United States Patent Application Publication US 2019/0348154 A1 - sequence listing, part 63

SEQ ID NO: 235185 - DNA, 789 bp, Klebsiella pneumoniae
gtggaagctttcattctcagcgcagtggaacagggcgtcatgaccattaccctcaatcgcccggaccgcctcaacagttttaacgatctgatgcatcaccagctggcggaatgtctgaagcaggccgagcgcgatgatggcgtgcgctgcctgctgatcaccggcgccggccgcggtttttgcgccggccaggatttgaacgaccgcaatgtcgaccccagcggcccgccgccggatctcggcatgtcggtagaacgcttttacaacccgttagtgcgccgtctggcggcgctgccgaaaccggtcatctgcgcggttaacggcgtggccgccggcgcgggcgctaccctggcgctgggctgcgatatcgtgctggccgcgcgttcggccaaatttgtgatggcgttcagcaagctcggcctggtgccggactgcggcggcagctggttcctgccgcgggtggccggccgtgcgcgcgcgatggggctggcgctgctgggcgacagcctcagcgcggaacaggccgcgcagtgggggattatctggcaactggtggacgattcagaactggcggataccagtctgcaactggcgcgccatcttgcggcgcaaccgacgtttggtcttgggctgattaaaaaggcgctgctggcttctgaaaccaacagtctcgacgcgcagctggacctggagcgcgattatcagcgtctggccgggcgcagcgatgattaccgcgaaggggtcagcgcgtttctggccaaacggccaccacagttcagcgggaaatag

SEQ ID NO: 235186 - DNA, 768 bp, Klebsiella pneumoniae
atgagtgacctgctgatccaccgtcatggccgggtgcttcagttgacgctgaaccgcccgcaggcccgcaacgcgctgaacaatgccttattaacccagattgccgaggcgctggaggcggcggcagttgatgacagcgtcggcgtctgcgttattcgcggtaacgcgcgttttttcgccgccggggctgacctcaatgaaatggcggaaaaagatcttcctgccaccctggatgatattcgcccacggttatgggggcgaattgatgcctttactaaaccgctcatcgcttcggtcaacggctacgccctcggcgccggctgcgagctggccctgctgtgcgacctgattgtcgccggggacaacgcccgctttggcctgccggaaattaccctcggcataatgccgggcgcgggcggcacccagcggctgatccgcagcgttggcaaggcgctggccagccggatggtgctgagcggcgagagtattgacgcccgccaggcgcagcaggccgggctggtcagtgatatccatccggcggcgttaaccgatgagtatgccctgcagctggcaaccaccattgcccgccattcgccgctggcgctacgggcggcaaaacagtcgctacgcctggcgcaggaagtcagcctgcaggccggtctacaacaggagcgccagctgtttagcctgctgagcgccaccgaggaccgccgcgaaggcatcgacgccttcttacaaaaacgtaccccggaatttaaaggacgctaa

SEQ ID NO: 235187 - DNA, 1071 bp, Klebsiella pneumoniae
atgacgacgttccattcgcttaaggtggcgagagtcgagccggaaacccgcgatgcggtgaccatcacttttgcgatcccgcaagccctgcaggcggaatactgttttcgcccgggccagcatctgacgctaaaagcccgtctgggcggcgaagaactgcgccgctgttactccatttgtcacagccgcacgccaggcgaaattagcgtcgcggtcaaagccatcgacggcggacgcttctcgcgctacgcccagcacgatatccagcagggtatggagctggaggtgatggtgccgcaggggcatttcggttatcaaccgcaggccgaacggcagggagaatatctggcgattgccgccggctccgggatcacgccgatgatggcgatcattagcgcgacgctagcgaccgagccgcaaagccgctttacgctgatctacggcaaccgcagcagccatagcatgatgttccgccaggcgctggccgatttaaaagaccgctatccgcagcgcctgcaggtgatccacctgtttagccaggagtcgatggacagcgatctgctacaggggcgcattgacggcgacaaactgcgccagctcgctgaccatctgctggatttcagccgtttcgacgaggcctttatctgcggtccggcggcgatgatggacgaggcggaagcgacgttacgtgaacttggcgtagcggagaaatcgattcatctcgaacgctttaataccccaggcggcaatgtgaagcgggtcgctggagtgcaggcggaagggcgcacggtgaccatccgccaggacgggcgcgatcggcttatcgccctcagcgccgaagacgacagcatcctggatgccgcattgcgtcagggcgccgatctgccgttcgcctgtaagggcggggtatgcgccacctgtaaatgcaaagtgctacgcggtgaagtggcgatggccgccaattacagcctggaagcggatgagctggcggcgggctacgtgctgagctgccagtcattgccgaccagcggcgatgtagtggtcgactttgacgcgcgggggatggcatga

SEQ ID NO: 235188 - DNA, 498 bp, Klebsiella pneumoniae
atgcaacgtcttgccgatatcgctcctgcagaggttcgcaccatctggggattattaagcgcgatcccggatccggaagtgccagtactcaccatcaccgaccttggtatggtgcgcagcgtcgcgcgccacggcgacggctgggtgattggctttaccccgacctattcgggctgtccggcgacggagcatctgctgggggagatccgcacggtcatgaacgagcatggctttcagccggtacatatcgtcctgcagctggatccgccgtggaccaccgactggatgagtcaggatgcccgcgagcgcctgcgccagtacggcatcagcccgccccaggtgcacgcctgccatgcggatatgcctgctgaggtgagctgtccgcgctgcggcagcacccatacctcgctgattagcgaattcggttccacggcctgcaaagcgctctatcgctgcgacagctgccgggaaccttttgattactttaaatgtatttga

SEQ ID NO: 235189 - DNA, 756 bp, Klebsiella pneumoniae
atgaataaccctaaccccgtagccacctacgccctgcggcttggcgacaatggtctggttctggcccagcgtttaggcgcctggtgcggacatgctcccgagctcgagatcgatcttgcgctggccaatatcggcctcgacctgctcggccaggcccgcaattttttaagctatgccgccgagcttaacggttgcggcgacgaagatacgctggcttttggccgcgatgagcgccggttcagcaacctgctgctggtggagcagccaaacggcaattttgccgacactatcgcccgccagttctttatcgacgtctggcatgtcgccctgttcagccggctggtgaacagccgcgacgcgcagctggcggccattgccgctaaagggctgaaagaggtgcgttaccaccagcgctttagccgcggctggctggagcgtctgggtaacggcaccgaattatcaaatcgcaaaatgcagcaggcggtcgacaatctgtggcgcttcaccggcgaactgttcctggctgatgaagtggagctcagcctggttgagcagggcattgcggttgatccgcgtgaactgcaggccgaatggcaaagcgcggtacacacggcgcttctcgactccggcttacagatcccgcaggaagcggccttccgcagcggcggcaaacaggggctgcacagtgaacatctcggcccgctgctggcggagatgcagtatctgcagcgttcgcatcccggactgcagtggtaa

SEQ ID NO: 235190 - DNA, 288 bp, Klebsiella pneumoniae; identical to SEQ ID NO: 211678

SEQ ID NO: 235191 - DNA, 930 bp, Klebsiella pneumoniae
gtgacagaagaacaacgctttgaccagcgcatcgcgcaggaaacggccatcgaaccgcaggactggatgccggatgcctaccggaagaccttgattcggcagataggccagcacgcgcactcggagatcgtcggcatgctgccggaaggcaactggatcacccgcgcgccgacgctgcgccgcaaagcgatcctgttggctaaggtacaggatgaggctggacacgggctgtatctctatagcgccgcggaaacccttggctgcgcccgggaagacctgtatcagaagatgctcgacgggcagatgaaatactcctccatttttaactacccgaccctcagctgggcggatatcggcgtgatcggctggctggtcgatggcgcggccatcgtcaaccaggtggcgctgtgccggacctcctacggcccctatgcccgggcgatggtcaaaatctgcaaagaagagagctttcaccagcgtcagggttttgaagcctgcatggcgctggcgcagggcaatgaggcgcagcggcagatgctgcaggacgccattaaccgcttctggtggccggcgctgatgatgtttggccctaacgatgacaactcgccgaacagcgcccgcagcatggcgtggaaaatcaaacttcactccaacgacgagctacgtcagcgcttcgtcgacaataccgtgccgcaggtagagatcctcggtatgactgtcccggacccggatttgcagtttgatgaagccagcggccactaccgcttcggcgaaatcgactggcaggaatttaacgaggtgattagcggccgtggcatttgcaatcacgagcggttggccgccaagcgtaaggcctgggaagagggcgaatgggtgcgcgaagccgcgctggcccatgcgcaaaaacagcaggcccgcagcgcggcatga

SEQ ID NO: 235192 - DNA, 2046 bp, Klebsiella pneumoniae
atgcagcagttagccagctacttatccggcgcctggcagaccggccggggccgcgcccgtactatccatcacgccatcaccggcgcggcgctttgggaggtgaccagtgaaggcctggatatggcgcaggcgcgccgcttcgcgattgagcgcggtggcaaagccctgcagacgatgacctttattgaacgcagcgcgatgctgaaagcggtggcgaaacacctgctggagcagaaagaccagttctacgccatctccgcgcaaaccggcgccactcgcgccgacagttgggtggatattgaaggcggtatcggtacccttttcacctatgccgggctcggtagtcgagaattaccggacgatatcctgtggccggaagacgagctcatcccgctctccaaacagggcggttttgccgcgcgtcatgtgctgacatcaaaatcaggcgtcgccgtccatatcaacgccttcaacttcccctgctggggaatgctggaaaaactggcgcccacgtggcttgccggtatgccggcgatcattaaaccggcaaccgctaccgcccagctcacccaggcaatggtgaaagcgattgtcgacagcggcctggtgccggagggcgccatcagcctgatttgcggcggcgcgggcgatctgctcgaccacctcgatagccaggacgtggtgacctttaccgggtcagccgccaccggccagcagctacgggcgcaccctaacctggtagccaaatccattccctttaccatggaagccgattcactcaactgctgcgtgttaggcgaagacgtcactccggagcaaccggaattcgcgctgtttattcgggaagtggtccgcgagatgacggcgaaagccgggcaaaaatgtaccgctatccgcagaatcattgtgccactggctcagattaatgcggttagcgatgcactgatctcccgcctgcataaagtaaccgtcggtgaccctgcgcaggagggcgttaagatgggggccctggttaatagcgaacagcgtcaggacgtacaggagagcgtcaataagctgatagccgctggctgcgaagtactgctcggtggagaggcggatctcagcgcggccggcgcatttttcccgccgaccctgttgtactgctcacagccggatgaaacgccggcggtacacgccattgaagcttttggtccggtggcgacgctgatgccgtatcgcgaccgccagcatgcgctgacgctggcgcgcgccggcggcggcagtctggcggggacgctggtcaccgccagcggcgagctggcgcgcgagtttatcctcggcgccgcccgcgcccatggccgtattcagatactgaatgaagcatcctccgcagaatcaaccggccacggttcgccgctgccgcagctggtgcacggcggccccggccgcgctggcggcggagaagagcttggcgggctgcgttcggtgaaacactatatgcagcgtaccgcggtccagggcagcccaacgatgctggcgaccatcggtcaacagtgggtgcgcggcgcccaggtgaacgaagaccgtattcacccgttccgcaaatatttcgaagagattcagcctggcgacagcttattaaccccgcgccgaaccctgaccgaagcggatatcgttaacttcgcctgcctgagcggcgatcatttctacgcgcatatggacaaaatcgccgccgccgagtcgatttttggcgagcgggtggtccacggctatttcctgatctccgccgcggccgggctgttcgtcgatgccggcgtcgggccggttatcgccaactacggcatggaaaacctgcgctttattgagccggtcaaaccgggcgacaccattcaggttcgcctcacctgtaagcggaaaacggtcaaacatcagcgcagcgccgatgagaaagccaccggcgtggtggaatgggcggtggagattttcaatcagcaccagcaggcggtggcgctgtattccattctgaccctggtggcgcgtcaacagggagatttcccggcgtga

SEQ ID NO: 235193 - DNA, 1566 bp, Klebsiella pneumoniae
atggcaaacggcttgaaattttctcctcgtaaaacctcgctggcgctggccgtggcggtggtttgcgcctggcaatcaccggtcttcgctcacggtagcgaagcccacatggtaccgctggataaaacgctgcaggaattcggcgctgatgtgcagtgggatgactacgcgcaaatgttcaccctgataaaagacggcgcttacgtcaaagtaaagcccggcgccaaaacggcgatcgtcaacggtaaatcccttgacctaccggtgcctgtggtaatgaaggaaggtaaagcctgggtttccgatacctttatcaacgatgtcttccagtccggtctcgatcagaccttccaggtggaaaagcgcccgcacccgttaaactcgctctcagcggcggaaatcagtgaagcggtgaccattgtcaaagccgcgccggagtttcagccgaatacccgctttactgagatttccttacacgagccggacaaggcggcggtatgggcctttgccctgcagggaacgccggtcgatgctccccgcactgccgatgtggtgatgctcgatggcaaacacgtcattgaagccgtggtcgatctgcaaaacaaaaaaatcctctcctggacgccgatcaaaggcgcccacgggatggtgctgctcgatgacttcgttagcgtgcagaacatcatcaatgccagcagcgaattcgctgaggtgctgaaaaagcacggtattaccgatcctggcaaagtggtcaccaccccgctcaccgttggcttttttgatggcaaagatggcctgcagcaggatgcgcgtctgctgaaggtggtcagttatctggataccggcgacggcaactactgggcgcacccgattgaaaacctggtggcggtggtcgaccttgaagcgaagaaaatcatcaaaatcgaagaaggtccggtgatcccggtcccaatggagccccgtccgtatgatggtcgcgaccgcaacgccccggcggtgaaaccgctggagataaccgaaccggaaggcaaaaactacaccattaccggcgataccattcactggcagaactgggatttccacctgcgtcttaactcgcgcgtcggaccaattctgtcaacggtgacctacaacgataacggcacaaaacgccaggtgatgtatgaaggttccctcggcgggatgatcgttccctacggcgacccggacgtcggctggtatttcaaagcctacctcgactcgggcgattacggcatgggcaccctgacctcgccgattgtacgcggtaaagatgcgccgtcaaatgcggtactgctggacgaaactatcgccgattacaccggcaaaccaaccactattccaggcgcggtggccatattcgaacgctatgccgggcctgagtataagcacctggagatgggcaaacccaacgtcagcccgaacgccgggagctggtggtacgctggatcagcaccgtcggcaactacgactatatctttgactgggtgttccatgacaacggcaccatcggtatcgacgccggcgccaccggcattgaagcggtga

SEQ ID NO: 235194 - DNA, 762 bp, Klebsiella pneumoniae
gtgttccatgacaacggcaccatcggtatcgacgccggcgccaccggcattgaagcggtgaaaggcgtgctggcgaagaccatgcatgaccccagcgccaaagaggatacccgctacggaacgctgatcgaccataatattgtcggcaccactcaccagcacatctataacttccgcctcgacctcgatgtggacggcgagaacaacaccctggtggcgatggacccggaagtgaagcccaacaccgccggcggcccgcgcaccagtactatgcaggtgaatcagtacacgattgacagcgagcagaaagcggcgcagaaattcgacccgggcactatccgcctgctgagcaacaccagcaaagagaaccgcatgggcaacccggtctcataccagattatcccttacgccggcggcacgcacccggcggcgaccggtgccaaattcgccccggacgagtggatatatcatcgcctgagctttatggataaacagctgtgggtgacgcgctaccacccgacagagcgatatccggaagggaaatacccgaaccgttccgcccacgataccggcctgggccagtacgcgaaggatgatgagtcgctgactaaccacgatgacgtcgtgtggatcaccaccggcaccacccacgtggcgcgcgccgaagagtggccgatcatgccgaccgagtgggcgcacgcgctgctcaagccgtggaacttctttgacgaaacccctactctgggcgaaaagaaaaagtaa

SEQ ID NO: 235195 - DNA, 951 bp, Klebsiella pneumoniae; identical to SEQ ID NO: 235118

SEQ ID NO: 235196 - DNA, 891 bp, Klebsiella pneumoniae
atgacagcatttcctaaggttgcgctaattggtcccggcgccatcggcaccacgattgccgccgccctgtttgagagggggagggcgccgatggtctgcgggcgtaccgcccattcggcgctggtgctgcgcactgacgagggtgagatcgtggtgcccggcccggtgtacaccgacccgatggcgatagccgcccccttcgacctggtctttgtcgcggtgaaaaccacccagacggaggccatcgccccctggctgacggccctgtgttcccctgacatcgtggtgtgcgtgctgcaaaacggcgttgagcagcgccagcagtttgcccccttgaccggcggcgcgacggtgctgccgtcggtggtctggttcccggcgcagcgcgatgccgatgcctctgtctggttgcgcgccacgccgcgcctgacgctgccggatctgccgggggcagagcgggtgcagcaggcgctggcgggaacccgctgcgcggtggacctggcggctgattttaccaccgtggcctggcgcaaactgttgcagaacgcggttgccggactgatggtgctgaccggacgccgcgccgggatgttcgcccgggaggacatcactgccctcggactggcttatctgcgcgaatgcctacaggtggcgcgggcggaaggggccgccctgagcgacagcgtgccggaggagattatcgccggctttcatcgggcgcctgccgacttaagcacctctattctgatcgatcgcctcaatggccgaccgctggagtgggatattcgtaacggcgtggtgcagcgtcgcgggcgtcagcacggcattccgacgccgctcagcgatatcatcgtgccgctgctggcggcggccagcgacggcccgggctga

SEQ ID NO: 235197 - DNA, 1500 bp, Klebsiella pneumoniae
atgtccacctcacagatagcgctgcttgccagcgtccagcagtttttagaccgtcagcatggcctgtatatcgacggcgccccctgcgccgcgcagagcgaaaaccggttaaccgtctgggatccggccaccgggcaggcgattgccaccaccgccgacgccagcccggcggatgtcgaccgggcggtgatgtccgcctggcgcgcttttgtcgatcgccgctgggccgggcgcaccccggctgaccgtgaacgcatcctgctgcgttttgccgatctggtggagcagcacggcgaagagctggcgcaactggaaaccctcgagcaggggaaatccattgccatctcccgcgcctttgaggtcggctgcaccctgaactggatgcgctacaccgcggggttgaccaccaagatcagcggccggacgctggacgtttcgatcccgttcccgcaaggggcgcgttaccaggcgtggaccaaaaaagagccggtcggggtggtggcgggcatcgtcccgtggaatttcccgctgatgatcggcatgtggaaggtcatgccggccctggcggcgggctgttcgatcgtcatcaaaccctcggaaaccaccccgctgaccctgctgcgggtggcggagctggcgacccaggcgggcattcctgacggggtgttcaacgtcgtcaccggcagcggcgccggctgcggcgcggcgctgaccgcccatccgcaggtggcgaaggttagctttaccggctcgacggcgaccgggaaacagattgcccgcgtggctgccgaccgcctgacccgcgtgacgctggagctgggtggcaagaatccggcgattgtgctcaaagacgccgacccccagtgggttattgaggggctgatgaccggaagcttcctcaatcaggggcaggtctgcgccgccagctcgcggatctacatcgaagcgccgctgtttgacaccctggtcagcggcttcgagcaggcggtgaaatcgctgcaggtggggccggggatgcaggagacggcgcagatcaacccggtggtctcccgggcccactgcgacaaggtggcggcctacctcgaagaggctcgccagcagaaggcagagcttatcagcggcagcgccggaccagacgcgggagggtactatattccgccaacgctggtggtaaaccccgacgccggactgcgtctcagccgtgaggaggtttttggcccggtggtgaacctggtgcgagtggccgatggcgaggaggcgctgcgcctggccaacgacagcgattttggtctgaccgccagcgtctggacccgcgatctgacccaggccctgaactacaccgaccgtctgcaggcgggaacggtatgggtcaacagccataccctgattgacgccaacctgcctttcggcggcatgaagcagtctggtaccggccgcgatttcggccctgactggctcgacggctggtgcgaaaccaaatccgtctgcgtgcgctactaa

SEQ ID NO: 235198 - DNA, 903 bp, Klebsiella pneumoniae
atgatgaccacggcagagggagggctggcgtatcagcgctggctggcgacgatcaatcaggtctgcggccatttcgccgcccggccgttggaggagagtttccacggcgagattgacgcccgctacgccggcagcctcaaggtcagtaccgtcaccgccgccggcgtcaatctctaccgcacgcgcaatgagataaaacgcgataacgacgcctggttctataccgtgtttcagctcgccggcgaagccatcatcgaacaggacgatcgccaggtgacgctggcggcaggcgatatcacgttaatcgacgccgcccgcccatgctccatcgtctggcagcagacctcgcgtcaggcctcgctgctgctgccgcgccagcgggtggcgcccacaggggacatcactaccgcctgccggctggacaaatctctgccaatggtccagctcagccagcgactgctgctggaaagcatgggcggcacgacgctctccgccagcgagagcgaagccgcgctggaggcgatcgcctgcctgttgcgcccggtgctgcatcagcgcgatcctgccccttcccggcgggtaaagcagtttcagaagattattgcgttaatcgatgcgtccattcagtcggagcatctgcgtccggagtggctggccagcgagacgggcatgtcggtacgcagcctgtaccggctgtttgccgaccaggggctggtggtggcgcagtatattaagaaccggcggttggatctgtgtgcccaggcgttacagaacgtccatgacgatgaaaagctggcggggatcggctaccgctggggcttcagcgaccacagccatttctccaccgcctttaagcagcgctttggcgtcaccccggggcaataccgcaagcgctgtcgctaa

SEQ ID NO: 235199 - DNA, 324 bp, Klebsiella pneumoniae; identical to SEQ ID NO: 138935

SEQ ID NO: 235200 - DNA, 186 bp, Klebsiella pneumoniae; identical to SEQ ID NO: 138934

SEQ ID NO: 235201 - DNA, 2640 bp, Klebsiella pneumoniae
atgaagggtaaatataaagccgccatcgcgctggtgttagttctggtgttattgccgctaaccctgctgttgacgctaacccactgggtgccgacgctggcgggcatctggctgcccgtgggcacgcgtatctctttgcaggagagcccgcgcctgacgcggtcggccctgctgatccccgatctgcgttatctggtgggcgactgtgaaatcgcccgggtgaccgatgcccgtctctcgcgtcccagccgctggcggctgcatattggccagctggagatcaacagcgcctgcctgagcaaactgccggccagcgatccctctcccggttcaccgcgcacgcttgccgaatggcaatcgatgttgccctatagctggttaaccattgacaatctgcggctgtcgccgtgggagaaatggcaggggcggctggtaatgtcattaacgcctgcgcagcaggatatcggctttgccgggaaggaactgagtctgcaggcgcgcctgcgcggccaggcgctcaccgtcagccagttcagcgcccggctgactgacgatcagccgccggtgaagctggtggggaccttccatctgccgctggtgccggatggtctgccggtcgacggccagatgcagggcaccttcgaattcccgcagactgcggaatggatcgatgctgagctcgagtggcagcacaatcgcggccagctgctggtcaccccgcggggtgaggtagagcctattctggacctgccgtgggagatcaccccggagcggatcaccatcagcgacggccgttggcgcacccgttacgaggcgtatccgctgcgcgggcgggtggcgctgtcggtgggtaactggcagcagggcaccgaacagatgatcgtcagcggtcgcctgaatgttctcaccgaggggcatgccgggaagggcaatgcggtactgaatattggtccgggcaagctgagcatggataacagcgatctgccgctgcggctcaccggcgaggccaagctgggggagatgatactatacgcggcgctgccggctcagctcagcgggccgctgatcagcccgcagctggcttttcaccccggtgcgttgctgcgctcgcgcgggcgggtgatcgacgcgctgaatattgacgaaatccgctggccgctggccggggttaaggtcactcagcagggcgtcgatggccgcctgcaggcgatccttcgcgcccatgagcagcagatgggcgactttacgctgcatctggacggtcaggcgagcgattttctgcccgacagcggccgctggcagtggcgctactggggcgagggacattttaccccgatgcaggcgcgctgggatgtgaagggcagcggggagtggcgcgacaatgctattaccctgagcagcctctccaccggcttcgataagcttgagtacggcacaatgcgggtcagcaccccgcgtctgaccctcgagcagccgatccgctggctgcgcgatgctgagcatccgcgcttgaccggcgcgctgtcgctggacgccgccaaaaccaccttctccggcggcagctatctcccggcctcaacgctgaaattcgccctcgacggtcgggacccgacgtggttccagttcaccggcgccctgcatgccgaggctatcggtccggtgcgtctgtccgggcgctgggatggcgaacggctgcgcggccaggcgtggtggccaaaacagtcgctaacggtgttccagccgctggtgccgccggactggaagatgaacctgcgtgaaggcagtctctacgcgcaggtggccttctcggcggcagccgggcagggatttgaggcgggcggccatggcgtcctgaagggcggcagcgcctggatgccggataaccagatcaacggcgtcgatttcgtcctgccgttccgcttcagcgacggtcactggcagctgggcatccgccgcccggtctccctgcgcattggcgaaatcgtcaaccaggtcaccgcgcgtaatctgacggcggacctgcagggcacctggccgtggagcgaggccaatccgctgcagctcagcgacgtcagcgtcgatctgttaggcgggaaactgacactgctgcagctgcgtatgccgcagcgcgacccggcgttgatccgcctgcagcatatctccagcagcgaactgaccagcgccgtcaaggtgaaacagttcgccatgtccggcgcggtgagcggcgcgctgccgctgtggctggagaataatcaatggatcatccacgacggctggctgcgcaatgacggaccgatgaccctgcggctggataaagacaccgccgatgcgctggtggcggataacgtctccgccggggcggcgattaactggctgcgctatatggaaatctcccgctcgtggacgcagattaacctcgataatctgggcgtgttgacgcttaaggccagcatcaacggcaccagccgggtggaagggaaaagcagtaccgtgcatttaaactacgctcatgaagagaatattttcgacctgtggcgcagtttgcgcttcggcgacaatttacaggcgtggctcgagcagaatgctacgctgcccgtacggcgctgtacggaaggtaagacatgtaaggaacctaaatga

SEQ ID NO: 235202 - DNA, 501 bp, Klebsiella pneumoniae; identical to SEQ ID NO: 138858

SEQ ID NO: 235203 - DNA, 990 bp, Klebsiella pneumoniae
atgaaaatcgcggtttatagtacgaagcagtacgataaaaagtacctgcagcacgttaatgatgcatacggctttgaactggaattcttcgatttcttgctgacagcgaagactgccaaaaccgccaacggttgcgaagcggtatgtatcttcgtcaatgacgacggcagccgcccggtgctggaagagctgaaggcccacggggtgaaatatatcgccctgcgctgcgccgggtttaacaacgtcgaccttgaggcggcaaaggagcttggcctgcgcgtcgtgcgcgttccagcttactctccggaagcggtcgctgagcatgcgatcggtatgatgatgtcgctcaaccgccgcatccaccgcgcttaccagcgtacccgcgatgccaatttctccctcgaaggcctcaccggcttcaccatgtacggcaaaaccgccggggtgatcggcaccgggaaaattggcgtagcgatgttgcggatcctcaaaggcttcggcatgcgcctgctggcgttcgacccgtacccaagcgccgccgcgctggagctgggggtggaatatgttgacctcgccacgctgtacaaggaatcggacgtgatctccctgcactgtccgctgaccgacgaaaactaccacctgctcaatcgcgaagctttcgatcagatgaaagacggggtgatggtgatcaacaccagccgcggcgccctgatcgactctcaggcggccatcgacgccctgaagcaccagaaaattggcgcgctggggctggacgtttatgagaacgaacgcgatctgttctttgaagacaaatccaacgacgtgatccaggacgatgtcttccgccgcctctccgcctgccataacgtgctgtttaccggccaccaggcgttcctcaccgccgaggcgctgatcagcatttcggagaccactctgggtaacctgcagcaggtcgccaacggcgaaacctgtccgaacgccatcgtctaa

SEQ ID NO: 235204 - DNA, 441 bp, Klebsiella pneumoniae
atgaacaaatttgcggcgcttctggcggcaggtatgctgctgtccggctgtgtctataacagtaaggtgtccaccggtgcggaacagctgcagcatcatcgcttcgtgctgaccagcgtcaacggccaggcggtcaacgccagcgaccggccgctggagctgagcttcggtgagaagatggctattaccggcaagatgtatgtatccggcaatatgtgcaacggctttagcggggaaggtaaagtgtcggacggcgagctgaaggtcaaatcgctggcgatgacccggatgctgtgccacgacgcccagctcaataccctggatgccacgatcgacaagatgctgcgcgagggtgcgcaggtcgatctgacggaaaaccagttgacgctggcgaccgccgaccagacgctggtctataagctcgccgacctgatgcactag

SEQ ID NO: 235205 - DNA, 264 bp, Klebsiella pneumoniae; identical to SEQ ID NO: 211692

SEQ ID NO: 235206 - DNA, 3528 bp, Klebsiella pneumoniae
atgattacgattgatggtaatggcgcggtcgcttccgtcgcgtttcgcaccagtgaagttatcgccatctacccgatcacgcccagttcaacgatggcggaacaggctgacgcctgggccggcaatgggctgaaaaacgtctggggcgatgttccccgcgtggtcgaaatgcagtcggaggcgggcgccattggcgccgtacatggcgcgctgcagaccggcgccctctccacctcctttacctcatcgcagggcctgctgctgatgatccccaccctgtacaaactggccggccagctgatgccgtttgtgctgcacgtcgccgcccgcactgtcgctacccatgcgttgtcgatcttcggcgaccattccgatgtcatggccgtccgccagaccgggtgcgccatgctgtgcgccagcagcgtccaggaagcgcaggatttcgcgctgatctcgcatatcgccaccctgcaaagccgggtgccgtttattcatttctttgatggtttccgtacttcgcacgaaatcaacaaaatcgccccgctggcggatgacaccattcgcgccctgctgccgcaggataagatcgctgagcatcgccagcgcgcgctcaatccggaacacccggtgatccgcggaacctcggccaaccccgacacttacttccagtcccgggaggccaccaatccgtggtacgacgcggtgtatgaccatgtcgagaaagcgatggacgatttcgctgccgccaccggccgtcagtacaaaccgtttgagttttacggccacccgcaggcagagcgcgtgatcgtcattatgggctcggccatcggcacctgcgaagaggtggtcgatgagttgctgagtcgcggcgagaaagtcggcgtgctaaaagtccgcctctatcgcccgttctccgccgcccacctgctggcggcgctgccggaaagcgcccgcgcggttgccgtactggatcgcaccaaagaacccggcgcgcttgccgaaccgctttacctcgacgtgatgaccgccctggcggaagcctttaaccgcggcgagcgcgagacgctaccgcgcactatcggcggccgctacggtctctcctccaaggagtttggtccggaatgcgtgctggcgatattcagtgaactgcaggccgcccagccgaagccgcgctttaccgtcgggatctatgatgacgtgaccaacctgtcgctgccgttgggcgaaaataccctgccggcagaggccaagctcgaggccctgttctacggcctcggcagcgacggcagcgtgtcagccaccaaaaacaacatcaaaatcatcggcaactcgaccccatggttctcccagggctattttgtctatgactcgaagaaagcgggcggcctcaccgtctcgcatctgcgggtcagcgaaaaaccgattcgttcatcgtatctgatttcgcaggctgatttcgtcggctgccaccagctgcagtttatcgataaataccagatggccgagcggctgaagcccggcggcattttcctgctcaacacgccgtacagcgccgatgaggtctggtcccgcctgccccaggaagtccaggccaccctgaatcagaaaaaagcgcgtttttacgtggtcaacgcggcaaagatcgcccgcgaatgcagcctcggggcgcgcattaataccgtgatgcagatggcctttttccatttaacccagatcctgccgggtgatagcgcgctggcggaactgcaggcagccatcgccaaaagctacagcagcaaaggtcaggagctggtggagcgcaactggcaggcgctggccctggcccgtgaatcattggcggaagtaccgctccagccggtgaacgccagcagtccgaaccgcccgccggtggtctccgacgccgcgccggatttcgtcaaaacggtcaccgccgcgatgctggccgggctcggcgatgcgctgccggtctctgccctgccgccggacggcacctggcccatgggcaccacccgctgggagaaacgcaacatcgccgaagagatccccatctggaaggaagcgctgtgtactcagtgcaaccactgcgtcgccgcctgcccgcactcggcgatccgcgccaaagtggtcgccccggaagagatggagaacgcccctgccagcctgcattcgctggatgtgaaatcccgcgatatgcgcgggcagaaatacgttctgcaggtcgccccggaagactgcaccggctgcaacctgtgcgtcgaagtgtgcccggcaaaagaccgccagaacccggagatcaaggccatcaatatgatgtcccgcctggagcatgtggaagaggagaaggtcaattacgagtacttcctcaacctgccggaaatcgaccgcagcaaactggagcgcattgatattcgcacctcgcagctgattagcccgctgtttgaatactccggcgcctgctcgggctgtggcgaaacgccgtatatcaaactgctgacccagctgtacggcgaccgaatgctgattgccaacgccaccggctgctcctccatttacggcggcaacctgccctcgacaccgtacactaccgacgccaacggccgcggcccggcgtgggccaactcgctgtttgaggataacgccgaattcgggctcggcttccgcttgaccgtcgaccagcatcgccagcgcgtgatgcgcctgctgagcgaattcgccgacaagctgccggcagagctgaacgcggcgctgcacgccgaggcgacgccggaagttcgccgcgaacaggtggcggccctgcgtcaggcgttggccggcgtggcgggtgctgaagagctgctgaccgatgccgacgcgctggtggagaaatccgtctggctgatcggcggcgacggctgggcttacgatatcggcttcggcggcctggaccatgtactgagcctgacggaaaacgtcaatattctggtgctggacactcagtgttactccaacaccggcgggcaggcgtcaaaagccaccccgctgggagcagtgactaagtttggcgagcatggcaaacgcaaggcgcgtaaagatctgggcgtcagcatgatgatgtacggtcatgtttatgtggcgcaaatttcgctgggcgcgcagctgaaccagacggtaaaagcgattcaggaagcggaagcctatccggggccatcgctgatcatcgcctatagcccttgcgaagagcatggctacgatctggcgctcagccacgaccagatgcgtcagctgaccgccaccggcttctggccgctctaccgcttcgacccgcgtcgggcagatgaaggcaagatcccgctggcgctagattcccgtccgccatcagacgcgctggccgagacgctgcttaatgagcaacgtttccgccgcctgaacgcccagcagcctgaagtggcggagcagctatggaaagacgccgccgccgatctgcagaagcgctatgacttcctcgcccagctggctggcaaagcggagaaatcgccaagcgaaggttaa

SEQ ID NO: 235207 - DNA, 213 bp, Klebsiella pneumoniae; identical to SEQ ID NO: 135963

SEQ ID NO: 235208 - DNA, 435 bp, Klebsiella pneumoniae; identical to SEQ ID NO: 135962

SEQ ID NO: 235209 - DNA, 936 bp, Klebsiella pneumoniae; identical to SEQ ID NO: 135961

SEQ ID NO: 235210 - DNA, 1374 bp, Klebsiella pneumoniae
gtgaccgctttttctaccctgactgttttacctgccgcccaattagccaaccttaacgagctgggttatctgtcgatgaccccggttcaggccgccgccctgccggcgatcctcgcggggaaagatgtgcgcgtgcaggcaaaaaccggcagcggaaaaacggccgcatttgggctgggtctgctgcagcatatcgatccggcgcgcttcgagacccagtcgctggtgttatgcccgacccgcgagctggccgatcaggtcgccggcgagctgcgccgcctggcgcgctgcctgccgaacatcaagattctgatgctctgcggcgggcagccctttggcgcccagcgagattccctgcagcatgccccgcatattatcgtcgccaccccgggccgtctgctcgatcatctgcagaagggaacggtctcccttgacgcgctgcagaccctggtgatggacgaagcggaccgcatgctcgatatgggctttagcgatgccattgatgaggtgatccgcttcgcaccggctgaccggcagacgctgctgttttctgctacctggccggcggcaatcgcggcgatcagcggccgggtgcagcgcaatccgcagacaattgagatcgacactgtcgacgcgctcccggcgattgagcagcagttctttgaagtttcccgccacggtaagattgccctgctgcagcgcctgctcagccagcatcagcccgcatcctgcgtggtgttctgcaataccaaacgcgattgccaggcggtctgcgatgcgctcaacgccgccgggcagagcgccttgtcgctgcatggtgaccttgagcagcgcgatcgcgatcagacgctggtgcgcttcgctaacggcagcgtccgggttctggtggcgaccgacgtcgctgcccgcggtctggacatcaaatccctggcgctggtggtgaatttcgagctggcctgggatccggaggtgcatgttcaccgcatcggccgtaccgcccgcgccggtgaacaagggctggccatcagcttctgtgcgccggaagaggcgcagcgcgccactattctggccgacatgctgcagctttccctgaactggctgccggcgccgacgggcaacaccatcgcgccgctgacggcggagatggcgacgctgtgtatcgacggcgggaaaaaggcgaaaatgcgcccgggagatgtgctgggagccctgaccggggatatgggctttgatggtgccgatatcggcaaaattaccgtccaccctgctcacgtctatgtggcgatccgccagaatatggcgcagaaggcgtataagcagttacaaaatggcaagatcaaaggtaaatcctgccgcgtacgactgctgaagtaa

SEQ ID NO: 235211 - DNA, 984 bp, Klebsiella pneumoniae
gtggacgcgattaaaggctcggagttgcagataccggacgcgatcttcgcgtgggtgctcgacgggcaggggggcgttaagccgctcgccgatgacgatattatcgacaaagacaagccttgctggctgcatctcaactatacccatagcgacagcgccgactggctggcggccaccccgttgctgcccaataacgtacgcgatgccctggcgggagagagcacccggccgcgggtgacgcggatcggtgacggggcgctgatcaccctgcgctgtatcaacggcagtaccgatgagcggcccgaccagctggtggcgatgcgcctgtatatggatgagcggctgatcgtctccactcgtcagcgcaaagtcctggcgctggacgatgtgctgggcgacctgaaggaaggtaatggcccgacggacggcggcagctggctggtggaggtctgcgatgcgttgaccgatcatgccagcgagtttatcgaacaactgcacgatcgcattatcgacctggaagacgacctgctcgatcagcaggtgccgccgcgcggatttctcgcgctgctgcgtaagcagctgattgtgatgcgccgctatatggcgccgcagcgcgacgtttatgcccggctggccagcgagcggctgccgtggatgagtgacgatcagcggcggcgaatgcaggatatcgccgagcggctggggcgcggtctggatgagatcgacagctgtatcgcgcggacggcgatcatgagcgacgagatcgcccagattatgcaggagtcgctggcgcggcggacctataccatgtcattgatggcgatggtgtttctacccagcacctttttaaccggcctgttcggtgtcaacctcggcgggatccctggcaacagctggcatctggggtttagccttttctgcttgatgttagtcgttgtcatcggtggtgttgcgtggtggttacatcgcagtaaatggctgtaa

SEQ ID NO: 235212 - DNA, 744 bp, Klebsiella pneumoniae
atgcataagctcgccaggcaaaaacatattctcgacaggcttagcgaaaccggtcagctgagcatcagcgaactggttgcagatctgcaggtgtcggccgataccattcgccgcgatctgagcgacctggaacaacagggcgtgctgcagaaaagccacggcggggccatcgcccttaacgtcccggccatgacgcgccagggcagaaacgctcttctcacccagaccaagcagcgcctgggtcagcaggtggccgcgcgcattccctctggctcgacgctgtttctcgacgccggaagcacgctgctggcggtggcagcccagctgaaagggccgttgaccgtgatcacggcttctctggatatcgctcagctgttcagcgaccgtgccgatatccagctgatcctgcttggcggccagtgggatagtaaacaacggctgttcgccggcagcgccaccctgtcgctggtcacccgctaccgggccgatatcgccattctcggcacctgcgcgctccatgccgggctggggctgagcgccagccaggaagctgatgccgacgttaaacgcgccatgctggccgccagcgccgagcactggctggtggcggaccataccaaactcaaccgctgcgaaccgtggcgggtggccggactcagcgacattcaccatctttttcttgatcgtccctgggctgagctgggggatgaccccgccctctctgtacatattgctgacgcttaa

SEQ ID NO: 235213 - DNA, 1119 bp, Klebsiella pneumoniae
atgaccccgccctctctgtacatattgctgacgcttaacaacgtggagaacctgatgagtaacaacacgataaatatcgccctgattggctacggattcgtcggtaagaccttccacgcgccgcttatccgttcggtgccggggctgaacctggcgttcgtcgcttcccgcgatgaagagaaggtcaaacgcgacctgccggacgtcacggtgatcgcctccccggaagctgcggtccagcatccggacgttgacctggtggtcatcgcctcccctaacgccacgcacgccccgctggcccgcctggcgctgaacgccggcaaacatgtggtggtggataagccctttaccctcgatatgcaggaggcccgggagctgatcgccctggcggaggagaaacagcgtctgctttccgtcttccataaccgccgctgggacagcgactatctcgggatccgtcaggtgattgagcaaggcaccctcggcgcggtgaaacacttcgagtcgcatttcgaccgcttccgcccggaagtccgcgtccgctggcgcgagcagaacgtcccgggcagcggcttgtggttcgacctggggccgcacctgatcgaccaggcgctgcagctatttggtttgccgcagtcggtgcaaggtaacatagccaccctgcgcgacggcgcggagatcaacgactgggcgcatgtggtattaaactacccggcgcataaagtgatcctgcactgcagcatgctggtcgcgggcggctcgtcgcgcttcaccgtgcacggcgataaaggtagcgttatcaaagcgcgggccgaccaacaggagagccagctgctggcgggcgtggtaccgggcagcgccggctggggccaggatgacgacccgctggttatctatgatgcctcgctgcaggcccacgcgcaggctaccccgcagggcgatcagcgccagtactatatgctgatccgcgatgcgctgaagggccagatcgccaatccggtgccgccggtggaagcgctggcggtgatggccgttctggaagcggcggtgcgctctgctgaaagtggtatggtgcagaccctggacctgtccgacaacgagcgcaacatgctgcgctaa

SEQ ID NO: 235214 - DNA, 195 bp, Klebsiella pneumoniae; identical to SEQ ID NO: 135956

SEQ ID NO: 235215 - DNA, 747 bp, Klebsiella pneumoniae
atgaagcatgtgcacaagctggcctggataggcctgttcgtcaatattattatctgttttgtcgcgcgaaatttattacttgatgaaggacagctgaacttccatagtcgggcggacggcgtatggtcctggctggtgctggccctgtttattgccgtggtggttcaggcgatcagcataatgctgtcaggccgctacccttatctggccatcgtcctggcgtttgttggcggcatcgtgatggtgcccgccagcgtgatctttctggtgggtagtctgttcagcttgcaaacgcggattaacgccggatttacgccctggcgatcaaccacggcagtgggcgaggctgataaccagcagctattaacctttaatgcctcaggcttttatccccaaggggcgctggcgctcatcgccgggatcattattttaatgattggcatgggtataggcggagtatttattgccgctggtattgttgcgctgtgcaatggctatcgtctgcaaaatcgggtggtgattggcgtgagcggcgagtcgatgatattcacgccggggctctatgccgatacctacgttattcccttgcgggatgttgccgtagttgaacgcagcaataatgatgcgaaagtccgactgctgatccgttccagcggcagaagcttcacgttgcgtaaaaaactgctcgccggcgataaggttaatgacgccttcgccgccattctggcaaaactgactaccgtttaa

SEQ ID NO: 235216 - DNA, 1380 bp, Klebsiella pneumoniae
atgacaacgcagcaagagcatcagttaaaacgcgggttaaaaaaccgccacatccagttgatcgccctcgggggggcggtcggcaccggactgtttttaggtatcgcgcaaacgatccgtatggcaggcccgtcggtcctgctggggtacgccatcgccggggttatcgctttctttatcatgcgtcagcttggcgaaatggtggtagaggagccggtggcggggtcgttcagccatttcgccaaccgctactgggggcccttcgccgggtttatgtccggctggaattactgggtgttgtacgtgctggtaagcatggcggagctgacggcggtggggatctatattcagtactggtggccggaggtacccacctggctgtcggcggcgatcttcttcgtggcgatcaacgccatcaacctgacgcacgtcaaagtgtatggcgagctggagttctggttctcgattgtcaaagtggccgccatcatcagcatgatcgcctttggctgctatctgttatttagcggtcacggcggcccggcggcgacggtggccaacctgtggcaggacgggggatttttccctaacggcatcacgggcttggtgatggccatggcggtgatcatgttctccttcggcgggcttgagctggtggggatcaccgcggcggaagccgacgaaccgcataaaaccattcccaaagccaccaaccaggtgatctaccgtattctgctgttttacgtggggtcgctggcggtcctgctgtcactctacccgtggcggaacgtcgtggaagggggaagcccctttgtgctgatctttcacgccattgacagcaatattgtggccaacgccctcaatctggtggtgctcaccgccgcgctgtcggtctacaacagctgcgtctactgcaacagccggatgctgttcggcctggctcagcagggcaacgccccgcgtgcgctgctgcgggtgaaccaccgcgggatcccattgaccgccctggcggtatccgccgtcgccacggcgctttgcgtggtgattaactatgtgatgcccgggaaagcctttgccctgctgatggccctggtggtggccgccctggtcatcaactgggcgatgatctgcatcactcatcttaagttccgccgcgccatgcagcgggcggggaaggtaacggctttccagagtttcgcctatcccctgacaaactggctgtgtctgctgtttctcgccgcgatcctcggggtgatgtatctgaccccggacatccgcatctccgtctgcctgatcccggtatggctgctgatccttgctgcaggctatctgctgcgcaggaaaagcgcgccggcgccggtggcggcgcttgaggagcgttaa

SEQ ID NO: 235217 - DNA, 480 bp, Klebsiella pneumoniae
atgtacaacatcgacgactatgatctgaaaatacttaccctgctgcaggccaatggccgtttaaccaatcaggagctgagcgagcttatcggcctgtccgcttcccagtgttcgcgccgccgtatcgcccttgaacaggcacagcttatcctcggctaccatgcgcgtctggcgccggatgcagccgggcaggagatgcttggcctgattgaggtgcgtctgctgaatcacaccccgcaatgcgtggagagctttcatcagatgctcagtgaagtggacgccattctggacgcctggaaaaccaccggcgacgccgattatctgctgcgggtaacggtcccggacctgcccggtctgagccatttgatcagccatattctggcgcaaaacaaaggggtggcccatctgaaaaccgccgtcgtgctcaaccgcctgaaagagaacggccagctgatgccgggcacgaccccgctgcgctga

SEQ ID NO: 235218 - DNA, 615 bp, Klebsiella pneumoniae
atggataacgtcctttcccctgaaaaactgacccacacctggctggaggatgccctggcgctgctgttcggcacgctgatgatctcctttggcattatcctctttcgccaggctggcgccctgaccggcgggacggcgggcatggcctttctgatccactacgccacccacttgccgttcggcgtggttttcttcgccattaacctgccattctactggctctctgtccggcggatgggcgccgccttcacgctgaaaaccttctgcgcggtcggactggtgtcgctgttctccgacctgcacggctactttatccatgtcgatcgcctgaacccctattacgccaccctcttcggcaacatcatggtcggcatcggctttgtggtgctgttccgccataaagcgagtctcggcggcgtcaatattctggccctctatctgcaggataaaagcggcatccgcgccggtaaattccagatggtagtggacgcctgcatcgtcaccgcctcgctgtgggtggttagcctgccgatgctgctggtctctgtcctcggcgccgtgattttgaattcgattatcgccatgaaccaccgccccggacgctatgcggtgtaa

SEQ ID NO: 235219 - DNA, 1200 bp, Klebsiella pneumoniae
gtgttccagaacgttgacgcctatgcgggcgatcctatcctgtcgctgatggaagcctttcaacaggatccccgggcagacaaagttaacctcagcatcgggctgtactataacgagcaggccattattccccagctggaggcggtccgtcaggccgctgaccggctgcagagtcagcagcaaaaggccagcctttatctgccgatggaggggctggcgccctatcgccgcgcggtccagaccctgctgtttggcgacaatcatccggcgttgcgtgccggacgcatcgccaccatccagacactggggggctccggcgcgctaaaggtgggcgctgatttcctcaagcgctacttccccgactccgcggtctgggtcagcgatccaacctgggagaaccacgttgccatctttgccggcgccggctttgaggtacatacctatccctggttcgacagcgccacccgcggggtgaatttccccgctatgctcgccgccctccagcagctgccgccgcgcagcattgtgctgcttcacccttgctgccataacccgacgggggccgatctcacccgcgagcagtgggatcgggtgattgaggtgttgatcggcagggagctgatcccattccttgatatcgcctaccagggcttcggccgcggactggacgaggatgcctatgccattcgcgccatcgccagcgccgggctgacggcgctggtcagcaactcgttctcgaagattttttcgctgtacggcgagcgcgtcggcggcctgtcggtggtctgtgacaacgccgatgccgccgggcgcgtgctgggccagttgaaagccaccgtgcgccgcaactactccagcccgccggggtttggcgcccaggtggtgtcgcaggtgctcaacgatcccgagctgaatgccctgtggcaggaagaagtggaggccatgcgcacccgcatcagcgccatgcgcgtcgcgctggtgaaggccctgcaggcagccctgccgacgggggatttttcctatctgctgacccagcgcggcatgttcagttacaccggctttagcgccgatcaggtagacgttctgcgtcaagagcatggcatctatctgatcgccagcggtcgggtctgcgtggccgggctcaaccacggcaatattgcgcgggtagccagcgccttcgccgcggtctgcgcacgctag

SEQ ID NO: 235220 - DNA, 1026 bp, Klebsiella pneumoniae
atgaataacgcgatgatagaatttcgccacgtcagtaaaagcttttccaggaaaggacatccggttctggccttgcaggatattaatctcagcattgagcgaggcgatatttttggcattattggctacagcggggcaggaaaaagcaccttattacggctgattaatcgtctggaaacgcctggcgagggcgaggtactgttaaacggcgagccgctacaggcctgcagcggccagcgcctgcaggccatcaaaaaagatatcggcatgatctttcagaattttaatctgctgaattcgaaaaccgtttttcataacatcgccatcccgcttattttacaggggcgcgacaaggcctttatccaggcgcgggtggcggaactgctggcgttcgtcgatctgagcgacaaaatccacagctaccctaatgagctgtcgggcggacaaaagcagcgggtcggtattgcccgggcgctggccaccaacccgtcggtccttctgtgcgatgaagccacctcggcgctcgacccccacactacggtgcagatcttactgcttttgcaggagattaatcgtcggtatggcatcaccatcgtactgatcacccatgagatgtcggtgatccagaaaatctgtcacaaggtggcggtgatgcaggcgggccgtatcgttgaacagggggcggtttttgatctctttgctcagccgcagcatccggtcactgccagtttcgtgcagtcggtggtgcacgaccgcctgccgcagcgggtggcgtcgttcctgcagcgcgataacggcgcccgagctttacgcctcgaatttgtcggcgcgacggcgcagaagccgattattaaccacctgatccgcgagtatgctgtcgaggtgaatatcctgtttgccagcatgtctgaagttcagggccggattctgggatttatgattatgcagctcctcggcgagcctgacgaaaccgaacgcgccatcacccatctggtcgatgcaggagtgaaaatcacccatgtttga

SEQ ID NO: 235221 - DNA, 807 bp, Klebsiella pneumoniae
atgaacaagtcagttgcgcgcgggatcgctctcgccctgttgtcggccacctctttttatgccgccgccgacgctcatcttatccgcgtcggctttaaccccgggccgtataaagaacaatttgagaaaggcgtcgcgccctatttattgagtaaagggtataaaatcgaatataaggatttcagcgacggtattcaggtgaatgacgcggtagcccgcggcgatatcgaagcgaatattatgcagcatccggtatatctgaaagcaattaatgagcggctggggatcgataacgtgggcattgtgcaggttcccacgccgccgatggggctgtatggtgggaaactgaccaccctggggaccccggcggcgggcaccgtcgtgtcggtaccaaaccagccgtcaaatgaatatcgcgcggtactggtgctggagagccttggctgggtgaaaattaaaccagacagcgatccggccactttttcgcagcgtaacatcgtagataatccttacaaaattgtcctaaaagagatggataatgcccagcaggttcgcgctctgccggacgtcgactatggcctgattcagggcaattttgccgtctccagcggtatgtccctgacctcggccttaaagctggaagcagctaccagccattttattaatgtcgtgaccgtcgccggtaaaaatcagaaggcgcagtttgccaaagatattatcgatggctaccactcggccgagttcaaaaaatatattctcagccatccgcagtatgatggttacctgctgcctgactatttaaaatga

SEQ ID NO: 235222 - DNA, 1176 bp, Klebsiella pneumoniae
atgcctgattttactgcttcgccgctggtggacgccctggaagagaatttgttcagcctgctggaaaaactggccgcggaggtcaacaccgaagcgctgccgctgatcgatctttccagcggcagtccggatcaacccaccccgccggaagtgattgactcgctgcagagcgctattcatcgtcgtgaaaaccatggctacccgtcgttctggggcaaaccacaggtccgcgaggcgatcgcccggttctatcgccggcagtatgatgtggaactcgatccgcacagcgaagtcgccgtgtttcaggggtcgcatatcggtataggcggcatcccgcgggcgctgctcagccccgggcaatacctcatctccaccgatccctgctatccgatttaccgctcggcggcgctgcagtcccaggcggcgttttatggcctgccgctcagggcggagaaccatttcctgccgaattttaacgatcttccccgggaagtcgctgacaaggccgggctggtggtgcttaactatccgcataatccaaccggcgccctcgccacgccggcgctgttcgccagcgcgctgcagtttgctcgtcgtcaccaggtgccgatcctccatgattttgcctatgcggccatcggcagcgcggccagcgatgcgccgctgagcctcttctcccagcccgacgcgaaagcatggggagtggaaacctatactttttccaagacctttaatatggccggctggcgcttcggcttcgcggtcggcaacgcctcgattatccgggcgtttaaaaagctgcacacccatagctacagtacggtgtttggcgcgattcaggatgcggcgatcgccgcgctcaacctgccggccgaacggattgcgcagctaacggcggtctatcatcaacgtcgggagtgggttctgcgtcgactagccgcgctgcgctggccggcgcgtgacgcacaaggcactttcttcctctggctcggcgtgccgcccggctaccgttcgcaggagtttgcccgcctgctgctgcaggaagcgcatattctggtggcgccgggcacgggttttggcgcagggggagaaggatttattcgcatcagcctgaccgcaggggacgaggcgctgagcaacgcgctggaccgtcttgcccggctggcgctgttttag

SEQ ID NO: 235223 - DNA, 1035 bp, Klebsiella pneumoniae
atgtcgacgcagatgatgaaggctgttcaacagcacgcctttggcgggccggaagtcctgagctatgaggatgcgcccatgccggtgctgcaggccggcgaggtgctggtgcaggtgcacgcggtgggcgtgaacccgccggacagctatctgcgcgatggctatcaacagctgcccccggagtggcggcccgaggtccgctttcccttgatcctcgggaccgatctctccggggtggtggtggcgcgggcggatgacgtccgggaggtggcggtcggcgacgaagtgtatgctatggcgcgttttcccgaaggggcggcagggggcagccgcgcttacgccgagtacgttagcgtgccggtcagcgacctcgctcgcaaacccctaaccctgagccatcagcaggctgccgcggtgccgatgtcgctcctcaccgcctggcagttcatgatcgatcccgggcatgaggtggcgaatccgctgcagccggggccgcatcggccggtgccgctggcgggtaaacgcgtcctggtcaacggcgcggcagggggagtcggtcatttcgccgtgcagctggcgaagtggcagggcgccgaggtgattgccgtcgccgcgggccgccatgaagcctttttacgtcagctcggcgccgatagcgttatcgactatacaaccaccgcagtggaggagacggtgcgtgacctggatctggtcattgatgcgccgggcgggccggccagcggccgttttttgcgtaccctgcgacccggcggcgcgctgtacccgatctttccgctcggctttgccggggcggaagaggcgcgacagcgcggagtgacggtctccaccacccaggtacgctccagcggcgcgcagctcgcccggcttgccgacctgctggacgccggggtcatccgggttgcaattgacagcgttttcccccttgcgcaggcgcagatggcgcatgagcgagcagcgcaggggcatcttgagggcaaaatcgtgctgtcggtgatggactcgtcagccgggtaa

SEQ ID NO: 235224 - DNA, 549 bp, Klebsiella pneumoniae; identical to SEQ ID NO: 135949

SEQ ID NO: 235225 - DNA, 912 bp, Klebsiella pneumoniae
atgaataatgcgcaaagcgtgttggtttttggcgccaccggtcagcagggcggctcggtggcgcgggcgctgctgcaccgcggctggcgggttcgggcgctggtcagggatcctttctccgccggggccgctgcgctggcggcgcggggagccgagctggtcgtgggtacctttgaagaccgggcggcaatgcggtcggcgatggccggggtcgacggcgtcttcagcgtccagcccagttcgccgggagggacggtgaccgatgagcaggaggtacgctacgggataaccatcgccgatctcgccgtcgagtgcggggtgaagcatctggtgtacagctccggcagcgcgacgggggagacgccgaccggcgtagcgcattatgacaccaaagcggaaattgaacggcatattcgccgcctgccgctggcggcgaccatcgtgcggcccgccacctttatggagctgctggtgatgcccggttttggccttgatgaaggtcgttttcaattttttatgttgccggaggggagaatgcaggtgctggcggtggaggatatcggccatcttgtcgcggcggtttttgccgcgccggcgcggtttgccggcaagacgttcgagatcgccagcgacagcgtgaccggtcgtcagctggagttgttattctccgcggcggcgggacggccgatcccctattcgcgattttccgacgaggtgctggccgccagtccttttctgcacaagctgaccgggctggtggacgacgggcggctggccgggcacgccgacctcgacgccctgcgccagctgcacccgcagctgcacaccttcgccggctggctggccggccccggccgtcccgccttcgagcgggcgctgaccagcgcggccagctgggcgtttgatcgttaa

SEQ ID NO: 235226 - DNA, 867 bp, Klebsiella pneumoniae
atgcaaacttaccagacaggcgatagcctgattttcaaagtgccggagcgcgagatttccctgcagccggcagcgctctatccagaggcgttcccggtagcggaggcggaggccgttattcagccgattgcgctgtcaatccacagctgggtggtgcagaccccctacgatctgattgttatcgataccgccaccggcaatggtcgggagcgcggcggcaatccgctctatcatcaacttaacacgccgtatctggagaatctccgcgccgcgggggtgaacccggaggacgtgaccctggtgctactgactcacctgcataccgaccatgtcggatggaataccgtctggcaggacgatcgctgggtgccgctgtttcccaacgcccgctatctgtgctcggcaaaagagctgtctcgggtgaaaaacagcgaacgctaccgggcgctgtggcttgacagcctgctgccggtgattgaggccggccagctggagaccgtcgatgtggcgacccggccgcgggtcggcggacggatcgactttattcccacccccggccacagtccggaccatgccgcgctggtcctcgccgccggagatgattacgcctgtttctccggcgatcttctgcattccccgatccagtttgcccatccgcagtggaattcagcgttctgcggcgatccccggcaggcggaagtctcgcgacgggagatgatggcgtggggggcaagccatcatgctcaatggttcaccgggcattttgccgggccttcctgcggctggctggagaaggataagcaaggtgactatcgctggcgagaggccgggaaacaggctgcagataaggggaacagtgatgaataa

SEQ ID NO: 235227 - DNA, 924 bp, Klebsiella pneumoniae
atgaagaaaatcattgaaaatgattttagtcgtatcgatctgaatctgttgacggtcttgatggtgctgtaccgcgaagggagcgtcacccgcaccgcagaggtgctccatcttggccagccggctatcagcggggcgctgaagcgcctgcgcgagatgtttgacgatccgctgttcgtgcgcagcgccagaggcatgctgccgacgccgcgggcgcaagcgctgatgaccgacctgcagccgctgatggaaaacctgcattcggcgatgtttggcgccggggagtttgtcccggcgcgcgcgcagcagctttttcgcatcggcctcagcgactggagcgaacactggctgatgcccccgctgttacccgggctgatgcaggaggcgcccggagtctcactgcagtcgatagccgccgaccccttccaggttcgccagttgctggaggaggagcgcattgatgtcgcggtgtctgtcaacaaacagagccgcggggaggtagtcagcgaaccagtgatgaccatgggagtcaccaccctgtggtcgccgcagcagatcccctgccgcgggccgctgtcggtgagcgactttgtcgcctgggaacacgtgatggtggcctatcgcgaaaccggccacggtgaaattgaccgccagctcgccagccagggactcgcgcggcgcgtgcgctttgccacgcagaatttctccacctttcccctgctgctgaccaccctgccgctgttcgccaccgtcccgcaggggctggcgcagcgctggcaggcgcagtatgcgctgcgcgcggacgctccgccggtagcgtatccggaatttacgctgtgcattttgcggcacaaacggcgggcgcaggatccggcgctgaactggctggtgacgatgttaaaacaggccatgcgcggccaataa

SEQ ID NO: 235228 - DNA, 906 bp, Klebsiella pneumoniae
atggacaaactggatgccatgcaggtctatgttgcggtcgtggatgcccacagcttcgcccgcgcggcggaggtgctcgggcagccgcgctccacggtatcgcgggtggtgaaggagctggaagcctggctcggggcgcagcttctccagcgcaccacccgcaagctcagcgtgacgacggagggtcgccggtattatgaggagtgtaaaaggctgctggccgagatggcggcgatggaagcctcctttcccgggcgctcggctcagccagccgggcggttcaaggttgggatgccgcaatcccttgcccgccactgcattctgccgaggatcggcgagtttttgcagcagtatcccgacctggagctgatcctctgctcaagcgacaacgtggaagatattattcaggagggattcgactgcgtgatccgtaccgggcggatcgaagattccaccaccctggtggcgcgtcctctggcccgctaccgctggatggtcctcgcctcgccggcctggctcgcggcccacggccggccgcagagcatcgacgatctgcaccaccaccgggcggtgggctacctgaaccaccgtaccgggcggaccatcgactggcttttctccctcgatgacggcgactgcgcgatccgcatgcgggagacgctggtggtcgacgataccgatgcctacattcaggccggcattcaggggctgggcctgatccgagtcgccagctatctggcggaaccttatctgcagagcggggcgctggtcgcctgtctggagcaggccgcttctgatcttcccttgtcgctggtctatccgcaaaaccgctatctgccgccggcggtgcgcgcgttttatgactggagcaggcgcgtgctgcaacccccgcacagcgaggcctga

SEQ ID NO: 235229 - DNA, 930 bp, Klebsiella pneumoniae
atgaaaactgataattttaatcatgcggaaaaggtattggtgctgggagcgggacaactgggcgccgccgttctcgatgcgctggtgcctgcggtaatcgagcgccagggcacggtctcggtcatcgtctcgccggcggcctgggatgaagccggccagctgcggtcgtcaaaccatcaggcgctggccgacgccggagccaccttcctcgccgtcgatatcgccggtagcgccatggagacgctggccgatcagtttcgcggattcaccaccgtgattaactgcatggggtttgtcgccggtccggggacacagctgaaaattacccgcgcggtgctggcggccggggtaccccgctattttccctggcagtttggcgtcaattacgatgtggtaggcaaaggcagcggtcagccggtctgggacgagcagtacgatgtccggaccctgctgcgcgcgcagcgggccacggagtgggtcattgtctccaccgggatgtttaccagctttctcttcgaaccagacttcgatgtagtgaatttatccaaccgaacccttcacgcccttggcagctgggatacccaggtgaccgtcacctcaccggcggatattggccgcctgaccacggcgatttatctgcatcagccgcggatcgtcaacgaggtggtgtttgttgccggcgaaacgacctcttaccggcagttggcggataccgtggagcgcgtaacgcagcagacgttcagcaaagccgtccacaccctgcccgccctgctggagcagctgcggacagacccggatgacgccatgctgcgctatcgcgccgccttcgcccggggggatggcgtgtggtggccgatgggcgacacatggaatgcccgccaccagctgccgacccaggacattgccggctggctgcagaccgcgcgctga

SEQ ID NO: 235230 - DNA, 207 bp, Klebsiella pneumoniae
atgaacaagttaattccactgatcgtattgagttgtctgctgcccctcgcggcaaatgccagaaccattaccgccaccggcgataccctggaccatgcggagagcaaaatccgccagcaggccgcccgcgagggcgcgactacctatcgcatcactgaagcgcgaatgggcaacaaagtgcatatcacggcgaaaatcgcggactaa

SEQ ID NO: 235231 - DNA, 879 bp, Klebsiella pneumoniae
atgcgcgacgctctgttcgatctctgccgccggtttgccgatgctcatgtcgatagcagcggggtggcagttaccccggttcccggtattactctggtgcgggccctgcatcctggtgacctgcaggcggctatcgccaggccgctggtggccatgctgctccaggggcgtaagagcgtgaccaccggcctggccagctttgactatggtccgggcgaggcgatggtgattgccgcggatgttcccactaccagccagatcaccgaggccagtcagcgttttccctattacgcgctggtgctggagctggacctggctatcctgcgcgagctgcaggaggccgggccgtcagggccggatgaggcgccccgcgttggtatcgaaccgatgaacgccgatgtgacggatgccgcttaccggctggcaaggctgtttgatcaaccgggggcgctggcggtgctgggggaaggtctgcggcgggagctgcattactggctgttgcagagtgtccatgggccggccatccgggcgctgggcgccgtagacagccattcggcgcggatccgtcgggcggtggcgatgctgcgccgggattttatgcagccagtcagcgtcgacgcgctggccgacgccgccgggatgagcgtctctgtctttcaccgtcatttccgcgccatgaccacgctgtcgccgctgcagtttcagaagcagttacgcctgatccacgcccgccgcctgatgctggcggaagggatgagtattgcgcaggctgccggggaggtgggctatatcagcgtgtcgcagttcacccgggaatacgctcgcctgtatggcgcgccgccgggccgcgatcgtcgacgggaaaaaatgagcgcctga

SEQ ID NO: 235232 - DNA, 507 bp, Klebsiella pneumoniae
atgactaagattgcacttattaccggcgccaaccgcggccttggccgtcagaccgcactggatatcgcccgccaggatggggatgtcatcgtcacctaccgcggcagtctcgaacaggcggaagcggtggtcgccgacatccgcgccctgggccgcaaggccatcgccctgccgctggatatggcgcaaaccgccagcttcccggccttcgccgacagcctcggcagcgcgctggccagcgtctgggggcgggccactttcgaccacctgatcaataacgcagggcacggcgaattcgccccgctggccgaaacgcgcgaagcgcagttcgacgggctgtttaacgtccacgttaagggggtatttttcctcgtacaaaccctgctgccgctgctggcagacggcgggcggatcgttaacttttcctccgggctgacccgcgtctcctatcctggcttctccgcctacgccgccgccaaagcggctgtggagatgctgagcgtgtag

SEQ ID NO: 235233 - DNA, 249 bp, Klebsiella pneumoniae
atggcccgcgagctgggcgggcgcggcatcaccgtcaataccatcgcccccggcgctatcgccaccgattttggcggtgggctggtgcgggacgacgcagaggtaaacgcgcagtttgccgccatgacggcgctgggacgggtgggcgttcccgaggatattgggccgatgatcgccagcctgctacgcgacgataaccgctgggtaaccgcccagcggatcgaggtgtcgggcggacaaaccatctga

SEQ ID NO: 235234 - DNA, 594 bp, Klebsiella pneumoniae
gtgaccactacaaaacaagggcgtactccgggacgtccccgccagtttgatgcggaacaggccattgaaacggcgcaacgcctcttccacgcgcgaggctacgacgcggtgagcgtggccgatctgacccaggctttcggcatcaatcccccgagcttttatgccgcttttggcagtaagctcgggctgtatacccgcgtcctgcagcgctacagccagaccggggccattcccatcgatgccctgctgcgagacgaccagccggtggcggcgtcgctcatcgccgtactgcaggaggcggctcgccgctatgtggccgatccggccgccgccggctgcctggtgctggagggggtacattgtcaggatgctgatgcccgggtggcggcaggcgaatggcatgctgcggcaagagccaaaatccagcagtatatcgcccgccatcgcccacaggacgcgctgcgggtgactgactatatggatacgctgatgcttggcctgtcggcgaaagcgcgggaaggggatagtctgccgcgtcttctggagaccgtgcggctggcaggcctggcgctggagcgcatcctgccagcctga

SEQ ID NO: 235235 - DNA, 714 bp, Klebsiella pneumoniae
atgacagcgtttcacaacaaatcagtgctggttttaggcgggagtcggggaattggcgcggcgatcgtcaggcgttttgtcgccgatggcgcgtcggtggtgtttagctattccggttcgccggaagcggccgagcggctggcggcagagaccggcagcacggcggtgcaggcggacagcgccgatcgcgatgcggtgataagcctggtccgcgacagcggcccgctggacgtgttagtggtcaatgccgggatcgcgcttttcggtgacgctctcgagcaggacagcgatgccatcgatcgcctgttccgcatcaatattcacgccccctaccatgcctccgtcgaagcggcgcgccgcatgccggaaggcgggcgcattattgtcatcggctcagtcaatggcgatcgcatgccgttgccgggaatggcggcctatgcgctcagcaaatcggccctgcaggggctggcgcgcggcctggcgcgggattttggcccgcgcggcatcacggtcaacgtcgtccagcccggcccaattgataccgacgccaacccggagaacggcccgatgaaagagctgatgcacagctttatggccattaagcgccatggccgtccggaagaggtggcgggaatggtggcgtggctggccggtccggaggcgtcgtttgtcactggcgccatgcacaccatcgacggagcgtttggcgcctga

SEQ ID NO: 235236 - DNA, 495 bp, Klebsiella pneumoniae
gtgacagcgagggaacgtttttttaagaaactgcagcaacagcaaaatccgcggcggacagcggccctcgacgggtcggccgccgcggatatcgccaggtttcgtcagcagatggcggcgctggctcagcagataagtcagtggtttgatggaaccggtattgaggtggtgatttcgacccgccatctccacgacctgagtacccttggctacagcctcaacagcggcatctgccgctacgatatcccggccattcgtctgcaaaacggcgagcgcagcgtcaatatcgtgccgcagcagctgttggatggcgtggaaaaggggatcgtgaccctgagtcttgaggcgcccgacggcgcgggatcccgggaggtgttttatctgagcctggccccggaggagggctggatgatccgcaaggcgcaccagtccccggaagcgcggcttatgcttaccgaagatcgcttttttatggcggtcgatagcctggcctga

SEQ ID NO: 235237 - DNA, 543 bp, Klebsiella pneumoniae; identical to SEQ ID NO: 211725

SEQ ID NO: 235238 - DNA, 1755 bp, Klebsiella pneumoniae
atggacgatttaaccctgcgttattacgacgctgaaatgcgctacctgctggaagcgggtgaagagtttgcccgcgctcatcctgagcaggcggcaatgctcaatctcgacaaagcgggcgctcgcgacccctttgtcgagcgtctgtttgaaggttttgccttcctgatgggccgcatgcgcgagaaactcgatgacgatctgcctgagctgaccgaaggcgtggtcagtctgctgtggccacattatttacgtaccattccctcgatgtcggtcgtcgaattcacccccgactggccggaaatgaaagaatcgatgacgataggcaaaggttttgaagtgctttcccggccgatcggtgaaaagggcacgcgctgccggtacaccaccaccaaagcgatcgctctgcagccgttatccctggaacgcgtccagctggccaccgatacggatggccggtcggtgatcacgttgcgctttacctgcagccagctgacggactggcgccgggtcgatctcagtcatatcccgctgtactgcaacgccgatgcgccgctggcctgcgccatgcacgaggcctttaccctcaatgtggcccggatgtggttgcgcatgcccgatgaggtggacagaaggccgctggacgggtatttcagcgcgctgggatttggcgaggatgacggcctctggcctgaagatggccgcagttttcgcggttaccagctgctgctggagtattttaccttccgcgaaaagttcatgttcatcgatctgcgcgggctggagacggtggcttttccggccggactggcgtggtttgaaatcgacgtcgtgctggcggaacgctgggaacatgacttccgcttcagcgaaaagcagctgcgcctgcactgcgtgccagtgatcaacctgtttccgctggagtccgatccgctgaccatcaattccctgcagaccgaatacccgctgcgcccgatgcgcgtgcaggacggccacaccgaaatttacaccgtcgattccgtgatctcctcacaccagcaggtttacgcgccgttctcaagttttcgccacaaaggcggcatgatgcgtcatgacgcggcggactattactatcatacccgggtgcgccgtggcccctccgggctgttcaacacctggcttatcgtcggcggagaagcctttgataatcataccgtaccggaagatgaaagcctgtcgctgaccctcaccggaactaacggccagctgccgcgtcgcgcgctgcagagcaccgtgctcgatacggtgatgaaaaccactgccgccagtattgcagtgcgtaacctctgcgcgccgacgctgccgtgctatccccccgcccaggaccgttttcactggcgggtgctgagccatctgggcagcagttttctttccctgatggataacgcggaggtcctgcgcggcaccctggcgctgtatgaatggaccgacagcgagatgaatcgtcggcgtctggaagccatcctcgacgtgaagcaccgcgcaacagagcgctttgcacagggccatctggtgcgcggcgtacagattgaagtcaccctcgacagtcacggctttgccggacgaggcgatatatgcctgtttggcgagatgcttagccgcttcttcgcgctctacaccgacatctacttgttcaaccgcctgattatcattctgcaaccaaccggagaacgactggaatgggaagagaagcacagccgccgcattcccggctga

SEQ ID NO: 235239 - DNA, 1593 bp, Klebsiella pneumoniae
atgagcattttacaaaatttggttgccgccagtcagttggatgaaagcgcactgcgccagcaggcccggtcacgccaggcgcagtggcagtcatggcttgcgccaatcagtgatagccagcccaccgggagcgatccgggctatgacgatggttttcagcgtatccgcgaggaggtcaataagatctccggtgtcgatactgaactgatttgccagctggcagaaaaactgctgactcagacctgcaaggatctgcgcgtgatcaccttttacgtgtgggcgcgtctgcagcgggatggtgaaaccggtctggcggagggcgttacgctgctggcggcaatgcttgagcggtttggggctatgctccatccccagcgtgaacgtagctgtaaatcagcgctggaatggcttggcagtcgccggatgtcggacagcctgtctctttatccggaagtcgacatgaccactatgcaggtcattatcggggcgttattgctggcggaagccactttttccggcttggctgaagcatctcgccccgatctttccgggctatatcagatactggagaaccgcctggtgcaaagcggcggagcccacagtctggtgccgcagaccagccgcgaagaacacgatctgctaccccaacatacggacaccgcaccggtaatgcataccgtcacgtcaggtcgtgatttgctcgatcaggctaaggtgctggcgaaatatctgcgtgagtgtcccggcggatggctggcaggtcatcatctgatgaagagtgtgcgttgggatacgttaacggagttaccgccgctggatgcctccggccggacacggctattgcctcccaagcctgagagtaaagcccatcttaagcgtttgtatttacagaaaagctggtcggaactgctggagcatacggacacgctgttggcgcaaggcgtcaaccatctgtggctggatgtgcagtggtacgcctggcaggcgttgctgaaactggatgctgacagtgtacgggccgatatcctgtgccgggatatgaaagggttgctggctcgtctgccggggctggaaaccctggcgtttaacgatggtacgccattcgccgatgaagtgacgctcaactggcttaacgaacgtgtcctggatgagatggccggatggcaagatgagccggtaattgcggcgaccagcgctgatgaggtgctgtcgctggagccagaagtgctcacccgcgcggacgatgaaggtattgagtcggcgctgaactggttacaggcgcagccgggctataccaccagccgcaatcggtggctgatgcgcttactgatggcgcgggtcagcgagcagtacggaaaaaatgaaatggcgctgcatctgctggcggaactcgacagccgcgcccgggaaatgacgctcgaacaatggaagccggagcttatctttgaggtcaaagcccgccgactccggctgctcagaggcaaggccgggcgcagtgaggcagaaaaaaatcgcttgctgccagaaatggagtcattgcttgccgggctcatcgctctggatcctgctcgcgccgcggtgctgtgcgcataa

SEQ ID NO: 235240 - DNA, 1182 bp, Klebsiella pneumoniae
atgtggttgcacgctggtgagttccaaccccgattgcagggttgcgcagtgagagctattcctacatttcctcgctatcgtcttgcgaaaccgccagttgcaaagcgctggttaggaggaggtgccgctctggttttgctctctggtatcatcgcggcaatggcagggaaatccggtgccaataccagtatcattcttttctgcatggttggaatggtattacttggcggtgttgtctggtttgtacgcacaatcttttttcgcctttcagttcatcattcacatacctgggagcgcgaagcagaaaatgagcgcaggcattggtgggaaatccatcggcgtcagtttgccctgaaagatattgtcctgattggcccggcaggcgctgaactttctgactggctgcgtgtgattaagcgagagcatcaggctccattagtcaggcaggaatccctggggaaatcgttgcgtattgccagaagtttctcttctgctcttattgaacgtgaaaaacaactggctcaaatgctggtattgcaatggaaaaggcagcgaggtaaggaattattcgtttctccggagaaatatttctggcaggggagccctgaagcctggcaagcctttgtggcacaactcattgagagttttccgggaattacagctcctgaattacctgagttatggcaaggggagaaaacattatccgtactggctaatgttcttgcggacaagaaacagctggctaattttttgattgccgggtgccagtctttatctcctgcttctgactctactcgtcctgccggtgaatgcgcagtactgtggctggctggaaaccagggggacgtcacattatcccgtggtgaattttttgagccttctgatagtgagtccctgcggcacgtcgccttgcgagccgaaaaacagagcgaacttaatgagtcgcccgaacggtgcattctcttctcacacccggagaaacctgaactcgccgattgtggctggaatgtgacccacaatatccaggatgactactggggcgatcctggaaagcttgatgcgctggttgtgatatcgctcgctgcaattaccgctaagagtgaagcaaaaccctgcggctggatagcgtcagacccccttcatactttagctcttgggatcgtaaaaccacatggaaactga

SEQ ID NO: 235241 - DNA, 258 bp, Klebsiella pneumoniae
atgaaacatattgtcaggcagggtgattcgctaaaagagtatggtggttcagttattggcggtcactatctttattttggtaaaggtattgctgtgaaaggtgatgcggtgaaatgtaataagcatgggatgacaacgattgtcgaaggtagctctctgacaaaagttgacggtcaaccagtagcattacatggtcatcgctgcgcatgtggttgcacgctggtgagttccaaccccgattgcagggttgcgcagtga

SEQ ID NO: 235242 - DNA, 2406 bp, Klebsiella pneumoniae
atgtccaaaataaacccagacttaacatggtatccacctcactttccaaaacaagggcgtttaccaacagatacagcggcaacgaagcgaaactgtaaacagcaggatagccatgagctggcataccggaatgagctctgtcacgctgcgggtaaagccgtagagccgccttgctgtaaaactctgcatatcagtttattttttgacggtacaggaaataaccttaataacgatctgtatatttccagccctaaacatccaacaaatattgctcgtttgtttcgtgcaacgatcggtcagggttatgccggtggtgttcaggggcatactgaagagctggttgatttagcgggaacgtcaggcaacaaatactataaatattatatccctggggttggcacaccttttccagaagttaatgaccttgattacagtacgccaggtctggcttttgcgacctacggtgaagaacgcgtcaactggggtctattgcgaattattgatgctctcagaagaacatcgggtttaaccgagatttctgacgccgagtgttatgccgccgtcaacagaatgacatcaaatctgggatcggacgggccagacaggcgttataccgtttttaatgaacttttaaaggcagcagatcttgcacctaaactgaaacaggcagttacacaaccagaaccagggaaacctaagctattaggcattaagttatatgtctatggtttctcccgcggtgcagcaagtgcgcgagcatttgtgaactggttatctgagttgctgccagggggcaggagaaagggaagtaaacctgagctttgtctgaagtcgggtgacgtaaaaatccgcttaagtattgaatttcttggcctgctcgacactgtggcatccgttggcatagcaaatattgcgccattcgcagaagggcatatgggctgggctgatggtaccatggaattaccggataatgggctgatcaaaaaatgcactcacctcgtttcatcccacgaacaaagactttgtttcccgctggattcaatttgccgcagcgacggaacttacccaagttatgctacggaagtggtttatccaggaatgcactccgatattggtggggggtatcccccgggggatcagggaaaggccactggcgagaatgatggcaatttgttatcacaaatcccattgcacgatatgttctcttcagcattccaggctggtgcgccgatgaaaacaccagaagatgcgttgccaaaaacattatctttagacaattggagagtaatgcctgctaatttgatctctgaattcagagtatcagatgtgcttatatctcgattcaatgcctggcgcgtgtttactcttaatttatcgtcaagttatgtagaagactctgttgacgcattgaaattcaatcccatccgagcaagttcaaatattattacagcgttagaagatcaactcggctggattacggcatggcgtatcgggcgatatgtaaacggcgcttataaatctcaaggattttacaaatcttcaggtgtcgcgtggcaaaataaagattcagatccggccactctggctgcatctaaggctgagcaagaacggaaacaaaaagaggtggatgatgcgcgcctgagagcaatcgtgaataataggttcaaaaataaaaagttcataccattacctcctggcccaaaagattttgacccggctatcgctcaggttcagctaagacaggcggcagaagaattcaatgctgattaccagtctaagccacgccccgttacggggaactggaaatatacggtgtctcagcaattatctaatgtgatatactccttcagtgagaatgatttctctgttgagtatgaacgcatcaaaagttcaggtgacagtaaatttaacaaactgtttccgaagcaatctgctggagaaaccgctcaatcgccagaaagtctggtcagatcattatttgacgatcaggttcatgactcacgcgcctggtttatgcacgcaacctttggtgacagagaaccctggggaagttacttcctttatcggatgattttctttggggagttgatgagtaaaaatgtttcattgatcgctaaatatggccggtttgttgaaggccaacttaaatcagcgataaaaggagccagtctcatttttgataacacgactatcaacagtaatatttcagatgaaatcacatctggtattaaacaagtgatttctatcatccctgcttcggcaagtgggcctgaagttattaatgcagaatctactattcaacctgcaatgacaaatggaattgcgccattgggtagccagacacgtaaagccctggatgctgcgaaactggccgaaaccaaagctgatattcttaaaatatggtga

SEQ ID NO: 235243 - DNA, 336 bp, Klebsiella pneumoniae; identical to SEQ ID NO: 217419

SEQ ID NO: 235244 - DNA, 1671 bp, Klebsiella pneumoniae
gtgattcggattctgacagcgattccgactccgacagcgattccgactctgacagcgactcggattctgacagtgactcggatgctgacagcgactcggattctgacagcgattctgactcggacagcgactcggactctgacagtgactccgattcggacagcgactctgactctgacagcgattccgactccgacagtgactccgattcggacagcgattccgacagcgacagtgattcggactccgacagcgactctgattccgacagcgactctgactccgacagcgactccgactcggacagcgactcggattctgacagcgactctgactctgacagtgactctgactctgacagcgactccgattctgacagcgactccgactccgacagtgactccgattcggacagcgattccgacagcgacagtgactcggattctgacagcgattctgactctgacagtgattccgactcggacagcgactctgactccgacagcgactctgactctgacagtgattccgactctgacagcgattcggattccgacagtgactcggattctgacagcgattcggactcggacagcgactcggactctgacagtgattccgactctgacagtgactcggattctgacagcgactcggatgctgacagcgattcggactctgacagtgactccgattcggacagcgactctgactccgacagcgactctgactctgacagtgattcggactccgacagcgactcggactctgacagcgactccgactccgacagtgactccgattcggacagcgattccgacagcgacagcgattcggattccgacagtgactccgattccgacagtgattcggactctgacagcgattcggattccgacagtgattccgactctgacagcgattcggactctgacagtgactcggattcggacagtgactcggattctgacagcgactccgattctgacagcgattcggattctgacagcgattcggactccgacagcgactcggactcggacagcgactccgattctgacagcgattcggactctgacagtgactcggattctgacagcgattccgactccgacagtgattcggactctgacagcgactccgattcggacagcgactctgactccgattcggacagcgattcggattccgacagtgattcggactctgacagcgattcagactccgacagcgactctgactcggacagcgattcggattccgacagcgattcggactccgacagcgattcggactccgacagcgattccgattccgacagtgattcggactctgacagtgactccgattcggacagcgattcggactctgatagtgactccgattcggacagcgactcggatgctgacagcgactccgactctgacagcgactctgactctgacagcgactcggattctgacagcgactcggattccgacagcgattcggattctgacagcgattcggattctgacagcgattcggactccgacagtgattcggattcggactccgactccgactccgactcggacagcgattccgattctgacagcgactccgactccgattcggataccgaaccgcaggcaaataatgatacccatacggcggctatcgataccgtag

SEQ ID NO: 235245 - DNA, 1110 bp, Klebsiella pneumoniae
atgaatatttttttacataaaagtcttcctttaagtgtgggaggggttttgttaggtatgatttcttttttttgcagtatgtcatcatcttccgctgcagtcataaacgcgcaacccgggcaagggtttatgccagtggactccttttcgggaacagtgcgagttcctgtaagctctttaatcagtagtacccagtcacaatatgctggctttgggatggcgccaataacaattggtgaagatatgatatgctcgagttatctttcacagtggaaatccatagacggttactatggttacgaagtaagtcccggcgttttgttggtaacttataatacacaaattacgggcgacgtggtcagttctaccggcggctctatcgcggtaaacgggaatattaattctaccggaattttgtctggttctcttccaccgaaacgtaatggtgttaactgttattcatacctaaccggtgagagggtaacaactagagaaacgattacacaattcagcggcagctatggttattatatttcgtctacagcctcattaacctcagatgccggttttcagcccacgagaattggattcagacgtgcaatgggaattggcccgatgtggaatactaactatgtaaccatcaattccaatgacactattatcatcaaagaaccgcctatgacctgctctgtctcggtgccgccggtagactttggtgaggtggcttccacagcggttggcaacaaggtggtggtggaatccacattgggggttaactgtacaaatacgtccaacaattccatacccatcacgtacagcatgacgccaaaaactcaggcgggcgatcaaaccagtatcccgatgatctcaaaggccgggggaaccgtgggcgatatccggggatttcttggtgcaaacgcctctgcagatgccgggtgtgtagcgaagacttcatcggtacgcattgatggttctcagacgccactgcgtaccgtgcccagcaacaatagtgctccgtggaccagtcctctggtgtgggtattatgccccaaggcaacggcaaaacctggggtagcctcagcggcagctacctttgaattaaactggtaa

SEQ ID NO: 235246 - DNA, 231 bp, Klebsiella pneumoniae; identical to SEQ ID NO: 121864

SEQ ID NO: 235247 - DNA, 249 bp, Klebsiella pneumoniae
atgagtggattgaaaggccgccgaatcagcgcggatatgtttgctatgatgttaaaagtatctgccgggcagctggtttttgcagcccggcatgacaagcctttacgcagactgaccctacccccttacagaatcgaaggcgggaaaagctggagctcgaccgcctccacccgcagtatgacgtttgatatgcaggatgcggtcgctttcagcgagaaatttcataaaattcagtcgcctgacggctga

SEQ ID NO: 235248 - DNA, 1341 bp, Klebsiella pneumoniae
atgatcaaagagactgttacgatgagtcataaggaactcgaccgacttcacattattcaggagtcacttaatcgccatattactcaggaacaagctgcggcacgcattggcatttctattcggcaggttaaacgtctggtgcaacggtatagaaatgaagggccttctggtctagtttcccgccgacgtggaaagcgtcccaataattccttttctaccgaattcagagcaacagtaatttcactcctcaaaggccgctacgctgattttggacctacgcttgcgtgcgaaaaattgcgcgagatacacggcttgtgtttatccattgaaactctcaggaagtggatggtagaggagggcatatggcgcgaacgtcgtcgtaagtttgcccgaatttatcagcgccggatgcggcgcccatcctacggtgaactcatccagattgatggctcgcctcatgactggtttgaaggtcggggccccaaatgcacactgatagtctttatcgatgatgctaccagcgctctgatggcgctacgattcgctcctgcagaaacaacccgggcttacatggaaaccctccggggttaccttaatgatcatggcgtaccactggctctctattctgacagacacagtatattcagagtaaataacccggagcgggaaggagagttgactcagttcacacgtgcgataaagacactgggcatcgagccaatccatgccaacagcccgcaggcaaaagggcgggtagagcgtgccaatcagacactgcaggacaggctggtcaaagaaatgcggcttcagggtatcagtgatattgaaacagcaaacgcatggttgccgacctttattgaagcctataacaaccggtttgctacgccgcctcgtattgctgataacgcccatcttgatgtacaccattctgaagaggaactgggttatatcttcagcctccaggcgaagcgcgttctctccaaaaatctcactttccagtacaaaagcagtgcgtttcagattcgcagtgaaggccggggatatcgacttcggcattcggttgtcacggtatgcgaaagctttaacggtgaaattaaggttctgtatgatgggaaagcgttgggatgggaaaaatatgttgatggcccggagcctataccactggatgatgaaaaaagtgtccatgaacgtgtggataatgcccgttttgatttacgctcaaaattctacgtaaaacctaaagctgaccatccttggctcacgcgccgcacgcaaagtaatcagcaagtgaagccccctaaattacccagaaagaaggctgatcccgataaaatggactga

SEQ ID NO: 235249 - DNA, 1644 bp, Klebsiella pneumoniae
atggcctactatgcgaagcaaaatggcgtgccggttgttctctctgagttgtcgcaggttcagctcaaaaactcggatattgcgaccaccgcgggttatattgccgtgatgataccgcccttgtcgtgggggatcgtgaagagcatgggggccgctttctccagtgcctacagccatttttcttcatcggggctcagtgcaacatcgcaggctgcctccggcgtggtggacggcaattactctttcgccaacatgcagatggagaacgtcagcggctacagctggggtaccaacagtacaaccagtttcggacagatgtcgcggcagctggcgaatgggggcatgagcacgcagacgcgggctggatcgatggtctgggacagtggtggtgcaatgtcaaaactgccggtggatatcaacgtcggtcgtcagatagccagtgcgcagcaacagatggcgcgtgagtctgatgtccaggccgaaagcgcgctgcatggctataacagcagcgtgacaagtgcctggaatagcctgcagcaatttggcaccaataaagggaacagcgcctcaacaacgaccggggccgatactaccgagtcttcgcaggattcgatggccagaagcaagatgatgaatgctgtagattcgtatgctaaagctaaccatattagccgtgatgaagcattcggccagcttatggacaagtcagtgagaggtgatgtttctggcgaggcttatgtaggagccagaggtggtgttggattcgagctcttcggtaatggcggtaaagctgaattcggtgggaggatgtcggcgagagggacagcaagttctggatctcaggacaatactactgagtcaggacgccaatctaatgctgacaatcatgataccagcagtcaggcagttaaagacttcagagagtcttctgattacttcatcaaccagaaatcaagccagtctggaaacatcactgataacaatgcatcttctcgggttgatcaattttctgcctctttggccagtgcgaaaaatagctatgaccagtacacgacgagcaaaacacgtagccatgagtatagtgagatggcctcacgaacagaaagcatgagcggccagatgaacgaaaacctgactcaacaatttgctaatttcgtacagaaaaatgtcccacaaaatgctgaagctattcttactgacacgtcttcacctgaaatcgctgcccaaagggagcaactggctcgtgaatttgtgaaacaacaggttgaaccaaaagtcgatgaggcgtaccaggagggcagaagaaacattggcgcaaatatgccatcagtttctgaaggtaaaggaagcggtacagtatatgcggactacaactctcacggtgatagtatcgatgagatgaccaaaaatgcaggtatcaaaaatgatgttcaccaatcggttgaacacatggttagcgaaaaccagcaagctcataaggataggcaagatagcatacataagcaggaggatgatgttcagaatgaacacactcgtctgaaaaaccaccataatttggaaggaaataaatttgagaaagaatacaatgacaaaaaggctgaacagagagcacttcctggagcggatacaagagacgaactctga

SEQ ID NO: 235250 - DNA, 1287 bp, Klebsiella pneumoniae
gtgctgaccaactacgtcaaggctattcgctacctgcagggcatcgagaagaacggggagccgttcactatcagggactggatgcgcggtgtccgtgaggaccgacccaatggttggctgtttatctcctccaacgctgacacccatgcttccctgaagccggttatctcgatgtggctgtcaattgctatccgcggcctgctggcgatgggggagaaccgtaaccggcgcgtgtggattttcgccgacgagctccccacgctgcacaagctgccggacctggtcgaaatcctccctgaggcgcgtaaatttggtggttgttatgtgtttggtattcagtcctatgcccagctggaagacatctatggcgtcaagcctgccgccacgctctttgacgtgatgaacacccgggccttcttccgctccccgagtaaggagattgcggagtttgctgccggtgaaattggcgagaaggaaatcctcaaggccagtgagcagtactcctacggtgctgacccggtgcgtgatggtgtatcgaccgggaaagaaaaagagcgggaaacgctggtcagttactccgatattcagacgctgcctgacctgtcctgctatgtcacgctgcccgggccgtatccggccgtgaaactggccctcaaatacaaaccgcgtccgaaaattgccgagggatttattcctcgcactctcgatgcgcgggtggatgcgcggctcagtgcgttgcttgaagcgcgggaagctgaaggcagtcttgccagggcacttttcacgccggatgcgccggcatccgggcccgctgatacaaacagtcacgccggtgaacaacctgagccggtcagtcagcctgcgccagcagaagtgacagtatctccggcaccggtaaaagcgccgccgacaacgaagattccggcagcggaaccctccgccaggacagctgagcctcccgtcctgcgggtcacgaccgtaccgttgatcaaaccaaaagcagccgcagcggccgctgctgccgcaacagcatcctctgccggtacccctgctgcagctgcaggcgggacagaacaggagctggcgcagcagtccgcagagcaggggcaggacatgctgccggccggtatgaacaaggacggcgtcatcgaggacatgcaggcgtatgacgcctggctggcagatgagcagacactgcgggatatgcagcggcgtgaggaagtcaatatcaaccacagccaccgccacgatgagcaggatgatgtcgagattggggggaacttctga

SEQ ID NO: 235251 - DNA, 144 bp, Klebsiella pneumoniae
atgcccacgataatattcaactttataataaagaaaatggtggggtttcttctgctcggaatatgggacttactatatcaaaggcagaatatgtatggttctgtgatcccgatgatgaaattattgcaaatggtgaagatataa

SEQ ID NO: 235252 - DNA, 375 bp, Klebsiella pneumoniae
atgcctctggatgtcctcttctggtgtggtggaagccatggctcactttacccgtttaacggccaggtcagtaatgagtccagcccgctgcagtcgtcggtactggtcagtgagcgtatggccttcaagctccaccggcagggacaaattatggagagtatcgggaaggacaaggcagtctgttacgaatatccctccccgatcatcccgaaagaacgctggcgctatcagatggtgaacatgtatccggacagtggtcagtgccatccgcttggacgcagcgtgatgcgctgggaggccggcaaaaatccgcccaacacccgcaagaactatggctacctgatgtggcgtaaacgtaactgcgtatttttgtaa

SEQ ID NO: 235253 - DNA, 660 bp, Klebsiella pneumoniae; identical to SEQ ID NO: 16020

SEQ ID NO: 235254 - DNA, 312 bp, Klebsiella pneumoniae; identical to SEQ ID NO: 181259

SEQ ID NO: 235255 - DNA, 261 bp, Klebsiella pneumoniae
atggtggaagatgtgaactacaccatgatcaccgatgttcagatcgcggaaagaaccaaaacacaggttcagactgataacgtggccgtattacgtcagggaacatccggagcaaaagtgcagacaagtactgaaacgggtaatcagcataaataccagactcgcgtcgtctctaacgcgaataaagttaacctcaagttccctgaagcccagcctgttcttgaagaccagctggcaaaatcgatcgctaatatcctgtaa

SEQ ID NO: 235256 - DNA, 240 bp, Klebsiella pneumoniae; identical to SEQ ID NO: 233461

SEQ ID NO: 235257 - DNA, 267 bp, Klebsiella pneumoniae
atgccgacgctggggcgtcttatgagcctgctgtcaccctttgacgtggtgatatggatgacggatggctggccgctgtatgaatcccgcctgaagggaaagctgcacgtaatcagcaagcgatatacgcagcgaattgagcggcataacctgaatctgaggcagcacctggcacggctgggacggaagtcgctgtcgctctcaaaatcggtggagctgcatgacaaagtcatcgggcattatctgaacataaaacactatcaataa

SEQ ID NO: 235258 - DNA, 567 bp, Klebsiella pneumoniae
atgccgatatttatggggcttattttaatatctgacgatataattcctcttgtatttggtgaacaatgggtttctgcagttcctacaataaaatttttcttcgtttttggttttttatcatgtatcggtagccttcaattgtccctaattaaagctaaaggaaatacaggttggatattgaagtatcaacttttccagcaagttacaactgggatacttgccttggtattagctaagtatggtcctgaatatgtgattatggctattgttataaaaacctacctcacttggccatatacaatattttatattagtaaactacttgacatttctgcatttagatattttatagttatagtcaaaccattccctgcattaataatgatgaccgtttgtttctatcttttgaaggaagagatttactcggttaatttatttctatatttattggtgcaaatattttgttgcggccttgtttattttttagttacgtttgttctctttaaaagagacatcttaagcattctacatatgcttaaatctagaggtgttgagtccattaaatag

SEQ ID NO: 235259 - DNA, 276 bp, Klebsiella pneumoniae; identical to SEQ ID NO: 139585

SEQ ID NO: 235260 - DNA, 276 bp, Klebsiella pneumoniae
atgattaacggcttcggctcggcaaaagagcagtggttctcctcctttatgctgcaggtggaagcgaactgctcctggcaccgcctgttcgttgacccgctcagccgggcgatgtactcctccaaaggcccggattttgagtacatgcaagcgcgccggcaggagggggtcgatatccacgatgcggtatacggactggcgtgccgcaactttaaagacgaaatggcagagcttgaatcccgaataccggtgaatgacatggaggataaacagtga

SEQ ID NO: 235261 - DNA, 996 bp, Klebsiella pneumoniae
atgccaacgtattcgcctgagcaggctctggcgcgccccaccggccgcgcgccgctgtggggagaagggctgctggccgccgcgctgtggctgctgggcggtctgtttactcttacctggcccgacgccgggcggcgctggccgtttagcgaaggctgggcgctggcgcaattcaccctcggcggcggcttgctgctgctggcgctgagctatcgctactggcgggcgcgcggcgcgcgtgtgctgcatgccggcaagtggctggcgctgctgccggtgctgtttgctgtctgggaagggctgaccgccaaaactgccgtgttgccggtaccattcttcgcgccgccgcaggcgctgatcgaggtgctgcacgacgactggccgcgcctgctcgacagcctgctgcactccctggggctgctggggctcggtgtgctgctgggtaccagcagcgggttcatcaccggtctggccatcggctggtcgcaacggattggctactgggtgcatccggtgttacgtctgctggggccggtgccgtccaccgcgctgctgccgctgtgcctgtttatttttccctcgagcttcggcgccagcgtgtttttgatcgcgctgagcacctggttcccggtcacggtgctgacctggtccggagtgatgggcattgataaggcgtggtacgacgtggcgcggaccctcggcgccagccagcgtttcctgatcctgcgggtggcgatccccgccgcgttgccgaacgtctttgtcggcctgtttatggggctcggcgcgtcgttttcggtgctgattgtcgccgaaatggtcggggtgaagtcggggatcggcttttacctccagtgggcccagggctgggcggcctatcctaatatgtatgccgcgctgctggtgatggccttgttatgctccggcctgataagcggattatttatgctgcgtgaccgtctgctgagctggcagcgaggagggatgcaatggtaa

SEQ ID NO: 235262 - DNA, 318 bp, Klebsiella pneumoniae
atggccgctgatgtcccagccctccgcgcgacgggtcgccacggtgtccggcaggccgccccgcgctggggagcccagctccggctcgacgcgcaggctgttaatgaggccaccgtgttcgacagcatcgtgaaaaacctgctggcgcagcggcgcgtgccaggcgtcattttccgccagccgcaaatggtggagatactgcatgcagacgatcagcgctgtcgccggctctccccaggcgatggcggcgatgacctgctgcagctgggccagactggcgcccgcgccgccgcaggatggcggcacggcgagacttaa

SEQ ID NO: 235263 - DNA, 198 bp, Klebsiella pneumoniae
atgggggaactcagcgagcgagaatttcagatattacagctgattgctgaaggtcagatgaacaaagaaatcgctcgctccctcgctatttctgccgagacggtcaaatggcatatcaaaaacatctacgcgaagcttaaagtgaatagccgcactcaagcgatgagccgggcgctggagatgaaattactggattaa

SEQ ID NO: 235264 - DNA, 432 bp, Klebsiella pneumoniae
atgacgatgtgtcgggttttgtgcgttgcccgggccgggttttatgcgtggctgcataatccggtctctgcgcgggataaagataaccagcgtctgctgacgctcatccgcgattcatattccctgagcggtggcgtctatggctatcgtcgggttcatggcgatctgaatgagatcggtgaaacctgcggcaaaaaccgggtgggtcgtattatgcaactgaaccggattaaagccgtacgcggctataaagctccgcgtcgtatcgctggccggccttcagtggttgcccctaatcgcgtgcagcggcagtttactattgtccgggccaatcaggtctgggtcaccgatattacttatatccgcacctggcagggctggctgtatctgacggtggttatcgatctcttcgcccgtaacgtggttggctga

SEQ ID NO: 235265 - DNA, 594 bp, Klebsiella pneumoniae
atgataaaaatattgataatgtaccatccaagctttgcatcttctggtaagtttgaaagaaaacttaccaaaattctttcaacattagatgattaccaaattctttattttgatgatccagcaagccttatctgtaatttcttcgattcaaaatcattaaaacatcttgacgataatgtacttggtaatatagttcaagatgaaaaactaactcatgcagtattttttgattctacatattccccagaatttacaactgttaaatcatatctttcagaggtgatacccgttcgatatattcaagataaaattacatttgtttccaataaagataaaggtgaacattttgatacttatattggccgtggtactttgtggggcaatccatatgcaataggtcaagatggtgatcgtgaagaagtgataaggaaatttgcatatgattttaacagaggttttttacgaggtggagaagatttcaatgagaaactaaaagctctaagaggacatactttagggtgccattgtaaaccctacgcatgccacggagatgttcttgctgactatcttaataaactggatgatggtgaatag

SEQ ID NO: 235266 - DNA, 441 bp, Klebsiella pneumoniae
atgaaagtatattcaattgggtttactgaaaaaactgctgaaaagttttttacacttatcaagtcacagcctggtattaaaaaattaattgatgtacgtttgaataacatttctcaactgtctggttttgccaagaagaatgatcttaaatactttttaaaggaactatgcaatgttaactatgtacatgtcccggaattagcccccactaaagagatgttaaatccatacaaaaaagggaacatttcatgggaggcttatgaagataactttttgaatttaatggcaaaaagaaacattgagcgtattgataaatctttgattgaaaatagttgcttgctttgcagtgaacataaaccgcatcactgccaccgtcgacttgtgatagaatacttgaataagcactgggataccgagtttgaggttaagcatctgatatga

SEQ ID NO: 235267 - DNA, 681 bp, Klebsiella pneumoniae
atgccaagcatacgattagtattattagcagcctcagcgaaacgtaaacactattgccttgcaggaagaaaatggcacgatgatgaaacccatttatggatacgacctgttgggaacagtcttcctaacgataacgatgctctaacgacaagagagattcagtttaaagattatagaatacctcaagttcttgatatagttgacattcatttattaggaaaagctaatcaccctgtacaggccgaaaactttctcatcgacacttcgtttcgatggaaaaaagtaggtactcttccagtcaatatgctcgaccaatttgttgaataccctgatactctttggttcaatcctcaccaacattatggggtgaatgattgttttccttctcagttaattaatggtcagactaatagtctgtattttattatcattgaggatttagtgattcgtgtaagccattcttcctacaatggacgtaaacgctatcatgggttgtttgaatacaatcatataaattataaaatttccattactgacacaattatctattcagcttatggtcagaaagaggatggggattaccattatggaaaatgttatgctacattaagtatggctccattcaatgaacgtaatgaatgttataaatttttagcagctctaattaaaatacaggattaa

SEQ ID NO: 235268 - DNA, 621 bp, Klebsiella pneumoniae
atgcgtgtatgggcatatctaagagcatccacgaaagagcaagatgcgaatagggcattgaaagagttagaggcttttgctcattcacatgatctgaaaatatcaaagtacttcaaagagaatgaatcaggtgcaagcctccaacgtcctcaattattcttactcttagaaattgctgaacggggcgatattattctttgtgaacagatcgataggatctctagactcacagcagaagattggaaaaccctacgagcactcatcgaatccaaggggatcagggttgtatcgttagatttgcctacgagccatcagcttttgcatgttcaggatgagttcaccgctcgtatgtttgaagcaatgaattcaatgatgctcgatatgctggcggcaatcagtcgcaaggactatgaagatcgccgcagacgacaaaagcaaggtattgaaaaggccaaacgagagaaaaagtatcgtggtcgtccagtcgatgagagcttgcatcataaaatacaagaactactgtctgacggtaaaagctggagcaaaattcaggctttgatcggttgttcaagggctactatcgcaaaggtggctaaaaactcatctcttacagaagaatag

SEQ ID NO: 235269 - DNA, 219 bp, Klebsiella pneumoniae; identical to SEQ ID NO: 144439

SEQ ID NO: 235270 - DNA, 240 bp, Klebsiella pneumoniae
atgtgcattaacgtgatcactatgccgagcgtaatctcgtattacttcatgtgggattttgtaggcatcaagaatgttgtaagtttcatcgaaaataacggctatcaaataatcaaaatcgacagcttcatagttacgcaatgcactgagttgccgggaaggattatccgatgtgactctcctcgctttgatctgcactttcttgccatcagtgtcaatggcatctgcaccagcagatga

SEQ ID NO: 235271 - DNA, 558 bp, Klebsiella pneumoniae
atgctagtgactaagctcgctgacgtgagattggattcaaaatgtctcatatggagcgtggccttacagtggtcaaaattgcacattcagtgcatgaaaaaatccctgagaatacagtttggcgagcgggtaaaagaactgcgcattgccaccggattgagccaggaagcgtttgctgatcggtgtgggttcgcacgtagctatatgagccgcattgaacgcggtggttctaatgcgtctctggatgcgattgaggtgctggctaaagctctcagtgttgagccgtggcggttgttagcgcctaaatcatctgaaaataatgatctagatctgttagttccatacgcggccgatggttcgtgttttcaccccggtttggcgagcacccgtgatggttcgtttggcgtaggtgataaagcggctcagaagcgttttgcctcattttccgaagcacttgagtatctccgtagcatggagacggcaaaatggcgtagacccaatgccagtggtaattggggcattgtttcggcagtgcggtgggacaaactgagaaagtga

SEQ ID NO: 235272 - DNA, 216 bp, Klebsiella pneumoniae
atggacaagaaagcgacgtttcgccatgtgtggcaggagagtgaagcgcagccggtattcaacacctacctctggcatgacgagaacaaacgaactattcaaatgttcggacaacaggctaaggcaattaatagcctggggatgctaacaccacttcaatatttctgtatttttaacgccagcaccggggaagtcatcgcggcttcgtttgagtga

SEQ ID NO: 235273 - DNA, 849 bp, Klebsiella pneumoniae; identical to SEQ ID NO: 80969

SEQ ID NO: 235274 - DNA, 561 bp, Klebsiella pneumoniae
atggcgattttcggctacgggcgtgtctctactgctcagcaggatacggagaaccagaggttggagcttgagcaagctggttggacgtttgacttttggtttactgatgtcgttagcggtaaaacccctgctatgcagcgcaaagcattctcagagttgctgggcaaaatcagggacgatgaaacgctggttgtagccaaacttgaccgtttggggcgtgatgctattgatgtgcttcaaacggtccgggtgctatctgatcgcggcatcagggtgatagtccaccagcttgggaatactgatctcacctccgctgccgggaagctgttattgtcaatgctggcggctgtagctgagatggagcgagatttgctgattgagcgcactcaggcggggttaacgcgggctaaagctgaaggcaggaagttgggaagaccctttaaaattgcaccagaagctcgtggagcgattgtagcgaaaaagaatagcggaaccagtgtcagcgcgttagcgcgcgaatatggcgtttccagagcgactatagcggctattgtcgattga

SEQ ID NO: 235275 - DNA, 501 bp, Klebsiella pneumoniae
atgaagcgtaggcactggataagcatcgaaacacacaagaagttctatagggctcgcagtgagtttgcggactggacggacagggagtggaaacacccggtttcctgctttcttttgcaggtctggggattcttgatgtttgttattcttggactggcctctctgcttttgggtgttggttcacataaaaatgccttcccggaattatatcagaacgatgaaaagcgcagaccaattcgctttaagtattccttgacctcattcgtagagggtaagggctggattttgtttgtagtgttcgcacttttgttcgtctcagtcgccgatgtattcaacccattctatttaacatcgtcctttatttattacgtaatcaatggggtagcactatttgctgggtggtggggtggggtatttgtttatttaaggttagttagttggatgagagaacgcaccatttggctatcagaatggcagcgtagatgccctgatgacaagtag

SEQ ID NO: 235276 - DNA, 573 bp, Klebsiella pneumoniae
atgcccgtatccagttattaccaagcccaaccggatggttatgtgcgctttgattggcatggcaattccatagaaggcgagtttttcagctatgtggagtgtggtcgagatatcgatcccaaatggggttacatccgaccatttgatagagtcaccagacagcaactcattgataatttacaggcaactcacggtatcgacctccagacattcacctcgcaaggcaacctgatcacctgtgatgcttttgtcacccacaaaaatttgcaggcagcacaccaggttgttgtagagtcgtttgatttcgttgatgagtctgagcttacaactgaaagagaacgcatcggtaactgccgggtcgatttactacgacgccaatacattgtcggcagcaaccttaaagagcccaaagagtctttggacaacctcaatgcagagtttcttaaatgggtaacacctttctacacgccgttgcgttacgagcggaaatggttaaccaagcatcgtaaagggttattacgttttggcgcactcgttgctgtcgcagttatggcctatatccactatggctga

SEQ ID NO: 235277 - DNA, 333 bp, Klebsiella pneumoniae
ttgagaaccgtcgaaatactgcaatacaccttacgcaaaggcaccggtgccgcttttcatgccatcatgcaggaaatcagtgttcccctacaccaaggacacgggatcgatgtcgtgtcgtttggtaactcgcttcatgacccggattgctactacctgattcgcgcctttgacagccctgaaagtatggctgcggttctcgatgctttttacgcaagcgctgactggcgcaacggcccacgtgaagacatcattggcagcatagaaaccagcattaaaacagtgataaatctaccaccggaaagcgtggaagggctgcgggtgcaatcgtag

SEQ ID NO: 235278 - DNA, 1953 bp, Klebsiella pneumoniae
atggcgcagcgtgataatctctatcgacgtccaagcggtatctatgttctgcggatcaccgttccggttcgttatcgcgccctgatagggcagcgtgaaattcatgcatctacccgcacaacccaccttgcaaatgccagagctattgccgcgcgtttgctggagaagtggtatgcgtctctggaagagttcaggcaagtggacaaagagaaaatcaggggcaatgccccattgttgactggcgcaggtaaaatcagcctggcgttgttttgcgattcatttggggttggggctgagactgtcgtccaacatcttctggcagccaatgtgccgctgtatgcccttgtgtctaaccagcgtggctttctgattgatgatttcagcacgcttgagcgtgatcctgatacgcatgggttcgttttgaataacattgcgtatgacggtgctgaggctgcggtaaacggctatatgcagctttaccagccgcagtttgcccttgttgaattgctgaacaggcgagaggttgaggttacggcattcagggctaacaacggcaatcctctttccctctggttgttggatttacccggggtgacgctgaatgcaagttctttgttcatcaacaacgtgcaagctgaaaaactgcgtagcgcctgggataaggcgcttacgaaatcggagccaacattaagcgctctgccgtgtgctccggcgggtgtaacaccagcgattcctgcgaccgctaccatcaacccgtattgcaacccgacatatgcgagcatgacggtttcagcattgctgaaagcgtttttggtctataaaaatacgggcgatattaagctagccagcgaggggaaaattcgttccagaattgaacacttcgtggagataatgggcgatttaactctaggcgaactgaatcgtgacgttgtgaaagattacgtcaccaaaatgcagaatatgcccggtaatctgtatttgatgcggcgaaaatacaagatttcagatacgcaaaagctaattgaaatagcgctagctgatggtcagccagttatgagccgagatgctattggcaggcatattgagtcactgggttcgatgctcaaatgggctaagagtgaacgttacctttttgataaccctgctgagaatgtgttggctcagcgtcgtgtgatggtgcgtgagcaggatcgccgcgacctcttcaccgacgatgaactagagcaaattttctcggctgactggtttaagaaaggcgcgggaaagcccaatcaatacggacgttatacgagcttccgcccgtttcactactggttgcctctgttggcattatatgtgggcgggcgcatcaatgagctttgtcagctttatctgacggatattcgcgaagataaaaacggggttgcctatattgattttaaccttgatgcaccggataaggtgatggatgaagaagcgcaggctggtggcgataaatcattaaagacggtgaatgcgatccgtcaggttccaattcatccgcgacttatcgaactagggctgctggagtatgtagatgcattgaaagctgccgggtatgatcgtcttttccctgagttgaagcacaacaaaatcaaaggatatcgtgccgccgcatcaaaatggtttaacgaaaactactttggcaaagtcctcggttttacccgtgacggtaagaaaacgttccattcgctgcggcatactttcatcaacgccgtagacaagtttgagatcaacgaacgcacgattgcgcagcttgttggacatgttcggggcagcaccaccgcgatgacaacctatcgtaaggatgctgatgtgggagagcaattgggcgtgatctcgcagcttcgctacagtttgcctgatattgcgcagttcgactcgcaagcgggtattaaggcggtcatcgacgcacggcgcaggcataaatcatag

SEQ ID NO: 235279 - DNA, 1467 bp, Klebsiella pneumoniae
atgagtattcgtcattgtgtcgctgtcgatttaggcgcctccagcgggcgggtgatgctcgccagctatcagcccgggccgcgcgccctgacgctgcgcgaaattcatcgcttcaccaatagtctgcagaaagtagacggcttcgactgctgggatgtagatagcctggaaggcgagatccgccgcgggctggagaaagtgtgtgagcagggcattctgatagacagtatcggcatcgatacctggggggtagattatgtcctgctggataagcagggtcagcgcgtcgggctgccgatttcctaccgtgacgaccgcacccagggcctgctgcgtcacgctgaagcgcagctgggccgggcggaaatctatcgccgcagcggcattcagtttttgccgtttaacacgctttatcagctgcgcgctctggtggagcagcagccggagctggtcagtcaggctgcccatgccctgctgatccccgactatttcagcttccgcctgaccggcaatctgaactgggaatataccaacgccaccaccacccagctggtcaatattaacagcgatagctgggatgagacgctgctgaactggaccggcgcgccgttggcgtggttcggaaagccgacccaccccggcaatgtgataggccactggatctgcccgcagggtaaccgaattccggtagtcgctgtcgccagccacgacaccgccagcgcggtgatcgcctccccgctggccgaccgccatgccgcctatctctcctccggcacctggtcgctgatggggtttgaaagcctgacgccgtacacctgcgacgcggcgctgcaggccaatatcaccaacgaaggcggagccgaaggccgctatcgggtgctgaaaaatatcatgggcctgtggctgctgcagcgggtgctaaaagagcaaaacgtcagcgacctgcaggggctgatcgcccgcaccgccgcgctaccggcgtgccgcttcataattgactgcaacgatgaccgctttatcaacccggccagtatgagcgccgagatccaggccgcctgtcgcgacgccgggcagccggttcctgaaagcgatgccgaactggcgcgctgcattttcgacagcctggcgctgctctacgcccgggtgcttaacgagctggcggcgctgcgcggccaccccttcagccagctgcatatcgtcggcggcggctgtcagaacacgctgctcaaccagctgtgcgctgacgcctgcgggatcgccgtcgtggccggcccgatagaggcctccaccctcggcaatatcggcatccagttaatgaccctcgacgagctggccaatgtcgatgagtttcgtcaggtagtgcgcggcaacgcggcgctcaccacttttacccccaatcctgatagtgaaattgcccgtttcgtggcgcagtttcagccacaacagaccaaggagctttgcgcatga

SEQ ID NO: 235280 - DNA, 270 bp, Klebsiella pneumoniae
atgaaccacgcgattacgatgggtattttttggcatttgataggggccgccagtgccgcctgtttctatgccccgttcaagaaagtaaaacactggtcgtgggaaaccatgtggtcggtcggggggatcgtctcctggctgattctgccctgggccatcagcgccacgctgttacccgacttctgggcctactaccgctcttttagcgcctccacgctgctgccggtctttctgttcggcgccatgtggggcattggtaatatcaactaa

SEQ ID NO: 235281 - DNA, 747 bp, Klebsiella pneumoniae
atgccctgtacgaaatcgcctccatgcgcctgttttgcccgattatccctggatagcgccctgccggatcgcaccaccatcatgaatttccgccacctgctcgagcagcatcaactggcccgtcaattgttcaagaccatcaatcgctggctggccgaagcaggcgtcatgatgacccaaggcactttggtggatgccaccatcattgaggcacccagctctaccaagaacaaagagcagcaacgcgatccggagatgcatcagaccaagaaaggcaatcagtggcactttggcatgaaggcccacattggtgtcgatgccaagagtggcctgacccacagcctagtcaccaccgcggccaacgagcatgacctcaatcagctgggtaatctgcttcatggagaggagcaatttgtctcagccgatgccggctaccaaggagcgccacagcgcgaggagctggccgaggtggatgtggactggctgatcgccgagcgtcccggcagggtaaaaaccttgaagcagcatccgcgcaagaacaaaacggccatcaacatcgaatacatgaaagccagcatccgtgccagggtggagcacccgtttcgcatcatcaagcggcagttcggcttcgtgaaagccagatacaaggggctgctgaaaaacgataaccaactggcgatgttattcaccctggccaacctgtttcgggtggaccaaatgatacgtcagtgggagagatctcagtaa

SEQ ID NO: 235282 - DNA, 141 bp, Klebsiella pneumoniae; identical to SEQ ID NO: 36145

SEQ ID NO: 235283 - DNA, 144 bp, Klebsiella pneumoniae
atgaaaacagcggtatgggtggtggtgtatttcgcgatgtgttttctgcttttcacaggatggatgttcgcttttgcgcagtatgcgccctataacgggcaggaacacgcgttttctctgacgtatctgggctttgttgaataa

SEQ ID NO: 235284 - DNA, 567 bp, Klebsiella pneumoniae
atgactcaggtgcgccgaccatcgccgctgcagcggcgggtgctgattgtgctggccgccctcgatgcgaaacgtccggggccggtggcgacgcgggatatcgagcgggtgctggagcagggcggggacgccccggtgtacgggccgaacctgcgcgcctcctgccggcgcatggaggccgcgggctggctgcgcaccctgcgcgccccgaacctgcagctggccgtcgagctgacggaggacggtcgcggcattgcagaaccgctcttccaggcagaacgcgaggctgaaacggcacgaaaacgactgacagacgtccggcgtctgccgttacgccagacggctgccggtgacgcggtggagctgcagctggatgacggccattacaccatcagggaagcggcctacgtgatccgtctggacggtaccacctgcctgcagctgacggatgccggcggcatacgccggataaaagagggcgatcccctgcaggtggccagctggtatcaggcctgttttgatgcaggcctgccggtcaccgtgcaggtgaatgagagccgggactga

SEQ ID NO: 235285 - DNA, 330 bp, Klebsiella pneumoniae
atgccgatcatagcaccaattccccgtgacgaacgacgcctgatgcagaaagctatccataaaacgcgtgataaaaattatgcccgcagactgaccgccatgctgatgttgcaccggggcgagcgcgtcagtcatgtggccagaacactctgctgtgcacgctcatcgattggtcgctggattaactggttcactctgtctggtgctgaaggcctgaagtcattaccgtcaggacgtggcaggcgctggccgttcgaacatatttgcgcattgctgcgtgagcttgtgaagcattctcccggcgatttcggttatcagcgttcccgctag

SEQ ID NO: 235286 - DNA, 552 bp, Klebsiella pneumoniae
atggtcgctatccatgaagcactggcgaaatgcagtgcggaaaatcccgtgttttacgaagatgaagtggatattcatctcaacccgaaaatcggtgctgactggcagttacgcgggcagcaaaaacgtgttgtcacaccgggccagaatgaaaagtactatcttgccggtgcgctgcacagcggtacgggaaaagtcagctacgtaggtggaaacagtaaaggttcatgtttatttatcagactgttaaaacatcttaaggcgacataccggcgggcaaaaacgattacgctcattgtcgataactacattatccacaaaagtcgtgaaacgttgcgctggctgaaagcaaaccagaagttcagggtcatttatcagccggtttactcgccatgggtcaatcatgtcgaacggttgtggcaggcgcttcatgagacaataacccgaaatcaccagtgccgttcaatgtggcatctgttgaaaaaggttcatcactttatggataccgtcagcccattccccggtggaaaacacgggctggctaaagtgtag

SEQ ID NO: 235287 - DNA, 525 bp, Klebsiella pneumoniae
atgatactcagaaacgttattgtgggcctcatacttggtgttttagcttacattgcatctgtttacataggggggcaaatcgttggctcatactcagggctatctgatctttacagaaatagtatgagaggctatttcttttccgcatttttaggtatatcgtctttccttttgtctttattaacctttgtcgttatcaacctcaaagaaaaaatgtttgactcagaagattatagaaaaatctatataaagcataatcagttgaatgctggagatgagataaagaaatataacctatacaaaccattagctgtaattactacaatgctagtattttcaatttcatgtagtatatctacttcaatattgcaatttaccctagggttatctagcaactactggatattgatcatgccaacattgactccgttcatttccatttcatttatggtgctctcgctttatcaaatgtcgcaattaattttccaatggctgcgttctgaagatgttatcaaaatatcttga

SEQ ID NO: 235288 - DNA, 876 bp, Klebsiella pneumoniae
atgaaggtttactgcacaccggtgaaggttgcttgcaccagcggacgatttaccgcagcttcttttttgtctgaaagtgcaaaaaattcaataatagacatggattattctgattctgacaagagtgtctactttcgtttttttgaagactctgatgcattttcctgtgtaatattgacaataaaaaaatcaaaatcttacgtctctgcaaacttagtaaataaggatttctccttaataacaacaggcactggggcaaattcaattagcgaagctaacatagccatagtcaataaacataatttaaagggaatatatatacataatgaagggactatgttgcttggcgcttttgatagtaaactcagagcgtattactatcgtgtgctaagggataaattaacatcaaaaaaaagagatgagaggtttgttattgagcgcctagttgatagttcaagcctcatggacaaaatcaataagtactcttttgtagatgaaattaatgctacttttgttaactctactaccgcagcaagatacttaaactcctcagtttataataaaacaaaaagcgttagaataactatgagaacaaataacttgtctataaaaacaaaagctgagaaagatgatttggctagttatctaactagtttaatccaaacgcaggcgcaaggtataagttttaaagggaaaaattcaataaatgtagctggggaaacggtaggggtaattgataaggctaatagcatcgaaacgttagagcatgatgattatatgactatgctgaatggtatgaagttaagcgcctttttgagtagtcaattatacactgacatgaaaaaattaatcatgtcacacaatcttctaaaatga

SEQ ID NO: 235289 - DNA, 1047 bp, Klebsiella pneumoniae
atgagtcatgcaaaaaataacagaaacagacatgaatacgtcatcaacaaactacccatcagcgtaggatcggatggctttgataaacaaaatagctatgtaatgaaaaattatataacagaaaattctttatgcagtatttacgggccgagtggatcttataaaagctttcttgctatatcgtgggcgtgccatatcgcaaccggtatagagtggtctggtaatagagtgaatccgggtgttgtgatttatattgtcggtgagggtggtattggggttagccgaagagtaaaagcatgggaaaatatctataataaaaaagtgagtaaccttatattagttaaccgaccggtgtttcctgccgatccttcagaacggcgtgatttactgagtgggataaaatacattgaagggaaatgccgattacctgtcagattgattatttttgatacgctagcacgttgttatggcaatctggatgaaaataactcgcaagatatgggccgtctaattgttggatgtgatgccatcaaaaatggtacatcagccagtgtccttcttgtacatcattcgggtaaagatgaaacgaaaggtgccagaggttcaagttcattaaaagcggcactggatgttgaatttaatgtgaaaaaagataaagaaaatcaatcgctgattttgtcctgtaccaaaatgaaagacgcggaagaaccaaagtctcatgcttataaattacatgaatcagagttgtttatagatagtgacggcgaaaggatttcttctctggcggtcattgatcatgctcgaaaagcaataaacctataccctgaattatcacatgtttcaaacctgactgataatcataaaactgtttgggaaatgattcataaaattttttcagatgctgggagatgtactaaaaaaatgcttcgtgatgagttgaagcaacagggtattgagattaagcactttcatcgatgggttaaaaaatttattgatgatgggatgttgctggaacatggtgaagaactactgctcgtaagaaagtga

SEQ ID NO: 235290 - DNA, 351 bp, Klebsiella pneumoniae
atgtggaccgtacttttttgccaacgctttgatgattggctaagcgaacaggatgatgcgcttcaggaaaaagtgctggcggatttgggcaagttacagatgtatcgccctgagttgcccagaccctatgcggatacgctcaaaggctcgcgatacaagaatatgaaggagctgcgtgttcagttttccgggcagccgatacgtgcattttatgcctttgacccgatacgccgggcgattgtgccttatgccggggataagagcaatgacaaacgattttatgagaaactgatgcgtattgctgaagatgagtttgccgcgcacctgaaaaatctggagataaaccaatga

SEQ ID NO: 235291 - DNA, 3522 bp, Klebsiella pneumoniae
ttgaccacctcgatcccccctttatcagcgaactttgcttttttggaagaatatgatccgctgtttgtgcagataaccacaacggctgagcaggtgtttgccagcgacccgaacaccacgctgatgaaactgcgccaatttggtgaagtgctcgctcagaatattgctgtgcggttaaatattagtcttgaagataatcccagccaacaagaactactttatcgactggacagagagctacagctcgaccccgccattcgtcagctgtttcataccttacgtatcgaagggaataaagccacccatcagtttcagaccaaacaccgggaagcgatggatgccttacgcatcgcccgtgctttagcgatttggtttcatcaaacctttggcaacgccgtaagcgggtttaatcccggtccctttaccgcgccccatgaccctagtacccagttaacccagtcccagcttgccattgaaaaactgaaacagacgttgctggccaccaatcaaaaactggaaagcagcgaacagctacaggcgttactcaagcagcagaaagaagagtatgcccaactggccgaagcgatggacaaggaagcgcgggaacagcaaaccctgttggaaatcaatcagcaagatttactgcgcctgcaaaaggagtatgacgctaagttaaaggccctgcaggaacagcttgcccaacaggcgcaacaggtggtcactgaccagcgtaaagcgtttaatcgtaagtccagttcagcgcgtaagcagttgatgaccgaagagctgacacgtattctgattgaccaacagctgaatgagtggggctggctggcagattctgaggaactgacctaccaaaaaggtgcccggccagaaaaaggggttaataaagccattgcagaatggcccacctcactgaagggtgagcgcggtagagccgattacgttttattttgcgggcttatccccatcgcgacagtggaagcgaaaaagaaaaatgaaaacgtcgccgggaaaattccccaagctgagcgctatagcaaaggctttcagtttgatgcctcattaacgcccgcctggaaagaggaggggttaacagcaggttgggatgatggtaccggagagatgttccaaatcccctttgtattctcctgcaatggacgcccttatattaagcagtcggcagagttttcaggaacctggttccgggatgtccgctccccggataatacccgctatccgttagaaaactttattacccctgaggggctgatagatcgtctccatcgcagccgtgctgaagctgaagccaaactgcataatgaaccttttggctaccttgggctacgtgattatcaggaaaaagcggttaaagcggtggagtcggccctggaggacggggcacgagaagcgctattggccatggccaccggcaccggtaaaacccgcaccattattggtctgatctatcgttttttaaaagcagagcgctttaaacgtattctgtttctggttgaccgttcagccctcggggaacaggctcaggatgcctttaaagaggcttcattagagcagaaccagactctgtcgcagatctacaatattgctgagctaggagatatggcggctgaagcggagacccgtgttcaggtggccacggtgcaggcgatggtcagtcgtatctatcgttcaggtaatccgcctgcggtggatacctttgactgcattattatcgatgaggcgcaccggggatataccctcgatcaggagatgactgagggcgagctgactatccgtgataatgctcaatatctctccagctatcgtcgggtactggactactttgatgcggtaaaaattggcttaacggctacgccagccaagcataccagcgagatttttggtcatccggtctatacctattcttaccgcgaagcggtggcggaagactggctcatcgaccatgaacctccgattcgctataccacattgctcagtaagcatggcattcactttgagagaggggatgaggtcagtgcgattgacaccgaaaccggtgaggtggataccagtgaactggaagatgaactcgattttgatatcgaggcctttaaccgccgagtgattaccgaagagtttaaccgggtgatttgtgaagagctggcgaaagagatcgatcctgccgggaatgaaaagacgctgattttctgcgccaccgatgcccatgcggatatggttaaacgcttactggatactgcgatgggcgatgtccatcctgattttaatcaggccgcgatacaaaaaatcaccggtaaaagtgatcaggtgagtaaactgattaaacgctttaaaaatgaacgttatccgagtattgccattacggttgaccttctgaccaccgggattgatgtcccgcctatcacgcatttggtgtttttgcggcgcgtgaagtcccgcatcctctatgagcagatgattggccgggcaacacggcgctgtgatgaaatcggtaaaaccgtattctggatccacgatccggtagatctctatgccacgctgcaagatgtcaatacgatgaaaccgctggtcaaaaatgccggagtcagtattgaacagctggttgcagagctcgccgatgatgatgtgctggccaccgctcttaacatgccgggggacagcgccaaggaaacacaagcggatagcctgcttaatcacctgagccagaaagtgatgcgggtgctgcgtaaagccgaaagtaaagccgacaggcagccggaggtgcgtgaaaagttaaacgagctggaagccttatggggagttgagccgaaaaatctgcatcagcatctgcataaaatcggcccgcaacaagcctccgtgtttctaaaacagcaccgcaatctgattacacagctggaagatgtaggggcactgctgggcagtgaataccgcccggtgatctctgaccataaagatgagctgattagtagagagcaaaactatgggcgctatcaaaaaccggcggactatctgcagagttttagcgagtttatcaaaaataacctcaaccaatccgcagccttatcggtggtggtgaatcgcccgcgcgatctgacgcggcagcagttgaaagagatccgcttattactggatgaggcgggttacagtgaaaccactctgcgttctgctatccgcacggagagcaatcaggatattgccgccaccattatcggccatattcgtcaggctgctttgggtgaatctctggtgccgtttgaagagcgcgttaagcaggcactggatggcatttatgcccagcataactggaatactgtgcagaaaaagtggctggttcgtctggctaagcaactggtacatgaggtggtgctggataaaaatgtggttaaccagtctttctcaaacattgggggctccaaaggactcaataaggtactggatgaccagttagacagtattctcgagcaaataaacgacaccttatgggctccaaaaaccgcctga

SEQ ID NO: 235292 - DNA, 1626 bp, Klebsiella pneumoniae
atgagcaataataacgaaatcgtccagaaactctggaacctgtgtgatgtgctgcgtgatgacggtattaactacagcgactatgtcactgagctggtattactgctgtttatcaagatggtgcatgagaacaccgaagctgaaacgctggataaacacaccttgccagaaggctgccgctggaccgatttaaacgccaaatccggtattaacctgctgaatgattacaaacaaattctgctgaaactctcaaccggtaaagatgccgaaggcaacctggtacatgccgacccactgattaccgcaatctatgccgatgcccagactcgcctgcgtgagccgcgccacctggagcagctgatccgctccctagaccaaatcgactggtttagtgtccagaaagatgggctgggtgatttatatgaaggtctgctggaaaagaacgccggtgaaaccaagtctggagccgggcagtactttaccccgcgtgtactgattaatagcatggttaactgcatcaaaccccagccgggggaagtggtgcaagacccggcggcaggcaccgccggtttcttaatcgctgccgaccagtatattaagtctcataccgatgatctctatgatttgaccgccaaagaacagcattttcagaaaaacaaagcctttgtcggtgttgaactggtgccctcaacccgccgtctggcgctgatgaactgcctgctgcacggtatggaaggggacgatcaaggggtagtccatcagggcaatgccctggggatggctggtcaggcgctggcgaaagccgatgttattatggcgaacccgccttttggtaccgcaaaagggggcgaagccagtattacccgggacgacctcacctatcctaccagtaataagcagcttgccttcttacaacatatctatcgtaatttaaaaccgggcggtcgcgctgccgtggtcttgccggataacgtcttatttgaggctggggtgggcaccgatgtgcgtcgggacctgatgaataagtgtaacctgcataccatcctgcgcttacctaccgggattttttacgcccaaggcgtaaaaactaacgtactgtttttcaccaaaggtaccgaggcggataaatatcaggaagagaactgtacgcaaaatatctgggtctatgacctgcgcaccaatatgccgagctttggcaagcgtaccccttttaatgaaaaccatttaaaaccttttgaaggcgttttcggtgactcacccaacggtaacagcccacgtcaggaaggggagtggagctttaacgctgaagacattgaggcccctgatacggctgaaaatgtcaatgtggccgaacggctcacaaccagccgctggcgggtctttacccgggagtggatccgcgataccaaaggtgattcgctggatatctcctggctgcgggataatagcagcgtcgatgctgccagcctgccagagccagccgtattagccggagaagccatgagtgaactggtacaggcgctaggggagctggatgcattgatgcgggagttaggggcaggggaagaagcggatgcgcagagcatgttgttacatcaaatgatgggcggaagtagctatgaatga

SEQ ID NO: 235293 - DNA, 1290 bp, Klebsiella pneumoniae
atgaatgatttatctttcccaaatatatggctctcaaggaaagctcttgattgttttatacaaatatcaactaataatagaaatgttaaaactaaagattgcaagtctgagggtttatatcctgtcatcgaccaaggacaacagtttatctgtggttatatagatgatgaaagtaaagtgattcaggtctcaaacccactttgtgtgtttggtgaccatactagaatcataaagtgggttacccaagactttgtacctggggctgatggaacaaaaattctagaagcagagaaatttatttttccaaaatatggttattacgctctcagatttatcgatattccagataaaggttattcgcgtcattttaagtatttaagggaattagagatacctatctcctccttggccgaacaaaaaatcatcgccgataaactcgatgaccttttggcccgcgtggagagtattaaaacccggctggaaaatatccctgaaattttaaaaaaatttaggcagtcggtgttgagtacagagtttgattatgaaatagatgatttttcttcgttgaaaaacatggagttaaaagatatttgccgtagtatttctgatggggatcatcaagctcctccaaaatcaaattctgggataccttttctagtaatttctgatgttaataaagggtttgttgattttgataatgcagttagacgagttccactggaatattatgataatttgaaagatattagaaagccagatgaaaaagacattctttatactgttacaggaagttttggtattcctgttttaatcacagataatgctaaattttgctttcagaggcatatagctattattaaaccaaatcatgaattgattttttataaatatctatatttttatttaaaatcacctgaagtgtttaaatatgctcagagagttgcaacaggcacagcacaaaaaacagtgtctttatcaaatctcagaaagtttaaaattaggttgccttcaatttttttacaaaaaaaagttgtgagaaagatagaagcgctatttttgtacgccgatacaattgaaaaaaaatctatagaggcaatgaaaaatattaatcaactaacccaatccatcctcgccaaagcctttcgtggtgaattaaccgcccaatggcgcgaggaaaaccctgagttgattagtgggcttaatagtgcagaagcattactggaaaaaataaccgctgaaaaactggctgctggtacgataaaaaaacgcgctaaaaagacttctcactaa

SEQ ID NO: 235294 - DNA, 918 bp, Klebsiella pneumoniae
atgtcggttcctacctacgataactttattgagcctgtattacgggtattacagcaatcacctgccggtgtcgccgcgaaagaggtttatgagggagcagccaacttactgcatctcgatgatagccagcgcaatgaacttatccccagcggccaaccggtttacaaaaatcgggccggatgggctcacgaccggctcaaacgtgccggcctatcccaaagcctgtcacgcggtaaatggtgcttaacggaagcaggcttcaactggcttaagcaacacccttttcccctaagtaaagcgcaggttgatcatctggcgtttgattttatcaacgtccgactgaccactcctacggatgcggttatgctggatgatgacggtgcaccggacacggtaatttccccgcaaaccagcagcccggatgaccgcttagcggaggctctggcagagatccgtagcgcggtcgccagcgaattactggaaaatttactgcaagtctcaccgaatagctttgaagtaattgtcttagatgtgttgcataagcttggttacggcggccatagagacgatcttcagcgtgtcgggggcaccggcgacggcggtatcgatggcattatttccctggataaacttggtctggaaaaagtctatgtccaggctaaacgctggcaagacaccgtcggcagaccaatactgcagggcttctatggcgcactggcggggcaaaaagccaaacgcggtatctttatcaccacctcaggctttaccgcccatgcggtggaattttcccgatccgttgaaggtttagtgctaattgatggcaaccggctggttaacttgatgatggataatgaagtgggggttacctcacaacagattaaactgcccaaaatcgatatggattattttgagcagtaa

SEQ ID NO: 235295 - DNA, 171 bp, Klebsiella pneumoniae
atggcgttaaaagatatcgaagtcggaacagctatgccagcggacaaacaatataagctgaccgatggcaacggtatgcatcttttcgttcaccctaatggctctaaatatggtgaccccacgcccgtagccacttgtagaggctgtgtgcgggaacgccccgacgattag

SEQ ID NO: 235296 - DNA, 492 bp, Klebsiella pneumoniae; identical to SEQ ID NO: 142944

SEQ ID NO: 235297 - DNA, 867 bp, Klebsiella pneumoniae
gtgagcgaaaataaagaaaaaaaaagaatatttattggttcttcatcagaatccaagagaatagcagatgctgtgtactcatactttgaatacaaacatgacactagaatatggagtgctgtatttgatgcatctactgtgacaataaatgaaataataaaacaagctaatgaaaatgattttgctataatgattcttggcgaggatgacattttatcctcaagaggagaaacttatagttcagctagagacaatgtgattttagagctaggtatattcattggttccttgggtttaagcaattgctttatcgttataccatcaagttcagagcacaaaattaaaatcgcttcagatctatcaggagtaacgcttctaaaatacaactcagcaaaagaaaacccctcagaatctgtactaactgcatgcggagaaattgaaagaaaaatagctacttcaccgaaaaaaaatactcctagagaagtggaaaaagaaataaaaatcaatgatttaaatgatttcaataatattagacacgagctcatttcaaatggatttgaattagatcgggcaagaaaggaatcagaaattttaagtagctctataagaaatgcatttttttccatagtaaaacctgccactaaacatgaaattgacaaatggattcaaggtgctaaatccaattctggattcagtggtgacattagacactataatattttttacactgacaaggaagtaattgtccctcaactatacggtgctgactcaattggattgattgttgaatctggaacgaaaatatatcaatcaggaaatagccacaatacaatctattatatggatggttttagatgtaaccgttaa

SEQ ID NO: 235298 - DNA, 582 bp, Klebsiella pneumoniae
atgagcattattaatacgacaattagtcagcatgccaaacgttggcttaatgatgggtacttatttattgataccgaaactactggattgggtgacgatgcggaaatcgttgaaatctgcattatagataaaaatggttttattatgcttaatacgctaattaaacctactaagcctatccctgatgaggttatcgctattcacggcattaccaatgaaatggttgctcacgctccaacttggaaagatgttcacggtgcagtagccaatttgttctttaattatggcttcgttatttataatgctgattatgatactcgcctgatacgtcaaacagcggaattaaatggattagggactgacggactatcttcatttatagaccactccctgtgcgccatgatgttatatgcggaatatcgtggcgagccggggagatatcacggttataaatggcataagttagtcgatgcagccgcgcatgaaggggttgtggttgaagggcaggcacaccgtgctttagcagattgcaaaatgacattaggtgtcattaaagctttagcgcaaggcggtgcagcatga

SEQ ID NO: 235299 - DNA, 300 bp, Klebsiella pneumoniae
gtggaagcgaaagcgggcggcgggtcggcgaccttgtcgatgggccaggcggctgcccgttttggtctctctctggttcgcgccatgcagggggaaaaaggcgtggtggagtgcgcctacgtggaaggcgacggccactatgcgcgtttcttctcccagccgctgctgctggggaaaaacggcgtggaagagcgacagtctatcggcaaactcagcgcctttgaacagcaggcgctggagggcatgctggacaccctgaagaaagatatcgcgctcggcgaagacttcgtcaacaagtaa

SEQ ID NO: 235300 - DNA, 990 bp, Klebsiella pneumoniae; identical to SEQ ID NO: 227362

SEQ ID NO: 235301 - DNA, 2631 bp, Klebsiella pneumoniae; identical to SEQ ID NO: 227339

SEQ ID NO: 235302 - DNA, 687 bp, Klebsiella pneumoniae
atgagcaccggcagcggccccgcttacccgccagcgttgaggatgagcaccggcagcggcccactttccccgccagcgttgaggataagcaccgtcagcgcccccgtttacccgccagcgttgaggatgagcaccggcagcggccccgcttacccgccagcgttgaggatgagcaccggcagcggcccactttccccgccagcgttgaggatagccaccgtcagcggccccgtttacccgccagcgttgaggatgagcaccggcagcggccccgcttacccgccagcgttgaggatgagcacctgcagcagccccgtttgcccgccagcgttgatgattagcacctgcagcgaccccgcttacccgccagcgttgaggataagcaccgtcagcgcccccgtttgcccgccagcgttgaggataagcaccgtcagcggtcacgtttacccgccagcgttgaggatgagcacagtcagcggatccgtttacccgccagcgttgaggataagcaccgtcagcggtcacgtttacccgccagcgttgaggataagcaccgtcagcgcccccgtttgcccgccagcgttgaggataagcaacggtagcggatccgtttacccgccagcgttgagaatgattcccctccaccgaccccgtttacccgccagctttgacactaccagcgactag

SEQ ID NO: 235303 - DNA, 492 bp, Klebsiella pneumoniae
atgagatgtttagctcatattgctctggtgacggtgatacagttcattgcctgttatctggctgattgggggagtgccgaaacagtttttatcctgtgctttattgtactatggcagggattgtttatatggttgttttctcaaatacgaaaaaaacggcatgtgtcggatgagtttaaattcagtaaaggcgtttggtatataacgatgccagtatcttccttactctctccgttattaagcctgatggtttttatcattggtacactatacgaattaaggcgagttagtggttgcataagcataaaaaaatggggtcaaaatcaactcaaaaaccaatatgatgggagtgaaaagttagacttcgggggcattgaacagcccccaacgacctactataacccttcaaccggataccctatgcatggaggctttgactcagcgggaaatacttttgggactcgttggcaggattattatgacaggcaataa

SEQ ID NO: 235304 - DNA, 321 bp, Klebsiella pneumoniae
atgaacatgcgtaatattaatgttattactgcccgctctgtaccggataaaagcgtatcagatgattttatgcatgctgttctcagtaactgcaccacaagaatcgtacttcctgcaccgaaggaattcagttctgaatcattgccgcacaattttaatatggctgctgtcggtgtgatgaagaagggaatgtcgatgagcttattttcttctccggggcatattgtggttgccggacaatccggtggcggaaaatctgttccggtgaaagaactaatcgacagaattattcagaaatataaggaacccttcgatgaataa

SEQ ID NO: 235305 - DNA, 585 bp, Klebsiella pneumoniae
atggcaaataatatgtcgtcccgtcaggcgtgccatgccgcccggtatgttgtcgcccgggttctgcgaggactgttctggtgtctgaagtacaccgtcattctgccactggccacaatggccctgatggctctgtttgttttatggaaggacaacaccacgccagggcagttactggttcaggaaattgacttcgtaagacaaacagcccctgccgggcagtttcctgtaagagagtgtttgccttctctgcatgatcttccaggagcagaagagaaaatctgccgttaccgtgctgctgatgctgcagattatgtcagggagactgaccggtcactgatgcaactggttaccgcattatgggcaacactggcattgatgtatgtctcactggcagttatctccgggaaatatccggtgctgcccggaaaaatgaaatgtatccggggggtaaccgcagatgaacgtctgacggaagtttatacggaagacgcttccctgccggaaaaaatcaggaaatgccctgtttattttcctgatgacagaacaaacagaaacaacggagataaaaatgaacatgcgtaa

SEQ ID NO: 235306 - DNA, 324 bp, Klebsiella pneumoniae; identical to SEQ ID NO: 227451

SEQ ID NO: 235307 - DNA, 495 bp, Klebsiella pneumoniae
atgataaacatccggatgaccaagttagccattttcccgctggctgtttttcttttaacaacaccgctgacttcaattgccaaaactttctcggcaaaagttgtcagagtaattgatggtgatactgtacaggcttatgacggtgcaataaatacaagaatacggctctatggaattgatgcccctgaaagtaagcaagccttcgggcagaaggctaagcagacaatgatccagttggtcgcaaaccagattgtaaatattcaggaccatgggcaggacgcctatggacgtatgcttggtacaatctatcttaaaagccaggatattaattccatcatggttgcagaaggcatggcctgggcatatcgctatcagggtcgattaactgtacctgaatatgggactcttgagcagaacgctcgcaatgcaggtaaaggtctgtggtcggacccgaactcgattgaaccacgtcaatggcgcaaagcgaataaataa

SEQ ID NO: 235308 - DNA, 822 bp, Klebsiella pneumoniae
atgagtgctatagaaaaccaagaaacagttatacaagcagttaatagtttacatccaacaacgttgtttcactttactaaaaatgaagaggcattctatagcattttaacagaactctattttaaacctttccttgcccgtgaacgcatagtcggagtaaaaggaagaagaaatttcgcagtaccaatggtttcattctgtgacatcaagctgtctcagattaaagatcatagtgaaaaatatggtgaatttggatttgggttaacaaaagaatgggctgagaaaaatgatctccatcctgttctatacatgaatcaaggcagtgaattattttcaaagtataataaaagaattagaaaactaaaggatgcgttaattcctctatggtcgaaaaggcatatccctgataataaagagcgtaagtattttgaaagccttaaagaagagtacgctgacctttataatttattacgttatatgaaaaattataaaggaaaattagaaaggacgaacgaaaaacccattgagaattatatctacgctgacgaaaaagaatggagatatgtaccgcatccatttgttggcgatttatggcctagcctaaatttagagcgagtggtggaacctaaccagaaggccgtcttaagtaaaaagttctctgaatttggtattagtttttctttcgatgacattaaatatatacttgttcctgatgatagccacatttccaaattgataacttgccttatgagtataagaaattatgatccttatataataagtaaagttttaacgatggataaggtaaaacaagatttttaa

SEQ ID NO: 235309 - DNA, 129 bp, Klebsiella pneumoniae
atgaaaggtcaggtcgatatcgaactccaaagattgatacgggcgcggtataacaccgcggtagaaaattggagtgaatggaaatggttagaaatcgggcatggcgtcgtcatcatatatctcggttaa

SEQ ID NO: 235310 - DNA, 4764 bp, Klebsiella pneumoniae
atggtcaaaccaaactgggataactttaaagctaaatttaatgagaatcctcaagataattttgagtggttttgctacttattgttctgtcaagaattcaaaatacccgcaggtatatttagatataagaatcaatctggtatcgaaactaatccaataaccaaagataatgaacttatcggttggcaatctaaattctatgacacaaaattgtcggataacaaagctgatcttatagaaatgattgggaaaagcaaaaaggcttatccaggattaagtaaaatcattttctatactaatcaagagtgggggcaggggagaaagtctcatgaacctgaagacgataagaacgctgataattattttgaaactgtcggaaatagtaacgatcccaaaataaaaattgaagttgatcagaaagcatatgagtcgggtatcgaaatagtatggagagttgctagtttttttgaatcaccgtttgtaatagttgagaatgaaaagattgcaaaacatttcttctcccttaatgaaagcatctttgatttattagaagaaaagcgcaagcacacagaaaatgttttatatgaaattcaaaccaatatagagttcaaagacagaagtattgaaattgacagacgacattgcattgaacttctacatgagaatctagttcagaaaaaaattgtcatcgtcagcggagaaggtggggttggaaaaacagcagttatcaaaaaaatttatgaagctgaaaaacaatgcactcctttctatgtctttaaggctagtgagtttaaaaaagacagcattaatgagctattcggtgcgcatggcttagccgatttctctaatgctcatcaagacgaattacgtaaagtcatagtcgtagattctgctgaaaagcttttagaattgaccaatatcgatccttttaaagaattcctgactgttttaataaaggataaatggcaggttattttcacaacccgtaacaactacttggcagatctgaactatgctttcatagatatttataagataactcctgggaacttagtaataaagaaccttgaacgcgacgagctaatagagttatctgataataatggatttagccttcctcaagatgttcgattattagaactaatcaaaaatccattttatctaagtgaatatctgaggttctataccggtgaaagcatcaattatgcgagcttcaaagaaaagctctggaataagattgtcgtcaaaaataaaccttctcgggagcagtgtttcttagcgactgcttttcagcgggctagtgagggccaattttttgtctctccgacatgtgatactggaattttagatgcgttagttaaagacggaattgtcggctatgaagctgctggttacttcattacacatgatatatatgaggaatgggcattagaaaagaaaatttccgtcgattatatccgtaaagcgaacaataacgagttcttcgaaaagataggagaatcacttcctgttcgccgtagttttcggaattggatatctgaacgattacttttagatgaccagtccataaagccttttatcgcagaaatagtctgtggagaaggaatatcaaaattttggaaagacgagttatgggtagctgtccttctttccgacaattcaggcatattttttaattactttaaacgatatttacttagtagtgaccagaatcttttaaaaagacttactttcttattgaggcttgcttgcaaggacgttgattacgatctgcttaaacagttaggtgtaagtaattcagatctactttccattaaatatgttcttactaagcctaagggaactggttggcagagtgtgatccaatttatccatgaaaatttagatgaaattgggttcagaaatattaattttatacttccagtgattcaagagtggaatcaaagaaacaaagtgggtgaaacgactcgattatctagtttgatagccctaaaatattatcaatggactatagatgaggatgtctatttatccggaagggataatgagaaaaatattctgcatacgattcttcatggggcggccatgattaaacctgaaatggaagagattttagttaaggttctaaaaaataagtggaacgagcacggtaccccatatttcgatcttatgaccttaatccttactgacttagattcacatccggtttgggtatctctcccggaatatgttctacaattggcagatctgttctggtatcggccacttaaagaaaaaggcgaacgttatcaccatatggatattgaagatgagttcggtctatttaggtctcatcatgactattatccagaaagtccatatcagactcctatatattggttactacaatcacagttcaaaaaaacaatagactttattcttgattttacgaacaagacaacgatatgttttgcccactcccgctttgctaaaaacgaaattgaagaagtcgatgtctttattgaagaaggaaagtttataaagcaatatatatgcaatcgtctgtggtgctcatatcgaggaacacaggtctctacctacttactttcatcaattcatatggcattggaaaaaatttttcttgagaattttaaaaatgcagactcgaaagtgttggaaagttggcttctctttttgttgagaaataccaagtcagcttctatctccgcagtagttactagtattgtacttgcattccctgagaagacattcaatgtagctaaagtactattccaaacaaaggatttcttccattttgatatgaatcgaatggttctagacagaacacataaaagttcattaatctccctcagggatggctttggcggtgcagattacagaaactctttgcacgaagaagatagaattaaagcttgcgatgatgtgcatagaaatactcatcttgaaaatcttgccttgcattatcaaattttcagaagtgaaaatgtaacggagaaagatgccatagaaaggcaacaagtgctatgggatattttcgacaaatactataatcagcttccagatgaagctcaagaaactgaagccgataagacgtggaggctctgcttggcaagaatggatcggcgaaagatgaatataactactaaggagaaagatgaagggattgagatatcattcaatcctgagattgacccaaaactaaagcaatatagtgaggaagcaataaagaaaaattccgagcatatgaagtatatgacgctgaagctatgggcaagctataaaagagaaaaggatgaacgttataagaattatggaatgtatgaggacaatccgcaaattgcgatacaagagaccaaagaaataataaacaagcttaatgaggaggaggatgaagatttccgactattaaacagtaatataccagcagacgtttgttctatattactattagagaattttaatcagctgaataatgaagagagagaatactgtaaagatattgttctagcgtattctaaacttccgttgaaggaaggctataattatcaggtgctagatggaacaacctcggcaatttcagccttacctgtgatttatcataattatccagtcgaaagggagactataaaaacaatattacttttgacactgtttaatgaccactctattggaatggcaagtgggcgctactcagtatttcctagtatggtgattcataaattatggctatactattttgatgatatgcagtctctattgtttggttttttgattttaaagccaaaatatgtaatcctttcaagaaaaatcattcatgaaagttatcgtcaagcagactatgacattaaaaaaataaatattaataaggtgtttttaaataactataagcattgcatatcaaatgtcatcgataataaaatatctatagatgatttgggaggtatcgataaagttgatctgcatattttgaacacggctttccaattaattccagttgatactgtcaatattgaacataagcaattggtttccttaattgttaaaagattttctacaagcctattgtcaagtgttcgagaagatagagttgattacgctcttcggcagtctttcttggaaagatttgcctactttacgcttcatgcgcccgtgagcgatattcctgattatataaaaccttttcttgaaggtttcaacggttcagagcctatttcagagttatttaaaaaatttattctcgtcgaagatagattaaatacttacaccaaattttggaaggtttgggatttgttttttgataaagtggttactttgtgcaaggatggagataggtattggtatgtagataaaattataaaaagttacctttttgctgaatctccatggaaagaaaattcaaatggttggcacacatttaaagataacaatagtcaattcttttgcgatgtatctaggactatgggtcattgcccttcaactgtatattctcttgccaaatcattgaataacattgccagttgctatcttaatcaaggtataacctggctttcaggaatattgtcggttaataaaaagttatgggaaaataaattggaaaatgatactgtttattatttggaatgtttggtgaggcggtatatcaacactgagcgtgagagaattagacgaaccaaacagttgaaagaagaggtcttagtaatattagattttttggtagagaaaggatcggttgttggttatatgtcacgggaaaatattctgtga

SEQ ID NO: 235311 - DNA, 2034 bp, Klebsiella pneumoniae; identical to SEQ ID NO: 30687

SEQ ID NO: 235312 - DNA, 1563 bp, Klebsiella pneumoniae
atgatgacgagtaagttcctaccggcattagtgtccgagcgaatctgtgctagggctaatggctacttctttcacttatatgatacatcgtggatattggataaaaatacccacgccactcttgtagatattcaccattacttgtcaggtgaggggctcaatggctgcctacgcacgctagcattttatgcttctactcaatctgctcctcatactctgaacattattatgcggtttcagcacatgctgcgagagactcatgcgagagaaattactgatacggtattgattaattatcgggcgagactattgcctgcgacggaatggtatctggcaactatacgtggctttcttcgaacttggcaccagcttggttatcccggtatcagcaaagatgtgatcagtttgttggatggctggaggctgaagggtaatcgtaagggagatgcggttaagcgtcaggatcctcaagaagggcctctgacggataatgagctgacagcgtttaacgagggggctgttcgggcttatgaaaagagcttaattaccatagcggagttggctttggcacttagcatcagtcatacaggacgacgacccatccagatctcgctgcttcatgcagtcgatgtgctttgcggtaaaaatggaaagggagagccattctatgttttgaatgtgccgcgagccaagcagcgcagcagttcttttcgaataaacttcaagctctttgcgatatcaccagaactatgggtaattctgaacactcaggcaaagaatgcaattgcaatggttgagaatcgtctggggtttgaattgcaggaagatgaccgacagcaaatccctctgtttccagatcttgatgtgttagctaccgtccagtctccttatgaattccgccaactgtttgctaccgacaaactccacattcccgcagcaaagataaccaacacactccagtacatcatagaaaaatctgatatccggtcagaacgtactggtgagctattacatatcaatgctcgtcgttttcgctataccacgggcacacgagctgccaaggaaggatttggcgaattggtgattgcggaactacttgaccatacggatacccaaaacgccggcgtttacatcaagaacattcccgaacatgtgaaaaagcttgatgaggcggttggcttccaactagcaccatacgcccaggcctttgtcggggtacttgtcgattcagagagggacgcgcatcgaggtaacgaccctgccagtcgcattaggaccgagataggccatggtgtaggtacttgtggggagcatggtttttgtggtgccaatgttcctattccttgctacacctgcatgcatttccagccttggctggatggcccccatgaggatgtctatcaggggctgctcaacgagcgtgaacgggtgaaagagataaccggcgatatccagattgctgccatacttgatcgcagcattatcgcggtggcagatgtgatcatgcgttgtgcaaaacgtcgtgaagagcttagtccacagggagcaatcgccaatggctga

SEQ ID NO: 235313 - DNA, 1191 bp, Klebsiella pneumoniae; identical to SEQ ID NO: 30686

SEQ ID NO: 235314 - DNA, 234 bp, Klebsiella pneumoniae; identical to SEQ ID NO: 154037

SEQ ID NO: 235315 - DNA, 1959 bp, Klebsiella pneumoniae
atgcctgtaacgaagtgtgaaccagaaaccacccgcaaagcaagccgtaaatctgtaaaaacgcaggaaactgcactgtctgccctgctggcgcagacggaggaagtgagcgtgccgctggattcactgattaaatcaccgctgaatgtgcgcacggtgccgtattctgcggagtccgtcagtgaactggctgattccattaagggagtcggcctgctgcagaatctggttgttcatgccctgccaggtgaccgttacggtgtcgccgcaggtggtcgccgactggcagcactcaacatgctggcagagcgtgacatcattccggctgactggcctgtccgcgtaaaaattattccgcaggagctggcgactgccgcatcaatgaccgagaacggtcatcgtcgggatatgcaccctgccgaacagattgccggattccgcgcaatggcgcaggaaggcaaaacacctgcacacatcggtgatttgctgggctattcaccccgccacgttcagcgaatgctgaaactggctgaccttgcgcctgtcatcctcgatgcgctggcagaagaccgcatcaccaccgaacactgtcaggcgctggcgctggagaacgacaccgcgcgtcaggtgcaggtgtttgaagccgcctgtcagtcgggatggggcggtaaaccggaagtacagaccattcgtcgtctggtgaccgaaagtgaagtggcggtggctgggaacagtaaattccgcttcgtgggggctgatgccttctcgccagacgaactgcgcaccgatttgttcagcgatgacggggacggttatgtcgaccgcgtggcgctcgatgccgccctgctggaaaaactccaggctgtcgctgaacaccttcgggaagccgaaggctgggaatggtgcgccgggcgcatggagcctgtcggtgagtgccgtgaggatgccggaacataccgctgtctgccggagccggaagcggtgctgacggaggcggaagacgaacgcctgaacgaactgatgacgcgttacgacgcgctggaaaaccagtgtgaggaatccgacctgctggaagcagaaatgaagctgatgcgctgcatggcgaaggtcagagcgtggacgccggagatacgtgccggaagcggtgtggtggtgtcctggcgttatggcaacgtatgtgtccagcgtggtgtgcagttgcgcagtgaagatgacgcgactgacgacgctgaccgcacggaacaggtgcaggagaaagcgtcagtggaggaaatcagcctgccgttgctgacgaaaatgtcctcagagcgcacgctggcagtccaggcggcactcatgcagcagccggacaaatctctggcactgctggcatggacgctctgcctgaatgtgtttggcagcggggcgtacagtaaaccagcacaaatcagcctggaatgtgaacattattcgctgaccagcgatgcgccatcggggaaggaaggtgccgcattcatggcgctgatggcagaaaaatcccgtcttgcagccctgctgccggagggatggtcacgggacatgacgacattcctgtccctcagtcaggaggtgctgttatccctgctcagtttctgcaccgcatgcagccttaacggtgtccagacccgtgagtgtggtcacacgtcacgcagtccgcttgactcgctggaaagcgctatcggattccacatgcgcgactggtggcagccgacaaaagcaaacttcttcggacacctgaaaaagccgcagattatcgcagccctgaatgaggccggactgtccggtgccgcacgggacgcggagaagatgaagaaaggtgatgcggctgaacatgcagagcaccatatgaaagacaaccgctgggttccaggctggatgtgtgcaccacatccacagacagatgccactgaacgcaccgataacctggctgatgccgcctga

SEQ ID NO: 235316 - DNA, 207 bp, Klebsiella pneumoniae; identical to SEQ ID NO: 74992

SEQ ID NO: 235317 - DNA, 1095 bp, Klebsiella pneumoniae
gtggccgttattgtgaacgatatgtcagaagtgaatattgatgctgcgctggtcagggatggcggtgcagagctctcccgtacggatgaaaaactggtagaaatgagtaacggttgtatctgctgcacattgcgggaagatcttctgcttgaagtcaatcgtctggcaaaagaaggacgttttgaccagcttgtcattgagtccaccgggatttcagagcctctgcccgtagctgagacttttacctttgccggtgatgacggtgaaagcctgtcaacagtagcgcgccttgataccatggtgaccgtggtggatgcgttcaattttctgaaagactacggctcggaagacagcattcagtcgcgtggagagtcgctcggtgatggtgatgaaaggagcgttgtagacctgctgatcgatcagattgaattctgcgatgtgctggtcctcaataaagttgatctcatcagtgaagcgcaaaaagacaaactgatggcggttttacgttcgcttaatccacgggccaggatcgttgtttcacagtttgggaaggttccacttgataacgtacttaataccggactgttcgatttcgatcaagccgctcaggcacctggctggcttaaagaattgcggggtgaacatacgccggagacagaagagtatgggatcaccagctttgtatttcgtgcccgccggccttttcatccggctcgtttctggcaggtgatggataatgaactgaatggcgtcgtcagatcgaaggggtacttctggctggccagtcgtcctgagtttgctggctcctggtcgcaggcgggtggagtggcgcgccagggactgggaggcatgtggtgggcaagtgtccctaaagaacgctggccagaggatccggaatcactcaaattcatcatgtctcactggatggatggtattggtgatgcccggcaggaactggtttttattggaatggaaatgaatgaatccgaactgcgcaacaggctggaatctgccctgttaacggataccgaaatggctgaaggacctctgaaatggcgacattaccctgatcctgttgagccgtggttcgattag

SEQ ID NO: 235318 - DNA, 207 bp, Klebsiella pneumoniae
atgatccccaagacttaccagcaatggtaccggtgtatcacagaagaatgtggcattcccctgacgcaggcatttattgcatcccgcctggctgttcttcaggaccctggacaccaggaaaccagacgctttgtctcgttatatggacaatctcatctgaacagtattgtacagtggttcaaaaaagctggggaagaattgttgtaa

SEQ ID NO: 235319 - DNA, 963 bp, Klebsiella pneumoniae
atgcggcgcgtgtcaccgtacgcgatcgtacggggaaatgtatgggaacactattactcaacgaagcagctgactgcattgagatgtgttgccgaccgccggaggtgcgccttgattaatcaacatggaggcagttcgtccctgcgcgagaaccgttgtcatatctggccagtgaagaaggatgatacccaaagtaacgatattgctttttttgaaaaggcattcagggaacagtccagtcgatgggggctgtatgaaattgttctggggtgtcctggagagggcaacatatcgctgtatcagtccgtcaatcagggggctgacgttccgcatattctgattgcggcagggtttcatggagaagaacccgcgggatgctgggggatgctggattttctgcgcgaaggctcccctgaattgtttgataacgtagctgtgagttttttaccgcttgtgaacctgtctggcctgagtgctggctgtcggctcaacagtactggacagaacccaaatcgcggctttaccaatggggcagaggtcgaaccttcagttgaaggaaaagtactgcttaattatgaagcgcttctgaaaaacgcagccagacacggtgtgctctgttgtcacgaggatattcttcgccagcaggcgtatctctacacctttgaacatactgcccgtccaggccattttagcgtagcattacgtgatgagcttgaacgctttttccctgtcatggaaaaagagcgggttgatggctgtgaatgtgaggatggcatcatctttaaccattttgattcgtcatttgaatcctggttgtattcttcaggttccgacgtcgcagcgtgcactgaaacgccgggattgcaaccctttgcaaagcgagcagaggcaaaccgttatttaatcggcgcgtttatctcatccatactggagcgcaacagtatcgggggcgggatgtcatga

SEQ ID NO: 235320 - DNA, 954 bp, Klebsiella pneumoniae
gtgtcacggtgcgcgatcgtaccgggaggtgcatggggacgctgttactcaatgaggcggcagacgctatcaaaatatgttgccagccaccggaggttcaccttgattaagcaaagcagaagcgatatcccccgacgcgagagcggtcgtcacgtctggccggtgaaggaggatgatacccaaagcaacgatatcgatttttataaaacggcgttcagagaacagtccaggcgatgggggctttccgagatcattcttagtaatactggtgatggagaaatatcactctatcagtctgttaatcagggggcagatgttcctcacgtactgattgcggcagggtttcatggagaagaacccgcgggatgttgggggatgctggattttttgcgcgagggctcccctgaattgtttgataacgtagccgtgagttttttaccgcttgtaaacctctctggtctgcgcactggtagccgccttaatagtcttggacagaatccaaaccgaggctttaccaaaggtgcagaagtcgagccttctattgaaggaaaagtactgctcaactatgaaacgcttctgaaaaacgcagcaagtcatggtgtgctctgttgccatgaagatattcttcgtcataaggcgtatctctacactttcgaacatgctactcgcttgggtcatttcagcgtggcattacgtgatgaacttgaacgctttttcccggtcatggaaaaagagcgagttgatggttgtgaatgtgaggatggcattatttttaaccatttcgattcgtcatttgaatcatggttgttttcttcctgttccgacgtcgcagcgtgcactgaaacgccgggattgcaaccctttgcaaaacgagcagaagcaaaccgttatttaatcggcgcgtttatctcatcgatactggagcgcaacagcatcgggagcgggatgtcatga

SEQ ID NO: 235321 - DNA, 426 bp, Klebsiella pneumoniae
atgaactgccattaccttggtacccatttcgacattcatggcggtggttcggacctgatatttccccatcatgaaaatgagattgcccagtccacctccgcaaatgatggcccctacgtaaattactggcttcacaccggcatggtgacggtgaataaagagaagatgtcgaaatcgctgaataacttttttaccctgcgcgatattctgcaccggttcgatgcccagagtgtgcgcttcttcctgctaggcgcacattatcgcaagccgctgaattatagcgaggaaaatattcacattgcgcgcgcctcgctgacacggctctacaccgcatgccagttcgctgacgggtctcgatctgaacagcacgatgcatggcgggccagattctgtgaggcaatggatgatgatttcaatacaccctag

SEQ ID NO: 235322 - DNA, 312 bp, Klebsiella pneumoniae
atgtgcagcagggggatttttaccccggaaatggtggtgagaaagaccagccatgctgtagccgagcgcttccagctcaaagatcgcggctatatcagggaaggctattgggcggacctggtggttatcgatccgttcagtcatcaacagataatccgggaggatgtggcatacaaatgcggatggtctccctttgaaggccggattttgtcaggcggtgcggttgatatgacgctggtaaatggccacgttatctggaatgggcacaccatacagcagaagtacggcctgccactggaattctgtcgctag

SEQ ID NO: 235323 - DNA, 459 bp, Klebsiella pneumoniae
atgaatggtgatagagtttcagagagagacgcgcctttcaacgtctaccagatggataacagcaaaggcgggggaggaaatgaaggtatgctggaaaaattggagaaacgcgtagaaaaactcgaagaagacatatcatctgtcaaactcgatcttgtgcgactgacagagcgttcagagcagtttgtcacaaagactgatttatcagagcttaagggtgatttaaagtccgaaattatcggtcttaagggtgatatcaaggcaggtattgcagagataaaccttaatacctacaaagcgatcaaagagtctcaagagtccacgctcaagatagtccaggagcgtttcgataagcttgatgaaatcgctcgctggaaatggggcaatattatcatccctatcgtgatgggtgtattcggtgctgtagttgcgtacctagtggcaaaagctggtgcttga

SEQ ID NO: 235324 - DNA, 1197 bp, Klebsiella pneumoniae
atgaccagtaaccagttaacagagcagcaaatcgatctgctaatcgaaaatggatacgacattgcacacacactggagaatctcgcagaaaacgaaatcaatagtgactgctttgaggttttcagttattcagaaaatggacgagaaactgagtgggacgggaaaataactgagtttgcacaacgcgccgcaaaagccattcgacaccttacagatgcgacaaccgccttgcaggcagagctacaggaacgccgcaaggctgacagcgagccggttgcgtcggtgaattgcgtaacggcagaacatcgtcgcgttattgaaatgctgctcaccgtttgcggagcggcgttcgagctcgctgatgatagttgccagcaagattttgatggcgaagagtgccatgttgttccagacgacgcatttcagaagctaagtgatgcgctggacgaaattgaaaacactctcccgacagaggataccgacaggccagacgtatttctggtctggtcggcagtaccgagggcagcgctgaaatctattctccacgcgcagccagcgccggtagtgccagatgaaataaattcggcaagtgcgccagaagtattcgaaatagccgctgaagctgagcgtcttggtttgcgcggtacttatgcttcatatgcagttggctggaacgcttgccgcgccgtcatgctcgacaactgcgccaccgtagaatccagaaataatgcgggttgcagtccgaaaaatggattaaagtgcgccaccgtgctccaggctgaatctgtaacgacggctaacaagttgggcaactctccggcaattccgaatggttacgtgatggtgccgaaggaagcgacgctcgacatgctcaaggctggagcaaagcaggagatgaagggtgaagcatttcagtatgtatggcaggccatgctcgcagccgccccgcagtcaaccggcagtgagccggccaccgtgccgggtaaatggattccggtaagcgagcggatgccaccaagtcgtcatgaggttttggtcgggcgttggtggggagagaagccgcggtggtgttgcaaatgggcaacgtatatccctggccaccctgattcgcagagtagcggctggttgatcccaggcgtgtcatggacgccaactcactggatgccgctgccagcagcgccgcaggaggtgaagtga

SEQ ID NO: 235325 - DNA, 531 bp, Klebsiella pneumoniae
atgaaatatccaacggtatcagtgaacggcgtctccgttcgtgtcgatgaccaggggcgctacagcctgaatgacctgcacgcttcggcagtatgtagcggtcaagccaaagagaatcagggaccaagccagtttcttcgctccaaaaaggttaaagattttgttcagactttagccagaatgcaaaaatgcactctggaagaaaatcaaccagttaaggttattaacggtggtttgaatcaaggcgtctgggctctggagatcgtcgctattcgttatgccgcgtggctcagtgctgagtttgaaatccgcgtttatcagacattccagtatcttgtccgtcagggatttgatgccatggcccgcctaaataaaatcgaccatgtgataaacgctgaaacgaaggaagttagtcaatgcgcaagtcgaatgggcaagtggggtgccggaggaagaaagcgcctgcttatggctgcccgcgcccgtgtggtcgatgaggttcagatgtacctcccaggatttgaggcgtga

SEQ ID NO: 235326 - DNA, 144 bp, Klebsiella pneumoniae
atgccaaaacctttgatacaaaggattcagaataacaacgaagtagaaaaggctatcatctatcaagaagacagcctaaattttatccataataactacttaatcgaaagtgatttcatcagatatactattagcgatttttga

SEQ ID NO: 235327 - DNA, 753 bp, Klebsiella pneumoniae
atggcttatcgtgatgatgctgatttagagtttctttcacaatgtacagatgaagatcttaacgacctggtacaatgtcttatctatgataaggatggtaaaactcgttggacagaagagctttcaacaagcgaggcgtacaaaaagtataaaccacaacatagcaagtattggaaggagatagcagctgaaatccagtgctttggcggtaataccttcgccactcttgcgagaggcggaaagggagtattgtataaagaagttttgtgtgatgtctgtgataagcttaaagtgaattataataaaaagtcatcagttgatgtaattgaatcaaatttactcatgactatcatgacgaaagcattagaatctatgtctcaagatgaaattaaagaattaggtgaaggccttggagttaaaaatgttgcaggtttaaccgctaagacattaaccgcagcttttcaagccatatttcgggccggtggtttcaaatcttatcaattaactgcaattatagttaaccaagttttgaaagttctgattggcagaggtttgagctttgcagcagctggaactttgatgagaacattatcgatacttacaggcccggtaggttggggtatcacaggcctttggactgtagttgatatcgggagcactgcgtatagagttaccattccgtctgtgttgcaagtggcttttttacgctcaaaaatcgctaatagtatatctgatgaaatcactttcgattaa

SEQ ID NO: 235328 - DNA, 1200 bp, Klebsiella pneumoniae
atgaagggtatgcagaagatcaaaaggggtaagaacttctcaggtgttgttcattatgcattgaaaccgggagcacgccacaaaagtgatccagttgtcattggcgggaacatgttaggtgattcagcccttgaactgatcgctgaattcgatagcaccaagcatcttcgccaagatgtccagaaaccggtttggcacaactcacttcgcttacccaatagtgaatcattatcgaatgaccaatgggtaaccatagctgacgactacatgaagaggatggggttcagcgatacccatctccgttgctatgtcttacatgacgacgaaggccagcatatacacattattgccagcagaatcggcatagccggtgggaagctctaccttggcaggaatgagaacctcataagtacccgcataatcagtgaactcgaaatcgctcacggtctgacagtgaccaagacagcactttccattacaacaaagcaacagaagcgaagaaaggtttcccgcaatgaacagatgctttcagaacgaaccggggagccttcaccaaaagaagctttacagcagattattgataaaagtttggcagatacacctgaccttttaacttttatcaagaggctggaagaagcagaagtaggctggacggcgaatgtcgcaagcacaggtaaaatgaacgggttctcattcaaataccgcgatatagctttcaaggcatctaaacttggaaaggcatactcctgggcaaatctcagtaaccgtcttaactataaccccagccatttagaagctctgcgaaccgacataccaccggcaaaagaatctgctcctgctcctgctcctgctcctgctcctgctcctgctcctgctcctgctcctgctcctgctcctgctcctgctcctgcaacgattttaaggacaactgagagaagggaaagtatcggtggaaaaattgcagaactggaattacggctcagagaagacaaacggaccgcaatcgtagaaaagattcttataaagaatacagtcaaacagcaaaagcatctcaggctcagaagctggtttccctttttacaacggctcatagagcttctccgaagctacggtaagagcattcttcacaacaaccctgcaagattctcaaaagtctatgcaactcagcatctaaaacctgcaagaaaaattcgtttatag

SEQ ID NO: 235329 - DNA, 444 bp, Klebsiella pneumoniae
atgaaaaaacacaacatagaaaaaccaagaaattcagaactgctgtcaattaaaaaaaatggcaacgaagcttgcgctaaaatcacacataatgaacttcgaacccactgtatcagtgtgagattaaataataaagaattaagtaaattgaattatctcagaggtcattacgcaaaaggcaaatggttacgtatggctttcttgcagaagctccccacgattgtacctcctgtaaacattgatacatggaaaactctgggtgagatcaatcagaagctaaaccgtattgctatccatatcgacagtaagagtaaagatagccagcttactcatacagagcttttcgctgttaagcgacaacttgaagagcttcgccagaacctgttaaatgcaaatgtatggagcaaacccgatgaagggtatgcagaagatcaaaaggggtaa

SEQ ID NO: 235330 - DNA, 1098 bp, Klebsiella pneumoniae
atgttagaagatttttattcatctgagaaaatacaatcccatactttcgttaaattttacgatggacctccttatacacaattaggatggagaaaatatagaaaattcatctcaacgctaaacgattatatcttaaagctaaaagaagaagaaaatattgatgtttttctgcaagaatatgaagtaaaactaatcgatagattttttctctggacgtttagtttcttagaggaggatattgctcgacaaaagtatataacgagtattcttaggcatgaaataaatatgatcatgtcaatattctatgataataatgagcaagattttacatcaaataaccacgatgatgattttgaattagatccatcatctggttgggccgacttttattgccacttagtttctaccgcgaatcatgagttagagcatatacaccctccaaaaaataaatcatacaaaaaacaaaacatagatataaaaccatttagtaatgcaataaccgtagaggaattttgtacattaattgatcattacctttacggtgatgacaccgctgataaatatgaatatctttcagcatttgatggttttttttcaagtaaatatcgtgaaagtaagtatttaagggaggaattcatcccaattaaagatttcattaaaaaaatcaaaatcccttctaattccattttaaatttagggctaaaaacggaaaattatgatgctatggtaaccttgccatcaggcgaaagtttcttattagaaattacttgtgctctcccttctgatgatcataaattattatctattttatctcaaagctatgacggtttttacccgttaaaaaatatggcaaagctgaaaattgccatagatgactttccattaaaaatcatcgaggtgattaatgctaagtataataagaattatgaagataaaagaacgctaattgtatatctcccaagcgaatatacctatcaaaatgagaattatattctaaaggaagtttttaatgaggtatccaataacattccagagcataatggtagtttcactcaaattctacttttagcaaataggactttccaccgcattagatga

SEQ ID NO: 235331 - DNA, 1125 bp, Klebsiella pneumoniae
atggggaaactaaacctcattccggaatattcttatggtctttcggagactgataactgcctcatccaaggtgataatcttcatattttgcaatatttgacaaaacatatttctggaaaagtgaaatgtgtttatcttgatccgccctacaacaatggtgaaagttatcttcattattatgataacatgggccatgatcagtggattgaaaatatttcaaaacggctattgatcatccgggaacttttgtcctcaagtggaagtttgtggatatcaatcgatgattcagagcttcactatctcaaagttgctgcagataaaatattcggtagagaaaattttgtttccactattatttgggaaaaaagaacaacaagagaaaatagaaaagcattttctcgtaatcatgaatatattcttgtatatgctaagaaagcttctctgtggaataaggttaggaatactcttccgttgaccaaagaagcgacagatcgttataaaaatccagatcaagatcctcgtggaccttggcaatctgttacagctaatgtacaagctggacatgcgactccacagcaattctatacaattatctcgccaagcggaaaaactcacaatcctcctaaaggtaggtgttgggtctatccagaatatcgtatgattcaagaaattagtgcaaacaatatttggtttggaaaagatgggaatggcgtgccacggatcaaaaaatttcttgcagatcgtaaagaaggcttagttccagaaactttgtggcgtgcagaaactgtggggacaactagtgatgcgaaaaaacatctgctagagcttttctctgagatatcattgtttgatactccaaaaccagagcagttaattgctcaaattctaaaaattagcacaaatccaggtgatttagtattggatgcttatcttggttctggcactacatgtgctgtttctcataaaatgaatagaaaatatataggtattgaaataggctcacatataagaactcactgtgcatcaagacttgtgaaggtcgttaatggtgagcagggcggtattactgattccatcagttggattggtggtggtggttttaaattttataaatttgaaaaatga

SEQ ID NO: 235332 - DNA, 1332 bp, Klebsiella pneumoniae
atgacaacgacagaaataattaaaccaatatactatcttggtgcaaaaaattcattccttagtgaaataagaactattatagacactataaaaaaagagtctgggcctgtttgtgatttattctctggctcaggggttgttggcaattatcttagtcaattttatccagtgaccactgtagatattcaagaatactcaaaggtaattagttcagccttatttaaaagcagtaaggtaaatactgacaaaattataagggatattgaagagcttcatctgaatgaagtatatcaagaaatatatgaatgtataagaccgctatgtgagtatgaaagaagttcaatagatggcatatcgaaagataatgttaatgcgatagttgagatcgtagaatcttatccactagcttcttgtttatcaacctatactaagggtagtatattcaatgagttacagaaagaatgttatttacgattgaatgaaaagggattagattcaccccaatttactactacatttcgatactttgggggagtatatttttcgtattatcaagcattcattctcgatatgattttatatctttcagatcgctcgaatgatgaaagtaaagacttcattaaagcaattgcattaagctctgccagtagtgtagttaataccgtaggtaaacaattcgcacaacccattagaccgcgaaataaagatggatcgattaagaaaaatttaaactcactgataggtagagatcgtaatcttgatactgttaaaattgcaatatcttggattcataagtacaaattaaatgttaattctacttatacttcaaatgctttaaggatggattatcaagaggcattagatacttatggaaaaaaattttctgtagtttatgctgatcctccttatacccgtgatcattacagccgtttttatcatgtattggaaaccatgagcttaagagatgagccagtaatcacaacaagtactcgacacggtataaaagagttaagcagaggcttttacagagaagagaggcatcaatctccattttgtatacgatcattagctccgaaggcttttgaaaatcttttcaaatccacgagttcatgtaatacaccactagtattatcttattcacctcatgaggaaggggatggtactcatccaagggtcgtatcaacaaagaacctaattgaattagcatcaacatattatccatctgttgaagtgattccagttgaaggaatcactcataataagttcaataaaaaggacttaatgttggaagaaagaaatattgccgaaatattcctaaaatgtacattttag

SEQ ID NO: 235333 - DNA, 1131 bp, Klebsiella pneumoniae
atggtaaaccatagcttctatgtacaaaatccggaaaccaatgagggatcatatttaattgataaaatacttgagcaatgtaatgaagctatcgcaggtggtgctgcatttgcatttatgagttcaggaggagtaaatctattaataagagacagcagatttttatcttttttagaaaatcatgactttcatttgattgtaggtgtcgatgcaataacagatgataaagccgttgatgaagttaaaaaggtaatgcttatttataaaaatcttaaagttgatttttttataacaaataataaacgctcaatttttcatccgaaatttgtttggtttcaaaaggaaaaggagtcaattcacattgttggctcagggaacttaacatcaggtggtttacgatggaatgtcgaagcatatagtattctaaccgacacggaaagtaatgaaagctcacttatagaatggaaaaagtttttagaagaaaataaaaatcatatatacacacatgatgatgaaaaagttatttcagccctaagccataatactaaattaaaacaagccttacttaaattaaagaaaggagaggataagcttaacgaaatagaaaagaaatcattatcacaattgccaattgaagaagatttagttccctcctacggattaaagaatgaaatattgatagcggaaatcccccggaacggaggtcggttacagcaagtcaatttcgataaaaagaattttattaatttttttggtgcaagtgatgaacaaggtgaaaatgtctatgtgtatttcttccacatcacacatcaaggcttattacaagagccagaggttaggcctgctgttgtagtaaagagccataattttcgatttgagttgaatgccgttaaaggaatgagttatccaaaggaaggtaaacctattggattatatttaaaagtagcctctaaatccttcttatatatgatatatttaccggcagataaagattatccaaaattacaaaaaatcctaaacgataaagcaggaaaatcaaaatctggtatgcgccgtatagtatttacagcgcaagatatattagaaaaaatcccaaaatcaccgatttggaataaatatgagataagctaa

SEQ ID NO: 235334 - DNA, 144 bp, Klebsiella pneumoniae
atgtttgttaactttagcgtttttgtgaagtggtggaataaaagaagtgaacttttcagatttgtttttataacggcaattccttttgcctacgtagcttcttatataatatcagatattattaatatgttaaaaaatttctaa

SEQ ID NO: 235335 - DNA, 1392 bp, Klebsiella pneumoniae
atgaaaaagaccaaaattgtttgcaccatcggtccgaaaaccgaatctgaagagatgctgaccaaaatgctggaagccggcatgaatgtgatgcgtctgaacttctcccacggtgactatgcggaacacggtcagcgcatccagaacctgcgcaatgtgatgagcaaaaccggtaagaaagccgctattctgctggacaccaaagggccggaaattcgtaccatcaagctggaaggcggcaacgacgtctccctgaaagcaggccagaccttcaccttcactaccgataaatccgtcatcggcaacaacgaaatcgttgcggtaacctatgaaggcttcacctccgacctcgccgtcggcaacaccgtcctggtggacgatggcctgatcggcatggaagtcacggctatcgaaggcaacaaagttatttgtaaagtgctgaacaatggcgatcttggcgagaacaaaggcgttaacctgccggcgctggctgagaaagacaaacaggatctgatcttcggttgcgaacaaggcgtggacttcgtcgcggcctccttcatccgtaaacgttccgacgtcgtcgagatccgtgagcacctgaaagcccacggcggtgaaaacatccagatcatctccaaaatcgaaaaccaggaaggcctgaacaacttcgacgaaatcctcgaagcgtctgacggcatcatggttgcgcgtggcgacatgggcgtggagatcccggttgaagaagttatcttcgcccagaaaatgatcatcgaaaaatgtatccgcgcgcgtaaagtggttatcaccgccacccagatgctggactccatgatcaagaacccgcgtccgacccgcgctgaagccggcgacgtggctaacgccatcctcgacggcaccgatgcggtgatgctgtccggcgaatccgcgaaaggtaaatacccgctggaagcggtcaccatcatggcgaccatttgcgaacgtaccgaccgcgtgatgaccagccgtctggacttcaacaacgacaaccgtaaactgcgcatcaccgaagcggtgtgccgcggcgcggtagaaaccgctgagaaactggaagcgccgctgatcgtggtcgccacccagggcggtaaatccgcacgcgctgtgcgcaaatacttcccggatgccaccatcctggcgctgaccaccaacgaaaccaccgctcgtcagctggtgctgagcaaaggcgtggtaccgcagctggtggaagagattgcctctaccgatgatttctatcatctgggcaaagacctggcgctgaagagcggcctcgcgcgtaaaggcgacgtagtggtgatggtttccggcgcattagtgccgagcggcacgactaataccgcttccgtacacgtgctgtaa

SEQ ID NO: 235336 - DNA, 1299 bp, Klebsiella pneumoniae
atgacagaaagtagcattaccgaacggggcgcgccggaactggccgatacccgtcgtcgtatttgggcaattgttggcgcttcctcggggaatctggttgaatggtttgatttttacgtttactcattctgctcgctctatttcgcgcacatcttctttccagccggaaataccaccacccaactgctgcaaacggcaggcgtatttgccgccggatttctgatgcgtcctatcggtggatggctgtttggtcggatcgctgaccgccggggacgtaaaacgtccatgcttatctcggtctgcatgatgtgctttggctcactggtgattgcttgtctgccgggttatgcggtgatcggcacctgggccccggcgctgctgctgctggcgcgtctgttccaggggctgtctgttggcggagaatacggcaccagtgcgacctatatgagtgaagtcgcggtggagggtaagaaaggcttctatgcctccttccagtacgttacgctgattggtggtcaactgctggctgtattagtggttgtggcgctccagcaggtgcttagcgatgaagatctccatgcctggggatggcgtattccttttgccctcggggcggtactggctatcgtcgcgctgtggctgcgtcgccagctggacgaaacctcgaagcaggagacccgggcgctgaaagaggctggctcatttaaagggttgtggcgcaatcgccgggcctttgcgatggtgttaggctttaccgccgccggatcgctgaccttctacaccttcaccacctatatgcaaaagtatctggtcaacacggcgggcatgacggccagcaccgccagcgtgatcatgaccgcggcgctgttcgtttatatgctggttcagccgctattcggcgccttctcggataaagttggccgccggacctccatgctgtgctttggcgtgctggcgacgttatttaccgtgcctattctcagcgccttgcaaaaagtgagctcaccctatgccgccttcggcctggtgatctgcgccttactgattgttagtttctatacctcgatcagcggcatcctgaaagcagagatgttcccggctcaggttcgcgcgcttggggtcgggttgtcctatgccgtcgcgaacgcattgttcggcggctctgcggagtacgtcgcgctgtcgcttaagtcggcagggatagagcacgcgttctactggtatgtgacggtgatggccgccattgccttccttgtctccctgatgttgcatcgcaaagggaaggggttgcgtctgtaa

SEQ ID NO: 235337 - DNA, 1188 bp, Klebsiella pneumoniae
gtgcttcgggcctatggcatccacacgctgccaacctggattgccgctgacagcgcggaagcggtgcatatcgctgagcagataggctatccggttgcgctgaagctgcgttctccggatatcccgcacaaatcagaagtacagggggtcatgctctatttgcgtaccgccgccgaggtgcagcaggctgcagatgcgatgatcgatcgcgtcaaactggcctggccccaggcgcgcattcatggattgctggtgcaaagcatggccaatcgcgctggcgcccaggagctaagagtagtggttgagcacgatcccgtcttcggcccgttgattatgctaggcgagggcggcgtggagtggcgggccgaggaccaggccgccgtggcgctgccgccgctgaatatgaacctggcgcgttatctggtgatccaggcgatcaaaaataagaagatccgcggccgcagcgccttgcgcccgctggatatcgctggcttaagccagctgctggttcaggtctcgaacctgatcgtcgactgcccggagatccagcgcctggatattcatcccctgctcgcctccggcaacgagtttacggcgctggacgttaccctggggcttgctcccttcagcggcgacagtgaaagccgtctcgctattcgtccctatccgcaccaactggaggagtgggtggtgatgaaaaatggcgatcgctgtctgttccggccgatcctcccggaagatgagccacagttgctcgcatttatcgcccaggtcaccaaagaagatctctattatcgctattttagtgagatcaacgaatttacccatgacgacttagccaatatgacccagatcgactacgatcgagaaatggcgttcgttgccgtcaggaccagcgcagagaagagcgagatcctcggcgtgacgcgggcgatctccgatcccgataatattgacgccgagtttgccgttctggtccgttcagatttaaaagggttaggcctggggcgaaggttgctggaaaagctgatcgcctatacgcaaagccatggcctgcagcgccttaatggtattacgatgccaaataaccgaggcatgataggcctcgccagaaagctgggattcaccgtcgatattcagctggaagatgggattgtcagcctgtcgctgcccctgaatcagggataa

SEQ ID NO: 235338 - DNA, 540 bp, Klebsiella pneumoniae
atgaaatgcaacgataacattcctattgatttctggagagagtgcttatcctatgatgctgagaatggtgttctttattggaaagctcgcccattagatcacttcatgacaagccaatcctgtgcaacatggaataagcgatttgctggaaaaccagcgggctctcccaataatcaacaatacattcacatagggatgcgaaataaattatataaagctcaccggattatttgggctttatattatggtgaatatcctcactcccttatagatcatgtcaatgggaataggcaggataacagaatcgaaaacctcagagtcgtcagctcatccgaaaactgccaaaaccagaagctacgaatcactagtaccagcgggtgcgttggcgtggctaaatgtaatagtggtttcaggagttacattcaggtgaacggaagacgggttcacttgggggtataccaaagcgtagaagaggctttcgctgtaagaaaagaagccgaatcaaggtatggataccatgagaaccatggacggaaataa

SEQ ID NO: 235339 - DNA, 504 bp, Klebsiella pneumoniae
atgacgccatcaatgaggaataaactgattggcgtgatcgccggcggcggtggcgccatagccattgcctctgcgctcatcactggcccaaccggtaacgatggtcttgaaggtgtgcgatacaacccttatcaggatgtggtaggcgtctggactgtctgctatggccatacaggtaaagacatcatgctcggcaagaagtacaccgaggctgaatgccgtgcgcttctcagtgaagacctgaacaccgttgctcgccagattgacccatacatccagaagccgatccccgagacaatgcgcggggctctgtactcgttcgcctataacgtcggcgctggcaatttccagacctccacgctgctgcgcaaaatcaaccagggtgaccagaaaggtgcatgtgatcagctgcgccgctggacctatgccaagggtaagcagtggaaaggtctggtaactcgccgcgagattgagcgcgaagtttgtctttgggggcagaaatga

SEQ ID NO: 235340 - DNA, 837 bp, Klebsiella pneumoniae
atgaatattgacgtaaaaattaagcatccggcgatccgctaccacggcggaaaattccgccttgcgccgtggattatcgaacagatgccagaacacgtctgctatgtggagccgttcggcggcgctgctggtgtattactccagaagccgcgcagctattcagaagtttacaacgacctcgacggcgaggtcgtgaacctttttcgtgtgctgcgtaaccctgaattaaatcaacgcctgcaggatgcctgccgtctcaccccgtattcacgagatgagttttgtcacgctcaggagcgagcgacagattctgtagaacgcgcccgccgcatggtagttcgcgcttgcatggggttcggctcagctgcaggtatcggtggcaactcaggctttcgcggagacagtaagcgcaaatatgccactgcagcgcacctttgggagcgttacccggagaatctcgcagctttatgtcagcgcctacagggcgtcatcattgagaacaaagacgccttgtcagttatgcgtgcccacgatgctcaaacgaccctgcactacatcgatccgccgtatgtgccggaaactcgcgtgcaaggtaatcgctactacgcgcatgaaatgactgttgagggacacgagcaattgcttgctgtggccagaacgatgacaggaatggtgatgattagcggttacgacactgaagtctacaacgacatgctatcaggctgggccaagactgagaaaacctcacgcatcagcgcagggcgaggtaccaaagttcgtatagagtgcttatggcttaacccggcagcacagcagaaacaggagcatgcagcatga

SEQ ID NO: 235341 - DNA, 264 bp, Klebsiella pneumoniae
atggaaagaaacagactggcccggcagattatcgatacctgcctggaaatgacccgcctggggttaaatcaggggaccgccggcaatgtcagcgtgcgctatcagggaggaatgctgatcacccctaccggtatcccatatgaaaagctgacggaagacaagatcgtctttattgatgccgacggccagcatgagcagggaaaactgccctccagcgaatggcgttttcatcaggcggcctaccagacgcgacccgatgcctag

SEQ ID NO: 235342 - DNA, 348 bp, Klebsiella pneumoniae
gtgtcgatcctcaaccggcccatcccggccattcactatatgatcgccgcggccggcgggaattcgatcccctgcgcgccctatgccaccttcggcacccgcgaactgtctgagcatgtcgcggtggcgctgaagcaccgcaaagccacgctgctgcagcatcacggcctgatcgcctgcgaggccagcctggagaaagcgctctggctggcgcatgaagtggaggtcctggcccagctctacctcagtacgctggcgattaccgacccggtcccggtgctggatgacgaggcgatcgccatcgtgctggagaagttcaaaacctacggattacgcattgaagagtga

SEQ ID NO: 235343 - DNA, 318 bp, Klebsiella pneumoniae
atgggctttccatcacccgcgacggactacacggaacagcgattaacggttaactcgatctgcaatgttgggcctaatacgttgctcttcgagcggtctggcggttacgttgtgctggatatctccctgaaaccaaagcaaggtagtcaggttctgattcagcacggcggcgggacggagattgccacgctgagaggaaagacgctgattaccgaagatggcgaagcaattgaaggtgaggccttggatgatgtcactgtcgcaggcgtcgtgtcgtttactatctgcgatgtgcgccaggacaatgcggttgtttag

SEQ ID NO: 235344 - DNA, 240 bp, Klebsiella pneumoniae; identical to SEQ ID NO: 218363

SEQ ID NO: 235345 - DNA, 1398 bp, Klebsiella pneumoniae; identical to SEQ ID NO: 192848

SEQ ID NO: 235346 - DNA, 663 bp, Klebsiella pneumoniae; identical to SEQ ID NO: 192847

SEQ ID NO: 235347 - DNA, 1635 bp, Klebsiella pneumoniae
atgaacttactcaaagataaacaaaccataaactctgcactttgggcggccgctggtgatgctattggttggatttcagagcttacagatgagcagggactgaagcgcagaacaggtgattcttatctggttcaccctgtaggatggaatagaaaaattggcggttattctggggtaactgtaagacttccagctggaacatactcagatgacactcaactaagattagctgtatcacgggcgattagagataatggtgaatttgatatagaatctttcgccaaagtcgagcttcctgtatggctatcttatgcattgggtgcaggtcgtgcaactaagtgggctgctaataatctattgcgcaaggatactacttggttttcaaatttttataaaacggacgggactgaatatattaatgcaggcggtaatggaaccgctatgagaatacagcctcacgtttggagttgtaaagatttacccggaaaagcatacactattccagtaataaaagactcacttgttacccatgggcatttgctagccgtttgtggggccgtaatacatgcggatacgttgcaatatgcgttgttaaatagtcagcctgttaacatatctacacttggaagaattattgacgacctttcatctttgccagagaagattaatagtgtttatgaattaaaaaatctgtggttacccaattgggaagctattagtaataaaaaattagctgaagaagttgaaaggatcaggatagagacaaaggaatttttatcaaaagctgttgaagcagctaataaattcagtgaaccatcggagcagtttagtgcttcaattaaagcgttagagtgtgataaagattccagaagaggtgctgcaactaatacagccattgctagtagcctcttgtgcttttattttaaaggattaactccttacgaggcaatgattacttgcgttaatcaattaggtaccgatactgactctattggaagtatggctggtgcaattatgggttgttataatgaaatgccccgttgggatatacaagatagccaatatataattgatgaggctatacgtttaaataaggtttcacagggtataccgtcaagtagctttatttatccaaatattaataaatgggttcctccacaaacacagagtgatagtttagttagggataatgctggggagtattatgtcttgggactcggcaaagctcaagccttaaacgaagaagtgtggaaaacaaaaacagcttcttggcagtggatgaagcttgaatttggccaaacgattcttataaagagcaaagttggtgatattaaagctatagatacacctgtactccgtaacagtgaacctatgcgcaccacagagcctgtaatggttaataagtcgtctaagttttatgataatgatccgcggcgtaaatttgattacgaagatacgaaattaagtgatttgaatattgatgagattacaaccttattgattaaagatgggtttaatgagcaaaaagttggtcattttctcattgaattagctgataagaaaggaattgaggcgtgcattgcatttgcggctatcataggtaaggcctttgtgactcgtaagaaaaaacagtaa

SEQ ID NO: 235348 - DNA, 678 bp, Klebsiella pneumoniae
atgattcaacgccccctccaagtggggtgtttgagtttttggtggaaagggaacatgtctcagccaaaaaaatgggtgtttactgagcttgtacaggactccgacgagccggagcagttgattgcttatgcgatgtataaagcagacaaagatgatctggcaatacaatgccgcgcaaggttgctttctgagacggacattgaggttgagctcacaagattccatgacagcatagcttattcagatagaaggcttcaggattatcgtgataaagccaaacgtgctgtagatcaattggtaggtagtgtgagtgatagggttgctcttgcatacgatcagacaatcgctacgatgacggataatcaccagaacgaactgcaggatagatggaaaaagtggggcgaagaagcggcgctgtacagtgcacatcttattcggccagtatggtatagccggttatggaaaggcactttatcttggctcggtggtggggtttctggcctgcttgcgaccgtggtttctacgctcctaattgttggtatcgtgtcccttttcactccctcggttagagatacagctcgagattcattgaaaggtgtagttgatactttgatcccagaaacacccattccgggtgtaactgatgcagccaagaacaacaatcaaaagcagccctga

SEQ ID NO: 235349 - DNA, 1110 bp, Klebsiella pneumoniae
atgattgagtttattaatatccaaaactttaaaaccttgttaaatgctagttttccactgggtaatctgaatcttttctcaggccttaatggcatgggaaaatcaacgcttgtgcaaagcttattgcttttaaggcagtcttatgaacgcaatacccttaaaactaagggtttactgttaaatggtgattatgtcaatatcggtacgggtaaagacgcgctctctagttttagtgaacaagaagagattatttttaccattaaatggctcgagaaagaacagccaacacggtttgagtttgattatcaacatgactcagatctgctgccgctgcgtaaatcgggtattgagggtgatccagaatcgctaagcttatttaactctaattttcagtatttatgtgccgataggttaggtccgcaaagtcatcaccagttgtctgagtttcatattcgtgatttaaaatcgcttggccatcatggtgaatttgcggttcattttatcgcggttaatggctctaaagacttggaaatagaagcgttacgccatcaaaaggctgtttcaggcactttgctttctaatattgaagcatggatgtcggatattacgcccgggttaaaaatcaaagcagtggcgcagcctcagtttaattcggtgagccttagttactcttttaaccaagggaaagacacaaccgaagactttaaaccacagaatgtggggtttggattaagttatgtgctacctgtcgtaaccagtatactaagtgcggcaaaaggtgatttgctgattattgaaaacccagaatcacacttgcaccccgctgggcaatccttgatgggtaaattgtgttctattgctgccaataatggcgtgcaattaatcgttgaatctcattctgatcattttctcaacggtatacgggttgcggtgaagcagaaagtggttgcagctgacgatgtcaaagtctttttcttgcagcgagatgttcataactccattcacgcctcagaagtcatgtaccccaatattgatgatgagggacgaatagactgctggccggaaggcttctttgaccaatgggataaggagttggatcatctattatga

SEQ ID NO: 235350 - DNA, 516 bp, Klebsiella pneumoniae
atgctgttctctttgccgaccctgcagagttttcacgctccgggtatgcgtctgctgtggtcgccgaggatatgttcattattaccgctgtccggtctgatggttcattttttattcctgaccttgatatccccggcattgacattgacaccctgtctcgtatcactgctgagatcacatttattgaccctattgagtttttgcgatcgggatacaggtcagctgtgctgtcagctgaccgctttattctgtctgcggtggcgctggattccgatgtttatatacccgtcatttctgactcggtcggggttattgaatcgcgcgagttcgcccgcagtggttttatcaacgcagttatttcagaggacagatttattatggcagccaggactactgaggaaaatgctcaggaggggagcagggaaattcgcctgccgacagagtttgagcgttcgggataccggtatgctgatacgagcgccgatatgtttgttacagacggagaccggctgttaa

SEQ ID NO: 235351 - DNA, 318 bp, Klebsiella pneumoniae
atggggtttccttcacccgcagcggactacgtcgagcagcgactgtccgttaactcgatatgcaatgttggtcctaacacccgcgttttcgaaagggatggcggttatgttgtgctggatatctccctgaagccaaagcagggtagtcaggttctgatccagcacggcggcgtgacggagcttgccacgctgagaggaaggtctctgattaccgaagacggcgaagcgatcgagggcgaggctctggacgatgttactgtcatcggcgtcgtgacgtttactatctgcgatgttcgccaggacaacgcggttgtttag

SEQ ID NO: 235352 - DNA, 234 bp, Klebsiella pneumoniae
atgacttttacaccgatccttgatggcaccgtctataactgccaggtcaaatggaacattgccgggctgaggtggtatgtcctcataaccgatggctctgggaataccattctaaataccccgctcgttggctccgtgcttaacggtggaataaatattatctccggagtgtttaattcgtcctccatgtactggcgagagcagaatggactgattgaggtaaacagctcatga

SEQ ID NO: 235353 - DNA, 1038 bp, Klebsiella pneumoniae
atgagatattatgatattgagataaccattcctgctgaaggcgcttctccggaaagaacgataaaatacagtagccataagaacggagtttacaacccaggcgccctgatgattgagtttgatatcctaaggtacggtgaatcgactccccagggcgaaactcacctgaccatctggggtattggcccaaaagaaatgcagcaggctcgccagaatttttttggcaaaaaaattaaaatatcccttgggatgaaagacgggctgccattggctggaaaggttaccgcgccaaaactggtattggatggcgtgataaatcaggtctttggtaactggcagggtattgagctacgacttgacttcataatcgtggttggtcctgtccagaacgtgccaaataacaaacccgtaccccttcctttaacctttgactggaaggaggggcagaagctttctgtagccctcacgcagtgctttatgaacatcagagggtatacgttcaatatcaacataagtgaccggctaattcttaatcattaccgggggctgttttgtgatgatattgtcacactggccaaggaccttaatgctttttcacgttccagaattcgcgatagtggatactcaggtgtagagatcgcaatagtgaatggtaatgagatccgggtatgggataacgattatgataaccacccggataagacttctgtttccagcgccgtagccagaagcaacagcccaacccaaatagatttcaaggatttgatagggcagccgacatgggtggcatttaacacaatcagcatggcgtgcgtaatgcgcggtgatattcaggttggcgatcacatcctgatgcctaaaaaaagcactccgttgatacaggcctcttcgtactctcagtatcgagaagactctgcctttactggcgactttattgtgaactccgttcgcctgttagggaatagcaggcaaccaacggcagaggcatgggtaacaattattgaggcttcccctttcattaaggcaggtagtgcatga

SEQ ID NO: 235354 - DNA, 300 bp, Klebsiella pneumoniae
gtggcaactgttcaataccctccgttcctgccgcttccgcagcgtgccgatcagaacatgacgcaggatacagcccggcagacgtcgcggacgatttacgtcccggcgccggtggtccctataagcgctgactttactgtagacacaccgatccccggaatggaggttccgttcacgtggcaggctagtctggagttaaacgcgaagctttactctgcgctggggcagtacaatctggatcaggcggggattagaagtattgaagaacgccgaaatattttgctatcagaaggcaaataa

SEQ ID NO: 235355 - DNA, 192 bp, Klebsiella pneumoniae
atgttaaatcgtgatgacatagaagtaacactcatgagccttgccacaaaacagggactgagcctggatggaaaagatttattggacattcgcacacaggtagcgacagttctggccgccaaaaaactgcaccgacagcggatgacggcacccgcctaccagtggaagaagccggataatccgcgtcgctaa

SEQ ID NO: 235356 - DNA, 210 bp, Klebsiella pneumoniae
atgactatcaacgaactttacaaaacttttgatattccaatgtcacattttgcaaaaaatgagacagcaaacgattttggtcgcagagtcatgagctctaactttgtaaatacagagcattctggtgtaatctattccactggttctactgttgaaccaatcaatttaaatcagtcagttaaacaagaataccaactctactcgtattaa

SEQ ID NO: 235357 - DNA, 891 bp, Klebsiella pneumoniae
atgggcgagatggctatcctcgcccaaaaaagtccgttggatacagtaagaagcaaatacataaaagaaatgtcagatatgacaggacgtaatgtaattgcttactactctggctttttacaaaaaaatacggcctctatcagtcatttaataagtatgaccgatgatgataagaatggttttatgacagcaatcaatggcttagacactagcaaaggccttgatttacttcttcatacccctggtggtgatattgctgcgcttgaatctattggctactacctgcgcgcaaagtttggtaataatatccgtgcgtttgtaccgatgatttctatgtctgcgggcactatgctggcttgtacggctaaagaaatagtcatgggtaaacagtctaacattgggccatttgatccccaagttggaggcgtacctgctcacggagtaattgaagaaaccaccaaagccatgcaggaaattctcaaaaaccccgcctctgctgggttttggcaatttaccctttcaaagctaaatcccacgtttatcggtgaatgtgaaaaggcaattcaatgggcttctgctattgtcactgactggcttgtaacaggaatgtttgcgggtgatcctgagtctcacattaaagcgcaacacatttgtgccgagctcaacaatcactcgtctacttttgctcatgcacgccacattcatagtgataaagctcgtcaaatcggattgaacgtgacagcaatggaagatgatcaagagcttcaggatatcgttctgaccattcaccatagcttcatgcatacatttggtggtagttctgcagccaaaatcattgaaaaccatgaagatgggcgtagagtttggcatgtgcctcccggccatatgtaa

SEQ ID NO: 235358 - DNA, 132 bp, Klebsiella pneumoniae
atgattctaaataacaaattattcggcggagccagggaagtactacatgcgattttctttcgcagagcgctgccagatggcgacttgccgtcaaaaatggcgctgacgagctacgtgcgttgggatttatga

SEQ ID NO: 235359 - DNA, 267 bp, Klebsiella pneumoniae
atgaagacgcagaaaacagcggtatcacctggggaatgccatcgcaatttccttactgcaaacgggcaagaattcgcgatagcctatctggcagatagccactttggtaagctgcctgtttcctcctttgagcaggtcgtaaagccggtaatcaaatggcttaacgaaaacgccgccccgaacacttgtgtaaacattgatatgacccacaccgcccttttaaccggagagttcagcattcacatgggagagttcattaaggactga

SEQ ID NO: 235360 - DNA, 345 bp, Klebsiella pneumoniae
atggcaacaccggactgggaggccatcgaatcggcataccgggccagagtccttagtctccgtgataaaggtgagcaatacggcgttactgaaggggctatcaggaagagggctaagaagtttggttgggtacgcaaggccggtacgcaagcacgcaaaaatggtacgcaaggcggtacgcaaaaagtacgcagaaaaaaagttggtgaggtttccaacgtggtttccactcatcggaaagtttccactggaaaccagaagaaaacactggtggtaaatagagtgtgctatgcagtgcgcaaaaaagtgcgaattgcgcagtttgcaaaagcgctgcgcaagtag

SEQ ID NO: 235361 - DNA, 1653 bp, Klebsiella pneumoniae
atgaaaaaaatatacatagatcatgatgaaaaatataatggcaatggttcattaaatagcccatttaacactcttgaagaattatacagtctgaaaatagaacatccagtaactattctgataaaaaaagggaatattttccgtttttcattaatagaccttaatggaattttttataacaatacgtctgaaaagagtatcatgagttcatatggtgagggttctaatccagtatggattactaaatctgaaaataatagccatattcacactaataaaatacaaaattttacgataacaaatattgacttctatgcccatgaaaatggaactcaaaaaccttatatatttggcatacctacaggcaatcagtcaggagattgtaatttagaaatatcccaatgtacattcatgggaacctctcgctcggcacattcagataatggaagagtagctactatctatcttgaagtagaagataaacgatttaattatgttaataaaatcactatcaaaaattgtcatttcaactttgtaaactcagggatatatattcatggtaatacaactcctaaatccaccaacaacaatctaggcgattcatataaatgctatggaataaaaataaaaagttgctcttttacaaatataatcaatgccggcattttactcgtggcatgtgcatcaaaaaatagtaattacgatttaaaagatgaatatacaagtggtttcgaaaatatttattactcgagttacagaacagacgtttacaattccgagaaagataaattggccgaacaggcgcaatgggatgcaccaatttggtttaccctatgtaataaaattatagggcaatactttagcatacatggttcaggtcctgggcatccagacagaatggctatcgatttcgattatcactgttgggattgtataataagacatggatatacatcaaataattcaaggaatgtcatgtttatttcaggacctatggcaagaactatttttaaaagtaaatattcaatagataaacctttagatataactgatgaagaatggtattatactcgtaggtatggtacaggtaataatctttacgaacaagtaatatcatttaatgatggtttaatgcgagacgcatcatctataaatcctgattcagtaaaaataaatgctaatagatatgtttatgattgtgtaattcgaaattgcgcttttatagatacaatctcttcacgtaacatatttataatcggcgcgtatcctactgataataataaatgtggtccgacgactttaacaattgaaggttgtcttttttattggaaattcttagaaacaacctatttaattaataaagaaacaattccaatgattaatggtttaaagaaaataatcataaataatacaatattttactctgaaagatggactgaacgtctcttaaatgaattaggattatttactatcaataatgtaattgttagtgatccgcgattcaaaaacttacctatcgttccgccagtcagtttggatgcagcattggaaattttatctatgttatactcacctagtttcagtcatgaaccatcaaaaaatattttggataatctgtttaggagagagagtaaccaaacatctaataaatga

SEQ ID NO: 235362 - DNA, 972 bp, Klebsiella pneumoniae
atgaatactgtcggcacgccgttgctatggggtggattcgctgtcgttgtcgcgatcatgttggcaatcgacctgctgcttcagggacgacgcggttcgcatagcatgaccatgaagcaggccgctggctggtcaatcctctgggtcacgctttctctgctgttcaacgccgccttctggtggtatctggtgcaaacccagggccgggccgtcgccgatccgcaggccttagccttcctcaccggttatctgattgaaaaagcgctggcggtcgataacgtcttcgtctggttgatgctgttcagctatttcgccgtaccgcctgctctgcagcgccgggtgttggtgtatggcgtactgggcgcgatcgttctgcgtaccattatgatcttcgccggcagctggctgatttcgcagttcgactggctgctgtacgtctttggcgccttcctgctgtttaccggcgtgaagatggcgctggcgaaagaggacgactccggcatcggcgataagccgctggtgcgctggatccgcagccatctgcggatgaccgataaaatcgagagcgagcgcttcttcacccgtaaaaacggggtgctgttcgccaccccgctgctgctggtgctgattctggtggaactgagcgacgtgattttcgccgtcgacagtatcccggcaatcttcgcggtcaccaccgatccgtttatcgtgctgacctcgaacctgttcgccatcctcggcctgcgcgccatgtacttcctgctggcgggggtcgctgagcgcttctcgatgctcaaatacggtctgtcggtgattctggtgtttattggcgtgaagatgctgatcgtcgacttctaccatatcccggttgccatctcgctgggcgtggtgggcggcatcctggccgtcacgctgctgattaacgcctgggtcaacaggcagcacgacaagcagcgcaaactgccagagtaa

SEQ ID NO: 235363 - DNA, 216 bp, Klebsiella pneumoniae
atgaccgcgtattggctggcccagggggtcggcgtcatcgcctttcttatcggtattaccacctttatcaaccgcgatgaacgccgtttcaggctacagctggcggtctatagcgctattatcggcgttcatttttttcctgatgggcgccgggccggctggaatgagcgccgggctcaatgcgcttcgcacggtcatttccttacgcacccgtag

SEQ ID NO: 235364 - DNA, 1488 bp, Klebsiella pneumoniae
atgcaatacatcaaaatccattcgcaggataacgtcgcggtcgcgctgacggatatcgctgccggtagcgtggtgacgattgataatgactcggtcaccctcggccaggatatcgttcgcggccacaagtttgcactgcgcgctatcgcgaaaggggaaaacgtcgttaagtacgggttgccgattggccatgcgctggcggatatcgcgccgggagagcatgttcatgcgcacaatacgcgcaccaatctcagcgaccttgacgcgtatcgctatcaaccggacctggttgcccaaccgccacagcctgcggatcgcgaagtgcagatttatcgtcgcgccaacggtgacgtcggcgtgcgcaatgagctgtggatcctgccgaccgtcggctgcgtcaacgcgatggccagacaaatgcagaaccgtttcctgaaagagacgtatggcgctgaggatatcgatggggtacatctcttcagccacacctatggctgctcgcagcttggggacgatcacatcaacactcgcaccatgctgcaaaatatggttcgtcacccgaacgccggggcggtgctggtggttggccttggctgtgaaaacaaccaggtggaggcctttcgcgagacgctgggcgagtttgacccgcagcgcgtgcactttatggtttgccagcatcaggacgatgaagtggaggcgggggttgagcatctgcatcagctgtatgaagtgatgcgtcaggataaacgccagccgggcaagctcagcgagctgaagtttggcctcgagtgcgggggatcggacggcctgtcgggcattaccgctaatccgatgctgggccgcttctcagactatgtgatcgccaacggcggcactaccgtgctgaccgaagtgccggagatgttcggcgctgaacagttgttgatgagccactgccgcgacgaagcgaccttcgacaagctggtgaccatggtcaatgactttaagcagtactttattgctcacgaccagcctatttacgaaaacccctcgccgggtaataaggccggagggatcactaccctcgaagataagtcgctgggctgtactcagaaagcgggctccagccaggtggtggatgttctgcgctacggcgagcgcctgaaggttcatggtctgaatttactgagcgcgccgggcaacgacgcggtcgccaccagcgcgctggccggcgccggctgccatatggtgctgttcagcaccggtcgcggcacgccgtacggcggctttgtgccaacggtgaagatcgccaccaacagcgagctggcggcgaagaaaaagcactggatcgactttgatgccgggcagctgctccacggcaaaacgatgccgcagctgctggaagagtttgtggatgccattgtagccttcgccaacggtaaaccgacctgtaatgagcagaatgacttccgcgagctggccatctttaaaagcggtgttaccctgtaa

SEQ ID NO: 235365 - DNA, 294 bp, Klebsiella pneumoniae
atggaaatgaagattgacgccctggccggcacgctggagtccagcgatgtgatggtcaggattggaccggcggcgcagccgggcattcagctggaaatcgacagcattgtgaaacaacagtttggcgctgcgattgagcaggtagtgagagaaacgctggctcagcttggcgtgaaacaggccagcgtggtggtcgatgataaaggcgcgctggaatgtgttttgcgagctcgtgtacaggccgcggcgctgcgcgcggcgcaacagacccaattacaatggagccagctatga

SEQ ID NO: 235366 - DNA, 270 bp, Klebsiella pneumoniae
atgacaaaaatgagcaccatttacagcagactttcatacggcaccgggaccgcactgacgggctgcggtgtctcagcaaaggcgtatgccggggcagttaaggcagaggtatggattttggccgacaaaatagcggggatgaccctgagtgactgggcaattattgtcggtatcgcctgcaccattaccacctgtggggtgaactggtactaccggcggaaagaacgcgaggatcggctcaatggctatgacaccaaaactgaggaatag

SEQ ID NO: 235367 - DNA, 1272 bp, Klebsiella pneumoniae
atgccgaatgaatacactatagagtttttgccttttcatgaagggcaaaagaagattcatcggtcaaaggctaagaggaaggtaattcgcgctggacgacgttttggcaaaaccaccatgcttgagcaggcaggcggaaactgggcagccaagcagatgcgcgtcggctggttcgccccgtcatataagatcctgttgccatcttttaaagctatccgggaccttttaaaaccaatcactaccagctccagcaagacagactcaattattgagactatcggcggtggcctagtggagttctggactctcgataacccggatgccgggcgttcacgtaaatatcacaaagtgattattgacgagggaagcctcgttaaaaggggtatgcgtgatatctgggagcaggcaatagagccaacgctactggactttgacggtgatgcggtcatggctggcacacccaagggtgtggatgatgagaactttttctatcaggcctgtaacgacaaggatatgggctgggaggagcatcacgcgccaacggcggccaatcccacgattaatcccgaggctttggcgagaatcatcgagggtcgccctccgatggttgtccagcaggaatacaatgccgagttcgtagactggcgcgggcaaaacttcttcaagctcgactggcttttggagaatggcgagccagttgattatccatattcgtgcgatacggtttatggtgttgtcgactgcgcgcaaaaaggtcagttgcataacgatggttcggcgtgcatctggtttgcgctgatcaacgttccaacccctcacctagttatactcgattgggacatcatccagatagatggatatttcctgaaagatatagttcctcagtggatcggaaaagcaaggcagctaagcgaaatatgcctggcgaggatggggtgcgccgggttgtttattgaagataaagcaaccggcatcacgctacttcaacagggctccaatgagggctggaacgtgcatccgatagatggtgatttaacgtcccttcctaaagagtcaagagccatcaatatctctggttatgttgcatcgggaaaggttcgaatttccaagtatgcctttgaaaaactaaccgaatacaaacagtcaaagaaaaatcacctgttattccaggtcctgaaattcatcataggtgaagaggaccaggatgatgatcttttcgactgcttcaactatggcgttgctatcgggctcggtaacggcgacggattctga

SEQ ID NO: 235368 - DNA, 711 bp, Klebsiella pneumoniae
atgggattcacacgtgaaatgtataagctgggttttgaaatatccccagtaatactttgcggagggatagcgcaggccattcctggaggaatgctcccggtcgtcgctttgacgcagagcgcgagctttgttacggggctgcttggaggagccataaacctacccgatctggataaatatttctgccactggcgcccggttcagggcgccacaatggttgattatgaaattgccagataccctttcgccaaccaggtagtagctgcgaacgccttgcttgctcagcctttgcgcgtttcgttggtaatggaggccccggtcaatgaaaacaccggggcgatgacaaagctcgtcactatgagtgctttgcagtctgtccttcaggcgcattctaacttaggcggcacgtttatcgtcgccaccccatccgttatctatagcaactgcattttgcgtgtcgtgagggacatcacttctggtaatgatccattaccacagcgttcatggatatgggatttcgagcagccactgataaccgataatggtgcagagcaggctgtgaacaattttttaaacaagattggcgccggggatatggtaaccgacccatcctggactaataccgccaatgctcttggcaacacgcctctcgggagctctgtatcggaagcaataaccggcctattgggtaagttgggggtagggccatga

SEQ ID NO: 235369 - DNA, 1440 bp, Klebsiella pneumoniae
atgaaagttgactggcttttcaaaaacgtcacggtgatcgacgggagcggcgggccgcaataccgtgctgatgtggcggtgaagggcgatcgaattatggctatcgccccggcgctggacgttgcggcggagcaggtgattgatggccaggggcgggtactggcgccgggctttattgatgtgcatacccatgatgatatcaacgtgatccgcatgccggagtacttgccgaagctcagccagggggtgacgacggtgatcgtcggcaactgcgggatcagtgcggcgaccgccaccatgcggggggaagtgccggacccgatgaatctcctcggcgagcagcaacactttatctatcccaccgtggaggcttatgcccatgcggtggaagcggcgcgaccgtcgctgaatgtcggcacgttaatcggtcacaccgcgctgcgtaataaccatatggacgatctgtttcgtccggcgaacgagacggaaatcgccggcatgcgcgtacagctacgcgatgcgctgcgccagggagcattagggctcagtaccgggctggcctacgccagcgccttccagtcgaccaccgaggaggtgatggcgctggcggaagagctggcggccgggaagggcgtctataccacccatttacgttcagagtttgagccgattctcgaggcgctggacgaagccttccgtattggtcgccacggcaacgtgccggtggtggtttcgcaccacaagtgcgccggggcaaaaaactgggggcgtaccaaagagacgctggcctttttcgatgagatgcgccagcagcaggatatcgcctgcgactgttatccctattccgccagctcgtcgacgctggatatgaaacaggtgaccgatgagtttgatatcgtgatcacctggtccgaagcgcagccggagcaggcggggaaaacgctgcagcagatcgccgatgagtggcaggtgagcctgcacgacgccgcggcgcggctgatgccggcgggcgctatttatcacaacatggatgagcaggacgtacggcgggtgatgcgctatccggtcaccatgattggctctgacgggctgccgaacgatccgatgccgcatccgcgcctgtggggcgccttcccgcgggtgctcggccactatagccgcgacgagcagctattcccgctgactaccgcggtacacaagatgaccgggctgtcggcggcgcgcttccagctggcggatcgcgggctggtgaaaattggctactttgccgacctggtgctgtttgacccgcagacggtgcgcgatgtcgccagtttctccgacccgaaacgaccggcggacggcattgaggcggtgatggtcaacggcgtgatgagctacggcagtgataagaaaattaccggacgggcagggcgtttcctgcgtcgtcggatggactaa

SEQ ID NO: 235370 - DNA, 1419 bp, Klebsiella pneumoniae
atgtctaaagggttcacattcgaaaagaatttacctcatcaaaaggctggcgttgatgcagtgatgaatgtctttgtatccgctataccccatcagacggataatgttgctattcgccttttagctaatccagaactgaatctatctgaacaacaatactacaacaacataaaaaatgttcaggagttcaatgatattgagcactcaaaagataattacgatgctaaaagcaacgtaattgatgtttctatggagacaggtacaggtaaaacttatacttacaccaaaacaatttttgacctgaacaaatcatttggtattaacaagtttatcatcattgttcctaccctatctatcaaagctggaacagttaactttttaaaaagcgatgctttaaaagaacactttagagacgattacgagcgtgaactaaagacttacgttgttgaaagccagaaaagttcgggtaaaaatacaaaatcgtatatgcctcaagctatccatgattttgttgaagcaagtaatttcaataagaaatatatacacgttcttgtgatcaactcagggatgattaactctaagtctttaactgacacttatgatgttggcttgcttgataatcagtttgataccccattttctgcacttagtgcgataaaaccattcattatcattgatgagcctcataaatttcctacgggtaaaaagacatgggaaaatattgaaaaatttaatgctcaatatatcatccgctatggcgcaacctttagtgaaggctataaaaacttagtttatcgtcttacagccgtggatgcgttcaatgaagatcttgttaaaggtattgatgcatacattgaggatattgttggtgatggtagtgctaatcttaaatttgttaaatctgacggaaaagaggccacttttgaactaaacgaaaatggtaatagaaaaaaattcaagttagccaaaggtgaatcactatctaaaacgcatagtgcgatccatgatttaacactggatgccttaaacaagagcactgctgtattgagtaatggtattgaactaaaaattggtagctcaataaacccctactcttacgatcagacacttgctgataacatgatgcgtaaagctgtcaaagaacactttaagttggaaaaagagtatctgacacaaaggccacgcataaagcctcttactcttttcttcattgatgacattgaaggctatcgtgatggtaatgatattgccggaagcctgaaaactaagttcgaagaatacgttttggcagaagctaataaactgttaaaaacagagaaggatgagttttatagaaactaccttgaaaaaactgttaaggacatatcttctgttcatggtggttatttttcaaaagataatagtgataaagatgattaa

SEQ ID NO: 235371 - DNA, 330 bp, Klebsiella pneumoniae
atgaaggatagaatcgccgaaatactacaatacaccctgaaaaaagattctggatctgactttcatcagatcatgcatgaagtcagtgttccacttcatacctggaacggtatcgatgtggttgcgtacggaaactctctgcacgatgctgacagctactacctcatacgggcttttgaaagtgaagaacagatggaaatcgttcttgatgatttctatgcgagtgcgggttggcgtagtggcccacgagaagcaatcatcagtcgaattgaactcagtttaaaatcagttctatcactaccacaaagcgttattgatggattgagataa

SEQ ID NO: 235372 - DNA, 1077 bp, Klebsiella pneumoniae; identical to SEQ ID NO: 199874

SEQ ID NO: 235373 - DNA, 297 bp, Klebsiella pneumoniae
atggctaaagatatcgatgcacttctggaacagcaggcggatcagatgacctccgttttaaaaagccatgcggcgcatattgaaagcatgctggcgcagcatcgctttcaggtcgcgcagctggcattgcacaacagcccggaaccgttcgttcatgaggtattcaaccatctgcgtgatcgcctggtacaagtcaccatcaatgaagctggccttgctgatgctgaggatgcgcgttacctgctgcgaatacttgatcgcatggaattgtcagcattagaggggaaaccattatga

SEQ ID NO: 235374 - DNA, 351 bp, Klebsiella pneumoniae
atgatttaccgcaggggatgggtgccggttttgtttcggcatgagcttgagcgtaagttaaaagagcagggtttcgaaaactggaaagagatatgtaattttctttgcggtgaaggggatgactacgccgaatcagccaaaatgccagagcaatacgattaccaggtggtcgacaataccaaatggatggcaagccgtgacgcgacgttctggcagcgtcttaaccgcctgtggttcgtgccgctgtatttgttgaccatcccattccagtggcttatccgtgggcgtgtgggattcgctacaacgtcaaaaacagcagcattcttcagccggttaaccgggctgaaataa

SEQ ID NO: 235375 - DNA, 168 bp, Klebsiella pneumoniae; identical to SEQ ID NO: 180609

SEQ ID NO: 235376 - DNA, 792 bp, Klebsiella pneumoniae
atgaatgcactctctgttttctcatttcaggaagaacatcctgttagggtggttatggttgatggtgagccgtggttcgttgctatggatatctgctcagccctccacatcgccaacccttctgatgctttaaagaaattggaccatgatgaaaaattgaccctcggtttaaccgaggctcaaaaattagatcgtatggcaagggaagttaatgtggtttctgaatctggactctatacgctcatcctccgctgccgcgacgcggtgaagcagggaacgacagcctggcggttccgcaagtgggtcaccaatgaggttctaccagctattcggaaaagcggtgagtacagctacgtcgaacccgcgccaaaaagcgccggtgaaccattggactggcggcaaaaggaagagttacgcggcctgataaacgatatagcccaaagttttcagtacaggaacgcgtggatcagtggcgtctggctggcgcttcgtcgcgcctgcaggaacccttcacctaacccaattacggtcgacgatctgccggctatcattgccgaattacgccgaatattaacggcggcagaaactgccctaggtaatatgcgagtttacgaacgggagctgctgcgcgaggtagttcgtggcgggcgccagagtatgtcgtgtgaagaattgcctatcactgatatcaatacggaaatggagaaggtgctgccagcgcatttcgagctggccatcaataaactggaggccttatccacaaaattagaggctcctgccgtctcttcctga

SEQ ID NO: 235377 - DNA, 792 bp, Klebsiella pneumoniae; identical to SEQ ID NO: 235376

SEQ ID NO: 235378 - DNA, 168 bp, Klebsiella pneumoniae; identical to SEQ ID NO: 180609

SEQ ID NO: 235379 - DNA, 366 bp, Klebsiella pneumoniae; identical to SEQ ID NO: 199846

SEQ ID NO: 235380 - DNA, 1077 bp, Klebsiella pneumoniae; identical to SEQ ID NO: 199874

SEQ ID NO: 235381 - DNA, 756 bp, Klebsiella pneumoniae
atgagccttaacgcgaattatcagaagttagagccaggcgatgaggttcgtctcctggagatcgatggccaggcgtttggcctggacgaggttttgtatttccacggctataacgtcccccatactgcagccgaaatcctcgccgctgacggcgacctggataagctgcctgcgaaaagcatctggtggcaggggcgggagtataaagcctggccatgtgtaatcgaagggatcgagtcatccaccactggcagcgacgcgcagccaacgctgcgggtagggaacatcgacgggaaaatatccgcgctctgtcttcattacgacgatctggctctggcgcgggttgtcatccacgacacgcaaaaacagtatctcgatgcgaagaactttccggacgggaatgcctcagctgatccgacgcaggagaaacggcgccttttcttcattgacgtaaagcattatgaagacgatgagaaggtggaatttactctctccagcccgtttgccctgcaggggatgatgatccccactcgccagctgcatgcgatttgcacctggtgtatccgcaatcaataccgcagcggtaacgggtgcgactatgccggcacccggtattttgacaggaacaatcagccagttgatgacccgtcgcaggatgtctgcaacggaacgctcacggcctgcaaattacgtcatggtgagaatagcgaactgccgtttggcgggttccccggcacctcattaatcaggagctga

SEQ ID NO: 235382 - DNA, 828 bp, Klebsiella pneumoniae; identical to SEQ ID NO: 229168

SEQ ID NO: 235383 - DNA, 339 bp, Klebsiella pneumoniae
gtgcccgccggtctcggccatccgctctctcgtctgccacgggtgcaggagaaagtcgggcagatcgccgggctgctgctggtcaaccgcagcctgctggagcaggccgccgcgctgcgcttttccgccatcgaggccaatctggcgaaagtcaccatcaccgacaacgccattcaggcggtgaatatcgcgctcgagctgaccggcaatcatggtctcagccgacaaaacccgctggaacgccactaccgcaatgtgctctgcggacgggtacataccccacagagcgacagcgcctggctggcagccggcaacttcgtctttcaatcacaaggataa

SEQ ID NO: 235384 - DNA, 561 bp, Klebsiella pneumoniae; identical to SEQ ID NO: 5006

SEQ ID NO: 235385 - DNA, 822 bp, Klebsiella pneumoniae
atggctaaagcaaactcttcattttctgaagtgcaaattgcccgtcgtattaaagaggggcgtggccaagggcatggtaaagactatattccatggctaacagtacaagaagttccttcttcaggtcgttcccaccgtatttattctcataagacgggacgagtccatcatttgctatctgacttagagcttgctgtttttctcagtcttgagtgggagagcagcgtgctagatatacgcgagcagttccccttattacctagtgataccaggcagattgcaatagatagtggtattaagcatcctgttattcgtggtgtagatcaggttatgtctactgattttttagtggacagcaaagatggtccttttgagcagtttgctattcaagtcaaacctgcagcagccttacaagacgagcgtaccttagaaaaactagaactagagcgtcgctattggcagcaaaagcaaattccttggttcatttttactgataaagaaataaatcccgtagtaaaagaaaatattgaatggctttattcagtgaaaacagaagaagtttctgcggagcttttagcacaactatccccattggcccatatcctgcaagaaaaaggagatgaaaacattatcaatgtctgtaagcaggttgatattgcttatgatttggagttaggcaaaacattgagtgagatacgagccttaaccgcaaatggttttattaagttcaatatttataagtctttcagggcaaataagtgtgcagatctctgtattagccaagtagtgaatatggaggagttgcgctatgtggcaaattaa

SEQ ID NO: 235386 - DNA, 2109 bp, Klebsiella pneumoniae; identical to SEQ ID NO: 16545

SEQ ID NO: 235387 - DNA, 1668 bp, Klebsiella pneumoniae; identical to SEQ ID NO: 16546

SEQ ID NO: 235388 - DNA, 1527 bp, Klebsiella pneumoniae; identical to SEQ ID NO: 16547

SEQ ID NO: 235389 - DNA, 1617 bp, Klebsiella pneumoniae; identical to SEQ ID NO: 16548

SEQ ID NO: 235390 - DNA, 126 bp, Klebsiella pneumoniae; identical to SEQ ID NO: 16549

SEQ ID NO: 235391 - DNA, 378 bp, Klebsiella pneumoniae; identical to SEQ ID NO: 16550

SEQ ID NO: 235392 - DNA, 789 bp, Klebsiella pneumoniae
atgagggaagcggtgatcgccgaagtatcgactcaactatcagaggtagttggcgtcatcgagcgccatctcgaaccgacgttgctggccgtacatttgtacggctccgcagtggatggcggcctgaagccacacagtgatattgatttgctggttacggtgaccgtaaggcttgatgaaacaacgcggcgagctttgatcaacgaccttttggaaacttcggcttcccctggagagagcgagattctccgcgctgtagaagtcaccattgttgtgcacgacgacatcattccgtggcgttatccagctaagcgcgaactgcaatttggagaatggcagcgcaatgacattcttgcaggtatcttcgagccagccacgatcgacattgatctggctatcttgctgacaaaagcaagagaacatagcgttgccttggtaggtccagcggcggaggaactctttgatccggttcctgaacaggatctatttgaggcgctaaatgaaaccttaacgctatggaactcgccgcccgactgggctggcgatgagcgaaatgtagtgcttacgttgtcccgcatttggtacagcgcagtaaccggcaaaatcgcgccgaaggatgtcgctgccgactgggcaatggagcgcctgccggcccagtatcagcccgtcatacttgaagctaggcaggcttatcttggacaagaagatcgcttggcctcgcgcgcagatcagttggaagaatttgttcactacgtgaaaggcgagatcaccaaggtagtcggcaaataa

SEQ ID NO: 235393 - DNA, 525 bp, Klebsiella pneumoniae; identical to SEQ ID NO: 16553

SEQ ID NO: 235394 - DNA, 537 bp, Klebsiella pneumoniae; identical to SEQ ID NO: 16554

SEQ ID NO: 235395 - DNA, 384 bp, Klebsiella pneumoniae
atgttccctctgttgaaaacgggggggctggctgatgtgaccggtgctctcccggcggcgcaaatagccgagggcgtggatacccgcgtgctgctgccggggtttcccgcgatccgcgacggagtaggggaaccgcaggtggtggccagcagggagaccttcgccgggccgatgacgctgttgtttggcgactttaacggcgtgggcatctatctgattgatgccccgcatctctatgaccgaccgggtaatccttatcatgacccgcagatgcaggattatcccgataacgtcctgcgtttcgcgctgttgagttgggtcgcggctgagcttgctggcggtctggatccgttctggcggtctggatccgttctggcggcctga

SEQ ID NO: 235396 - DNA, 3072 bp, Klebsiella pneumoniae; identical to SEQ ID NO: 207930

SEQ ID NO: 235397 - DNA, 972 bp, Klebsiella pneumoniae; identical to SEQ ID NO: 127364

SEQ ID NO: 235398 - DNA, 2382 bp, Klebsiella pneumoniae; identical to SEQ ID NO: 207932

SEQ ID NO: 235399 - DNA, 1731 bp, Klebsiella pneumoniae; identical to SEQ ID NO: 207933

SEQ ID NO: 235400 - DNA, 909 bp, Klebsiella pneumoniae; identical to SEQ ID NO: 207934

SEQ ID NO: 235401 - DNA, 684 bp, Klebsiella pneumoniae
atgtctgtttggtttattactggcgcctcacgcggctttggccgtgccgttgcagaagaagctctgaagagaggtgaaaaggtcgtggcgactgccagaaatccttcgtcacttgagtttctttctcaggagtttggtgagaatattctcacgcttcagctcgatgtgaccaagcaatctcaggttaatgacgctgtggataaagccgtgagccatttcgggtcaatcgatattctgttcaacaatgctggtatcggttattttgccgcggtcgaagagagtgatgagcaggaataccgccggatgattgaaatcaacctgtttgggcttgcatccgttacaaatgcagtgcttccacacatgcgtgcacaacgttcggggaccatacttaatgtttcatccgtaggtggtatccggtcatttccagcagtaggctggtataatgcatccaagttcgctgttgaagggctttcagaagcgcttcagcttgagaccgcgccgcttggtattcgtgttgtcctcattgaaccaagtgcattcgccactgactgggctggttcttcagctgcagaagttaagccagacagggtaattacggactatgctgacacggccggcgcacagcgcaagattttccgtgaaaatgcagggaaagaaccgggtgatccgcaacggctttgttga

SEQ ID NO: 235402 - DNA, 159 bp, Klebsiella pneumoniae
atggttgaaattaaatacatggaaggtacaaacaaattcaagtgcatgacaagctttaacgaaaaaaatttttacataattaaacagcctgaatacgagattaaattcaacgctccatgcagaaaatataaacgttctaaaaggtttatcagaacataa

SEQ ID NO: 235403 - DNA, 1272 bp, Klebsiella pneumoniae
gtgacacagagagttatattacgagtcaggcctccgctactggtatcgatggctgcccttttcattaatggggtactttatgcaacatggggtgtcagcatacctgtcataaggagtaaatttactgtttcggaagctgagctctctctcgcacttgccgccgttgctatgggcggcatagttacaatggctggttcctcgagaataataaatcgctacggcagtcgtacaagcgcgatggtaagcggcgttatgatggcattttgcgcatccggaataatgttaataccacagtatgctcctttggttttactgcttatcttgtttggtattttcaccgccgcgaacgatatcgcccttaacacgcaggtttcggcacttgaacggcattcaggacgttctttaatagggatgctacatgcaagcttcagcgcaggaggtctgaccggctcattattatccggtacatggactcacactggtctgggagctgaggccagcttcctggttccttcagcgatcggggcgctcgtgattttatgcaccttccgctatatggtgccgctttcagtcgaacagagctctgaaaatatctgcgacaaaatggtcgcatcttcaaactggtctcttaaggcaacacgaaggaggctcaaattatttggcctgttggccttttccgctctggttgtagaaggtgcgttctatgactggtcagcaatctatatgcgagagatagtatatgctcctgctgcatggtcaggatatggctatgcgagcttttcgtttggtctgattgcgggcaggttctccggtgactggatcagggaccgtatagcacatcagaaagtagttggctatggaggggcgctttcgctcgctggcctgatagccgtactgattaatttttctgctcctactgtaattttgggttttcttttaacaggaatgggaatatcaaatattatcccgcttcttttttcgtcctcagccaaacttgccgttaatagtggcctttctccttcagaaggtttggccataaccacacgtttcggctacgcaggcctgcttgcaggcccattaattgttggtcctgcagcagaggcggtgggactcagggtagcacttgccaccctgggggtggctctgttcctgacatgtacaggctggcttcttctcagcgccagaacatcaggcatgccatggcgtcttgtatcgaaaaaaaaggatagcaatgatattgcagatctacccgctggctatcacaacaggtaa

SEQ ID NO: 235404 - DNA, 918 bp, Klebsiella pneumoniae
atggacaatcttgaaataagacggcttcgtgcaaccctgcgtgaaatggttcgtgagcttggcatgctgagccgcagtagtagcggaacatcgctttcccctctgcaaagtcatatccttatagaactgagcacgcagccttatagtgcaacagaactggccggtatactttgtgttgaaaaggcaagtatgagccgtgcgcttcgaagactgttagaagcttcctatattgaaagaacaagggatgaacatgacggaagatcgtcaacattcaagctaaccgatgccggtaagcacatactggccgttcttgaagaaaatgctgatcggtttgctgaacaggcaatcgcttcatcttctgatgaagaagtgcagctatttatgcatactttgaaaaactttacagccagtctacgcaatgctcgtaggcaaagggaatccaattttgtgattcggccgttgctgtctgcggatgatgccacaatggcaaatatcatacgaaacagcttccgcgagaataaaatcgatcatcttgaaggtgtcagtctgcacgatcctaatcttaactgtctgtctaaaacatacagtcaaccaggttttgcatactgggttgctgaaatcaacggagtcgtggttggagggggcggtattgcgccactaatgggttacgatggtgtttgtgaaatgcaaaaactatttttcacaagcgaggtgaagagaatggggcttggcagaagaatgattgcacacattctatctgagtccagaaaattaggttataaattttgctatcttgaaacccttgatgaactcggagatgctgtgtgtttatataaagcattcggatttaagaattcggaccgaatgggagcaaccgggcatacggactgcaatatctgcatgctgaaagagttataa

SEQ ID NO: 235405 - DNA, 204 bp, Klebsiella pneumoniae
atgacgaaacaggaatggattttacgactacggcgctgcacatcgaaggaaaccctggaaagggtaatagagaaaaataaatattctctgtcagatgatgagcttgagcatttcaatgccgcggttgatcaccggctggcggagatgacgatgggaaagttgtatgaccgggtaccgccaggtgtctggaaatttgtgaaatag

SEQ ID NO: 235406 - DNA, 495 bp, Klebsiella pneumoniae
atgaaagtcacagaacccggactgaatacgctgatcgataacctgaacaccctgatttgcgaggacagcctgctcacgcgccaggagcgtgaaacgctggtactggccgtcgccgctatcggcgccatgaaagcgcgcgtcggcttgaaaaaaggcgatgcgccgaccgttgccagacgggaaaaaagggagaaaaaagaccgccagcctgatccgcgttttccgcgagccggtcatccctggcaggaagacgaaaaaaccttactgagtgatgcgctcgattcggtaccggacgaagagattggcaagcatcttttctggctttccgagaaactgggcagaacgcctttcagtgttgctttccagatcgcggcaatcagggagctgcaggacggctgggaggagcagttcagggagatttcggataacatacgtttatccggtctgagcatcagtgattatcttacgcagaacggcacgggccataacgcctga

SEQ ID NO: 235407 - DNA, 219 bp, Klebsiella pneumoniae
atgatggtaacaggaattaacacggtacgtatcggcggtgaagtgaagcatatcaccgagctcgatgcgctaacactcatgcatgaatggtccaagctgaaaaaagagaatgctcacctgtatgattataaccgtcaggttaaccggggctggcgcggctttgtcctgcgcctgatgggtatccatttgcctgtcagagaccattcgcccggtatttaa

SEQ ID NO: 235408 - DNA, 411 bp, Klebsiella pneumoniae
atgggcacgaatagccttgatgttcaacttgtcgctgctaatcgtcggtctgagtgcgtcgtaactggcttcacccttagggatgaacagcttggtgtcgcccagggcgcggatgcgcggcgcgaagcggaagcccagcagatgcatgagggcaaagacatgatcggtgaagcccgccgtgtcggtgtagtgctcctcgatgcgcaggtcggactcgtggtacagcaggccgtcgagcacgtaggtcgagtcgcgcacgccgacgttcacgaccttggtgtggaacggcgcgtactggtcggagatgtgcgtgtaaaacgtccgccctgggctgctgccatatttcgggttgatgtgcccggtgctctcggccttgctgccggtgcggaagttctggccgtccgacgatga

SEQ ID NO: 235409 - DNA, 387 bp, Klebsiella pneumoniae; identical to SEQ ID NO: 170802

SEQ ID NO: 235410 - DNA, 192 bp, Klebsiella pneumoniae; identical to SEQ ID NO: 98356

SEQ ID NO: 235411 - DNA, 1296 bp, Klebsiella pneumoniae
atgaaagcttacacgctaagtcttattgcactggcgctaacctcttcactggcgcaagccgcaacagccgatctggtgctggataaagtcgtaacgctgaaccgccatggtatccgcccacagatggatacggcaaaaatccaggcaatgtcgccagaaactttcccccattttcagggcaaagatggcgagctgaccatgcacggctacgctgccgtcacacgcatgggagattatttgcgggattacctgcagcaacgccagttccttaaaaaagatagctgcctcaatgccgacgatatttttgtccgcaccagcgccaaacagcgcacccgtatgacagcttacgccctgatcgatacactgtttcccggatgtggcgtcaaagtcagctcacccgccagcaaaaaagatacactgtttaaacccattgataatggcgtcgctccgctagatgtcgccagggccagcaacagcgtcttacaaaagatgggtggcagcctggaggcggcaaaacagcgttatgccggtgacatagcagcgatgcaaaaaatcgttgaccccaactgtaaaggtgatcaatgcacctactccagcggtgaatggtcgattaagaacctgaaggatcgcaatattgagctggaagggcctctattctggggtaacgagttgggtgaaaccttccgcctgcaatatgccgaaggactgccactggaacaggttgcgtttggccacgtcaaaaatactgacgacctgacacggctcaacaaactgcatcagattaagttcgatctaatacttcatgacccgtatatcgccgcccgcgctggctcacaactactgagccagatcctctatacgctggaaaaggggtctggtttccacgaccccaacgccagcccagagattgccgccagcgcgccggatgcacggatggtcatgtatttcggccatgactccaacctgacgccactgcaaaccctgctcaatgtctcctggcatctgaagggctacccgaaagatgatacgccgcccggaagcacgctgatgtttgaacgttatcgggatagcaaaacgcatcagacgtatataggccttacctttatgacgcaaagcctggatcaaatgcgtcagctggagccgctaaatgtgaagaatccaccgctgcaacaaaagcttaatctgcactgtaaaaacagtccggacggctggctgtgcccgatagatgaatttgccgcgcagattaatagccgtctcgataagactgcgatgattgcgcagaactacgcggagtag

SEQ ID NO: 235412 - DNA, 549 bp, Klebsiella pneumoniae
ttgtccgcccacatctttctggataccgaaacgacggggctgggtaataccgcagaagcgctggaaatcggcctgaccgatgcggccggccgggtgatatttgaaacccgcctgaagccgacggtcgccatcgaggcgcaggccgccgccgtgcatggtatcgatgagccggcactcagcggcgcaccatcctggccagatgtggcgctgcagctgcgccacgccatcggggcccggccagtgattatctttaacgccccctttgatacccgcattctgaaacagacggccgccgcacatggcgatccggccgactggctgggagaactgacagtgtattgcgcgatggagctggctgcagggtattttggggccaccaatcgctatggcaccatttcgctggccagcgcggccagtcaggcagcattgacctgggaaggggaggcacactcggcgatcgccgatgcacggatgacggccggggtggtgaacgccattgccgcataccatctggcattgctgcaggagcaggaacggctgcaggcctga

SEQ ID NO: 235413 - DNA, 1077 bp, Klebsiella pneumoniae; identical to SEQ ID NO: 23497

SEQ ID NO: 235414 - DNA, 393 bp, Klebsiella pneumoniae
atgatgctgtttcttcgaaagtacggatttttgtttatacctccagtctactggctcatctatctgggagccagactgacttacaatggactggcaggagagttttctcctgatttctttcagggtattcgacatgaaggcgtctatattatctgtagtttgtgtgtattttattttttctgcttagaggtggaagttggtgatggggagttctcagcgaacattctgttcctgattgttttctttcatgtggttttattatttatcactctgcttatttgtctgtggcaaggggaggtgttgttggattcgatctttatgggtcagattattgcttccatgtgtttattgttttttattccagtgctttccattataagaaggagtttctag

SEQ ID NO: 235415 - DNA, 972 bp, Klebsiella pneumoniae
atgaatatttactgcgatgatggttcaactaatgttaagctggcatggtttgaaggagatgagcttcagacacgagtctctgcgaactccttcaggcatggctggaaagtggcagaattcagtgcggcaacgttcaattatcaggtgggcacgctgaaatacacctgggacagcgtcagccgggatgccatcccgacaacaaacgtggaatatcagtacggtgatctcaacctgctggccgtgcatcatgcgctgctgaacagcggactggagccgcagccggtgagcctgaccgtgacgctacccctgagcgagtattacgacggggactgccagcggaacgaggagaacatacgacgcaaacgggaaaacctgatgcgtgagctggttctgaataagggcagagcatttaccgtaacggacgtgaaggtgatgccggaatcactgccggcggcgttctcccgtctcgcggagctgaagcccggccccgctgagaccaccctgattatcgatctcggtggcaccacgctcgatgccggtgtgattgtcggccagtttgatgatatcagtgcggtgcacggtaatccgtctgtcggcgtgtcacaggtcactcgcgcagctgcaggcgcgctgcgggcggcagacagcgaaaccagcgccctcatcgctgacactatcatccgcaaccgcaatgatcgtcagtatctgcagcgtgtgatcaacgatgccggtaaaattgacgaggttcggaacaaaataacagaggcaatcacctccctgggcgcgcgtgtcaccagtgagctgacggccttcaggaacgttaaccgggtattcctggtcgggggaggggcatccctcattgaagaggctatccgtcaggcctggcctctggctcctgaccgtatcgaggttataggcgatccgcagatggcgctggccagggagattgccctttacaataaagaggactaa

SEQ ID NO: 235416 - DNA, 231 bp, Klebsiella pneumoniae; identical to SEQ ID NO: 234330

SEQ ID NO: 235417 - DNA, 993 bp, Klebsiella pneumoniae; identical to SEQ ID NO: 213942

SEQ ID NO: 235418 - DNA, 429 bp, Klebsiella pneumoniae
atgcagtatgtgacaacacgccccgtcctgaatgttgaagagtgtgaccgcctgtcttttatgccgtacctgttcggcacggattttatgctcgcagaattgcaggtgtatgcgctggcgaaacaatggatgcctgaatacagcagtgagttctggcactttatccggctgccagagggcggcggttacatgatgccggattgtggccgggttcatctggtcaacagtgaaaactggtttgatcgcattgtgagcgccgacgccgcgggcattattctgacatcgctggccgttaaccgtcgtctggcggcaaatcatgacagcagtaatccggccctgacccgcctttctatgctgcgtgatgcccagctctggaatcacatcacctttcacccggaatgcagtgctatttacgccgcgctggactga

SEQ ID NO: 235419 - DNA, 573 bp, Klebsiella pneumoniae
atgcgtcggcgccagaccgatgacgcgcggacgggtctcttccggcagcagactgatggcactcatgactgcccggaactgggtggttttccccaccccggcatacccctgaaccaccgtgaaccggtccgtgctttccagaatcatccgggtcgccgcccgctgtccggcggtcaggtccgtcatcagactggccggtacgcgatccatcaggggggccaccgcgtctttaccttccagcacgtgggtcaggatgcttttttcggcgtcccaggtctgacgggaaatcagcaggtcattgccgtggccgtgcgccaccggtacattcagcaactgccccgacctgatttgtgcctgaatggtcgtgtcgatgtccgccatcggaaccttcccgcccccggtttccagcgctgtcgccagcagctggggccgggagaaggtcagtttctcactttcaagcagcgggatggccaggtgaatggcctgttctgccggggtacgcagtccggccttctgctgcgcaatggccgcatccaggtccgtctcgccggatcgggtcttcagctgctctga

SEQ ID NO: 235420 - DNA, 336 bp, Klebsiella pneumoniae; identical to SEQ ID NO: 139380

SEQ ID NO: 235421 - DNA, 585 bp, Klebsiella pneumoniae; identical to SEQ ID NO: 216544

SEQ ID NO: 235422 - DNA, 261 bp, Klebsiella pneumoniae; identical to SEQ ID NO: 92452

SEQ ID NO: 235423 - DNA, 240 bp, Klebsiella pneumoniae; identical to SEQ ID NO: 233461

SEQ ID NO: 235424 - DNA, 327 bp, Klebsiella pneumoniae; identical to SEQ ID NO: 223636

SEQ ID NO: 235425 - DNA, 327 bp, Klebsiella pneumoniae
atgctgcacgaaacccggcagtacggcattccggcgacactgcgtgggctcgtcaataacgacatgaagaccaccactgacgcggtgctgcagctggtgaaggatggcgtgaccgacggcgtgcagatcgacccgacactatatacgcagtacagcatccggagtgtgccgtctctggtggtacggtgtcaggccggatatgacgtggtacgcggtaacattcacgtcaaacaggcgctggagaaagtggcacaaaccggtgactgcgcacaggtggcccggcaaatacttgatgcgccctcgaatgccgccgggagccagccatga

SEQ ID NO: 235426 - DNA, 291 bp, Klebsiella pneumoniae
atgtgcatcagcctgcggtgccggctccgcctcctgattctgagcctgctgttgcccgttcttttccgcttccagttcatcaatggttttcagctgaaaaccatcctggaacacgacggtcacttcgttaccggcaccaatcggaatgaccgggtgatactgctcggcccttttgatgtagtactcgctcagcgtctgcgcagctttagatgcaccaccgcctacgcccattttcagaacatcaccggcgccaacagatgcggttgcccccaggccaactgccggctgtga

SEQ ID NO: 235427 - DNA, 126 bp, Klebsiella pneumoniae
atgatgactcatgtgattgaaagggttcttcagtttagcaaattttttgatttcatcacttttggttggcaatattttaaggcgtgtattagaatcatcgtcaatttctatgattgcagtccctaa

SEQ ID NO: 235428 - DNA, 288 bp, Klebsiella pneumoniae; identical to SEQ ID NO: 84381

SEQ ID NO: 235429 - DNA, 333 bp, Klebsiella pneumoniae
gtggacctgcgcgactggaaagtggtgctgttcatgcagggacactgtccctactgtcataagtttgacccggtactgaagcagctggccggacagtatggcttctccgtgttctcttacaccattgacggacagggtgatgacgcgtttcctgaggcgctgccggcgcctcctgacgtgatgcagacctttttccccaatatcccggtggccaccccgaccacgtttctggtcaacgtgaacaccctggcagcgtacccgatcctgcagggcgccacggatgcacagggctttatggccagagtggatacggtatttcagatgatgcactga

SEQ ID NO: 235430 - DNA, 192 bp, Klebsiella pneumoniae
atgaaacttgcaccacaaagccgcgatatcctgcgacagtacaaaggcctgattaatgcccgccgccgcgatgccggtcagcgggaactgaacaccgcgcaggtgatggatgaaatctgcgaatacatgacctgtcagtgtgccgtctacattggcggacacttcatcttacagggcggcaagggccagtaa

SEQ ID NO: 235431 - DNA, 372 bp, Klebsiella pneumoniae; identical to SEQ ID NO: 212322

SEQ ID NO: 235432 - DNA, 168 bp, Klebsiella pneumoniae
atgttccgctccattgcagataagattgtgtttgagggtgtagagactcaggagcaggtgaactatctgaagacgttctggccacagagttatgctcagggctggtattactccagagctcttccgctggaagaagcgagaaaacttaccatccgggaattgaactga

SEQ ID NO: 235433 - DNA, 405 bp, Klebsiella pneumoniae; identical to SEQ ID NO: 229378

SEQ ID NO: 235434 - DNA, 1803 bp, Klebsiella pneumoniae
atgttagatgatccttacaataacactattatatctgaaataaataacaaccttcatagttctttttattcattggatgaatctaaaaaagatgcatttgaaaaaataaataagactttgcctatattcttagtccaaggacctcctggtgttgggaaaacatatctgataacgactcttgtaaatcaaatattctctaatgaaagtgagagtcgaatagttctaacggcacaaagtcattctactgtccagcatttataccaagaagtgacttcatccttagatataacgaactccaaaccattaattgttagttgtataaaaaaagattcggatgatgatagcgatgacatatcaataaaccaattagactcccttgcgctagaatatattaaaagatttattgatagtgatatttttgatgaatgtacatcaactataagtaaaaattcaattatatcagccagtcgtaaatcatccaaatcagacagatattctcttatcaaacagatattgaaatctgcaaatatggtttttgctacaactaactccagacaagtagaagaattaattagtgagaaatcacaatttgactggtcaataatggaagaaacaggaaaagtcacaggcgtagaacttcttagcccgatgttactttcatatagaagactgatgataggtgatcataagcagttacccccttatgcaacagaaaaaatgagagagatcctcactgacattaataaattgaagaacgcaataattattgcaactgatataaataatcaacaaataaaaggtgattggataaaagagcgttttactgaaaattttatctcaacaattgatagcgaaacacttgaaaaattgagttctagtgcagtcaggcttcatctcttatttgaaagtcttgtgcttgaagaaaaagtgaaatcacaaaaatatatagatcgttacggtgatgatagaaagcatagaaaaattgcgagcatgcttaatttccaacatcgtatgcatccagatatcgcaaacttgatctctagcgtattttacgataaaaagcttaaaacagaaccttcaaaagaaaaattctatagagatgcaaatactattaccccttttacatttaaacctaactcaccattacttaactccccggcaattatatggattgatacccccgatgttcaacaaactaaaaacaattatgctgcagaatctcttcctatttggacaaataacttagaaaaaaatactcttttatccgttcttgaacatttgagagtgaattcaaaagcagaaaaaacaccaaaactagcaatcatgtcaccttatgcaaagcaggtagatttaattaagagaagtctggataaaaaactgcataaagaaccaaattcgttacaaatagaatattttcaaaaaccagatgatcattcttcattttgtagcactgttgatggttttcaaggggctgaggctgacatagttattgtatctatggttagaaataatcatcattcttatgttagagcatctctaggatttctccttgatagtaggcgcatgaatgtcctactaagtagagcaaaatataagatgataattattggttcattcgaattccttaaatattggtctgatttaatcgacaaaaaagaaattaaaaaaggtgatttaagcaatcaatttttagtcgatcttgtcaataaactcatcgaatatgagcgtgaaggattattaaagaagattgactctagagaattcaaacacgtaaaacaagataagaataagaaaaggacataa

SEQ ID NO: 235435 - DNA, 261 bp, Klebsiella pneumoniae
atgcctgttaacacctcagccatactacaaaatcagcgcctgactgcattcagtcagaatgaccttgaatgcctggagcatcttcgcaacgtcggccactttgtcagcgcgatgatgcaggagcaggactgcactaccattcgccgcgacccgactcagcagtcgcagcttacctccgtgatttacctcatgaccgcccagctcgacggcgtggtcgaacgctgcaaccaccgctggttcaccggggagggcaacgtatga

SEQ ID NO: 235436 - DNA, 255 bp, Klebsiella pneumoniae
gtggccggggaggcgcgtaaagccggcgagccggcggaccgggtgaaagaggttatcggggacgtcattcgcggactggagcgtgaccggccgggtacggagaaaacgacgctaccggatgatcctcagttccggcgccaggaggaggcgattcagcaggtggcctcagaacgtctgcagcgtgagcgtctgcaggctgtggagcgtgacatggttcgtgaccttaaccgcgagaaaaccctcgggggcgactga

SEQ ID NO: 235437 - DNA, 771 bp, Klebsiella pneumoniae
atggcttgtttttatagttgggacgttcttgaattatcaacgaatgcctatagacagggcgtagctgccttaatcgcagggatcgcttgtgtattattttacaggaagcggtttttatcagccactttattgttttatgttgcattatcatttcattggggagctgttgttgttgtacttgcatgcatagtatctttctttttcttgaattcaaggatgattgtttatgcagcaagatttgctcttgtcatgtttttgtgtgcaattttcataaaagtagatattgttggactgctatatgagcatgtatcatctttgggttttttattcagtggtgttaatctgtcatctaaagccgacgcttatttggctggtggggtggaaggtgctaatttttatgactttaatattcctagaagaatttataatatattgacaaccattattccattagggatgtttgttatttatacaattaataaaaaaaatatggagtatttcttttctgattctcagaaagtatgtattcttgcacttttctctcttttaagtatttacggggttttgttaatttcaatgacatggtttatgcggaatttctattggaatactttttttgcatgtgctttttatccgttgttccttgaatttatacaacaaaaaattccgaaaaagttaacgaaatattgcatcgcattttctgtgtttttactgctgctttcttgtataactatgtggcgaacaccttcaatctttatttcatacccttaa

SEQ ID NO: 235438 - DNA, 1365 bp, Klebsiella pneumoniae
atgaacgccctgcgcagcgggatccagagttatgcggcccgcagcggggacaccgccagtctggtcaatatggctaacacatcatcccttgaaaagcagcggctggcacaggccacaatggggcaccaggcgcttcgcgcacttccactgatgcagaccgtcattatgggtttaatgattgggatgttcccgatcatggtgatggctgccatgtttaacatgatgacgctgcaggtgcttaaagggtatgtgtttgcgcttatctggctgcagacgtggccattactgttcgccatcctgaacagcgcgatggcctactatgcgaagcaaaatggcgtgccggttgttctctctgagttgtcgcaggttcagctcaaaaactcggatattgcgaccaccgcgggttatattgccgtgatgataccgcccttgtcgtgggggatcgtgaagagcatgggggccgctttctccagtgcctacagccatttttcttcatcggggctcagtgcaacatcgcaggctgcctccggcgtggtggacggcaattactctttcgccaacatgcagatggagaacgtcagcggctacagctggggtaccaacagtacaaccagtttcggacagatgtcgcggcagctggcgaatgggggcatgagcacgcagacgcgggatggatcgatggtctgggacagtggtggtgcaatgtcaaaactgccggtggatatcaacgtcggtcgtcagatagccagtgcgcagcaacagatggcgcgtgagtctgatgtccaggccgaaagcgcgctgcatggctataacagcagcgtgacaagtgcctggaatagcctgcagcaatttggcaccaataaagggaacagcgcctcaacaacgaccggggccgatactaccgagtcttcgcaggattcgatggccagaagcaagatgatgaatgctgtagattcgtatgctaaagctaaccatattagccgtgatgaagcattcggccagcttatggacaagtcagtgagaggtgatgtttctggcgaggcttatgtaggagccagaggtggtgttggattcgagctcttcggtaatggcggtaaagctgaattcggtgggaggatgtcggcgagagggacagcaagttctggatctcaggacaatactactgagtcaggacgccaatctaatgctgacaatcatgataccagcagtcaggcagttaaagacttcagagagtcttctgattacttcatcaaccagaaatcaagccagtctggaaacatcactgataacaatgcatcttctcgggttgatcaattttctgatcttgaccctccatctccgaacagcttttgtatcttaagttaa

SEQ ID NO: 235439 - DNA, 393 bp, Klebsiella pneumoniae
atgatgctgttttttagaaagtatggatttttgtttatccctccagtctactggctcatctatctgggagccaggctgacgtacaatggactggtcggggagttttctcctgatttctttcagagtattcgacatgatggtgtctttatcatctgtagtttgtgtgtcttttattttttctgcctggaagtggatattagtgatggggagttctcagcgttcattctgttcctgattgttttctttcatgtggttttattatttatcactctgcttatttgtttgtggcaaggggcgatgttgttggatgcgatctttacgggtcagattattgcctccatgtgtttattgtttttcattcctgtgttttccattataagaaggagtttctag

SEQ ID NO: 235440 - DNA, 618 bp, Klebsiella pneumoniae
atgagcgaaacaatctggctggaaccttcaaataataagacggtttatctgcaaatcaaaaatacctccgataaggatatgagtggcctgcaggcaaaaattgccagcgctgtcacttcaaagggatatcaggtcgtcagtaaccccgatacggcgggctactggatccaggcgaatgtgctcaaggccgataaaatggaccttcgtgagtctcagggctggttaagccggggttatgagggcgctgtgactggcgccgctcttggggcggggattaccgcttacaactccagttccgcgggagcaaccctgggagtagggcttgcagccggtctggtcggaatggcggctgacgcgatggtggaagatgtgaactacaccatgatcaccgatgttcagatcgcggaaagaaccaaaacacaggttcagactgataacgtggccgtattacgtcagggaacatccggagcaaaagtgcagacaagtactgaaacgggtaatcagcacaaataccagactcgcgtcgtctctaacgctaataaagttaacctcaagttccctgaagcccagcctgttcttgaagaccagctggcaaaatcgatcgctaatatcctgtaa

SEQ ID NO: 235441 - DNA, 519 bp, Klebsiella pneumoniae
atgaaagaaaaaaaagatggagagtatagatttaactctattgactatataatatttatatctgaaacacatgagataaacggtaatccagttgtgattattttagaaggttctaatgcggctaagaaccctgcagaaattaatgaatatttgaattatattgctaatgggtggtctcaatttaatggtcgtaatactatgaaaattgacaatgccagagatttattcattaatttagaagagaaagaagagcctaaatcaaatagtttaactcgcactgatgaaagaaaactatggtatcgtaaaaaccgatatatgaaagattggtcagatgataaagttttaaaggcggcggttgatcatatgaacaaaataatgccatttattttgaaaaatggaccaaaattaccagtggataagttaggtgagctaatgttggcatttggtgattttattgaagagtccaacatgcgtggcttagatctaaaaggacttaataaccttttcacggataagtga

SEQ ID NO: 235442 - DNA, 276 bp, Klebsiella pneumoniae
atgattaacggcttcggttctgccaaagagcagtggttctcctcttttatgctgcaggtggaagcgaactgctcctggcaccgcctgttcgtcgacccgctcagccgggcgatgtactcctccaaaggcccggattttgagtacatgaaagcgcgccgggaagagggggttgatatccacgatgcggtgtacggcctcgcgtgtcgcaactttaaagaagaaatggctgaacttgaatcccgaataccggtgaatgacatggaggataaacagtga

SEQ ID NO: 235443 - DNA, 276 bp, Klebsiella pneumoniae; identical to SEQ ID NO: 235260

SEQ ID NO: 235444 - DNA, 189 bp, Klebsiella pneumoniae
atgaagtccggggatgcgaccgttaaaggcacgtttggtaagcaatccagcgtagtcaaatgggtggttctggcagaagtcgtcgccggtggcatcatgtacatgatgaccaaaaacgtgaagttcctgtttggcttcgcgattatttccacctttataaccatcggtatgtcggtcgccggttactga

SEQ ID NO: 235445 - DNA, 2286 bp, Klebsiella pneumoniae
atgacactggcgacccgcaccctcactttgccgggcggcctgcaggccaccctggtccatcagccgcaggcggatcgcgcggcggccctggcgcgggtcgccgccggcagccaccacgaaccgtcgcgcttccctgggctggcgcacctgctggaacatctgctgttttacggcggagagcgctaccaggatgatgaccgactgatgggctgggtgcagcgccagggcggaagcgtgaatgccaccaccctggctcgccatagcgcgttctttttcgaggttgccgccgatgctctggctgatggcgtcgcgcgtctacaggagatgctgcaggccccgctgctgctcagggaagatattcagcgcgaagtggcggtgattgacgccgagtaccgcctgatccagcagcatgagccatcgcgccgggaagccgcggtgcgccacgccgccagcgcgcccgcggcgtttcgccgctttcaggtaggcagcgccgacgcgctggcgggcgatctcgctgcgctgcaggccgccttaggcgattttcaccgcacccattatgtcgcccggcgaatgcagctctggctgcaggggccgcagtcgctggaggcgctcggcgagctggcggcccgtttcgccgccgggcttgccgcaggcgaggctccgccgccggcgccgccgctgcgcctgggcgagttcactgcactgcagctggcggtctccagccagcccgcgctgtggcgctgcccgctgatcgctttaagtgacaacgtcacgttactgcgcgagtttttgctggatgaagcccccggcagcctgatggccggcctgcgccagcgccggctggccggggatgtggcgctgaactggctgtatcaggatcggcacctcggctggctggcgctggtcttcgccagcgaccggccggaagaggtcgaccggcagataacccactggctgcaggcgctacagcaaacgacgcctgagcagcagctacactactatcagctatcccgccgccgctttcaggcgctgtcgcctctcggtcagctgcgccagcgggcattcggctttgcccccggcgcgccgcccaccgggttcaccgatttttgcgccgccctgcaggccgccccgtcggtcagcctggcctgtcagaccgtttccccaggggagtctgttgccacccagggctttagcctgccgcttagccgctggcgccgccgccctgagtctgacccggcgctggcgttcgctttttatccgcaggccgctggcgatctcgttgccaaatgcccggagaaagccgcgccgctgctccacctcccgtcaccgggagagccgccgaggctcctgctgcgaccgcccttctactgctcgcccgatcaggccgaaggactggcgcgtggggaacagctgcgcccacagcttgccgccctgcgccatgccgggggacacggcgagtggcatctgttcgacggcagctggcagttgaccctccagctgccggagcccggccgacggccggaggcgatcctgcaggccatcctgcggcaactcgcactcccggtcgcctcgctgaccccaccgccggaaagtatcgctatccgttatctcatggctcaactccccgaacggctgggtacatccgggcatcagaaaggttggctggcggccctggccggcggcagcgcagaagatgcgcagtgggtagcgcgtcagctgagcctgattaccgccccggttaatccgccgatgcccgctccggcgccctgccgccgcggcgtcgaacgtctggtttatccgggaggcgatacggcgctgctggtcttcattccgctgccggatggcgcctcgctggcggccctgcggctgctggcgcagcattgtgagccgctatttttccagcgcctgcgggtggagcagcagattggctatgtggtgagctgctgctatcagcgagtcgccgatcgcgacgggctgctgatggcgctccagtccccggatcgccgcgccggggaattgctgcgctgtggtaaagactttctgcgccagctggcccccatggatgaggcgaccttcagaccgctacagcagcgcctggccgctcagatccgcgccagcaggccgccagaggcgcgggcgctgtccgccctgcgtcaggagtatggtttaccagagctaacgccgcaggcggttgacgcgctgcgcgttgcagaggtggccgatctggcacgcgaaatgacccgccggcgtcgccgctggcaggttctgttcacgacgggggattaa

SEQ ID NO: 235446 - DNA, 414 bp, Klebsiella pneumoniae
gtgtcggataatctgtttaacggaacacgtttccgggcgctgactgtagtggataattttagtcgggagtgtgtggcgatccatgccggaaagtcgctgaaaggtgaggatgtggtcggtgtgatggaaaggttgcgggtgctgggcaagcgtctgccggtacgtattcagacagataacggcagcgagtttattttgaaaagtctggataaatgggcgtatgagcacggtgtcacaatggacttatcccgccccggaaaaccaacggataatccgtttattgaatcatttaacggcagtctgcgggatgaatgcctgaacattcactggttcctgtcgctggaagatgcgcaggacaaactcgaccttcatccgcaaaaatttttctgtggtcctagagcaaacggtacgtga

SEQ ID NO: 235447 - DNA, 306 bp, Klebsiella pneumoniae
atgtcagccccttatgccagtatgctacggcacgcggtgaacatttttacttcctttccagtgaatacgggcaacggcattatggggatgcaggctttcctgatgctcaaccctgatatcaaatgcttcacaaaagggtgcacaacgaaaaacattattgagccgacgggcagcatcttcgcaaaacatcagattctgaccgttagccaacgcaaaagcctgttcgtcgctccgcttgacgaccgtttgcacggctgtcccgagagcaacttcagcataatcaatcagctcaagcacaggcagtga

SEQ ID NO: 235448 - DNA, 546 bp, Klebsiella pneumoniae
atgccggattacgattttcatcgggtggcgttactcatcgatgagcttcaggatgccattgacgcagttttgccggatgaagccgacaaaaaatatgatatttcctggcgggtcatcgaggatgaccgtccatttcatccgcagcgtctgtgggatacgtgccaccgatttatgggttccggggtttaccgcagcaagggttttttctggctaccgggaagggatgacctggcattactgtggaaccaggccgcaggaagcatcaatctcgaattcataagctactggaaagccggggtcctgactcacactgataattcactgacaaaggaagaacgcgcagctatccatgagcaactggcaaaaatgcctggcagatttggtgaccggcgctgccgcctgactgttattggcgagagcggcgaaattgacgattttgtcctcacgttgcgccagtgtttactcactgaagaggaaattcgctggtggcagcaggggggggttttccacgatccctggcccacgaaagtggcccggctggcttaa

SEQ ID NO: 235449 - DNA, 1818 bp, Klebsiella pneumoniae
atgtcactaactacatacgtaatagtaccttttggatacggcatgcatcgttttagtttagcgaaagccaaaccttgggggccaattgaaaaaatattgttagggtatattgctaaaacaccttgtacctcaacttttttagctaagacatcaaatctccccaggcaactcgtcgtggaaatgctaatccctctgatgaaagctggatggatcgaaataaaaccaatcaatgatgaatatttttttgtaacaacgaacaggggggcagaagtagccttatatgaagaactacctactgatagcatcccttattcaagagttagaagttttatggtggaccctttgactcgtgagtgttaccgatacgagaaaagaaaaaagaaacaaagttttcaactatactctaaacataatattttagatgctacaaagtcattccgtggtttatgctctgaattaaatatcatctctagctacactactaccttatctagaatttatgaaaaaatcacaaattacgatgaagaggttattgatatagaagatgacataatagatacaaattattctaaaaatatacattttgctcttgccgccatagacgacatggggaatattacaggaatgcccgaaatatcagatgaattaaagtgtgagatacttaaaagagataagaagattcgtgagcgcgcagagatattagatataagtaaatctgatatctatgttggagaaaatattaatgaaactgttaaaacgttaccaaaacgtttaattaacaaagagcaagttagactgattgcaggtcccgaagaacatcggatgcatcttttcaattcaataatcaatgcaaaaagtagattaattatacattctacatttatcaatgaagaatgtattgctgatgtgtttgataatttaatagatgcggcacaacgatcagtccaaattgatattctatggggccaaacagaaccagaggaacagaataaacttgaatcttataaaaatgtcatagccaaatttgacgaattaaataacaaaatagtacaaaaaggattatctacacaaataaaattccatagagcccccactctatctcatgcaaaattcataatccatgatgaaatacagggtatttacagcgctacattaggttcgtgcaattggctatcgagcagatttaatagatttgaagtatctgcctgtataaccgacgatttaatcgtagcagatttaactgatatatgctcccatctatcaatgggtggaactggattagcaaataacctgagcagagaactagcttttttctctgcaagcttatataaaaatgttagtatacgcaaagaatcagatggtaatactagcgttcaaataatttctgcacctgagcatcaccctatagtaaaacaagcttgcaatgtagttaaaaacaatatatttatttgtagtcatagagttagctatgcgggtgatagacctataatattaccgctgaaaaccgtgaaagcgtacgataagaatatatctattgatattgcttatggaagatcaagtggggatctaaaatcagccgagcttaaggaattaaaacaaaatcttcagtctttaggtttcaatattacaaccgcagataatcctcaagtacatgctaagtttttctcttgggacaataacaatattgtagtcacaagtcttaactggttgtcatcttcttctaagggtgatatttacaatgaactaggtttccttattacacttcctggcattggaaatgaagtgaaggaaaaattccatgaaatgtatccagaataa

SEQ ID NO: 235450 - DNA, 1104 bp, Klebsiella pneumoniae; identical to SEQ ID NO: 233390

SEQ ID NO: 235451 - DNA, 1884 bp, Klebsiella pneumoniae
atggccggggcggctttgcttggtataggggcgatgattgcaggatcttccgataaagatcattcgtcgcattctccgaacgatgatactgattctgatgcggacagtgattcggatagtgattcggatacagatccagggggcgaccctctctccgccgctaaaaacattacagtaacagacgatgttgagctacataccggtagtatacctaatggcggcctgaccaatgatgctactccgacaataagcggaaccgcgcaggctggcacgacagtgaccatatacgatggcacgactgtattgggtaaggtagtcgttggtgctgacggaaaatggagttttacgctcccaaaactaagtgatggtgaacattcacttagcaccaccgtatctgatacgaaaggtcataccagcggccactcgccggactttgtgctcacggtggacaccaccgtggcgccggtcagcgatctgcaggtgacggatgatgtggcgcagcacaccgggccgctgaccagcggcgggctgaccaatgatgcgacgccggccctgagcgggacggcggaagccggggcgacggtcactatttacgacggcagcacggtgctgggcaccgcggtggcggatgaggatgggcactggcgcttcactccggatccgcttggcgagggggagcaccgcctcagcaccacggtgaccgatgtggcagggaacaccagcggccactcgccggactttgtgctcacggtggacaccaccgtggcgccggtcagcgacctgcaggtgacggatgatgtggcgcagcacaccgggccgctgaccagcggcgggctgaccaatgatgcgacgccggccctgagcgggacggcggaagccggggcgacggtcactatttacgacggcagcacggtgctgggcaccgcggtggcggatgaggacgggcactggcgcttcactccggatccgctgggcgagggggagcaccgcctcagcaccacggtgaccgatgtggcggggaacaccagcggccactcgccggactttgtgctcacggtggacaccaccgtggcgccggtcagcgacctgcaggtgacggataacgtcggtgaggagcaaggggtagttagtaatggcggaataacagacgatacaactcctaccctgagtggtactgcggaaccaggatctacggtaactatttttgataaagggattcaaataggtacagcgttagttgctgaaaatgggaattggagttttacaacctcagcgttgcctaaaggcgagcattccttcacaacagttgtcactgatgaagctggtaatacaagtgattcatctcctccctttgttgtcactattgaactgatcgacgactccgatgcggatgcagactccgacagcgactctgactctgacagcgactcagactctgacagtgactcggattctgacagcgactccgattcggacagtgattccgactctgacagcgattcggactccgacagtgattcggactccgactccgactctgacagcgactcggattctgacagcgattcggattctgacagcgactctgactcggacagcgactccgactccgacagtgactccgattcggacagcgattccgacagcgacagtgactcggattccgacagcgactctgactcggacagtgattccgactccgacagcgattcggattccgacagcgattcggactctgacagtgactcggattctgacagcgattccgactccgacagtgattcggactctgacagcgactccgattcggacagcgactctgactcggacagtgattccgactctgacagcgattcggactctggattcagggggccagtctag

SEQ ID NO: 235452 - DNA, 2454 bp, Klebsiella pneumoniae
atgtccgaaataaccgaaacccatgccgcctgggtcccgccgccgtttccgccgcagggacgtctgccgggccgggcgctgcaggttgggcagaactgccatcagcagaacagcgacgagcggcgctatcaccaggaactgtgcctggctgccggacggcgcgtggagccgccgtgctgcaagacactgcacatcagcctgtttttcgacggtaccggcaataacttaaatcatgacttttttatcgcgaacccgaagcacccgaccaatatcgcgcgtttgtttcgtgccaccattggcgacggtaccgccggcggcgtcactgataccaaaaagatgccgctggatggggtaaaagacagtggaggaaaatacttcaagttttatattcccggtgtgggcaccccgttcccggaagtgaatgacccggactattccaccatgggtctggtgggggcagttaagggtgaggagcggattaactgggcgctgctgcggattattgatgtgctaatgcgcctgagtaaggacaaggaaaacaacagcataaagctgtccgaaggagccagccgtgaatccctcaaaaaaatgggtaccagctggaaccggctgtggtttggcggcagccataaccgctatgaagagttcactcgtttgctgaatgatttggcctctgatttgaagcccctgattattcagcctgagccgggcaagccgaaactgacaggcatcaagctgtatgtctatggtttttcccgcggcgcggcagcggcgcgcacctttgtgcgctggctgagcgaactgctgcccccgccggcggcggaaggtgaaaaaccgccgcagtgcctgcagacaggcgggatgcagctgcccgtcagcgtggagtttctcgggctgctggatacggtggcctccgttggggtggcgcatgtggtgccggttgccgacgggcatatgtcctgggcagacggcacgatggagctgccggatgatgaaacctatggcgggctgataaaaaaatgtgttcacctggtctccgggcatgagcagcgtctctgctttccgctggactctgtgcgccgggcaaacggcaaatacccgccctgtgccactgaggtggtttacccgggaatgcactcggatattggtggagggtatccaccgggggatcaggggaaggcgaatgctaaacatgatggctatctgttgtcacaaatagtgttgcatgacctgtattcaagcgctttttctgctggcgcgccactgaaagtcaataaatttagtttaccggagagtttaagaaaggatagttggcgcgctcttgatgctgagcaaattagagattttgtcgctgcaccggaattaatatcacgcttcaacgcctggcgcgaacttaccctgggccaaaccacgccgaaaacgttcgatcccgatgcagcctctcactacgaaccacctgccgccggcggcagtctggaaaccgtcattgctgagcagatggcctggatcaccgcctggcgcatcgaccgctatgccagaggctcaatgctgaaaacgcccttctatcagcgcgccacgaataccgaagcgctgcctgccgcgcgtaaggcggcagaagagattcgtgatgaaaaacaggcggcggtgctcagggctcgccagaaccagatagcaaaccagcctcctgacaggatggatgagctggttctgcagccgggcgtgaaggattttgacccaaagatggatcaaacccagctgttcgacgcggcgaaggagttcggaaaggattaccacgacggttaccgtatcccggataacctggcgcagctggtgctggataccgtgctgcagccggttattttcgttctcaataccgatgatgaagcgcaggaataccggcgcatgaagcgtgacggagaggcccgggtggccgtcctctttcccgatgccggggaggccagcaacgcggagcagcctgccgggctggtgagggcgctgtttgatgatcaggtgcatgactcacgcgcctggtttatgtatgccgcgctcggcacgcgcgagatgtggaccggctacttccgctaccggatgatttacttcagcgagcgctgcagtaagccgctctcgccgctggtgctcgccggagacctggtgggttttgcgaccgtgaccgcgggtgtcgtgctcagtttccggcaaaagcgcctgaccggcaagctggccgggctggctgcgacaggcgccgtgcgctcgctggaggtggcggtgctggaccagataaccggggaagcgctgccggagctgcccggaggggagcagctgcgggcatttacccacgagccgggaaccgttgtcgcacagcaaaaggcgcggaaagcggacgagcagctggcgcgggggcaagccgcgctgccggccagctggctggaggacgttctgacgacaacggtctga

SEQ ID NO: 235453 - DNA, 168 bp, Klebsiella pneumoniae
atgaaaaaagctaagtttgttttcaatatagtaggaatgatgatttttaatatttatgattacgggcatgtgaatgtgtctgttttaatgaaagaatgtggtttgtgtattgtgaattttgcattgttgtatgtgatattcgaattaccacgaaaagctttaaaataa

SEQ ID NO: 235454 - DNA, 282 bp, Klebsiella pneumoniae
atgacctcgttatgcgatactgaaacaatatcaaatatcgtctcaatggtaaacttttgcttttgttacgagggtgaatacgagagtcttacattggtgtgctactccagaaatgacaaaggggcttatgccccttgtttcgccattttgataaactcttttatcaccttaaacattagccagttcagatttaagggatttcaactcgttttcaattttagcaatcatattcataagcgtattaaccttgtcttctttactgtcgtcttcaacatgctctaa

SEQ ID NO: 235455 - DNA, 219 bp, Klebsiella pneumoniae
atggactatttacgctttaaacatatcagacttgttcttacaacaacactaaaccctaaagagtttaaagagctgattggacataagcaggttaaaacatttgttttagagcatgttgaagacgacagtaaagaagacaaggttaatacgcttatgaatatgattgctaaaattgaaaacgagttgaaatcccttaaatctgaactggctaatgtttaa

SEQ ID NO: 235456 - DNA, 546 bp, Klebsiella pneumoniae
  misc_feature (527)..(536): n is a, c, g, or t
atgcttgaagaagcagatagatttactaaatcaggcgttcatactcgcatagataggatttacatccataatgatacggcgatgtcgaaaagcattataagtgatgatgataactttgctaaactcaacacaatgagttatcgagaatttcttgataacttatcacaaaccatgtttgctaaacatgatactttgcataaggtattttgtgatataaaagatactatcaatatcactgactacctgaacattcagacaatcagaaaaattaaatctgggtttagtaaatatctgcttaacaattcgtttaacaaattcagtcttggatataatgttatttcaggatcgattcatcctacaaagttcactaatgaagaaggaagtcctctaaacgaggttttgtcgagtgatcttggtgtattacatgataatacgaaaccaccgttagattcttatctttttgaagaggttttttacgactcagagcttgaacgactcaacatcacagatggagagatccagtctgnnnnnnnnnncagtctgtag

SEQ ID NO: 235457 - DNA, 705 bp, Klebsiella pneumoniae
atgaaaaaaacagatgaattacttaaaaagaaactgattaaacagattcaggctatcagtgataacacacacaaaagcttttcagcctttgcttttgcggcagctaccgccgcaagggatacaacccggctttatgtctctgagatcgaaacgggtgatttcttggtaaggccggatgtatacgcaagaacacgctacagcaagatctgtgatgccatagagacatacatagagctggtatcagtctctgagccgtatacagacctgttaagccctatctacagtgaactcatacttgatggagcgccacaggccaagcgaaacgggcagttttacacacctgattctgtagctacagccgttgccgaaatgatggggaacagagtcaacatcatagagcttgatatgtgttgtggtatgggagctttatcactcgcaagagctaaatacaaactggagcaaggccagcagataaccaagatgatttgcatagatcttgatgatgtggctatagcctgttgttttgctcagttggcatataacaaccttatgaacacggtgatccactctatagagctgtgctgtagaaacgctatcactgattacgttcaaggttatgaaacgacaatcagctatcgtttaaagattaatgaaggtaaaaaataccgtcaagaaatggaatatttagatttagcaacagggtaa

SEQ ID NO: 235458 - DNA, 318 bp, Klebsiella pneumoniae
atgatattggattcaatcagttttaatgaacacgattaccacttggtttctaatacaacagcgacatacgaaataaaactaaaaatagtcaaagttttacgtgggcgtaagtttgaaagattcagggtagatagtccgtttgtagaaatactcaaagtggcatatgccccggcaggtaagaaaagagcaaatgaaacaacgagtattattgagcaaatgaaagaggacttaacaaacatagttcttgaagaggcggtaaaaacacaggataaggcaatgagttttataaaaggtgattcagatggagatgataaatga

SEQ ID NO: 235459 - DNA, 540 bp, Klebsiella pneumoniae
gtggcgctggggctggcacgccaggacggtatcgccggcacgccctatgccgaaaacctgttcctgatccgctggctggccaccgcccaaaagcaaaaacgcttccccaggagcgtggcgattgacatccagtggttactcgaacgtggccgcaaacacggcccggccggccacctgcgccagcatcttgactacctctttcgctcctgcagcggcaatctggccgctcaatccgacctgttccgtctcacctacgcctctgaaaccctgaaagaccagggctgggacaattatgtgctggacgcacacgagtggaaatccggcgtcgtgccgacaccgtcacagcataacgggttctatgtcgaaaaaacggcgctgaatgccgcttttgcccaggacggtcgccatctgcactccgtcacgtttcgggtggtcggtgacgccgaccggtttatgcatgtgttggccgagtacggtctgtgtacgcgccggcagggcagcacgtcagcctgccacaccatcgcgcttgaaccggcgtaa

SEQ ID NO: 235460 - DNA, 174 bp, Klebsiella pneumoniae; identical to SEQ ID NO: 233412

SEQ ID NO: 235461 - DNA, 465 bp, Klebsiella pneumoniae
atgtcaaaacaccccttactgctgggcctgacgctgctcagcgccagcctgttcaccggccagaccttcgccgaccgcaccgtcaccgaccagctgggtcgccaggtcaccctccccgaccacgtcacccgcgttgtggttctgcagcatcagacgctcaacctgctggtacaactgcatgccgccgaggatatcgtcggcgtcttaagcagctggcagaaacagctcgggccgcagttcgcccgctttatgcccgagatcgggcaactggcgaccccgggcgatctcacccaggtcaatattgaaagcctgttggcgctgcgtccgcaggtggttttcgtcgccaactatgcgccgccggcgatgatcgcgcagatccaacaggccgggatcccggtagtggccatctcgcttcgccacgatgccgccggggaaaaaaaaaaaaatgaaccccaccatggctga

SEQ ID NO: 235462 - DNA, 1008 bp, Klebsiella pneumoniae
atgcccgctaaccatcatccctggctggtgcagggtagcctggcgctggtgaccctggggatcgcggtcgcctcgctctgtttcggccagtacccgttaagcctgagcgccgttggccacaccctggtccatctgccgccaggtgaaggggtgatcgggcagatcgtctggtcggttcgcctgccgcgcgtggtgatggccctgctggccgggggcgcgctggggctgtgcggcgccaccttgcagggcgtgttccagaacccgctggtggacccgcacatcatcggggtgaccgccggctccgcctttggcggcacgctggcgatcctgttgggcgtcggcagtctgctgatgatggcctcgacctttttcttcggcctcgtcgcgctggggctgatttacgccctcgccgccctgcaggggcgggacagcacgctggggctgattctgtccgggatcattctcagcggcttcttcgccgcgctggtcagcctgatgcagtacctcgccgacagcgaagagacgttaccgaacatcgttttctggctgctcggcagcttcgcgaccgccagctggcataaggtactgcttatgtccctgcccctggcggtggctgccggggcgctgtggaagctgcgctggcgtatcaacctgctggccctggaggaacgcgatgcccgcagtcttggcgttccggtggccgcgctgcgtcgcggcgtgctggtttgctgcgctgtgctggtggcagcccaggtggcggtcagcggcagcatcgcctggatgggtctggtggtcccgcacctcgcccgtctgctggtaggggctgaccatcgtcgcctgctgcccaccgccttctggctcggcgccgcgctgatgctggtggtggacgatctggcgcgtacgctgacccaggcggagatcccgatcgggatcatcaccgccctgctcggggcgccgctgtttaccgtgttgctggtgcaatcccgacgccggagtacgacccgatga

SEQ ID NO: 235463 - DNA, 276 bp, Klebsiella pneumoniae; identical to SEQ ID NO: 233309

SEQ ID NO: 235464 - DNA, 798 bp, Klebsiella pneumoniae
atgaaatacataataaattttactatcactttcgatccggacagtagattattaaaacttagaaataaggaccaacttacgattgagttatccaagccagccactcgtttgttaatcgaactcataaaaaacaataaaaatgagatgccacgagagacgctcatcaagcacgtctgggaggattacggattctctccctctagtgcaaccttaagcaaccatattagtgaattaagaaaagctttcgaagcacttgggataaataaagatattttgatcacggtgccgagggttggttttaaaatggaggctgaaattcatcctgaaactaaaaacaaagagctagatacatcaactgacggctttggaagaaatgatattacggaagactcagtagtccagaaaaaaatgataaaaaagcctgcgggatcatacggcaaaaaggaactgcatcgtgtgttgaaaccaattctggcgctcatttttatcttgcttttaataattactataataactatattagcccgcgagagaaatgaagaaccaaaaccattaggcacaatgaataaatgcaagatttatgcgttgggagatgactatccggacccggaattgttttctcatgcgcgaataatgctctctgatatagagatagattgcactaaggaaaatcgtgacatcttctttatggagtcactttctgccaatggattacgaaagacttcttttatggtagtttgtacaaaaaattccgagatgaactataaagcctgtcaaaattataaacggattgattaa

SEQ ID NO: 235465 - DNA, 2559 bp, Klebsiella pneumoniae
atggtgttttgttctcttggaaaaattgcgaatgtacattcgttaggattatttatttttgtttcattaagtcctttagttatgaaggcttatgcaacagataatattcaatttaacacagatgtattggatgttcgcgaccgaaagaacattgatttgagccaattttcgcgaagtggttacatcatgcctggaacctacgacatggttgttcatatcaataagaatactctaccggagcaagaaattcccttttatgagccggatgatgacccaaatggcagtcgcgcctgcataaatcccaaactggttgaacaacttggactgaaacccggggtactgaaagaccttgcttggtggcataaggggggatgcctggacaagagaagtgtgaagggaatggaaatacgaggcgatcttccaacgacctctctttacctgagtataccgcaggcatatttggaatacaccgacgagaactgggaccctccgtcacggtgggatgaaggcgttgcgggcttgttgctggattacaatctcaacgccagcagtcaacaccagcagagtgagggcagcaatacccaagctctcagtggtaatggaacagcgggaggaaatctaggtagttggcgttttcgagccgactggcaggccaatttagatcatagcaacggttcggaacagtcgacacaaaaacagttcgacttgagtcgttactacgcttaccgggcaataccgggtttgcactcaaagttgacactgggagaaaactaccttgactcgggaatgtttgacagttttcgctttaccggtgtgagtttgatttcagatgacaatatgctgccacctaacttgcgtggttatgctccggaagttacgggaatagcgaagactaatgcaaaggttattatcagtcagcaggggagagtgctttacgagacctcagtggcctcggggccgttccgcattcaggatattaacgaagctgtgagcggtgaactgaacgtccgggtggaagagcaggacggtggtgtgcaggagtttgtagtcaatactgcgaatatcccatacctgacgcggccaggctcggtgcgattcaaattaactatgggaaaaccatcagattggcaacatcatttacgcgatccgatgttcggtaccggcgaattatcctgggggatcagtaacggttggtctttgtatggtggaattctgaggggcggggattataacgctctatcactgggcatcggacgtgatcttatgttcctgggagcgctgtcatttgacgcaacacattcgcgtgttcgtctgccctgggaagatcttacgctcaatggggattcttatcgactgagttattcgaaaaacttcgacgagtacgatagccaggtaacttttgcaggttaccgcttttcagaacaagacttcatgaccatgagtgagtatctggacgcacgatcttatggtacacgcagcaatggcaatggcaaagagatgtacaccgtcaacttaaacaaacattttcgcaaattggaactcagtagctatatcaactttagccgagaaacctattgggaccggccaactacagaccgctataacattaccttatcacattattttgatttaggacggttccgtggtgtgagtatatcgttatcggcttatcgcaatcagtacaatggaaccgaagataatggggcttacgtatccatgtcaattccgtggagtgatagttcgacggttagctacaacgcgatggtcagccataacgacaatacccatcgggttggatattacgaccgtgttgacgaacacaacaactatcaattgagtgcagggaactccagcagaggagtgagcgtgagcggttattacagccatgaaggtgacatggcacgcatgagtgccaatgccagctaccaggatggtcgttacagtgccatcggtttaacaatgcagggcggactcactctcacttccgaaggcggtgcaatgcaccgctctggaatgatgggggggacgaggatgctaattgatactgaaggtgttccggacgtaccggtccgtggctatggcagtaccagccgtaccaatgcctggggcaaggcggtaattagtgacgttaacagctattaccgaaacaaggcaagcattgatttgaaccagttgggtgacaacattgaagccactgtgtcggtggtacaggctacgctgactgaaggggcgattggttacagaaaatttgatgtaatttctggcgctaaagcgatggcagctataaagctggctgatggcagtgaaccaccgttcggtgcgactgttataaataagcgaaagcaggagacgggtatcgtcaatgaaagtggaaacgtttatttaagcggtattaatgccggagaaaccatggtggtgcattggggaggctcagcacagtgtgaagtgaggatgcctgcacttctgcaaccagatatgttgatgaatacattgcgactactgtgtaagccgcttgatgggggcatacctggcgccgacgatattaagccggctgcgtga

SEQ ID NO: 235466 - DNA, 417 bp, Klebsiella pneumoniae
atgatagaacatcagcggtatcaccagcggcagacgctcgtggcccgcttccaggtggcgctgcatggcggcgatggcatagcgcatcaggcggaaggccatggttttatccggccggctctggtgctcaatcaggcaatagacgtacccgtccccgcgggccgtatcgagagagtagagcacgtccgagtagcaggcgcgcaggtcatcttcgataaaggagccggattcgagcttcagggtgtcgaggttgcagaccctgagcaggctggacggcaggtgcagctgcaggaagtcacgggcggtctccgggtgggtgaggaaggccttgaacacggcatcgtgtggggaggcggtgggtttgctcatgacttacctgctgcgggtgacgatggcctgggcgaacaggcgacctga

SEQ ID NO: 235467 - DNA, 282 bp, Klebsiella pneumoniae; identical to SEQ ID NO: 215489

SEQ ID NO: 235468 - DNA, 552 bp, Klebsiella pneumoniae
ttgcgtctacctaagcgttctatcagggctaagatactttctgctctctctccttcaattaacgccgcttttgctataaactcattaccattatgtaaacccaacttctttaactctcttgttaagtcttacattcactttgctggaacttctgaaataaacactacagatgaaaatggtaaaacagctttgttcggggcaagttttgaaatagctgaacttttaataaaagctggtatagacgtaaaccataaggataacttcggtaatacagcattgttctttagtgattttaacagcacatggttgttattgaataaaggcgctgatattaacgcagtaaacaacaataacatgaatgcgctatacactgctgatacgtctaaggcaaggatgttaatcaaatcaggtataaacataaacaataaatctaaacttggtcataccgctttatattacgctcacttattaaatgacagaaacatgatgagtgttttaatggatgccggaatagaaataagtcataaagaacaaaaaagatacgcagcataa

SEQ ID NO: 235469 - DNA, 258 bp, Klebsiella pneumoniae; identical to SEQ ID NO: 233401

SEQ ID NO: 235470 - DNA, 261 bp, Klebsiella pneumoniae; identical to SEQ ID NO: 233400

SEQ ID NO: 235471 - DNA, 276 bp, Klebsiella pneumoniae; identical to SEQ ID NO: 233399

SEQ ID NO: 235472 - DNA, 1272 bp, Klebsiella pneumoniae
atggccggggcggctttgcttggtataggggcgatgattgcaggatcttccgataaagatcattcgtcgcattctccgaacgatgatactgattctgatgcggacagtgattcggatagtgattcggatacagatccagggggcgaccctctctccgccgctaaaaacattacagtaacagacgatgttgagctacataccggtagtatacctaatggcggcctgaccaatgatgctactccgacaataagcggaaccgcgcaggctggcacgacagtgaccatatacgatggcacgactgtattgggtaaggtagtcgttggtgctgacggaaaatggagttttacgctcccaaaactaagtgatggtgaacattcacttagcaccaccgtatctgatacgaaaggtcataccagcggccactcgccggactttgtgctcacggtggacaccaccgtggcgccggtcagcgacctgcaggtgacggataacgtcggtgaggagcaaggggtagttagtaatggcggaataacagacgatacaactcctaccctgagtggtactgcggaaccaggatctacggtaactatttttgataaagggattcaaataggtacagcgttagttgctgaaaatgggaattggagttttacaacctcagcgttgcctaaaggcgagcattccttcacaacagttgtcactgatgaagctggtaatacaagtgattcatctcctccctttgttgtcactattgaactgatcgacgactccgatgcggatgcagactccgacagcgactctgactctgacagcgactcagactctgacagtgactcggattctgacagcgactccgattcggacagtgattccgactctgacagcgattcggactccgacagtgattcggactccgactccgactctgacagcgactcggattctgacagcgattcggattctgacagcgactctgactcggacagcgactccgactccgacagtgactccgattcggacagcgattccgacagcgacagtgactcggattccgacagcgactctgactcggacagtgattccgactccgacagcgattcggattccgacagcgattcggactctgacagtgactcggattctgacagcgattccgactccgacagtgattcggactctgacagcgactccgattcggacagcgactctgactcggacagtgattccgactctgacagcgattcggactctggattcagggggccagtctag

SEQ ID NO: 235473 - DNA, 579 bp, Klebsiella pneumoniae
atgagtcagccaaatccactttgtgtgggcatcgatgtttccaaagccacactggacatcgctgccagcagtgatgttgctcagtttacagtcagcaatgactctgatggctttaacgcgattattaccggactgagacggcactccgttgctctggttctgatggaggccactggtgggctggaggttgcggtggcctgttcgcttcaggccgaaggttttgaggttgccgtggtcaatcccaggcaggcccgtgacttcgcccgtgcaatgggatatcttgcgaagaccgaccgaattgatgccagagtcctcacgcagatggctgaggttattaatcgtcatcctgagcggaaacgctttatcagggcactgccggatgctgaacgtcaggcccttgctgcaatggtggttcgcagacgccagttgattgcgatgttggtggctgagcgtaaccgactgtatccatcccatccacagaacaagaaaagcattaataccatcattaaagcgctggaagatgagcttgccaggctcgagaaagacatgaacagtcacatccggaaccactttaaatag

SEQ ID NO: 235474 - DNA, 246 bp, Klebsiella pneumoniae
gtgctggacgcgaaagagtggaagtccggcgtcgtgccgacaccgtcacagcataacgggttctacgtcgaaaaaacggcactgaacgtcgcttttgcccaggacggtcgccatctgcaccccgtcacgtttcgggtggtcggtgacgccgaccggtttatgcatgtgatggccgagtacggactgtgtacgcgccggcagggcagcacgtcagcctgccacaccatcgcgcttgaaccggcgtaa

SEQ ID NO: 235475 - DNA, 687 bp, Klebsiella pneumoniae
atgcgtttaacgattattttagtcggtcctgcccgggccgagaacgtcggcgctgccgccagggcgatgaaaaccatgggatttcgcgaactacggatcgtcgatagcgaagcccacctggcgccgccggcacgctgggtggcgcatggctcaggcgacatcctcgatggtatcaccacctatcccacccttgccgaggcgctgcatgacgttgattttaccgtcgccaccaccgcccgcagccgcgcgcgttttcactattacgccacgccgcagcagctgttgccgctgctggaggagaaggcgcagtggatgacgcacgcggcgctggtttttggccgtgaagactccgggttgagcaatgaggagctggcgctggctgatgtgttgaccggtgtgccgatggctgcggattatccgtcgctgaatctcggccagtcggtgatggtctactgttatcaattagcatcgctaatgcaacaaacggcgcccgccgccgctgcggcagaccatcatcagctgcaggccttacgtactcgtaccctggcgttactttcgcgtttgggcgtggaggatgatgccaaactggccgactggttgtcgcaacggctgggcctgctgcagcagcgcgacacagcaatgttgcatcgtttgctgcatgatattgaaaaaaaccttccagaataa

SEQ ID NO: 235476 - DNA, 531 bp, Klebsiella pneumoniae
atgaaatctgcattaatcagcccgctgctggcgggtctgctgctgttaaccggctgtgcacagccagccgcacaggccggaggcggcggtggcggcacaataaaagccatcaaccacacaaaatgggcaattaaccacttcagtgtcaatggccagtcggggatcgacattataggcccgtttcaggggggcggaggcggctgctgcttcagcgtgcccgcccgctggacgccgggtatgacggtgcgcgttgactgggaaagtggggaagcttcaactgatgatttcccgggatatgaaaactggaataaatatcttgaatgggaaaagaaaataaaagccagtcatcggcagcacagcaaaactgtcccgctgcccgactataacggccaggatgtgtgcggcattacggtgcactttttaccctgcgatgacgtgaaagtgaccaccagctgctggtcaccgagaaatgcgaattatccgataaaagagcccgtcaggatgaaggagcccgccgtatgtccgaaataa

SEQ ID NO: 235477 - DNA, 618 bp, Klebsiella pneumoniae
atgaatgtaaaactcttcggcattatcattttatgtattttgatgtttactttaggtttcttcattggtgggtttaaatgggagtgggctgaaagtaaacatacgagtgaagtcgcgctctgggcaatgcttggtggttggctatctgcatttgcgacgttggtcgctgtgatggtttcattgtacatggcatatcaagcggttcagagcgagatcgaaaaaatcagagttattcatggaataagtggtgtggtttccaatggcaaaggtgtaaattgctcgctcacaattcaaaatatgagaaatctgagagttaatattacagggatttatttctctctgggtaaatcttctggccgttactcattggaaaaaacagttcaactgaataatgtatctttatcacataagggcgagagagcggcattttgtttcgttattgactcgggtgtgacgtggtgggggatttattcattatttgataaagacgaaaaaataaattttaagaagggaaagattttcataacgaccgatctcaacacttatgaatttaagctgccaaaccattacctcactgcctttgaggatgcttattcgtattttcaaacgattaaatag

SEQ ID NO: 235478 - DNA, 216 bp, Klebsiella pneumoniae
atgcacagcaggctgaagggtaatgaagtatttttacttgcgagaacgctggctcctgaactaggtaaaaaagagagagctatcgcccgctttatagatgataaccctcagtccctggcacgtatgtcaatcacagaaattgctaattatttgaaggttagcgtatcgagcataaccaaagtctccaaaaaaactgggatttaccgggtttcatga

SEQ ID NO: 235479 - DNA, 561 bp, Klebsiella pneumoniae
atggaaaaagaaatattaacggcatttatttctgccggggcatcttttgttggagctggcattggttggattgtagcttataaaacagtaaaagcacaagttaaccaatctgttaagaatcttgcagcttcacatcgagcggagataatcagaagacaacttgattctttagagacactatggggaatatttgatgccacatctcgtaccggtggtcaaggtagaataatccagcatagggaagggaatatctatttatccataccaaatacaaaaaagtttattaacctcattgaaaaaaccttcaatggcaaaagtggattatatttttcagaaatatgcaggaggaaattgttcgattttcggaactatttactctcatttgtcaatataactccttatggagtgcctcttattactttaagctcgcaccagttcgacgaattctataataagagaaaagagctacgacatcaaataagaacagaaatgggaagtttagatctaagaatggcaaaggaagaattagataagctatccaaagacaatttcaacaagtaa

SEQ ID NO: 235480 - DNA, 1146 bp, Klebsiella pneumoniae
  misc_feature (1117)..(1126): n is a, c, g, or t
atgattaagcctcatttgattgttgaaagattcgctgtatccaggaacggcatttttgtgtatgaccaagaattccacaaaggcgttaatataataagaggttggaatgggacgggcaaatcaacgattgtagatttattgtcttatgctttaggttcagttataactgactggactcaacatcaatcatattgtgataaagtgtttgctcaagtttcactcaacggaattagggtcacattaaaaagagatattgttgaaaacggactgtcaaagatgtacttgcatgaaggtactattgactcatccatcaaactcaatgctcactggacaggttacccttatcgcagaagtgatacattacatagcttttctcagcagctttttgagcttttgagtcttccaagacataaaactgatgatgaccgaaacttaactctccatcagataatgcgattgatgtacgttgaccaattatcagcaacaactaaacttttaaaagaagagaagaactttgataatcctaacttaagaagagctattggtgaataccttcttggcattgatgacttagaagctcacaacttaagacaagaactgttatcagaaacaaaacgtttcgaaaaattcaattcagaagcgaattcaatatttaagataattggcggagatgatgtaaaagtaagtgaacattcattaaatcagcgcattgaaaaatactcacttgagcttgataaacttaatgaagagatgcaaacgttgctttctggtggaaatacggatgatagcagcgaagacaaatccgttttagcaaaattacaaaatgaaaatcttgagttgatatctttccgattcaaaatacaggaagaaattatttctttatcaaaagaaatgagcgacacgaaacttttcttaatttcactagaatcaagaaaagatgcactattacattctaagtccgttaataattcacttggtagtattgaattcaaatattgcccctcatgtttaaatcatattgagataagtaccgatttagaaagctgtggattatgcaaaagtaaaaatagcaaaaactcgtctgatgatgcttatgtcaaacaactcaacaacctgnnnnnnnnnnccttaagactttctcattga

SEQ ID NO: 235481 - DNA, 522 bp, Klebsiella pneumoniae
atgttaatctatcacccaatattcgatacgagccattgcgtctatagatcgttgcttttattagaagagcaaaatgactgtgaaattgatattgaactattcaggctaatggacttttatgtacttttccctagtcttttaaaactcataaaaccatttccgaatgaagtaagacgttataaaaaagcaatacaaaagataagtgaaccttacgagaacattcagaatcctaatcggattttcattgaactaagacgaattcaatctatcgcgttccatcatcttttgtccaagaatttaattgatatggaaagttatacgaatggaaagataaaaaggactaaaactgttttacctgaagatttaaaacattctttgagcgaagtttcttacaggaagagtgaatggtttgccctaatatccaaagggttccagcaaattgaattttacggctccaacggactaaaaaaaagaacaggtcttatggaatatagatatgacgaggtagatacaaatgattaa

SEQ ID NO: 235482 - DNA, 948 bp, Klebsiella pneumoniae
atgtctgaggtgaatattcccgatattcgcgaggttctgcgcaaccttgtcgatggtaaccgctttacttttgctcaggttgcccgtgaaaccggcttatcaaccggtgtggtcagtggcttcatgaacaacaaatatgccggtgataacgaccgcgtcgagaaagccctgcagcgctgggtcaataaacagcattctgctgcagaactgccggagccgccgcgctttattgagaccccaaccgttaaacaaatatggacagccttccgctatgcgcacctgacggagtgcatcggcgtggtctgcggtaaccccggtgtcggcaagtcagaagccgcccgcgaatatcgccgcagtaacgataacgtctggatgataacgatcaccccttcatgtgccagtgtgctggagtgcctgaccgagctggcatatgaactcgggatgaatgatgcgcctcgccgtaaggggccgctggcccgcgcactgcgtcgccgtcttgatggcactcagggccttgtcatcattgatgaagccgaccatctgggtgctgaaacgctcgaagagctgcgtctgttgcaggaagctacccgcgtcggactggtgctgatgggtaaccaccgcgtatacagcaacatgaccggcggtaaccgtaccgttgagttcgcccgtctgttctcccgtatcgccaaacgtgtcgctattaacaaaaccaaaaaggccgatgtggccgcgattgcggatgcctggcatatcaccggtgaaaaagagcgtgatttgctccagcagatcgcacagaagcccggcgcactgcgtatccttagccactccctgcggctggcggcgatgacggctcacggcgcgggtgaagctgtcagcgaaagctacattcgcaaggcactgcgtgatctggatctggatgttgatgtttcaacgttactgaggggttaa

SEQ ID NO: 235483 - DNA, 240 bp, Klebsiella pneumoniae
atgattactgaacgtattgctgaacatgttggtatggccaccgctgcgcaggcatggctgcaggcgcgcggtagtcgtgttacggagatgcgggtgtggatgcgccgcccatgtctggaaatcacctgtccgccgactgaactggtgaacagggctaatcatctgattgaacgctgccccaccgggacccgttccgtgtggatggccacccttgaaggctgtcatgttatctggaggtaa

SEQ ID NO: 235484 - DNA, 498 bp, Klebsiella pneumoniae
atgaatccgaaaacaaaaggtatttttgaggctgctttcgccaaatggggatttgaatctcaggtgctggttctttctgaagaagccagcgaattatctgctgcctgttcgcgttttcttaaccacaaaaccgacatcagcaaagtggctgaagaagcggcggatgtcgagatcatgattgagcaactgcgtcataacggggtgggccccatgatagacaatgaaaaaaatcgcaagatggcgcgtctggctcaggttgttggtgttgagtcgcaaccagtcagcccctttggtccgtccgttctggggctgctggaggaagcgacagagcaaatggggctggcagaaaccctctatcgcgacaccaaaaccagcaatcgttatgccgccgcccgcgcccgtacggccatcagtctgctgatgcaggcggctcagaagatgatgcacgagcagcagtatgccgaacgtatgcggacggaggataaatctcatggctaa

SEQ ID NO: 235485 - DNA, 306 bp, Klebsiella pneumoniae
atggctaaagcaaccaccctcgaaatgctgaatcagtgctggagagagcagcgcgttgccacgcacagacgcgcattcagcgcagcaggtaatttatcggaagaccgttgggcgcaggtgtttaatgcccataagcgtcgggttctccgccgcaagggattgcgtaatcgtgctgtatgggttgcatccagactcaatgatattcaggtctggtctgcacttattggcagtaaccggaagcatattggattacccccgcagatttatcgtgtaaccggtaatggtggaaaggtggaggtgatttaa

SEQ ID NO: 235486 - DNA, 324 bp, Klebsiella pneumoniae; identical to SEQ ID NO: 161453

SEQ ID NO: 235487 - DNA, 1797 bp, Klebsiella pneumoniae
atgtatcatctcgacaacaccagcggcgtcccggaaatgccggagccgaaagaacagcagtccatgactccacgttggtttggtgaaagtcaggagcaaggcgggataagctggccgggcgcagactggtttaacgtggtacaggccgaattactgaacctgctggcggcagcaggtattgagcctgaaaagcacgcctatgaccagttatccaaggcaattcctgttctgggagatgctcaactccggtctaatcttcgtcaaaatgatggtgcagggctaattggtggccttagttttctgacgatcgagatgtattcttaccttgctgagggtgatgactggcgaaaagcaatacaggctgctattgaccaggctcaccagaattatcttgccgggagcggtccgactaatattctcattggtggtgagttcactgtcaccctcaatccggactcaacattgatccccggtgaggttgctgcgggccgtggcgcgctgtgcatgcgcagtggtgtaacccttatgggtggcgggtcaatcactcttgatggcagttttaccggctcatccagcggtgcaatcatcactaactgggaaggcgctgccgataactgcaagatacaggggatcacgcttaacggtagccgtgccaccgctgctggaacgggcatcacctgtattaatatcgtggactcggacaacgtcaccgttgataacgttaaggcgcttgacagtacatcgggcggaatttatctgcggcgtgcaaataatgcagtttacgggtgttcaaactcccggatactaaactgttatgtgaataatgtagggtatatcggcattcagtgtgagcgccccaacgggatgaccattacgggatgcaccgtaacctcctgcggtgataacggcattgatatctttggtaacgtaaccgacgaaacaggtcagggtgtcgcggaaaatgttgttatagccaattgcaccgtgggtgatatttccgttggcatatttattgaatcctgtgggaatgcaactatttccgcctgtgtcatctatggctttctgaactcgggtgttttctttaaccgaataaatacagcggcatacaactgctctgttacggggtgcacgattactggtaaagacatcactaccagccaaggtatccgctggaaaaatgctgtaggttatacgcgcgtatacaacaatacgattaaaaactgcattgattcctttgtgacaaccggaggcatgatttacgttgatattggggtaaataatcacgaaaacatcggtcgttgcttcctttacgtaccgaaaacctcaaacggctgtgtctacacccgaatggcgcagcaggtctacagcggcgttcagacgaacgggataccttacaacaccacccctcgcaactggccatcagcgaacaatacccggtactaccgttgctcattctccgcgccgtacatgatgtactccgcgacgacaggcgaggataacttcattcggtctactggcaatcttccatctaacagtggctgggggccagcttattcgctctataattccatcgtggcgggggaaactgttattgccatgggtagtgcgcttttagctgcgggtgagttcatgctggtaaacggaagttactactctgtttacagcgtaacatcatcctatgctgtcgtgagaaaatgggatgaaaccagccaggactttattgctggggattacacatcatatctgaacagttcatacgtatattcaatttttcgagcggcctggggagtgttatga

SEQ ID NO: 235488 - DNA, 255 bp, Klebsiella pneumoniae
atgaaatatttagccggagattacatatcaacagactcacgatacggggattcgcgtaaaagttgctacgcttttgcagatgaggctattaaagaaggcgatatttttatcagtaccatcagagtctttgcagacaaaaatcaaaacatccccatctttgattttaatgtaggaaccattaacggtgacccaattgaagcgcttaacaaggcttgtgagacgttccttcagggctttgttgtgattagcgagtaa

SEQ ID NO: 235489 - DNA, 513 bp, Klebsiella pneumoniae
atggcactgacacacgatgaactttgccagatagcctatcaattcctcaagcggaacggcttcaaagtctgctttcacgatcgctttgtcgctgtcaccagtaccggtgagcagccagacgcgatggggttcaggaatttcgcatcctgcctgatagaggcgaagtgctcccgtgcagacctgcttgcagacaggaagaagcgcttccgtcagcgcccggagcttggcatgggtgactggcgattctttatcagcgagccggggattatctctgtcgaagaccttccgccaggctgggggttgcttcatgtcaggaacgggcgcgtatacaaagtccacggctggccgggaaacgcgctgtggtgctctcaggagcacaagccatttaaggccaacaaacaggccgaatgcgattacatgtacagcgccctgcgccggatggacctgcgcggccacctcaaagaagtatacgacggcgtgatagttaacaaatcagaaggaagtgcggcatga

SEQ ID NO: 235490 - DNA, 1008 bp, Klebsiella pneumoniae
atgcgacttttccgatctgcattattaatgctggctttgttgtttcccttgagtggcatctgctgtaactataattttatcggctctccctatactgtggattatggcaatattatcgttcagcgcgatgtccccgttgggcaagcaataagcaatgagatatatggctccttagcacatgcctattcctgcgttacaaccggcaatgaagggtcaagctcagggatgaaaagcggggttttaccctatgtcgcgacgtacggggcgcggcgcgtttataaaaccaatgtgcctggggtgggtatttcttttagcttttatatgaattccaaagcaggtgtatcgacttatagcggcaccgattatattgaccgcggtaacgcttcattgtccagttggtcatcaaaccctggagagttagttagccatgactatcagccggttatacaattctggaagattggtaatattacatccggctcagtgacggggcaacttgcatcgtttgtcgccttcacaatgcaatatctcggcggagaacaagctcctgagatacctgtaaatgcgggggccggatctattacccaggtggcatgtgcggtaaaaacatcgaatattttatttgaactgggggacgtcttggttagtgaattcggctctgcggtaggcacaacgcccgctaatgcgcagaagacgcagaatctcattctggactgcgatgccggagccaatattaacgtcatgctcaccgggccacaaaatcccgacgtcagcgataataccgtgctggcattaaccggtcagggcagcgcaggcgtcgcccgtggggttggcgtgcagctggtttataacaatactcccctcacccttggcaataatctggttttgaagagaaccacgggtggccaggagatgttcccgttaacagcacgctattatcagaccaatacaacggtaaccaccggcatcgcaaacgcatccgcaacgctgagccttacctatcaataa

SEQ ID NO: 235491 - DNA, 366 bp, Klebsiella pneumoniae
atgctgcgccatcgctttccccttatcagtttgcatggtttccggcaggcgcagaagtttgcactggaaatggtcgagggcatatttgcggtcatccagcgcccgccgatcagcaaaaggatcttcggcatcaaacaagatggtattcagggcgccggcgacagcgaagaccctcgccagaccaatggctcccagcgactcgagtcgatcggcatcctgaactattttcgcctccagcgtgcgcggtgggatcgccgcgctgaagctgtgcgcctcgatggcatggctgaccgccgggtaacgatccgcaggaaaatcagcaaaggccgactgcaggctttgttgaataaatcgaacttttgctga

SEQ ID NO: 235492 - DNA, 138 bp, Klebsiella pneumoniae
gtggtgagattgtgctatcaggcgataaagtggatgttgaagcaacacaggcgaagcaaaattctgctggtgctggtgctggtgctggtgctggtgctggtgctggtgctggtgctggtgatcatcacaatgcaatga

SEQ ID NO: 235493 - DNA, 540 bp, Klebsiella pneumoniae
atgcgggacaatatttggtttacgtataaagcacgaattaatgcgcatcatcgtctggaatggcttgagaaacactcacagttcattcttgtatggtatgcgatactaagtgcaattctttctatcgtgacaatacgatttcctacagtgctaggaagtaataccgatattttggctgctatattatcggtagctttactcggtatttcccttgtggtttctaatctggattttcgtggaagagcgatatctatgagaaggaattatcttgcaatgcagcgaatttattttgaatctactgaaaataaagatttaacctctgaacaaagaaatcaataccatgtattgcttgatgaagttgaaaatcatcttgatatagatgataaagccgcacgtgtagcccaggcaggtctcagaacaaggattcctactgctaaagaaataagggaggtaaggaattggaaaattaaaagattcatatttacttctgcattctatttacttccgatcttactcgtttggatggactatgactgctag

SEQ ID NO: 235494 - DNA, 1404 bp, Klebsiella pneumoniae
  misc_feature (486)..(495): n is a, c, g, or t
atgactgctagccgaatttttaaaaaatcattttcggaaaaaaaccttcttaaaatttacaaggagagaataaaagagtcgggtgccattggtattgaccgagtacgtccttcaaaactcgatactacaataaaagatgaagttaagtttatttctgaaaaggtaatgtctggtaactataagtttacagcttacaaagaaaaactcatttctaaaggggctaattctaatcccagacagatctcaataccgacagcgagagatagaattacactcagagctctatgcgaatgtcttacaggaatttatcctgattcaagattgagactacctcataaagtgattgattcactaaaagttgcattagccagcggtttgtattctgaatatgcaaagattgatctcagaacattctacccttcaattgaacactcacttatcactgtctcttatacacatctccgagcccacgagactaaggcgaannnnnnnnnnatcagaaaaaaagaaattagaaacttaataatgtcatctttggttgtaccaacagtaaatgaatttaaaggaagcaaaggtgtatcacctaatgttaaaggtgttccacagggattggccgtatcaaatattctcgctgagatttctttatctaattttgataaagaaattaatgagcttccaaatatttggtttatgcgttatgttgatgacattcttatccttacgcaaaaaggtgaagccgaagtattggcgtctcacgtaattaaaaaattacaagcgctaaaattagatccacatcctttggatgacgttaactcaaaatcaaaaattggtaatctagacgaatcatttgacttccttggctatcatatcaatcaaggggagttattaatcaaacaagaaagtattcttaggttcgaatcttctttggcgaaaatttttacagcatataggcatgcattgctgcaggctaagaataaacgtgaaaaagaaagagctataacttactgtcagtggaagcttaaccttagaatcactggttgcgtatttgaaggtaagcgacttggatgggtctcatacttctcacaaatatccactacatctcaattacgcgccgttaatcataccgtaaataacttgttaaatcgttttaatctttcatctgagattaaaccaaaatctttaataaaaacattttacgagcttcggcgaggaactgcagaaacgttcaaatatatacctaattttgataatttggatatatctcagaagagagagcttgtttcaatgtggataggtaaggacaatgcaaaaaaattaagcgacagtgaaattgagaggaaattcaaatttaaaatagccaaatctgctaaagagcttgaggaagatatttcaggaatatcataa

SEQ ID NO: 235495 - DNA, 396 bp, Klebsiella pneumoniae
atgaacataaaagagatcgggaacgtgtttcactgtgattgcggcttttcctggcatcgcggtaaaaacgataaccataactgcgctgatggtttgcgtgaaaaggtacggcaactggcggcggagaatgtggcgctgaagagcgccattacagaccatagtcattcggttcacttctgcaaggtttgcggaaaggatgatccgtgcagcactgacgatgtttgttatgtgcttagtgaaacccctgccacagatcgcatcgtagccgggattaaggctgatggggtggaggaatgggtatccagcagaggcgggcgctggaatggcacgaccgaagaagcgctgaagttcgccaaacaactgcgggaaggtaaatcagaggaggttaaatcatga

SEQ ID NO: 235496 - DNA, 240 bp, Klebsiella pneumoniae; identical to SEQ ID NO: 99304

SEQ ID NO: 235497 - DNA, 474 bp, Klebsiella pneumoniae; identical to SEQ ID NO: 99300

SEQ ID NO: 235498 - DNA, 228 bp, Klebsiella pneumoniae
atgaactctaccccggatgttaaagaaagggagggcatcctgaaaaagttaatgtttctaaccatccgtgacaagaacgcgctggatgaatacataaaggccaaccgattcagaaacgtcaaagataacatgaggttcgcggagctgctgggttacggtacttcgaaatcagcgatgtgcaggtacataaaaaagattaaggcggaatatgatgaaaacaagttttaa

SEQ ID NO: 235499 - DNA, 726 bp, Klebsiella pneumoniae
atgaaaacaagttttaatgcattgctggctctggctcctcataaagatataacagcaataaataaattcattacatcatcctgctttaccagcacaggacaagacacgctttcttttatccgtaaaatgggatacagatttaacctcagcgatacaagtgtttatatagggctggtaaagaaacagtttgaagaggcttgtacaaaatttggtgacactgtagagattgattttttctgtgatgttgctggcacgaagtatttcgaagacttcatggctgtttatgataaagattcattttatcaggaaatgattaacttcaaccctgactttaattatacaggaaatctgaagagcatccgtagtcgtgcattcacagctgtaagagaaaaagacctccagaatccgggggaaggcatttcttatcttattggcgcactggaaaatgcactgaagaaaattggtgtaaatcctgaagatgatatgaacggaatgaccaaatcattaagaatggccatgagcattatgaatgatattggtggcatgcaattttacctgcctaaaggtgacttactcaaacgggtggttaataagatagatatatacaccgacagctacacgatgggtactcagcaactggcaataaaatacggcgtttcatttaaggcaatcatacttgttattaagtcagtgaaacaggcaatgaaagaatacgagggtaaataa

SEQ ID NO: 235500 - DNA, 1800 bp, Klebsiella pneumoniae
atgagtaacaggctgaatacagaaatcctgattaaccttaccggcaacctgaccaccaaagcccgccagtatggtgccaacatgtccgagttcgcgcggcgtagtgagcgggcgatgtctgtggtgaaagcaacggcttcggcggcggggcgaggtattgatgctctcgggaatcgttatacagcagcgattgctggtttcggtggcagtgccatgctcaggaatttcaccactacagagcgccagttgacacaactgggcattgtcgcagagaaaacccgcgcagagatgagatcaatgtacgaaggcattcaggacgagaccttcaaagtcggcattgatcctaaatcacttctggaaacctatggcattattaatggcatgatgggaagcgttgagtttgcggaaaaaaacaaggatacgcttgctgcgacacttgcgtcgactggtgtcagcggcgaggagctgggggcgcttgtttcccagttccctaaatttacaggatttgacaaagccaaccccgaagatttaaaacttgccgtcgacggccttaaccgtctgggtaaggaaggttccttcgagctgggccacatggcaaaatacctgccctccctcttttctgcggcggctgcgatggggcagacgggccagcaagggattatgaatgtgggcattctgtctgaggctgcaaacgacctcacaggcaatcccgcaataagcgccacgcatattcaaagcctgctgaccaatctacaaagtggtaaaacagaaaaagcgttaaaagatgcgggtattagcacccgcaataaagatggtgggttccgcgatattgttgaactggcgacagagattgccagaaaatcactacactacagtcttaaaagtggaaagtcgcaaacttcattactcgaaggtgcgggctttgatgattattcagtccgatttttacaatcaatgtccaccccggaagaaataagacgtatagaacgttatcgcaatgtcattgctgatggcaaaagtatttttgtggatgcgaaatatgcatcggatgattttgcttcctcattacagcgcctgtctatttcatgggaaaaattctcgaactctcagctttcaggtccggtcagggaactagctgattatattaattccgtggatcagaattccgttcagaactggcttgatgtcggcaaacaaattgctatcgctggtgctggattcatcgcagcccgtaaggcttttcagttgggaaaaggcgcgtgggatttgtttggtgtcggtaagtcaaaaggcattcccaaaggcgtttcagatacgttcggctcaggcgtcatgcccgtctatgtggtgaacatgggggcaggcggaatgggagtacctgacatggggggcggtaaaaacccgcgcggcggctggcgtaactcgttaggctcgatggcgatgatgtcaccactggcggcgacgataccttttcttgccgaagaacctaagctgacggataatgagaaagccgggatgattcagtgggcacaggaacgcgccaaagggccttcaatatggtcgagagtgtctgactggatcaattcggccagtgaagcaccacagattgcagacccacggccgtgggcatcgatgcagccccagaatcagccaggctacccgttttcgtcacagcaaatacaggggcatattgaagtcgaggttcatgataaacgtgtacaggtcagaaacgtaaaaatcaatgcgccaacaatcaccatgagtgcgtggactggttttagcaatgtagaacaagattga

SEQ ID NO: 235501 - DNA, 1740 bp, Klebsiella pneumoniae
atggctgcagatctgaatccgccgctgggtacgacgacacctgaaatattcatggataacgtcaagcgcgctgacgaactggtgaacgggccatcgagcatcgtgctcgatcgcggtggggagccactggattcctggcgtctgatgatggcgaaaaatgatgaggtccggcagaacatcattccgctaagtaagcagtacatgacgcttgatgcggcccaggccgatatcgtcaatatccccgatggctcaacaacctatgtacgcagccctgatggcggcacactggcggatgagtatattaataacggtggcacgctggcggctacgggcagagctatgccgtcgatgagcgctctgaaaacgggatacattacaggggatgctaaaagcgatgcggaaattgttgccgggctggtgatatatgctgatggctctactgcatcgagccctacgtggaatgcctggtatctgaaagtcagggtgggcgagacagtcacctatagcgggacggtaggctctaacaccgccggcgaacagatggcgtatcttatccagctggacgccaacaaagcattcgtggcatctctggctgagtggacatcaaccgggagcgtaacggataaagccacgctgtcagcggtcgccacgcaggacgggtatatgtacgtccgggttagggatacagcagacttcaccctgacacagcgcaaaaaaacaattctggtggagacagatattgatgccgccggaggggtagcaagctatgccagctatcagaatgtgctggcgaataaaccgcttgttgatattacctcatctcagagtactgcatgggtgaccgggcgggtgatttatgccgatggtacccgcacagatgcggccggagagtcatggcgtgccgcttacgttcccgtaaaaaagggggatgttctcgaatatcacggtgagattggtagcgccacacctggcgagctgatggcgtacataattcagctcgacaccagccttaatgtggtggctaacttggcgacctatacgtcgacaggagtccaaaaaacgggtgtcatatccggcgtggccacacaggacggtttcgcttactttcgtgtacgggtgaccacgccggaagcggcaatttatcagagcagagagcggttcacaccgggcgctgacgtattcggtattaaaactgaatccagtctgacctcggctaatcgagtgactacggatgtcacgaatgcctcaactacaaattatattatcgggcgtgtcatgtcagcggatggctcagtcgtggataatgcaggcacatcatggaaagcggcttatcttcctgtgaagtccggagaggttattcagtatcacggccaaatcggctccggcacttcgggtcaggtactggcatacatcatccagctcgacagtgagatgaaatttgtggcgccacttgccacctatacttcgcccggcttgtccagcaccggcgtcatgacaggtgttgctacacaggacggctttgtttacgttcggatgcgtgttaccactccggcagcaaccatctcaaaaaccacgcaactgtttttcctgcccggcaacgtgcacgctttaagggcgcagaccgatattgccgcggctaacagaacgactctggatgtgaccagtgcaccggatacatacactatcagtaagcgtcgtctcagcaccgtctggcagatcctgatattcctgagaggatag

SEQ ID NO: 235502 - DNA, 1005 bp, Klebsiella pneumoniae
atgattgattcccgctgctttgccgaaaacacaataaatattgtttctgtttcaggtggaaaggacagtcttgctgactggctgcttgccattgaagcagggattgcacatatgccagcgcttgccgataccgggcatgagcaccctcaaacaatggaatacctggaatatctggaatcaaaactcgggaaaataacccgagtgaaagccgatttttcgcaacaaattgaagggaagcgcaagtttatcgctgaaaaatggccggtgtcgttggttgaagagtgcggaatgtctcacgatgaagcggcggagcgtattgcccgcgcgctggaaattcttcacccgaccggaaatccttttctcgatttatgtatgtggaaagggcgattcccaagcactaaggcgagattctgcacctttgaccttaagcatgagccaattcgcacgcagattgtattacctgcactggaggaatacgacgaggtaataagctggcagggggttcgtgctcaggagtcgccagcacgcgcagccttacctatttgggaggaggatgcagataatacgcccggtttgcatgtataccgcccaattcttaactggacacatgaggacgtatttgccttagctaagcgacacggcattaaaccgaacccactctatcaacaaggatgtagccgcgttggctgcatgccatgtattcatgcaagaaaatctgagctggccgagatttttgctcgctggcctgaggaggttgcgcgcgttgcagagtgggaacgtcttgttgctgcctgttcacgtcggggaaactcaacatttttcccatctactcacgacccgcggcgagcagaaaaacgtattgaagttattaccgtagaagagtatgggatagcttcatatcgtgactgggcgatgaccacgcgcggcggttctcagttcgatttactcgctgctacaaacgacaaaactgtgtgcagtagcgtttatgccggtgtgtgtgaatga

SEQ ID NO: 235503 - DNA, 279 bp, Klebsiella pneumoniae
atgggtattcgtatagaggttggcgacaaatgggttattacaagcgaccaatatcaattcatcctgaatgaaaagaaagtcgttaagtcaggaaataaagctggcgaggaatggctcgacactatcggatattacccgaagattaatcagcttatttccggtctggtgcatcatcaaattcaaacggcaccgataaattccctttctgaaatggcggcagaaatagagaagttatcgtttatctgtaaagacgcatttaaggcggtgaaaaatgattga

SEQ ID NO: 235504 - DNA, 873 bp, Klebsiella pneumoniae
atgagtaatggagctagcgacgttaagcaagttattgaaaggattctaatttcttacggtgtgaaaaatcgtcctgaatactcagaaattacgcatgtacctctatcaaccatcagtaattgggtggcacgcggtaaagttcctggcgactatttgattcagtgctcatttgatactggcgctgacctcaaatggctgatggatggaagtgaacttacaaatgtaagatttgagcccaggcattaccctatgcagggtatgagattgatggaagcaatgcagaattcaggcggcaaagaggttttgcagcgcatcatgcaggcttacggcttcaccatgcaaaaggagctgggcgaccatctcgatataccttcaggcacgatgagcgcttgggtgaggcgtgaacatttccccggcgatgtggttatcgtctgtgctcttgacactggcgcatcgctgtactggctggcgacgggtatcgggccgatgaatgagcaacatacgcaagtgcaacctgagcagctaacagctcttcctgctggccttaggcaaatcaccaaatacagcattcataccggccagcttactgagaacggtacgtggttctgtgatgactcgctgattgattccacggtagttaacccggcgttggtagagaaaaacgggcagcggtggtgtgtggatctcgatgcgaaaaatatcgctaatggtcgttggttggtcgatgtcgacggtactgccgatgtttatgatgtcgcgcgtttaccaggtaaccggttgtcggtaaaaaatggctcgtctcagtttgaatgtctggttgatgaagttaactgcgtcggaatggtatttttgacactgagtaaaagtctctaa

SEQ ID NO: 235505 - DNA, 570 bp, Klebsiella pneumoniae; identical to SEQ ID NO: 100955

SEQ ID NO: 235506 - DNA, 432 bp, Klebsiella pneumoniae; identical to SEQ ID NO: 100956

SEQ ID NO: 235507 - DNA, 501 bp, Klebsiella pneumoniae; identical to SEQ ID NO: 85998

SEQ ID NO: 235508 - DNA, 618 bp, Klebsiella pneumoniae
atgagcgaaacaatctggctggaaccttcaaataataagacggtttatctgcaaatcaaaaatacctccgataaggatatgagtggcctgcaggcaaaaattgccagcgctgtcacttcaaagggatatcaggtcgtcagtaaccccgatacggcgggctactggatccaggcgaatgtgctcaaggccgataaaatggaccttcgtgagtctcagggctggttaagccggggttatgagggcgctgtgacaggcgccgctcttggggcggggattaccgcttacaactccagttccgcgggagcaaccctgggagtagggcttgcagccggtctggtcggaatggcggctgacgcgatggtggaagatgtgaactacaccatgatcaccgatgtacagatcgcggaaagaaccaaaacacaggttcagactgataacgtggccgtattacgtcagggaacatctggcgcaaaagtgcagacaagtactgaaacgggtaatcagcataaataccagactcgcgtcgtctctaacgcgaataaagttaacctcaagttccctgaagcccagcctgttcttgaagaccagctggcaaaatcgatcgctaatatcctgtaa

SEQ ID NO: 235509 - DNA, 1485 bp, Klebsiella pneumoniae
atgtacggagaggagaagtcggactcgctcatagtagcggcgaagcaggcgaacaacccgaaaggagcggagtcagtggagcgaaggagcggggccaaggggaacgcggaacagccacacatgcgccggacacagagccgggaaagcatgtcacagaggctgtcacgcgtgcgggaagctgcgaagcagcggaagaaagaacggtttacagcattgttccacctgctgacagtcgaagcactggaagccgcattcctctccctgagcaggaaagcggccgccggagtggatggcatcaggtggatggactacgccggaaacatgaagaacaacataacagatctgcaccggaggctacatcagggcagctacagggcgcagcccggcaggcgtcactacatcccaaaagcggatggaaaacaacgcccgctcggcatcgcctcgctggaggacaagatcgtccagtatgcgctggtgaaaatcctgaacgcagtctatgaaaacgactttatggggttctcatacgggttcagacccgggcgaagccagcacgatgcactggacgcactggccacagggctggtacgcactaacgtaaactgggtactgtatgccgacatcagtcagttctttgacagggtgagccacgaatggctgatcaggttcacagagcatcggatcggcgaccggagggtaatcaggctcatacgtaagtggctcacagccgggacgtcggaggagggtcaatggcgagcaacggaggaaggcaccccacagggtgcggtcatctcaccgctgctggcaaacatatacctccactacgtcttcgatctgtgggcgcatcagtggcgacgtcgctatgccacaggcaatgtggtaatggtcagatacgccgatgacatcgtcatcgggttcgacaaacgatacgatgcccggcgcttccgtatagccatgcagcgcagactgagggagttcggactcacggttcacccggagaaaacccgtctgatggagttcggccgcttcgctgccgaaaaccgtgccatcaggggaaaaggcaaaccagaaacgttcaacttcctcgggttcacgcacatcagcgggaaagatcgcaacggcaggttcatgctgatacgaaagacccgccgggatcggatgacggcaactctgaaagccatcaaagacggtctgcgaaggcgctggcattactcaatccccgaacagggaaaatggctcaggagagtggttcagggatacctgaactatcactcggtaccgggcaacttccccaccatgcagaagttcaggacacacgtaacaaacctctggcgccgggcgctcaggcgcaggagccagaaggatgatacgacctggacgaaagcaaacagactggcagccgcatggctaccaggggttcgggttcttcatccatggcctgtggagcggttcaccgccagacacccgaggcaggagcccggtgcgtaa

SEQ ID NO: 235510 - DNA, 327 bp, Klebsiella pneumoniae
atgactgccagctattttccttctcctgctgctgattatattgagtctgctctgactgtcacggccgcatgtgatatcaacactaaatatcaggttattcagactgacagaggctacattgttttagatttgtcgctgaaagtgacgcagggaagcgtcgttcttatccgccaggctggcgaactgcagtttgcaaaattgatggggagctcttttattacagccgaaggcaagagcatcgaaggtgaggcactggaagacgtggaattactcggagtcgcaacccatgcgattaacgacttgagacaggatatgagtcctgtttga

SEQ ID NO: 235511 - DNA, 993 bp, Klebsiella pneumoniae
gtgaaaaccctgacgcttttcctgagtgccctgatgttgtgggggtacagcctcagtgcggctgctgacccctcatgtgagggccggtttgttaacccgatcaccgatgtgtgctggcgctgcatcttccctctgtcgctcggcagcgtgcaggttggtaaaggcgacctgcctgataccagcaatcccggtaatcccctgcagctgtgtccggcgccgccaccgctttttgttcgccccggtctggccatcgggtactgggagccgatggccatgacggacgtcagccgttcgccaggttgcatggtcaatctggggggcttcagtatcaatctcggcaagaccggcatgggaaccgcgagaaaggacgataagcaggtgaacggcgccttctatcacgttcactggtacaagtacccgctgacgtactggctgaacatcatcacgtcggcaggctgtctggaaggcggagacatggatattgcctatctgtccgagattgacccgacctgggtggacagcagcctcaccaccatcctgaatccggaagcgatcctgtttgccaaccccatcgcgcagggcgcctgtgctgcggatgcgctggccagtgcattccatatgccgctggatgtgctcttctggtgtggtggaagccacggctcactttacccgtttaacggccaggtcagtaatgaatccagcccgctgcagtcatcggtactggtcagtgaacgtatggccttcaagcttcaccggcagggacaaattatggagagtatcgggaaggacaaggcggtctgttacgaatatccctccccgatcatcccgaaagaacgctggcgctatcagatggtaaacatgtatccggacagtggtcagtgccatccgctaggacgcagcgtgatgcgctgggaggccggcaaaaatccacccaactcccgcaagaactatggctacctgatgtggcgtaaacgtaactgcgtatttttgtaa

SEQ ID NO: 235512 - DNA, 2745 bp, Klebsiella pneumoniae
atgatataccagcgatgtgagcgaattttgctcatagtcccatctgactctctccgaacacaaatatccaaaaaattcattgagttgggatatttgccagagctaacagtcgttccgcctaacattgcactccctaatgtcgccattattaagaagggaattcaggtagcggaagaagctaagcaattagcttgtgaatcaaacgtcttggttgctacgaccagcgttttgtctgcctgctccgaagcagcattaaatgcactttgcgagtcgtgtagccatctttttgttgatgaggcccatcatatctcagcctcatcatggcagacaattcgcgaacgattcacagacaaacgtgtagtgcagtttacagctactccctttaggaatgataaaaagtcccttggtggaaaaattatctataactatacgatgggggaagcccaacgagcaggctattttacaaatgtaaatttgctgcctgtagaggagtattactctgaccttatggatcatgcaatcgcggatacagctgtaggtcaactgcgtatagacttaaataatgaccttgaccatttgctcatggcgcgtactagcaataagcagcgagcagaagaaatacttactatttatcagaaaattgcaccaaactttaatccaatcgttgttcattctgattatcctaaaacggaaataaaaaaacgtcttaataaattattatcaagacaatcaagaatcgttatttgcgtagacatgttgggagaaggctatgatctacccaacctgaaaattgccgctttgcatgatcatcataagtctcttgcagtaactttgcagttcattggccgatttactcgtgtcaataaagcacagaaaattggtcaagccagtgtagtcatgaatgttgcggaccctaatgttgaaggtgaattacagcatctatattcaacagatgccgattgggataacgtattaaggcgactctctgaaggacgaattgccagagagattaggttgcaagaggtcgtggatgccttaaaaaggaaaggtgatttacacgatcagatttctctctggaatattgagccaagttgttctgtcatgttatttaaaacgtactgtgacaattgggagcctgaaagatacaaggagaaactgcccagattcgatgaatcctggcatgcaatagctgaagatgagaatttgcttgttgtgctagctgtccaggcaacttcagtccgatggggaaactacaaagatcttaaagataccaattataaaattctaattgctcattgggatcaagacagatccgccttgtttgtattctcaaatgactataaagcattccgagttgagaatctagtcagtactatttgtgatgataaatttgaagttgtcagtggtgaaaaagtctttaatgtatttaatggtattgaatatcctttggcaagaaatttaggcgcatcccaaattggggcaatcagctttactcaatactttggcccaaatgtcactgaggggctatcactaattgaagcatctcaatcaagcttaagcaatattgcagcattaggttatgaatccggaaaccgtgtaatctggggatgctcgcaacgcagaggtaaagtctggtcaccacaaaaaggtggcagcattgctgattggtgcaactgggttaagaaagcatgggacaagatttttagttctgaaccggatccaaacaatcttacgcgtaactttttgcgtccagtcccattacttgaaccctataatgaatatccaatatcagctcaatggggtgagtatttgcttactgcgttcgaagataaagttatttttcattttgatgctgtatctgcgcatttatatttagtagaggttaggactgctggaaagtttgacgattgtaatgtacgactcattttctctacagatgaaacgtcatctgaatataaattatctctcacgggaagtgctacagcaaaaggttatgcctatcagttgatatctggccctgaagtttttgtacagcgtggtgaatctgaaccggtatcactatcagagtatatggaaattgatccagtaatgattcattactccgatggttcattttcatacaacgctcatatagtccatgtaagccaaaatattggcctttatgacaaagacgaaattgtagcttttgattggcaaggaactgatgttcgagtggaatcaatgggctatactcgtgatccatcatccatccaatggcgttggtactgtgaaattaaagataattacgatgtcattattaatgatgatgggaaaggtgagtcagcagatttagtggggttgagaatagttgatgactgtattgttctctccttaatccattgcaaatattcaggttcagaagaagcaggggccagacttaaagacctttacgaagtatgtgggcaggcacagagatgcattcgttggaaacacctgaatctttcctatttataccaccacattaagcgtcgtgaggaacagtggcgatcgcgtggttattctcgctttctgaaaggcactataaaagaccttgccgctatgaaagagcgttccagaatcacacctcttaaattccaagttgttattgttcaaccagggcttagagtacgcaaaattaatgaagaaggccttaagctacttggcagcacggcgctatttataaagaaaacaacgatggcagatttagttgttattggttctaaataa

SEQ ID NO: 235513 - DNA, 507 bp, Klebsiella pneumoniae
atggttcgaacaacggatgttatggtaaatctatctataaatgtctattatagtggatttcctatagttgtttggaaaatgacaaggatatatatgaaaataattaagtgggcttcactgtctggtgttctgttaatatctgcttgtggtgtttctcagaacgaagtaaatagtgctaattatggttcaaaaccaatagataatgatgcgaaagtgattggtatgcttaaagagagtctaaaagatcctgattctctaaaagttatatcaataaccacccccgccagaggtttttctaagtatggctttggctctacagagcatggctggttcactactattacatataatgcaaaaaactcttatggcggttatgttggtgctaagtccattactttcgtttacttaaacggagattataaagtggcagtgccaatgtctaatggtgagagggttatgttagataaagtgtcattttcatgtaaagacaattgccaaactaaatga

SEQ ID NO: 235514 - DNA, 273 bp, Klebsiella pneumoniae; identical to SEQ ID NO: 219271

SEQ ID NO: 235515 - DNA, 390 bp, Klebsiella pneumoniae; identical to SEQ ID NO: 152530

SEQ ID NO: 235516 - DNA, 1050 bp, Klebsiella pneumoniae
gtgcaggcccccgcgccttcacggcccatcgagcggggtatcgcaggaccggggctgctggcccgcgtgctgatctcaaagtatgcagagcacaccccgctgtaccgccagtctgaaatatacggccgccagggcgtggagctgagtcgttcactgctgtcgggctgggtggatgcatgctgccggctactgtcaccgctggaagaagcgcttcaggactatgtgctgactgacggtaagctccatgctgatgacacgcctgtcccggtgctgttgccaggcaataagaaaacgaagaccgggcggttatggacctacgttcgtgacgaccgtaacgccgggtcaacgctggcgccggcggtgtggttcgcttacagcccggacagaaaaggcatccatccgcagacccatcttgcggggttcagtggtgtactgcaggcggatgcatacgctgggttcaacgagctgtaccgggatggtcggataacggaagccgcctgttgggctcacgcccgccgtaaaatccacgatgtgcacgttcgcaccccgtcagccctgacggaggaagcgctgaaacggatcggcgaactgtacgccatcgaggcagagataaggggaatgacggcggagcagcgccttgccgaacgtcagttgaaaacgaaaccgctgctgaaatccctggaaagctggctgcgtgaaaagatgaaaaccctgtcgcgacactcagaactggcgaaagcgttcgcatacgccctgaaccagtggccggcgctgacgtactatgcagatgatggctgggctgaggcggacaataacatcgctgaaaatgcgctgcggatggtcagtctgggccgcaaaaactacctgttcttcggttcggatcatggaggagagcggggagcgctgctgtacagcctgatcgggacgtgcaaactgaacggagtggagccagaaagctacctccgctatgtccttgacgtcatagccgactggccgataaaccgggtcggcgaactgctcccctggcgcgtagcactgccgactgaataa

SEQ ID NO: 235517 - DNA, 381 bp, Klebsiella pneumoniae
atgggctattcctttacctcacccgaagtcgccggcgcgcttgtcagggcaaagcggcgtggcgtcgatgtgaaagtggttctggactggaaagccaataccggcaagcaaaaccaggcgagtctggcggccatgaatcttctggtcaatgccggcatcccggttcgcacagtgtcgcagtacaaaattatgcatgacaaagtcatcattgctgatggccgcaatattgaagtcgggtcttttaactacacccgctccgccgatcgggtcaattcagagaacgtgctagtcgtgtgggatgttccagtcgttgctcaacgctatctgcagcactggtcgacccgctggtcgcagggaacggactggaaacgggcttattaa

SEQ ID NO: 235518 - DNA, 174 bp, Klebsiella pneumoniae
atgctgccggccggcatgaacgaggacggcgtcatcgaggacatgcaggcgtatgacgcctggctggcagatgagcagacacagcgggatatgcagcggcgtgaggaagtcaatatcaaccacagccaccgtcacgatgagcaggatgatgtcgagattggagggaatttctga

SEQ ID NO: 235519 - DNA, 192 bp, Klebsiella pneumoniae; identical to SEQ ID NO: 234415

SEQ ID NO: 235520 - DNA, 753 bp, Klebsiella pneumoniae
atgcgaacaatacatgccgccatgctggcggggtgcctttgctgcaccctgatgccggctttcgccaaagacgcgggctggcagtggtacaacgagaaactgaagccccgtgatgaggaaaagccagccgcaccagcggcaccaccgccgcaaatggatattctggagaaactcgccacactccaggcggccaccaaacggtcgctgtacgaggccattctgtatccatcgtctgaaaacttcgtgaagtatttccggctgcagaactactggacgcagcaggcaggtttgttctcgatgagtgcgaagaaagcgatgctggaaaaccccgaactcgattacaacctgcagcacagctactacaacggcacggtaaaaaaccagctcgctgccgactatgccgaacagcgacaggctatctccaccctcgcacagcactacggcgtgatgttcttctaccggggccgggaagcgatcgatggccagctggtccaggtgattaaaaattttcgcgaaacctatggcctgagcgtgataccggtgtcggttgacggagtgattaaccccatgctgcccgatagccggacggaccagggccaggcagagcagcttggcgtgaagttcttccccgcgatgatgctggttaacccgaaaagtggccaggttaagcctctcagttacggctttatcagtcaggacgacctggcgaaacagttcctctatgtctccagcgactttaaaccgaatttctaa

SEQ ID NO: 235521 - DNA, 216 bp, Klebsiella pneumoniae
atggatactttaatagcatttttatctctggctctctttattgcttttatcgtggggttaatcaagccgtcgctggttcgaatgcctaaccgtaagcgctcaagtgcggtttatcttggtggctgtctggcgctgggcgttattggctcaatcttatggccgactgaaaaaagtcagcctgtggcaaaaactgaagcaccggcggggctttgttga

SEQ ID NO: 235522 - DNA, 231 bp, Klebsiella pneumoniae; identical to SEQ ID NO: 190757

SEQ ID NO: 235523 - DNA, 258 bp, Klebsiella pneumoniae
gtgcgtgagcgttttcgcagctatcaggctgagcgtaaatctcacggccgtaagcgggatactgcacggcgggatgcatcacggcagcgtcatgacatcgagacgcgcgtgcgtcagcaactgacccgcgaatacgccaccggccgcttcaggggagataaagaagcgctgaagcgtgaggttgagcgccgtgtgcaggagcgcatgctgctgtcgcgcgggaacaactacacgcgactggccactgtccccctataa

SEQ ID NO: 235524 - DNA, 681 bp, Klebsiella pneumoniae
atgccaaacagcaaaacctacgacctgacagggtgttttgtggggcttgaagcctggggcgacgtatcgagtgagcgcgccattgtccggacccgcaatatcagctgtatcaaaggtgataaaaccatcgatcagcccattaacggccacgtgtcatttatggggaaaaacggggttaagggagaggtggtgatgcgtaacggaaaaatcctcggctgggcatggggggccggttttgttgacgggattggtcagggcatggaacgggcttcacagccggcagttggcctgggggcaaccgcatctgttggcgccggtgatgttctgaaaatgggcgtcggcggtggtgcatctaaagctgcgcagacgctgagcgagtactacatcaaaagggccgagcagtatcacccggtcattccgattggtgccggcaatgaagtcaccgtggtctttcaggatggttttcagctgaaaaccattgaggaactggaagcggaaaagaacgggcaacagcaggctcagaatcaggaggcggagccggcaccgcaggctgatgcacatcatcagtcaggcggcggtatgaacggattcaatactgacgagatgctgaagaagctgggcaaacttgatccgcgggagttctctccgggcgcagcgccgcagggggaaaataatggctaa

SEQ ID NO: 235525 - DNA, 186 bp, Klebsiella pneumoniae; identical to SEQ ID NO: 217874

SEQ ID NO: 235526 - DNA, 1302 bp, Klebsiella pneumoniae
atggggtacagaactcttccatacacgtttcagcgaaacggcaactactacctgcaaatccggctttcaaatggcaggatgtataagaaatccctcctcactgacagctatcgcgaagcatctgctttgatgattggcgttactccgcatattccttttgtgaaatcattatctacgccgatctctgtgttcgattcatttttgtcaaacctgattacgtcagaacgcaaggctgcgagaaatccactttttccccaccagcagataactgttcctgttgaaatcgtggaatctcaatcgccagctgaaccggcaaaagtgctaaccctctcggatgcgtgggcgatgtacaaagacgaaaaggggcgtaactggacgaattcgatctcaatggcaaatgagcgctacatggaagtgctgttaactgtcttgggaggggaaactgatgtagcggcgattagcaaacaggatattaaacaggtgatggaaatcgttgaaaaccttcctaagcgtgttgttcagccttaccgctcaatgtcgattcagcaactgattgagtgcgatgatgttccaccggatcaactggtaggcgttgaggccatccataagcatctcaagctgtataaatcactcttcaaaaccttcctcacagaaagcaaagattttttatctaagtcgccaactgatggcgtagtggctgctccatcgaaagcgagatttggtgcatacagcacagcggaaatgaaaaagtttgtcgggtgggcgcttaaacagcctgataactggcaaaagtggatcacattgctgttggcatacaccggagccagaagaggcgagattgccaaactggagaagtcacagatcaaattcgatgaagatagccagcgctactatttcctgattgccgaaggtgggcaggggaaaaccgagaacgctacaaggcaggtagtcatccaccctaagctaattgaatggggtttcatggagtatgttgatcgccagtggaaagagcggattttttcagaagtggcaggtacaaacatgactaagatcggtaaagtgtttgctgatgttcgagatcagttgggtattccttatctggacgattatggacagcggcggttgctgcattcaatccgtcactcggtatgttctgccgcaatggctggctgggtcactaacattcttcatcttcagcagactgttggtcatgaaaagagtggaggaatcactaaacgatatttatatacttttcctctatttacagtctcctatgtagttgatgggctttgctgggtctaa

SEQ ID NO: 235527 - DNA, 168 bp, Klebsiella pneumoniae
atgcctgacaacaaaaaacaagggcgttcgaacaagactatgacgttcttcgtctgtttcctcgccgcgctggctggcctgctgttcggccttgatatcggtgttattgcgggtgccttaccctttattgccaatgagttccagatttccgcccacacccaggagtga

SEQ ID NO: 235528 - DNA, 288 bp, Klebsiella pneumoniae
atgtttacgatagagaaagaagttgcagttaaacaggttacttccgatggtatcgcggttggaactgcgacgctaaaagtcaccctgacatacaccatcgagaggatcgagcttgaaggggcgaacggtatcgctttttacactgttacgtctggcgcggatgctgagggtgcgaggaactacatcccattcatttattcagggaacggtgatccactgcctgaagccgaggcagcattaaaagaatcgcaatcccggcacgatgacatgcagaagcgcaccacctga

SEQ ID NO: 235529 - DNA, 1545 bp, Klebsiella pneumoniae
atgaaaatccgttctcaggttggaatggtgctgaatctggacaaatgcatcggctgtcacacctgctcggtcacctgtaaaaacgtctggagcagccgcgaaggcatggagtacgcgtggttcaataacgtggagaccaaaccgggcattggctaccccaaaaactgggaggaccaggatcagtggcaaggcggctggatccgcggcattagcggtaagctgacgccccgcctcggcaatcgggtcagcgtgttatcgaagattttcgccaacccggtgctgccggcgatcgacgattactacgaaccctttacctacgactaccagcatctgcacaacgcgccggagggcaaatatctgccgaccgcccgcccgcgctcgctgatcagcggcgagcgtatggataagattaactggggcccgaactgggaggagctgctcggcggcgaattcgagaaacgcgcccgcgaccgtaacttcgaagccatgcaaaaagagatgtacggccagttcgaaaataccttcatgatgtatctcccgcgcctgtgcgagcactgcctcaacccgagctgcgtggccacctgcccgagcggcgccatctacaagcgtgaggaagatggcatcgtactgatcgatcaggataaatgccgcggctggcggatgtgcatcagcggctgcccgtacaaaaaaatctactttaactggaagagcggtaagtcggaaaaatgtatcttctgctatccgcgcattgagtccgggcagccaacggtctgctcagaaacctgcgtcgggcgcatccgctatcttggcgtactgctgtatgacgccgaccgtattgaagaggcagccagtaccgaacatgaaaccgacctctatgagcgccagtgcgaggtgttccttaatccaaacgatccggcggtcatcgaggaagcgctaaagcaagggatcccgcacaacgtcattgaggcggcgcagaagtctccggtatataagctggcgatggactggaagctggccctgccgctgcatccggagtatcgcaccctgccgatggtctggtacgtgccgcccctgtcgccgatccagtcggttgccgacgccggcggcttaccgagcaacggcaacatcctgccggcggttgagagtctgcgcatcccggtgcaatacctggcgaatctgctgagcgccggcgataccggaccggtcttgcgcgcgctgaaacggatgatggcgatgcgccactacaagcgctcgcaaaccgtcgagggcgtcaccgatacccgcgccattgaagaggtgggcctcagcgttgagcaggtcgaagagatgtatcgctatctggcgatcgccaactacgaagaccgcttcgtgatccccaccagccatcgcgaactggcggaggatgcctttccggaacgtaacggctgcggctttaccttcggcgatggctgccacggatcagatacgaaattcaacctgtttaacagccggcggatcgacgccatcgacgtcagcggcgtgcgtaagcatggggagggcgagtga

SEQ ID NO: 235530 - DNA, 786 bp, Klebsiella pneumoniae; identical to SEQ ID NO: 99907

SEQ ID NO: 235531 - DNA, 1224 bp, Klebsiella pneumoniae
gtgtattatgcttttatcgagttattcaccaacaggatgaaagtaaaagtgaaacatctgcaacgattcttcagtagcgatgcttccggcggcattgtcttaatcatcgccgcggtgctggcgatggtcatggcaaataccagcgtgaccagcggtctgtatcactccttccttgatacgcctgtacagctgcgggtgggggcgctggagatcaacaagaatatgctgctctggatcaatgatgccctgatggcggtgttcttcttgctgattggcctggaggtcaaacgcgagctgattcagggctcgctggcgagtcgtcgtcaggcggtctttccggtgattgccgcgctcggcgggatgatcgtcccggcgctggtctatctggcctttaacgctcaggatcctgtcgccagagagggatgggcgatcccggcagcgacggatattgcctttgcccttggcgtgctggcgctgttaggcagccgcgtcccgacggcgctaaagattttcctgatggcgctggcgatcattgatgacctgggggctatcgtgattatcgcgctgttttatacccacgacctgtcaatgctctcgttgggcgtggcggcggcggcgattgcggtgctggtggccctgaatctgagcggcgtgcggcgcactgggatctatattctggtcggcgcggtgctgtggacggcggtgctgaagtccggcgttcacgcgacgcttgccggggtcatcgtcggctttatgattccgttacaggaaaagcagggtaaatccccggccaaagcgcttgagcatgtcctgcacccgtgggtcgcgtttatgatcctaccgctgtttgcctttgccaacgcgggtgtctcgttgcaaggggtcacacttgatggactgacgtcgctgctgcctctgggcatcatggccggcctgtttatcggtaagccgctggggatcagcctgttctgctggctggccctgaagctgaagtgggcctcgctgccggaggggaccacctgcgggcagattatggcggtggggatcctgtgcgggattggctttacgatgtcgatttttatcgccagtctcgcctttggcaacgtggatcccgcgttgatcaactgggccaagcttggcatcttgatcggctcagtgttatcggccgtcaccggatacctcatactgcgtcagcgcgcgacggatactcgcctcgcggtataa

SEQ ID NO: 235532 - DNA, 663 bp, Klebsiella pneumoniae
atgcataccttatcgacgctctttcccgccgccttcccggcgttagccctgtcccactttgtcgctctgctcagtccgggccctgatttttttctgctggtcggctacgccgtgcgctaccggatccgcggcagcatcggattgtgtctcggcatcgccgcaggcaatgcgctgtatattgtgctcgccatcgtcggctgggggcttctgcgccaggcgccgctgctttttttgctcatcgagctgctgggggcgggctatttattgtggattggcagcctgctgatacgcagccgtcccgcgacgctggcgatggagagcgttcgcgcagcgcgtccggggttcggcaggcagctgctgctggggctggggtcatcgctgctcaaccccaaaaacgccctgttttatctggcgctgatgacttccctgctcgggccggctgtaaccctgcttcagcaaacggtgagcgggctgtggatggtcagcgtggtgttcttctgggatttactgctggtgagcgcgattgcgctgccgcagatacagcgccgcctgggcgccatcgtctggcgagtcgagcgggcggcgggggcgatcctgatgctcttcggcctggggattatctggcgatttttgcacgacctcgccgtcaggctatatgcttaa

SEQ ID NO: 235533 - DNA, 1152 bp, Klebsiella pneumoniae
atgtcgcttatcaccgatctacccgccatttttgaccagttctcagaagctcgccagaagggctttctcaccgtcatggatcttaaagagcagaacgtaccgctggtgggcacttactgcacctttatgccccaggagatcgccatggcggcgggcgccgttgtcgtctcgctgtgctcaacctccgatgaaaccatcgaggaagcggaaaaagatctcccgcgcaacctctgcccgcttatcaaaagcagctacggcttcggcaaaaccgataaatgtccctacttctatttctctgacctggtggttggggaaaccacctgcgacggcaaaaagaaaatgtatgagtacatggccgagttcaaggcggtccacgtcatgcagttgccgaacagcgccagcgatgccgcctcgcgcgcactgtggaaaacggagatcctgcgcctgcagcaggtgattgaggcccggtttggcacgccgattagcgaggcggcgctgcgcgaagccatcgtgttgaaaaatcgcgagcgccgggcgctggcccacttttatcgtctcgggcagctcaatccgccggcgctcagcggcggcgacatcctgaaagtggtgtacggcgccacttttcgtttcgacaaaaccgccctgattgatgaactgcatgccatggcggagcgcatccatcaggagtggcagcagggtaaacggctggaacctcgtccgcggatcctgatcaccggctgcccgatcggcggcgcggcggaaaaagtggtccgcgccatcgaggaaaacggcggctgggtggtcggctatgagaactgcaccggcgcgaaagcgaccgagcgctgcgtggcggaagagggcgacgtctacgacgccttaaccgataaatatctcgccatcggctgctcctgtatctcccccaacgaccagcgtctgcagctgctgagccagatggtggaggagtatcaggccgacggggtgatcgacgtcattttgcaggcctgccatacctatgccgtggaatcgctggcgattaaacgccatctgcgccaacagcacgatcttccttacatggcgattgaaaccgactattcgacagcggacctcggccagctcagcacccgcgtcgccgcctttatcgaaatgctgtaa

SEQ ID NO: 235534 - DNA, 264 bp, Klebsiella pneumoniae; identical to SEQ ID NO: 186031

SEQ ID NO: 235535 - DNA, 963 bp, Klebsiella pneumoniae
atgcattttaaattttacacaacattgagattcatgcatgttacgggcgataactttgatgattttgatctccttcccggtgtaacactgataagagatcgaaagaaaataagaaaaatacttaataaagaaattaaatcctttacaggcattattgaatacgagcatttatataatgcaaaccacataatttatgccgaccttcaagatgattttttttccccatcaacatcaagtggtgatgcagtgatgagttggcttttatggatagacatgcttgttagtacctcttggctgattaaagataatggtatgctttgcgagatagcatactgcaataaaactgatcgtaaaacattctctgaatggtctaataatagtttattaagcctgtttacgttagctgggggaaatagacatactgatattgagtttagcagagatgatttaattaaatgggaagatacaaatcacaaaattcaaactcatctatacaaaaataattctactgtgtttaattcctttgtggattcaaaatattctcgatatggtagagctttcagtttcattaagtcagcaaaacgagaatttgatcctgcaatgaaaatatcgcattactgcagtgcactagagagtttattttcaacagataactctgaactctcacacaaattatctgagcgcgtttctattttcttgaaaccatatgattatgatcccatcaagacatttgatgatattaaatcattctataatattcgctctaaagttacccacggtgatagtttgaagtctgatagagtagggaaattaccagaagaaagcattaaactagataattatcttagagtaatcatgaatataatattagattccgatgaacttatgacaatatttaacggtaacaaagatagctttgaaaaatatttcaaggaaaaattattacttggcgttcaagtatag

SEQ ID NO: 235536 - DNA, 1062 bp, Klebsiella pneumoniae
atgcgtaataatgaatacccccatggtatagtgattgcagttcatccatatccgaggtatttgaatagtgattggattctgcatacgtatataagtgaacataaagagccttttagatggaaaaaaaaggtggatttttttgagccatttgactatgggttagtttttagtacttatcaagaagcattaagtgcagccgataaaataaataaagtgattcgagatgcaattaaccaactagacgctcctcaagaaattaagcactcatattttttaagggctgaaaaggcaataatgtctagggggagactcaaaaatgaagaagatctaatgtttaatgaagcgttaagaattacttcttcgttgccgcgacctaaagatagtgaagtcattattaaaattaatgcatataggcgagcagatatttccataaaagatgaattgctaaaagagattaaaattaaccccttaattgaaattgctcatttgaaagaaaacaggatggttattggaaaaaatgaaaaaggtgagtgggggcgttatctctattacaacgaacggaccacccaagtagcatttagagaaaagatttcaaggtctttcggtttttcaggccgtgagcactgggggaaagttaagtctgaaattagactgaaactattaccacgagcaaatgagcttttacaacttgcgagtgtaaaaagaatgcttgcagaggcatattctcatgggcataaagttttaatggcagggggatatgtattttggtacgaggaaaatggtgatattggatggacagtaaaaactactaatagcaatgaatcgatcaaaaatggtgaaagcatttggcatgatgggacaattatatcaaaaaaccatggaaggatcgtagttttcccatacattaaagaaaatggagaaaaagttcagggacatactaaaaatgcccctcatgatggaaaagctaaacctcgacatcctagcgagtatgttgagttgccgtttcacattcttgaggatgacttgatggtcggtctgtttggtgaacttaaatatgagtga

SEQ ID NO: 235537 - DNA, 2019 bp, Klebsiella pneumoniae
atgagtttacaaaccaatctcaaaggccgtttgcgaaatacgtcgttgccaaaaagccacggcttgatgcctgtttttgaggcggtggtaaactctattcactcgattgaagaaaaagggaatagtgatacaggtaaggttgttcttcgtattaaccgcgctactcaggagagtctagatttcgatgccaaatcgctaccacctatcttgggtttcacaataaccgacaatggttgtggttttaatgaaaccaactttaaatcatttgaaacactagattccgaccacaaaattgataaaggctgccgaggagttggtcgcctgatgtggctaaaggtttttgattttgtcgaagtcgaaagccactttttcgatgttgatggtgagcttaaaaagcgcgtattccgctttgacgataaatcaggtgttcacggtgaaaatattcagatagcgacagaacagcagcctggtaccctaatcaagctgatagggtttgatgacagctatcgaaagcaggtgccaaccaaggggctatcaatagcaaatcagttacttgaacatgttctctggtattttgttcgtcaaggctgcgcacccaagatacaggtagaagacgcaggcgaggtattcgaactggataacttgttagaggagcatatgcacgccggtgcgtttctcgaaactattatcatcggtgatcattccttcgacttaactcacattaagtttcgtgcatcggtaaataaaaagcatcagttagctttatgcgcagctaatcgattggttaaagaagaatccattcaaggaaaaattcccggcttgtacggcaaaatatctgacgaatcgggagaatttacctatacctgttacgtgtcttcaggctacctagatgagcgtgtacgcagcgagcgcacctcttttgatattgccgaaagcgtagaggacatgctcaacgaagtaagttttaaagatattcgcgatgcagtgctcgcacgcactaaagaatatctgcaagatgttttggcagaaaatgtctcagccggtcgtaaacgagtagatgattttattaatagccatgcaccgcgataccggcctattgctcactatgtcgcagaagaacagctcattgttgacccagaaaaatcggacaaagatttagagttacatctacatgctcactggtatgaggtcgagcgacagttagtaagtgagggtcatgacatcatgcaacctcaaaatgaggagcatgtagaggagtacaaggaacgactgagtgagtatctgcgaaaagctgaagacctgaaaaaatcagaccttgccaattacgtatcacatcgaaaggtcattattgatctgctgcaaaaatccatcgagcgactggatgatggcaggtatgcccgtgaggatatgattcatgagctaatcatgcctatgcgtaaagattccagcgaggttttacaggattcttgcaatctttggctgatcgatgaacgtttggcatttcacaactatttggcttccgacaaaactctgaatgcgatgccgattactggtaatgattcgacaaaggaaccggatttactcagcctaagagtgttcgataacccgctgcttgttaatgatcaaaatagctttcccttagcatctattaccgtggtcgaaatcaaacgcccaatgcgcaacgatatgcgagaaggcgaagataaggaccctattgaacaagctctcggttatgtagagagaattcgcgagggtcaagcgaaaacaaaatcaggactacttatccctagaaatcatgacattcccgcatactgctatattgtgtgcgatctgacttcaacaatggtaaagcgctgcaaaaactttagtttaaccatgactgcggatggcatgggattcttcgggtacaaccctaattacaaagcttatatcgaggtcataagttttaatcagcttgtgagggccgcaaaggaacgtaaccgtgcattctttgacaagcttggactcccctctatgtaa

SEQ ID NO: 235538 - DNA, 1215 bp, Klebsiella pneumoniae
atgatctctagctttgagaattgcccagataattggagcatgctgaaaattgatgagatcgcaatcatacaaagtggaacaggttttcctcctgatgctcaaggattgactagcggtacgattccatttttgaaagttagtgacatgaatttaccgaaaaactctcgatttatcgaagagtggaataattcaattacagaagaacaggtgtcaaaactaaaagcgaaaatattacctccaggcgccgttatctttccaaaaattggaggagctattgctaccaacaaaaagcgagttctaacgattccaagctgtttcgacaacaacgttatggggttgaaagctaaacacggggttttagacgaatatttatattggttactgcaatcaatagatttggtttcttggagctcttcatcttcacttccttcaatgaaggcttcgactgtaaaagaattttttgtaccagtaccatcgatggctgagcaaaaatacatcgtcgaaaaactcgatgcgctgttcacccgtatcgacactgccatcgagcatttgcaggaaagcgtcatactagctgatgcgttgtatgcaagcacgataaacgagcagatgatgcaagcgattgagctggcaggtatatctacggtcgaaaagcatattaagcagattcagacagggacaacaccaccaacgaagcaacccgaattttacgaaaatggtgatattaattggttcgcaccttctgactttggtgatcacgatattctgtctgactccaataaaaaactcagtcaaaaagcatttgacgcaggtaaagcacgtaagtttgatgctggcacgatcatgctcgtcgccatcggagcgaccatcgggaagatcggttatttagagcaagatgccagttctaaccagcaaattaccggtatgaaattcaacagtgacataattcctagatatgcgtattactggtttcggttcattaagcctgaaattctggcaaatgcgtcaaccgcgacattacctatcatcaaccagaaaggtattaaagcgctttcgttttgtgcgcccaacaaacagctacaagaaactatttgcaaaaagatcgatgaagtttcgaatttcagaaacacagtaaaagctgaattaattgaaaaagtagaattaatgcgttcattaaaagcatcaattcttgattctgcttttaaaggcgagctctaa

SEQ ID NO: 235539 - DNA, 1482 bp, Klebsiella pneumoniae
atgtcattacaacaaaagattgaccgaattaccgacatactacgccgtgacgacggcattagtggtgccatgcactataccgaacaaacctcttgggtgttgttcttaaagtttttggatgattatgagtctgaaaaagaagatgaggcggtactgtcaggtaaagactaccaacccgtattggatgaagagcaccgttggtcaaactgggcttgcccaaaaaatgccgatgggaaactggatatcaacaaggttcgcaccggcgatgatttaaccgattatgtaaataatgagttatttccgtacctaaaagatttttctaatgcctatggcacaggtgctgaccctaaatctttcgcttataaaattggtgcaatattccagtacctggataataaggtcgcatcgggtcacaccctacgtgaagtactcgatattgttgataccttgaacttccagtcagaatccgatctattcgaactctctctggtctacgaaggtctgctgcaaaatatgggcgatgccggtggctatgcgggcgagttttacacaccacgccctgtggtccgcgccatgatcaaagccatcgacccgcaagcaggacaaaccatttacgatgcggcggcgggttcctgcggattcttggtggaggcgtttgaacacctaaaagctaaaaagagcgagctttccaccgaacaatggggctttatccaacgcgacaccttctttggttttgaaaaaacctcgctggcctatgtaatgggtatgatgaacatgattttgcatggcatcgaatcccccaacttgtttcggggtaataccctaactcaaaatatccgcgatattcaggaaaaagaccgttacgacattattctggcgaacccgccatttgggggcaaagagaagtcgcagatccagcaaaacttccccatccagagtaacgcgactgaattgctgtttttacaacattttatgaaaaccctaaaaagtggcggcaaagcagcaatcgtagtaccagaaggcgtactgttccaaaccaacagtgccttcaaacaagtaaaacaagaactgctggaaaattttaacctgcacaccatcttaagcctacctgctggcgtatttttgccgtactcaggcgttaaaactaacgtgctgttctttgagcgcagtggtggcaccagcgaggtctggtattacgaatgtgatcctgagcaaaagctcaccaaaaacaaaccaatcaccgacgaacacttaaaagagtttgttgaactttataacagtcgtaaaaccactgaccgttcgtgggttgtgtcggccagcaagctagcagaagactatgacctatcagctaaaaacccagccaagcaaaaagttgccgagcatttagcgccaagcgatatccttaagcagatccgttctaaggaaaaactggtgtctggtctgttggatgaaattgaagaactattagtggagatccgctga

SEQ ID NO: 235540 - DNA, 1773 bp, Klebsiella pneumoniae
atggaactgaacttagccccaaacccattgcaccagcaaagacagactttgcgcatcgataagattgcaacactgattggtgagaatggctccggtaaatccagtattttacattcaatttttcaaaagcagattgaagaacctagcgatacgcttcaactgatttgtgctacttcaggacaaaatgaaaacttctcttccatttttgagcaaagattaaactctttacgttcaaggaaagatataagagatattgatttttcaagcctttttttcactcagaaagatgttagattccttgtttttctcgcgcatacattcaagaaaaatggtttggtttttaattttattaataaccacaaggcgttaaaggatcatgtttcagttaaattgaaactgaaaatttctgtacctgatgcctacttaaagaacgtacaacaagatcagatagcagaagccaaagactatgaacatccgtcgataagaaaaaggccttttaatcaacgacttgatgcctttcttgaaaagatcgaaacgcttcctgatcttgatactctgctagaatcaggtaaaggcttaaagtcaaccgaagtagaagtgacttgtgaacaaatttttgatgtttttgatggttctagagtcgatgccacaaaatttctactcgaaggctcatacaacgaatattttttttcagcctctgaaatgttgctttacctagctgatagtattgaattttcattactcagtgatggtgaatatcagtttctgtttatagcctcactgattgatctatttgatagcacttcatctctttttatgtttgatgaagttgactcacacctgcaccataaaaacgttgaactgctttgggacgtcctaaccaaaactaaaggtaaagtcataaccacaacacatttagtggactcaattgctgaaaacgactttgattcattgtttttggtcgaaaatggccaaataaaaaatgagcagaagtctcaaaagctattggaacgattgaaaatcttatccaaaagtaaagtcgtcgaattagaaatagcctctaaattgaacaacatttgcttgattgactactacaacgattggaggatttttgagttattagcaaagcagaaagggctttattggatgcctctttcctcaatcaaccctatagcaaagtcatctggttacaaggcggctggtgatagttttggtgcatcaaagatcaaatgggtaaatgaacttcgtgacatgaaagactatatcagggcatgtaaagctgagaaatatggcaaaaagcctccgctgcatgaccacaaagtaaccaatgtcttcttggtatgcgatcgtgatgagctgccagaagctaacattcacgcacaaagcggtgtcaaggtagttggagttgattaccaagaacaattcgacgtaggtttaccttgtccagaaagaataaactgctatttgctgacatggaaacgccgcgaaatcaaaaattacttgctatcacacaccgcattggtgcatcacaacctgcttgaccaaataaacaatggagatattgctcaacgcaatcatctacagcccaataaccaaggtgataacgatgatattcgtcgcttgaatgccaaagatgtcattgaccctctgatcaataccgaaggtttaggcctcgatattgggaaactccaagcctatatcgatctgattccgccagacgaaattagtgaagacatcaccaatatgtacagttttattatcggaaaactataa

SEQ ID NO: 235541 - DNA, 2316 bp, Klebsiella pneumoniae
atggcatctgaagcagatacccgagcgaactacattgaccctgcattacgtgccgcccactggcttccctgccatatcatccgtgagcactattttaccgatggtcgaaaaatggcaggaggtgtccgtggacgacgttgctttgtcgactatctgcttcataaagacaatcgctacttggctgttgttgaggccaagaaggaatctgaacatccgacgaagggactgcaacaggccattgactatgcgaagaaacttcgcgttcgttttgtgtattccagcaacggtaagcaaacctacgaattcgacctagaaacaggcaaaggtaattatatcgagttttacccaacgcctgtcgaattggaaaaacgatgtgccggtggcagcacggatctcagtcaagagctaagaaacattccctttcatctggaaggtgcaatgcaaccgcgttattaccaggaactggcagtacatgcggtcacagatgctataggccaaggcaaatcccgaattctgcttacactggctactggtaccggtaaaacctttatcgcgtttcagatcgttcacaagctatatcaggctcgctggaaccgggataagcccggctcacgcaggccgcgagtcttgtttttagccgaccgaaatatactggcagatcaggctatcaacaccttcaacccctacgagaaagaccttgtcaaaatcaatggtgaagaagtcagaaaacgcaatggtgttgtgcccaccaatgctcatatctttttcgctatttatcaggcgattgctgagcgggaaaacatagacggctactacaaggcctatccgcaggacttttttgacctagtgctgattgacgaatgtcaccgaggcgcagccaatgaaacgggttcttggcgtgcaattcttgatcacttcaatagtgctgtgcatctgggtctgacggccacaccaaagcgcacggacaacgttgatacctatgaatattttggacagccagcctacgtctactccctcaacgagggcattaacgatggtttcttaaccccataccgtgttaagcgggtcagaaccaatctggatgaactggtgctcaccaaagacgatgtgattgtcgagggcgagtctggccaagacctgtataaggtcgaagattacgaccgaaagatcattattgatgaacgcacagagctagtagcaaaagttattctgcaaaatatcaacccgctagaaaaaaccatcgtcttctgtgaaaaccagaatcatgcactgaccatgcgtgacatgatcaacaaacacaaaaaggttaaagacccactctactgtgtgcgagtgactagcgatgaggggaaaattggccgcgagctattggaaaagtttcaggacaacgacaaagatattcccaccattattacttcgtctcaaatgcttaccacaggggttgatgcccgtaatgtgcgcaatgtagttctggatcgaagcattggctcaatggttgaattcaaacagattgttgggcgaggcacccgtgtgtttgaagggaaagatcatttcacaattatggatttccgtggtgcaacaaacaatttctacgacgcagagtgggatggtgaacccgaagcaccagagacgggatgcaccggtgaaccaacgcctccgccatatgagccagaacaaccggaagatagtgatagccctgaggctgaacccggtgagcctcgcccaagactgaaagtgcagctaggtaaacaccgggagttaaaggtcatcgatattgaaacccgctatatcgacgaaaatggcaagcctctcacgattcaggaatttgtcgaacgattgatccagcaactgccagggctgttcaaaagtgtcgatgaactcagagacatttggtcagatccagacctacgtgagcaactgttggcaaaactggtacaagcaggctttgacaaagaacagctatcaaccctgcgccgtatgtttgaggccgacgactgcgatatgttcgatctgctggcgtttttagcctttgaacaacctatggccacccgcaaatccagagcggaagcagtacgagctaataacgctttcttcgatcagttccaacaggaaaaggccaaacaattcctgcattttgtgctgaatcgctatgaacaaaccggcactacagagttggcgcgccagcgccttcctacgctgatagaactctctggcctcggcaccaccaaagatgcttccatggcctttggtgggaagcctgcgcaattgcttgccgcgttcaaacaacttcaacatcagcttttccatgtgagctaa

SEQ ID NO: 235542 - DNA, 231 bp, Klebsiella pneumoniae
atgatccgctgccacctcgcccgcatgatgggcgaacacaaaatgcgtattgctgacgttgccagagagacgggcttaagccgtgccacactgacgttgctctataaagagacggctcaaaaagtggatctggatgcgatagagaaactctgtttgttatttggttgcagaattggcgatttgttggaactccaaacccaaatgagcaaggagctgcctgatggcatctga

SEQ ID NO: 235543 - DNA, 1218 bp, Klebsiella pneumoniae
atgaattcctatctgtgccgtgcctgtttgaatagcaaaaccttgccattagagtttgatgttcgtagcgatccagtccggaatcatgtcgatgttcatgtgctaaaaaccaatacttttcctaaaagtgcctttaatcaaagcggtactaagcaattgcttgcctggttgctcacggatcaatcagctatggcgtcatatcaaagtatttatcggcactatcagttgaatcgcgagtttaaagggaagctagaaagttggcggtttagctttgatcccccggaaatgaataattggcaacttcacgtgaaaggtcgttacagcggcgataaagcaatgtacctggtcgaggaaatcgttggcgttgtgttcgatgttgatgttccaagcagtattgcatttatcaatcctgattttttcaagcgagataccaaagataaatcggctcgagcgggttttggtggtgttaactggctgaataatgaagacgagtttgaaatagatgacgatcagacaggatcagatcagaacgagaccctggccttggagggtgatttatcctggatccgttttaccaagccatttgatgtctataaacaagaacaggtgaaaggcagcagtaagctgattatgaatgaacttgccgaaaaggaagcgggtcgagaagttagcaccgatgagccgcatcagggtggcactttgcctgccgctgatgttggtggcaaacaggatattaccgatagggaacgactgtttgccagtcgctttaagagctttgatcacatgctgcaagtgctagtcagcaaacaccaatgctcaattatcaaccaggagacattgccgttaccaaaagttggccggagtcagcagcatcagctggaaaatggctcgcctcgtgccatcagagcagtacgcgttcgataccaatcgaatgaagccgtcttacttgaggttgatacttcggatgggatcaagatgttgtcgaccaaaatgattttccgctcagatgaacgggactggattgagcatttcactcagatccgaagaggcgttgtttcaaagtcgatttcttggccgaacgacctgctggacactctctttggcgagcaaaatcatgttggtattcatcaccccaagcaccaaggggcggtggtgggcaatatacctgtggagtcgattgaaggctgggcgttgagattcttgcaatatttcacttaa

SEQ ID NO: 235544 - DNA, 1521 bp, Klebsiella pneumoniae
atgcgaaactttcccgtgccgtaccctgatgaacttgtatacagcatggtggcgcgggctggtatttatcatgggattaccagtcccaaacagttgctagatgaagtatttgagaaccgcaaggtgattgcgaccttggatttaccttgccacttgcagtcgatctccagcctatttcaaaacacgggtcgctatagcgtggaagaattggtttatcagcatacgttgtttccgctttatgcgccttttgttacagagtctcataaaagccgggcgttacagatgatggcagggcgttctcagggagccgttcatctcatgcttggtgtggccgcttcccgtattcaatccagtgatcgatttagatattgtcctgagtgtattaaaaatcagcatcagcactatggagaatatttttggcagcgtaactggtttttccctggtcttgcggtttgcccggaacatggccccctttcaattttaacgaatggtagtgggtctcaccgtcatcatttctttgctatgacccctcagagtcctgtggattgcgaactatcatcggtaaatgaagagcttctaaggctggcaatctatgcaaataaatttctgaacatttcgcctggatattcaccagactttgaacaatggacatctttttatcgcgatttggcttcagattttggtttttgtcggggcaggcatattaatcatggagagatccacgaacgggtgcatgcctgttttcatccttctactttaacgcagttaaacctttataccgattcagctacagaaactggctggctaaaggggatctttcgtaaacatcgtaaggcgtttagctatcttgaacacgcaataatctggcaaagttttattgccgaacttgagcctgaggatgtcatagatcgcgtgcgtaaaatcaaaccttgcaccaaggtcgtttttgaaaatacagcatcatcgacattgtctaaaaataatgaacatctgcaggttcagaggcagacttggcagaaattagtacttcaatatggcgtactcaacgcacgcaatagccgccccggaaaggcgttatatgcttggctatatcgcaatgacaaatgttggttgatggcatttaattttgaacacaaagagcagcgcacaaaccctgaactaaaagcagattggcatcggcgggatttggtggcaattcggcaattgcggaagctgcttcaagagattgcgccttcttatgcggggccgcgtctttctgctaattttcttttatgtaaactgcagcagagcagcactattgagaaaaatctggataaattacctctggttaggatgtttttgcagcgatacacagaaaccattactgaataccagatacggcgattaacaaacacatgtgcagagatgcagcgacagggtgaaccactaaaaaaatggttggttatgcgtaaggctggtttaagccaagaacggctgaggccggatgctcaaacggtactcaatgaattacagttgttttaa

SEQ ID NO: 235545 - DNA, 1266 bp, Klebsiella pneumoniae
atgttgttgattggttgttctggtagcggaaaaacaacctcgctggggcgaattcttcaaacctatccgcaggtgatataccacgctgaatttaatttcgagcaggttgtttatctcaaagtggattgctcacataacggttctttgaaagaaatatgtttgaactttttcagatccctggacaaggctcttggtaccaattacgaaaaaacctatggtcttaagcgtcgaaatggtattgagactttgctggcgttaatggcgcaaacagctaatgcgcatgcattagggttgttggtgattgatgagatccaacatcttagccggtcacgttctggtggctcggaggagatgctgaatttcttcgtcactatggtcaacacgatcggtgtgccagtgatgttaattggtactcccaaggccagagatatatttgaagctgacttgcgttctgcgcggcgtggcgcaggacttggcgcaattttctgggagccgatgtctctgggccatccggataaacccagtcaagagtggatcgcttttaccaataacttatggaagctgcagctgttacagaaacgagatgttttgctaaccgatgagatccgggccgtttggtacgatttaagccaaggtgtcatggatattgtggtgaaacttttcgtgttagcccagttgcgggcgctggcgcttaacaaagagcggataacggttggattattacgccaagtgtacgaggacgaattaaagccagttcatcctatgctggcagcgcttcggtcgggtattcctgaaaaaattgcccagtattccgacctgatggtgccagacatggataagcgtcttatccaattacagcaaaatattgccgcgatgaaggaacagacggcggaagagacagccctacagcagttagcgacagaagatgagcggcgaatttacttgctgctaaaagatgtttacgactcacctcttctggtggcgacgatccggaaagcctttacggaaaatccgcagctgacgataagccagttactccctgtcgttacccaatggctctctcagcctgcggttaaagatgcaacaatgccgaatgttagccaagaaaagtcgactgtcattaaagctgatgcgtgggaacagctaccctttgatgatctccgttacatcaagtcgcagcataaacaggcggttgatgtgcatgcagaattaaaatcaaaagggatgctgctagatctaaaatcagtgctggccagagcgagctaa

SEQ ID NO: 235546 - DNA, 2094 bp, Klebsiella pneumoniae
atgtggcaaatcaatgaagtgctgcgatttgatgggcaacattatcgcattctagccgttaactctggagaaatcgtgtggatttgcctggatttggacacggctcagccagagcgtagaacagagttagaactcatttcttattttgacgaagagcgtctgttccggcatgtcgatccttttgcttcaatcgatcttgaagaaccgctggttggttcagttgcttttaataagcgcgaacgggggcttttgattattcagcccattattgcagatgaactatgttttgagccaagaattcgagctcggcgtgtggaacaagtcagacagtcaggcatggcctcaatagccactatctacaagttattgcgacgttactggcaacgagggcaaaaaccaaattcactattgccggattataaaaacagtggcgctccagggaaaacgcgcgcagcaagtggtcaggcaaagattgggcggtccagaaagtttggtgatggcgaaggtatgaaagtcacgccagatattgaacgcctattccggctcactattgagaagcacattcttagcgtggatggtttaaaaacaacggttgcctaccggcgtttttccgacctattcaaacagtattatccgcaagttgaagaagcgaacaggcctacaattcgccagttccgatatttttatgaccgtgaatataaaaaacctcagcgcttagaggccagaacccatccgggtgtctacaagaaagatgtcagaccgctaaccagcacggctacagccagtgttctcgggccaggaagccggtatgaaatcgacgccactattgccgatatctatctggtggatgatgaggaccgcagcaaaattatcgggcgaccaacgatttacatcgttattgatgtgttcagccggatgatatcgggtttttatatcggttttgataatccgtcttatgtggttgccatgcaggctgtcgtcaatgcctgtattgataaaactaatatttgtgcgcaacttggtgttgatgtcagccccgatgagtggccttgtattggtttgcctgatgtgattttggctgatcgcggggaaatgatgagccatcaggtcgatgcgctgatttcagggtttaacttgcgtatcgagagtgcaccaccaaggcgaggtgatgccaaaggtatcgtcgaaagttgctttcgcaccttgcaggcggaattcaaaccttatgttcctggtgtagtcgtggggaacagagtcaaaaagcatggcgaacgggattatcgtcttgatgctgtcatgccaattagtgatttttcgcaaatcatattacggactattctgttcagaaataactatcacgtcttggataaatacgaccgtgatgcggatttacctgccgatcttccatcaataccacgagatttgtggaattggggaatgcagcaccgtgttggcggattgcgtcaggttgaccctttgcaactacaagttgcccttttgccccggcgtaaagtctcagtctccccttttggtgtgaatatgtggggtctttattactctggaaccgaccttcttcgagaaggttggctacaccgtagcactgagattaatcgaccagaatctcttgaagccgcctatgatcccgctagtgcggatactatttatttgtttcctcaagctgggagtcgcatctattgggaatgctctctgactgatagaagtcgtcaattccgtggactgacgttttggcaagtttgggatattcaggctgaagaaaaacacaacaaagcaaacgctaaacttatcgaagatgccaagcgacgcgaattggatgcgtttatcaagagtaaaactgttgatgcaatcaaacaatccccgtctgtaactgagccggaccagcaacggatccagcagattagatctaataagaaaagtgcgcgagatgctgagcggcaaaatcggactaaatcagtaacagtggatcccggcaaaccgctggccgatgttgtgcccctcaaacctgctgatgatgattacagttttccgcatttcgtaccggaattatttgatgacggccagggggatgctgaatga

SEQ ID NO: 235547 - DNA, 828 bp, Klebsiella pneumoniae
atggcaaaatctcaacagtccctatcagagctccagattgtccgcaggatcaaggacggtcgtggccagggttttggtaaacaataccggccttggttgtatgttcaggatgtgccgtctgaaggtcgatctcaccgtatttattcccacaagaccggccgcgttcaccatttattatcagaccttgagcttgctgcctttctggtctttgagtggtctcctgatattgctgatattcgtgagcaatttccgcttcggcgcgaggatacgcgggctattgccgctgaacatagattaagacatccgtctgtccgtggtgttgatcaagtcatgtcgtctgattttttggttgatacagacaacggtcttcatcgccagtttgctgttcaggtaaaacccatggaagcgttatctgatgtgaaaatcattgaaaaactggaattagagcggcgctattggcagttaaaacaagtcccttggttcttaattacagaacatgaaattgatcctgtcattagacagaatgttgagtggttgtacccaaccaagactgaagggctggttgagccgggattactggcgcaacttccgttgctatacaggactttcagtaaagcgccagagacaaaggttattgatatttgtaaacaaattgataccgcttacgacttggaattaggacatacccttcgcgatgtgcgaacgctcatagcaaatggattcctgaaatttaatatccacaaagtctttaggacgatcacggctgctgaactgattttttgccaattcaatgatatggaggccttgcttcatgtggcaaatcaatga

SEQ ID NO: 235548 - DNA, 1500 bp, Klebsiella pneumoniae
atggctcaaacacatttactggctgaaagaatttcccggctcagcgcggcactcgaaaaaggactctttgaacgcagccacgcgatacgcctctgcctgctggcggcgctcagcggcgagagcgtttttttgcttggtccaccggggatcgccaaaagcctgattgcccgccgcctcaaattcgccttccagcaggcgcgcgcttttgaatacctgatgacccgcttctccaccccggaagaggtttttgggccactgtccattcaggcgctgaaagatgaaggccgttacgaacgtttaaccgccggctacctgccggaagcggaaatcgtgtttctcgatgaaatatggaaagcaggtccggctatcctcaacaccctactgacggcgattaacgaacgtcacttccgcaatggcgcgcatgaagagaaaatcccaatgcgcctgctggtggccgcgtcgaacgaactcccggaagccgacagcagcctggaagcgctgtatgaccgaatgctgatccgtctatggcttgataaagtgcaggataaaggtaatttccgttcgatgctggtcagccagcaggatgaaaacagcaatccagtgcccagcgcgctgcaggtgagcgacgaggaatttacccaatggcagcagcagatcggcaatattaaactgccggacgcggtgtttgagctgatattccagctccgccagcagctggacgccctgccaaatgccccctacgtctcggatcgccgctggaaaaaggctattcgcctgctgcaggccagcgccttcttcagcggccgcgacagcatcgcgccgatcgacctaatcctgctgaaagattgtctgtggcacaacgtcgaaagtatgaacctgatgtcgcagcagctggaaacgctcatgacctgtcacgcctggcaacagcaggcgatgctgacgcggttgggggcgattgtgcagcgacgcattcagatccaacaacagcaaagcgacaaaacggcgctgaaggtcacccgccttggcgggatgtttagccgcaaaccgcactatgaactgccggcggagatccaggggaccaccctgacgctgctgctgcagcagccgctcaaacttcacgatatggaagtgatccacattacttttgaacgcgaggcgttagccaactggctggaaaagggcggcgagatccgcggtaagctcaacgggatcggctttgcccaactactcaatatggatgtcgacaccagccagcatctggtcgtccgcgatgtgagcctgcagggctcacgcctcgcgctgcccggcagcgcagcgcaggagaatatgccggcggaaattcgccagcagctggaagcgctggatgatgagtggcaccagcaacacaaccgcttcagcgagcagcaaaagtgcctgtttatcccggtcgaatggctgggaagaatcgaagccagcctgcaggacgtcggcgcgcagattaaacaggcgaagcagccatga

SEQ ID NO: 235549 - DNA, 1869 bp, Klebsiella pneumoniae
atgagcactgataataaacaatcgttgccggcgttaacgctggcggccatcggcgtggtgtacggcgatatcggtaccagtccactgtataccctgcgcgaatgcctgtcaggtcagtttggctttggcgtagagcgcgatgccgtttttggctttttgtcgctgattttctggctgttaatctttaccgtatcgattaaatacatcaccttcgtgatgcgggcggataacgccggggaaggcgggatcttaacgctgatgtcgctggccggacgtaatacttcggccagaatgacctccgtgctggtgatcctcggccttatcggcggcagtttcttctatggcgaagtggtgattaccccggcgatttcggtaatgtcggcgatagaggggttagaaattatcgccccgcagctcgatacctggattgtccctatctccattatcgtgctcaccctgctgtttgtgatccagaagcacgggactggcatggtcggcaagctgtttgcgccgattatgctgatctggttcctgttgctggcggtgctgggcgcgcgaagcatttacgctaatccggaagttctgcaggcgctgaacccctactgggctgtgcacttcttcctgcaatacaagaccgtttcctttattgcgcttggcgcggtggtgctgtcgattaccggggtggaagcgctgtacgccgatatgggccacttcggcaaactgccgatccgcgttgcctggttctccgtcgtgctgccctcgttggtgctgaactattttggccagggcgcgctgctgctgaagcacccggaagcgattaaaaacccgttcttcctgctggcgcctgagtgggcgctgatcccgatgctgattatcgccacgctggcgacggttatcgcctcccaggcagtgatttccggggtcttctccctgacccgtcaggcagtgcgtctgggctatctgtcgccgatgcgcattatccatacctcggaaatggagtccgggcagatttacattccgttcattaactggctgctgtacgtttctgtggtcatcgttatcgtcagctttgagcattcgtctaacctggcggcggcgtatggtatcgccgtaacgggcaccatggtgctgacctccattctgtcggcgaccgtggcgcgcaaaaactggcactggaacaagctgtttgtcggtctgatgctggtggccttcctgtgcattgatattccgctgttctcggcgaacctcgataagattgtctccggcggctggctaccgttgtccctggggatggtcatgtttacggtgatgacgacctggaagagcgagcgtttccgcctgctgcgccggatgcacgagcatggcaactcgctggaagcgatgatctcttcgctggagaagtcaccgccagtgcgtgtgccgggtactgcggtgtatatgtcccgcgccctgaacgtgatcccgtttgccctgctgcataacctgaagcacaacaaggtgctgcatgagcgagtgatcctcctgaccctgcgtaccgaagatgcgccttacgtgcataacgttcgccgggtgcagattgagcagctgtcaccgtccttctggcgggtggtggccagctacggctggcgggaaacgcctaatgttgaagaggtgttccaccgctgtggcctggaaggactcagctgccggatgatggagacctcgttctttatgtcgcatgagtcgctgattatcggcaaacggccatggtatctgcgcctgcgcggcaagctttatctgctgctgcagcgtaacgccctgcgggcgccggatcagtttgagatcccgccaaaccgggttatcgagctcggtacccaggtcgaaatctga

SEQ ID NO: 235550 - DNA, 195 bp, Klebsiella pneumoniae
atgaccatcaatcactatttacgccagctgcggatctgccatgcgcagtatctgctgcagcataccgagcgcttaatcggcgatatcgccatgcagtgcggctttgaggacagtaactacttttcggtggtttttagccgggaaatcggcatgtcgccggggcagtggcggcagcgcagtcgcgccgccgcctga

SEQ ID NO: 235551 - DNA, 1242 bp, Klebsiella pneumoniae
atgatgaaagcgcctcactcacacagctacccgttgctcagtgccttactgtttttctttttcgtgacctggtcgtcatccggctccttgctctctatctggcttcaccaggaggttgggctgaaggcaggcgataccggtattatctatgccgtactgtcggtttccgcgctgtttgcgcaagtttgctatggatttatccaggacaagctggggctgcgcaaacatctgctctggtatatcaccgcgctgctgatcctctctggtccggcgtatctgctgttcggccacctgctgaaaatcaacgtcctgttgggcagcatctttggcgggatctatatcggtttgacctttaacggcggcatcggcgtgctggaatcttacaccgagagggtggcgcgtcagagccagtttgaattcggcagggcgcggatgtggggctcgctgggctgggcggtggccaccttcttcgccggcctgctgtttaacatcaatccgcagctaaacttcctcgtcgccagctgttccgggctggtgttctttatcctgttggcgcggctgcgggtctcctcggcgccgcatgcgatgcaggaggcggtatcgggcggtaaggtgaccctcgaagatgcgctgcgcctgctgacgctgccgcgcttttgggcactggtcttcttcgtcatcggcacctgcatttacggcgtctatgaccagcagttcccggtctatttctcatcgcagttcgcgaccctgcaggaaggcaatgagatgtatggctacctcaactccttccaggtgttcctcgaggcggccggcatgttctgcgcgccgtggctggtgaaccgcatcggcgccaaaaacggtctgattttcgccggcatggtgatggcgatgcgcatggtggcctccggtctggtggaggggccgctgctgatctccatcaccaaactgctgcacgcggtggagttgccgatactgctggtggctatctttaagtacaacagcctcaacttcgataaacgtctctcctccaccctctatctggtgggcttcgcctgcaccagctcgattatcgccagcgtattgtcgccgctggcgggctacagctatgaaaaatatggcttcgcccagtcctacctgatcatgggcatgctggtgttctgcaccacctttatttccatcttcttgttgcgctccggcaaatcctccgccgatccgctggtgtcgcaacctaccgctatctga

SEQ ID NO: 235552 - DNA, 396 bp, Klebsiella pneumoniae
atgtattacagcaatgttgtcatcagctatttacaggccaataaaattctcgcaatgaaacttgatcgcgctgtttcaggcatagaacaacgggtttccggtcaggttaaaacaataggtgctggcgttactcgaatcctatattatacatcctgttttactgatgagtatcaggatgtatgtaaaaagcagaagaatgaggatgttagatttgctaaaggtatctaccatcttttacagcgtaagaatattgtatatgaaatgctgaaaatatattttgaagaaatatttaagcacaaaacaacagagcagttagagcatattaaaagaattctgatggctgttaacattcatatcgctgcagactctctaaggaaggtgcgaacaagttcctga

SEQ ID NO: 235553 - DNA, 201 bp, Klebsiella pneumoniae
atgagctatacccgttgcacctattgcggctcacagctgcacaccgtcgccaactgtcccaagacatggggcggttcctcgcgtcgcgcaaacctgcgctgcggctactgtggacagtccgggcataactcaaatgcctgcccgcacaacgcgacagccggacgtcggcgcaccctgaatgatgacttttgcctcgattag

SEQ ID NO: 235554 - DNA, 195 bp, Klebsiella pneumoniae
atgagcatagatgagagcccactaggtaaaattcaagaagttcgaactgttgaagatattgaacaagtaaatgaaggtctttccaaaggctgggtaatattaataatcacggaagaaacaaccgtctgggacgatgggagtaaaagtagtcgtgttacttatcatatgggaaaaccaaaggtattacctatctga

SEQ ID NO: 235555 - DNA, 687 bp, Klebsiella pneumoniae
atgaaccagttaacaccgaaaaatgttgtcacgatgtccagccgcgatatcgccgatctggttgagtcgcgacatgatgatgtgaagaggtcgattgaacgtctggcagagcgcgggattattcaacttccgccaatggcggatgttaaaaaccaccttaaccagtcagtctcggtctacctggtaggaaagcgggatagctatgtggttgttgcgcaattatccccggagtttactgctcgcctggttgaccgctggcaggagctggaagcgggaatatcaccggcgatacctcaaactttctctgccgctcttcggcttgcggcggagcttgaagaggaaaaacagcgactttcgcatgaactggctgcagcggcaccaaaggtagactttgttgatcgttactgtacagctaacgggtcaatgtcatttcgccaggtagcaaaattactcagtgcaaaagagcctgagctccgtctgtttctgattgagcgtgaaataatgtaccggttaggaggggtattaactccaatggcccagcatattgacgcgggaaggtttgaagtaaaaaccgggacgtcgataacatctaaccacgcattcagccaggcacgatttactgctaaaggggtccgctggatcggtggcctgtggacagaatacaaagccgggggtaatgccgcgtga

SEQ ID NO: 235556 - DNA, 915 bp, Klebsiella pneumoniae
atgagcctgttaatgccatcaaggccgatagtcatcaatcctgaccttgcgtacagcattggcctgaatgaagccattgcgttacagcaggtgaattactggctgaaggagacaacctccgggctggagcgtgacggtgtgcggtggatctataacaccacagagcagtggctggagcagttcccgttctggtcagagtccacgctgaagcgcacattcacccgcctgaagagcctgggagtgctcaaaatcgaacaactgaacaagtcccagcgcgacatgaccaactactacacgatcaactatgagagtgagcttttagatgaggtcaaagtgaccaaatcgaaggggtcaaaatgcgctgttccatcaggtcaaaatgacacgatggaagaggtcaatgtgaaacgctccaccaggtcaaaacgaaccgctctcatcgggtcaaaacgacctgatgatcctacagagattacaacagagagtactacagagattacaggtaaagactcttgtccggttgcgccgcaaccagacgagcctgatccggcgtttatcgttctggatcatttcaacaagatgactaactcgaactacgggaagagcggaaagaccaaaacgacgctgggttacatccgagggcgactttcagaggattacagccctgaagacctgatgctggtggttgattacctgaccgagaaatgggccaaagatccgaagatgagcgattaccttcgcccgaaaacgttgtttgcccctgagaactgcgttgagtatttcgataaggcgaaaaagtggggcgctgctggccgtcctgcctgggctaacgggaaatgggttaacaacgaccaggcgtttaaatcgagctatgcggaggttaattacacggttccagcggggttccgctcatga

SEQ ID NO: 235557 - DNA, 453 bp, Klebsiella pneumoniae
atgaacctcaaagaagtcgtgaaatctatgtgcaaagcatatccaggtgggcgcgaagcaatggctggcgcactgggaatgacggtgacgcagtttaacaacaacctttacgagaaaaacggctgtcgtttcttcgaagtcagcgagctggaagcgatggaggacatttccaatacgtcgttactggctgattacttcgctcgccgccgtggtgctctgctggtggatgttccgcaccttgaagagctggatcgcgtggacttgttcagccgggcaatgcgtacctcagccgccagagggcaggttgatcagattatcgaacaggcgcttgaagatggcgttattgaaaggcacgaggccgaagaaatcatggtgcatcaccgccgccacctggctgcgcgtgaagaagagatcgcggcaattatcacgttgtttgcacgcaaaaagaagtga

SEQ ID NO: 235558 - DNA, 171 bp, Klebsiella pneumoniae
atgaattattacacagcagtaatcaacgaaggttcagagcttatcgtgatctacgcacgtaataagttcatcgcaaaagcgcttatcaatgatgatgctgaacacattcaaaaaattagtgcagttgaagcgaaaaagttagtttctcgcggtattaaacagatttcttga

SEQ ID NO: 235559 - DNA, 135 bp, Klebsiella pneumoniae
atgtgggtaatgatgaggcttagacgtactggtcaggagatgtatttccagtgttacgacagcaaggaagcggctgaaatggcggttaaggttttgaactccgtcgccagcggctgggaattttatatccgttaa

SEQ ID NO: 235560 - DNA, 558 bp, Klebsiella pneumoniae
atgattaatttagagcaggttaaagccgatattgcggcccgtaaggcgatgccagcttgggggaaaaatacttccatcgagcgcattaaaaccattaatgcaacgcttcccagcttttcgctgaaaacggttgaggctctggtggatatgctggagaaaacccagcgagctaatgcagctcaggacgatcatataaaccagcaacagaaccgaatcgaccaactggagaataaaaacggcgagctggggcgcagactgtatcagtattcgatggaaccgggggaggcagagcggcgcatcgccgagctggagtcccgcaccgtgaagctgccaccaaaaattgagcgcgactatgttgatggctggttttcgtacaagggtggtctcgtcggtggcggcgcggctgagtggtacaacaaggcactggatgatgtcggttcagaactaaccgccgctggcatcaagtgggaggcaggtacttttcgggaaaacgagaattcgtcaaccgcatcttttcgggaaatatcggaaacgtcaactaaaggcggtaaccaatga

SEQ ID NO: 235561 - DNA, 390 bp, Klebsiella pneumoniae
atgagtgacgatctctttggtgatgttcgtgatgacagtttgctagatcatctcagtgatgaaactgagaatgtccgtttcccgtcgattcttgctgaactcaattcaatactaagccgggaactggcgagactgggcggcgattcttcgcattctctggagttggtaattgcgataactcgtcatatcggaggaatgcaaatctatgttcctcggggacagcggcttgaattcctggtacgcgatatgcaaatctggcgtgattactgtaacagggccagcattgatacccttgtgactcgctaccatgtcacctacaaaacggtgtataaagctataaggcgtatgcgcaggctggagcacaaaaaataccagccatcacttttttga

SEQ ID NO: 235562 - DNA, 525 bp, Klebsiella pneumoniae; identical to SEQ ID NO: 186052

SEQ ID NO: 235563 - DNA, 219 bp, Klebsiella pneumoniae; identical to SEQ ID NO: 184781

SEQ ID NO: 235564 - DNA, 408 bp, Klebsiella pneumoniae; identical to SEQ ID NO: 186054

SEQ ID NO: 235565 - DNA, 435 bp, Klebsiella pneumoniae
atggctgagcaactcatgacaaaagccctgtgggaacaggtcgctgatgagctgaaaaatatcttctgccatgttcgcttccggtacctggataccgtcatctccgtcattcgtgagcgcgatagcgagagtagcactgttctcgccgtatattttgatgacaaatggtgtgccggatggggacgagaagaaagcgaggtgtttaatccgctgacgcggcttttctggtgcgaaaagaaaaagcgtcattatccctcaaaaacagtggctgaagttgagagagcgctgggtaagcgacaggcgaaaaaaacatttcccaaactgcatgattcgtttatctatcgtctgccgttcttcactagttcatcgaccctcgttcgtcagttcaaaaaggtggatggcctgatgcttatcactaagcaggaggatatgtga

SEQ ID NO: 235566 - DNA, 1800 bp, Klebsiella pneumoniae
atggcaaaccgcctcaccactgaaatacacatcaatctggcaggtaacctgaccgccaaagcccgccagtacggtgccaacatgtccgagttcgcccgcacaaatcagcgggcaatgtcggttgtaaaagccacgacggcggcggccggtcgtggtctggatgcgctgggcaatcgatataccaccatgattgccggttttgctggtggtgcaatggtaagaaactatcaacagttagatcgtcgtcttactcgaatgggaataacagcaggtaaaacccgtgaggaaatcgctggtatcttcgatattgcacaagatgtagcaattaaattcggggtagataccagtgagattcaaggagcgtttgaagaaataaatgctcgttcaggtgatttagatctagctctaaagaacaccgagaacataggtatggcgctgtctgcatcaggggccgaaggtcaaactctcggtggtcttatagcagagtataaaaaacttcaaatagaagataaaaagcagacactccttgctttggatggaatgaatcgattaggaaaggaaggcgcatttgaactaaaagatgctgcggaaaagcttccagcatcgttatccatgtatgcagcagtgggtggaaaaggtgtcaaaggtgcaatggatgtgatgacagttgctgaatcagcgatggacgtcacagcaaataaggacaaagcagctacagcggtagagaactttattcgagaccttcaaaacccaaaagttgttaaaacattacaaagaaatggtattaacgttttcgacagcaacggtgcaatgcgtccacttcctgttttgctccaggaaacagcggctcgatcttccaaaggagggataaagaagcagcgaggtcgtcttactgaagccgggtttaaccaagatagtatggatttgattgctggcgcttccggggaagctggttcgcagaagctgaagacttatatgaatgtagtcgctgatggtcaaagtataattgaagatgcggcttatgcttcaaaggactttatgtctgccactcaacgcctttctaccgcatgggaaaagtttactaaccgagaacttgcaggtcctgttcaggaactggctgatgctcttaattcggtggataaagagaccgtcaataattggcttgaagttggtaaacaaatcacgatcgcagtcggtggcctcattgcagcccgcaaagcctttcagctcggcaaaggcgctctcgatctcttcggcgtcggtaaatccaaaggtatccccaaaggcgtttctgatgtgttcggttcaggtgttatgccggtctatgtggtgaatatgggctccggtggtatgggtggcggtcctgatgttggtggccccggtggtagaaaacctccagggcgcggcgtccccggtcgagcatactctgcgatgggctcagcctggatggttggtcctctggctgcaaccattccatttcttgatgagaaaccaaaccttaccgatgatgacaaagccagcatggtcaaatgggctcaggatcgagccaaagaaccatctgtatggtcccgtgttatggactggctccagcccccagatggttatcaggatccatcgccgtgggcgtcgatgcagccacaaaaccagcctggctatccgttcctacagcagcctgagctgaaaggcagtatcgaggtctctgttaaagatgatcgggttcaggttacccgcgttaaggtcaatgcccccggcgttacaatgagcgcccagtctggcgtcagcaatgtggagcaggactga

SEQ ID NO: 235567 - DNA, 1221 bp, Klebsiella pneumoniae
atggctggcacaaacaaactcagcgacaaaaaattaagggcgctcttaggggctgccagaagcaaagaggaaatgctagcggatggcgagggattaagcgtgcggcttttacgttctggtgctatcagctggatatttgcttatcgcttgggcggacgtggttcgaaactggagcggttaacgttgggtagctacccggatatgtcgctgaagatggccagagaaaagcgcgaggagtgccgatcatggttggctgaagggaaaaaccctaaattccagcttgatattaagacggaggaaatactccggcctgttaccgttcgcgatgcaatgacgtactggtttaatgaatatgccattcatcaccgggttaactgggaaaggcatcaggcacaggtagaaaaacatatttacccgtatataggcgatctgcctctctccctgtgtgaaacccgtcattggctcgaatgctttgatcgtgcgaaacgtgaaaccccctacgcagccggctacgttttccagatgtgtaaacaggccctcaaattctgccgtgtgcggcgctatgccattagcaacgctctcgacgacctgactattcaggacgtaggcaaaaagcaggagaagggcgacagggtgcacgatatgggagagcttacccaaatctggttatcaacgaccgggaaaatgtataagccgtattacgcctcgctgctgcggctgctggtggtgtttggctgccgatctcaggagatcaggctatccacctggaaagagtgggatttgaaagactggatctggatagtaccgaaggaacacagcaaaggcggtgaaaaaattattcgtccgatccctgaagctattcggccctttgtcgaggatctatacaaagagcattcccattctgggctattgctcggcgaggtcaaaaagccagaagccgtcagccagtggggcaggggaatttataaaaggctgggccaagctgaaccatggacgctacacgatttacgccgaacttttgccaccacgcttaacgatatgggaattgctccgcatgttgtcgagcaacttctgggacatgtgctgggcggtgtaatggcaatttacaatcggagccagtatttaccggaaaaactggacgcattaaataaatggatggagcgcctcgaacttatctctggtgaacattctaatgttactattttgaaggttgcaaaatga

SEQ ID NO: 235568 - DNA, 738 bp, Klebsiella pneumoniae
atgatagataaaaataacctaccacaaagattatattacacacttcctgatgcagctaaagtcttggggtgtgaagttcgggatataattcattatgcggcaattcatgccttgcaactttcggtgtacataaaacttcatcattgtgagaccgattcatggtttcatcttaatatgccttcaagcaaagtagatgacattgatatattttccatgctaaggggcgatggctgggagattgacttcgtagagtttaaaagcaaatctgaaaaattctttgctgatggctattatgctaaggctgtaagcggatttttttatgttgatggttacaacctaattcctcttgaattcaatgagtctgacgaaatctctctggttggcgtttctactttaccgagcttcatcgatggacagtgtattgatgttaattttatgatgaatcatttaaaagtgaatagtaattatttatgtgttaggaaaaatgacatggattttataaataaaaatgtttccatgccatctaaagatttaaatagtgaatcaaggaaaaccacagcaaaaaaatcagaacttatattctatcttttaaagatgattccagagttatcttgcgtggatttagagagagaaaaaatcacaaagatagcttcgatgatagaagaaattgcagctaagaaaggtattgatttaccttctactcactggcaaacgtggagcaaataccttgagagataa

SEQ ID NO: 235569 - DNA, 222 bp, Klebsiella pneumoniae; identical to SEQ ID NO: 106422

SEQ ID NO: 235570 - DNA, 177 bp, Klebsiella pneumoniae
atgtcaaccaaagaaaaccaaaaagaacgcaatgtggtacaggttcgcttggatgcggatttatcagagcgccttgctattgccatgaaagaggacggcgacgacaacaaggccggatggataaaacgactactgcgcagagaattggataagcgcggcatcgagtcgaaaggctga

SEQ ID NO: 235571 - DNA, 273 bp, Klebsiella pneumoniae
atggctgatcaacagcatacccaaactcacccaaaatttacatggctctttctggcaacccctaagagccatccagactgttcgccggtagttctgcgttttgatactgatactgaggagaatgcccgcgccgcttttcccggctgggaaatggtattcgccgccaaaattcgggcagaagcaccatgtcgggtcgcgttctttgattacaacactcgccgcggttgggcttttgatagcgcctcagacagagaggtggttggccatgattaa

SEQ ID NO: 235572 - DNA, 225 bp, Klebsiella pneumoniae; identical to SEQ ID NO: 207145

SEQ ID NO: 235573 - DNA, 369 bp, Klebsiella pneumoniae
atgatcagcaacgtgaaatttaatgagctggctggtcgtgttgagcaactggtgggcaaggtggaagaactggaaaattgtatcaaggcgctggcagatagtcagggtggcgatatacctccgggcatgtctccggtttccacgctggcggccgagttcggcataagcactaagaaagccgaggaactggcgaaaaacaccggcgtgttgttggttaagcataaaggcggcggttatctggcccatgacgagaaattcagggaggcggcgcggctgatactgcgcaaggcaacccggcgtcgcggttcggcctactggtttcatccgttgatcggcaaattccagatgagcggggggatcccgaaatga

SEQ ID NO: 235574 - DNA, 2124 bp, Klebsiella pneumoniae
atgaagaacgccccgaatctgaaacatctgccaaaggataagtttgtcgaagcggttatttttgccggcgctgatgcatggagtcatgccagacaatgggaagagggattaggcaagaagattgcggaagataccacgcctcctgtttatctggggccgcgacaactggaggaactggacaacctgcgcattatcgataatggccgcagagctgcgcgggtgtatctggctggcgagattgaaccgctgatgattaatgcgattggtgcccggctggcgctcgcaggcgtgcaggatgccaaattatataaaggcattccggatcgccatccggaggactggcatgattatcttaagcgtctccgggaagaggcagaaagcggggatagcacagtggtaaatcttccggtgaagaaacgagagccgaagcctgacgccggtgatgaactgaaaccccgtgttgagagccgcgacaatggcctgtactggataaccccaaaggtggacaaggatagcggcgagatcatcaacaatgaaacgtggttatgctccccgcttgaagttgtcggatctggtagtgacggggctgagcggtatcttgttttgcgctggcattcgccgcgtggccgcgaagagatcaccagagcgataccctgtgcggatgtcggggagcgagagggctggcgagtgctgaaatctggtggtgttcaggtcacaacgaaaagcacataccgggcgattctggccgactggctacaacaaagtagcgcagggcaggaatggcagatcagccatacatccggatggctgcacggtgcgtacatcatgccggacggcgaagttatcggggagccggaaacgccgattctgtttaacggtcgcagcgcggcggcgggcggctatgtggtggctggaacggcggaaagctggcgtgattctgtgggccggctggctggtggcaacccgtcaatgatgctgggtgttgccacctcgctggctgcgccgctggtggggttggttggcgctgatgggtttggggttcaccttttcgagcagtcgagcgcaggcaaaacgactacagccaatattgcgagcagtctctggggcgagccggacgctctgcgcctcacctggtacggcaccgcgctgggtatcgccaacgaagcggaagcgcacaatgacggtttgctaccgctggacgaaatcgggcaggggagtaacgcgcgtgatgtggccacgtcggcttataccctgttcaacggcgccgggaagttgcagggcgctaaagagggcggaaaccgcgagttaaagcgctggcgcactgttgcgatcagcaccggggaaatggatgtagagacgtttcttattgctggtggcctgaaggtgaaagccgggcaactggtgcgcctgctgaatgtaccgatggaaaaatccaccgcctataacggcctggcgaacggaaaagcccacgccgacgcgcttaaagatgcctggttgagtaatcacggtgccgcagggcgtgaatgggttaaatggcttgccggccaccagcaggaggcaaaacaggccgtcagggatgcacaggcgcgctggcgtggtcttatcccggcagactacggcgaacaggttcaccgcgtggcagagagatttgccattctggaagcggcgctggtgatcgggagtgaaatcaccgggtggagcgaacaggcaagccgtgatgctatccagcacagttttaacgcctgggtgaaagagttcggcactgggaacaaggaacaccagcagatcatcgaacagtgcgaggcgtttctgaatgcctatggcctgagccgatacctgccataccctgaaacggatccgcgtgacctgccgattaaggatctcgccgggtaccgttccggaaatagtgctggtgaggagtctttcaagttctacacctttccggcggcatttgagcaggagatagcgcagggctttaacccgcgtcagtttgcaaaggcgctggccagtgccgggatgctggaatcaggggacaacgggcggcataagaagaaggcgctcaggaagatgggggggaagcagcatgtcttttacgtcctgatgttctcgccagatagtgaatag

SEQ ID NO: 235575 - DNA, 252 bp, Klebsiella pneumoniae
atgaatatcacagcggcattgaaagaatttgaagatgacagacagattaagcaccttgagacaacatcactccaggaattccggcaacatgtaaaagcagagaattttctcttcgttgattctcacgatcatctggtggacgctttttccggacgttgctttgcggcaagcaaggagcagttagatgaactaatttcctaccttgagcgtcttcgtgagacgcttcctgatcatgaccctcgttatctataa

SEQ ID NO: 235576 - DNA, 195 bp, Klebsiella pneumoniae
atggcagaacgaagcaataggcagcacgataaaggcggtacggttcatatcgatgctgaaaccatgaaaaaaatagaggcgtatcaggcattcatccgtaagaatcacccggatatgcccgtaccaacgaaaggtcagattgtgcgcagcagcgttaactactggcatcaccagacgctgggggcctgggtatga

SEQ ID NO: 235577 - DNA, 1914 bp, Klebsiella pneumoniae
atgaaatcctggtacaccatcaaagcagcgagcgatgccaccagcgccaatatcagtatttacgaggaaatcggcggctggggtatcactgctcaacagttctctgaagacctgaaagccctgggcgatatttcccatatctgccttcacatccactcacccggtggtgacgtgttcgacggcatcgctatctacaaccttctgaataaacacccggcaaaagtcacagtgcatattgatggccttgctgcctctatggcctcagtcattgcgatggccggtgaccgtatcgttatgccggaaaatgctctcatgatgatccacaagccgtggggaatctccggtggtaatgccaacgatatgcgcgactatgccgaactgctggataaggttgaaaacgtcctgatcccggcttacgcccgcaaaactggcaagtctgctgaagtgctggcggccatgctggaggatgagacctggatggatggccgtgaatgtgtagcgcagggattcgccgatgaggtgttaccggcggtcagcgcaatggcctgtattgaatcgaaacgaattgaggattttgagcatatgccaaaagagattaaagggatgatcaccagtccgaaaggctccaccagtagtgcggtgccggaacagaaccgtatcaacgggattaaagacctgtttgctatgttcggcggtaagcatgattcactgaaaatgcagtgcctggaagatgtggactgcacgccggaaaaagcgaaagacatgctgctgactgccttgggcaagattgcgaccccatcgaacaaaagcactggtgcacacatttacgctggtaacggcaacattaccggcgatgctatccgccaggggctttattcccgtctgggtcacgaacgcgccgaacgcgggaacccttatgccatgatgagcctgtttgatatggctcagtcatcgctggtggatcgtggcattagtatcagcggctttggcaaccgctcgcaaattgtgaatctggcctttacgcacagtacaagcgacttttcccatatccttgctggtggcgctgagaaatctgtacttacaggctggcagaacagcggtgaaactttccagcagtggacgaaaaccggctcgctatccaacttccatgaagccaagcgcgttgggctgaatggcttttctgagctggaaaaggtgccagagggggctgaatacaaatatgtcactaccagtgacagcggcgtacctatcgctcttgcgacgtatggcaatatcttctccattacccgccaggccatcatcaatgacgatttgagccaactgacgaccgttcctcaggctatgggccgtgctgctgcgcgtactgtagggaatctggtctatctgaacctgacggcgaacagcaagtttacagacggtaagccgctattccatgccgaccataaaaacctcatcgctaaagggatggatactgacggacttaatgaagcccgtaaggctatgcgcctgcaggaagacgcgaacggcgatccgatcaatgtcatcccagcctatatcctcgtccctgcggctctggaaggggcagccaatcgcgcggtgctctcatcttcctcgctgttccctgtagaccaggacggcacactgaaccagaaccccggcatcattaacgtggttaaagatatggctcaggttgtggttgagccgcgactggataagtcagacaacaagcagtggtatgttgcggcggcacagggcacagacactatcgaggttgcttatctcgacgggatggatacgccatatcttgagcagcaggagggcttcaccgttgatggtatcgcctggaaggtgcgcatcgatgcaggtgtggctgcgctggactaccgcgggctggtcaaatcgagtggggcataa

SEQ ID NO: 235578 - DNA, 597 bp, Klebsiella pneumoniae; identical to SEQ ID NO: 106416

SEQ ID NO: 235579 - DNA, 351 bp, Klebsiella pneumoniae; identical to SEQ ID NO: 106415

SEQ ID NO: 235580 - DNA, 765 bp, Klebsiella pneumoniae; identical to SEQ ID NO: 106414

SEQ ID NO: 235581 - DNA, 948 bp, Klebsiella pneumoniae
atgataagtttatcaccaccgactatttgcaacagtgccggtaatggcgcggtgccgcctccacaggtcagttaccagtcggtgccggtaccgaaccagatccagcgtaaaaccttcagctatgaccgcggcaagaaaacgaagtcacttccgtacattccgtcggggagttttgctaaaagccttctcattgaaggagcggatgcgaatgcgtccgtcaccggtaatgaatccacctcaccgatgcaggttcgccttatcggacgcgtggaaatgcctaataacaaaacctatgacctcaccggttgctttgtcgggctggaagcctggggtgacgtctcgagtgagcgtgccatcgtccgtacccggaatatcagctgcatcaagggggataaaaccatcgaccagccgattaatggtcacgtgtcctttatgggcaagaacggcgtgaaaggggaagtggtgatgcgtaacggcaaaatcctcggctgggcctggggggcaggttttgttgacgggattggtcaggggatggagcgggcttcacagccgtccgttggtctcggagcaacggcgacggtcggcgccggcgacgtcctgaaaatggggattggcggcggggcttctaaagctgcgcagaccctcagtgagtactacatcaaacgcgccgagcagtatcacccggtcattcctatcggtgcgggcaacgaagttaccgtggtgttccaggatggttttcagctgaaaaccattgaagagctggaagcggagaagaacggtcagcaggcgcaaaaccaggcgcaacccgaacaacccgagaacaggtcgcagcaatccggcgggaacctgaatggctttaataccgatgagatgctgaagaaactgggcaaacttgatccgcgtgagttttctccgggtacagcgtctcagggggaaaacaatggttaa

SEQ ID NO: 235582 - DNA, 597 bp, Klebsiella pneumoniae
atggttaagtctgtcctgagcttcattctgtcatcgctgcgctggattaactggctgattcagtatgcggtggtatatccgctggccatgatgatgttgctgattgtcgcggtgttctggaccgggaaagtcacacccgggcagatgctggtgaataccatcgaatcggtgcagcgagagggatatgtcatcaaggactgcacggggcctgcttcgcgcggtgaacttaatgctgatgcggtcaagccattactgcctcctgttttacaggaagactgcaccactgacagcacggatgcggcaggatacgcggcagatatcgatgaggtttacaccaaaatgatcctctcgctctggctgctgatggctgtcgtgtttaccggaagcgctgtggtctttgatcggacacctgcctgcagagccggtgctacatgggtgagggatgcgagggggagtgtcttccccggatgcagacccggtaaaggtgcgatatccccgttactggccggatatcagaaacgcggtggggccaccgtggtttatgaaccatcagccagatttagcaaggaagataagaatgaaattaaagagaaataa

SEQ ID NO: 235583 - DNA, 570 bp, Klebsiella pneumoniae
atgaaggaattaatgctgttaattcctctgggcagcgctttgctcttaaccgggtgtgcgggcacagagtcagattttgaatgtaatgccacaacctcagatacctgtatgacgatggagcaggctaatgagaaagcgaaagcccgggaggaaagcgcctccgcaaagccggctgcggccgggttgccacgactggctgacggaaatttcagaacgtcgtcgccaaattcatacccgctgccgccgcaaccagttattaattctgggcgtaatactgctccaactgtaacggtgagcaataaatccgggttcctggatacggtaccggtcaatcatgatgacgtcctgagaacccggaccgttccggtaaatatcaggccggttagtgtcagtacatatacctctccttctacggtacccggcaattatccccggccattaaggaaaggggagcagaccgcgtcgttatgggttgcgccgtatgtcgattcagatgacgtgtatcaccagccgacaacggtcgtatttgtggtaacgccatcggcatgggggcaacctcgtattaattaa

SEQ ID NO: 235584 - DNA, 480 bp, Klebsiella pneumoniae
atgactgaaataactcagcatgtcgggttaattcttcgggggttacagctatatttttatggcgtcaatctgggatggttagcgggggggtttttagctctcttcgttacagcaggtatccttgctgcgtcagtatcctgtatagcttgcgcagcaatctttgctctcccgaagaagcatcatattcattctggcatcataaaaatttttctggggagcgcgctggccgcaatagcgggtatcgtcggaacaggggttgtcatgtttgtcactgtgtcaaatagggagctggaagcgggaaggtactggaaaacagaatgcaaactgatggaagtaaacattcagacggggatattttcagaaccggtcaataaactggattgtgccggcgttatcattaatgtacggacccgaacatataatcgctatatcctggaatggcaatcttatgagaatgataaaaacaatgtgatgaattaa

SEQ ID NO: 235585 - DNA, 285 bp, Klebsiella pneumoniae
atgggaagtgacaaattgtttatagtgagtggggttttagtcagtgcaataatgcttttctctttcattctcaaaaacagtcaacctgatgtggagagtctgattaagtcagggagatactggaaggcaacgtgtgtattaaaagaagtaaatatcccggctgggttctttcatggtgaaatgaaccgccttgattgcgagggggttgtcacgaacgtgagtaccaaaaaatataaccaggctacctcggcgtatcaggatagtttgcgaaacaaagtacgttag

SEQ ID NO: 235586 - DNA, 405 bp, Klebsiella pneumoniae
atgagagccttttatcttgagggtagtaatattacctggcttaacgtgctgtgcattcttttttttgttatcggtgttgtcggtgcgctggccatgtttgttatccctgataaatttaatctgcgagtctgcagagctaatctatttttctttagtgcgcttatggcagtggtttcgttagccatgcttatcgtcttcaccagtgagtcattctcgatggatgagctggaatccgggagacactggaaaaacgattgtcagctcctggaggtaaacatcccgacaggttcctttacggcgccggttaataaactggactgtgccggtatcatcattaatgtgccgaggcttcagtatgatgagtatattcgccagtgggaattgtataaggataaaaataaatga

SEQ ID NO: 235587 - DNA, 354 bp, Klebsiella pneumoniae
atgaaagagatttttttgaaatttattatttgcatggttgttatcggtgttgcaggaggatttttattttatatggctaaaaatgattatcgtgaaagacagcctgccactccagaacagctgacggcaattgcacaagacattccctgcgccgcagacgcatttcgacaagcccttcaagcggatgcctatgggtatcggactgaggttttaagtatccggaatgcccgaaagctcgcagaagattgcagtgaaagagagagacaaatggaagaaaagaacgccagggagaatgaaattaataaggtgcgtaaaatgcaacttgaagccctggaaaataaaggtgcccactaa

SEQ ID NO: 235588 - DNA, 390 bp, Klebsiella pneumoniae
atgatggtgtttttaaaaagatatggatttttatttattccacctgtctattggttcatctatctgggcgccagactgacatacaatggactggcaggggagtttactcctgagttttttcagagtatccgtcacgatggtgtgtttattatttgtggtttgttggctttttatttttgttgcttgaggattgaggtcagtgatggggaactctcaggggtactctttttatgtattatttcttttcatgtgatctcgttagttattacccttattttttgtttatggcaaggggcgattttgtggaatgttatttgtgcctggcaaatcggcacctccatgttgttactattttttatccctgtgcttaccttttgttacggtaattaa

SEQ ID NO: 235589 - DNA, 393 bp, Klebsiella pneumoniae
atgggaaataccaccgaacaacagaccagaacgacgttcttcactttccgccggagtctggtccttaccgtcctggtgagcctggtcctggcgataaatgtcggtataacgcaccttatgctgacccacaccacgcctcgtgtggtcgcctttgatatgaagaaaacactggacagcttcatggacagcgtcagtcagaagcagctgtcagaggcgcagtcaaaagcgctctcagaccgctttaatgaagcgctggagcagagcctggccgactatcagaaaaagaatggtgtcctgatcctggtttcaccggccgtggttcagggcgcacccgatgtgaccctgaaaatccagaccgacattgccagccgaatgaagggagcgcgggaatga

SEQ ID NO: 235590 - DNA, 630 bp, Klebsiella pneumoniae
atgaaacacaccggtactgccttgttggcgttctgcctgatttcaacgcgtgtgccggcagctgacctgggaacctggggtgatctatggccggtgcaggagcaggacatgttgacgctaattactcagcgtctcgaggcgctacaaaagtcggggaaatgggaccaggaaatggaggctttcaagggacgcgtgatagagcacagccagagaccggcgccggttgaggggatagggaaagcggataagtatgcgcagcgctggttcgaccccagtatccggctgactgaggacctgaaagatcacaacgggcgggtgttcgcgcgtaaaggcgacgtactgaatccgctgaaaacagtcccctttatgcagacgctgtactttatcgacggtgacgatccggaccaggtcgcctggatgaaacggcaggtccccgacaccctgataagtaaaattattctggtgaaagggagtgtaccggatacgtcagtggcgctcgatgcccgaatttactttgaccagaacggtgtgctcagcaaacgctttggcctgacggcagtacccaccaggatcacaccggcgccctcaggcgaacggctgaacatcgagacgttccccgctcatcaataa

SEQ ID NO: 235591 - DNA, 630 bp, Klebsiella pneumoniae
gtgaaattactgaacatactgacggtgatgctgttactgacccgcactttcgccgcggcagcgggcgcagtctcgtcagatccgatggaggcagatcgtaagtggcttaaacagcaggaggatttcagtgagcagttgcgccggcatccggataaggcgctacagcaggagcttgaagcacaaatcagccgtaacccgctggcccgctcggatcagcagttcatcgataatctggccagtcagcagcgggagtcgacccgggataaaccaacggaaggtgctgtgtatttcatctccttctcaataccagatgaagggttgaaacggatgctgcatgaaacccaccgctacggtattcccgctacgctccgggggctcgtcaataacgacatgaaagcgaccactgatgcggtgatggggctggttaaggcggggattaccgaaggtgtgcaaatcgaccctacgctctattcacagtacaacatccgcagcgtacccgcgctggttgtgcgctgcaaagccggtttcgacgtcatacaaggcaatatccgcctgaagcaggccctggagaaggtcgttgataaaggggattgtgcagagacagcccgaaaactcctgggaggtgcctga

SEQ ID NO: 235592 - DNA, 1956 bp, Klebsiella pneumoniae
atgagatcactccccctgctcctgatgctgcatatgtttgtgctcgggacatttatctggtttaccgttccagcctgtgctgacagcacgtccgattacaaagcgggcgctgattatgcgaagcagatacagggaagcggaactgacgcgctgaagaacttcaacggtgctgacacactaccaggatataccagcaaaccggcgcagacgaagtactacggcggtgtctctgccagtggtgacagtaacctgaaaagtgactctgcagccgaatgggccagcagtgacgtggggaacagcatcacggagtcatttactaaccgtcccccggacagcatatcagctgacgcaccgttcattcaggcggccaaagagaccgaatccagagcagattcgatcgtaggaaataccggtcaggcctgtacagcagaagtggttaatcgcagtgagttcacgaaccatacatgtgagcgggatttgcaggtagaaaacttctgcacgcgggaggcaacgctgaaagacaacgccacgacgcaaaaggtgaatcgcacgtaccagcaggccgtcccgctaaccttcacccggaacagcaaccgatgggacggaaaactgacgatcccgacaacaggtcgcctgttaagtgtttccgttgatggtgaacccctgcccgttccctggatttatgagtgtgacagcgaaggaaaagtaaaagatagctgcaagagtgctgtcagcgaaaaactcagcctctttgataaaacattccccatcgacgtgatgacctggccaaatacggtaacgacgtgctccggtggtcagaatacgcactgtactgaccattactacgatggtaccgggaagatacatcaggcattcagcatggatcggaatgttgtggccggacagacatttgcggttttgaaaacttccaaaaccctcccgtcagtgaatgttaagtccctccaggtgacggtcatactggtcatggaggagacagaaacggtttttgcacccgagctggtctgggttgaaagttgtccgttcagtaaagacgagggcacgaagaccggatcagagtgcatcagccctggcgggacgaaaaccctcaacctgggcgggaaagagtacgcctttacggaagcctgctggaaatacaaagacacctggttgactcaacctgcggataacggctcctgtgaaaaactgatgagtaatgcggcctgtacgttgtcatcacgccagtgtgcattcagcgcggaggacgggacctgtctacatgagtatgccacgttctcctgcgaaacccggaccagcggaaaacagatggtttgtggtggcgatgtgttctgcctcgatggcgagtgcgataaagcggtcagcggaacgaacaacgactttggacaggcggtttctgagcttgcggcgctggcagcggcagggaaggatgttgcagaactgaacggcgttgatgtgaaagcgttcaccggtaaggcgaagtactgcaaaaaatttgcggccggattcagtaactgctgcaaagacagcgggtgggggcaggacgttggcctggcacgctgtagcagcgaagagaaagcgttggccaaagccaaaacgaacaagctgacggtcagtatcggggagttttgttcgaagaaggtgctggggatctgcctggagaagaagcgcagttactgtcagtttgactcaaagctggctcagatcgttcaggagcagggccgcaacggacagctgcatattagtttcgggggtgccagcagcccgaactgccgggggatcacgatggctgaactccagggcattaactttaaccggctggactttgcgaactttatggaggatttaatgaataaccaaaaaatcccggataatgcggaactgacagagaaaacaaaacagcgaattaaagaacttctcacgcagtcatcatccaaataa

SEQ ID NO: 235593 - DNA, 381 bp, Klebsiella pneumoniae
atgaaaacacatggcctttttaataagtacagtaaagtgaaagtgctatacccgtttatcccggtctttatcacattaagtgcgatgtcgtggctgagcaccggcgcgatgccgacgttaaaacccgtcgtactctttattattatcctggcgactccgctgctgatggctatgctggccatgacacgcggggcactgatgtttttcctgggcgcgctggtcacacaggttaccgtcgccatgctggtcacgttgtttaccgcgcacaacttgtccgcggctgccggatttggtgccgcttctgttgtcatctacgtcctcatcacggggttcggtgatgaaaaggccgatgccggtaaggaggataaaagtgatagttag

SEQ ID NO: 235594 - DNA, 237 bp, Klebsiella pneumoniae
gtgatagttagctttgctaaacatcctggcgtggacttctgtgtaaggttgctgctgacagccgttattattttccccgtggtttacttttcctgggatgcggttatcgggacaacggccagtgattatattgcgagtgtcatttttattcttgttacagggtttatctggtttttgctttatctgtttttttcggcctttgagaggctgttaaaaaaagaaaatggtgtgaaatga

SEQ ID NO: 235595 - DNA, 327 bp, Klebsiella pneumoniae
atggaagagaaaaaagcgtacggtctggttatgacgtttgtcgctgtgtttgtcgtttttctggtcagcgtcatgtcttacagcttgtggcgggataaacagattaatgcgtttctggccaccaaccgggcctggggtattcagtgtgacaggagctcgcaggctgcgtgggttatcaggaacggcgagcgtacggcattagcaatgaataatctgacactctactgccacggtttccagtttcagggacgcactgacccggaaacgaaaacagtcagcctcgataaatacagcgtttatcaacatatttcgcgccagccgaattaa

SEQ ID NO: 235596 - DNA, 237 bp, Klebsiella pneumoniae
atgcgaaagattcgattccccgatttggatattacgggaatgtgggtgctggcggttggggtgtttttccacctgatagcccggctcgtcagaaaacagcctgagatggcggttcagttcggagagatcctgggactggggatggtgatatttggtggataccgaattctgaatgccctgattgctgaagctgaaaaacaggagaaggcccgtgaaaagcaacctgaagacaattaa

SEQ ID NO: 235597 - DNA, 567 bp, Klebsiella pneumoniae
gtgaaaagcaacctgaagacaattaagacgggtatcacaacagttgctttgctgctgacactttctcccgtgacctgggccgggacgctcgatgaagtaaaatccctctgggacccacagggtataacaggcacggtgccggcatcatcttctggcgtgcccgctgccgtgaagccggtctctcaggcccgatggtaccggctcagcaacggcaaacaggtcaatctcagcgactggaaagtggtgttgtttatgcaggggcactgcccgtactgccataagtttgacccggtgctgaagcagttgtccggacaatacggattctcggtgttctcttatacgatcgacggacagggggacgaggcgttccctgaagccctgccggtacctcccgaggtgatgcagacttttttcccgaatatcccggtggctaccccgaccacgtttctggtgaatgtgaatacgctggcggcctatccgattctgcagggcgccaccgatgcgcaggggtttatggccagaatggatacggtatttcagatgatgggggcacctgataatggatag

SEQ ID NO: 235598 - DNA, 429 bp, Klebsiella pneumoniae
atggatagtctcaacaaaatatattcttcgttacccgtactggaaagaaataaacgcctgaagctatcacggcaaaagagattcgatgtttattattgtctcgcttttatgtttggtttttccggattgtgcctgtggtggggaagccatgcgtatttcggtttattgtctgacctgttaaccccgccggaaaaactggggacggcaaagaacgtaatggatattttgaatgccctgatgtatttcgtgccctttattcttttttcactttccatcggttgtctggcaacggctttgctgggagtactgatggctgaactggctttctggtttgagtatgcctttgaaaaaagcttccagcgatatttaaaccgcgtccacggacggaaaaataaaatgaaagaaggagggcctcatgctcattcgtaa

SEQ ID NO: 235599 - DNA, 1371 bp, Klebsiella pneumoniae
atgctcattcgtaaaccattatcagtgctttgcgggatgttgctggggatgtcatttacggcggccgcagatgttaacggcgacatgaacaacttcttcaataagctcgggtttgcctccaatacgtctcagccacaagtctggcaggggcaggcggcaggttacgcttccggcggttcgctgtatgcaaggacgcaggtgaaaaccatccaactggtcagcatgaccctgccggatattaacgctggctgcggtggtatcgatgcgtatctgggctcgttctcctttatcaacagcgagcagatacagcgattcggcaaacaaattatgagtaattccgttggttacttttttgatctggcactgcagacgactgttcctgagattaaaaccgcgaaagattttctgcagaagatggccagcgacatcaacagcatgaacctcagttcctgccaggccgcacagggcattgtgggcggtctgtttcctcgcactcaggtggcgcagcagaaagtctgccaggacatcgccggcgagagcaacatcttctcggactgggctgcttctcggcagggctgttcggtgggcgggcagatggacaaggtacaggacaaagccagcgacaaggacaaggagcgggtcatgaagaacatcaatgtcatgtggaatgccctgtcaaaaaatcgcctctttgatggcaacaaggaattgaaagagtttgtgatgacactgaccggcacgcttatttttggcgaaaacagtgaaattacgccgctgccggcacgcactacggaccaggacctgattaaggcaatgatggagggcgggaccgccaggatttaccactgcaatgattcggataagtgcctcaaggttgtcgccgacgccacggtcaccatcgctgcaaacaaggcgctcaagaaccagatctccacccttctgagtagtatccagaataaggctgtggcggatgaaaaactcacggagcaggagaaagggtttatctccagcaccaccatcccggtattcaaatacctggtcgacccgcagatgctgggcgtatctaacacgcttatctaccagctgacggactatatcggctacgacattctgctgcagtacatccaggagctgatccagcaggcccgcgcaatggtcgcaaccgggaattatccccagtcgacaatggatatgatcctcgaaaacctgaaccaggccagtgtgcagattgccgccttccagcaacgtgtccaggtccagcaggacgcgttactggttgttgaccggcagatgagttacatgcgtcagcaggtctctgcccgcatgatgacccgctaccagaataactatcactttggaggaagcctctga

SEQ ID NO: 235600 - DNA, 615 bp, Klebsiella pneumoniae
atgaaatctatttttttgatagtgatccaatatgtgtcttgtgttctggctggatggcaactccctgaaactcttttcatggtatgtgcttccttgatgtggttgattgtttttaactatgcgttctatcagataggtaaaaacaaaaaacaagcattggggaaagataagagcattgtcggcttaatgattgtttctgttttctctctatttggtccagtgttttgtatgtttgctattgttatgtaccccttgtatatactaaacgttcagtttgcttttttttcattaaaaaaaattggttcccatggttatggcgttaaaagtagtaatggtaaagtggtcagcttgaaatcatttgatatgcaaagagatatatttgatgccaatgaattacagggaggtggttcttcaacatcatttaatcataatcggaatgactttagcgtagctccagatggctttgattcatcagtatctgaacctgagtggtttcatgaaagtgttagtcatactagatttagtattgatgaggtcaatcccgcgaatggtcttccaatgattgggaatgtcgatgtttctggaaatccatatggaattgatcggcacgattag

SEQ ID NO: 235601 - DNA, 5262 bp, Klebsiella pneumoniae
atgatgtcgattggctccgtaaaatcggcgggcagcgccggtaactactatacggacaaggataactattacgttatcggcagcatggatgagcgctggcagggaaaaggggctgaggcactgggtctggaagggaagccggtcgacaaggccgtgttcacagagattctgaaaggaaagctgccggacggcagcgacctgacccggatgcaggacggcaccaacaagcaccgcccgggttacgatctgaccttttcggcgcccaaaagtgtctcagtgatggcgatgctggggggagacaaaagacttattgacgcccataaccaggcggtgacaaaagcgctgcagcaggtggaaacgctggccgccacccgcgtgatgaccgatggaaaaagcgaaactgtgctgaccggtaaccttattgtggcgaaattcacccacgacacgaaccgtaacgaggagccccagttgcacactcacgccgtcgtcatgaatgcgacgcagaacggggacaagtggcagtctcttggcactgatacagtcgggaaaacgggctttatcgagaatgtgtacgcgaaccagatagccttcgggaaaatctaccgggaggagctcaaacctctcgttgagatacttggctacaaaaccgaagtcgtgggcaaacacggcatgtgggagatgaacgaggttccggtcgagccgttttccacacgcactcaggaggtcagggaggctgcgggtcctgacgcttctctgaagtcacgggatgtggccgccctcgatacccgcaaatccaaagcagccatcgatccggccgagaagatggtggaatggatgaacacgatgaaggagaccgggtttgatatgcgcagctaccgcgaggatgccgataagcgcgcagcagagctcgccagtgcgccagtcagtccggtgaaaacggacggccctgatatcagcgacgtggtcacgaaagccattgccagtctcagcgaccggaaggtgcagttcacctacgccgacctgctggcccgcacagtcagccagctggaagcaaaacccggtgtgtttgagcaggccagaacgggtatcgatgcggcgatcgagcgcgagcagcttattcctcttgaccgggaaaaaggtctcttcacctcgaatatccacgtgctggatgagctctccgtgaaagcgctgagccaggaggttcagcgccagaaccacgtctctgtcacgccggatgcgtctgttgtccgtcaggcccccttcagcgatgcggtcagcgtgctggctcaggaccggccggcgatggggattgtctccgggcagggtggcgcggcaggtcagcgggagcgggtggccgagctgaccctcatggcccgggagcagggacgcgacgtacatattcttgctgctgataaccgctcccgtgattttctcgccggggatgcgcggctggccggggagacggtgaccggtaaatccgccctgcaggacgggaccgcgtttatcccgggggggacgcttatcgttgaccaggcggagaagctgagcctgaaagagacaatttccctgctcgacggcgcgatgcgccataacgttcaggttctgctttctgacagcggcaaacgcagcgggacggggagtgcgctgacggttctgaaggacagcggcgtcaatacctaccgctggcagggtggacatcaggtgacggcagacatcatcagtgagccggacaaaggggcacgctacagcctgctggcgcaggaatttgccgccagcgtgcgtgagggacaggaaagcgtggcgcaaatcagcgggacgcgtgaacagaatgtgctcaacagcgttatccgcgacaccctcaaaaatgaaggtgtgctcggagagaaggagatgacggtcaccgccctgacgccggtgtggctggacagcaaaagccggagcgtgcgggactattaccgcgaagggatggtgatggagcggtgggacccggagacccggaagcatgaccgctttgtcattgaccgggtgaccgccagcagcaacatgctgaccctgaaggacaaagaaggggagcgcctggatatgaaagtttccgccgtcgacagccagtggacgttgttccgggccgataaactgccggtggcggaaggggagcgtctggccgtgctgggaaaaatccccgatacacggctgaagggtggtgagagcatcaccgtgctcaaatccggggacgggcagctgacggtgcagcgccccgggcagaaaaccacccagtcgctttctgtcggcagcagcccgttcgacggtatcaaggtcgggcacggctgggtggaaagtcccggcaggtcggtcagcgagacggcaacggtttttgcgtctgtgacgcagcgtgagctggataacgccacactcaaccagctggcgcagagcggaagtcacctccggctgtactccgcgcaggatgcggcgcgcacgatggagaagctggcgcgacataccgcgttcagcgtggtgtcggagcagttgaaggcccgttccggagagacagacctcgatgcggccatcgcacagcagaaggccgggctgcataccccggcagagcaggccatccacctttccgttcccctgctggaaagcgatgacctgacgtttacccggccacagttgctggccacggcgctggaaaccgggggcggtaaggtatcgatggcggatatcgacacgaccattcaggcacaaatcaggtcggggcagttgctgaatgtgagcgtctcttctggccacggcaacgacctgctgatatccaggcagacctgggatgccgagaaaagcatcctgacccgggtacttgaaggcaaagacgcggtagcccccctgatggaccgcgtgccggccagtctgatgacgggcctgaccgccggacagcgggcgtcgacccggatgattctggaaaccccggaccggttcacggtggttcaggggtatgccggggtggggaaaaccacccagttccgggctgtcacgagagccatcagtctgctgccggaagagacccgcccgcgcgtcatcggtctggcgccgacacatcgcgcggtcggggaaatgcagagtgccggcgtggacgcgcggacgacggcgtcgttcctccacgacacgctgctgctgctgcgcaacgggcagacacccgatttcagcaacacgctgtttctgatcgatgagagttcgatggtggggttgtcagacaaggcgaaagccctgagccttattgcggccgggggaggtcgcgcagtgtccagcggggataccgaccagctgcagtccatttcgccggggcagccgttcaggctgatgcagcagcgcagcgccgcggatgtggccatcatgaaagagattgtgcgccaggtacctgagctgcgaccggcagtctacagcctgattgaccgggatgtgcaccgcgccctgaccaccattgagcaggtcacgccggagcaagtgccgagaaaagaaggcgcctgggcgccgggcagttctgtggtggaattcacgcgggcacaggagaaggcgattcaggaggcactgaagaaaggcgaaagcgtgccggcaggtcagcccgcgacgctctacgaggctctggtgaaggactacgctggtcgcaccccggaggcacagtcgcagacgctggtgatcacccatctgaataaggaccggcgggcgctgaacggtctgatccatgacgctcggcgggagaacggggaaaccggcaaagaggaaatcaccctgccggtgctggtcacgagtaacatccgtgacggtgaactgcgcagactgtcgacctggacggctcacaaggaggcggtggcgctggttgataacgtataccaccgtatcagcaaagtggataaggataatcagatgatcaccctgacagacagtgaaggaaaggagcgatttatctcaccccgggaggcatcggcagaaggcgtgacgctctatcgccgggaagatatcaccgtgtctgagggggaccgaatgcgcttcagcaaaagtgacccggagcgcggctatgtggccaacagcgtgtgggaggtaaaatccgtctcaggtgacagtgtcacgttgtcggacggcaaaacctcccggacactgaacccgaaggccgacgaggcgcaacgccatatcgatctggcgtatgccattaccgctcacggggcccagggggccagtgaaccgtttgccatcgcgctggagggcgtggcggagggccgaaaagcgatggccagcttcgaatccgcctatgtcgggttatcgcgtatgaaacagcatgttcaggtctataccgacagccgggagggctggataaaagcaattaatgcctcgccctcgaaagcgacggcgcacgatattcttgcgccgcgtaatgaccgggcagtacacactgcagagcagctgttcagccgtgcgcgaccgatgaatgaaaccgcggcaggccgcgcggcgctgcagcagtccggccttgcgaaggggatatcacccggaaaatttatctcacccggtaaaaagtaccctcagccccatgtggcgctgccggcgtttgataagaacgggaaagaagccgggatctggctcagttcgctgacggacagcgacggacgcctgcaggtgatggggggcgagggacgggtgatgggcaatgaagatgcccgctttgtggcgctgcaggggagccggaacggcgagagcctgctggccgggaatatgggagagggcgtcagggtcgcccgcgataaccctgacagcggcgtggtagtgcgccttgccggcgatgatcgcccctggaatccgggcgccatcaccggcggacgcgtctgggcagatccggtaccggtagtttcaccggaggcggcaggaactgacattccgcttccgccagaagtgctggcacagcgggccgcggaagaggcgcagcgtcagaatatggagaaacaggcggaacagactgcccgggaagtggccggggacgggcgtaaagccggcgaatctgaagaccgggtaaaagaggtcatcggagacgtcattcgcggtctggagcgcgaaaaaccgggtgaagagaagatgaccctgcccgacgatccacagacccggaaacaggaagcggccgttcagcaggtggctcaggagagccttcagcgggagcgcctgcagcagatggagcgcgatatggttcgtgatctcaatcgtgagaaaacgctcgggggcgactga

SEQ ID NO: 235602 - DNA, 591 bp, Klebsiella pneumoniae
atgactgaagaaaaacgccctgtactgagtctgaaaagaaagccggcagcggataccgcggcgaccgggacccctgagacgcccgtagtggtacggcgtaaaaaagtggtggtggtcacgacgcctccggcctggaaggtaaagaaggagaagctggagcgggccaaaaaggctgacgaagccgcagcacgtgaatctgcgccggtggtggtcaacgcggtaaagccaccacctccggtccgatatctgcgtctgctgccgccggaacaggccatcatgactttgaaggcgttctggccacagttgttcgacggtaatgtgccacgtctgctggcgacgggaatgcgtgagcacctgtttgcggacattacgcaacgcaacctcccgctgtctcataaacaggtgattaagtgcctgaaaagcctgacgcgttcagaagagtatctttccctgatgcaggctggcgctccccggtatgaccttcagggaagtattgtggcgaccgtgacgccagaagaagaaaactatgcccgtgaacggagagtgcgccagagccgcctgagtgcccgaatacagagtcagacgctttaa

SEQ ID NO: 235603 - DNA, 786 bp, Klebsiella pneumoniae
atgaaacgtaaaatatatttgctgcttccatttattttcgccacctttgttaataacagcgttgctcaagagcctgagacagaaaagactttctccgtcatccaggaaaaaagaatcggagaaatagcggccgattatttgcgtgctcatcctgaaatactgattcagatgagcgagaaacttcaacaggagcaggaagaaaaacaaagccgggggctgacatccgctgcgctggcgcagcaggcgaaaatactgggcgataaaactatcccgtcctgggggcctgcggacggggatgtgatggtggtcgaattcttcgactatcagtgcatctggtgcagccggtttgcacccgagctggagaaggtcataaagaacaacacgaaggtgcgctatttctttatggaatggccggttttcggcagtcggtggccagcgtcgctgctggcagcgaaaacaggtctgcaggtctggaaagagcaaggagcggaggcctatcttaaatatcacaatggtctgtacgggacaggcctgaatgaagggaagctgacgaagggagatattgaaaagacatcagggggaatttcatttcaaccgcagaccattgaagagattaacaccacgctgaagaatattaatgatattgccacggagacaggattaaccggaacacccggaattattgtgctgccggtaaaaggcgcgacggctgaaaacatcacagtatttaccggaatgaccgaagcagagaatattcagtctgcaatcaataaagcccgtcattaa

SEQ ID NO: 235604 - DNA, 645 bp, Klebsiella pneumoniae
atgttccgatatttcaccctgcgcactgaacagcaattattctgttatttgtacgggggcgcgctggcgctctttctgacactcttatacccgtcttttcccgcatgggcaggcccccttctggtgatgctgccggttgcgctgttctgggccggtctggcgctgtacacccgtcataccgaccaaatgagaacgctggaggtttcaccgctggtctgtatccgtgatggtgttcaggtggtggccatgctgccgcaccacgagaaagcccggctggaatgggaaattctccaggacggtgaagtgtatcgccagcagatgcatgaccttatcggcctggtggtccggcttgtctcccggggatgcctttatgcgccagcagcgatactgacgggcgccggcttcctggtctggggatttccgcaggacggtatccgtctggtgaccgccctgcgaactatgcccgcaacagagcttgtacagctggccggcatcgtccttcactacgtgctgttgatttccgccatatcggtcctgattgctgacctcgtggctggtcagggggtgccgaacagataccgacgcgcgttgctggatcggttgccggcagatgcctggtgcatcagaagagggactgagcgttga

SEQ ID NO: 235605 - DNA, 585 bp, Klebsiella pneumoniae
atgaagcttgatgctgtgaagactgttcgcgatttaatgcgctattgtcatatgcccgtatggtgtcagcgtgaagtcagagatatgagggtcggtgacatctattttttagggaaatataaagaagtgatgttttccggggagctaaatgaagacgtcgattttgtaggggaggcatggatcgaaaaggagagagggatatacaaataccatgcgacctggacgataccagtaaaaccctcccgggcttttgtcatgacttcgggtcaatttaaattactgaaaggtggtgtcgtggatttcaacggtgacctttcatcgtttcgttcatttgctctggtttcacgctatctcaatcgactggtgatgaaaatgagcaatgaagaacggcatgaattctataaagtcggttccaggccactttttcgtggcatttgtattgataaggagtcaataagccgaaggccgcactatatcaaagatggagaagttttacggcgtgtctggctaaattacagcaatcaattaccgacgcatcccctgcaggctattgtgacagcggcaatagcgctgaaacaaatttaa

SEQ ID NO: 235606 - DNA, 138 bp, Klebsiella pneumoniae
atgcgggtttttattgcagcaaaaaaatccccggggaaaattctttcagaagggctgagtggaatgctgaacagagtaaagaaacacatatggattgatatggttataaagcgaggcccggaatggcaaaaatattaa

SEQ ID NO: 235607 - DNA, 600 bp, Klebsiella pneumoniae
atggcaaaaatattaatgatgacgggtgccatcgtcatagtactgggtctgctgggttttctggttttgcttgtgaagggacgaacaacgggaaagacctctccagtgctgcaggcactgaaagcggcgggtattcgcaccaccgaggcggaacagcgactgtgtcgtcagcgggcctgggtgagtaatgacatgctgatgacgccacgggaacagcatttttaccgggcgttgctgaagcacaccgaccggaaacgctggcttctgtgcccgcaggtgcgggtggcggatattgccagcctggcacctcatatccggcctcgctcccggacctggtggcagctgttccggatggcctcacagtggcactgcgatgtggtggtggtggatatcactacctttgccattgtggccgctgtcgaactggatgatgcctcgcacctgaaaaaacatcgggtacgccgggatattctgctggaagaggtacttcgccaggccggcattccgctgttgcgggagcgggattcagagaaactggtcaggtgtgtgagggattttctgaagcaccgacatgacatcactgaatgtcatcaggagtga

SEQ ID NO: 235608 - DNA, 567 bp, Klebsiella pneumoniae
atgagtatagaaaaaagaacgacccgtcaaatcccagccagccggtggtggttgcccggactgctcagtctggtgctttacacgccagtgccggcagtcaacgccgcgtccatcgagaccggcttttccccggaaggaacggccctgcagctggtcctgaagaccatcgattcagcgcagcaggaaatccgcctgatgggatactccttcacgtcgccggaggtgactcgctcgcttattgcggcaaaacggcgtggagtggatatcagggtagtactggaccagaaggcgaataccgggaaagccagcgtggccgccatgaacgtgctggtcagcgcgggtatccctgtccgcaccgtcgacgtatataagatccttcatgacaaagtgatcgtcgcagacaaacgcaataccgaggtcggctctttcaatttcagtcgggctgcggaccgttcgaattcagagaatgtgctggtcgtgtgggatgatccggttgtcgcccgcagttacctgaaccactgggcatcccgctgggcacagggaacggactggaagagtacgtactga

SEQ ID NO: 235609 - DNA, 270 bp, Klebsiella pneumoniae
atgccacaggccataaacgcagttacttcctcatctaaacgtccctacagaaaagggaaaccactttctgctgcagaacggcagcagaaggctgttgcgcgtaaaaaaacgacgcacaaagaggtgagggtgtttgtgcgcgattcacttaaaaatcagcttcaaatcatgtgtgagagtgaaggaattactcaggcagaaatgattgaaaggcttattgaaatggagtccgcgaagcttggaattgatgtaacgacgtcacattcttga

SEQ ID NO: 235610 - DNA, 552 bp, Klebsiella pneumoniae
gtgactaatcataaccaacaatgcccacataagtatgttcgggtcaacaatcctgaccctgttttcacggtttcgcaggactacaccccctggcctttctcgctgaaacttatggctaaagccaatggtttcactgaaagtttcgatttcgatattgcatccgcgatgtcgcgaagggatggaatacgaaaacgtaaacccccagttttgcgccgcagagcgatgaatgcgttgctcatggcgatgtgcttttattatgatcctctttcaaataaagttctgcgctcactgagagagatggccccggagtgtggacttgtaagtcaatctctctctggcgaagtatccatcggacgggcggtcagagcactggaatcgctggaaaaagattttggattcgttgcctgctcatcgggacgttattcaactgctgagatttttctcacccctaagctgttcgagtttctgagaatatttccactctctctgagtgaagcaaggctgaaatgccaggccttgaaaatcagtgcaaaggattgtgctgatgagtaa

SEQ ID NO: 235611 - DNA, 1020 bp, Klebsiella pneumoniae
atgagtaatccgcacaatccgcagcactggagtcagctggatacggaagaacagatccgtttctggcagggcgttgatgatggccacgttgaatcgtttctggtttccccggagaagaaacgtacccgtcgccgtcgtggtgagcactccaccaaacccaaatgcgaaaacccgtcctggttccggccgtctcactataaggcactcggtggccagctgggccacgcctataaccgtctggtggaaaaagatgcggccacgggtcaatgtaaactccgtatgcacatgtccctgcatcctttctatgtccgggagcggcagcgcgccgggcgtaaatatgctttccgtccggagaaacaacgtctgctcgatgcgttatggccggtactgattagtttttgcgatgccggtaaacacacggtagggatgagtgtgtccagactggccagagaactcagcccgaaggatgctaaaggtaaagtgatgtccggaaatgaagtcacggttcgccggatttcggcattaattgctgaacaggtacgctttggtgtacttggcgtatcagaggaaaccatgtgggaccgtgaatcacggaagcgactgccgaaatacgtctggatcactcccgctggctggaagatgctgggcgttgacttgatgaagctgcaggagcagcagttgaagaaactgcgggaatgcgaggaacgtcaggcgctcattaaagaggggctgttaggcgaacatgaggagatttctgtcctcagggcgcgtaaacgctggtatgagcagcgcagtcgtgaagctctgcaatttcggcgtgcaaaaggtgccgcacgtaagcgtgcaaaccgtctgtccagaatgccccgtgaccgccaggtctatgaaatgacctgctggctgaagaaaacgctgccggcagatgaactctatggctattccgcagacagacttgagcagctggccgtcgggcacctgtaccagctggagttgtcattgagccattccccaccgcattag

SEQ ID NO: 235612 - DNA, 900 bp, Klebsiella pneumoniae
ttgcgtaacgccgcactcgaactttttaacgaccgcttaccgcacaagccatacttctcggacgatctgcacttcggtgtacgcatcgcagggaaagagcgagctatcctggcgaaatacatccagttcaatcagcctcacgccatgttctggctgggatttgacgttgatcgcgtcggcgcagccatcgactggagcgaccgcaacgcgccagcgcctacgctgaccatcactaaccccgaaaatggccatgcgcatctgctttacgcgctgcaaacctcgatacgcaccgcgccggacggaaaaatgaagccgctgcgctacgctgccgccgtggagaatgcgctgcgtaaaaaactggacgctgatacaggatattcgggactaatctgcaagaacccgaaccacagccattggaagattgccgtctggcagccggaactctacacactggactggttagctgattcactcgacctgaacgccgcgaatgacaaagaaatcgttgctgactatggcttaggtcgcaactgcacattgtttgataaaacccgaaaatgggcttatcgcgctattcgtcagggctggcctgagtacaaccagtggctaaaagcctgctatgaacgtgcaagtgcttataacctccaattttcatcacctttggaaattaatgaagttgtaggtgttgctaaaagtattgctaaatggacacattctaaattcagccttaatgctcttaacgattatgtatccagaactcattcacctgaaattcagtcgttaagaggtaagagaagtaaaggtggtggaaggcctagccttaactcaccatggcattcattgggtataagcagaagaacttactttaggaataaaaaaagaggtatgtatggcaattag

SEQ ID NO: 235613 - DNA, 1341 bp, Klebsiella pneumoniae
atggcaattagagatatggaaaccatgctgttaaatataaggaataaaaagatagcccctctaatggaggagtctatgagatgctataatgcatttgcatatagagcatctataagcacagcattcaatgccatgtttcacgacctgtgcgacaagcttgaagctttgaaagaaacaaactcatcgattaaggctttgtaccaagaaatagaaaaaaagaagcagcagcaagaagtttatgaatcttatcttatcgataatctagcatcgaataatctaatatctaaactagaaaaagatatattggatggtatgagagttatgaggaacaaggcatctcatccaacagaccatgagccaacagctgaagaagcaagatatgtctttaccactatcattgaccttgtcctttccaagggaagaatactttctcgctcagctgctgatgacattctttcttcgctaaaagataataattacttcccatcaaaagtcgactttaaagaaaatactaaaatagtaagttatgatatagactccattcatgagtctgcaatggtgtatttagtgaacaaggttattgataatatagttagtgagccagatgaggagaattatgttttatttatgatatctctccttaatcagaaaagagatgatctatctaaagttgtaatcagtcagatcaataaaaccaaatatactaaagatgagtttaaatggttggtgattgctattgcaattcagcatgctgacgcccttgaaaataaattttcagccagaataatatcactgctttccatggatatggataacaataattatagcatgtcctcaattaggagtgtaaggagggcatttgtttcgatcgctgagaaaaatcctgatctatatggcaagcttaaggtggattttaagaattccgtcttctcaaaatatgactcttgggactcctgcatatctagtgatagtgaaccgctaaaaatagactttattaattatttcaccaggtggctttcaccaaaatttaatattaatggggagcagtataaaaaaatacagaaaagagtctcttatttgacggcaaacgataaagttttcgcatctaaacttgatgatctaactgtcataaaaataattttttccttcttgcaaactactacatcatcaataactcctgatgttgaaggaaatccatctgattccttcatcgataaaattgcagaaactattcctaagacatatgaaaagcttagttcctttaggtcaagaaatcccgatgcatacaatacagaagccaaacgaatgaaagtggatgcatatctaacaagacttccttaa

SEQ ID NO: 235614 - DNA, 771 bp, Klebsiella pneumoniae
atgtctatcaacaataagatttgttatttaggcgctgttacatgctatatggcacttactagctccgttgcaatttccgcccctgcacaaataataggtagtgtttccaccggaatggtggcgtcacaaatatctgatagcttaaatgatttaataaataatgcaagagacgcaggggattatctaactatcagagcagcagtggaagcaaaaggtgctattgagctatggaaagattccaataaagaactattaaatgttgctttctcaaagttggatgagtcacaaagaaatactataaataattttagacaattaactgaaagtattggtcatgatacagataaaaaacttgataatatacaaaaaatgttagatcaggcacaccaaatagttgagtctttaccaactacacacaatacatacattaccggtttctctcctcgagtaaaacctgctcaatctaattcttcaataacattacgcgtacacggagtaaaccttgataagagcaatccagtacttaatcttggtgagcatgatgctcagagaatgctaattggtccaactgaaatacaatacaccattccaattaatgcgctaaaaggagatgtcgacaaaataactgtaatacctttacaaataacatacacgacgttaaaagatggcttttggaacaaagcgtttaataaggggtccgcttggaaaacggaatctatggtcactcccgtttttgcaacaccgattttgacgacaagttggcttgcttga

SEQ ID NO: 235615 - DNA, 1422 bp, Klebsiella pneumoniae
atgaataccgcgatctcttcccgcgatgaacgtgctttttcagcgccggcgctgctggtggcaggtgccttttttatggagtttctcgacgggacggtgatcgccaccgccctgcccgatatggcgagggattttggcgtcaccgcggtcgaactgaatatcggcatcagcgcctatctgattacccttgcggtcctgatcccggccagcggctggatcgccgatcgcttcggcgcccgggctatttttactctcgccctggcgatctttacccttgcctcggtcttctgcggcctctccaccgaggtgcatatctttgtcgccatgcgtatccttcagggagtcggcggcgcgctgatggtccccgttggtcgccttgcggtgctacgcaccacgccgaaacaccagctgatcaaggccatcgccaccctgacctggccggcgctggtggcccccattatcggcccgcctttgggcggctttataacccgctacgccagctggcactggatcttctttatcaatgtcccgctgggccttgccgccataatcctttcgctgcgcattatccctgatattcgcgaaacggaacggcgctccttcgatctcagcggatttatcactacctcggtcgcgatggtcagtctggtaaccgcgatggagcggctcggcgatcgccagccgcagatctggccgacgctggctctcgccgcgcttggcttcggctgtctgttatattccattcgtcatttccgccgggcggcggcgcctatggttcgtctcgacgccctgcaggtgccgacgttccgggtgacaatgtacggcggctcgttgttccgggcctccatcagcgcggtgccttttctgctccccctgctgttccaggtgggattcggtatggatccttttcattccggcctgctggtgctggcggtgtttgtcggtaatttaaccattaaacccgccaccacaccgctcattcgctggctgggctttcgtcggctactgctgatcaatggcgcgttgaacgtctgttcgctgctggcttgcgcgctgcttacgccgcagacgccggtctgggccatcatgctgatcctttatctcggcggggtgtttcgctcaatccagtttaccggtgtaagcacgctggccttcgccgatgtccccgccgcgcagatgagtgatgctaatacgctgttcagtaccgcgtcgcagctggcggtagggctggggatcacgctcggggcgattggcattcgcctgggcgagcaggtcggcgactggctgcatcttactgaactaccggggatcagcttccgcctgtcgtttgtgtttatcgccttgatatgtctggtagggatgatcgacagcctgcatctggccaaaacggccggcagcagcgtgtcggagaagaagaaatag

SEQ ID NO: 235616 - DNA, 1515 bp, Klebsiella pneumoniae
atgcaacagtctaccccttatctctcatttcgcggcatcaccatgacgttccctggcgtaaaggccttgtccgatatcagttttgactgctacccgggacagatccacgcgctgatgggcgaaaatggcgcaggcaaatcgacgctgttgaaaattctcagcggcaactatatcccgaccgcgggccatctgcagatcggcggccagcagatggcattcgccaataccatggaggcgctgaatgccggcgtggcaattatctaccaggagctgcatctgatcccggagatgaccgtcgccgaaaatatctatctcggtcagctgccgcacagaggcggcatcgtcaatcgctcgttgctcaactatgaggcccgcctgcagctggagcatctgggtctggatatcgacccggagacgccgctgaaatatctctccattggtcaatggcagatggtggagattgccaaagcgctggcgcgtaacgccaagattatcgcgttcgatgagccgaccagctcgctctccgccagagagatcgacaacctgtttcgcgtcatccgcgagttgcgtgaggagggaagggtcatcatctatgtttcacaccggatggaagagatttttgccctcagcgatgccatcaccgtctttaaagatggccgctacgtttgcacctttgacgatatgccgagcgtcagccacgacgccctggtccaggcaatggtaggccgcaatctgggcgatatttatggctggaagcctcgcccctatggcgaggagcggctgcgcctggaggaggtcaaagcgccgggcgtgcgcacgccggttagtctctcggtgcgcagcggtgaaattgtcggtttgttcggactggtgggtgccgggcgcagcgaactaatgaaaggcctgtttggcggcacgcagataaccggcggtcaggtgtatatcgatggccagcccgtctccattcgcaaaccggcccaggccatccaggccgggatgatgctgtgcccggaggatcgtaaagcggaggggattattccggtgcattccgtgcgcgataacatcaatatcagcgcccggcgcaagcatattcacgctggctgcctgatcaacaacgcctgggaggcggacaacgccgatcaacatatccagtcgctgaatattaaaacgccgggcccggaacagctgattatgaacctgtcgggcggcaaccagcagaaagcgatccttggccgctggctgtcggaagagatgaaggtgatcctgcttgatgagccaacccgcggcatcgacgtcggcgccaaacatgaaatttacaatgtgatctatggcctcgccgcctccggtgtcgccgtggtgtttgcctccagcgacctgccggaagtgctgggcgtcgctgaccgcatcgtggtgatgcgcgaaggacaaatcgccggcgaactgctgcatgaagaagccaatgaacagcaggcgttaagccttgcgatgccaacagtgagccaggctgtcgcctga

SEQ ID NO: 235617 - DNA, 390 bp, Klebsiella pneumoniae
atgtcatcagtgactacgtccggggctacccgctcaacctttagctttgcccgcatctgggatcagtttggcatgctggtggtgtttgcggtgctgtttatcggctgtgtgatttttgtgcccaactttgcttcattcgtcaatatgaaagggctggggctggcgatctcgatgtccgggatggtggcctgcggcatgctgttttgcctggcctccggcgattttgacctgtcggtggcgtcggttatcgcctgcgccggggtcaccaccgcggtggtgattaatctcagcgaaagcctgtggctggggatcgccgcaggcctgttgctgggggcgcttagtggcctggttaacggctttgtcattgcgcgcctaagatcaacgcgctga

SEQ ID NO: 235618 - DNA, 969 bp, Klebsiella pneumoniae
atgagcgaaataatggatttagtcgtcatcgagaaaaagaacgcgatggcggttttcaccaataacgaccaactcgatccgcttatcgaagcgatcgaaaaagaggctcgcagtctggttccggacgtgaccaccaaaaaaggccgcgacgccatcgcatccatggctcacaaggttgcacgctctaaaacctacatcgacaacgcaggtaaagacctggtcgctgagttaaaggcgctgccaaagcagatcgacgaaagccgccgcgttgtccgtgagcgtctcgatgcgctgaaagatgaagtgcgtcgcccgctgactgaatgggaagccgaacaggaacgcattaaggccgaagaagccatgaacgcccttcacttcgaagcactggccatgaatgaagagttcgatcggcagctggctgctcgtattgagtctgaccacgaaatggccctcctgatgaatgacgctttcgaccgtgagcaggccgagaaaaaagcagaagccgagcgccagcgcattgcccgcgaagaagagattaagcgccaggcggaagcgaaggcgaagcgtgaggcagcagaaaaggcgcagcgtgaaattgacgccgcagccgccagagagcgcgaagcgattttggccaaagagcgagccgaacgtgaacagagagaagcagctgagcgtgcggagcgtgaaaagcaggccgctgtggaagctgaacgccgcaaagcacaggaagaagccgatcgcatccgccgcgaggcagaacaacgcgaacaggcccgcctggatgaggagaagcgcaaggccgaagaagaatcgcgccgcgccgctgatgttgagcatcgccgcggaataaatacagcagcggtacaggctcttatcaatcagggcatccctcatgaatgggctaaagcctgcatcattgctgtagctctcgggaaagtcccggctacgaccatcaaatactga

SEQ ID NO: 235619 - DNA, 780 bp, Klebsiella pneumoniae
atgaccgctcagcttatgaccgcgatcagcaatcgcgatggtgatgcgctggccagaatggccgcaggtagcacggagccgcagaggcttctcgatttcgaagctgaaaggctggttgattctctgttccgacagctgaagcagatcttcccggcgtctacccagactaacctgcggaccgacgccgaagagaagacagcgaagcgccagtggattgccgcttttgccgaaaacggcatccgcacccgcgaacagttatccgccggtgtgcgccatgcgagagccagtgaatcgccgttctggccatcgccgggccagttcatcaagtggtgcaaggatagcggcacggtgcttggcattggcctggctgatgtgatgaatgagtttcatcggtatagccgcgaaaaagggctgcataccggcggagcagaagctttcccgtggtctcatgacgtcatgtactggattgtgaccgatacgcgcagagcgatgtaccagcgccagctgagcgaggctgaaactgaaaaatacgcgtcaaaaaaacttgaggaatgggcgctgaaagttgctggcggggaaaaaataccatctcccgtcctggcgctcgagaattctgatgaagtgatcccgacaaatcacgtgagccgtcaagccggttatcacccggaaggaaaaagcttcgggtgcatgccaaatgcggcgactctcggcgctctcaccccggcccaatggctttgggaagagtatcagcgcgggaaagagagagggcttattcaatga

SEQ ID NO: 235620 - DNA, 354 bp, Klebsiella pneumoniae
atgatgattaaacattccttgctattctcaattctgctaataaccaccactctttcatatgcagagacgcttgatgattttttcaataaaaataaagatctaaacaatgatattgagattagattagctataaaagagaaagcatctcaacttgctttgtcagaggcatatgatgagggagcaaatgacctctctgccaggagtggcaggctgatgcgggaggatggcggtagttatgctagatatgcggtcaaaactcttgttgatgcttgcaataacattggcccgtatcaaagcatgcttgacgatcaggcatgcaaaaggctagaaggtaaggttgctggcataaaataa

SEQ ID NO: 235621 - DNA, 1131 bp, Klebsiella pneumoniae
ttgaataattcagccataccgtcacgtctgacggttgtattttctgcgagcggcgacaaaaacacgatcccggtcaattccacctctgaaacgctggctgacggcctggcggcgatggattccggtttcccgccgctgacccgtattgcactttctgccggcggtaagccgccaagaggtcaggactttaacggcattttcaatgacgtttacacgcgccttcaatggtcagctgcagggatggggtatccatttagtaacgaattcagcgctgcaatttccggatacccgaagggggctattgttcctgcttctgattactcaggtagatggttgaacctgaacaacggaaatacagtgaatccagaatcaccttcaggatctcctactgggtgggttcctcaaagttcatatggaattactgccatttctggtatttcaggctcaagtatcaccctctcatccctgcaggccgcaaaagaacgaattattctgaccgggacattaactgcaaatatcaaccttgtatttcctgcgtggattaaaggatgggttgtgcacaataactgcacagggccatattctgtaacttgtaagacggaattaggtaatggagttgtggtcattcctggtctcgtatcacgtattttctgtgatgggacaaatatcactgatgaaaccatgtccacacaaaccgatctagttggtagtgtcgtcggatttgccgttaatacaccccctactgggtggcttgctgctaatgggcaagcggtaagtagaaatatttacgcaagacttttcttaagaattggaactttgtggggtgctggcgatggaagtaccacatttaaccttcctgattatcgcggtgaatttataagaggctgggacaatggcaggggagtagatcctggaaggggacttgccacccctcaaaatgcaacccaaattgtagattacgccggaagtgcagatggtagcgctattcaagtaggaataattaacggagaaggaagttcacctgatagcacatggcaaagatatagaggtacagccacttcctcttatggtgcgaagcgtatttcagtcagacccaggaatatcgcagctctttactgcataaaattctaa

SEQ ID NO: 235622 - DNA, 186 bp, Klebsiella pneumoniae
atgagttatgtcaatgacaaaattaactgccttgccattcagaaaggtcagctcggaggcactcagtataagctgagcaaagacgtaggtgttaaatccagtctggcctgctggcgctttccatccgccatatcgcgcacttggggcaacttcggcaccatcccagccaaccgatccattgaatag

SEQ ID NO: 235623 - DNA, 261 bp, Klebsiella pneumoniae
gtgtcgcagattaataatgcagttacttcctcttctaaagaaaagcgggcctatcgaaaaggtagtccaatgtcggactctgagaaacagatggcggcggttgcgagaaagcgtgttacccataaagaaatcaaagtctttgtacgtaaccccctgaaagatattcttattgagctctgtaatcgtgatggattaacccaggctcaggtagttgaaaaattgctcgaaaaagaattcaaatctcagggtttactcaagtaa

SEQ ID NO: 235624 - DNA, 558 bp, Klebsiella pneumoniae
gtgaaaataaatcgtaatctccgcagatggtgtctgcccgggctggtcagcctgagcctgtgcgcccccttaccggccgtttatgcagcgagcattgagaccggattttccccggaaggaaccgccctgcagttggttctgaaaaccattacgaccgcacaacaggaaatccggctgatgggctattccttcacgtctccggatgtggccggcgcgctggtcagggccagacagcggggcgtggatgtgaaggtggttctggaccacaaagccaataccggcgagcgcaacaaggccagccgggccgccatgaacctgctggtcagcgcgggtataccggtccggacggtggatacctacaagatcctccacgacaaagtgatcatcgctgacgggcgtaacaccgaggtcggttcgttcaatttttctcgcgccgccgatcgcgccaattcagagaacgtgctggtcgtgtgggatgaccctgttgttgctcaacgctatctgcagcactggtcgtcacgctggtcgaagggaactgactggaaacagacgtactga

SEQ ID NO: 235625 - DNA, 393 bp, Klebsiella pneumoniae; identical to SEQ ID NO: 139382

SEQ ID NO: 235626 - DNA, 2415 bp, Klebsiella pneumoniae
atgatcgcccgctggttctggcgcgaatggcgctcgccgtcgctgctgatcgtctggctggcgttaagcctcgccgtggcctgcgtgctggccctggggtcgataagcgatcggatggagaaaggccttagccagcaaagccgtgaatttatggccggcgaccgtacgctgcgtagttcgcgcgaggtacccgccgagtggatcgcacaggcgcggaagtcagggctgaccgtcggcgagcagctgagctttgccaccatgacgttcgccggtgatacgccgcagctggcggacgttaaggcggtggacgaccgctatccgctgtatggcaccctcgagacgcagccgccggggctgaagccgcaggcggggagcgtgctgctggcgccaaggctgatggcgctcctgaacctgaaaaccggcgatacgattgacgttggcgatgccacgctgcgcattgccggggaggtgattcaggagccggatgcagggtttaaccccttccagatggcgccgcgactgatgatgaatatggccgacgtggcaaaaaccggggccgtgcagcccggcagtcgcgtcgcatggcgctataagttcgccggcgacgctgaacagctggccaattatgagcagtggctgctgccgaagctcggcccggagcatcgctggattggccttgaccaggacgacagcgcgctgggcaaatccctcgaacgctcgcagcaattcctgttgttatccgcgctgttgacgctgctgctggccgtcgccgcagtggcggtagcgatgagccactactgccgcagccgctatgatctggtcgccatactcaagacgctgggcgccggaaggtcgcagctgcgcaagcttatcgtcggccaatggctgctgctgttgacgctgtcggtgataaccggcggggtggcgggcttggcgctggagcgtctgctgctgctggttctcaaaccggtgctgcccgccgcgttacccgctgccagcggttggccgtggctgtgggctatcggggcgacaggcgtcatttccctgctggtgggcctgcgaccctatcgactgctgctggcgaccctgccgctgcgagtgctgcgtcaggatgtggtggctaacgtctggccgttgaaaatctggatcccggcggttagcgtcgtggtggtgggcctgttggcctggctgctgggcggcagcccgctgctgtggtcggtgctggccggggcggtggtgctggcgctgctgtgcggcctggtgggctggggattgctgtggctgctcaaacgcctgacgctcaaagccttgccgctgcgtctggcggtgaaccgcctgctgcgccagccgtggtcgaccctcagccagctggcggcgttttccctgtcgtttatgctgctggcgctcctgttggtgctgcgcggcgatctgcttgaccgctggcagcagcagttgcccccgcagagcccgaactactttctgatcaatatcgcccctgagcagatagtgccggtgaagaccttccttgccgaacaccagacgcgggcggcggaattctatccgatcgtccgggcccgtctgacgcagatcaacggtcaatccacgaacggaaacaaagacgaagcgctgaatcgcgagcttaatctcacctggagcgaacagcgtccggatcataatccgctggtggccggcagctggccgccgaagccgggcgaggtatcgattgaggaggggctggcgcagcggctggggataaagatcggcgatacagtgacctttaccggcgatacccaggagttcagcgcgaaggtcagcagcgtgcgcaaagtagactgggagagcctgcggccaaacttcttctttattttccccgccggggcgctggacgggcagccgcagagctggctcaccagcttccgctgggataacggtcccgcgatgttgacccagctgaaccgcgagtttcccaccgtcagtctgctggatatcggcgccatcctgcgtcaggtcggccaggtgctctcccaggtcagccgggcgctggaggtgatggtgggcctggtgacagcctgcggcgtgctgctgttgctggcgcaggtgcaggtcggtatgcgtcaacgccatcaggagctggtggtctggcgcacgctgggggcaggaaaatcgctgctgcgcgctacgctgtgggcggagtttgccctgctggggctggtttccggcctggtggcggcgataggcgcggaagtggcgctggcgatgctgcagacgaaagtctttgattttccctgggcgccggactggcgcctgtgggtgttgctgccgctgacgggagcggtgttgttatccctgtgcggcggcgggctggggctgcgtctgttaaaaggaaaagcgctattccgccagtttagccagtaa

SEQ ID NO: 235627 - DNA, 705 bp, Klebsiella pneumoniae; identical to SEQ ID NO: 225654

SEQ ID NO: 235628 - DNA, 2862 bp, Klebsiella pneumoniae
atggccagaaaacaatgccaggtctgcggccagcccgccacggtgcgggtggaagccaatctcaatggtcgtcacagcaccatgctgttgtgtgacgatcactatcgccaactggcgcgccagcaaaagcgcaccgtctcgccgctggaggctctgtttggctcgcgcagcggtttgttcgaagacttcctcggcagcgacttcttccgcatcggtgacgatgcaccgtccatggcggccgataccgatgaggtagtcgatgcctcattcggcgaacccgccccggccggtacgggcaccgcgcgccggcgcggcagtgggctggccagccgtatcagcgaacagtccgaggccctgttgcaggaggccgccaaacatgccgccgaatttggccgccccgaagtcgataccgaacacctgctgttggcgctcgccgacagcgacgtggtcaagaccattctggggcaattcaagatcaaggtcgatgatctcaagcggcaaatcgaatccgaagccaagcgcggcgagaagccgttcgagggcgagatcggcgtgtcgccccgggtcaaggacgcgctcagccgtgctttcgtggcctccaacgaactcggccactcttatgtcgggccggagcatttcctgattgggctggccgaggaaggcgaaggtttggcggccaacctgctgcgccgttacggccttacgccgcaagcgctgcgccagcaggtaagcaaggtggtcggcaaaggggccgaggatggccgcgccgagacgccgaccaacacgccggaactcgacaagtattcgcgcgacctcaccaagatggcgcgcgagggcaagctcgatccggtcatcggccgtgcgcaggagatcgagaccaccatcgaggtgctggcccggcgcaagaaaaacaacccggtgttgattggtgagcccggcgtcggcaagaccgccatcgtcgaaggactggcgcagcgcatggtcgccggtgaagtgcccgagacgctgcgcgacaagcgtctggtcgaactcaacatcaacgccatggtggccggcgccaagtaccgcggcgagttcgaggagcgcgtgcagaaggtgctcaaggaagtgaccgagcaccagggcgagatgattctcttcatcgatgaggtgcacaccatcgtcggtgccggccagggtggcggcgaaggcgggctggacgtggccaacgtgttcaagccgatgatggcgcgcggcgaactgaacctgatcggcgccaccacgctcaacgagtatcagaagtacatcgagaaggacgccgcgctggagcgtcgcttccagccggtgatggtgcccgagccgacggtagcgcagaccatgatgattttgcgcggcctgcgcgacaccttcgaggcgcaccacaaggtcagcatcaccgaggatgcgatcatcgccgccgccgagttgtcggaccgctacatcaccgtacgctttttgcctgacaaggccatcgacctgctcgaccaggcggccgcacgcgtgaagctgtcagccacggcccgcccggtggcggtgcaagagctggagtccgaactgcaccagctgcggcgtgagcaggactatatggcctcgcgcaagcagtacgacaaggccgccgagctgggcaagcgcatcgaggccaaggagactgaactcaagcagctcgtcgaggaatgggaacgcgagcgcgcctcgggcagcgccgaagtcaaggccgagcatgtcgcgcagatcgtctcgcgcctgaccggcattccggtcaacgagctgacggtggaagaacgcgagaagctgctgcatctggagcagcggctgcacgagcgcctggtgggccaggacgaagcggtgcgcgcggtggccgatgccgtgcggttgtcgcgcgcgggcctgcgcgaaggcgacaagccggtggcgactttcctgttccttgggccgaccggcgtgggcaagaccgagctcgccaaggcgctggccgagtccatctatggcgatgaaggtgcgctgctgcgcatcgacatgtccgagtacggggaacgccatgccgtggcacgcctggtgggcgcgcctccgggttatgtgggctatgacgagggcggccagctcaccgagaaggtgcgtcgcaagccctacagcgtgttgctgctcgatgagatcgaaaaagcgcaccccgacgtctacaacatcctgctgcaggtgttcgacgacgggcggctcaccgacggcaagggccgggtggtggatttcaccaataccatcatcatcgccacctcgaacctgggctcggacatcatccagcgtcggctgaaggccggtggcgccgccggcgaggaatacgagaagaccaagtccgaggtgatggacgtgctgcgcggacacttccgccccgagttcatcaaccgcatcgacgagatcatcgtcttccatgcgctgggcaaggaggagatccgccatatcgtcggcctgcagcttgatcgtgtggcccgcaacgccgccagccagggcgtgacgctgaccttcgatcagaccttgatcgaccacttcgcggaggaaggctacaagcccgagttcggcgcgcgtgagctcaagcggctgatccgcagcgagctggaaaccgcgctggcgcgcgagatgctgggtggcggtatcggcaagggtgatcacgccaacgcccgctgggacgacaaggccgaacgggtggtcttcgagcgccaggagccacccgcgaagtcggctgagcctgaaaagcccgatgccgcggacgtggccgaggcaccgcctggcgacgcgagcaagcctgcgcgcaagcctgcgcgcaagaagaagtcagcggacggcgaatcttga

SEQ ID NO: 235629 - DNA, 555 bp, Klebsiella pneumoniae
atgcagcacctaatccgcttctgtgtttatgcaggcgggcagcgtccgtttgaaatgattgccagccagtggagcgcgattgactggcagcaaaagacgttactgatcatagctgatgtatcgaaaaacaagcgtgagcacctgatcccgctgactgaatcggcactacaggaattagcctcagtgaaagagctgacgaaggaaagtagcagtccctatatcttcccactctcgaccaacgccgagcgtccagtacgtaccgacagcctggctcgttccatcatgtatttccgtgcttttaatcctgagtttaaagttttcacggcgcgagatttacgccgcacctgtaaaacgctaatgggggaggcggggatcagtaaagagatccgcgaccgtatccagaatcacgctttgaacgacgtcagctcgaaacactatgaccgctatgattacctgactgaaaagcgcaaggcgcttgagatctgggaagagcgggttaacaactatcagcggcagcacgaaaacaacgttgtgaacttgtttggacggaggtaa

SEQ ID NO: 235630 - DNA, 846 bp, Klebsiella pneumoniae
atggatttaaatgaattatttaattcaatagaagctacaatgttggctcgattcaaagaatccggctttatacatcatagtggcgataaaggtgagaatcgagaggagtttttaatggattttctcaaaactcatttgccaaaaagatatggtgtgaccaaaggagaggtaattacaaaagaaggtttacgctcccatgctattgatatcataatttatgatgccgttaattgcccagtgctttatgcggggaaaacatcaatccttcctgttgaaggggtatatggtattatcgaagttaaatcaactctatcaaaaagtgagtttgatgatgcagccaataaaataacctcattcaaaaaactagcgccgagagatttaggggtaattgctactagagaatacgcaacagttcatagggcatctaggccatttggtattgtttttggatttaatatttctggtaattctctggattctctaaaagaaaattggatggcgcacagcaaggctgtacatgatgtaaattatttttgtaatctaatatgtgttcttggtaaaggtgtgcttcgttatgaaaaagttaatctaacaataggggaaaaagatttgctcctagatacagatgagtttgttaatttggttttgacggcgcataagcggcgggtaaatagtgaggaaaatgatcaaattgttttacgtatagttaaagagggtatggaagaccaatcttttggccgtttttttacttacctactaattatgcttactcgaatgaaattgaatgttcctgatatcgggcgatatatcgatccaaatttgccattgtccatcgtgagagagtaa

SEQ ID NO: 235631 - DNA, 573 bp, Klebsiella pneumoniae
atggacattataattactattttatttctatgtctggctattttctctgcagttgtttacttcaggtcgcagggaaattcggtaataaaatttatcaaaggtatctttgcatttagcatcatctttagagctattgatgtttataaaaatgaagaccaaatagctgcatttattatggttgcggttgttttctgtctttcttatcgtcgatttcagcttaataaagccgctaactcccccctatcagtaataaaaacgaaaatcgacaataatgacaacgcgtttaaccatgaagaaacaaaggtaatttcatcaaaaaagaaactcacaagctctgaaaaaaatgagcttaaaaatatatcgtttggatataccgattcaagcaacaactctacttatagagaggttgacgttaaaaatgttgacgcagactacattactggtttctgtcactcacgcaggcagctaaggtctttctgtatagacagaattgaaaatagtgaaattgtagttcgcaatactggcgaattaatcaatgtttatgactggattgtccagctatgtgaggaatga

SEQ ID NO: 235632 - DNA, 894 bp, Klebsiella pneumoniae
atgaataaaagtaaggcaatctcaagaatagaaagaatattgaggaagttaaaggatggaacctttactgacagtgatatagatgtgctttttgtgacggctcgtgagttaccgactgcgaccaaaaatatttttgaaattggaagttttgttgctcataaccatcagagggatcaaggtttaataaatgatatgatgctgagaaatcacttgttattaagcttggggtttggtcgggataaacatgatgtaaaacctgagttgaatgaatatccgaagttcttaccattattaattaagctgcaattgagaatgtttaatgatgatcatttcaaaaaaaaattaggattgaaaggcgggcagattaatactgcgcgaaagaggcttaacaataaaaaatcttacgaaataaaaggcgatatctgtaagctaacgcaagatattggcgcaaatgaaaggcggatgattcaagaagccttgtcactattaaattgtgctgactcaattgaatatgatgttttgtttgatgagttaaaggatttgctaaaaagagaaatacccaatgtggacttaactccacttgatatcaacagaatgaagatggcgggcattttaatttgtttgttgaacaatattgacttttctttaatggatggggttgaagcaaaaacaacacttagcattaattccgatgaaactgtatatgtttacggtcggtattatattattcatgataaggagccatttaataaagtatctatcatgagcccagtttttcatgcgggatataaaacggaggagctttttgatgctcatgtgacgaatgaaaacatagatgctggggatgttgagtttaatgttgatttggggaaagtggtggtattgcagcaatag

SEQ ID NO: 235633 - DNA, 903 bp, Klebsiella pneumoniae
atggccagaattccagaatcctcatcgtgggaagaagagattgagcttatttccagaagcgagcgcgtttcaggaggcctggacggcgttgcaaaccggcccctgaaaagtctggcgaaccgtacacgctacctgaaaaagaaagccgatgagtcagatgagcttgccgctgaaaaagtcagtgccgtaaaaaacttcgctgaaggggcaatactggattcaccaagagatgagatactgcatggtgcttttcgactcgtctggacgggagaattcccaaaaattgttccggctgattcgtcacctaaaacaaccggtggcgtgggtgtcggcgcatgggcttatacatccgatgcggttattcgccaggaactgagttcacccgacagcgctaaactcgttggtggtataggatttgtgtcgccggaaatgttcggctacctgcacggtgtttctcctgatgccgtgccttactatcaaaaggctgtcgatgaaggacacgccagagggcttcccgtgcaactgacggggaaatattacgccacaacctatcctcataaagtcactttaccaggcgatgacgggaccgcttacccgggatgggtgactgcggggaatgatgcaaatattgccgcggaacctgaaaatcatatttatgcggctattcgactttatcccgactccgttattatcggcgacagtatgcagaactgcgcgttaatcggagactgggattcggatacgcctgtgattaacaataaccagcacattggttattttatttccggtgactcatcagacggttatattcgcccgcagctggtaaatcacggtgtgcgcaacttctttatcggtcgctacgggaatggcgtggctttgttgaataaatcgaacttttgctga

SEQ ID NO: 235634 - DNA, 189 bp, Klebsiella pneumoniae
atgagtgcctatatccgcatcgttctggctctggtgatagccgccagcgtttacgggttatttgtgccaatcctcatttcaatgaaggacacggtagccgtcgcatcaggcgttgcactggcgtttctgaccccgccatgcatctacgcaatttttaagggtctcgttattcccaaggaaaagaaatga

SEQ ID NO: 235635 - DNA, 285 bp, Klebsiella pneumoniae
atgcaacaggatttcgtcagggttgaaatgccagcgctttactgccaggcggatgctcagtggattcaggagcagttattgagattgccttcgtcgctgcgccggaaaattgccctgaagtattcagagatttacgaaattgagtttaacgccgagcccgtttcattccgacaggagaatcgggcaaggcatgaagccaatgtaaggcttcgcaggttcgtggatgcacacggacgcgcactgcagggttacacgacccagccacccctggccggatcacagtaa

SEQ ID NO: 235636 - DNA, 966 bp, Klebsiella pneumoniae
atgaaaacggctgaagccgcaaagggccactggcccatgatttttgagcattacgggctgccgccgatcaccgggaaaaatcattttaaaggggagtgcccggtatgcggctccagggggaaattccgcgtcgatgatcgagacgggcaaggtacatggatttgcgtatgtggtagtggcgacgggatgaaactgcttacccagaccttgcaaaaaagcttctcggccatttgtgcggaagtggatcagctgattggcaataccttccggcgcatcgatgtaccggtaaccagcgatgcgtcgaatctgcggaaaaaggtcatcagaaaattttcgaagctggtggccctgaaggggaccagcgccgccgattatcttcttaaccgcggcattactcgcttacccgttgaagctgtgcgattcaatgaccggcagcggcatgcaggaaaggtgttccagtccctttatgccttggctacggatgataaaggggaattgtgttacctgcatcagacgcttcttgatggcgataagaaagcacagatcggcgtaagcgccagaaagcttaaatcgctacaggaagataactatctggatcatgcccgttcggtggccattcgcatgtttcccgtatcaacaaccctcggaattggtgaaggcatcgagacggcgctttcctgccatcaggtttatggcgtcaatacctgggcggtgattaacagcggcttcatgaagaaattccgcgtaccggctggagtgaagattctcatcatttttgctgacacggacaaatactcagctaccgggcatgccgcggcgttcgaatgtgctcatgcaaacctgatggcaaaaaacgacctcgttaaagtttgcatccgatggccggataacggggatttcaatgattttctcatgaacggtgatcaggttcgtgagcaggtcttttttaagaaggtgaccgcatga

SEQ ID NO: 235637 - DNA, 312 bp, Klebsiella pneumoniae
atggcaaatcgtatgcaagacaaagagagcatggccggaataacctggctggctctgctgatcattgctggttggggcggtctggtccgattcctgatggatgtgaagcagggtaaagcgaaatggagctggataaatgctcttgcgcagatcgtcgtttcggcatttgccggggttattgcagggttaataagtatcgaaagcggggcaagcatttatatgattctggcatctgctggggttagtggtgctatgggttctgtagccctcacgtatttctgggaacgaattaccggagtgaaagcacaatga

SEQ ID NO: 235638 - DNA, 204 bp, Klebsiella pneumoniae
atgatggagcatcattttacgtctattctggaccggctggacattcagtttcaggatatcctggcactcgtgcaaaagattgtagtggcttacaaacggttctgggagatggctgacccggagctggtaaattttgcgctgaatccctgccccatgctgtcaaagcttacttggaatgagcgccggaagtatctcggtgattaa

SEQ ID NO: 235639 - DNA, 480 bp, Klebsiella pneumoniae
atgatgattaccgctggatcccgacttaatagcctgtgctatgagtttttcatcgaatttgcacgatatgagttctgcctcaaaatgacgggttttacgcagggggacggggcagcaaaggccaactgggatcgctatgcggctgaggttgaggacatcgtcgcttcgcccggaaccacagaactggccggcgctattgactacattctgagtcatcctcccaaaaagcagatcgtcagaaacggtgaactagcctgggatgaaagccccgtacagagcacaagtaaggcgcagctggtcctgctgttaatacgcagaatacgaaacaaccttttccacggcgggaagtttaatggtcgctggtttgagcctgagcgaagtgaacttctaatgcaccacgcgctgattattttaaaggcctgtgctatgaaccatgcggctgtcagtgaggcttataactgcatggatgtatctctatag

SEQ ID NO: 235640 - DNA, 318 bp, Klebsiella pneumoniae; identical to SEQ ID NO: 231900

SEQ ID NO: 235641 - DNA, 222 bp, Klebsiella pneumoniae
atgaatacccagaagcttttagatacatacatgttagttggggccggtctttctcgcgtcaaatatgagattttctcaggagatgaagggtcatatgcgtttattactatttatgcatatgaacctcatttccatattaagggctatgattctttaaagttagacgacgctattgatgtcagatctcagatcgaaggacattttgtagataactaccagtag

SEQ ID NO: 235642 - DNA, 2181 bp, Klebsiella pneumoniae
atgagcacatataaaaccggcaacccgctgggctctgcggctgtaaaggatttatttgataacgccgagaacctcgattttgcactgaacagcctgacggccttgatatggactgaccgcctggggaaagttcggccttcattttttggaatggagacatcatttctcagccagatgtccagtcaggagagtcggtttacttctcagctggccgatcaggatacgcgatttaatacgttcatcgcttcatcaggctatgacattattggcgattacacggtggggactattccggaaggaaaccccctgaccatcaccgagtataaccagctcattcgttataacaacgaactctacaaactcacggcagcgactgatatcccgttcacggcttcgggtaaaacggacgaaacctggactgctacagactctgcacattttgtatctgtcggtgatgctgctcttcgccaaaacctgggttcaagcgacggcacaaaactcatcggcggtctgccttttgtaactcctgagatgttcggctcaagccggggtgatataacccacgatgaagcttttcggctgatgcttgctgcggccgcggtgcatccaactcgaacggcatgggcgcctggtgattatgaactgtttgatacccatattccgccgcagggagtaacactcatcattgatggcgttattaagcataatcccgtcggtgatttcacgtggtctgaaagtaatcgacgttctgattactcattatttctggttacagaaagtgatatagccattaaaggttcagggagaattgaaaataaatatgaggctgtgtctgtagatgcaggtggcgataactttaaatttgaaggggtaacgatttctaatcctgaccgttcgaaatcggttgggttatcaatttacaacgtatctaacgtcagtgtgttgaattgcctgattgcaaataacggcagcaaaggaacatatgtaaatagttcgagcgcgggaattaccgggcgctacggtaatggtattgatagcggaggtatccgggggctgaccgttagcgggctttcactgattgataacggcggaaatgggttctggtgttacggtgtcggggatttaaccttcacgactaactggtgcctcatgaatggtgtatccgggatgcagtatggcccacatccggattatgatggcgtgaacatttcatacaacatctgccgtgaaaatgctgcggacggtattgatattaactacaccggcgcttcgccagtcccgatagcaggcgtttttaacggtaatatttgccgacgcaacggtttttttaattctgatacgacgaaacctacagccgatggctcaggtatcaccctgcgtaatgtgaccgattatatctgcgcagacaatatgatacgggataataacggcgtaggcatttattgtacatttgcggctgatgcccatatccatgataacgtcattatcaacagaataatgttgtctgccggtatgtatcagggcttcgtgtcaacggatgtaaacatccacgataaccggattattaccaaagggactgcctatcaggaaggcggctctatgcctgtctcacgaatgtcattccacagtaacaagttatttagttctcaggcccagtcggtatccattccgagcaatacacagacggacagaacctggaaagacaaccatcacgtaacgcctaacgtcatcaacttctggttctcagttaaagatgacactgtgcgctatacgggaagcacaggcagggcggtttacattaacgccaactacggcaaatttcgcgacgttaccgttaacggcgcaacgtcagacgacctggtttatgttgatggcggtcttaaaaacatcttctccgggtttacggcaaataacaccggaaccgggagggccgtatacaccaataacagcgctcgtctcaagttcgcggattcgtttatccagtgcgctgcgggtacggcattattctgctatgccggtactaccgttgatctggatagctgcgatgtcatcggcgctaccgccataagtgcgccactgccagcatccggaagtgccgcagagataaagaaagctggtacgaactttataagcggtacggtcagtacagccaccccggttaaacaagttacgtattcatag

SEQ ID NO: 235643 - DNA, 279 bp, Klebsiella pneumoniae
atggcatttaaaatcacgaaagagttagaggcgagtctggtatcaaatggcgttgtaattggctatcaggcccagagcgcggagctaatcatgacggttaccagcgtttcggtttacccggacggaacaggaacggcatacctggaaaccacagtgaatgggtcatctaacggcgatgtgcgctcattcccgataacctggctgaatggagatattttcagccaggcgcaagcgcaaatcatggggctgggtgagttttccggggctgcaaaaatataa

SEQ ID NO: 235644 - DNA, 258 bp, Klebsiella pneumoniae
atgtttacaatagagaaagaagttgcggttaatcaggtaactgtcgatggtattgcggttggcactgcgacgcttaaagtcatccttacatacaccatcgagaggatcgagcttgaaggggcgaacggtatcgctttttacactgttacatctgacgccgatgctgagggtgcgaggaattacatcccattcacctattcaggaagtggcgatccgctgtctgaggccgaggtagcgctaaagttaagagttgaatga

SEQ ID NO: 235645 - DNA, 318 bp, Klebsiella pneumoniae
atggctaaacgtatgcaagacaaagagagcattgccgggatgtcctggctggttctgctgatcattgcttgctggggtggacttgtccgctacctgatagatgtgaagcagagcaaggcaacatggagcttgatcaatgctcttgcccaaatggtggtttcagggtttaccggcgttattgctggcctggtgagcattgaaagcggactgagcatttacatgatactggccacttccggaattagcggggcaatgggttctgttgctttgacctatttctgggagcgcctgacggggattaaagatgcaaatcagtaa

SEQ ID NO: 235646 - DNA, 450 bp, Klebsiella pneumoniae
atgcaaatcagtaataacggtattgcgctgattaagcgatttgagggttgcaggttaactgcatatcccgacccgggcacaggtggtgatccctggacgataggttacggctggacggggaaagtcgacggcaaacctatcaagcccggaatgaagattgacgacgaaactgcggatcgcctgctgcgcactggcgtggtgagctttgaccaggcggtaagcaaaatgctcaaagtctccgttacccagaaccagtacgacgcgcttgtgtcgctggcctacaacatcggtacgcgagcgctatccacatcaacgctgatgaagaagctgaatgcaggtgatgtgaaaggcgcagctgatgagttccttcactggaaccggtctggcggcaaggtaatggctggcctcaccaatcgccgcaaggcagagcgagaagtctttttatcgtga

SEQ ID NO: 235647 - DNA, 333 bp, Klebsiella pneumoniae
atgaaacagttttgcttggcattagctgtgatggtatccatgccgacgatggctgcaatccagtgtggcaattacataatgaccggcgaaggtatgaccgtgatcaatggtgagactgtcacatcacagaaagtaaaattcttggggaaggatggcgattacgcaaacatgaaaatggacatgggtcttatgcctgctcgcgatggtaataattacggctttgaattcgtgaagcgtaacggtaaggcgttccttaatgtccaacttctgcaaaacagtatggatgccccgaaaatcatcgggtcgttcccctgcagaaaggtgcccagctaa

SEQ ID NO: 235648 - DNA, 219 bp, Klebsiella pneumoniae
atgagcgatacaaaagggttttcaaatccctatgaagatgacgaaaacgccattatttttgagtttgatgaatgggggcagaatggaggcattcacgtgcatcattttctcgtattcaataccattcataaaacgatgacgctgcaaaagcgtactcttgatgccgataatctaccaagaggtgacggcaccactgaaaaatgcaagcttaaaaaataa

SEQ ID NO: 235649 - DNA, 231 bp, Klebsiella pneumoniae
atgagttatgtcaatgacaaaattcactgtcttgccattcagaaaggtcagctcggaggcactcagtataagttgagcaaagacgtaggtgttaaatccagtctgacctgctggcgctttccatccgccataacgtgtacctggagcaacttcggcaccatcccagccaaccgatccattgaacagctcgccggaataggtcatcagcgctgttgtcttcacacccagtga

SEQ ID NO: 235650 - DNA, 231 bp, Klebsiella pneumoniae; identical to SEQ ID NO: 181160

SEQ ID NO: 235651 - DNA, 156 bp, Klebsiella pneumoniae; identical to SEQ ID NO: 181161

SEQ ID NO: 235652 - DNA, 681 bp, Klebsiella pneumoniae; identical to SEQ ID NO: 181162

SEQ ID NO: 235653 - DNA, 420 bp, Klebsiella pneumoniae; identical to SEQ ID NO: 181164

SEQ ID NO: 235654 - DNA, 786 bp, Klebsiella pneumoniae
atgcaggaaaccaccaccttaaacgcccttgtgatgcgccgtgcacgtgatctgctggctgattacggatggccggtccataccgatgttggccagcgtgatccggtaaataaaccgggatggataagtatttatgtccgtctggacgcggccgctattgttcacctgcttcctttgctttgtaccggtggagtacccgcagcgctgcaaactgccatgacaaaaatagccgggacgccagcgcagattattttatccggcagccgctatgccgacgcgccgcaactgccggaggacggaacacagataacctttccctgggccggggaatggctgacagagcctgaaattcaggctgtgacggattgcctgtttcgtgccgtgcgggatatttcccggcaggtccgggaggatgcgcgccggattgaggccgcgctgaccacgcgcggggaaacgctgttttaccgccagacacgaaatttccgtctggttgtgaaggaaagtgatatgccctgctggctggacgaagaggacgacaatgtaccggtggtactggatgccctcctgaacaaaggcgcgcgctacagtgccgttgagtactttgttatcagcgacaaagtggatcagatcctggcatgtgggcagatatgtgatgtgttacggataccgggagagcctgcgcgccggtggatggatttatccctgttacatgaggtcatggcagaagcgcgcgcagaaatcacctttgtccgcagtgccctttcaacaatccggtcagtgtcgtga

SEQ ID NO: 235655 - DNA, 429 bp, Klebsiella pneumoniae; identical to SEQ ID NO: 181166

SEQ ID NO: 235656 - DNA, 192 bp, Klebsiella pneumoniae; identical to SEQ ID NO: 181167

SEQ ID NO: 235657 - DNA, 231 bp, Klebsiella pneumoniae
atgatcgttactattgtttcaccttccgcagaggctgtaaagccccgccgtcatccgcgcattttccgcgccgatattcccgcgccggagattgaccccgcgttaaaggcttttggccgccatatcgccagaagtcaccgcaaggggcgcggcgttcatatccccgcgatgaaaaacgccgcttttgggcaggtgctccgcacgctcgaactgaaacgcgcatttaactga

SEQ ID NO: 235658 - DNA, 564 bp, Klebsiella pneumoniae; identical to SEQ ID NO: 181171

SEQ ID NO: 235659 - DNA, 249 bp, Klebsiella pneumoniae; identical to SEQ ID NO: 181172

SEQ ID NO: 235660 - DNA, 234 bp, Klebsiella pneumoniae; identical to SEQ ID NO: 181174

SEQ ID NO: 235661 - DNA, 414 bp, Klebsiella pneumoniae
atgccttaccctgtctataaaaacggttttgaggatatgtataacaaggctatagctaataacaaaaaaatcattgttatgagtgagccatatgcatttgacattaatatcggaaaagcatataaaagagccctttggttaaacactgattttgacattaataaatataaaaatggcattactcacgacattcaaaaaagatcagacaaggacttatttgatataatttccggaaatccaaacactatgattattgctcgagatgaaatgttttctaaaagccaatacgctattgaaaatataccttactcatgggatggcaaacacattagtatccttggctctttgagtgccgagaatcactttgaaaaatctggtggattacaaaaagtgaaagactttattaacaaataa

SEQ ID NO: 235662 - DNA, 1941 bp, Klebsiella pneumoniae
atggctcaacgtgataatctgtatcgccgtagcagcggtatttatgttgtccgtattgcagttcctgcccgataccgtctctacacgggacagcgtgagattcacgcttcaacagaaacaaacgacatcagaaaagcgagagcgattgccgcaggtttattggttgtctggcagcgatgtctgggtgagtatcaaaaattggatagagaaaagttggtaagtagtgcgcctgctttggctggcgaaggaatgatcagcctcgctgaattttgcggtttaacgagcgcttccctgcaacaagtggcgcagcgactacttgatacgaatatcccacttttttggcttgctgatgggcgtcctgcctactatgtagaagatctttcactcgttgataaggatgatcctgaggcttctggatttatcatcgatagtgccattaacatcgggatcagaggctctctgagcggttatgttcagcccttggtttcatcacgtatattacgtcagatgatcgctggcgagccgctggatgcagaaaccgcatttaaatcttcagaggcttcatccaaagccgcttggttcgttgactttccaggtgtcgaaatctcgcctaattcattgatgattcatcgtgttcaagccgagcgcttacgattattttggctgtcacatagcaccgcagtttctccagtaatgccagagaaaccaaaagcaattacccctgtattattgccctcatcaataccggataatgaatatgtaaatcgtaaatactactcagtgaaaatgagcgagttatgtgaaaaatatattcgctacaagcgcggggggaaattcacggaaaaggcagagaatcgagtccgggaaggttttggcttactccttgaagtcatgggtgattcaacgcttgaaaaagttgaccgtgacttcctccgtaagtatgagagcttactaaggtcgatacctgcaaggcgcgatctggcgaaaataagatacaaaatcaatgatgctcatgaattgattgccaaggcaaaagagaatggcgaccctctaatgagcgataatgccgttcgtaaatatatgcgaattctcttcgaggctttccagtgggctgatggagaaggcatttttattaagtctcctgcgaataaattctttgcacctgttgaaaatgaaaagatggatcaggatttcaaatctgatttcactgatgaggatttaaacgctatttttggtatgccttggtataaacgtgggactgtcgataaaaacagtcaggggcaattccatcattatcgtgcatttcattactggctaccgctaattggtttttttaccggcgcgaggataaatgagttatgtcagctttatcttgacgatattaagcaggatgctgtcggtttttatttcttcgaaattagcaatgagcgtgcagatcagtcgctaaaaactattcattcgcgacggaaaataccgttgcatccgacattgatcaaacttggattagtccgctattgcgaagcattgaagaaagcaggccatgaacgtttatttcccgagcttccttaccaccctgtaaaaggatatggcgataaggcttcggactggtttaatcgctcgttgctcaaagagcggttaggctttgaaaaaggcagcaagaaatctttccattcattccgccacaccttttctacaagacttaaacaagctggaatcgacagcgagacgcgtgcgcagtttgttggacatatccgcggttctggcgagacagagaaccggtatagcaaagatcatccaccagaagccctctatgctgtgcttgagagcgttacgttagggctaccggaagttgctccatttgtttgcgaagatggtgtagatgcggtagctgatgcgctacggattaagcagagcaataaatcgcgaaaagaaccgcaatag

SEQ ID NO: 235663 - DNA, 333 bp, Klebsiella pneumoniae
ttgagaaccgtcgaaatactgcaatacaccttacgcaaaggaaccggaactgattttcacgccatcatgcaggaaatcagcgttcccctacaccagcgccacgggatcgatgttgtatcgtttggtaactcgctacatgactcggattgctactacctgattcgcgcctttgacagtgctggaagcatggctacggttcttgatgccttttatgcgagtgatgactggcgcaatggcccacgtcaagacatcattggcagcatagagacctgcacgaaaacagtgatcagcctcccgacggaaagtgtgaacgggctgcgggtgcaatcgtag

SEQ ID NO: 235664 - DNA, 513 bp, Klebsiella pneumoniae
atgcggttagtaacagtcgttccttacaataatcaatggcccgagattttcgagtttgaaaactcattattgctgatgactctcggcagggtgatttctaaggttcatcatattggcagcacgtcagtgcccgggttagcagcaaaacccgttatagacatactgctggaagtcactgacttaaaagaattagatcgttgtaacgaaaagatgaaacaagccggatatgttgctcgtggtgagaatggtattccaaatcgcaggtatttcaccaagggggaggagcagcgtagtcatcatgtgcacgctttcgtcagcggtgatatgcaaatcgctaagcatctagcgtttcgtgattacttgataaataacaaagaagtagcggatcagtatgccgctataaaacgtgctgcggcgctggaaagcgacaatgatattcatcgctatagcgctcttaaagcagacttcatcgcaaatcaccttcggttggctcttttggatttagatctatag

SEQ ID NO: 235665 - DNA, 1017 bp, Klebsiella pneumoniae
atgaagagtcgagaatgcaaaactaccgaagcagatcgcaaattctttaaagtctcagccgggattgactggctggacttaaagatcagcttctccagactgacccagcatcgctacgttcaggaagaattacttaaaatcaccggattaaaactctgggttaaaccctgcggtctacgtttctcaaagttgccattatgcgaaccacttcccggcagcaacatcaaaacgtgggtaaaaccggtgataagcagcactgacgatacttttcgaattcgcttccgagatctactggcaaacaatagcgggaagctggaagctgcactcgataaattgcaaaaccgtttcccatttgcttgtgagccgcaaatcgtgggagtcgaagttttctgcgatttctggcataaaacccggtcggttatcgctacaaatgcgatggcctatcggcttcaaagttccctgttcagcccgggaagtaaagtccgacaatacaatcccgtaactgggctaaatgttttccttgatgttcatggcgctcgtatcaatcctgaatggagcctgagaacaggtaacaagtgggacaacatctcgtggcaggtctaccacaaacgcactgacaacaatcagaaactacctgtagaagagcaacgcgctcgtgttgaagtcacgttaaaaggtgctgcgctcactcactactctcttcaccgtctgagcgacatgcagcgctttcgatttgaaaccctcgctcacctgttcaaatttcgcaaaccaattgagcctgaaatgatggctgacggtgatatgttccggttgaccgctatcaatgcggttcgtaaggtgaacgatgcaacagccgagcgtggattacattctttcaataacatcggacgtagggataaacgtagctggatgatggtcaacggtgacaagcgcctgcggaaggaaagctcgcatctggcagttgttagcgatctgcaaaacgccgtcaagggcgctttacgtcgcctccacgtttaa

SEQ ID NO: 235666 - DNA, 681 bp, Klebsiella pneumoniae
atggctcgtgataattctccaaaacagcgtcaacaaagacagcttgagcgtaagcagaaccggcgagcaagctacgaccgcattcttatcgtctctgaaggcagtaagaccgagccgaactattttagagagattcgcaccatctaccgcttacatacagccaatgtggaagtccgtcccagcgagctgggcactgcccccattcaggtggtgcaatacgctaaggaactgtttgaaaaaggtgaccgtcacaaggacatccagccgcgtgcgttcgagaaggtttgcgctgtttttgatcgcgacgatcatgatagctatttcgatgcgcttcggctggctgagtcactagatggcaagctaaggaacgacgccaagcaagctgtaacttttcaggccattgcctcagtgcctagctttgagctgtggctgctactccattatgaagatattcaggctccgctacatcgcgacgaagtaatgcgccgcctgaaacgacatattcatggttacgagaaaggcgcgggtaaagcatttgcaactaccagtgaacatttggcaaccgctactaggcgtgcagaacgattggcagaacgttttacagcggatactgaccccgaaccttttaccgctatcgtcgatttagtgaaactactgaccaaccttcacacaggaaaataa

SEQ ID NO: 235667 - DNA, 1269 bp, Klebsiella pneumoniae
atgttaatagaattccgtgttaaaaactttcgcagcttacgcgacgaacaggtgcttagtcttgttgcatccaaagacaagaccttgcaggacacccacactcaggcgacaggcattagtgccgcacccgcagttttgagaagtgcggtggtctatggtgcaaatgctagcggcaagtccaatctaatcaaagcactgcaatatatgcgtggcgttgtaactgagtcagctacggcgatgcaacctagtcagacgtttgcagtgcagcaatttcgattggatgccgtttctgtcggtcagcctagtgagttcgaggtcacgttcctgaacgacggtgtgcgctaccaatatggctttgccatgactacacagcgcatcgttagcgaacacttgttggtttacaagtcattcaagccccagcattggttcactcgccgctttgatgctgacacaagcaaagatatttacgactttggtcccggtctgaaaggcccaaaaaatctgtgggagggtgcaactcgcccaaacgcactgtttttgtcaatggcagtgcaactaaatagcgaatccttgcgcccgttgttcgactggttcttgaaccatctggtcatattcaacgagcaagcccaactgagtccacagatgtcgatcgagctgctcaaaaaggctgacgggcgcaaggagatctgcaacttcctatcttctgctgacatcagcattgctgatattgacgtggaaactcgtaaagtcccagggcaagccattcactttgacttaatggccggtaaaactgaagtgcgctcggaagagatggaagaacacaaggtgctcttccatcacgttaccgaacagggtaaggctgtttttgatataatggacgagtcgaatggcacgcgtaatctactgtttcttgctgcgccagtgctgaacatccttaacaaaggactgacgctggtcatagatgaactcgacaatagtttgcatactttgcttgtgcgcgagctggtgcgactgttccaccgccccgaaatcaatactggtggtgcacagttaatttttactactcacgatacgtcgctgctggatgcaccaaatctgttccggcgagatcaagtgtggttcgtcgaaaaagaccgtgatcaaacatcgacattggtcagtttgtctgaattcagccctcgtaagaatgaagcactagagcgcggctaccttatggggcgctatggtggcgtgccattcctagaccacactctggggctaaaacactga

SEQ ID NO: 235668 - DNA, 564 bp, Klebsiella pneumoniae
atggcgatttttggctacgggcgtgtttcgacatcgcagcaggatactgagaaccagcgtctggaacttgaacaagctgggtggacgttcgacttttggtttactgatgttgttagcgggaaggttccggcggtgcaacgtaaagagttttctgaaatgctcagcaagatccgcgatggtgaaacgttggtagttgcgaaactagaccgtctgggacgtgatgcgattgacgttctgcaaactgtcaggacgttggctgaccgaaatattaaggttattgtccaccagcttggcacgactgagctcacctccgctgcgggtaagcttctgctgtcaatgctggcagcggttgcagagatggagcgcgatcttttgattgaacgaactcaagcggggctgtcacgagcaaaagctgaaggcaagaagttgggcagaccttctaaaatcgcaccagaagcccgtagggcgattatagagaaaaagaatagcggaactagtatcagtgcgttagcgcgtgaatacggtgtttctagagctactattgccactattagcactgcttaa

SEQ ID NO: 235669 - DNA, 1170 bp, Klebsiella pneumoniae
atggaacagataaaagcccccggcatcttggcaggcaatattggtgaaccgataaaactagagaaggttgaaccccttatcggcttttcctctgcctatgcagctaaaggagatatgtgtcagctttggacgaaacacggattcacatctgatcaggatgtttttcatcaaatagctaaaagcttcatttcaacgcttgagcattacactcaaagagaagggaaattcgtaaagctgtctaactgtgaaatgcttcttttcattattcatggggatttatctgctgagatttggaatgataaagccgcagtggctagccgtattattatgaaaaagcaaattcagccaggaatggttgtttttgaaaaggaagttgctgatatattagatgtgcacttcccacttgtcgagttcaagcaagatgataaagtcatatgcttgtttagagaggggtggcgctttggtctatattttgatttaaatcgagatgacgatttttccgtggaggatatgaataaaaatcttggtgttttgcaccgagctgtgaagtataaaaatatatacgactcaatgttcgatcctgatactttatcttttattatcgctcgtggttggtttccttttgctgagttgatcaacgacggttttgatatactccagtatcaagagaaaaatgatgaagtgtttgataaatcagcaagccatcttatctctctatttgataaggatagaatggattcaatacgcagtcgttggaacagcaaaatttacctaaatgagaagatgcctatattagatgcagcctttagctcttattattatggaaactatattgcggcaataaaaattatacttactgaaattgaaggcgttctacaatctttttatataaaagcgaacttaaaaaaaggtagcagctcagccttaactgatttcgccaaagatacggcgattagaaaattgcaaagtaaaaatacgttgctctttcccgaagagtttttgctttatcttaaacaaaacacatattgtagctttgatttgatgacagggactgccagcgccaattccagacactctgttggtcatggtgccgcagcagcaaaaacttatacgaaagagaaagcgatccaagccatattaacttttgatcaaatcgttttttatttgtaa

SEQ ID NO: 235670 - DNA, 858 bp, Klebsiella pneumoniae
ttgaacgattccgctccgctcataaagccacgtcacaccttacaggccgtgcgtatcccttcttcagaagttcaggatttaggttttacttcattttatagctggctcaatagcttaggatatgacacgactaatcatagtaatcagcgagctgattgggctagaagtggtggctggcacttaaaggcatgtaagaataaggtcagtaaccaagaagatttctggttaatttcatttgatggaaaaggcggtgttttactttctgaaaagtcccaacaagactaccgaagtgcttatcgtcgcttgattaaagagggctatcagcccgcacgaatcgaagcaatgacgagaggagagctttactcgacttacaacgaggttagaggatcagcaggaagccaccctcacttaaaaccgagtcaggttgatcaagctgatttcgagctacatcccgatcagatacgggatatggtgaatagctcaatgattaagacctataacacatatagtcgcttcggccaggctcgcttccgtaatgcagtattgcttaattccttgaatgtgtgtgctgtaactggtgttgagtatcgtgccgcattggatgctgcgcatatacacccgcatagtaatggtggtgcgatgaaggtagctaatgggattgctcttcgaaaagatcttcatgctgtttttgatcgcggtgatatggcagtcaacccggaaaccctcacgattcattttagtgagcgagcaattgatagctacctcgattttgaaggacacgtaattcaaacagtgctgtcacttgataaaattgccttggtcgctcgctgggaagagttctgttctcgtgtaaagtaa

SEQ ID NO: 235671 - DNA, 1179 bp, Klebsiella pneumoniae
atgcctttaaatgatatgcagattcgccgcgctaagcctgaagctaaagcctatacacttggagatgggcaaggcttgtcattgcttatagagcctaatggaagcaaaagctggcggttccgctatcgctatgccggtaagcccaaaatgatctcgcttggtgtgtatccgacgattacccttgccgatgctcgctctcgtcgcgatgatgcccggaaacttgtcgcggaaggaaagaacccgagtgaagttcgaaaagagcagaagatcgcattgcaaacggaatccgaaagtgcgtttaaaaagatagctacagagtggcatcagatgaagtccgccaaatggtcggcaggatatgcgtcagatatcatggaagcgtttcagaacgacattttcccgtatgtagggacaagacccatcggtgaaataaaaccgctcgaactgcttaatgtgctgcgtaaaattgaaaaacgcggggccttagagaagatgcgcaaagtgcgacagcgttgttcagaagtgtttcgttatgccatagctactgggagagctgagtttaatcctgcagcagatctctcgagcgccctcgaagtacatcaatccaatcatttcccgttcctaaaagctgatgagctaccagattttctacgtgccttagacagttacacagggagtcggcttgtccagattgctactaaattactcatgattacgggtgtgagaaccatcgaattgcgtgctgcattgtggtcagaatttgatctagataacgctatctgggaaattcctgctgaaaggatgaaaatgcgcaggtcacatcttgtgccattgtcgactcaggcgttagatttacttaatgaactgaagatcatgacagggaactatcattatgtttttccggggcggaatgatccgaacaaaccgatgagtgaagcgagtataaaccaggttatcaagcgtattggctatggtggtaaagttactggacacggttttcggcatactctctctacaattctccatgagcaaggatttgatagcgcttggattgagagccagttggctcatgtggataaaaataatattcgaggaacttataaccatgcaaattatatatcgaatcgcaagtgcatgatgcaatggtacagtgataaaattttaaaagaaggttcaaactaa

SEQ ID NO: 235672 - DNA, 1092 bp, Klebsiella pneumoniae
atgtacgattatttaattgttggttctggtttttttggtgctgtttgtgcttacgaattaaacaagaaagggaaaaaagttttagtcatcgaaaaaagagatcatattgcaggtaatgcatatactgatgatcaaaacggaatacatgttcatcgctacggtgctcacatttttcacactaacaatcgtgaaatatgggattatgtgaataaattcgctgaatttaacaattttatcaattctcctatagcaaattacaaaggtaagttgtataatttgccatttaatatgaatactttttatcaactttggggggttagtacaccagcggaagcaaaggaaaaaattgaatctcaaacaaatggttattgtgctgaaaatgctaataatttggaagaaaaggcaatatcattggttggcgacgatatctataataccttaattaaagggtatactgaaaaacaatggggcagaaaggcaaaggatcttcctgcttttataattaatcggctacctgttagatttacttttgacaataactattttagtgatcgcttccaaggaattccaataggaggatatactaagttaatttctaacatgctttctggtatcgaagttaaattgaattgtgactatttcgaaaataaaaaagaactcgatttgcttgctgataaggtaatttatactggcccaatagatcaatattttgattattgctatggccctttggaatacagatctttacgctttgaaagtgagactcttgagttatctaattctcaaggcgttgctgttgtaaattatactgaatatgaaattccatatacacgaatcattgagcataagcatttcgattttgttgaaacttctcacacagtgattactaaagaatatccaatagaatggactttaggggcagaggcatattatcctgtaaataactccaagaacatggatatatttaaaaaatatagagaattagctagaggggaaagtaaagttatttttggtggtaggttggctgaatataaatattacgatatgcatcaagttattgcctctgctttaagaacagtagctgaattataa

SEQ ID NO: 235673 - DNA, 570 bp, Klebsiella pneumoniae
ttgtcatcaaaaaataataattcaatagatgtttcgttaccgattataaaatcgattacagataaaaaagcttactatcctcgagttaataacgtagtttgcgagcatgaaatttttttgaatgattccgattatgttatttctattggctcagggttgatgattacttctaagctcattgataaattcaatgcagagcagatgactcttttcgatgagcgcttttctctttacggtgttgattttagtttgttccggcgcataaagttgctgcgaacaaaaaacatacaaattaatattgagatcgctggagagttatgtcattcattatcacgtgttgatggtcgtgaatcaacttttagaatacgtgaaagatcaattgatgttgttttaacgaaaatcttatatccaactgaaaatgcttttataaattatttgtcaatatttaaagtacttattaaaactgtggcacgaatggatttacagggtttgagtatattatcttctgtgattaagcatagagcacacccaagatctatttcatatttattgaaaagaaagtataactaa

SEQ ID NO: 235674 - DNA, 903 bp, Klebsiella pneumoniae
atgaagcaatccgccggagtggtggtttcctggactggtcaggaggtgaaagtacagcgcggtgtggtgctgtgcgccgatgaaaaaataaaggagaaggatgcatccaccgatcaggctcctgaaaaagtcgatccgctggacgccgtcggtgtcccgttgctgacccgcctttcttctgaacgcacactggcggttcaggcggccctgttgcagcagccgcagaaagccatcgcgctgatggtctggaaactgtgtaattcggttttccataccacgacgtccgtcaaagagccgttctgcattagcgtgagtgtgtcgcattacgcgctgacccgtgaagcacctgacggtgaaaacagcgttgcgtttcaggcaatccaggctgaaaaagaacgccttgaagccctgctgccggaaaactggcgaaaggatatgaccaccttctttacgctcgatggcgcaaccctgatggcgttgatggctttctgcaccgcctgttctattgatggtgtacagggcaaggatgagtttggtcgtaaacaccagagttcgctggatggggtggaaaacgccatccagtttgaccttcgcgactggtggaaaccgacggctgataaccttttctcgcacatgaagcagccacacattgtacaggcactctctcaggccggactgactggcgcagcacaggacgccgcgaaaatgaagaaaaaggatgcctctgaacatgcagagcacttcctgtcaaaaacccggtgggttccggaatggatgaccagtgccgacaaccagaaacagcctgccgcaaagtctgaactcagtctggcaacgagtcagagcgatacagacgctgatgtcgaccacgtcaccgaccataacaacccggcctgcgccgcctga

SEQ ID NO: 235675 - DNA, 432 bp, Klebsiella pneumoniae; identical to SEQ ID NO: 181176

SEQ ID NO: 235676 - DNA, 729 bp, Klebsiella pneumoniae
gtgatcccctcatcccatgccattgtgaccctgaaacctgcacgccaggctgctttgcaggccatcatgttcgtggaagacgcccggtttcggggcgctcgtttgccctcgatgccccatgtccgcacgttcctgcgcatgctgaccggttgcagtcgaattaacagcgccgtcgcccggagtattcccggcctgcaccgtgatccgaaagaccggctgaataatctgaagcaggtggaagaggcactggatacgctgattgccagtcagggggaatgctccccgctgccgctgacaaccgatgttcaggctgaactttttccggaagtgattcacacccgaaccgatcggcggatgcagcgtgaaaatattgcgttcacccggagagttcggcgtgaaggcaaagagatagcacatacctggttgctgcgacagaacctgctggggcaggctatcacggagcttaactttcagtcaccggagaccgttaacacctggtaccgccagtgggctgacgagtttgacgcgcgggatctggagcctgccttctggaactggcgatcgcggtttgcctcgctggtctccctggactggctgcgggatgccggggagccgctgtatggtgtcatgcatgaaatcagcttcattgtgagagagacaccggagtctgtgcgtcaggcagaacgctggcaggtcccgaacaagctgacacaccggagccgcggatga

SEQ ID NO: 235677 - DNA, 291 bp, Klebsiella pneumoniae
atggcctcaccggggggacaggatgaacacacccgacacgtcggaacggcgtggcgccataaaagtgacggcagctttatcgccggcacggtgaaagcggcgcatcctgacaaggatgcagcaagcgtgaatttgaatttgcgtcaggatggaagcccgcagggcagagacagcctgctggctctgttcacgacagccgtgtccctaaagggacgacgcccggatcggaattcattgggttcgcctgtaaggataaataccggaagggataaaaagcagcatgccggatga

SEQ ID NO: 235678 - DNA, 324 bp, Klebsiella pneumoniae; identical to SEQ ID NO: 181181

SEQ ID NO: 235679 - DNA, 219 bp, Klebsiella pneumoniae; identical to SEQ ID NO: 181182

SEQ ID NO: 235680 - DNA, 348 bp, Klebsiella pneumoniae
atgtacttacacctcaccgaatcttcagcccgtccgggaatgcaggtgactgccgaagccgagcatgaatactggctcagtcgccagaaagcggcggtgaaagcgcccgctgaaatcgacgttcacgccttccatgatgcgctgggcctgatgtacccgctcaactggtcaacgagtgagaacggcggctgggagacgttcatgctgcaggaaatggtctgcggtgacgtggcagagatttatgcccgctatggagccagatatttccggctgcgggatgtgtgcaacctgagccatgcgcagattaaaacgcgtataaaggagggatttaacctgttccagaaatga

SEQ ID NO: 235681 - DNA, 147 bp, Klebsiella pneumoniae; identical to SEQ ID NO: 181184

SEQ ID NO: 235682 - DNA, 531 bp, Klebsiella pneumoniae; identical to SEQ ID NO: 181185

SEQ ID NO: 235683 - DNA, 480 bp, Klebsiella pneumoniae
atgaaaggaatggcactggcattcactctttttttattttccagttcgtcaatggcagcggattgttttgatatggcaggacgggattatcgaatagatccggatctgctccgggctatttcatggcaggagtcaaaatgggtggtgggtgccatcggaaaaaatccgggaacaggctacggtgccggactgatgcaaatcgattcgcagcaccatatgcaactgtcgcagtacggaattaaaccgcaaaatcttctgacagatgcctgcctgaatatttacaccggcgcatattatctggcactggcgtttcagaaatggggtataagctgggaggcggtcggtgcctacaacgccgggttccgcagaacggacaggcaggccatgcgacgactggcatatgcgaggaagattgaggttatctaccgggccatcaaaaccaataaaaatgcaggacaaccccatgctgttaaaaagtaa

SEQ ID NO: 235684 - DNA, 390 bp, Klebsiella pneumoniae
atggccagggtccaagcgtatgccagcgatgaagtggctgaaaaaattaatgcaattgtagaaaaacgtaaggctgaaggggcgaaagataaagatgtcagtttttcaagtgttgcctcaatgcttcttgaattagggttgcgagtttatgaggcacaaatggaacgaaaggaatctggtttcaatcaagctgagttcaataaaatgttacttgaaaatgtgataaaaacccagttttctatttctaaagttttggctatggaatcgctcagtccgcatatacagggtgacgagcgctttgatttcaaatcaatggttatgaacataagagatgatgccaaagaagtggtagaaagattctttcctgataccgatgatgaggaaagctaa

SEQ ID NO: 235685 - DNA, 690 bp, Klebsiella pneumoniae
atgtgtgcgacggatcgtagtcaaaatactgtatgcagtcaaactgtatccattcaatacttggtcgaaatgcttaacatttcatcgagtccttccttcattcgtaataatctgggtgagttagttcacacaagccctcttttcgataaacttttttttacaaacaacgatcgaaactcgtggttttcatccatctctgttgatgtcggggtggaattagttaaaacggaaatcagagctctgacaggtgggtctgcttgccttgttcaaaacgttcagataaatgatcaaagatggactgtatttattgagcgtatttctttaaaagaggagctattcagtaaatgggtatttatacaagatggggatgttcttcatgatcgttcaggaagatatgctacatttgcactaaaaatgaataagtacattgaaagtaagtatggagcgcccaattcagattgggcagtttttaacttatatgctattggttgttctcattccactatctctaaaattactggtgtgcaagaacaaacttcaaaaaatgtagtaaataagatcaagaaagacctgcagttttctgacagagaccaccttattatttcgtcaatttattcgttaagttactccagaattattcataatgtaatagatatactaaaaaacagtgttaatggtttgttattttaa

SEQ ID NO: 235686 - DNA, 513 bp, Klebsiella pneumoniae
atgatcgggcaaaacatcacattgacacgcgtatcctcagcacacgagttacacgccgaaaccaaggcagccctcggccggatagcagaccaatccagtgctctggtgctggtcgtcgatgcgccagagccagttatagcctctgcgttgcagaacaacgcggcaactaaaatcgacatatctgagctgctgtgtgaacgtctgttaccgctatcaagccgcgatcgagcacgcaaggcagctgacatcatcgctcaaatgcttaatggcgcagtatccgatgtggtatggctagacagagttcaggcgctgtttgagccatccttggaactggaccctttgcgccagctacaggaattagcgcgcctcaagcccatcattgccatctggccaggccaggttgccgaacagtgtttaaccttttcagtcccaggacgggacgattttcaatcttactcagcgaatgatctggccaacgtgcccatcattcactttaccgagcagaggggataa

SEQ ID NO: 235687 - DNA, 3726 bp, Klebsiella pneumoniae
atgaaaaagtacggagagctcattcagttcgagcccgtcacaaccatcatcaaactcaaagagtccgcagagcagcataaagcgcagcaattggtagcgtcttatgtcatttcggacaaaatgtcgcaaaagctggcggagatcatcattcctcagctgcagtttgaagaatccgttgataacaaatctctctgggtggttggtaactacggttcaggtaagtcacatttgatgtcggtgatctcggcggtggccgaatttccagaactggcacaattcatcactaacgacaaggttcgcgaagctgcgaacaagattgcaggcaagttcaaagttatccgcttcgaagtcggagcgagcaaaaaagcctttgccgatattgtcaccgataacctgacatcaggtctggccgagatggggatcgactaccaattcccggccatggataaaatctcatccaatcataaaccctactttgaagagatgatggcgctgtttcacgagcgctatcccgaccaaggtttgctgctgatctgcgatgaaattctcgattacttgcgctctcgtaaccagcagcaactgccgctggatatggcgatgatgcgcgtgatgggtgaagtgatcgatggcacccgtttccgtttcatctgcggtgtgcaggaagccattttcgatagcacgcaactcgcattcgcaacccaagaagtcaaacgcatccgtgaccgggccgaacaggtgctcatcacccgtgacgatatcaaatatgtcgtcgccgagcgtctgctcaaaaaagatgcccagcaactgcattggatccgcgagtacctgcagcaattcaccccctgctttgaccgcatgaacgaacgcctcgatgagtttgtgcgcatgttcccagtgcaccctgactacatcaataccttcgagcgcgtgcggggcgcgggtattgagcaacgccaggtactgcgtagcctgtcgcggcagatgcaagccttgatggagcaggtggtgcctaccgataagccaggtgtgttttcttacgacacctactgggatgagcttagaggcgacccgagcgccaaaaccaacccggagatcggtcaggttattgaggtcggtgaaaccctgtttacgcgtatcgaccaagcctatcccaccgctacggagatcgattttgccaagcgcttggtagccggattggccatccatcgtttgtccgtgggcgatgtctataacgagatgggggccacagctgccgaactgcgtgattccctttgcctctatctacccggcattgagcagttgccaggggaaaagagcacaaatctaaaaaaccatatcgtaacggtactgggcaaaataagaaaaaccgtcaacggccagttcttctccaagaacaaggccaacgatcaattctttttggatttgaaaaagaccgaagattttgatgcctatatcgaaaacaaggtgcccttgctgaccgatgacagccgtaatggtgcttatcgtgaagccatgctgcagatcctggaggaaactgatacccagcagcctaatattcagatgtggcggcacgagctcaaatggttggatcgtaacgtcaaccgcccaggctggatgttcctcggctctcctaatgagcgcgagacagccaaaccaccgctcgactattacatgtactttattcagccctataacccgcccaagctgaaaaaagagtttatccgtagcgatgaagtgctgtttatcctgcaaaacgccgacgccgagtttgatcgttgcttgaactactacgcagcagccatcgacttgcatgcttcggccaccggtaacgccaagaatgtctacaaactcaaggccgaaggttatctcagagagatgcagacctggctaaagagccacttcaaggatgcctacattgcccaatacgatgggcaaaacaagccgatgatggactggatcaaaggcacctcggttcgcagtatttccgggcttggcgatagccaaattggcagtctcaaagatatcttcgaagccgttgccagccacattttggccaaccactttgaagcattagcccccgagtatcccagctttagccaatggatcacctacgagaacatcgaaagcgcagccaaggatgcgttaagtgtggtctctggtggtgcggccaccaagcgcgccaatgccgtgctcgatgcgttggaattactggatggcgataaaatcgctccgctgcaatcgcgctatgcccaagccgttttggccgtattgcaaagcaagcagcaagggcaagtagccaatcaggccgagttactagaggccatcaactcccgcctctactttaagcccgatagcttccgcctggagcccgaatggctgctggtactgatcgcctgtttggtttacagcggcgaattagagttagtggtggtaggccataccctgaccgccagtgatgtggttaagttcaagtccctcgcctttgatgtgctcagagactttaaacatatccaggcgcccaaggattttaatataaccgccttaaaagccctgctcactctgctggagatgaacgatggcctagccacctcaatccagcaaggcgatgaaggcgtggtacgtgaaatgttaaagcgcaccgaggcgctgattaacgagctggttaaggggcagcagagcgttaaggatcgcttaccgctgtgggggcaatcggttctggaagagagcgaggagcagacgctctccacccagctgagcgagctgaagaactttttggaaactattgcgcgctacgataaacccggcaagctgaaaaaccttaaggtgacggcggctgacatcaccacataccagcagatgctgcaggcatggcacaactttgtgcagcttaaaaccgtagtgggagatctagcccccttatgcgcctacctcaaagaggcgcagctggtactgcctgaatcacacgcttggcaagagcaagtcaagcaggcgcgtgatgccctacgccaaggtttggccaatccgtcacagcgcggtgatgacagctttaaggccgcgcagctcagcacattgtcggcactgaaaaccgactatgccaaacactatgttgagctctatatgcgagcgcgtctcgacggcaacgaagagaagaccaaagccaagctgttgaatgacgaacgcttggctgagctggagatcttaagcggtatcgccttgctcccggccacacaactggctgagtggcgtaaagaagcggcgcaattgcaagccgccaaacccatcgacccaaagctgctggcgatgaatgccaaccccatggagttaaatgctcgccaagagagcggcaaggcgccagccagtgaacaattaaagagtctggaacagcggcttgacagtctgcaaagcgattggctcagtaacctgagcagcttgctggatgacccctttattaatatggatctgctcaaagccgaacaggcacagttaattcgtgattttattcagcaagggcagctacctgacccactggattccgcctttgtccaggcggtcaatctggttctcgccgggttggaggaggtgcgagtcagcgccgccgaactcgtgcatgcactcggtcaaggcttgcctcaggggcgtgacgaaatcgctgagcgctttaaccgcctgctgaacaaactctgtcagggcaaagacatcgcgaaagttcgcatcatcatcgattaa

SEQ ID NO: 235688 - DNA, 2793 bp, Klebsiella pneumoniae
atgcagcaagacagcttattttccagtgatagcccagaacaggatcaaacggcaggcccggttacctgcttgggcaaaacttttgccaacgatcaggctcgccgtgattattttttagctctgctagcagaaaaactaaaagatcccgaatttcgtaaaatcgaaggttttcctatcggaagcgatgaagatattttaaatcttagtgatccaccatattacactgcttgtcctaatccttggattggcgatttcattgcggaatgggaagcgcaaaaaccagcttctgatgaggaatatcatcgtgagccatttgcggcagatgtcagtgaagggaaaaacgatcctatttataacgctcactcctaccacaccaaggtgccgcataaagccatcatgcgttatatcctgcattacaccaatccaggcgatattgtctttgacggattctgtggtacgggcatgaccggtgttgcggcgcaaatgtgcggcgaccgagaaacagtcgcatcgctgggctatcaggttaaagccgatggcaccattctgcaggaagagattgacgaaagcggaaagacggtgtggaagtcgttttcgaagttgggagctcgcaaagcggtgctgaatgatttgtcaccggcagccacttttattgcatacaactacaacacgccggtggatgtgaaagcctttgaaaaagaggcgaagcggattctggcagaggtggagaaagagtgcgggtggatgtatgagacgaagcatacggatggacgggtagggaaaattaactataccgtttggtcggatgtgtttgtttgcccggagtgtgcgaaggaagtagtatttacagaagttgcagttgataaatccagcgaaaaggtgctggaaacttttaattgtccacattgctcaactattttgtccaaaaaaagcatggatagggcatggattaccaccattgatgaggcaacggggcaaaccataagacaatcaaaacagaagcccgttctcatcaactactctattgcaggtcaaagaagtaagtttacaaaaaaattatcttcggatgatatggttctgattcaaagaattgagcagaccaaaattgattcatggtatccttctgataggatgatggagggaaaagagacacgccggaatgatgtcattggattgacgcatgttcatcacttctattcaaagagaaatctttatattctttcaaaaattagagagcagtgcaagaataataggcaagcactactaatgttcaactcacaattgattaatgtgagcaaattgaatagatatcgacctggtgtgtcattcccatataatccgcttagtggaacgatgtatgtaggttctcaaatatccgagtcaaatgtttttgttgccttagagaataaaataaaaaaactggtagaagcatttaaatgtatctattcgcaatcacttgtcagcacaatgtcaacaacagaatttactcagattgatgttgactatatttttattgatcctccatttggagctaacctaaactattcagaactaagctctttgtgggagtactggttaaacgccagaacagacaacaaaaatgaagctatcgaaaattccgcacaaaataaaggactctctgagtatcgccatttgatgcttgaatgttttaaaaagacttattcattactaaaaccaggtagatggattactgttgagttttccaatacacaagcgtcagtttggaattcaattcagtcagcattaaccgaagtgggatttattgttgcaaatgtttccgcgttagataaacaacaaggaagtttcaaagcagtaactactcctacagcagtcaaacaagacctcgtcatctccgcctacaaaccaagtggagattttgaagcccgtttcaccacagaagctgccaccgaagagggtgtttgggatttcatccgcactcacctcaagtatcttcccattaccaagtcacagggacaggcacttctttccatccccgagcgagatccgcgtattctgtttgaccaacttgtcgcctactatgtccgtaaaggctaccagctgcctatcgacagcaaggagttccagatggggctttcgcaacgtttctccgagcgggacggcatgttctttttgcccgagcaaactgctgaatacgataagaaaaaactgatttctggaactttaatacaggcgtcactgtttgttaaagacgaagcatcggctattgactggctccgtcagcttttaaagactaagccgcagactttcgctgacatcaatcctcagtttatgcagcaattgggaggctggagcaaaaacgaggcgcaacttgatctgcgcgaactgctaagccaaaacttcctttgctatgacggccaggatgaggtaccggatcagatccatagttacctctccagcaactggaaagagctgcgtaacctggcgaaaaatgatcccgccttgataaccaaagccaaagatcggtggtatgtacctgacccgaataaggccggtgacttggaaaagctgcgagaaaaatcgctgcttaaagagtttgaagagtacaaggccgccaagaagaagctcaaggtgttccgcattgaagcagtgcgggtgggctttaagaaactctgggaacagcaggagtttgccgccttgatcgccgttgccgagaagttgcccaacaatgttctggaagaggatccggtactgctgatgtactacgaccaggctgttaccctgagccaggtcgatgccgacgatgagtggtaa

SEQ ID NO: 235689 - DNA, 2799 bp, Klebsiella pneumoniae
atgtggcaggtaggagactgggcttggagtcaggcccatcaacaatatgtcaaagtgattgaaaccgctggcctctggggccagcagttttatcgtgtctggttgcagcaacaagatgtggtgctcaaggtaccggctgtcgatctcagcctgcgacccgcacagcctgtggtgacggctgaggcattctgctatttagccactgccgcgaaaattgccaacgctcagcaagaagacacgctgttagcaccgatcgaatcaaatgtgatcccgctaccgcaccagctcaaggcgcttaccaaggcgatgagtaaaaaacaggtgcgttatctgtttgccgatgaagtgggcctgggaaaaaccattgaagcagggctggtgatgcgcgagttgaaattgcgcggcttggccaagcgtattttggtctgtgctccaaaagggttggtcagtcagtgggttagcgaaatgcagacccactttaacgagtcatttcagctgctgctgcccggtgagcaaaaaccgcaacatgagcaggagaatatctggtcacgccatgatcaggtggtctgtccggttgacagtatcaagcccatcgaaagtcgcaaaggctggtcactcaaacagctcaatgagtacaacaagctgcggtttgatgatctgttggccgccgggtgggatctgatcgtgattgatgaagcccatcgactcggcggcagtactgatcaggtcgcccgctacaagctgggccagggtctggccgaagccgccccctacctgttgctgctttccgccaccccccaccaaggcaaaagcgatgccttccatcgcctgatggcgctactggatgccgaggctttcccagatgtcggctctgtgacccaagagagggtgcaaccctttgtggtccgcactgaaaagcggatcgccattgatggcgaaggcaaaccgctgtttaacccccgacaaaccgaactggttgcggtggcttggcaagatcagcatgccttgcagcgccatctctacgaagaggtcaccgagtacatcaaggaaggttacaaccaggcgcaagccaaacagcaaaatgccattggctttttaatgatcctgatgcagcgcttggtgagctccagcagtgcggccatcgcccgcacccttgctcgtcgactcaatgtgttggaaaacaagcgggttgaagaggaattgcccctggcctttgccgatgagtgggccgatctggatggtcaagcccagttggatgagttattagcccagtgccaagcctcgctggagaatgagaagaatgaggttcgccgcctactggcgttagcggagcagtgcgtcaatgccgaaaatgatgccaaagccgaagcgctgctcgattggttataccgactccagcaagaagagggtaacccacatctgaagatgttggtgtttaccgagtttgtaccaacccaagagatgctagcccagttctttattgaacgggggatcagtgtggtctgtctcaacggctccatggatctggcagagcgcaaaaaagtgcaagccgcctttgcaggtgacatccgcatactgatctccaccgatgccggtggcgaaggtctgaacctacagttctgccatgtgattgtgaattacgatatgccctggaacccgatgcgcatggaacagcgtattggccgcgtcgatcgtatcggccaacggcatatcgttcgagccctgaatttcgtgctcgaagatactgtggagcacagggttcgtgaagttctcgagaccaagttgcagatcatcctggatgagtttggtgttgataagaccagcgatgtattggactcctccgccgccaatcatctctttgatgaattgtttatcgcctctatcacggatcctgcgttaatggatcaggagctagccaaagccttggctacgttacgagacggagcggtcgataagcgacagcaggatgcgctgtttggcggtgatgatcccttatctgccgacgactatcgccaagccctgaaccacccgctgccttattggatacagagcatggttgccaattacttgagttggcaacgcagcatgcagcaatccgcggatttcattgaggatcaggaaggtggacataccctaatctggcctgatggcgcagcatggagtggcgtcacctttatgggtaaagaggcccagcaacgacccgatctgacccatctcacattggaaaaccccaagatcagagggctatgtagccaattaccggtctggagtgaagcacaaccgatcccctgtgtcagggtaaagtcgttaccggcaggagccaatggttactgggcattgtggagtatccgcctggtggcaggtcaagagcgccgctgccaatacatgccggtctatatcaagccgaatggtcaatattacgctaccgcgtcgcagcgagtctgggatgcggtctgtagtaaagagttcgacatcttgcctcaagagttggccgccgcaccggctgaacatcagtcagcctatgccctgctacatcaggcagcgcaacaggaaggcaaagcgattttcgagagcatgttggcagccactcaaatcgatttagataaccagaatgagaaaggcgaatactcatttaacgcacgaaaacgggcgatagagcgcgttggattaccagaggttcggcaataccgtttgcgtcaacttgatagtgaatatgcactgtggcgtcaggagctggacaaaaagcgtaacgcgattccggacatgatgctgcacgccgtttttgaaattaaaggatga

SEQ ID NO: 235690 - DNA, 1968 bp, Klebsiella pneumoniae
atgacttggcaggatgatgttattcaaaaagtaaacttggacggatcgtttgtttacatcgttaacgatcccgatggactactctttgagccaaaaatatcggctgccttgcaaacccaaaatgccattttatttgatgacgaagatcctctcgcacttcgcctagcgtatgaagcatggagaaaactggccagaaaaaactcctttgtgatccgtctagaccagaaaggagagctatttatcccctatgacattcaggctgaatcaaagcaaattgacttccatttgtctgagttttttcaggacattgatctatcagcactcagattgctcccagcgtcgttattccagtcggtcatggatgccataaaactatttacgcctgggaaactgagtcagcagtccagtctcgatttcttacttcgccatatttatcgtatagctcccgagacgatccagactaacacagatctggttaggctattaatcagaaagcattatgttggcattgagatgcctacgcagattgaagatcggcttattcatttgcttactcttacgccaaaatttaaatgttgggactttaatacattagttccgaacagaagtattttttttgatttcttgcagcaacaatgggaaatgtatctgcagagcgaatcactcaacaccattgcaaatacctcatggccaagtgaacaacttattgtgccatttgctgatagtgacatccgtgtgtttattgacaacttattcgccgaaggcattatcaagccggtgaaagcagatggcctgcccgctggacattgggcttggtttggcattgctaaagagccggagataactgaacgcgaacggataagtctcttattgaaaaatgccaaggcttgctttgaacaatgcgaactagaaagtatcaatactgaattctggtttgagcagtcacactcgctcgggattatgaatgcattgttttatgaaaacaaaaaacaacctcctgttgctgcgctggccgaagaaataaagagattaaataccactgcggattttctatttcaggaatggctacgtttaaactttataaagttacaaaccacccccacggttcgctatccggcaatgttgcataaagtccctgattggttatcacggcgcatggatagtggcaagaaagtatgtctactggttttggatggcatgggcgctcgacagtggccattattgcgtaatcacttgcagatgtgtgccaatatttcattggacgaacatgcctgctttgcttgggtgcccacaattacatccatatcacgacaagccttattctctggcaagaagcctttttcctttgcagactctttgctgaccaccagtaaagaggagcagctgtggcttgattattggcaagagaaaggtttagccaaacgtgaaataaaatatgcaaaaaaaatagagtcgttatcgaatgacgtatggcaagacttgataactccaccaagcgttaaagtagccgggttggtcataaactttattgatgagcaaatgcacggcataaaaaatggaatgtctgctttgaatatggtcgtggatggctggctaacagactggcatttcaatgaaagaattgccgaattattagacaaaggctttgaaattatcattacttcagatcatggcagccaggaagcgacggggattggatatatcaatgagggagtgaaagcagataccagaggcgaacgagtacggatctatcacgatcctgccttgcgtgacagtactgctcaagcctgccatggatctgtgataacatggcccggtcctgaactagggcttcctaaagcaacctacccgcttcttgccaacgcgaatagtgccttcaaaagcaaaggcgatgtcattgttggacacggtgggatcagccttcatgaggtcgtagtcccttttgtcatagtgaatagaaaacaatag

SEQ ID NO: 235691 - DNA, 723 bp, Klebsiella pneumoniae
atggttaaaactccaggcttctgtcgccatgttgaaaaagagtggctcgaacaatctcttcgttgggtagcaaacggggccagctctgcacaacttaataacagccttgataactttttaagcggctatattgtctccaaggaaaaccgccgtaaagcgcggaatttgctcacctcagtgtggactcaacccgtagatcaatatataaagaatttttttgataaaggcatcgaattacataaagatgctgaatcattttccttgcctattcattggggcatgttaattgcgagaaagccattttttgccgaagtagctcgctttattggtcgacaagcaagactaaataacacttttacttatgcccaagcttttcggcgcatgagtatgctctatggtgaaaccgaagccaccagtagagcgttaagtgccgtattaagaaccgtgatggaattgggcatattaaaacgaaacataagtccagcctgttattctattgttaatcaacgagtcagtataagtagtcctctggcaaactggctgcttgatgccttgctcatttcatcaagcaaagagagtattgctcttgatgatgccttgaatgatcaggcgctcttccccttccatcttgatattaacttatgcaatcttgatatgtcggcatttgaatgtctgcaacaaggaaactcaattgtaatttttaaaaggaatattgagtcatga

SEQ ID NO: 235692 - DNA, 708 bp, Klebsiella pneumoniae
atgaaacccgctattggatttaatcggcatttagagatggactggctagtccaaaccgcatcctggtcagcaaatggggttcacggccaagcattaaaaaataaaattgatgtattacttgcccccagctttgacagtaaagttgcccaagacaaaaccagaaatctgctctttgggatttgggattcggaatcaaagtccgtacccaaagcatttcatgacgatgcttgtagactgcttattgagcacagtgaggtaaatattgccattcattggggaatgatgctggccaagtatccatttttttataatgtggcatcgcagattggtagaatggctaaacatgaagggttatttatatactctcagttagaacaacgcatcaccgaaaactatggcgacacatcgactattaagcgttgcattcaatttgtggttagaaccttgatgaatttggagttgttatccaatccgaagcagggtttatatcagttgcgtaagccaatcacaattaatcatgacagtgttattgcgtggttagtcgaagtgtctgtgagagcagaaggaaactcaagcaaaagcatgtcagccatcagtaacgaccctgcttggtttccattcgatattaacttcaatgaaaacagactatcgtctaatacccgtctagatgttcatcatcaagctaacgatgctattgtttttatttga

SEQ ID NO: 235693 - DNA, 1071 bp, Klebsiella pneumoniae; identical to SEQ ID NO: 78944

SEQ ID NO: 235694 - DNA, 633 bp, Klebsiella pneumoniae; identical to SEQ ID NO: 197348

SEQ ID NO: 235695 - DNA, 1419 bp, Klebsiella pneumoniae; identical to SEQ ID NO: 197347

SEQ ID NO: 235696 - DNA, 432 bp, Klebsiella pneumoniae
atgaagattttttataaaacaagtgcaacgtcagtcggtggtcgtgatggcagagtagacttagatgacggttcgtttggcctcgatttagtcagcttcactaatgacagtggtaaaactggcgccaatccggagcaattgtttgctatgggttatgcagcctgttttgataacgctctgattcatatcgcacagcaacaaaaactcgagggtatttcgaccaaaacgtcttgtgctgttgggattggacaaaatgcgaatggcggtttttccctggatattgatttagatgttgaagtacgtggactggacaagacagcagcaattgaacttgtaaagaaaggtcacgaggtttgtccatattcaaacgcaaccagaggaaatattgatgttcgtcttcatgttagtatagttgataaatttgatatttaa

SEQ ID NO: 235697 - DNA, 1362 bp, Klebsiella pneumoniae; identical to SEQ ID NO: 224279

SEQ ID NO: 235698 - DNA, 264 bp, Klebsiella pneumoniae
gtgctgattggcttgctgatcgccgtgatcggcgcgtcgatggggccgctaaccggctttgcgctgaatccggcgcgcgacttcggcccaaaactgtttaccagtctggccgggtggggctcgatcgcctttaccggtgggctggcgatcccttactttctggtgccgctgctggcgccggtggtgggggcgattatcggggcgtttttgtatcgcaagcttatcggccgccttctgccgtgcgaatgcggtatcgatgagtaa

SEQ ID NO: 235699 - DNA, 579 bp, Klebsiella pneumoniae
atgcttcagaatatgcttaacccggaaccaacctcaacagggatccggtctggaaaccgggtgataggctactccgctgctattcgcctgctggataacggtcgctatgacaaacacctcgccgaaggaatggaaattctggcctgcatcatggaagcggtagaaagctgctggatcacgcttaacatcgagaagcaaatcatcgtctggcgctggttgcttgccgcagtattcattactgaggaactggagaaaaacggaactgtcgacgttccgaatgatactggcggtgttgatactgctgttatctattccagcaagcatggcgccattagcgtttacccagggccggaacgctttgcgctcgcaaaccacattgaggccggcgccattgagaagtacggacctgatgttggcccgcagctggcgctgcggatgtatcaggacatggttgttgctgatgaagaacacggcttcaggttgtcggctatgggccgggaaggtttcaaccttctgcatgacggctttatagaacaaatccagaccgaaggtgtgccagaagcaccgattatgcattga

SEQ ID NO: 235700 - DNA, 537 bp, Klebsiella pneumoniae
gtgaagcgccataagctcttcatcgagcggagcatatttgcggtcgaaatatgcctgtgcgtctttctccgcttcatcaggcaattcgcctggtccgaagagcgtgttataaatccacgccagcccgtttttagcatcgccagtggcctgccattcgatgattgcagcctgcataaccaggatatttttcccgatcagcagatcgagctgctgatagcgcttacggatatattcgttttgcgcttcaagttctgcgttgcgctgctgcgccttctccagcgcctctaccagcgcgaggacgttgactgggttggcttctttgttgaattcattgagatcagtgatatcgatatcaatctgttcaccttcatgctgagagatatcgataatctcaccatatggatattctgcgagccgttcatgcgccccaatagcattctctgctgccgctttaaggctctgcaccagttcggtgatatcagtcatggctggcctccccaagcacccagcgcagagccgcagcataatcgccagtag

SEQ ID NO: 235701 - DNA, 258 bp, Klebsiella pneumoniae; identical to SEQ ID NO: 181155

SEQ ID NO: 235702 - DNA, 1995 bp, Klebsiella pneumoniae
atgcttttctttctgtcatatccggggcttgtgaaatttgtcgggtctaccgtgcggttcacgatgattttcgaaacgtcggctgatgtgacgacagaaacggcaatgtcggtaaacgtcagggtgatcacgccatcagggacgacgaattatgccgcagcgtttaccaatgtcactaagataacatcgacactaatgcgtggcgaagtgacgtatgccattactggtgccgaaacgacgtttgccccgtttatccagttgaagtccacgacggtgcgaaccagtgctggatactttaagctggtagacatgcgcgccgatcttttggacgtcgtgacgctgggggatacgctgggcgaccagatggccagcttgcgcgagtctgtgctgaaatcggatattatctctgcattatccggctctgccagctattcggcgatctacacgattaagccagatggtactggtgattacacgtcattgaaaacagctattgctgctcatggtggcggcgcaactgataacgcacgcattttatatgctgtatatgaaggaatttatacagacttaaacacagtcatacctaagtatgtggatattatcggttttggtcagagggataatgtctggtttaaaggcgagctgccggatactgtagacccagcaacaataccgttaacccaaacgttctggatgaatgatacgtctcgtatcataaatctgaaaatcaccgccaaaaatatgcgctaccctatccacagcgactcgcttgcatatcctgatgcatctatcaagaatgccaagctgagtatcatcctgtgtcacatagagcactatggtaatgcaggtgctcaagcgtaccagaactcgatctcaagcggtgtaaccgtatggtcatattgccatgcctggggcggcggaatgcacagcggtgagacggtagaaagcgtggatactgattatctcagccccacgaccgcattctattcccacagtaacggggacttcgattcgccatgccggatcgatatcagagggggtagcctgcgtaaccgggatcctaacggcatctctgcattggcgatccagaacctcgggtcagggcaagttggccgttgcgacctgcatggcgttaccttccagggtatgatcagcattgacagcaatacctggcgcgctactaagctgcccagtcagtggggcaaccgcaactcagaaatgcaaatttacctgcatagctgctctcctgtggctgtgcgttcaactaatgattcacgggtgttacagcttatcagtatcgatactgcaaacagttcggtagcagtaagcgggtccgccgtgccggcgctgtttgggcagaaccctgttattgtcaaaggaggttccggctaccccgcgcgtgttctcagctcacactcggttaaaggggaggttacgggtggtctgatcggccagcgcctgggggattgtacaacgacgaacaaagtgctgacggtcactttcgatggcggttctccggtaacgttgacattggccgcaaactacaccgcaatgtctaatgacgctgttgtgtcggcgcttaacacactcctgaatgatagcgctggccgtgcattcagtgtcatcactccgtacaataatgaagcgcctgtataccaaagcgaccgggagaagattttaacgaataatactaacgtcgttatcctcaagggtacggcagtagcgttcaataactctaagttgtacgggaggcgtgctactaacagtgacaaccgtgccactatcgccgggattgcattagaaaatatcgctcccggagaacaagggcgggtacaggtctccgggtacatctaccgcacgtatgtcgcctttaccggtacagcgccgagtgcgttcctcgctacctgctcggttaacagcgacggcaccctgtcggctggtagcactaacccggttctacagcgtgttagtacggaaacttatgagatgatttaa

SEQ ID NO: 235703 - DNA, 3525 bp, Klebsiella pneumoniae
atggcctttaacccggagctggggagcacgtctcccgctgtgctgcttgataacgctgagcgtctggataagctggtcaatggagatgcggccaccgttcccgaccgcgcaggtgatccgctgtactcatggcgtggaatccatcaaaacctgatcccgctgagtcgccagtacatgacactggcggcggcgcaggcggacatcgcgaatatcccggtggggtcgacgacgtattaccgcagccaggacgatagcgcactggctgttgaggtcatgaacgttagcgggacgctgcagcctactggccggaaaatgctgtcacaacaggcctggctgcacctgatggctgattcctccagctctctgaaaacccctgttccggtgacattttctggcgagctactgaacggggctactggatggaatgggtttaatatttgtccgtcccagtattatggcgggtggtcgattcctgccggggcgacgggatataactcctatgtttcacctaaaatcacgctgacaccttcactcgccagcggactggcgggcaagcgcgtgttgttcatttttggcgtcacccattctgctgcgctcagaagcgcaattgaaaacccgtcaaagttagctccttacgcctggatcaatggggttgctgttactgatcctgctttacaggctattgctatctcagataccgaatcggtggtgctgttcgaaactgatatcacttccggcacgacggatattgctattgctctgcaatataaagtcagtgcgcccgccgcttcacagctgacattttttacacattccgcgttttaccgggtgctggatgcccggagctttatttctgcgctggatgcatggtcccgaagcaaagccgttccaccggtggatagtgggtcagtggtgatcatgcccgccttcatcgaactgtttaacggtgccacacgcgacgcagccacaggaaaaattacactgccagccggggccacgggttacaacacgtactatggccggttcgatgccgtccataacaaccgtaatcgcgccggtgaaactatccgcctggtagcgatttttaacagctctacgaaattcattcagaccctaagctcatacaccatcggcgtggcaaaaaaactggatggtattcagtcgactggtgcgcaggtggcagggtcagagcgactgcgtgtcattgatgataatacgttcatgatcagtgctgattacgtcatttcaggcgctgcatcggagctggtttctgtctattttcagctgaaagacagcacctatacggcaaccgcccgtgacttcacaccgctgtcggcatcctactttttcgtttctgacggtgattttcgtggagactcagcccgtattattaatcagcggaagataacgtcaggaaatatggttaattcgctgctgagtgtcggcggtgaggtttttaatgggggcgtgctgaataaggggaccagaacgctgtctgttcctgcgggcagttccgggaataattcatatatccagccatttattgattacagcagcctggtgaaatttcccggtgcgcggctaaaactgtcagtaatgtttgcaacgtctgatgatgtgattgtccagagccctgtttcggtgaatctgcgcgtaaacagcccggcaggtcagaataataccgctgcggaaatgacacgcgtcaaggctctgacgtctaaaatgctgctggctgaactggtctataccctgacaggcaccgaaacgaccctcgcgccatacctccagataaaatcctctaccctgcgtacaactgacgcagttttccagctggcagacattcgggcagagttcatggatatcaccgccctgggggatacgctgaatgatcagatgctgtcatttcgcctgtctgcgcttaaagcggctattgataaagagatatcagatgccactggcggagtaacgtattacaagacggtgacgattaaacaggacggaagcggcgactatacatcgctggcggcagctatagccgcaaatggtggagggttcaccgcgttaacgcagatcctgtatcagctgtatagtggcatttacccggagcggaatattaatttcccggcctacatcactgtggacggtataggaaatccgtggataaaaggggaattgccagccgacgttgatccggcccagataccgctaaaccagactatctggatgaataacacagcgacaatccgcaacgtgaaaatcacatgtaaaaacatgagataccccattcactcagatgcgcaggcctaccctgatctgtctataaaaaacgctgtcctgaatgtagagggatgccatatcgagcattatggcaatgctgaggctcaggcgtaccaggactctgtttccagcggagtatcggtatggtcatcgtgccatgcctggggcggcggattgcattctggtgagaaaatcaactgcctgaatacggacttcatcagtccaactaccgcattttattcccacagtaataaggattttgatgcgccatgccggattaccatcagaggcggcagtctgcggaatcgtgaccctaacgggatatcggcgctggctgtgcagaatctgggttcgggccaggtcagttttctgaacatggagggggttactatccagggggcgattagtgtagacagcaacacatggcgcgctgagaagctggaaaatcagctggcagacaggaatgcagaaatgcgaatttacctgcatggttgttcaccggtcgctgttcgctcaacgaacgacgcccgcgcgctgcaacttatcagcatcgacagtgcctccagtgcagttgccgttagcgggtccgctgttcctgcgctgttcgggcaaaatccggtggtcataaaaggtggtattggttatccggctcgtgtgctcagttcgcactcagtgaaaggtgaagtcgctggcggcctcatcggtcagcggctcggtgactgtactgcggttaacaagacactgacgattgtgtttgacggtgggtctccggttacgctgacgttagcggccaactacacctcaatgtcgaatgactcggttgttactgcactaaactcactgctaaatgacagcgcaggtcgcgcattcagcgtcatcacgccatacaactactcggcaccggtatatcagagtgacagggaagtgatcctgacgaataccagtggtgcggtcattctgaaaggaaccgcggtggctttcaacggttctaaattgaacgcccgcagggcaacgaatagcgatacccgtgcagccattgcaggtatagcgctggagaacattgcaccaggtgtgcaggggaggattcaggggtcaggatatatcaatacaacctacatcgcttttagcggagcgccaccaacagccttcctggcctcatgttcggtaaacgcagacgcgacgctttctgcgggtggttcaacaccgcttttgcagagagtagcgacagacacatacgagatcatttaa

SEQ ID NO: 235704 - DNA, 330 bp, Klebsiella pneumoniae
atgagtgataacaacaattctgtttcacaccagaccattgaactgctgacacgctgtctgcagctgcagtcagaaaaagacggtattcagcgccccacgcctgacaaagcgctcgttggcgtgcccgttgatgacttcacccgccagatccatcaggcctgcctgtacgcctcgatgaccgacagcctgctggccctgcaaaaccgactggccgatacgggccggcagctggaacagcaggggcagatccacgtcgacgccggcgaaaactacgccgtggccgctgttgcctggcttgaacgctttacggggacagagaacgcgcaatga

SEQ ID NO: 235705 - DNA, 354 bp, Klebsiella pneumoniae; identical to SEQ ID NO: 181152

SEQ ID NO: 235706 - DNA, 447 bp, Klebsiella pneumoniae
atgaacaaaccaagatcccaacgcatcacccctgccaccatgactggcgagcatatcgcagacgcgatcctttatggcacgtacaccaaaaccgcgctttggtctttcatctccagaaatggtggagcggatgcggcacatgctaagtacccgcaactggccgttgcacttcatatcctgaaacaggaaaagaagaaggcaaagagctctcgtgcggtcaagacgatcctgaaacccctttcccgccagtatgctgacggtcagtcgttgactgagatccttaaccctgtgctccagagctatcgccgtctataccgtgaaaaactcaacctcgatatgacgcccgagcaggtgatcatgttcctggttgccacccacggtgtggagaaccttgagcaacacggttatagcgtcgcgggcgacttcctgacagttacgacagcgtga

SEQ ID NO: 235707 - DNA, 123 bp, Klebsiella pneumoniae
atgaagaaggaagaagctctcgccagcttcgtctggtgtggggccgtggttcaggtctacacgaagacggtgacgtttgccgggacggttatacagcggcatctgctatcgaagaacctatga

SEQ ID NO: 235708 - DNA, 1053 bp, Klebsiella pneumoniae
atggtcactatgaaaaacttaaccatgttttttttctcaactatattcgtttcattcatgtgtaatcctgcttttgcagcgaaagatatttatgggtgttctaattttgcaaatttcaaatcaagcagtcgtgattttgaagagcacatacaaaaagctgcggatacaaaaccgcaatctacggcctcaataaaattagaaggaatactacccagcgacccacgttttattgaaagtgaaaaatcattggatgatatggatattatccaaatagctacattttcatgggcttcaaatatatcaccaaaaaaaagcaaaaatatttcaaagaaatacataatatcttgggtgagcacttataatcctaacttcaatcctattgatgaagcgaaacttggccagttaataaaatcatattttatcataaaggatgaattctctagtacagaaaaccataaaattaaaaaatttctttcagcatgggggaatggctatcttgtaagaatgtcacatagtgacgattcaagccaatggaaaagcaactggcaaagtaatcgcatccgactggtcactttaattgctatcgcaatagatgatgatttgatgttccaaaaaataaaaaaatactacattaaacaaattcagaataatatttatcatgatggaagcacatgggatttcagagaaagagatgcaattaaatatgtaatcgcggacttagatgcgcttattgacacatcactagcggcgagaggaaaaggagaagactggtataatttaaaatctaacactggtagttcacttagtgcagccattaattggatgttgccatatgcaactggcagtaagaaacatcttgaatttgcgaatacgaatgtaaaatttgatgctattcgtgcaaaagcaaaagtcaaagggtttagtggctatttcaaacctgagacagcagcaaaccttttttggattgcatcgctctttcagccaaaactacaagatatagctatcaatattagaccttcgcatcctttcttttacagacaatgttatgaatag

SEQ ID NO: 235709 - DNA, 1164 bp, Klebsiella pneumoniae
ttgaaaggccgtttgtttattgctgtatctttgctcgcttcgagcgtttcctgcgcatttgccgtcgacttacctgctacggtcgcgccgccttccattcaggcgggctcctgggtgctgatggattacaccaccggtcaggtcctgaccgcgggtaacgaacatcagcagcgtaatcctgccagtctgaccaaactgatgaccggctacgtggtcgatcgcgccatcgacagccatcgtatcacctttgacgatatcgtcaccgtgggtaaagacgcctgggcgaagggcaacccggtgttcgacgggtcatcgctgatgttcttaaagccaggggatcgcgtcagcgtccgcgacctcagccgtgggctgattgtcgactccggtaacgacgcctgcgtcgcgctggccgactatgtcgccggcggccagccgcagtttgtcgccctgatgaatcagtatgtcgaaaaactgcacctgcgggacacccatttcgaaaccgtccacggcctcgacgctccgggccagcacagttcggcctatgacctcgcggtgctctcgcgggcgattattcatggcgaaccagacgtctaccacatgtacagccagaaaagcctgacgtggaacgggatcacccagcaaaaccgtaacggtctgctgtgggataaaaccatgaacgtcgatggcctgaaaaccggccacacctcgggggccgggttcaacctgatcgcctcggcggtggatggccagcgccggctgatcgccgtggtgatgggggcggacagtccgaaaggccgcgagcagcaggccgctaaactgctgcactgggggcagcagaacttcgacaccgtgcaggtgctgcagaaggggcagaaggtcggcaccgagcgtatctggtacggcgataaagagcagattaagctcggcaccgatcaggatttctggttagccctgccgaaggcggaagtgtcgcgcattaaagcgaaatatgtgctggataagaaggatcttgaggcgccgatcgccgccaatcagcgggttggcgagatttcactgtatgacggcgacaaggtggtggggcactatccgctggtcaccctcgaaagcatcaataaaggcggagtgttctcgcgaatgagcgattacctgcatcacgagctgtaa

SEQ ID NO: 235710 - DNA, 261 bp, Klebsiella pneumoniae
atgaagctgcttggaagaaatcggttggaccagcttaaaagtgagagttccgccaccaaagtttgggtaaccgcatggtcatctgagattgattcatgtagttggaaatccgttgatgaggtgaaagatcgattcccatcagtcgtttgtattgagaattgtatgttcacattcaaagttgatggctgtgatatggtcattgaaactatcatggatttcaatgcgttgactgtattgattattgctgtaaaggtcacatga

SEQ ID NO: 235711 - DNA, 1209 bp, Klebsiella pneumoniae
atggatattaaagttataaagacagagcaacagcatcaggactacctggagcgaatccattctttgatgctaatgatgccaccgactcgctcggacgagcatgaagaactcgagcttttaatcacgatcgtcgaagcctatgaaaactcgaagtatccgattgagccacctgaccctattgatgcaattttgtttaggatgcatgaaaagggtttaaaacaaattgatctcgttccctatctgggaacaaggagccgtgtttctgaaattctttccaggaagcgtcccttaacagtctcaatgattaaagccctgtccattggattggggatatctactgatacactgataggcataaattcagatgataatcaatctcatgaggaaggtgtagattggtccaaatttccattaaaagaaatgatcaaccgtggatggatttctgaaaatggaaatgctctaaaaagttcggctgaagacattatcaaaggttttataaaccagttaggctggcaaagcggaagcctttctttcaaaagaacattgtctggtgatgcttactcgccttcaacacagtatgcattgtatgcgtgggttagtagagttgtgcagcaagcgcggaagaaaaaaagctctctcgggattttcgatccaaatatgttatcggcaagttttctacgagatctcgcacagttaagctggttcgaaaaaggcccacttcttgcgatagaatttctcgagaaacatgggatagcaataataatagagccaagtttaaaaggtactcgtattgatggtgctgcactaaaagatattgatggacaacctattattggccttagcctgagatatgaccgtcttgataacttttggtttactttgcttcatgaagtcgctcatatctggaagcatgttcataatgaagaaacatttctggatgatttagatgcatcttcggatgataaaaaagaatcagaagcaaatagattggcaagggaagcatttataccaagagccgtctggaaaagaagcgatgcttatataaccccaacaaaagaaaatattgacatattatcaagggagttaaaaataacaccagcaatcattgcgggaagattaagaagagagttaggaaattaccgtctttttgcagatctcatcggtcagggtgaggttagtagaattttatctacagcagttatcgaataa

SEQ ID NO: 235712 - DNA, 1128 bp, Klebsiella pneumoniae
atgtatcctacttatgttcctatactgaaagcaaagcctggtgaatttgcggcattagaaaaacttaaaactgcatattcacaaaggataatacctttcttcgagatccctaaattcacacaaaaaatgcgtgaacaggcttattatcgtgactcgacccagcctaaaaaacattatctcgataagatttcacatgaaatttcaaaatcatgtaaaagttcggcaatcttttttgaccattttgaatggaagcccaacgaatataccgaaacaggagagcatgtatacagttacatgtttcgtaaactcacaggaagtggcctgaaagttcatccagtcgtgggatttgaccgatgggatgatgttgattatcaaaacgcgttaagtaatttatctattacagacgacacatatttttgtttgcggattgactcggaaacgatagaagatgcttatgatgaagattatttcaaagatagcattgacagcatagttcatggattgaatctcacaaaccagcaaatcatcattttgtttgattttggcgatgttactaaaaaatctatcgtttcattacttgcagacatgcaacatcttctaaaagttgtcagtgaatataaatttagttctgtgatgatggctggtgcttcatttccaatgattattaacgaagccgttaaggatgaagattctactgactatgtcgaacgtcgtgaaatggttgtgtggaaaacacttctggaagatagtaatcacaacctcatatttgcggattatgggatacgaaatccttcagcagcagatgacgtcattgcaactcatgcaaatgggaaaattcgttacactatttctaatagatattttgtggctcgtggacattctaagcaaaaaggcaataaaggtgagcaaatttatgacctcgccaaggttattgtcaattcgtcccattacttagggccagaattttcgtggggcgatgaaaaaatacttgattgcagcatgaaaaaattgaaaggtaggccacaggactggatcggatttgatacgaatcatcacatcagctatgttgttgaagaagtcttagagttcaatcgtatcaaagcagcaaaacgtgcagaagaaatttaa

SEQ ID NO: 235713 - DNA, 219 bp, Klebsiella pneumoniae; identical to SEQ ID NO: 139472

SEQ ID NO: 235714 - DNA, 1335 bp, Klebsiella pneumoniae
gtggacccgtcgcaaattcctctaacccaaacattctggatgaatgatacgtctcgcatccgtaacctgagaataactgcaaagaacatgcgctatcctgtacatagcgattctcttgcatatccggacacctcaattaaaaacgctgcactagatgttgaggaatgcgatattgaacattatggcaatgctggcgcgcaggcttatcaggattctatcggaagcggcgtaacggtttggtctgcttatcatgcgtggggttgcggtctgcactcaggcgagcagattaatgctgttaataccaattttgtcagccagacgtctccattttattttcataccaataaggactttgatttgccgtgcaaaattaaagttactggtggtaagtttgaaaataaaaatggtggttcggctcttgctgtacagaacatgggaagtggccaggtaaacacctgcattattgacggcgtcacgctgcagggtattaccaacattgacagcaatacgcagaaggcggaaaaactggttaatgactggggggatcgtaactctgaatcacaaattcatatcagaaactgtacacctgttgccgttaaatcgacgaatgactctcgcgttttgcagttaatcagcatcgacggtgctaccagttccgttgcagttagtggctcagctgttccggcgctgtttggctataatccggtcattattgcaggcggttctgggttcccggctcgcgtatatagctcacattctgttaaggggacgattcctggtggactcattggccagcggcttggagactgtactgcggttaacaagacactgacgattgtgtttgacggtgggtctccggttacgctgacgttagcggccaactacacctcaatgtcgaatgactcggttgttactgcactaaactcactgctaaatgacagcgcaggtcgcgcattcagcgtcatcacgccatacaactactcggcaccggtatatcagagtgacagggaagtgatcctgacgaataccagtggtgcggtcattctgaaaggaaccgcggtagcgtttaatggctcaaaaatcaacgggagaagggcaactaatagcgattccaggtcaactatcgcggggattgcactggaaaacattgtgcccggcgtgcagggtagggtgcaattttccggatatctgcacacaacctacatcgcattcacaggaacaccgccaactacattcctggcgacatgctcagtgaatgccgatgccaccctgtcagctggtagcacaactccactcctgcaacgtgtggctacagatgtttatgaggtaatttaa

SEQ ID NO: 235715 - DNA, 870 bp, Klebsiella pneumoniae
atgactgacactgatttaggtggaacattttcttcactaacaattactttgtctgctctatctctatggtgttactatcgtgcagatacggttcaaaaaaataaggttcttatcaatctgttagttttatttgcatttattattgccttatctaagccattgctttttatgagccgactgggaataatgagtactttaagtggctatgcagcaatatttatgtttcataaatataaaaaaggtcaaagtaaggccatatttttttatgccctgttgcttgctactattgtaattggcgttttcataagtgtttcatttctacgagcaggaagtgaaaacgctgacaactcggccttattaaaaaatttattcggatacactattgtctcttatagccatcttggtgcattacttgaaggcaccctcaaatattatgaccctggctttggttattatattttcacattccttagagacatccctcttattggcgatagtatcgctagtttttttggttggggtgatccctattctatttggttaagagaattccaagattcatggagagctggtttaaatggtgatcttatatggctcactggatttgggtatgtttatgtatcattgggatggttttcagtatttttcttttttgtttatggtttctttatgaaatgcgcttggcatagttttattaatggtaaagattttggaataatattttatccatggctatatttctgtgttctatttttatttggcaccaatgtaattgcggcaaaaacgacgttcttgcttattctaagctttatctgcataaaaatttacacttttgtttttggctctacttataaggttcaaccagaatga

SEQ ID NO: 235716 - DNA, 579 bp, Klebsiella pneumoniae
atgatcaacccttctgaagttggtaagtcaggtgaaatgattcgcctccgtacgctggaaagcatctggatacagggaaagctgcgcatgtggggccgctggtcatacattggaggcggtagcggcggcaacatgtttaaccagctattggcgtccgggaagataacgaagactgctatcaatgacgcactgcgccgtatgaagaaatcgggtattaccaaacctgaactggaagccttcttcaaggaaatcctcagcggtaaaaataaaagcggcctggcgttttgtactgacgaggagggattgaaaattgattcagtgcttagcgccgagcttgtgcgctccgggaataaagctctctataagctaatcaaggatcggtatgtctatcgcatgagtaagaagtcgatggcgaaagagctaaacgaaaagcatccagaatggtgcttgaggacttgcgagagcagggttgatgtttggctaaatttggcagaatcgatgctttacgcgccaatgtgtgacgcgtttggcacaaatagcgacagattttacttgaatagttgcgcggaaagtgcttga

SEQ ID NO: 235717 - DNA, 168 bp, Klebsiella pneumoniae
atgtggatcctcattatctggatgttcggcgcttatggaaacccgaccatcaccacccaagagtttcaaacagaatccgcctgtcgagcagcgtttgccgaagcaaaaaaggtaaacaatgccgacgtttctctacgtggcgtatgcacgcccaagggtaaccaatga

SEQ ID NO: 235718 - DNA, 654 bp, Klebsiella pneumoniae; identical to SEQ ID NO: 193578

SEQ ID NO: 235719 - DNA, 594 bp, Klebsiella pneumoniae
atgatctctcttggtatcgttaaattaattgacctaagaatggaaaaatactccaaaggagttatctcattgcgaagagcaagctctggggaacagtgtatattgctttcacttttgggtattgcagcaaatataactgataattcaattatattgattgatgagcctgaaattagtttgcatccagaatggcagcaacgttatattaacttattaatgaatacgtttgaagggttctataattgtaagtttataatcgccacacattctcctttggtgatatcaaacttaaagtcttcaaattgctatattttacctatgactgaatctgaaataataaatgcaaaagattacaacaatcgttcttctgattatcaattagcggagctgtttgagtttccaggctttcaaaatgaatatatcctaagaacagcaataaatctatttgctaaaatcagagccaataaatcattcgataaagatgatgaaaagacattaaaaaggctttctggttttaaatacaatctagaagaaaaagatccaaactatgatttgattactgccctagaaagcatgaaggtgatttatggctga

SEQ ID NO: 235720 - DNA, 246 bp, Klebsiella pneumoniae
atgatgcactgtccgttctgcaaaaagtcggcgcatgcccgcacctcccgctatctgtcggagaacgtcaaacagcgctatcaccagtgcaccaatattgagtgttcggcgacgttccgcaccactgaagccatcgacgaggttatccggcccccggcggagaaagcgccgcctgtcgcggagccggtcacacccccggcaccccgtaaagtgcagggctgctacagctcgccataccgtcattaa

SEQ ID NO: 235721 - DNA, 297 bp, Klebsiella pneumoniae
atggtgctgaaagcggatgtgatggcaaacccgctcgccaacaccatcggccatcagggctacaccgagccggagaaagaggtcatgcatcaggtggtgaccttcctgaccgggaaagtgagcgacttctccgtcacgccagcggatgagccggtgctctccctgaccggcttcccggccgtcaccctcccgcatatggaccacgacgccgccagcacgcccggcgagcgcaaggtctggcaggagaaaatccgtcagcgcgaggctgacctgaaagcgcgggggctgctgccatga

SEQ ID NO: 235722 - DNA, 231 bp, Klebsiella pneumoniae; identical to SEQ ID NO: 234330

SEQ ID NO: 235723 - DNA, 321 bp, Klebsiella pneumoniae; identical to SEQ ID NO: 226834

SEQ ID NO: 235724 - DNA, 147 bp, Klebsiella pneumoniae
atgcaggtgcaggactgtacctccctgcgtcgtgacccgactcagcagttacagctcacctccgtgatttacctcatgaccgcccagctcgacggcgtggtcgaacgctgcaaccaccgctggttcaccggggagggcaacgtatga

SEQ ID NO: 235725 - DNA, 399 bp, Klebsiella pneumoniae
atgatgcgcctggcggaatgcccgcgcggtgctgttgcaggcgactttcagctggtcacgttcaaaagccagcacttcggtcaggttgtcacattcctgcgccagctcccggcgggccacgcgttcgatatgaccgcttttcagctcatcggtcagcatggcacccccggcacggaaagcggcgcgccaggtgcgggtgtcgctgccgttatcctgctccagcgctgctttctgctcctccgcgcgggtaatggctgtcagggtgtcctccatccggcgggcctgttcaagatgggcctctcgggcctcggccagtcgctccagcgccggtttcaggtaatcagggataaagggggtgtcggtcatggcaggtttcctcgtggtttcaacatgaggtga

SEQ ID NO: 235726 - DNA, 906 bp, Klebsiella pneumoniae
atgacaccgccgccgcaggtcagctaccagtctgtgccggtaccaaaccagatacagcgtaaaacgttcagttacgacaaaggaaagaaagcgaagtcattgccgtacattccgtcggggagctttgcaaaaagcatgcttatcgagggggcagatgccaacgcgtctgttaccgggaatgaatccactgtaccgatgcagctgcgtatcaccggtcgcgtggaaatgccaaacagcaaaacctacgacctgacagggtgttttgtggggcttgaagcctggggcgacgtatcgagtgagcgcgccattgtccggacccgcaatatcagctgtatcaaaggtgataaaaccatcgatcagcccattaacggccacgtgtcatttatggggaaaaacggggttaagggagaggtggtgatgcgtaacggaaaaatcctcggctgggcatggggggccggttttgttgacgggattggtcagggcatggaacgggcttcacagccggcagttggcctgggggcaaccgcatctgttggcgccggtgatgttctgaaaatgggcgtaggcggtggtgcatctaaagctgcgcagacgctgagcgagtactacatcaaaagggccgagcagtatcacccggtcattccgattggtgccggtaacgaagtgaccgtcgtgttccaggatggttttcagctgaaaaccattgatgaactggaagcggaaaagaacgggcaacagcaggctcagaatcaggaggcggagccggcaccgcaggctgatgcacatcgtcagtcaggcggcggtatgaacggattcaatactgacgagatgctgaagaagctgggcaaacttgatccgcgtgagttctctccgggcgcagcgccgcagggggaaaataatggctaa

SEQ ID NO: 235727 - DNA, 822 bp, Klebsiella pneumoniae
atgaagggagttgtgattactactacaacagcaaaaataatatctatttgtttgatttttgtgctagttcatgatcagcatgatactttctatgctatgtttgccacatcattaggtgttggaatctctggcattatttcactttggtatgtaagaaaacttggtaaagtatgttttgaaaaaatggatgtttctagagcatataaactcacaaaagaagcgtatccgatattcctttcatttatcggttcgagtgtttatactaccttaaattcatttatattaagttttttcgtgccagttgctgcaattggaatttatagtggtgctgacagaataagatctgtgtcgcaaagtttattagtccctatgcaacaggctatttatcctcatttagctggagagttgaaaaataaagattcttatatcaaaggcatgtataaatatggaacgatattctttgtagtctctttatgtatatctttgtttttagcttttcttagtcctcaaattatacatgttcttttaggcaataaatttgatcagtcatttagaatattattgctattagcccccttacctacaattgttagtttggccattgtttttggtcaatgggggctagtaaacattggttccggacatgtgttgagcagaatatatttattatctgcgttcgtgcatttattacatgtctttataatgtgttatttctggggcatttatggtgcagcaatttcagttatgtttacagagacgttagttactgcccttataataattggtttttttcgggagtataagaaatggaagttaaaatag

SEQ ID NO: 235728 - DNA, 264 bp, Klebsiella pneumoniae; identical to SEQ ID NO: 94215

SEQ ID NO: 235729 - DNA, 630 bp, Klebsiella pneumoniae
atgaaaacgtatgaagacgctttcaacttccagatgagcgatggcaccaccatcggctaccacatcggggtcgcgtacaaggttgatccgaccaaagttacaaccgttttccagacctaccgtaaaggcgtggacgacatcaccgacaccgacctgcggcagaaaattgctgacgcccttaatcgtctcgcaagtcggatgagcaccgataaattcattgacggcgggaaagctgagctgcttgaaaacgcactgaaagagatccagtccgatatggggccggttggtatccaggtgatcagcctttcttacgttggccgtccggaatacccgccgacagtgatcgaaagcatcaacgccaaagttacggccaaccagaagacgctgcagcgcgagcaggaagttaaacaacgtgaagctgaagccaacatgttacgagccgaagccgatggccaggcggatgcaaagctgaaattggctgaagcagaagcaaagtctatccagatccgtgggcaggccttgcgtgagaaccctgaggtactgcaactggaggccatcaacaaatggaatggcaccctgccccagtacatgaccagcggaacaaacaccccttttatccaggttaaatga

SEQ ID NO: 235730 - DNA, 195 bp, Klebsiella pneumoniae
atggctacgatcctcaccccgtctcacccgcaatttgtcttcgtgtttgccgctgttcgtcgcgcagaccgtcagccccgtatctgtatgcttcgtaccgttgccggtgacgagcacgccgcacgcctttccctcgttcgcgattacgtcctctcgtttgccgggcgtctgccggtggcggaggtgcgcgcatga

SEQ ID NO: 235731 - DNA, 195 bp, Klebsiella pneumoniae
atggctacgaccctcactccgtcacacccgcagtttgtctttgtgtttgccgccgttcgccgcgcagaccgtcagccccgtatctgtatgctccgcgccgtcgccggggatgaacacgccgcacgtctttccctcgttcgcgattatgtcctctcgtttgccggtcgtctgccggtggcggaggtgcgcgcatga

SEQ ID NO: 235732 - DNA, 453 bp, Klebsiella pneumoniae
atgaaggcccacattggtgtcgatgccaagagtggcctgacccacagcctagtcaccaccgcggccaacgagcatgacctcaatcagccgggtaatctgcttcatggagaggagcaatttgtctcagccgatgccggctaccaaggagcgccacagcgcgaggagctggccgaggtggatgtggactggctgatcgccgagcgtcccggcagggtaaaaaccttgaagcagcatccgcgcaagaacaaaacggccatcaacatcgaatacatgaaagccagcatccgtgccagggtggagcacccgtttcgcatcatcaagcggcagttcggcttcgtgaaagccagatacaaggggctgctgaaaaacgataaccaactggcgatgttattcaccctggccaacctgtttcgggtggaccaaatgatacgtcagtgggagagatctcagtaa

SEQ ID NO: 235733 - DNA, 1212 bp, Klebsiella pneumoniae; identical to SEQ ID NO: 189563

SEQ ID NO: 235734 - DNA, 945 bp, Klebsiella pneumoniae; identical to SEQ ID NO: 183490

SEQ ID NO: 235735 - DNA, 1614 bp, Klebsiella pneumoniae; identical to SEQ ID NO: 183489

SEQ ID NO: 235736 - DNA, 381 bp, Klebsiella pneumoniae; identical to SEQ ID NO: 183488

SEQ ID NO: 235737 - DNA, 318 bp, Klebsiella pneumoniae; identical to SEQ ID NO: 183487

SEQ ID NO: 235738 - DNA, 294 bp, Klebsiella pneumoniae; identical to SEQ ID NO: 183486

SEQ ID NO: 235739 - DNA, 606 bp, Klebsiella pneumoniae
atgattaaaaatgacaaggcatggataggagacttgctgggcggaccgctcatgagcagggaaagccgcgtcattgccgaactgttgctaaccgatcccgatgaacagacatggcaagagcaaattgttggccacaacattttacaagcctcttctcctaacaccgcaaaacgttacgcggcaacaatcaggcttcgcctgaacactcttgataaaagcgcgtggacattgattgccgaaggttgtgagcgggaacgccaacaacttctgtttgtggctctgacgctacattcgccggtagttaaggattttctggctgaagtggtgaacgatctgcgcaggcagttcaaggaaaagttgcccggcaatagctggaacgaatttgttaatggccaggttcgccaacatccggtactcgccagctactcagattcatctattgcaaaaatgggaaacaatctggtgaaggcgcttgctgaagcgggttatgtggatacgccccgcagacgtaacctgcaggcagtttaccttttaccggaaactcaggcagtgttacagcgcctggggcaacaggacttgatatctattctggagggaaaacggtga

SEQ ID NO: 235740 - DNA, 603 bp, Klebsiella pneumoniae
gtgatagatcacgttcttgaatatcgcctgtctcaaatccagagtcgcattaacgaagatcgcttcctcaaaaataacggctccggaaatgaaattggtttttggatctttgattatcccgcgcagtgcgaactgcaggtacgggagcatttgaaatatctgctccggcatctggaaaaggaccataaatttgcctgtctgaatgtcttccaaatcatcatcgatatgctcaatgaacgcggccttttcgagcgcgtctgccagcaggaagtcaaagtgggtactgagacgctgaaaaagcagcttgctggtccgttaaatcagaaaaaaatcgctgattttatagcgaaaaaagtcgatctggctgcccaggattttgtcattcttaccggcatgggcaacgcctggccattagtacgcggtcatgaactgatgagtgccttgcaggatgtcatggggttcaccccactgctgatgttttatcctggcacctacagcgggtacaacctttccccgctcacagacaccggttcacaaaattattatcgcgctttcagactggtaccagatacgggacccgcagcaacattgaatcctcaatga

SEQ ID NO: 235741 - DNA, 3642 bp, Klebsiella pneumoniae
atgaatattgaacagatttttgaaaaacctctaaaacgaaatataaacggggtagtcaaagcagagcaaaccgatgatgccagcgcgtacatcgagttagatgaatatgtcatcacccgcgaactggaaaaccatcttcgccatttcttcgaatcctatgttcctgccactggcccggaaaggatccgtatggaaaacaagatcggcgtatgggtttcaggcttcttcggttcaggtaaatcgcactttattaagattctttcttatcttttatctaaccgcaaagttacacataacggtacggaacgtaatgcttactccttctttgaagagaaaatcaaagatgcattattccttgccgatattaacaaagcggtgcattacccgactgaagtcattctgttcaatattgattcgcgtgccaacgtagatgacaaagaagatgccattcttaaagtcttcctgaaagttttcaacgaacgcattggatactgcgctgattttccgcatattgcccatcttgagcgcgagctggataaacgcggtcagtatgaaacctttaaagccgcgtttgccgatatcaatggctcgcgctgggaagacgagcgcgacgcttactacttcatcagcgatgacatggcacaagcattaagccaggccacgcagcagagtcttgaagcctcccgccaatgggtggaacaactcgacaaaaacttcccgctggatatcaataatttttgccagtgggtaaaagagtggctggatgacaatggtaagaacatcctctttatggtggatgaagtcggtcagttcattggcaaaaatacgcaaatgatgctgaagctgcagactattactgaaaaccttggggtaatctgcggtggccgcgcgtgggttatcgtgacttcgcaggccgatattaatgcggcaatcggtggtatgagcagtcgcgacggacaggacttctccaagatccaggggcgcttctctacacgcctgcaactttccagctctaacacatcagaagttatccagaaacgtttgttggtaaagactgacgaagcaaaagcggcgctggcaaaagtgtggcaagagaaaggcgatatcctgcgtaaccagctggcttttgaccctacaacaactactgcactacgtccttttaccagcgaagaagagttcgttgacaactacccgtttgtcccgtggcactatcagattctgcaaaaagtgtttgaatctattcggacgaaaggtgcagcgggtaaacagttggccatgggtgagcgttctcagctggaggcattccagactgcggcgcagcaaatctcagcacaagggctggattctctggtgcctttctggcgcttctatgccgccattgagagcttcctggaacctgccgttagccgcaccatcactcaggcttgccagaatggcattcttgatgagttcgatggcaacctgctgaaaacgctgttcctgatccgctatgtggaaacgctgaaaagcaccctggataacctggtcacattgtctatcgataggatcgatgccgataaagttgagttgcgccgccgggtcgaaaaaagtctgaacacgcttgaacgcctgatgctcattgcgcgcgttgaagataaatatgtgttcctgaccaacgaagaaaaagagatcgaaaacgagatccgtaacgttgatgtcgatttctctgcgatcaacaaaaaactggcatcgatcatctttgatgacattctgaaaagccgtaaatatcgttatccggctaacaagcaagactttgatatcagccgcttcctgaacgggcacccattagacggtgcagtgcttaacgatctggtggtgaagatcctgacccctaaagatccgacctattcgttctataacagcgatgcgacctgtcgcccttatacgtcagaaggcgacggctgtattttgattcgtctgccggaagagggccgtacctggagcgatattgatttagtcgttcagactgaaaagttcctcaaagataacgccgggcaacgtccggaacaggcaaccctgctctcagaaaaagcgcgtgaaaacagcaaccgggaaaaattactccgtgttcagttggaatcactacttgcagaagcagatgtctgggcgattggcgagcgcttaccgaaaaaatcttccacaccatcgaacattgtcgatgaagcctgccgttacgtgattgaaaacaccttcggcaagctgaagatgctgcggccttttaacggcgacatctcccgtgaaattcatgcattactgacggttgagaacgacaccgaactggatctcggtaacctcgaagagtccaaccccgacgccatgcgcgaggtagaaacctggatcagcatgaatatcgaatacaataaacctgtgtatttacgcgatattctgaaccatttcgcgcgtcgcccttatggctggcccgaagacgaagtgaaactgctggtagcccgtctggcctgcaaaagtaaattcagcttcagccagcaaaacaacaacgtcgagcgaaaacaggcgtgggagttatttaataacagccgccgccatagcgaattgcgtctgcataaagttcgccgtcatgatgaagcgcaggtgcgtaaagccgcgcaaaccatggctgacatcgctcagcagccgtttaacgaacgggaagagccggcactggttgaacatattcgtcaggtatttgaagagtggaagcaagagctgaacgtattccgcgccaaggcagagggcggaaacaatccggggaaaaacgagattgaatccggtctgcgcctgcttaatgccattcttaatgagaaagaagattttgctctgatcgaaaaagtgtcatcgctgaaagatgaacttctggatttcagcgaagatcgtgaagatttggtcgacttctaccgtaagcaattcgccacctggcaaaaactgggggttgcgctgaatggcagctttaaatctaaccgcagcgcgctggaaaaagacgccgcggcggttaaagcgctgggcgatctggaaagcatctggcaaatgccggaaccttataagcatctcaatcgcatcacgccgttgattgaacaggtccagaacgtcaaccatcagttagtcgaacagcaccgccagcacgccctcgaacgcattgacgcacgcatcgaggaaagtcgtcaacgcttgctggaagcgcatgctacgtcagagctgcaaaacagcgttctgctgccgatgcaaaaagccagaaaacgcgctgaggccagccagtcgattccggaaattttggcggaacagcaagagacaaaagcactgcaaatggatgcagataaaaagattaacctgtggatcgacgagctgcgtaaaaagcaagaagcacaactccgggcagcaaatgaagccaaacgcgctgccgagtcagaacagacttatgttgtggtggaaaaacccgttatccaaccggtaccgaaaaaaacgcatctggtgaatgtcgccagtgagatgcgtaatgccaccggtggtgaggttctggaaacgaccgaacaggtggaaaaggcgctagacacgttacgcacaacgctgctggccgccattaaagcaggcgatcgcattcgccttcagtaa

SEQ ID NO: 235742 - DNA, 2598 bp, Klebsiella pneumoniae
ttgcaaaatcaggactttattgctggccttaaagctaaatttgccgaacatcgcatcgttttctggcacgatcccgataaacgttttattgaggaactggaacagctcaagcttgaaaacgtcacgctaatcaacatgacccacgcgtcacagctggcggtgaaaaaacgcatcgagatggatgagccagaacagcagttcctgctgtggttcccccatgatgcgccacctcatgaacaagactggctgctggatatccgcctttacagcagcgaattccatgccgattttgccgccatcaccctgaacacgctgggcattccccagcttggcctgcgcgagcatattcagcgacgcaaggccttcttcagcactaaacgtacgcaggcgctgaaaaacctggtgacagaacaggaagatgaagcctcgctggataagaaaatgattgcagtgatcgctggcgcaaagaccgcgaaaaccgaagacattttgttcaatctgattacccagtacgttaaccaacaaacagaagacgacagcgaactggaaaacacgcaggcgatgctgaaacgccacggtctggactcagtattgtgggaaatgctcaaccacgaaatgggctaccaggcagaggagccatcgctggaaaacctgctcctgaaactgttttgtaccgatctctctgcccaggccgacccacagcagcgcgcctggctggaaaaaaatgtcctgctgacgccatccggcagagcatccgccctggcatttatggtgacctggcgtgccgatcgtcgctataaagaggcttatgactactgcgctcagcaaatgcaggccgccctgcacccggaagatcattaccggctcagctcgccgtatgatttgcacgaatgcgaaaccaccctcagcatcgaacaaaccattattcatgcgctggtaacgcaactgctggaagagagcaccacgctcgatcgggaagcctttaaaaaactgctctctgaacgccagagcaaatactggtgccagactcaacctgagtattgcgccatctatgacgcactgcgccaggctgagcggttgctgaacctgcgcaatcgccacatcgatggtttccactaccagaacagcgccaccttctggaaagcctactgcgaagaactgttccgcttcgaccaggcttatcgcctgtttaatgaatatgccctgctggttcacagcaaaggggcgatgatcctcaagagcctggatgattatatcgaggcgctctacagcaactggtatctggcagagttaagccgtaactggaacgaagtgctggaagcggaaaatcgtatgcaggcgtggcaaatccccggtgtgccgcgtcagcagaacttcttcaatgaggtggtgaagccgcagttccaaaatccgcaaatcaaacgcgtgttcgtgataatttccgatgccctgcgttatgaagtggcggaggagctggggaatcaaatcaataccgagaaacgctttaccgcagaactgcgctcgcagctcggcgtgctccccagctacacccaactgggaatggcggcgttgctgccccatgaacaactttgctatcaaccggggaacggcgacatcgtttatgctgatgggctgtcgacctcgggtattcctaaccgcgataccattctgaagaactataagggaatggcgataaaatcgaaggaccttctggagttaaaaaatcaggaagggcgagaccttattcgcgattacgaagtggtgtatatctggcataacacgattgatgccactggcgacacggcatccacggaagataaaaccttcgaagcgtgccgcacggcggtgactgaactgaaagatttagtcaccaaggtgatcaaccgcctccacggcacacgcatttttgttacggcggatcacggtttcctgttccagcaacaggcgctttcggttcaggataaaaccactctgcaaattaagccggaaaacaccatcaagagccacaaacgctttattatcggccatcagcttcccgccgatgacttttgctggaaagggaaagtggcggataccgcaggcgtgagcgacaacagcgagttcctgattccgaaagggatccagcgcttccatttctctggcggcgcgcgcttcgttcatggcggcaccatgttgcaggaggtttgcgttccggtattgcagataaaagccctgcaaaaaaccgccgcagaaaaacagccacagcgccgcccggtggatattgtcgcttaccatccgatgattaagctggtgaacaatatcgataaagtgagcctgttgcagacgcatccggtgggcgaactttatgaaccgcgtatcctgaacatttacattgtcgacaacgccaacaatgtggtctcgggcaaagagcgcatcagctttgacagtgataacagcaccatggaaaaacgcgtacgcgaagttacgctgaagctgattggcgctaacttcaaccgtcgcaatgagtactggttgatactggaagacgcacaaacggaaacggggtatcagaagtacccggtcattatcgatctggcgttccaggatgatttcttctaa

SEQ ID NO: 235743 - DNA, 2085 bp, Klebsiella pneumoniae
atgcaaacccatcatgatttacctgtttcaggcgtatccgcaggggaaattgcctccgagggttacgatctggacgccctgctgaaccagcattttgctggtcgtgtggtgcgtaaagatctcaccaagcaactcaaggaaggggcaaacgtcccggtgtatgtgctggagtatctgctcggcatgtactgcgcctctgacgatgacgacgtggtcgagcaagggttgcaaaacgttaagcgtattctggctgataactatgtgcgcccggatgaagcagagaaagtgaagtcgctgatccgcgagcgtggttcgtacaaaatcatcgataaagtgtcggtgaagctaaaccagaaaaaagacgtttacgaagcccagctttctaacctcggcatcaaagacgcgctggtgccatcgcagatggttaaagacaacgagaagctactgacgggcggtatctggtgcatgattaccgttaactatttctttgaagaagggcagaagacctcacccttctcattgatgacgctcaagcctatccagatgccgaatatggatatggaagaagtgttcgatgcgcgtaaacactttaaccgtgaccagtggatcgatgtgctgctgcgctcggtgggtatggagcccgccaatattgagcaacgcaccaaatggcaccttatcacccgtatgatcccgttcgtggagaacaactataacgtttgcgagctggggccgcgtggcaccggtaaaagccatgtgtataaagagtgttctcctaactccctgttagtttctggcgggcaaacgaccgttgccaacctgttctacaacatggccagtcgccagatcggccttgttggcatgtgggatgtggtagcgtttgacgaagtcgcggggatcactttcaaagataaagacggcgtgcaaatcatgaaagattacatggcgtcaggatctttctctcgcggcagagattcgattgaaggtaaagcgtcgatggttttcgtcggcaacatcaatcaaagcgtagagacactcgttaaaaccagccatttgctggcgccatttccggctgcgatgattgataccgcctttttcgaccgctttcatgcctatattcccggttgggaaatccccaaaatgcgcccggaattctttaccaaccgttacgggctgattacggattatctcgctgaatatatgcgcgaaatgcgcaaacgcagtttctctgatgcgattgataaattctttaagctgggtaacaacctcaaccagcgtgacgttattgccgttcgacgtaccgtgtcggggttgttaaaactcatgcatcccgatggcgcgtacagcaaagaagatgtgcgagtctgcctgacctatgcgatggaagttcgtcgccgcgtgaaagagcaacttaaaaaactgggcggtctggagttcttcgatgtgaactttagctacatcgacaacgaaacgctggaagagttttttgtgagcgtaccggaacagggcggcagcgaacttattcctgccggaatgccaaagccgggtgttgtgcatctggtcactcaggcagaaagcggcatgaccgggctgtatcgttttgaaacacagatgactgccggtaatggtaagcatagtgtatcgggtctgggttcaaatacctccgcgaaagaagctatccgcgtcggtttcgattacttcaaaggcaatttgaatcgggtaagcgcggccgcgaaattctccgatcatgaatatcaccttcatgtcgttgaactgcataatactggcccaagcaccgcaaccagtcttgctgcgcttatcgctttatgttcgatattgctggcaaaaccggtgcaggaacagatggtggtgttgggcagtatgacgcttggtggggtaattaacccggtgcaggatcttgccgccagtttacagctcgccttcgacagcggtgcaaaacgggttctgttgccgatgtcctcggctatggatattccaacggttccggcagagttatttaccaagtttcaggtgagtttttactcagacccggttgatgctgtttataaggcgctgggtgtgaattaa

SEQ ID NO: 235744 - DNA, 213 bp, Klebsiella pneumoniae
atggaagttaagaccaaagaagactggctgtatcagttccgtcgttgttcatcccgggagacactggaaaaagtgatttcccacacgcgttataagcttactccagcggagatggaagctttcaactctgcggtcgatcaccggctggcagaactgaccatgaacaaactttacgatcgtgttcccgcttcagtctggaaatatgttacctga

SEQ ID NO: 235745 - DNA, 627 bp, Klebsiella pneumoniae; identical to SEQ ID NO: 15034

SEQ ID NO: 235746 - DNA, 675 bp, Klebsiella pneumoniae
atgagagcatataaatttaggtcggcttctcaaatagcatttaccctagatataatttttaatcgtaggcttttttgctctgactggaaaatgttgaatgacccaatggaagggatgtttgttttctctcatcaaacatctgatggttacgactataaaaaagaaattcagcagataatagaagaaaagaaacggcttaaggtttgttctctttcagctacatatgagtctcatttactttgggctcactatgctggggggtttgatggttgcgctatcgaaattgaaatcccagacaatcatcacagtattaaacaaattgaatatagaggtgtatttgcaaatttagcaatgcccaatatttatagtcctgatgaacttgctaaccaagttttatcctctaaatatcgagaatgggaatacgaacaggaagttaggattttgcaaacgaatgagtggttttacttagataaaccagttcgacgagtaatagcagggcatagaatgccttcggcattatttgaagccatgaatataatatgcaactcgatggggattgaattttgccgtactggaattggtgatgaggggattgatgccgattatgttgagccctcaaaaattctaacgccgaataatcatcttgactgggatgtactaaaaaatgaccgatga

SEQ ID NO: 235747 - DNA, 378 bp, Klebsiella pneumoniae
atgaaaacattacccgacacacacgaacgggaggcgtcacgctgctcgtctcctgtgacaatctggcagacactcctggcccggctgctgggccagcattacagcctcacgctgaatgacacgccgttcgccgatgaacgtgtgattgagcagcatattgaggcaggcatttcactgtgtgatgcggtgaactttctcgttgaaaagtacgcgctggtacgtaccgaccagccgggattcggcacctgtgcccattcgcagttaataaacagcatcgatattctccgggctcgccgggcaaccggcctgttgacccgcagcaactacagaacggtgaacgacattatccggggtaaagatgcggaggcaaaacaatga

SEQ ID NO: 235748 - DNA, 192 bp, Klebsiella pneumoniae; identical to SEQ ID NO: 189561

SEQ ID NO: 235749 - DNA, 183 bp, Klebsiella pneumoniae; identical to SEQ ID NO: 189560

SEQ ID NO: 235750 - DNA, 183 bp, Klebsiella pneumoniae; identical to SEQ ID NO: 189559

SEQ ID NO: 235751 - DNA, 192 bp, Klebsiella pneumoniae
gtgataaatcctgaagccaatgaccgctgggcggagaaaagcggtgaaatgattacggtggataatgtcgcttttaatcgggtgacgttcattcgtgatggttacgaatttccctgcatatttccgctggaaagattttttaaagaattcacttttgtaagccgggggcagggatatgaaaaacgcgcctaa

SEQ ID NO: 235752 - DNA, 189 bp, Klebsiella pneumoniae
atgcctaattcaaaatggtcagaaattgatattgaaaatgagctgcgccgccttgagtcgatgctttcaacgtcgctttttatgaatcttgaagacgacaatgaacacagtatagcaatggaattaatcagtatgtcgttgtttcgaattcgtgagctgaaagagattggcgaggtgagccatgggtga

SEQ ID NO: 235753 - DNA, 591 bp, Klebsiella pneumoniae; identical to SEQ ID NO: 189554

SEQ ID NO: 235754 - DNA, 630 bp, Klebsiella pneumoniae
atgaaaaaaagaacattagaacagctggaagatgatttaaatttttatgagtcattcattaaagaatacatgtcagtaatagaaggacatggaaatccagagtttacaatgtcattcggtagacgtggtgagagaaagctaatttcctatgaagaaatgcagtcttattctcttgatgaaagatatgagttatccaaaaaaatacatactgatactttttggtgtgatgaggatgatactacaaaagctataagagttttgtatgttcttggttttagagatttggcatttgcggttcataaagtaagtgctgaacatgcaattaataaagattttagtgataaaattaacgaaatcaagcgacaggttagcttgaaaaaagtaaacagcaaaggtgggaaaaatagaaccagtcgccataaagttaccgctttacaaattgcctcatctacatggaaagaagttcccggagccagcatggaaagcctttcaagaaaaatttatgatcatttgaacaaaaaacacagggatactcctgagccagggacgatcaagacctggctcagaacgtcaggattgaatcctgaacaattaccgaaaattaaagactacgaactagttataaagtag

SEQ ID NO: 235755 - DNA, 150 bp, Klebsiella pneumoniae
atggcggttgaagttaaagatgtggtctttgaggatgatggcttgtatgaaattaatgtacgcatattcccgtcagacgaaacaccttcgaaaaaaaacgaaatcgattcaattcgtagctttttctttgtgttaacagcaaaaggttaa

SEQ ID NO: 235756 - DNA, 693 bp, Klebsiella pneumoniae
atgaaaaacgaaatcgaattcaaatttggtgattacgcaatcatcgagcagaaacgccacggcgtacctaacgagatgtttgttcataaggtggttggtcaacttcgctctaacacctgggttgatgttccggttagtgttccggcgactgagacgctgcatggtgagatggaggacatttgtctctgcatctgctgcggaattgacgagaccgaggttcgccgttatcgcgtcaaggatatgcggcgccattctcctgtctctttggtggctgatgaaaagaggggttctactatcacattacaggcagtaaacgagctcattcggtcgctggagtcggcaggcgagctgtcgataagagagcagaagttcctgaagctggcgaaagcgtttaagcagctggaggcggagaatgtgcaaatcaaagctatgaacgattgcttatctgaggaactgcgtggttatgagtctgatggcgcttttgaggggccgaagatgcatctgctgtggtggcaggtcgaaacccccgccacagatcgcatcgtagccgggattaaggctgatggggtggaggagttcgcggcaaaacttcgaattcctggtgatgaccagttttttgacgttttagcaaaaggggttgcacttgctgctgacgacttctccaagcagctgcgcgagggggccgacaaatga

SEQ ID NO: 235757 - DNA, 315 bp, Klebsiella pneumoniae
atggctgagttacgcgcaggtgggttggcgatgattattggcggattctaccgtaccaatgacgggaaggctgtgctggttgcaggctttgtgccgaatggctcccggtttacctggaatggagaggtgtacgccgagccggtgcctatgggagatgcatggttggtatcaggtgacctagtggcgcgggatggcgctactggagaggcgaaaaggatggatttcgcgctgatgccagaaaaatacctcatgccaattgacggcgacgatttcaactatgaagaccagcaccagaaggcgcgggagcatgcctga

SEQ ID NO: 235758 - DNA, 141 bp, Klebsiella pneumoniae
atgagccgtgacgttatcgaacgcatccgcgaccgctggcaaaagcttcgcctcttgcgtagccgcggcaccgtactggttgactaccgcatactgagaaatttcgttcgcatctatcagaccctgggagagacagcatga

SEQ ID NO: 235759 - DNA, 1017 bp, Klebsiella pneumoniae
atggccgttaaatcactgaaaaaaggatatctggcgctggcggcttccatgctgctggtggcgcaggcgcaggcgacggagctgctgaacagctcctatgatgtctcccgcgagctgtttgccgcccttaacccgccttttgagcagcagtgggcgaaagacaatggcggggacaagctgaccatcaagcagtcgcatgccggttcatccaagcaggcgctggctattttgcagggcctgaaggcggacgtggtcacctacaaccaggtgacggacgtgcagatcctgcatgacaaaggcaacctgatcccggccgactggcaaagccgtctgccgaacaacagctcaccgttctattcgacgatgggtttcctggtgcgtaaaggcaatccgaaaaacattcatgactggaacgacctggttcgctctgacgttaagctgatcttcccgaatccgaaaacctcgggtaacgcccgatacacctacctggcggcatggggcgcggcggataaagctgatggcggcgataaagctaaaaccgaacagtttatgactcagtttctcaagaacgtcgaagtctttgacaccggcgggcgcggagcgaccaccaccttcgccgagcgcggcctcggcgatgtgctgattagcttcgaatcggaagtgaataatattcgcaagcagtatgaggcgcagggatttgaagtggttatcccgaaaaccaacattctggcggagttcccggtagcctgggtcgataaaaacgtcaaagccaatggcacggaaaaggcggcgaaagcctacctgaactggctctatacgccacaggcgcaaactatcattaccgactactactatcgggtaaacaacccgaaagtgatggatgctctgaaggataaattcccgcagaccgagctgttccgcgtggaagataagtttggctcctggcctgaggtgatgaaaacccacttcgccagcggcggcgaactggacaaactgctggcggcggggcgtaagtaa

SEQ ID NO: 235760 - DNA, 447 bp, Klebsiella pneumoniae; identical to SEQ ID NO: 10873

SEQ ID NO: 235761 - DNA, 447 bp, Klebsiella pneumoniae; identical to SEQ ID NO: 10873

SEQ ID NO: 235762 - DNA, 1053 bp, Klebsiella pneumoniae
atgatcgactggtttaccggaatcctgccttgcacacaccgaccgttaccggctggtagtgtcgtcagcgtcgatgctgacggtgcagtggagtgggaaacagtaaaacggttgaccgttcgcggttcgcatgagtccacaatgaaagtaaggtctgttggatctgatggtgaaggtcgggcaacacatctctacattgacggtaatccatcaaagtttttgcaaggtcactctgttatcggtcccgacgatttgcaagggttggtgttaacaacttacgccagaatattggcattactgcatattcctcatgatctaccatcctatcggcaggtcatggaagggcaatttaagatctcgcgcatcgatatcaattacatgtattcattgtcaacattagaaaatgtccgcgcatggttatatgccgcagaatttaaagctaaaactcgccacggtcgcgcctgtggtaaaggtggcactgtttacttagggaaaaactcccgtcgttggagcctgaaattttattcaaaatatgatgagcatacatctggcaaaaaagggcaccagatggcagacgaattcgttaaagctggtttactggactggtcaaaagataaattacgcattgaattaacattaagaacaactgaattaattgatttgaatcttacgcttggtaatagctggaatattgagacgcccaataaattattctctgactatgtagggagaatagaaatgaatcaaaatactatattaactgatgaaaaaataattaatctcccaagaaaaatacagtctacatatttattgtggaagcagggcgcgaacataaaagagatgttaccgaaacctacattctaccgacaccgtaaagaattactttctttcggaatagatattaacttttattgtgagtcaccgtattctaataacgttgttccgttggttcgtactcttgaagccaaaccagccaaaattccatcatgggtttatgagaaaggtttaattttcgattataaccgtatttcacatgccagtaactggcattaa

SEQ ID NO: 235763 - DNA, 1245 bp, Klebsiella pneumoniae
atggagatgtatcctttattcgcagggtcagagcttgaattaaataaagtcaagctaccggaggctatttctcttatttacagtgaggtgcttaaagtcccgtatatgctagatccacagcttgttaatgatgaacgaatgattacattcaggttaacacctgatattgatgaacgggaatttgtaacccgttatcttggcaatatgaacattcgaatatggacgaaaaagggtgttgattttatcgcgccctatacgccgaaagagccggttaagccacgttatacatggacttatacgcctcagtaccgttctgttgcctacctgtctgatattcttggcggctacgtttcaggctccttcaataacagtggagccgtgatttctgacgattcgctaaaaggttcatcaggggcaagcaactacatcaatcgaatcggtgatattctggtttattatggtacgaaagaggatatcgccatcctgaaaacactggtcacttcgctggatacgatgagtgatgaagtggttgtttctggttatgtttttgaggttcagatctcgcagtctgacggctccggcattcttttagcggctaaaattctgtctgataaattcaatatttcagttggtgctgccggactggataattttatcaatattcgaaccggctccattgatgccattttcaatctgctgaaaaccgacagtcgttttactgttgtcagtgcgccacgactgcgggtaaaaaataatgcctcagcgtctttttcagtcggctctgatgtgccagtactgggcagtgttacggtgaataacaatacgacaacgcaatccgttgaatatcgttccagcggtgttttgtttaacgtgacgccatcaatcaaaagtcggacaatggatctcaagattcagcagcagctttccaactttgtgaccactgaaaccggcgtcaataactcgccaacccttatcaagcgtgatgtaacaaccgaagtcagccttgcagatggtgatattattttacttggtggccttgctgaacagaaagacagtaaggccagttccggctggagcttcttcggttcccgtaccagtgaaagcaacaagactgatattatggtgatgcttcaggtcagaaaggttgaccggagcagggcgacgccccgcagcgccgcgaggagcggtgaactgttccgggacaacctgaactcgtacagtttccattttcagcgttatggctga

SEQ ID NO: 235764 - DNA, 147 bp, Klebsiella pneumoniae
atggggaagcgtcatatgcaacaacagtggtcggcagtagacaattatttgattaaggccttaattcccggcgatcctgtgctcgatcgggtactggaaaacaaccatcgtgccgggctcccggcacacgatgtcgccgccaattag

SEQ ID NO: 235765 - DNA, 255 bp, Klebsiella pneumoniae
gtgttcgtcggcttacagacctggctgctgcgcagcgcgggcgcggtcgcccagccggcgtcagccatttatgtggccatttttaatgccgccatcggcaccggggcgtttgtcggcggccagctgatcgcctcagctggcctgtcggaaatggtgtggctggcggcggggatcatggtgggcagtacgctgctgatcgccctgctgaaagcgcctctgcccggtcagatcggtgcggcgacggcaggcgcttag

SEQ ID NO: 235766 - DNA, 174 bp, Klebsiella pneumoniae
atgaatgtggatgccatctatttgctcagagagcagccaaccattgagacgctaatcgccccatctcgtaaccattggatcgatatgatgggggctaacaatattcaggatgacgagcaaaccgcgacgttgcaattcggaagtattttcaggtcagagttgattcttaattaa

SEQ ID NO: 235767 - DNA, 1638 bp, Klebsiella pneumoniae
atgcaaagcacagccttagacaaaagtcaagagtttcaacttgttgggaatgatgatgttgccgagcagccaacaattaatgcaactcaagaaataaaagacagtgtgactccagagattataatcgcactttgtgggccaattggttcaccgctacatgagactgctgagcagatatcattctcgctaaaaaaatatggctataaaacatatgatatacgtttgagtgatctaatccggattaattcaaaatatacaaaaattaatcttgatgaaagcactaagctaaagaaattcaagtcgctgataactgtgggtgataaacttcgtgaaatttacggtagtgatattcttgcaaaattagctattgctaaaattagcgccgagcgtaaaaaaaactttggtgagtttgatgatattgtcaatgaatccagcaaaggggaagcgagtaagattaaaaatcaaaaaatttgccatattattgactcagttaaaaactcctctgagcttgagttgttgaaatcaatctatggaaaaatgattttctctataggtgtgttctcccctttagaggcaaggcgtgaaaacctttcaaaaattaatagtctaagcgttgaagatattgctgaactaatcaataccgattctggggaagagttcgaccatgggcaatcagttagagacactttcccgaaatgtgattattttttgcgggttgatagtgggttggcagagccaggaaatgccgaggctaaaggccaaattctatctaaactggaacgtttctttaagctaatttttaggagttcagttatatcaccgactgaagaggaaaatgcaatgtatgcagccacctcagcggctcgtaattctgcatgtctatcaagacaagttggtgctgcagtaacatcttcatctggagaacttctttctaccggttggaatgatgtgcctcgtaatggtggtggcctctatggtaaacaatctatccgcttaaaagttattgatcctgatcatcgttgttatgctttaaaaagtagaagttgctcgaatgatgcagaaaagagaatattggctgaagttgtcattgatagccttgtacaggaaaaaataatctctgtaaaaaaaagagaagatgcgattcaaaccattttaaaaaactcacgattaaaagatttaatagagttttcaagagcggttcatgcagaaatgcacgcgattcttggcgcatctcgtgtggcaggagaaagaattttaggcgggaaaatatttgtaacaacctatccatgccattcctgcgcaaggcatattatcgcttctggtatctctgaagtatattttattgaaccgtatagaaaaagcttagctcttaagcttcattcggatgcgatgaccgaatcagtaatcgagacggatgaaaaagtgaagttgatacaatttgatggagtagctccaaccaggtttcttgagctttttgaatctggatctcgaaaatctaaagctggggtgctagagttagcgacagagggggcggctatgccagtggatagcgttagtctcaaagcgattcctaaattagaacaggtagttattgcggaagttgatagtaataaacttaacttgttgaggcttgagtga

SEQ ID NO: 235768 - DNA, 1020 bp, Klebsiella pneumoniae
atgagcattgatgcaatgcgatgggccaaaaaagtcaagacagggaagtcctctgcaaaagctgttctgacctggatggccgacatgtgcggagctgatctctgtgcttttccatccattcctgcgctggctgaagcaactgagctggataagaaaacggtccagtcgagcctgcagtatctggtttcgatcgggcttattgaagatacaggtgaacggcgtggaaagactaaacaaatcccggtttacaggcttcttggtgtggaagaaagcgttgccgaaattgaacacacccaaaaacgggaacattaccaaaaacgggatcgtttaaacacacccgaaaacggggttgttacagcagaaaaggcacccgaaaaagggactgtttcctgtacacaaaaaaaacaaacgatcccgttttttccgtcaaacgatcccaaaaacgggatccggaatctaccagaggaaccaaaagatataacccccacacatagggttttggtcggaccagttgtgcctgactatccgaatcaaccgggaatagttcctggtgaaacacaagcattcggaaaatttgcgatgtatttcggatggaaaccttccgaggattttccccgactggcaacgatttggggaatgccattaagaccggggataaatcttgcggccgagttgagcagtttcatcgcgtactggcaggctgaaggcagggcgtttcaccaggtccagtgggagcaaaaactagcaagacatcttaaccgtgcggaagtccgccataaaaaaccagtgaatgggggtaacgatcatgtgggagtacgagcagagccagcagcatccagagctgttcaacagattcgagccgcccgtgagcaacggttgcgagctgcgggaacagacggccgtagaaacggcgtggcgcctatgggaagtgatgggcgaaatcttttcgaaccgatggatcctgaagaacggagaggaaccatcagaactctggatcgctcagattgggtcgatgagtga

SEQ ID NO: 235769 - DNA, 336 bp, Klebsiella pneumoniae
atggcaaatctttacgatctgaaaaagttcgatttgaatttattggttattttcgaatgtatctatcaacatttgagcatcagcaaagcggcggcgatgttatttatcaccccctcagcggtgagtcagtcgttgcagcgtctgcgccagcagttaaacgatccgctatttgttcgtgttggcaaaggaatgacgcccaccaccgcctgcgtcaatcttcattatcatctacagcaaaatctggagcagctggaaaaaaccatcaatcttaataatcgctcagaactgcgtaaacgtattgtgatatatggccccccgctgggctttgttgaataa

SEQ ID NO: 235770 - DNA, 411 bp, Klebsiella pneumoniae; identical to SEQ ID NO: 137847

SEQ ID NO: 235771 - DNA, 564 bp, Klebsiella pneumoniae
atgctgttgttacaggaaacagaacatgcactggcggataaatcctctccgaaggtgattttcctgcacatgatggggtctcatccgaatccgtgtgaccggcttcactcctggccgaatcattacctggagcagtatccccgaaaaattgcctgttacctcgccagcatcagtaaactggataactttctcggtcagcttgatggtatccttcgccggcattcccgtcattttgccatgctttacttttctgaccatgggctgtcggtcagcgacagtgctaatcctgttcatcatgatggtcatgtgcaggggggctacagcgttcccctgattattaccgccagtgacatcacgtctcatcagtccgtcagcaggaaaatcagtgcccgtcatttcgcaggcatttttcagtggctgaccggtattcgtaccgaaaatatactgccattcaatccgctgacagacgaagataatgaacccgttatggtttttaacggagagaaaaatgtgccggcagacagtctgaaaccgcagcctctgattctttcggaccacaggtaa

SEQ ID NO: 235772 - DNA, 858 bp, Klebsiella pneumoniae
atgccgatgaatatcagaaaactgttttgtccgggcaatacgtcccggattttattgtttttattctttttcgttatttccgtaataatcacaattgcatgcggatacactgagaagaatgccacagggaatgtattgcttctgtttctccttcttctccttgcacacagaaataccctcacatccattacagcgctgttatttctgttctgttgtacactgtatgcgcctgccggtatgacgtacggtaaaatcaacaacagttttattgtcgcgttgctgcagaccacggctgatgaggctgcagagtttaccgggatgattcctgtttatcattttctggtcagtgctgcggttctggtattcatggtgattttctggcgtacacaccaccgcggtcaccgtaactggctggcactgctgctgttcgtattatgctctgtaaacagctggccgttgcggatggttaaaggaaccgttgtgggaacaactgactcattgcgtgaaatgcagtgttataaacaactgagtcagcacggggctgacagctggaaaatcctgccgggtgtaccgttgtatgacacgattgttattgtcactggtgagagtgtgcgcagggattatatgtcggtatatggttatcccgtgccaaccacaccgtggctgaatactgctcccggtttatttattgacggctatacatcggcagcagccagtaccgtaccttccctgagccggacactgatttatgactatgagcagaaccctgactccggcaacaacgtagtggcgctggcagcaaaagcaggatacagcacatggtggatatccaatcagggaaaactggggggagcatga

SEQ ID NO: 235773 - DNA, 531 bp, Klebsiella pneumoniae
atggagttatggatatttatagtagcgatttatttgatttatattctttttttcaaaaagaagaaaactaagtccgcgggctcttatacttccgctcctgtgaaagcaccacctaaagaatggcttgctaataacaaaaaaaatcagtctggaatgcacaacgaggacagcgaagatgacaatctggctacgtttacactaagtggcgggcggaatgccgaatacagtataacagccactcaacgccagaatttctcaaaaactaccggtatcagcacctgggattacgggtacggatacagtggtcgtgaatcgttgtcacgctcaggctctgctgacaacttcgcatggagccttggggccggtgttcgttatgacgtaaccccggatgtcgctctggacctcagctatcgctatcttgatgcaggtgacagcagtgtgagttacagggacgagtggggcgataaatataaatcagaagttgatgttaaaagtcatgatatcatgcttggtgtgacttataacttctga

SEQ ID NO: 235774 - DNA, 303 bp, Klebsiella pneumoniae
atgtcacccgaagacttcattcgcaagcacatcacggcggcgttgatggccgaaggcttctctgagagtgccgcaggggggggggggctgagcacggcgtcgattattaccggagaagctcacaggcgagcaggaaaggggcgattttcgatgattgcctctaccgagctcgtcagtgggctctcgggcagacaaccaccgcagaacggaaagcagcaaagaaaaagccggggcgagctggtggagttcatcccggcctgttctgacttctgctatgcacatcaaatctacctggcggggtaa

SEQ ID NO: 235775 - DNA, 813 bp, Klebsiella pneumoniae
gtgactccgattcggacagcgactctgactctgacagcgactctgactctgacagcgactcggactctgactccgattctgacagcgattccgactctgactcggacagcgactcggattctgacagcgattccgactctgactcggacagcgactcggattctgacagcgactctgactcggacagcgattcggattccgacagcgattcggactccgacagcgattccgattccgacagtgattcggactctgacagcgactccgattcggacagtgattccgactccgacagcgactcggattctgacagtgactctgactccgacagtgattcggactccgacagcgactctgactctgactccgattcggacagcgattcggattccgacagcgattcggactctgacagcgattcggattctgacagcgattcggactctgacagcgactcggattcggacagtgactcggattcggacagtgactcggatgctgacagcgactccgactcggacagcgactccgattccgacagcgactctgactctgacagcgactctgactcggacagcgattcggattccgacagcgactcggactctgacagcgattccgactccgacagcgactccgactccgacagcgattcggattctgacagcgattccgactccgacagcgactcggactctgacagtgattcggattctgacagcgactcggattctgacagcgactccgactccgattcggataccgaaccgcaggcaaataatgatacccatacggcggctatcgataccgtag

SEQ ID NO: 235776 - DNA, 1035 bp, Klebsiella pneumoniae
atgaagagaatttttatcctaataatattgctggtgctgggtagtgaggctgctgctaagtgcacatatagcggcactaccaagcgtcaaggcttaacactgaacaatgtcaaaattccaacggatacttccattccggtagggactgtattgtatacccataagtttggtacgggatcgtataaaggtttcacttgtgataaaagcaccgatgaccaatatattattgatgtcggggccgccgctgtttcaggcgttaccggtattcagggcggtaccgtatatgaaacggggattgatggtattgggtttcaagtctcggatttattgcgcagtaaaaatggttctctggtcgctgccgaggcaggttcgaccctggtaccgataacaaaatcaaccgagaacaactatcaatttattaccgtatggctagtcaaaactaaaaccgtaattgataccagcaccaagtccagctcaaacccctccgtttccttttcggtagggaatctaaaaaccaacccggtcgcgaatgataggcttttatacgaagcaatttccatttcaattaaaaatatcaattatcgcactacatcttgtaatgtctctacgccacggtcgcaggtgacactgaatcgtatcgacaaaggaaaactcatgtcactggctcgcggggcaataacgccatcgcagaaaagtattccaatgaatattagttgcccgaatgattctgtaggcaatactgtcacctactggtttaatcctgtaggaggcataagcgcctcgggggatgggattgtagacaatatgattaccggttcagatgcagcaaacaaagtagggattatattcaaactttcaggcagccctgtggttttctacgacaccgacagttataattataaaataaacaccagcaatgatctcaataaaaccattaatctgacaggtgattattatcgacaaagtgatagtagtaccgatgtcacaatggggctagtgaaaggaatgatggaaatggttattcaagaagactaa

SEQ ID NO: 235777 - DNA, 363 bp, Klebsiella pneumoniae
atgaagcagttaactgtatttgagatggaagagatttccggtggctatacttgggatttttcatctttaagtagcgcaattacttctttagccagcaatgctggtgaattagtcatttctgtagccttaggagcagcagtaggcgcaatggctggttccgtcattggtggcgttcacggcggtgacggcggcggtcttttgggtattggttcaattggccagggtgttggtatgatttggggtctggttgtcggtgccattggatgtggcatcgccgccgccactgtcggttgggatcaaactcttgctgtttgtcttgatgtcgttggtggtgttattgacggcacatttgcgccttggtaa

SEQ ID NO: 235778 - DNA, 417 bp, Klebsiella pneumoniae
gtgacgacgttaaaacctttgctggcccgcaaccgcagctgggcgctgcagaagtgtcagcatgacccggactatttcgaaaaatgggtcgacgggcagcggccccactcgctgtggatcggctgctccgacagccgcgtacccgccgaggtgctcaccggcagccagcccggcgagctctttgtccaccgcaatatcgccaatatgctcgatcccgccgacgataacgtcatgagcgtcctgcaatatgccctccactaccttgaggtggagcgggtggtgctctgcggccactacggctgcggcggcgtgcaggcggcgctctccctgcccaccctgccgctggcgcacgagtcctcggcgctggctcgccgcatcggccagctgcgccacaccctgcatcacgaaattgcgtag

SEQ ID NO: 235779 - DNA, 909 bp, Klebsiella pneumoniae
atgagcttttttgataataaatctggtcaacatgtcggggacggagctaccgcaatccaaattgcaggtaatgctcacattggcaataccactacagaagttgtcaccatctgtgaactagtagttcaagcacaaatggcctctttaaaagaggatgcttataagcttgtaaaccaaagagcaacagaattcggtaaccaaattgcttcaaagctatcgcgtgacctcgatgataaattgaaagaaaaattatccgacccggacattcagtactcaatgaatcaagctgtaattcaggtcgctcgcaaggggtttaatgaaaagtcagagctattaaaggaattaattgtttcaaaaatacaaactgaagaggaagatgatagcattgtaatagaccaagcccttgaaattacatcaaaattaacaacgaacgatataaaatttctttctctgatatattatcttagaagcatcactaagatgatcaatggaattaatataacgagactcgctgaagaaaatgaaacccatcctgaactacctggttttacagtagcactaaatcatttacgccacaaagagttttactctaactacaatcatgatttaattaatttcctaggggagatagcgtccttaaaaaaaataaatattgacatacttagcttgaaaggcgttgtttttacagacaaacattatgtaaaaaattatcaagatttacttggtaaaagaacaggaatcagtaaattcgagagcgatgagtctttctatgaagctttcccagcgttaaagtcaactttagatgcttttaatataccaaccatagggaaacttaatacaatagttttaaacccaattggcgaactaattgcagaaaactttcttagagctcgtaacttcctacaatag

SEQ ID NO: 235780 - DNA, 129 bp, Klebsiella pneumoniae
atgcgcctcgcagttcttgatgacgaccttggcgagtacatcgaaccaggtcgcgagcttattgcggtttatctcactggcgttgaggtcaagtatgtctttctgctgatgatgataaaggcgaggtga

SEQ ID NO: 235781 - DNA, 1275 bp, Klebsiella pneumoniae
atggacgatacaaaatacagcattgatctacgtaccaataatggcttgtgggccagagtagcatcttggttcgttggtggtcggctggtaacgccagagcaggggtcgcaaactggccctgtatctgccagcggcgtgctgggcgactcccagataaccgatgagcgcattctgcagatatcgactgtctggcgctgcgtctcccttatttccaccctgaccgcctgtttgccattggatgttttcgaaaccgataagaatgataaccggaagaaagttggcctgaatacaccgcttgcacgtctgctccggtactctccaaaccagtacatgaccgcgcaggagtttcgcgaggccatgacaatgcagctttgtttttatggaaatgcctacgccttgatagagcgtaattctgtgggagatgtcataagcctgcttcccctgatgtcggcaaatatggatgtcaggctcgaaggaaagaagattatctatcgctatcggcgtgatgctgaatatgcgaatttcaatcaaaaggacatttttcaccttaaaggcttcggatttagtggcctggtaggcttgtctccaatagctcacgcctgcaaatcagccggtgttgccgtggcgatggaggatcagcagcgagagttttatgctaatggcgcaaagtctcccaaaatattaaccactggggatcgggttctgacaaaagagcaacgtgctcagctggaggagaattttaaagaaatcgctggtggtccggtgaagaaacgcctctggatacttgaggcgaattttcaggctcatgatatcggcgtcagccctcaggatgcagagacaatggcgtcccgtaaatttcaggtgagtgaacttgcgcgattctttggcgttcctccccatctggtaggcgacgtggagaaaagcaccagttggggaaccgggatcgagcaacaaaatctgggattccttcagtacacactgcagccatacatatcccgttgggaaaacggaattcaacgctggttattgaaaccggatcaagtcggcgtatatcacgcagagcacaacctggatggattgttgagaggtgattctgcatcacgtgcggccttcatgaaagctatgggcgaggcaggattacggacaataaacgaaatgcggaggctggataactaccctccggtacctggcggtgatgtcgccatgcgccaggcacaatatgtgcccattacagatctaggtaataacacaaagccccgcaatgacggggcttaa

SEQ ID NO: 235782 - DNA, 681 bp, Klebsiella pneumoniae
atgcctgacatcatcaaaacgctttctttcgatgaaacagaaattaaattcgccggagatggtaagcagggaatttttgagggatatgcctctgtattcggtaatacagattcagacggcgatatcattcttccaggtgcctacaaaaacacgcttgaaaaacagacgcgcaaagttgcgatgttttttaatcaccggcaatgggaaattcctgttggtaaatgggatgccctcgaagaagacagtaaaggtctttatgttcgtggacagcttacccccggaaatagcgcggccagtgaccttaaagcagccatgcttcatggtacggtcgagggaatgtcggttggttttgcagtaacaaaagacgactacagcatttcgcccgctaatggtggccgcatcttcaaaaacatttcatggctaaaagaaatcagcgtctgcacatttccggcaaacgagcttgcgggtgttgattccatgaaaagtatcgacggcattgaaaccattcgtgatgttgaagcctggctgagggattcagtcggtctcagcaagtcacaggcagtagggcttatcgcccggtttaagtcagcagttcggagcgagtccgaatgcgacgaaaacaaagatatcagcgctctgcttaagagcatctctaattttcatcagacattaggaaattaa

SEQ ID NO: 235783 - DNA, 1167 bp, Klebsiella pneumoniae
atgtccgaactcgctcaaattcagaaagccctggaagaatcacaaagtaagctgcaggggcttttcgacgaacagaaaaaacagatcgagcagaatggcacgatctccaaacaattgcaggatgatatggcgaaggttaatgaggaaatgaccaaaactggtcagcgtctctttgatctcgaacagcgactttcttccggccctgataatcctggtgaaaagaaatccttctcagaacgtgcagcagaagagctgattaagtcatggaatggcagtaaaggtaactttgaagcgagcacttttaataaatcgctgggaagtggcgctgcatctgccgggtctctcattcagccgatgcaggttcctggcatcattatgcctggcttacgtcgtctgaccatccgtgatctgctggctcaggggcgtatctccagtaactcactggaatatgtccgtgaaaacgtttttaccaacaatgctgcaagcgtggcggaaaaagcgctcaagccagaatccgacatcacattcaccaagcagactgccaacgttaaaaccattgctcactggattcaggcttcccgtcaggtgatggatgatgcgccgatgcttgaatcttatgttaacaaccgcctgctgtatggtctggctctggaagaagagcgccagttgttaaacggtgatggcagcggtgatgacctggagggtatcaaccatgttgcaacggcgtatgatacggctttgaacgttacaggtgatacgcgtgctgacatcatcgctcacgccattttccaggtaactgaatccgaattcagcgcctctggcatcatcctcaacccccgtgactggcacaatattgccttattgaaagataacgaagggcgatatctctttggcggacctcaggcgtttaccagcaacatcatgtgggggcttccggtcgttcctacacgcgctcaggcacagggaaccttcaccgtcggtggttttgatatggcctctcaggtctgggatcgaatggatgccaccattgaggtgagccgtgaagaccgcgacaacttcgtgaaaaacatgctcactatcctgtgtgaagagcgtctggcgctggcgcattatcgcccgtctgcgcttattaaaggtacctttgctacagaacctgctggtggttaa

SEQ ID NO: 235784 - DNA, 339 bp, Klebsiella pneumoniae
atggagccaggtcgttttgtgcaccgcgtagtaattatgaacttttctaccacgcgaactccttctggacagccggttgagcaatggcttgagggaaaaaccatttcagcagaggtgaaaggcatcagtgggcgggaactgctgtctgctggtgcagaacaggccgatgcaacaattcgtgtatggacccgctaccatcatgagatcaccgccaggtcaagattgaaggtgctgacaggtccattcaaagacgccattctgaacgttaccggtcctccggttccggatataaaaggtacccggctggaaattctctgcaaacaggggaccgaaaaatga

SEQ ID NO: 235785 - DNA, 198 bp, Klebsiella pneumoniae
gtgattctgttcaagagaatatttgtatatctctggattaatgcctgcaccatcaataacaatagtctgttgttcttcgagtccaaccaacttagccagtttttttctgtcacggtcatgttcaaacataaatatacagcgcttattactggcaatatatttatatgcagcaatagtaaactgccgcaacaattttaa

SEQ ID NO: 235786 - DNA, 204 bp, Klebsiella pneumoniae
atgatgcttacccttgagcgctgcgaaccctgcgaaggggccggggtggcctgttattccgggtcgactgtcacccacgtagggatcgtggtcagtatcgatggtctgctgcatgtggcggaatgcaatccgggaacgaacgtcacctttctgccgttgccgcggtttaagcggcgatttgtcaaagtggagttctggcaatga

SEQ ID NO: 235787 - DNA, 237 bp, Klebsiella pneumoniae
atgacgcgactgaccaatctgacgccggcagagaagcaatttcttgatgatgctgttgcagctgcagagcgtgcttccggcaagaaactcaaccagccgaaccgacatatcgtgctcaaccgggcaagagcgcagattgaatcgcagcggcacgccgaccggcagcgcgctctacgtgaggaagaacggcagcaggccgaatttacctggtcacgtccgcgatcgccgcgccggtga

SEQ ID NO: 235788 - DNA, 204 bp, Klebsiella pneumoniae
atgatgcttacccttgagcgctgcgaaccctgcgaaggggctggggtggcctgctattccgggtcgaccgtcacccacgtagggatcgtggtcagtatcggtggcctgctgcatgtggcggaatgcaacccaggcacgaacgtcacctttctgcccttgccgcggtttaagcgtcgatttgtcaaagtggagttctggcgatga

SEQ ID NO: 235789 - DNA, 390 bp, Klebsiella pneumoniae
atgaaaaagacccgctataccgaagaacagatagcctttgcgctgaaacaggccgaaaccggcactcgggtggaggaagtctgcagaaagatgggcatttctgaagccacattttacaactggaagaaaaagtttggcggcatgggcgtgacaaaactgcgccgcctgcgccagcttgaggaagagaatcagcgtctgaaacgtctggtggctgatttaagtctggacaaggtgatgctgcaggaagttatcaaaaaaagttctgaggccggctcagaagcgtcaggcggtgcattttctgcgggaggcttaccgtatcagtgtccgacggggatgcggactgctgatgcagagcagaaccgtttaccactggcagagccggcgggatga

SEQ ID NO: 235790 - DNA, 1518 bp, Klebsiella pneumoniae
atgaatatccgggaatttataggccagtatcgcaaccacccagtgctcttcatcggagcaggtatcagtttgaggtatcttaacaattcgcatacatgggatggattgttaaagtatattgcttttgagttgaaagggaataatgagttttatttagatattaaagctgaatgccaagttgatggtaaatataactattccctaattgctactaaattagaaaaagcattcaaccaagcattaggcgaagatcgtaatggtaagtttaaggagataaatgattatttctatgctgagatggagcgtgaaaataatctgagcaggtttaaaatatatatttcaaagttagtggggaggcttgattatatagataataaaaaagaggaattggcagagctaaagaaaatcagaaaaaatgtaggctcagttataaccacaaactatgatggccttgttgaagatgtatttagctttgaaccgttagtagggaatgatatattattgagtaatccctatggttccgtatataagattcatggctgtaataaagacccttcaaaaatcataataacagaagatgactactctcattttgataataagtatgagttaattcgcgctcaattgctctcgattttcattcataaccctattatatttatgggttatggaattggtgatgaaaacataaagagcttactgaaaactattttcacttatgttgaaccaaactcacttactgcacaacgtattagaaataattttctcttggtcgagtttgaaaaggattcagcatcacatgatattactgagcatgacattgatttagaagggttttccacaataagaataaataaaataaagactgatgatttcatagaaatatatagagcactatctaacttgaatctaccagtatctgctatggacatacgaaaagttcaaagtattgttaaggatatatattctggtgtacatgatgatggtaccagtataaaagttaatattacagaggatatcgattctcttaataatagcgataaaatattagttataggatcaagtaattctataacatatgaacataagaattcgtcgaatttcataacggattattttgatataattgatgaatcaaaccatcaattgttacagttaatcgataaaataaatataacatctacccaatggtttccaatatatggcttctgtcagatttgccatgagcttgttaagtgtgaaccgcttaaaactcaacaaagaagaaaaatcgaagagtatcttgctggtttgccaattgcagtgcaaaacacacatgataattggggggatatttattctgatgaatcaatcactcgaacgaataaaataaaatctattatatggtcaacatggaatgatattattgttgctgatgatgtagaagggcttttacgttcgatgccagacaaaaaaggaacagattataggcgattactctgtgtgtacgactacaaaaaatatggtgatcctcattga

SEQ ID NO: 235791 - DNA, 1203 bp, Klebsiella pneumoniae
atgcgggtcagcaccccgcgtctgaccctcgagcagccgatccgctggctgcgcgatgctgagcatccgcggttgaccggcgcgctgtcgctggacgccgccaaaaccaccttctccggcggcagctatctcccggcctcaacgctgaaattcgctctcgacggtcgggacccgacgtggttccagttcaccggcgccctgcatgccgaggctatcggtccggtgcgtctgtccgggcgctgggatggcgaacggctgcgcggccaggcgtggtggccaaaacagtcgctaacggtgttccagccgctggtgccgccggactggaagatgaacctgcgcgaaggcagtctctacgcgcaggtggccttctcggcggcagccgggcagggatttgaggcgggcggccatggcgtcctgaagggcggcagcgcctggatgccggataaccagatcaacggcgtcgatttcgtcctgccgttccgcttcagcgacggtcactggcagctgggcatccgccgcccggtctccctgcgcattggcgaaatcgtcaaccaggtcaccgcgcgtaatctgacggcggacctgcagggtacctggccgtggagcgaggccaatccgctgcagctcagcgacgtcagcgtcgatctgttaggcgggaaactgacgctgctgcagctgcgtatgccgcagcgcgacccggcgttgatccgcctgcagcatatctccagcagcgaactgaccagcgccgtcaaggtgaaacagttcgccatgtccggcgcggtgagcggcgcgctgccgctgtggctggagaataatcaatggatcatccacgacggctggctgcgcaatgacggaccgatgaccctgcggctggataaagacaccgccgatgcgctggtggcggataacgtctccgccggggcggcgattaactggctgcgctatatggaaatctcccgctcgtggacgcagattaacctcgataatctgggcgtgttgacgcttaaggccagcattaacggcaccagccgggtggaagggaaaagcagtaccgtgcatttaaactacgctcatgaagagaatattttcgacctgtggcgcagcttgcgcttcggcgacaatttacaggcgtggctcgagcagaatgctacgctgcccgtacggcgctgtacggacggtaagacatgtaaggaacctaaatga

SEQ ID NO: 235792 - DNA, 903 bp, Klebsiella pneumoniae
atgatgaccacggcagagggagggctggcgtatcagcgctggctggcgacgatcaatcaggtctgcggccatttcgccgcccggccgttggaggagagtttccacggcgagattgacgcccgctacgccggcagcctcaaggtcagtaccgtcaccgccgccggcgtcaatctctaccgcacgcgcaatgagataaaacgcgataacgacgcctggttctataccgtgtttcagctcgccggcgaagccatcatcgaacaggacgatcgccaggtgacgctggcggcaggcgatatcacgttaatcgacgccgcccgcccatgctccatcgtctggcagcagacctcgcgtcaggcctcgctgctgctgccgcgccagcgggtggcgcccacaggggacatcactaccgcctgccggctggacaaatctctgccaatggtccagctcagccagcgactgctgctggaaagcatgggcggcacgacgctctccgccagcgagagcgaagccgcgctggaggcgatcgcctgcctgttgcgcccggtgctgcatcagtgcgatcctgccccttcccggcgggaaaagcagtttcagaagattattgcgttaatcgatgcgtccattcagtcggagcatctgcgtccggagtggctggccagcgagacgggcatgtcggtacgcagcctgtaccggctgtttgccgaccaggggctggtggtggcgcagtatattaagaaccggcggttggatctgtgtgcccaggcgttacagaatgtccatgacgatgaaaagctggcggggatcggctaccgctggggcttcagcgaccacagccatttctccaccgcctttaagcagcgctttggcgtcaccccgggggaataccgcaagcgctgtcgctaa

SEQ ID NO: 235793 - DNA, 1500 bp, Klebsiella pneumoniae
atgtccacctcacagatagcgctgcttgccagcgtccagcagtttttagaccgtcagcatggcctgtatatcgacggcgccccctgcgccgcgcagagcgaaaaccggttaaccgtctgggatccggccaccgggcaggcgattgccaccaccgccgacgccagcccggcggatgtcgaccgggcggtgatgtccgcctggcgcacttttgtcgatcgccgctgggccgggcgcaccccggctgaccgtgaacgcatcctgctgcgttttgccgatctggtggagcagcacggcgaagagctggcgcaactggaaaccctcgagcaggggaaatccattgccatctcccgcgcctttgaggtcggctgcaccctgaactggatgcgctacaccgcggggctgaccaccaagatcagcggccggacgctggacgtttcgatcccgttcccgcaaggggcgcgttaccaggcgtggaccaaaaaagagccggtcggggtggtggcgggcatcgtcccgtggaatttcccgctgatgatcggcatgtggaaggtcatgccggccctggcggcgggctgttcgatcgtcatcaaaccctcggaaaccaccccgctgaccctgctgcgggtggcggagctggcgacccaggcgggcgttcctgacggggtgttcaacgtggtcaccggcagcggcgccggctgcggcgcggcgctgaccgcccatccgcaggtggcgaaggttagctttaccggctcgacggcgaccgggaaacagattgcccgcgtggctgccgaccgcctgacccgcgtgacgctggagctgggtggcaagaatccggcgattgtgctcaaagacgccgacccccagtgggttattgaggggctgatgaccggaagcttcctcaatcaggggcaggtctgcgccgccagctcgcggatctacatcgaagcgccgctgtttgacaccctggtcagcggcttcgagcaggcggtgaaatcgctgcaggtggggccggggatgcaggagacggcgcagatcaacccggtggtctcccgggcccactgcgacaaggtggcggcctacctcgaagaggctcgccagcagaaggcagagcttatcagcggcagcgccggaccagacgcgggagggtactatattccgccaacgctggtggtaaaccccgacgccggactgcgtctcagccgtgaggaggtttttggcccggtggtgaacctggtgcgagtggccgatggcgaggaggcgctgcgcctggccaacgacagcgattttggtctgaccgccagcgtctggacccgcgatctgacccaggccctgaactacaccgaccgtctgcaggcgggaacggtatgggtcaacagccataccctgattgacgccaacctgcctttcggcggcatgaagcagtctggtaccggccgcgatttcggccctgactggctcgacggctggtgcgaaaccaaatccgtctgcgtgcgctactaa

SEQ ID NO: 235794 - DNA, 480 bp, Klebsiella pneumoniae
atgaacaggctggtcacctttggcctggtgctggctgtagttgcgctgggctggaccgctgatcactactacggaaaagcggtggacttgcgggataagtaccgcactgcttacagcaccacacagctgcaggcagccaccatagatgacatgcaggccaggcagcagtccctcgctgcactcgatgcaaaacacacgaaggaattagccgatgcacaaaaccagatcgatgctcttgagcgcgatgttgccgatggtcttaagcagctgcagctccacgcccgttgcccctccgtgtcagccgataaatccaccggcacctccggcccggatgatggagccagccttggacttactgacaccgctgaacgggattattacaccctcagaaagcgaatcgaaaaagcccgtaagcagatagatggcctgcagaactacatacgccagcagtgcctagcaccacaaacagcctcgcattag

SEQ ID NO: 235795 - DNA, 192 bp, Klebsiella pneumoniae
atgagagatttagcattagttgatagctttggtggcacagatgccgacaatgacgatattttgctaaaagcttttgaagatcatgaggcttatcaagatatattaaaatttaaaaaatttttagtcattggtaaaaaaggtagtggtaaaacggccatttttaaaaaaaataataacaactcgtgcagatga

SEQ ID NO: 235796 - DNA, 1128 bp, Klebsiella pneumoniae
atgagtaaattagaggcttttatagttgatgcctatggtagtcgtgatcctgatttaacccaagtatttaatcctcaacgagaaattaggcttaaacctcattttgaattgaattttaaaatattgaaagctggtgccagtgctgagtcaatttctattgctgatttaccaactgttattcaagaggtaaatgcacaattgatgaaacttgttttggcttctcttaaccccgaacataaatatttcatcgcatttgatcagttggatttgggtttcgataataaagctgatgattatataagtcgattgataggtttgctacttgcaggtagagatattaatatcgcggctaaaaatgctcaagtgaagtttttggttaccgtatttttacgtgatgatatctacaacgtattacgctttgaagataaaaataaaattactgaaaactttatgtcgttaattgaatgggatacgcctagaacaacgaaaactttaaagtcattaatggaaaaaagattcagtattgttgcatctgatattgatattgagcaggatgttaaatggagtgatatttttaacgagacgagagaaatgccaggtcaccagagcaagtatgatcatatcaaagatagaacatatcttcgtcctcgtgatatgattaagtttgctaatagtgctcttgctaaatttaaagaacgactaaacagtcccgcttcaaacacgcaggatgacaaaaggaaaattgataatattgatattcacagtgctcgtcatgaatatagtgaatattttcttcgggaaatagatgatgaagtacataaacattttccggagtatgagaaattcttagatgttttaagggctgttggaacttggcagttcgagaaaagtacctttgagatagtattgtcacagattttctctaaaagtgataagacaccttctgaggctttagaagagttgtatgattattcattcatagggttttataaggcgggtggtagtggctatggtggttcagaatatgtgtttaaatacagagattcccgtgcatctttctctcatgcctctactaggttccgaattcatcctggtctaattgaagttcttggattaaaaaaagtataa

SEQ ID NO: 235797 - DNA, 429 bp, Klebsiella pneumoniae
atgtctgcatcttataaacacaatccgctaccgaccccaggcgatattgtttggtgccatttccctatcacggcaaatcttgggaatcctggaccaaagccccgccccgcattagtaatcgcggtatcgcctgaacaccatgttgtgaaggtcgtgtacggtaccagccaaaaaacggacaaaatttacaagtctgaatttgtgctgaagaaagcagatgcaaatttttctgacagcggtcttgcgtttgacaccaagttcgacatgaacatggctgtcacgataccgtatgactcagaatggttcgacttggcgccagttcagccaggccaaaaaccaacaaccaaccccaaaatgggtgtcctacacctcagctacctccctgctgtaaaaacggccatgcagaactcgatacatctcgctgcatag

SEQ ID NO: 235798 - DNA, 282 bp, Klebsiella pneumoniae
atgaatgtccacgccgagaaacaagcaagttttctctttaggctgcggtctcaagacacgcctacaggagttagcaacgaaacgcttgatgctttaatgcaaaaaaccggcttgagcaaaacagaagttacccatctggctcttcgtaatttggctgatgtctatctaccacattatgagcgagatgactctgcgctaaaccctgctcaaatccagaccatccgcgaagcatcaccagcgggcgacgtaccggaggagagttttactatgacactactctaa

SEQ ID NO: 235799 - DNA, 306 bp, Klebsiella pneumoniae
atgaagcgttatacacctgacttccctgagatgatgcgcctgtgcgagaccaatttcgcgcagttgcgccgcctgttgccgcgaacggatgcagcgggtgagaaggtaagctatcaggtgggaagcgcgcagtatcggttaacgatagttgaatcgacccgctacactactctggtggcaatagagcagactctgcctgcagtgagctactggagcctgccatcgatgaccgtccgcctctaccatgacgccatggtggccgaagtgtgttcgagtcagcagatctttcgcttcaaagcgcgatag

SEQ ID NO: 235800 - DNA, 771 bp, Klebsiella pneumoniae
gtgattcatacgtcctacgttgaaaagacctgtctcgttgataccacaacgacaactattgccggtaatcagttctataccgactatcaggacccgtggaatgcggcactgacaaaagcgccagcgatggtttgtgagggtggtatcactgtcgacagaactgtcgtttcggctggcgtggctacacatccgttcagccagaaaccaacaaccatcaacggcccgctcattatcaatccgttccgtgataatacagaggactacacggcctcgcagattgcagagtggaacagcgccgaagggaaaacggtatacctctatgactggcgccgtcagtacagcgtccagcgcccgatacggttttttgataacacacaggaagcattccagtattacaagggtgtctggacgccggttgtcaaatgcggctcagaagtcgtgacgctgaataccaccgtgggaacctaccgccgctcagggcgtttagtgcatgcgactttcagaatcgaaaccacgtcaatggcgctgacgacaggaggcgcggtagtgatatcagggcttccgttcacggttgctgcactgagtgacgggggattaacagtttccccgataatttgcagtcgcgcaggctctgccatattgcttgcgcaaacgaacccgacaacgagggacatcttgctgctaacaaatagctcgccatccgctttctcaataaccggcggaaccggtttaactatttacggttcagttcagtacgttctgacagaataa

SEQ ID NO: 235801 - DNA, 210 bp, Klebsiella pneumoniae
atgcggattaaacctgacgataactggcgttggtattacgatgaagagcacgaccgcatgatgctcgatctggccaatggcatgttatttcgctcgcgcttcgcccggcgcatgctgactccggatgcctttgccccttcgggattttgcgttgatgacgccgcgctctatttctcttttgaagaaaaatgggctttgttgaataaataa

SEQ ID NO: 235802 - DNA, 210 bp, Klebsiella pneumoniae
atgtggaatccagcaaccagcacaagtattgaagaagttgtaactgaggctaataacctgaatgaactcttagatttgatgcatctttgctttaaaaaaatgaaccctcctcagaccgaagcattgctggggttggcgctaaatatcgcatcaaatatttctgtctggatagaggccgaggagaagcgccgtgaaaacaaatctgattga

SEQ ID NO: 235803 - DNA, 2157 bp, Klebsiella pneumoniae
atgacatcagtaatgaataataagccttctcccgtagattccgatgacatcgatttaggccgtttaattggtgaattgattgatcatcgcaagttaatagttgcgataactacagggtttacagtaatcgcggtattttatgctctgttagctacgccaatctatcaggcaaatgcattggtacaagttgaacaaaaacagggtaatacaattttaagtaatttaagccaaatattacctgatagccaaccgcagtctgcaccagaaatcactctgttacaatctagaatgattctaggtaaaacagtagatgatttaggattgcaaacccagataaaacagaagtttttccctgtaattgggagaggcttagctagaataatgggaaataaattgggtgcaattgaggtaaaagatctttacttgcctgataataaaagtggtgaaaatccagaggtaatcttaactgtaattgataaagataattactcaatagaagcggatggatttgattttaatgccaaggtaggtgaattggtcgaaaagaatggaatgtcgattttagttacaacgattgaggctgagcctggtagtaaatttagtattaactacctgacgcgtctaaaagcaatgaatatgctacaaaattcatttggagttgctgatcaaggaaaagacactggcatgctaacgctgacaatgactggtgacaatccacagcaaattacaaaaattttagatagtattagtcaaaattatttagcacaaaatgtggagcgtcaagctgctcaagatgcgaaaagtttagattttttaaaccaacaattacctaaagtccgaaatgatttagatcaagctgaggataagttaaatgcttatcgtaagcaacgtgattcagtcgatttgacaatggaagcgaagtcagtattagatcaaattgttaatgtggataaccagcttaatgagatcacattcagagaagccgaaatatcacaactctacactaaagagcatccaacttataaagcattaatggaaaaaaggcaaacactccaaaatgaaaaaacaaagttaaataaaaaagtaagttcgatgccatcgacacagcaagaggtgcttaggcttagtcgtgatgttgaatctggaagagctgtgtatcttcaattacttaatcgacaacaagagttgaatatagccaaatctagcgcaataggtaatgtgagaataattgataatgcagttagtgaaccaaaaccaattaaacccaacaaaccactaattgttgtggtcggatttatctttggcttattgttttcagttgggatggttttattaagaattctattaagacgcggtattgaatcgccagaacaattagaagaaatgggaataaatgtttacgctagtgtacctgtttctgaatggctaagtaaaaacttagcgaaaaataaaattaacagaaaagagtctgatattttactagcagtagaaaatcctgcagatttagccgttgaagcgattagggggttacggactagccttcattttgcaatgatggaagccaaaaataatatacttatgatttctggcgctagtccaaatgctggtaagacattcatcagtacaaatttggctgcaacaatcgcattaacaggaaagaaggtactttttatcgacgcagatctgagaaaagggtatgtgcataaaatgtttggcggtaacaatgagcatggtctgtcagacattctttctggacaaaccactctcgataattctttaaagcatgttaaagaagggggctttgattatattggacgtggtgcggttccgcctaatcctgcagaattgttaatgcatccacgatttgaaacccttttgaaaaaagtaagcaatgaatatgatttggtaattattgacacgccacctattttggccgtgaccgatgcggctattattggcagatatgcaggtacgactcttcttgtcgctaggtttgaaatcaatacgcctaaagagttaatggtaagtgtgaaacgctttgaacaaagcggtatcacaatcaaaggatgtattctgaatggtattgtaaagaaagccagcagctattatggctacggatatagccattatggctactcctacgaggataaaaaataa

SEQ ID NO: 235804 - DNA, 618 bp, Klebsiella pneumoniae
atgaatactttaaataccatcccggaaggttaccggattaacgctcaggggcatttagttcctgaatcacagattaaaccactggataaactgcgtgatgaaatggtgctcggcatcgttgaggcggctcgtctgcagcgtcagtcgctggtcgagttcaagctcggctctatggcgaaaatcggtgactttatcgacctttcagcagcggagtacggcgtggagtatggcggtaccaaaggcaatgtcacactggccagctttgatggccgttataagttggttcgcgccgtaggcgagcatcgcatctttgatgagcgcattcaggcagcgaaaaagctgattgatgactgcattcatgaatggtctgccggagctaatgaaaagattatggcaatggtcgatcatgccttccgtgtcaataaacagggccggattgatatcaatcaggttctgggtctccgctcactgaatattgacgatgccaaatggaatgaagcgatggacgccgtcgcggacgcgattcaggtgacgggaaccagtcagtacctgcgtttatatgagcgtcaggatgatggaacttataaacagatatcgctggatttagccaagctctga

SEQ ID NO: 235805 - DNA, 870 bp, Klebsiella pneumoniae
atgagaaaagttggaagtactacagatactgctgatgctaatggtgaatatactaatggcaacgttgctaatgggatttcaccgactattattaatgcagaaatgctgaatacatttcagcgtgaattggttaatgttgttgaaggcgcagggatggaattagatcctgctgatgataatcaggtggcaaaagcaatagagaaaaaagtaggtggcggaagattattaaatataaaaacatttacatcttcgggtacatataccccaacacctgggacgcgatacgtgattgtcgaggccgttggcggcggtggaggtggcggcgggtgttcatccacaactagcgataatgcagctgtaagtggtggtggtgcttcaggtagttacatcaaagcgaaatttgacattgcaagtataggcgacacggtagaaattactattggcgctggtggggttggcggtataggtaggcaggctggcggtgcgggaggagatacaaaacttggcgcgcttgcaactgcaactggtggtaagggaggaacatcctctactagcccagcgtcatctgctttcatcgccgttggtgggacaccaggttctatacctattggcggtaatttgatatcttccttaggaagtcgcggaggggctggcttattttttaactcttcaactggcgccgtaggtggagacggggcaccctctcaatacggtggttccggaattggttctggaagttctggaactaccggtactaatggtagtggatatgggagtggtggcggcggtaatgcccgccagccatcatccggtgctgttaatggttacgatggagctaaaggtattttaattatttacgaatactcttga

SEQ ID NO: 235806 - DNA, 1128 bp, Klebsiella pneumoniae
atgattctccgaaaaactgttaaaatcagagattatttaattgaattagagaataaaatgaaaggacgtttagtaagtcaaattataaccaaaggtaataataacctcgattttatccggttattggcgtcattatcggttatcgtttaccattcatttgttttaaatccacaatggggaatagtggatcctgtaaaaaatacttttggctatgtaacgactggaggtctagccgtaaaaatttttttcttcataagcgggcttttagtcaccaatagcctattgacgagaaaatcaattccccaatttattatatcgcgagcgcttagagtatttccaggattggcttttgttgtgattattacagcatttgcaattggccctatttttacaaacatccctgttattgaatactttaaatcaaaccaacctattttatatgcattaaagaatataacattggaaacgcagtactttctccctggagttttcgaaaggaataaatacggtgtaaatggttcattatggacaatacgctatgaagtattagcttatattactttagttttcttatatttaattggcttgggtaaaaaacgttggttatcatcgctattatgtttcatagtaatagttgaaccgctcatgccatacaaaggtatgttatttgcatcatcagacaataatgcaatttatctcttagctccgtgctttgctctcggctctctattggcaataaacaaaaatcactacagaactaatgcttatataccagccttattgtttataagtcaattcgcatttgagagcgtagcagtttcctcactccttatgtgtttatcagtatgccttattactcttcacatatcatcaatacaaaccattataaaaattaaaattaatcatgatatatcatacggagtttatttgtggggtttccctattcaacagatcatatctcagaatttcaatgttaattttgcattaaatataatcacatctattatcattatagttcccattgcgttatgctcatggttttttgtagaaaaaccatcattgaaactctccaagaaaatatcagaaatgaaaccaaaatgtaacttaatcaagagtattcgtaaataa

SEQ ID NO: 235807 - DNA, 729 bp, Klebsiella pneumoniae
atggtcatgacaattaaatcgaatattcctggtgacgtaatcgcgaatccggacggatggaaccctgggtttacaatggatggcctgagttatgccggcttgtttgggcgtagcctgactaaaaactttgcgcccggcggtggagatgcagcggtagtgggctctccggttgtgaccggtcattttgctgattttaccggttctaattatatcgccacgggaatttcgacgacaaaaaatgcgacactaattacagtcgcaaaaaggaaatccggggcaggccgccagttccttatctcctgttttcagagtggtgaaaatattggacgctctctggttcttgagggcggatcgttgtccacttactctcactacaaaggcgttgacgcgggcggaaaaacattcaacacgtggttcataaaggcgttgacattgactgcacttgatgattccccggcatttctttctgtacgagatacaggcaaaacgctatatacaaatgacaaaaccagcaatctggtctccagcgctacggccagcggaacggtcgagtcatttgctgatgctgcgttgcactatcgaatcggaaagagtctgcagtccggggcgtccgatccctgctcgattggcgcggcactgatttacaaccggtcattatcagacgaagaacttaacgatgtttatgcctattttaaggggtatttttcccggcgggctatctccatctaa

SEQ ID NO: 235808 - DNA, 1437 bp, Klebsiella pneumoniae
atgactttattaaaaaacgctcaatggaatatgctttcccagttttttaaaatgcttgtccaattaattaatgttatttatttagctaaaataatacctcccgcggaatatggtattatggccatggctctggttattataaatcttggtatcttgttacgcgatttaggtacttctgcagctattatccaaaaaaaatctttaagtcaagatttagtaaatacggttttctggcttaacagttttatgggattagctttagctattatcgtagctgtttcagcaccttttgtctcatctttttatggacaggtgaaactatttccagttttaattttattaagtattacttttccattatctagttgcgctgcaacacacttagccttacttgaaagagagtctcgttttaaaacaatatcttttatcgaagtctcatcctctattattgcagtgattgtagcaattactatggcaaatatggggtttggtgtgtttagtttggttggccaagctatcattcttaatcttatgtcagcaattcagttttggcgtgcgtcaaagtggagaccttatttcaaacaatttattaaccttgatgaacttcgaagtatttttggatttagtgctaatttatctctttttaattttattaattatttttcgagaaatactgatagttttataataggtaagtttttttctgcagcaatattgggtagttataaccttgcttacagacttatgttatttcctattcagacattaacttttgttgccaatagatccttatatccaattttaagcaggcatcaagatgataattcagtgatttcgaaaaactattttaattgtgtgttcattattttgatgttgacaacaccattaatgagtgggttagctttctatagcactccatttatatatttagtttttggaagtcaatggtttttaactgcggagattctgcgttggcttgcacctacggcaattattcaagcggttttgagtacaacaggtgcagtatttatggctaaagctaagacagacgtcttaatgcgtttaggttttcttgggacttttttacaagtaagttcttttattattggtgtacaatatgatattaagatatttgcaatgtgttattttattgcaaattgtcttaatttctttccagtaatgttttgcttatttaaaattattgatgtatcttttatcgatttcttcaagcgaattagtcccatttttgtgtcttctttacttatggtgctatttttatatgcactttcaattatatatccagtaaatgatattgccaacttattagtccttgtgttatttgctgtggcaggtgcatttgtttatattctcgctttatttttagtgtctagcgattttcgaagttattttattgctcgtgtactgaagaggcattga

SEQ ID NO: 235809 - DNA, 831 bp, Klebsiella pneumoniae
atgaataatattgcgattctagtagtgctatacgataaagaattgatagactccaaaacattaacatcgttggttaactttgactttaattttaattcattagttatttataacaacggacccgtcaatttggctgttaacgagcagtttgtgaatagtttatatcacaaatttaaatctgtgaaaatcgtcaacgatttaaataattctcctttgagtaagatttataataattttatttcggaaattgaagtttcttcatatgttatcttggatgatgacacagagttaaatcctagttatattgatatgttaaatgataattatttaaaaccaaaatatgatattgtagttcctaaaatcatatcgaagggtggagaacagtattatcccatatctaatggttcgccagttattactgaaggagatgttaataacttacctaacctattatctataacttctggagttgtcataaacaatactctactagcaaagatcaatgttcttaataaccgtgtttttgacgagcgatatgcattatatggtgtagataccagttttttcaaaaatatatccaagaataagcgagtgtcgataggattagcttcgcatttatctcattctttatctcgcgctgaatcaatagattcaccttttaggagaaaagaacgcttattcgatttagccatttctacgagatgctatcctagccttttcaattattattattttattaagactttaattaagttatttttttccagaaactttaaacttgcattatcagtagtagatgttttttgtaaaggtagacatcccaaatgctaa

SEQ ID NO: 235810 - DNA, 276 bp, Klebsiella pneumoniae
atggcaaaatttactgttcgcgtcgaattacatgatgctaattccgaggattacgacaatctgcacaagaagatggaagctaagggttactctcgagaaataagctcaaatggaaaaacctatcaacttccgtccgccgagtatatctgcgagaaaaatcttgaagcctcagcagttagagatgaagtcaaagaaattgccaagtcagtaaaaccggcaccagatattttagtaaccaaatctgacggaagggcttggaatctgggacaggtttaa

SEQ ID NO: 235811 - DNA, 168 bp, Klebsiella pneumoniae
atggatgaaaaagaatttaaaaatgttatcgcgctgctgcttgaggatgtacaacggcttcagatactggaaccaaatgcaggcactgaggcccgcatctggctggcgaagaatgctttagattctggagaccacgacgataaatgtcgtgatggccaagattattaa

SEQ ID NO: 235812 - DNA, 639 bp, Klebsiella pneumoniae
atggctacgattaaggatttatcccggcaacttcagacgttgcagaagcaaatcccctatgccacagcacaggctatgacagccgttgttcgtcagattgcagcagcgcaaaaagtagctttaggtcggaagttggaatcgccaaccccgttcacggtcaatgcagtgggttcttcaggagcccgcaagaacgatcttcgcgcaaaggtttatgtgcgagatatcgctgctggatacctggagccttttgagtttggcggcgatcataagctgaacagctcggcattgcttaaccccaaaaacatcaaactgaacaaatacggcaacatgccgcgaaataaactttcgcagttgaaagcaaagtcgaacgtgtttattggtgatgtgaacaatgtcaatgcagtctggcaacgtcgcaagccaaaacccccgaagaagaagagggctaagcgttctcctaatggcacacgcaggcctaaaccaaaacagcggccacctaaactgctggtgaggtttggtgatgcgcttcctgtaacgccagtgctggggtatatggaccgttcaaaagcgatggcagaggctttaatgcctactgccctaagccgcgctatctcggatgcgatcaggacagcaaaataa

SEQ ID NO: 235813 - DNA, 168 bp, Klebsiella pneumoniae
atggtctattacatctggaatggattgctaatcatcatcacaattgggttgccgattcttttgatgttcgcgtcaaacggtgctcagcctactttcctgtcctgccgtgaaattcgtgcccgttacgggacaccgcaaaagaaacagaaagacattaataacgcctga

SEQ ID NO: 235814 - DNA, 189 bp, Klebsiella pneumoniae
atggcattacagagccactttctgaggtggctcgataatgcttacccgaaaagaagcatagatctggtgtcaaccaaagaggtgatccacatcttgacggctcgcaaagacgagaagtggcggcgcaactctgagaagaagtggcaatgttgcgatataaattttgcgcatggtgtcgatataaattaa

SEQ ID NO: 235815 - DNA, 540 bp, Klebsiella pneumoniae
atggctaacccgaaaacgaagctcagcgcggccatgctggcgctaattgccgccggcgcatcagcaccaacgctcctggatcagttcctgaatgagaaagagggtaacagccttacggcgtaccgtgatggttctggcatctggacaatttgccgcggggcaacccgtattgacggcaagccagtaacgaagggtatgaagttaacccaggccaaatgcgaccaggtgaacgctatcgagcgagacaaggcgctggcgtgggtagaccggaatatcaaggttcctctcacggcaccgcaaaaggtcggcatcgccagtttctgcccgtacaacatcggtcccggcaaatgtttcccatcgacgttctatcagcgcatcaacgccggcgaccgtaaaggcgcctgtgaggctattcgttggtggattaaagacggtggacgtgactgccggttgaccaaaggccagaagagcggctgctacggacaggtcgaacggcgagaccaggaaagcgcgttgacgtgctggggattggaacaatga

SEQ ID NO: 235816 - DNA, 498 bp, Klebsiella pneumoniae
atggataaattcgacagaagcattcaacgggaaacgctgcaacttctttatgctgtatacccaaacgaactaactaacgagcaggtcaatgaaatcgccaatctgtaccctgacactgatagtttcatggcaaatttactttacctccaccagcaccagttgatagtgagtggtttaaaaccaagctcagaaggctacgtcctggtcaataggcccgccatcactcaccgtggtattgatttcatccgcgacgatggcggcctgggcgctattctgaatgtgcaaacagttaagctgcacgacagcacgatcattgccctggaagacataatccgcgttgcaaacattcctgaagagcagcggaagggactgatttcaaaacttcgtgagcttccggcagacgccataaaacatttgacgcttcaattactgactccggcggttctgcatccgcaggccgtaattcagtcaattgaaaaattcctccagactttgtga

SEQ ID NO: 235817 - DNA, 816 bp, Klebsiella pneumoniae
atgaaactggaagcatcgttaaagcatttcagcccgcaggggatgcatatcagcgacgacgtgaaaagcacatcgccgaatcgcctgaattgcacagacattatgaccgggatcggtgtgaccagcagcagggcacgcttcggcctggccgctttcttcggaaaggctggtatcagcaaaacggatgaacagctcgcagttcaagcgctggcgcgacatgccattgatacagcacctaaaaacgtgcggaaggccgcaggtaaagcgctggggcgctgctgcctggtgctggcgcagtttgcctttgcagaatattcccgttcagcggaaacaaccgggacctgcagggtatgtagcggtacggggaagatgcagacgactatcacggagcgcaaagtcacatatccgtggggaaaggcgccgtactgggcgaaaaggtcacgcgccgttcgtccgtccgactgggagaaatggacagaggtaactgctatcaccagcaccaaatgtgaatcctgtgacggcaaagggatgattaacgcccgctgccgctgcggtggctctggacaggttctggatcgaaaagagaccaaagagcagggggtgccggtttataaaacctgtgagcgctgttcgggaaatggtttttcaacgatgccgtctacggctgcgtacaaagcgattctgacgctcattccagacctgcacgtcagaacatggacccgtaactggaaacccttctgtgatgcgctggtggacgtatgctggaaggaagagcgccatgctgataaggaatttcaaaaagcgaccgatttttaa

SEQ ID NO: 235818 - DNA, 432 bp, Klebsiella pneumoniae
atgatcgacaaccgcaccgccagcgccattgacctggcattacagaagcaccacacgccagttggcgacctttacgccgctattcgtcacggccgcatgaagcgctgctttagccgcggtaccgccatcagctggcttgcccactttctgacgtcgcacgccttcgctctgtccgggtttaaacagcgccgccctgattttctggttgaacacgaaggtgtcgagatgcggtgtcgcggcgaaactaccgacgaatatcaccgcgcccaccagcgcaccgttcgccggctgcgtcgaatcctcgcccgcaaacgtgaaatgcagaagtggtgcgaaaggtgggatgccatgcacgaccgctacgtgaaagagcgtgaagaactcaaagccagcaaaccagcagaggtacgcaatggatcacacagtatttaa

SEQ ID NO: 235819 - DNA, 189 bp, Klebsiella pneumoniae
atgacgatggcgcagtttttccacagccacatccggccagacaacagcaatgccagtgattatgcaagtcttcggcatagcctccacgatgctgtaacaccagcccctgaaggcatggtccgcatgcagctgactcgcaatcaacgccgccttgcgaaaaaactcggcatcgcactgaaggaggaataa

SEQ ID NO: 235820 - DNA, 288 bp, Klebsiella pneumoniae
atgattgaccatgaaaaaaatcgcaaactggcgcgtctggcgcagattgttggcgtggaatctcagccagtcagtccctttggtccgtccgttctggggctgctggcggaagccagcgaacaattgggtcttgccgagacgctctaccgcgacaccaaaaccagcaatcgctatgccgccgcccgcgcccgtatggccgtcagtctgctgatgcaggcggctcagaagatgatgcgcgagcagcagtatgccgaacgtatgcgaacggaggataaagctcatgattaa

SEQ ID NO: 235821 - DNA, 1527 bp, Klebsiella pneumoniae
atgaaatctttaactttgatcccgggtcaactcagcctgtcgcagctccgcgacgtttacagcaacccggtaaatattaccctcgacagcggcgcgtttgccgccattgacgagagcgtggcctgcgtcaacgccatccttgccgaagggcgtaccgcctacggcatcaacaccggttttggcctgctggcgcaaacccgtatctcgacggaagatctggagaacctgcagcgttcgctggtgctatcccacgcggcgggcgttggcgagccgctggacgatgatctggcgcggctgattatggtgctgaagattaacagcctgtcccgcggtttctccgggatccgcctgagcgtgatccaggcgctgattggcctggtgaatgccggcgtgacgccgtggatcccggccaaaggctccgtcggcgcttccggcgacctagcgccactggcgcatatgtcgctgaccctgctcggagaaggtaaagcgcgggtacgcggcggcgaatggctgccggccaccgaagcgctgcgtcaggtggggctggagccgattaccctggcggcgaaagaggggctggcgctactcaacggcacccaggcctcgaccgcttttgccctgcgcggtctgttcgaagccgaggatctgttcgcctccgcggtcgtctgcggggcgttaaccaccgaagcggcgctgggctcacgtcgtccgtttgatgcgcgcatccatgaagtgcgcggccagcgcgggcagattgatgcggcggcgctgtatcgccacctgctgaccgacgatagcgcgatctcgcagtcgcaccataactgcagcaaggtgcaggacccgtactccctgcgctgccagccgcaggtgatgggcgcctgcctgacgcagatccgccatgcggctgaggtgctgctggctgaagccaacgcggtctccgataacccgctggtctttgccgccgaaaatgacgtcatctccggcggtaacttccatgccgaaccggtggcgatggccgcggataatatcgcgctggcgatcgccgaaatcggctcgctctccgagcgccgcatcgcgctgatgatggacagccatatgtcgcagctgccgccgttcctcgtcaaaaatggcggcgtcaactccgggtttatgattgcccaggtcacggcggcggccttagccagtgaaaacaaagcgctgtcgcacccgcatagcgttgacagcctgcccacctctgccaaccaggaagaccacgtctcgatggcgccggcggccggtcgccgcctgtgggcgatggccgagaacacccgcggggtgctggccgttgagtggctggcggcggcgcaggggctggatatgcgcgaaggactgaccaccagtccgctgctggaagaggcgcgtcacttgctgcgcgaacgcgtgccgcactatacgcaggatcgctacttcgccccggatatcgataacgccattgcgcttctggcggcccgtcacctgacgcgtctgctgcctgccgtactgcattaa

SEQ ID NO: 235822 - DNA, 552 bp, Klebsiella pneumoniae
atgaaacgcattctgacccttggcctggcgctgctgatgctgatcctcgccggctgcagcaccgaggttacggagtaccggcagcagcagcccgccctcgacatctttcactattttcaagggcgaaccgaggcgtgggggatggtgcaggatcgcagcggcaagcagctgcgccgcttccatgttgagatcgatggcgacgtcgtcggcgacaccctgacgctccatgagcgctttgtctatgacgacggcgagaagcagcagcgggtatggcgcattcgccgcaccggcgataaccgttatcagggcaccgccggcgatatcgaaggcgtggccagcggccaggcggcaggcaatgcctttcactggcgctacagcatgaacgtcgaggccagcggcagccggtggctgctgcactttgacgactggatgttcctgcaggacggcagccatttatttaacaaaaccgagatgaagaaattcggcattacggtcgccaccgtgacccttttctttacccgaaccacagcagaagagaggacagcgccatga

SEQ ID NO: 235823 - DNA, 1791 bp, Klebsiella pneumoniae
atgaagataaccattgcgcatgaccataaatcgatcccatctcaagcaccattcaaccttccagactttagtgtaatcataggaataaatggaagcggtaaaacccaccttttggaggctttgaatgattgcaacataacatccattgaaacctcaggaattcaactagcccataggatgtttttgccttttggagcactaacaccccatatcgaagtatcttgcgaccctgatcaaataaaatcaagcgttaaagttttgtgggatgacatatacaacactcaaaaaaacattcgagattccagcagaatacatccagacgaaaaagatgcaaatccatataaaaaagaactcaacatctttatgtttaatttggtagactctatgatgcgaaatacatcaaaaggctttcttgaattaaatgaagaagatgttctttatagtatagatacgattaacaaccctaatggtattttttcaactcgattggcatttatattcaaaacatatcacactcgatatgtaaaaaaccaatttaaaatattcctaaaccaaaatggaaacacatcatccagaaccttatccgagcaagaattcttagatttatatggtcccagaccttgggatctagtaaatgaattgatatctaaaattgggttgccatatgaagtaattgggccagacggcatggaaatagattcaacatacgcattaaacttcattaataaaaaaaataacaaaaagatttccacagttgacttttctacaggagagaaagtactattatcgcttgccctagcaatttacaatagcaatagtccgtcaggaaaattggacttattaatattagatgaaccggatgcgccactccaccctcatttttcaaaaatactaatagagactcttaaagatatattggttgataaagccggcataaaagttataattaccacccactcaccttccactgctgcattctgtcctgataattctttatttgaaatggatagggaagaacgaactcctaaaatgatcagtattgacagagcagttgaaaccctcacttctggcataccatatctaaaagtaaagaatgacaatcgtttgcaagtttttgtagaaagtaagtatgataccttatactatgaacatctttttcagatcataaaaaaaacagacataatagattatcatccaatttttttagagccacatagcggcacctccaactgttcagatgttgagtctatagtgactcgtctatacgatgctggaaatgatgttgtaagaggcatcattgattgggacaatgaaaaaacaaacacccaccctatatatgttttagggggtggacgtagatacgcgattgaaaattatattttagacccgttttatatagcactctctctaattagagcaggaaaaagaacactaagtcaattttccatatcacatattgacacatatgttgaaataagcaagataaatgcccaggacatacagaatacttctaatttaattttaataaatgctggcatagatataaatgtaacaaaaccttgtactttacttaatggttggacaattgatttaccaactagtttccttagtatgccaggtcatgcttgggagaaattattactttcgaccttccatgaattaaaatccgtatgcgttaacaacaatgactcagggttaaaactcggagtactgaaaagcatacgagaattccctcaatttttttcatgtgatatacgcgagacatttatagatataaacaacaaaagttaa

SEQ ID NO: 235824 - DNA, 1296 bp, Klebsiella pneumoniae; identical to SEQ ID NO: 219703

SEQ ID NO: 235825 - DNA, 159 bp, Klebsiella pneumoniae
atgggtaaagtgcaggcctaccccagtgatgaggtgtgtgagaaaattaatgcgattgtagaaaaacgcagaatggagggggctaaagataaggatgtcagcttttcaagtatatcgacaatgctacttgagttagggaaggtgcgaacaagtccctga

SEQ ID NO: 235826 - DNA, 3069 bp, Klebsiella pneumoniae
atgaccattcgtttttacccgtcccggcttcccggcgaacctctcgaaacgcatgagcatggcgtaaccagccttcgtaactggctggcggtgaatgttgaaggttacgaggatcgggatttgccgccgctgaccattgaggttgacggtctgtccattccgccaggcgaatgggccacctgcgtgatccgccctgatagtgatgtacggctttatccggtccccttcgggctggaggcagccacaatcgcgtggattggtgtcggtatctccgttgccgcagcagcctattcactgtttatgatgagcaatatcgatacgggaggctatacatcatccacagggcgcagtctcgacctgaacccggcgcgggccaacaccgcaaaactcggtgatgccattcgtgaagtgtttggccgggtgcgtatctacccagattatgtggtccagcctgtgacccggttcgacgttgctgatccaacgaagatgcgtgtccagatgctgctgagtcttggggtcggtgacctggaatattccactggcgatatccgggttggcagcaccccggcatcgacactaccgggtttcagcagtacccattacccgcccggcgcggatgtttccggcgatgagcgcagcgagaactggttcaactcgacagaggtgggtggaacatcaagcggaacagggctggatatggcccagacctcacctgattccgacgatattatcgctgacagcatgacggtttctggtgcatccgtaacgtttacaggtcttgatacagatgatggtgacgatgacgacgaggatgataattctctcccggacagctgggtaacggggaccatagtcgaaattaaggcgccgacaaattatctgatctccacctcttctggttacagtgtctttgccagctcgttgcttaccgaacttgctcccgtagcgggtatgccggtgacgctgagtttcaacagtgtcgattatgacctcgtcattgcgtcctataccccgggtcaggacgcagtgcctggcgagggtggcagtccagcaaaaattcaagccagtgcggctcccgtcacctacgatttttcgaccagctccagtacgttcatgatcacatggcagggcaccacctatacggtgtcgctggtagcgaactacatctcgatgtcgggactgctggcggctatcaccgaggggctcactggctccggcctggtcgcacgggacaacggcggtaccgtactgataaccgaggcggccagtccttacgtgggtggggcaatcacatcctcctcgctgcctgcagccgttttcggtgatgccccggtttacacctccggcacgccatcaaccggcggtagcccggcggtaacggcaaacgtgacgcttgcatataacagcactacgggaaccgcattctcgggcatgcctgaaggtgtgcaacggatttcacttgctcaccgcgggaatgagtaccagatcgtctctgccgacggcacaacggcaacagtggcgcgcctggttaatgggtccgttgatgagtcgtggccgggattcaccgccaggacgatgatcgactatgaggccaccggcctcaatgacacgctgagctggctggggccgttcctggtttgccctgaacatgagaccgtcgatatgttcgaggtgaatttctctttcccgaacggtatttgcggctttgacagtaagggcaaaaaacggattcgccacgttgagtgggagatacagtatcgcgtctacggttccggatcggggtgggtgagtcaccagggcgagtatgcgcttaaaaacgtcaacgggctgggattcactgagcggatcaccctcagttctccgggactggtagaggttcgctgccgtcggcgcaatgagcagggctcaaacaacgcgcgagacagtatgtactggcaggcactgcgcggacggctgctgacgcgcccttcatcctatccaggtgtgtcgctgatggcggtgaccgttgagacgggcgggaagctggcggcgcagtcagaccgccgcgtaaacgttgtggccacgcggtcctatgactcaggaacggccagaaccatttcgggggcgctgctgcatgtcgggagctcgctggggctggagatggacgtcgataccatcaacgcactagagtccgcgtactggacgccacggggcgaaaatttcgatttcgccaccggcgacagtatctcggcgctggaaatgctgcagatgatagccagtgccgggaaatcccgcttcctgttaagcgatggccttgcgacggtcaaccgcgaggggattaagccctggacggggatcataacgccgcatgagatggtggaggagctgcagagcggatttaccgtgccgtccgacgatgattttgatggtgtcgacgtgacgtacatcaacggcgtcacctgggcggaggagactgttaaatgtcggacacccgataatcccacaccggtgaaaatcgagaactacaaactcgatggggtgctcaatcaggatcacgcctaccagatcggcatgcgtcgcctgatgaagtatcttcagcagcgggttacataccagaccaccaccgagctggatgcgctctgctacaacacgggcgatcggattgtactgacagacgatatacctgggaacaacacgatttcctgtctggtggaggcgatgacaacggctggtggcgtgacaaccttcaccgttacggagctgcttgactggtctttcgaaaacccccgtgcgctgatccgctatcaggatggctctgcatccggtctgatggtggcgagcagagtgggggattatcagttgtccgttccccatctgagtgattttgatgacccattgaagattgaccagacttcaccagccattgagccagtccgcctggtgttctgcggctcaacgcgtcatgtctatgacgccattgttgaggagattgcccctcaatcagacgggacgtgtcaggttaccgccaaagagtaccgcgcgtccttctacgactacgacaacgccagttatcccggcgacattgcataa

SEQ ID NO: 235827 - DNA, 1278 bp, Klebsiella pneumoniae; identical to SEQ ID NO: 220683

SEQ ID NO: 235828 - DNA, 273 bp, Klebsiella pneumoniae
atgagcaacagcacccactacgaaaacgccaatttcctgcgcgaacttgccgaaagcctgccacgaataataccaaccggtagcgcggataaggcagaattgctgcaacgcctagcgaacgaggaactggctcaagccgaatatgacgaatgggtacgtagcaagataacagcagctcaagctgacacacgtccacgcatgaccaccgaacaggtgcgccagaaactgaaagcccgttatcaggaacagaaagagttgcgcgatgccctatga

SEQ ID NO: 235829 - DNA, 300 bp, Klebsiella pneumoniae
atgccctatgaaataggctggtcggtaaatgcaatggaggacgtggccgaactgtttgactatctggccgaaaatgcctctctctgggatgccagtgatgtgacagagcgcatcctgcaatctacagacaaactggcagacttcccccggttgtatgaggctgatgaacactacggcattggtgttcgacgcatcagcctgctcggccagcatgtattgtatgaagtagatgatacagttcaacgcattaccgtcctggccgttgtcggtcagcgccaaaacccgcgttcaatacgttaa

SEQ ID NO: 235830 - DNA, 600 bp, Klebsiella pneumoniae
atgactgaacaagaacaggaaaacgacaaaccggcagttacattgccggaaagcacctttcttgaggaaaaggcgtttcgttctagggtgattttggtatttggtaccataactgacaccctagcgtcagagacagtacgcaggcttctcgctctggattctgaatcggatgcccccataacaatgatgatttcatcaccgggtggacatcttgagtcaggagatgcaatacatgatgtgactcgatttgtttccgctccggtcatcatggttggtacgggatgggtaggaagtgcggctacccatctttatttgggtgctccaagagaacgtcgattttgtcttccgcaaacacgttttctgatccatcaacctagtgggggtactcgcggtccagctagtgacatagctattcaggcaaaagaaattattacagcccgtgaacgaattgctcaagtcatcgctcgcgaaagcggtcagccaattgagcgtgtacgtgaagatatcgaacgagatcgatggatgtcagctagggaagctatcgattatggtctggtttcccgcatcatcaatcatcgtaacgaattagctaaaatttaa

SEQ ID NO: 235831 - DNA, 873 bp, Klebsiella pneumoniae
atgatcgacctcgtttatcgcagcgcggacgcagcagagtcgatcgcggcgcaatacaagaacgtgctggaacattggcctgtggcaaggactgaactgcatgtgccgacccggcaaggctctaccttcgtgatcgcctgcgggccggaaactgcacctcctgtcgtgctacttcacggcacacaggccaattcggcgtcttggatggccgacattccgctctggtctgaaaagttccggctgtacgctgtcgatatgatcggcgagcctgggttaagcgcgacggtcaagcccgagctgaacacggacgctcatgcgctctggctggacgatgttctggctggcctcggcctgtcgcgggcgtccttcgtcggcacctcgcttgggggatggctggcgctcgactacacgcgccggcgaccgggcgtggttcaggcgctggtgctcatctgcccgtccgggattggacggcagaagaactttattgtgaaagccctgccactcctgctgctggggccgtggggccagcgcaagttgtggaggctggtgctaggccccaagcccgaggtcttgccggaagggatgcagcactttggccctctcatggaaagcataggaaagggcaccaagccgcgtttcctctccatccctcaactgaccgacgcccaattgcaggcgctcggcatgccaatactggcaatcgtcggcgggcgggatgtgctgctggattcagccgatacgcgcgacaggctgcaacgaaacgtaccgcacgctgaaatctgttttctcgaagacggctaccatttcttacccgaccagaccgcgcgcgtcatggcgtttctggagcgctatgtttcttcaccgcgcaactga

SEQ ID NO: 235832 - DNA, 423 bp, Klebsiella pneumoniae
atgccaaattcgcttttcaccgtcgcacaggcggcgcagcagctcaacctgcaccccaagaccgtcctgcgatacattcgtgacggacggctgtccgcaacccgcatggggaagtcctatcgcatcccccgcgccgagctggacgccttcgccggccttgcgcgcggtagtgcccaagcaggtccagaggcacgaacgacctgcatcaccgacatacccggcgtcacggtcgaagcagcggagcgggtcgcgacattccttcactccgtagcgatgaccggcgatgccagcaccccgccgatgcatctacagacgtcgttcgacccgctcgcccaaacgctgaaaatcgtggtgatcggtagcccgttagacgtgggccggttgctggaaatgctgaatttgcatacgagggtgcggccatga

SEQ ID NO: 235833 - DNA, 357 bp, Klebsiella pneumoniae
atgatgggcgatgccgcacacgctatgaaaacccgtttgcgggctgatctacgcgccgccatgaaggaggggcgcaccaaggagaccaagctgatccgggcgcttatcgcagcgatcgacaatgccgaagcgccgccgctccgggccggcgagcgggccacggatcaacatcggttccatgacggatcggcggaagttgagcggctttttttgactccggcgcaggtgttcggggtcctcgtgatagaagtgcaagagcgtgagcgtgcagcagtggagatgagtcgcgttaataggccggatcgtgctgacgccctgctcgccgaaacgatgcttgtaaaacgctacattgagtag

SEQ ID NO: 235834 - DNA, 1071 bp, Klebsiella pneumoniae
gtggcaatatttcatttaagttttaaagtattaacgcgtacaacaaaaacaggaaaaagcaaaagctcattatatttggctgcttacaacagccgcgaaaagttaaaagatgagttaacaggtttaacttttgactacactaaaaaaaatgacttatataaaagcggtattattttaccagaagatgcccctagtaaattttatgatagggctacactatggcaaaattgtgaggcatcagaaacacgccgggacagtcagatctgcaggtactttatcgtggccttgccacaagagcaaaacggcgagcaaaacgaggcgctattaaaaaaatatttaaaaaataattttataaaattgggaatgtgcgcggattatgctattcacgatataaataataaaccacatgcccacgtaatgcttacaatgagaaaatgcgaaaacggaggatttagtaaaaaaaaggcgcgagagtggaacgatccaaaattggcggaagtatggcgtagacagtggtcagtgttggttaataaaacattaaaagaaaacggaaacaaaaacacaataacgcatttaagttttttacgtcaaaaagagttaacaatagcaaaagcacgcgaagcattagaaaataacgatattaaaaaagcggaagaactaacaacattagccaaacatttagcaactaaaaaaccagtaaagcgaaagcctaccgctaaatatttaaaagacaaagcgcggaaaaaaaataaaaatcacgaattgagggaaagactcaggcaacaacaaaagcaaaaagaagaaacaaacaaaagagaaagtaaattaaatttgatttttaaaaatttaatattaaggtttaaaggaagtaaaaaaacagaaacaacaaaaatgaccgaagctgattttttaaaaaatatgaaaacagacgaaaaagaggccgaagatttagaattaaataaatatatagataaggagttagagaatgagcttaataagaaaaatgacattacacacacacccacgagggatcgaattagaaacaggacgcaaaagagttataagtcatag

SEQ ID NO: 235835 - DNA, 1488 bp, Klebsiella pneumoniae
atgctttataaaaataataaagcatatggggataatgtcaacattggcggagtgccatttttagccacatatgcagcccaaaatgggcaaagattaaacgaaagaaaagctaaaagtttaagattatcaaaactttattataaaagggctgaggcgctggaaggcgcagagtccgaagctatgaaaaaacgcgctgggcgtgtttttgggtgttgtagtaaaaaagaggtcgcaataagcgattcgggctattgttacacgttacattgtaacaggtgccgcgaccggtcttgccaagagtgccaacgcctccgcgcctttgttttgcagcaaaaaatccgccaaattttgcccgatttgatagctcaaacagacgcaaaagatgggctaatttttggcacgttaacagtaaaaaatccgcttataacagagcttaaagactatttaaaaatattaagtaaagcgttcgcgcgtatgtttaagcgtaaagagttcaaaaaaatttttgaagggcgcggcggttttaggtgttttgaagtgacgcgcggcgaatctggcgctgattattgtcatccacatatccactttttattacaagttaaagcgtcatattttgcgcgtaattcgccgctttatataaaatctgagcagtgggcggaagcctggacggattgcttaaaattagaaattgaaaaaacaggtcgagcttttaattatgccgattatccaagcggtaaggcttttgtaaaaattttacgtgtacaagctactgattatacacgagaaaatcgcaagtatgcgacagttggaatgctggaaaaacaggacaatattataaattatgtgcttaaatatacggcaaaaagtgacgacgaaaacagcaaaaaagcacttgtaaaagatgacccgtggttttttgaatatgataaaaacataaaaaactgccgcgctgtcgcatttttcggcatatataaaacgttaatatcaaaacttacgcccccaagttacgatgaaaaggctataaaagaagatttaaataataataaagctaaattttatacggcggtttgggatgatgatcatcagtatttagcgcttgaaagcacagaagaaaaagcgcttgaagcaaaaagacataacactgtaagcagtataaaagcaacattaaaagcgcaattaaaaagtaaaaattatattttaaacataattgatttagcttttaaaaagaaagattatataacagtacaaaaagagataagcgcacataatacgctcgctgggcgtgtattaaaaacatttgaaagattagaaaaagctggcgaagtaataaaagtaaaagacggatttttacagcattaccataattttttatttaaaagtgttatttttgaatgtttgccgaatttaataagtgaagcagaaattgaaaaaataaagaaagaaaacgaaattttaattgaagtaattgaaaacgatccgccattttaa

SEQ ID NO: 235836 - DNA, 546 bp, Klebsiella pneumoniae
atggataatttaacccttttagatatgttcaaacacggaaccgctacatggtcggcggtttcgtctttcgtcgttgtgcttttctggtgtgttggctgttggctggcatttttggcgattgttaattataaaaacgcagccgatggaaaaagcggaatcgcaaagccaattgttcaaactgtgatcgcgtctttgatggtcgcaatttctcgatttattccaattctttcagacactttaaacaataaagcggcagagttttcacctcagagcttacttagtgatattccaaccactgatccaatgggattggggctggcgttcacaagcgttttattgtttgttcaaatgttaggcaccatcgccatttttcggggcttcttgatgatatgggaagcaacgaacaagggcgcaggtagcggtcttattggtaaaagctggacgcacattataggtggcgttttagctgtaaacatacagttaaccatcgcgaccgtggcctccacgttttacccagggatcgacctttcgtttttaggtttttga

SEQ ID NO: 235837 - DNA, 297 bp, Klebsiella pneumoniae
atgagcttacaacaacaaaaagagcggttaaaaagagaactggcggcgttagaaaagaaagaaaaacatttaaaagaccaagcgaacgctaaaaatatgaaagcgatttcggcggaaattttaaaatatgaccttgaaaattacgacaattttaaaaaaattgtcggcttattgtcatattttgattaccaagacgacgattttaaaaacggcttgatgaaatgggctgaaaatgaacttgaagaaagaaaagctaaaaaagtagctcgaacatttaaaaaaaaaccacaaaaataa

SEQ ID NO: 235838 - DNA, 192 bp, Klebsiella pneumoniae
atgggttatttgcatactttttatttttgcgttgataaaaaagagtttgataaagaagggaataattatttagaagatttgcaattatctttaagtgaagaaatagaaaagcagatcgaaaaaatagaaaaagaaaaaaaggaagaagatgaagaatttgaaagattaaagttaaaacttggcaaggcttaa

SEQ ID NO: 235839 - DNA, 360 bp, Klebsiella pneumoniae
atgaaaacgttactgactctggatgtcctgaaaaccatgtcttctgatgagctggaagactaccgcgccgccggtgaagactttcgccgggagctgagtcacgctgtcatgcgcgatctgacctcaccgtccggctggtccgtgaatgccgaataccggtgcgaatttggcggcttctttcctgtccagatccgttttaccccctctcatggtcactttgatgtggcggtatgcagtccgggggagctgaatcttcgctggatagtggtctttgtgacccgtgacggtcagccgttctctgtcgttcgcgtgatggatgcattcaaccctgaactcatcaccctgtatgggtcctgttaa

SEQ ID NO: 235840 - DNA, 201 bp, Klebsiella pneumoniae; identical to SEQ ID NO: 214892

SEQ ID NO: 235841 - DNA, 297 bp, Klebsiella pneumoniae
atggtgctgaaagcggatgtgatggcaaacccgctcgccaacaccatcggccatcaggggtacgccgagccggagaaagaggtcatgcatcaggtggtgaccttcctgaccgggaaagtgagcgacttctccgtcacgccagcggatgagccggtgctctccctgaccggcttcccggccgtcaccctcccgcatatggaccacgacgccgccagcacacccggccagctaaaagtctggcaggagaaaatccgtcagcgcgaggctgacctgaaagcgcgggggctgctgccatga

SEQ ID NO: 235842 - DNA, 852 bp, Klebsiella pneumoniae
atgatcatggtcaactcgctggataacccgtattacgcctcggaagccaaaggcgccagcgaaaaagcgcaagctctcggctacaaaaccaccgtgatgtcccatggcgaagatgtcaaaaagcagaatgagcttatcgacaccgcgattggtaaaaaagtgcagggcattattctcgataacgctgactccaccgccagcgtcgccgccgttgaaaaagccaaaaaagcgggcattccggtggtcttaattaaccgcgaaattccggttgatgatgtggcactggaacaaattacccacaataacttccaggccggctctgaggtcgccaacgtcttcgtcgagaaaatggcggagaaaggcaaatacgccgagctgacctgcaacctcgccgataataactgcgtcacccgttctaaatctttccatcaggtcattgaccaatatccggatatggtcagcgtggcgaaacaggatgccaaaggcaccctgatcgacggcaaacgcatcatggacagcatcctgcaggcgcaccccgacgtgaaaggcgtcatctgtggcaacgggccggtagcccttggcgcgattgcggcgctgaaagcggccaaccgtagcgatgtgatcgtcgtcggcatcgacggcagcaacgatgagcgcgacgccgtgaaagccggcaccctgcaggcaaccgtgatgctgcaggcgcaggccatcgccgctcagggcgtcaccgatctggataactacctgcaaaaaggcgagaagccggcgaagcagcgcgtgatgttccgtggcattctgattactcaggataacgccgataaagtccaggatttcaacattaagtcctga

SEQ ID NO: 235843 - DNA, 234 bp, Klebsiella pneumoniae; identical to SEQ ID NO: 220008

SEQ ID NO: 235844 - DNA, 549 bp, Klebsiella pneumoniae
atgcgcttcaccgaccgcagcggcggcgtgtcacgtcgccgggtgattatccacttcccggagcagatagccccggaggagcgcgacccgcagctcagggataaaatcgcccgcgagctggccgtgattgtgcgccagttgatgcagcagttcagcgacccgatgagcgcccgcgcactgctccagtcgcagcagaactccgacgaggcgctcagtatcaaacgcgatgctgacccgacctttgatttttgcggctatctggaggcactgccggagccggacggaatgtatatggggaacgccaacattatcccgcgccagccgcgcctgtatctgtatcacgcttatctggtgtacatggaagcccacggttacaggaatgcgctcagcctgaccatgttcggcaaggggctctcagccatgctgaaagagtacggtcttaattatgagaagcgccgcacaaatcagggcatgcagaccaatctcgcgctcagggaggaaagcaacgccgactggctgccgaagtgtgacgaacccaccgcaacataa

SEQ ID NO: 235845 - DNA, 141 bp, Klebsiella pneumoniae; identical to SEQ ID NO: 131154

SEQ ID NO: 235846 - DNA, 1155 bp, Klebsiella pneumoniae
atgctacaacctgttgttcgcgtcggtgaatggctggtaaccccctctgtaaaccaaatcagcaggaaggggcgccagcttacccttgaaccgcgtttaatcgatcttctggtcttttttgcccgccatccgggggaagtgcttagccgggacgagcttatcgaaaacgtctggacccggaacgttgtgaccagccacgtcgtcacgcagagtatttctgaactgcgcaagtcgctcaaagacggcgacgacgttagccttgagtacatcgcgacggtacccaaacgggggtataagctcacggtgccggtgatctggtgcaccgaagagggggaggagctagccccgtcgatggaggcgctgacgccttcgccgtcgaccgccgttcctgcgccgtcgaccgccgttcctgcgccgccggccgccggtgcgccatccgacgtctctgtccctctccctgatgccgccgcgccgccaccggctcctaccgtggccagcgcgccgtcaggccgcaagcgcctcactaccgccctggtgtgggggctgttcctgttggcgctgggcacctgcgtggcgctggtggcgctgtcgagcatggaatcgcggccgccggtcaacaaggcgcgtctgctgctcaatccgcgcgatatcgatatccacctggtgaatggcaactcctgcgctaactggtcgtcgcagcactcctacgccgtaggactggccagcctgatcaccacctcgctgaacaccttctcgacctttatggtgcatgacaaaacggactacaacatcaatgagccgagcagctccgggaaaacgctgaccatcgagttcgtcaatcagcgccactatcgggcgcagcagtgctttatgtcggtccagctggtggacaacgccgacagctcgacgatgctggataagcgctactttgtgaccaacgataaccagctgaccatccagaacgatctgatgaacagcctgtcggatgccctggcgcagccgtggccggcgcgaatgcaggcgatgctcaggcaatatcagccctcgcaaagcgtggcgttaacctatttctaccagtcgcatcagctgttaatgaagggcgacgtcgattcattaaggaagttgcgattaagtggtccgcagctcccgatatga

SEQ ID NO: 235847 - DNA, 438 bp, Klebsiella pneumoniae
atgtgcggacgctttgctcaatcacaaccccgtgaagaatatctggcatacctggcggatgaagccgagcgcgacatcgcatacgaccctgagccgattgggcgttacaacgtggtgccggggactaaagttttgctcctgagcaaacgagacgaacagctgcacctcgatccggttcactggggttacgcacccgggtggtgggataaaccgcctctgattaacgcacgcgtcgaaacggcagccgctagcagaatgtttaaacctctctggcaacatggcctggcgatctgctttgctgatggatggttcgaatggaaaaaagaaggcgacaagaagcagccatatttcattcatcgcgctgatggcctgccaatattcatggcagcgatcggcagcttgccttttgagcgcggcgacgaagcattttccccttga

SEQ ID NO: 235848 - DNA, 228 bp, Klebsiella pneumoniae
atgggcgtaacaaaaatggtatgcgtcagctcaactgagccagcctggtttactccgggcaccgtttacgactcagaacctcgcggtcccgatatctgcatttgtggtgacaacctcgtttcagacctcaacaaagaggactggtacgaaatgagccagcgcgcagatgggttatggttcttaatcggttttcagcaagcaattttatttcggggagccaaccaatga

SEQ ID NO: 235849 - DNA, 750 bp, Klebsiella pneumoniae
atgaaagagcgcgggatgattttcaactctgaaatggtacgggccatcctcgacggtcggaagacgcagaccaggcggattatgaaggtacagccggaatccaaccagcttggcttgctgcttatcactgactcaaccaagcacagtgacattggcaaataccattgggcggaatctaacgctactggtaaccatgtgcgttcaaagcttttctcatccccgttcggcgccgtcggcgaacgtatctgggtgcgtgaaacatgggcgaccctgggcaatgaagagggttgttatgtcgattgggaagataatctttgcaaaggagatgagcgctcagcggcaaggatttaccgcgccagctgcgagcagagaccaggtgattacggcctgtggtctattcccgatgacgcctactggaaaccacataccaaagagcacaagttcgaaggagcatggcgcccgtcaatccacatgccgcgctgggccagccgcattctgctggaaatcaccgacgtgcgggttgagcggctgaacgctatcagcgaagaggatgcgcgagcagaaggcattattgacggtggctgtcttaattgcggggaacctgagccatgcggatgcgccaatccagagcctgacgctaccgatgcttttgcctacctgtggcaatcaatctacgggcaggataactggaatgctaatccctgggtttgggttatcgagttcaagcgcgttgaaggcggtgcagcatga

SEQ ID NO: 235850 - DNA, 1557 bp, Klebsiella pneumoniae
atgaacagcacctccgccgacttccagaatctgtaccaggccctgagccacagcgccgcccgcagcccggatgccctggcgctggcgtttgaggatcggcgctatctgtaccgcgattttcatctgcgggtacagcgggcgatggcgcagcttgatcgcggctggtcgctgcgcaaaggcgaccgtattctgctggcctggggcaatcaccccgctttttgcgaagtcctttttgccgcgctgggtttgggcatcgaagtggtgcctttcagcaccaagcttaagcaggccgaaagcgaggcgctggtaggccatatcgctccccgggttgtcctgttcgatgcgaccgtacaggactggctgaaaaacacccctgacgcgcgtgcggtttcactcagcgaatggcaggcgctctgccttcccgaaccgctgacccgcccgccggtcccggttaaccgcgacgatacggcggtgatgatgttcacctccggcaccaccggagagcctaaaggggcgattatcacccacaataacctgctctgcgcgattgacgcctatacgcaaagactgaatctcaccgccgcggatagcaccattctggcggttcctatctatcacatcaccggcctgtcggcgctgctggcgctgtttattagcctcggcgcgagcatctggctgcagcatcggttcaatgccccgcaggtgatcaccaccctgcgcgagcagaacattacctttctgcacggctcgcccaccatttttatccttctttgtcaggctgcgcgtgagcagagcgccagccatcccggcgattttccggcattgcgcacgattgcctgcggcgcgggccacctgagcgatggactgatcaaggagttaaaaaccctgttcccgcataccgcgattcagccgatctacggcctcaccgaaacgacctcgcctgcgacgatttttccgggcgacgtctggggcagcgataaatgcggcagttcaggtcaggcgatcccgggtctcgccattaccatccgcaacgatcgccagcagcccctccccgccgggcaaatcggccatatctggctaaaaggcgatgtggtgatccgcgaatactggcagcacagcgagcgacgcccgagctgcgatgcgcagggctggttttgtaccggcgatctgggctatctcgacgacgaaggctggctgtacatcaaagaccgcagcaaggacatgatcaatcgcggcggcgagaaaatttactcactggagctggaaaacattctctctacctatcggggagtacgggaagttgccgtcatcccgacccccagcccggtctacggcgaagagcccgtggcgtttatcgtgccggatggccagcatcacctgaccagcgaagagatcctcgactggctgaaggtcaaaatcgcccgttttaagctaccggcgcgcattattttcacccgtgctttaccgcgtacccacaacggcaaagtgagtaaacagcagctcaaaacgcgtctcgcagaatccatcatcacgctatcaacggaggatgaaaagtga

SEQ ID NO: 235851 - DNA, 480 bp, Klebsiella pneumoniae
atgcaaaacgatacgcaaaacattattggcgtggatgtcggttcgggcagcgtgcgcgccggggtattcaatctgcggggcgagctcctcgcccacgcgacccgggaaataaccctgtttcgcagcgccggaaacaaggtcgagcagtcgagccgtgagatctggcaggcggtgtgctactgcattaaaacggcggtggccagcgccggcgtttcgccgtcgtcgatagccgggatcggcttcgatgccacctgctcgctggtggtgattggcgataacgatgcgccgctggcggtcgggccttcggacgatgcggaccgcaacattattgtctggatggatcatcgcgccaccgggcaggcggaaaagatcaatgccacgggccacccggtactgcggtacgttggcggcaaaatctcgccggagatgcaaacgccgaaaattttgtggctgaaggagaatcgcccgcacatctattag

SEQ ID NO: 235852 - DNA, 789 bp, Klebsiella pneumoniae
atggcaccttcactaatcgcggattacaaaaaggtactctcagatttcccagatcatgataaacgcgaaaaaatccgagtcggctatacggttggctcggatttttctgttttgcgccttactgagtgggcgttgacggggtcaagttacccatattgcctcactgtatctgtggtaggggcgccagataatgagtggttgcaagaaattgcgatagaaatggatgcctctgataatgatgaagaggaaatcattggctacatacgtgctttagtcggtgctgaacctgaagatgatgatggcatccagatcgctagatttgtatacagagattttctgtttcggtcacaacaaggtcaccacagcggagtgcagattaaaggtgcttttgttgatccttccaaggaaaagaaaggccttgcccgcttagtatatggcttcctccttaactggcacgagcatatcatcagcgatgaccatcagacggtttatggggctaagatatgggccgttgggatgttaaaagtaggtagagtgcaagtctacgataacataaaaagtgattttgtagatgtgcttactgaaggcggtatcggtataaatggattcaagccttgggatgctatgatgctcaaagaagcacagctaaagcactggaaccctatggcgattagtatagacccatcatcgcagattctagccatcatttcagcgtctgacaggcatcagtataatggtgttactgtttttaacagagtcgttagacgaaggctcagagtaacgagataa

SEQ ID NO: 235853 - DNA, 399 bp, Klebsiella pneumoniae
atgcataacgcacttaactcatcacgttctattcaaacgattagagactgtaccaacatgatcgcatcggttcctttgcgtcattgggatgactcgctccaaatccgagaaatgggcacaccaggtgaacttaaggatcagcgtttcatcattacactgaagagtgacgtggaagcaggtagctttactatcaaattatttgctgagttgatggttctgaacaaccgtttgcgcttcctcgtgaagcccgaaaaacagtttccagaagtcgtttactgcgaaaggcaaattttttcggatatcgagagtgaaattgctacttttgttaaggacaagtacagtgtagatgttagtcttgtccgtacagataaatcaatggacatgcggcttgcaaactag

SEQ ID NO: 235854 - DNA, 294 bp, Klebsiella pneumoniae
gtgggagaaaaatcactgaattcgccgaagcacccggtagatatcgccgtcgatctcaacgccccggtgcttggtctgtacggcgctaaagacgccagcattccgcaggacaccgtcgagactatgcgtcaggcgctgcgggcagccaacgccacggcggaaatcgtggtctatcccgaagccgatcatgcctttaacgccgactatcgcgccagctatcatgaagagtcagccaaagacggctggcaacggatgctcgcctggtttgctcagtatggcggtaaaaaagggtaa

SEQ ID NO: 235855 - DNA, 213 bp, Klebsiella pneumoniae
atgaaaagtgaatacaatcagataatatacatagtgattggtatagccatagtgatcagcttcatcgctgttattaatgatggtttttcattattcaacattctgcgcggaccttttgtcgtgattggaatcattgtaggattatgcatcgcgtggtattcaactgtcgccataaataagatattaaaaaaaattggactcaaggattactaa

SEQ ID NO: 235856 - DNA, 234 bp, Klebsiella pneumoniae
atgatcaccctaaatgaagaacaggcaaagaaactgctctcactgatgaaagagcggtttctaaaagctcaccttaataccgctatgtacggcgcagctgcttacgcgaacggtgattctgaccgtgtaattttacgcgcaataaaaaacggtgacgcaccagaactgaaaatcctgatgaccgctatgggcctcatccctgaagaggaagacaacagtgaaaaaactgcatga

SEQ ID NO: 235857 - DNA, 1977 bp, Klebsiella pneumoniae
gtgagagaaatcatcgtagataactttgctggtggcggcggcgcatcgacgggcatcgagctggcgattgggcgcagtgtggatattgcgattaatcatgatccgaacgctgtagcgatgcataccactaatcatccggacacgctgcactattgcgaatcggtttacgaagtcaggccaaaggtcgcgaccgctggccgcccggtagcgctggcgtggttttcaccagattgccgtcacttttcaaaggcgaaaggagctaagcctgtcgagaaagcgatccgtggactggcctgggtggtactgcgctgggggctggatgttaaaccccgagtgatgaagctggagaacgttgaagaatttaaaacgtgggggccgctgctcgctggtgaaatgcgtccagatccagcccgtgctggcgagacttttgaggcattcattggcatgctgaccacaggcatttcagcggatcatccggcgctggccgaatgctgcgaatttctgaatatttcgcttgatagcgaggatgcagcacgactggtaaacggtttgggttacaccgttgagtatcgcgagttgcgcgcatgtgattatggtgcgccgaccatccgtaagcgattcttcatggtgatgcgttgcgatgggaagccgattgtatggccggaagccactcatggagatccgaaatcaccggcagtgctggccggaaaactggcgccatggcacacagctgcagaatgcatcgactggtcaatcccagctccgtcgatttttggccgcaaaaagccgctggccgataacacgctccggcgcattgcccggggaattcagcgctttgttatcgaaagcgcttcgccgttcatcgtgaagtgcaatcacacaactacacgcgggaaatatgactgtttccgggggcaggcacttgacaatccgctgcagacgattacgaaaacccacggctacgcaatcgcggtacctcatctgacgaagttccgcaccggtgcaaccgggcagccagtcaccgaaccggtaccaacggttacggctggcacgtccaggcgcccgggtgggaatggtcatgcgctggggattgttgaagcgggccttgtcccgttcctcgctggccaccgtggcagcgaataccaggctaaaccgcgcccgcttgataaacctgctcacaccatcctgaaagagtcgcgcgcctgcgtagtcgctccagttattgcccggcagtttggcgctagcatcggccaccgcgcagacgagccaagcgcaaccatcacagcgggcggcggtggtaaatcgcaactggtaatgccgacgttaattcagatgggctatggcgaacgaccagggcaggagccgcgcgtattgcagcttgaaaagccactggggacagtaaccgctggtggtaacaaatttgccgtaaccagcgcatttctggcgaagcactacggcggcaactatacggggccgggcgtggggctggatgagcctgcgcattcagtaacgactgtcgatcaccacgccttagtcgcttctcatctggttaaactgcgcggtacttgccgtgacggccagtctactgacgagccgatgccgactatcactgccggcggccagcacgtaggggaggttaaaactacactggcggtcgaggactatgacgaagagcgtgcgcagcaggtgctggcgttcctgcagcaatactgcggggaggaatgcaccgggctggtggaaatcgccggggtaacttaccgcatcgttgatatcgggatgcgaatgctgcaaccgcatgagctttaccgcgctcagggattccctgagtggtacatcatcgaccaggattaccgcggggtgaagtatgcgaaggataagcaggttgcacgctgcggcaatgccgtcccgcccccgttcgctgaggcgctagttagggctaatttgcctgagatgtgtcagacgagggaggctgcttaa

SEQ ID NO: 235858 - DNA, 261 bp, Klebsiella pneumoniae
atgaaagacaccttacttgagcatgcgtatcgccggatcattgagctcgaaaaattgctgctagtggacgtgcccgaaactgtctggcccgctgaagtggcgatagttttttctcaaattgaaaacgccggggaacttccggcgcaccatcagcgcagattgcagcaccatatcaatcgtatgtggctggaaaaaatgccggtaccgtcaatcatcgccgcggctcgttcgctggccagcgctatggagaaatacgcgtga

SEQ ID NO: 235859 - DNA, 786 bp, Klebsiella pneumoniae
atggctaaaaactcaatcgacgcgtatggcgccagtggcaaaacaaacgtcctgatgttcgaaccggaaaagctgcatcttgttaccgacaaaaaccatcttctctacgatgaacgtatcagcctgccgatcgacgaagggatggtactgaacattgcggagttgggggtactggagccgatcattgtctggaaagaccctgaaacagggctcacctgcgtagttgcaggccgtcagcgcgttaaacatacccttgaggcaaataaactccgtctgaaagaaggcaaagagccactgcttgttcccggagtcgttaagcgcggaaccgcaaatcagatggctaaatacatggtcagcgaaaacgaaattcgccgacctgatacaccgcttggccgggctaaaaaaatgtcagatgcgctcgaccgcgggctcgatgaggacgacattgcagtgttgtttggctgcagcgttcagaccgttcgtgcaacgctctccctcctcgatgccactcaagccgtccgggaagcagtagagtctggcacagttaccgttacccaggcgcgtcagcttggtgcgctcccacctgaagaacagcgggcaaaagttgcagaaatcgagctggcgacagttggtacaactggccatgaaaaagcacggcgtcagcgtcaggttctgggtgaggcaaagccgcgcctgaaaacccgcaaagaaatcactaaagccctggaatctgccgagggtgagtatgctagcgcactccgttgggtgcttggggaggcgcaatga

SEQ ID NO: 235860 - DNA, 1212 bp, Klebsiella pneumoniae
gtggacacaattaaatttcaacttaacgcccggcggcagccctatggccagggagcagacttgagtctgctgaatgaaagcgtggggaacgaagtgctggcattccatcaaaaatttcctgattaccgggtcacgccgctgcgtaagctggaatttttaagccagcggctggggctgggatcgatccatataaaagatgaagcgcagcgattcggtttgaatgcgtttaaaggattaggcggatcttatgcgatggggaaatatctcgccgctctgcttgagcgagatattaatacgttgagctttgccgagcttaattcaccagtgattaaggcgcgtatcaaggacatcgtatttgtgactgctaccgacggtaaccacggacgtggcgtggcgtgggcggctgagcagcttgggctgcgtgcggtggtgtatatgccaaagggctcgtcaccggtacgcgcgcagaatattcgccggcatggcgccgaatgcacgattactgaactgaactacgacgacacagttcggctggcggccaaaaccgcgcgcgagcagggatgggttctactccaggataccgcctggcagggctacgagcagatccccacatggatcatgcaaggctatatgaccctcgctgttgaaatctggcagcagctggcagaaagcggagcgtcgatgccgacgcatctgtttttacaagccggggtcgggtcgtttgccggtagcatcatgggatatttcatcgaaaagatgcagcagcaggctcccaccatcatcatcgttgagccgcacaaggcgaactgcctgtttcgctcggcaaccattaatgacggactgccgcacagcgtcggcggggatatgtcaaccctgatggccgggcttgcctgtggtgaacctaatatcaccagctggccaatgctccgcgaccataccacctgttttatttccgccgacgattgtctggcggccaacggcatgcgcctgttggccgctccgcgaccaggtactgacgaaccttttgtctccggggaatccggcgctattggcacaggagtgctttatgcgctgatgactcaaccggcgtatcgcgagcttgccgaatcgctgcgcctgaatgccgatgcacaggttctgttaatcagcacggaaggagatacatcacccgatgtctatgaagacatcgtctggtttggccgtaatggttga

SEQ ID NO: 235861 - DNA, 1158 bp, Klebsiella pneumoniae; identical to SEQ ID NO: 217015

SEQ ID NO: 235862 - DNA, 312 bp, Klebsiella pneumoniae; identical to SEQ ID NO: 220219

SEQ ID NO: 235863 - DNA, 492 bp, Klebsiella pneumoniae
atgcactgtgcgtcaacgttttcagacagcggggaaaaacgacgattcatggcggagagcaaaaaatcaacaacactgagcttcagaatcgaggatgacctcaaggaaaagctgagtcagttagccgaacgggaaaacaaaaccctgaccaacaaagcgcgggaattgctggctcaggcgctgagtttatcccccagaaaaaccctgacagagaatattctcgatgacgtgagacgtatcgacaccgagctgcgaatgaaactgaccacatggaacctggagctcacccggcagatgagtacggtcagcgaaggaaagcacctgctgaataaatacgagaccgagattaaacgtctgagcagcgaactggaggaggcgaaagccagaacccggcgcacacagcgaagcatggtccggtggaccgccgctttcttcctgacgaccctggcgggtaatgccgtggttatcgccctgcttgtctatctgaggtaa

SEQ ID NO: 235864 - DNA, 306 bp, Klebsiella pneumoniae
atgcgtgagaaaaaagaggccgagagaccggaaacggtcgaggaaatgcttacgcggctaggcttcaaaaccctgaaggaaacgcttcagaaacccattgtcctgattaacttcggggcggtcaaaaacatgcaggccgtcgtggatgaatcctttgatgaaatcactaaggcgaaacagggctggtactggcaaaaggtagtgaactgtctgaacgagaatacgaacgccaacgtgaagctcgaatccatcaaaaccatgtacaaacgggcaaagataaaacgggaggatgaagagtcagagtaa

SEQ ID NO: 235865 - DNA, 960 bp, Klebsiella pneumoniae
atgaatagtgcagttacaattgtcatgccaatgtataattctgagcgctatataaaaaaaacgctagaatcaatagcaatgcagtcattatccaattttagagtgattgtagtggatgatggaagtacagatgattcagtgggaatagtatctgattttttatgctctgataataggtttgaattatataaaaaagaaaatagcggggtttctgattctaggaattacggtttatcaatggtagagtcagagtatgttgtttttatcgactccgatgatcttttagataaatctcatctaaatgacatgtatctatgcgcaagtgccgatggtagtgatatcaccatgtgtgattataatgttatttatcaaggaaagattagaagaataaacacatatttaaatgatggggctgatggttatataagggatactttaactgcaaaaatgtggggtgttgtttggaataaaatgtttagacttgattttttacgcaaaaataatatcttgtttcacaatgacattcttttttgggaggatctggctttttgcattaaagcattttcatgcactgataaaatatcgcatacacaaaaaccaacttacaattatctcgtaagagatggtagccttcttcgctcagaaaataataaagccaaggtaatgaacaaaattagttcagttaatgaaatatctaaaataagaaaaatatcagaaaatttcaaagtggagcttgatgccttaaagcttcaagctaaaagcgagtttatatccgatcataacatgtatgatcgagatttatggaaagcgacattacctgttggatttttatctatagtgatggccgatacacgggcgaaaaacaaattgctgccgctactatccagtattaacttaaatatagcagtgtcatttttaatgaccattaaaaggtttcgatcaaaaatacgttcacggtga

SEQ ID NO: 235866 - DNA, 204 bp, Klebsiella pneumoniae
atgtctaacactaacgccaattttgagatgaccgggatcctgttagggcaagaagtccgtaaacgtaaaactcctcaggagaagatcgccattatccagcagacgatggagccgggtatgaatgtctcccatgtcgcccgcctgcatggtatccagcccagcctgctgtttaagtggaagaagcaatatcagcaactgtcttga

SEQ ID NO: 235867 - DNA, 405 bp, Klebsiella pneumoniae
atgaagaaaatcattactgcttgtattttttccctcttcctttctgcccctgcttttgcggatacttcctgcggaccatttgggatcaactggaaggcgcaggatggatttgcgcggataaacggcgctaagccagagtcgcagaagattacctttctaaaggtaaaaaatgattacaacaatgtgaaaatacagtggatgcttcctgacgccagatctggacgctggcttggaatggattttgtcgcccgaaacggcaagcctatcctcaacgtcgaagtgatccgcaagaacatggacgagcccagagagttctggacgtacgactgccagaaggtgaagcgatcgggtcgtttccgtgtaagaaggtgccggattgaccggcacagagttactcttctttga

SEQ ID NO: 235868 - DNA, 1077 bp, Klebsiella pneumoniae
gtggacaaagtggtcactgcagggcagaactttgctgtaagcaaaatatcacgaaccgtatcatcggccagccagaaacccgtacaggtcacggtcaccctggtgatggaagaaaccgaaaccgtctatgcacctgaagtcgtctgggttgaaaactgtccgttcagtaaggatgaagggaaaaaaacgggcgaggaatgtatcagtccgggaggaacgcgaaccatcaccctcggaggcagggattactcgttcacggaggcctgctggaaatataaggatacctggctcacgcagccggcggacaacggctcctgtgaaagcctgatgaaaaatacggcctgtactctgtcatcccgccagtgcgccttctccagcgaggaaggcacgtgcctgcatgaatatgcaacgtattcctgcgaaaccaggacgagtggcaagcaaatgatctgcggcggtgatgtcttctgccttgatggtgaatgtgataaagccacgtccgggaagagcaacgactttgggcaggcggtgtctgagctggcggcactggctgctgcggggaaggacgtcgcggcactgaacggggtggatgtccgggccttcaccggaaaagcgaagttctgtaagaaatttgctgccggcttcagtaactgctgcaaagacagcggctggggccaggatgtggggctggcacgctgcagcagcgaggaaaaggcgctggccaaagcgaaaaaagacaagctgacggtcagtatcggggaattctgctctaaaaaggttctgggtatttgcctggagaaaaaaaggagctattgccagttcgactcaaaactggcgcagatcgttcagcagcagggaagaaacggtcagctgcatatcggttttggcggcgccagcagtcctgactgtcggggcattaccaccgcggaactccaggggattgattttaacaagcttgatttcaccaactttatggacgacctgatgaaaaatcaaaaaataccggaaaacgatgttctcaccaataagaccaaggaacgaattaaggaaatcatgagtcagcaatccgcgcaataa

SEQ ID NO: 235869 - DNA, 708 bp, Klebsiella pneumoniae; identical to SEQ ID NO: 234020

SEQ ID NO: 235870 - DNA, 660 bp, Klebsiella pneumoniae; identical to SEQ ID NO: 217098

SEQ ID NO: 235871 - DNA, 198 bp, Klebsiella pneumoniae; identical to SEQ ID NO: 217097

SEQ ID NO: 235872 - DNA, 558 bp, Klebsiella pneumoniae
atgatcccgtcatccagtgctcttgtatccctgaaaccagcccgtcaggcagcgctgcaggccatcatgacggtggaagaggctcgccagcgcggcgcacgtctgccatcgatgccacacgtccggacattcctgcgcctgctgacaggctgtagccggattaacagtgacgttgcccgccgtattcctggccttcaccgtgatccaaaagaccgcctttccagcctgaaacaggtggaagaggcgctggatatgcttatctccagccacggggaatactgtccgctgccgctgacaatggatgtgcaggctgaactttttccggaagtccttcatacccgaacagtacgcaggctaaaacgtcaggactttgccttcacccgaaaaatgcgccgtgaagcccgtcaggtcgagcagtcctggttactgcgtcagaacctgctgggacaggctgtcacagaactgaattttcagtcaccggaaaccgtctgcacctggtacacccggtggagcgacgagtttgacgcggctttgttgaataaatcgaacttttgctga

SEQ ID NO: 235873 - DNA, 231 bp, Klebsiella pneumoniae; identical to SEQ ID NO: 145440

SEQ ID NO: 235874 - DNA, 420 bp, Klebsiella pneumoniae
  misc_feature (383)..(392): n is a, c, g, or t
atggaaggtaagttaattttttgttccgatgcaatactacggtttcagtccgattacgatgaaaccgctgccgttccattgctatccatccagaacgcgatagccaataccgatcccttctttcttctccgtttcttccaccacaccgttctgattgaagaaggaacaacgctggcaaatatcttcttggcaatagaaccgtggaaggcactgttagcggcttatctggacagagatgttggtgcttatatagatgaggtaagaaaaccgtccgggccaacgacatgggatatcgaatggatcggaatcgaccgtcgaagctcggtttatcgcgcttacaagcgtcaggatatggaagaaggggaagatttttcgacctattnnnnnnnnnnaaggagaagatttttcgacctattttaa

SEQ ID NO: 235875 - DNA, 444 bp, Klebsiella pneumoniae; identical to SEQ ID NO: 217869

SEQ ID NO: 235876 - DNA, 1077 bp, Klebsiella pneumoniae; identical to SEQ ID NO: 97051

SEQ ID NO: 235877 - DNA, 477 bp, Klebsiella pneumoniae
atgggtgtcagcgttggaggagataaacagccagccattgggtcggtcctcacggacaccgcgcatccagtcccggatagtgaacggctcgccgttcttctcaatgccctgcaggtagcgaatagccttgacgtagttggtcagcacggcacgaatggagatggccgttttctcaattttctcttcaaccaggttcgctgccggcgtgttctgcagataggcgcgcagcttgtcgattttaatggacagcatggtatcgaccagcttctcgtagctgcgatccttgtcttcacgcatcaggtacgcgccttcggcaaagatagtgcgaccggagccctgccagaacgggtcttctttggtgcccatcgggataagggtgttggagatgttgtcgaagtccggcagcgtcaggcactctttccacaaatcccaggccgcgcagcgcgaatccagcgggttgaggattttatccagtga

SEQ ID NO: 235878 - DNA, 1011 bp, Klebsiella pneumoniae
atgaaggcagctgttgttacccacgaccatcaggttaacgtcacggaaaaaacgctgcgcccgctggaatacggcgaagcgctgttgaaaatggaatgctgcggcgtgtgtcatactgacctgcacgtgaaaaacggcgattttggcgataaaaccggcgtcattctcggccatgaagggatcggggtggtacaaaaagtcggcccgggcgtcacctccctgaagccgggcgaccgcgccagcgtggcgtggttcttcgaaggctgcggccactgcgattactgtaacagcggcaacgagacgctctgccgctcggtgaaaaacgccggctataccgtcgatggcggcatggcggaagagtgcatcgtcaccgccaactacgcggtaaaagttccggacggcctcgactccgccgccgccagcagcatcacctgcgcgggcgtcaccacctacaaagcggtcaaggtctcccacatcaaaccgggccagtggatcgccatctacggcctcggcgggctgggtaacctcgcgctgcagtatgcgaagaatgtgtttaacgccaaagtgatcgctatcgacgtcaacgacggacagctggagctggcggcctcgatgggcgccgacctgaccatcaactcccgcaatgaagatgcggcgaaagtgattcaggaaaaaaccggcggcgcccacgctgcggtagtaaccgcggtggctaaagcggcctttaactcggcggtggatgccgttcgcgccggtggccgcgtggttgcggtgggcctgccgccggaggcgatgagcctcgatattccgcgtctggtgctggacggcatcgaggtggtcggttcgctggtcggcacccgtcaggatctggtggaagccttccagtttgccgccgaaggcaaagtggtgccgaaagtcaccctgcgtccgctggaagatatcaacgctatcttcaaagagatggagcaaggtcagatccgcggccgtatggttatcgatctgcgtagctaa

SEQ ID NO: 235879 - DNA, 276 bp, Klebsiella pneumoniae
atgattaacggcttcggttcggccaaagagcagtggttctcctcttttatgctgcaggtggaagcgaactgctcctggcaccgcctgttcgtcgacccgctcagccgggcgatgtactcctccaaaggcccggattttgagtacatgcaagcacgccggcaggagggggtcgatatccacgatgcggtatacggactggcgtgccgcaactttaaagacgaaatggctgagcttgaatcccgaataccggtgaatgacatggaggataaacagtga

SEQ ID NO: 235880 - DNA, 513 bp, Klebsiella pneumoniae
atgaataggctagcacgtctattacttacagcaagctcgattgcgccagtgtgcgcaacacttttttttataggttttgtaaaagagacagtgtggcttatgaactacagcctatacgtagggttagctagttggtgtttagctataggcttggtaaaatacgccgattgcaagatggaacggcttacaaaaaacatcaattctttatcaccagctaataaagaggtaactaattattttttaagttatcttttccctttgttaggtacagattctatttctgaaaataaatcctatgccttatttttctatttctctttgctattttatatatgtttttccgaaaactacaatttcaacccagtcctgtcactgcatggatataaattttacgaggcagaagatgatactggggttgggttcgtattgatttcaaaatccgttattacggatataaaaaatattagttttaatgttgttcaactaacagattacacatatctacatgtataa

SEQ ID NO: 235881 - DNA, 885 bp, Klebsiella pneumoniae
atggccctttttgctttgatggataagtctatcgcaaccagagttgttagggtagagttagacttgggtgctagcacttctgtgtcgacgatctttcagcaacagcgattacatttccaaactcatcacaataatcacatagctttttacgcaggatatgaacctagatatgatgaatgctttgagatacaaaatttcgcagatgctgctttattaatagatgctgcaactagacctactgccatgcccgtctgggatccaagccaaataagcatagataatatcaaggctttattcgttggcgttgatgccccaggaaatccaaacataattgcgttgcaaacctttaacaaaaaacagatccttgacacatcaaaatcatttcttgctactatgattggtagaagcacaacctttagcaaagctgttgatgtaggatttaatctcgatgacaagctagttgcaattattgataataataccatttgttttaagagcttttttaaattaaggagtgtatttgacatgacgtcatattttacagctgccacagatcaagatttagatgcatttagtcaattgccaatattctctattgctcaagggtttgatattaaaaacgtagcagacacggtcattagaaataaaataactctgataaatcaaactggtctactgacacctcaaaacctcgcacttttcaaggcagaggcagtaaaggtcggcttccccttacaaaccgtagtagtgggtggtgtagaaaaaataaccatgccttcttctaaaaaagaaattaaatccctcctagacttcatcgaagaagatatttgggtttcaggaattagtggaagacgctttaaatcaagttcaaaacgcccaatatga

SEQ ID NO: 235882 - DNA, 810 bp, Klebsiella pneumoniae
atgacgaaaattagtgaacgatggaagcacaatggcattactgaaggttattgcaatatttgtgggaaatatggcttgctcacaaaagatcatgttcctccaaagtgcaccataaccttaggccctgttttgcagaaaacagttagcgaattttttggtattcaggaaccagttaaaccattaaatgctaaaaacggttcttatttcagaaccatttgcagccactgtaacaataaggtattaggtgggctcgatgttgcaattgaaaatgtaacaaagtcctttaaagaacagttaagtcgatatatgaatggtgtgaatgtatatccattcattagaataccttttgatagcatatctttcactaaggctatgattgggcacgtgctatcagcaacttcagttgaagattgtaaaaaagaacccgtagatagccccttctatacacctttaaaggattatgttttgggcaaaaattcaagctttgaggaaactcatgatatttactactggttttacccacacagaatgcacatttccgctcaaagtgtagcatttatgaacgaaggacatgtggcatttatttgtgctttacattttttccctatcggttttattatcacaatgaaaaatgaaggaacataccctgcccactcaacaaaattagaacttgaagataaattccttacatttaatatgacctctataaattatgagtatacgacatttccatttgtaaatcttaagggaaaccaaatgtatgctataagcaacggtcatacttgtgtgagttatccaataattaagtga

SEQ ID NO: 235883 - DNA, 306 bp, Klebsiella pneumoniae
atggcattgaagtgggtacaaagtcaggcagattataacaatatcatgcagcatttgacgttgtcgccaggggagaagaaaggcagtaaagaactgaatgaaaaagatgtgattaagtttttaggcattggagaacgaaaattgtttttctacaccaattatggtgaaaagctcaccttattgcataataacctcccggtttttgttgacccggatgagccatttaaacccattcctgacatccttatgtcagaatatcttgccatgatcgacgaccagcacccgacggggacaatgactgcctga

SEQ ID NO: 235884 - DNA, 858 bp, Klebsiella pneumoniae
atgggtactcgtattattgctgtcggcgctgactggtccggaaaagggaagccaaatatttttccgttcgtttcactctcagatgcggatttcgcctacgattttcgcccgcgcaccacgaaatataatgacctgacaaataaaaccaccatcagtttaatgcggggtacactgtctccaggtaatgcatccatcgctttcagcactgataatacggttggcctggtgagcgccgacggtcagggactgacgattgataatctcggggcggcatttatttccagcattcctaaagcgctggcgctggatggcagtgtaaaactgaccgcgtacgtagtcggtgggtatagtgggctggcgttcccggcagggtcacagtatccgggctcaccggggcagactccgcaaatctgtaatctgtttgattacggcaaccgggtattgaaagaccgcggattcactattgaaagcgatggctatgccagcaacagctctgcgcaatttggcgggcgcgtaaactcgtacaatcccagcgtaggcagccagctggtaggcacaaccagaacagccaaatgtgcaatattcctgacgtttgatggtacaaatttcactgtttacaatgccaccaccgggtttacagagacaaaaacggtcgcagacttagggattacagccgcgttgccagtatccgccagcattgtgccggggattggcattggggcaacaggaacggcatccaatgcggcgctatccccgacaatctatcagattgcgcagtggagtcgggttctctcaaaaactgagatggattcgcagtacagcaaaaccagggcagcattctcaggtatcggaatctga

SEQ ID NO: 235885 - DNA, 882 bp, Klebsiella pneumoniae
ttgggcgagatgacggctctcgcccataaaagtcctatggatgaggttcgccgtaagtatctgtcacaactatctgaacacacaggaagaaatgtaattacatattattccggttggttacaacatggtggtgctgaggttagacatctcacgcaaatgacagatgacgataagaatggattaatgacagcaatcaacggccttgatacttcaagaggcctagatctaattctccacaccccaggtggggatatagctgctcttgaatcaattggacattatttgcgctctaaatttgggactgatatcagagccattgtacccatgatttcaatgtcttgtggcacaatgttggcgtgctgtacgaaccaaattattatgggtaaacagtctaatattggtccaatagatcctcagtttaatgggttttctacacatgccataatcgaagagtggaatcgagcccaagcggaaattttcaagaatccggcggctgtacaaacttggcagttcatacttcaaaagcttaatccaacaatcattggtgagtgtgaaaaagcaatccaatgggcgaatgagatcgttaagcaatggcttatgactggcatgtttgcaaacgatcctgaggcggaatccaaagcagcacatgtatgctcggaattaaataatcatcacactacttatacccattcacgccatatccatttcgataaggcccagaaaattggattaaatgttaccgaacttgaaagcgatcaagtgcttcaagatttggttttaactatacatcacagctatatgcactcatttggtggcgccccactggcaaaaatcatagaaaaccataatgggaacgctatgatgtggaatattcaatcgtag

SEQ ID NO: 235886 - DNA, 201 bp, Klebsiella pneumoniae
atgaccgcagctgagttctaccaagtttatggcatcaagccggcagagatgatggctggagaatctgttgataacttctcgttaagggtgtttgcagggcagacagcaactaatgggaacactggtgtgtggtactcgcagggaacagctacgcaagctaagcaaaatcaaaacacacatcatcaactctacacgtactga

SEQ ID NO: 235887 - DNA, 438 bp, Klebsiella pneumoniae
atgatccgcacccagttgcaggccgtatcaacgactaccggggcgggtaaatctttcgcgcagctcgcgatcaacatcgtcatcgcccatacgcttaacgtcttcctgtacatcactggcccctttcgtgacttcagcacggcgttctgccgcggcgacagtagcagcggcgttttcttcggtacgctgctgttcggctttggcttccgccttacttgttccgcgagcatgaccgatgccaaacgcgccagcgatagcactcaggataacgaccaccagccccgcgatagcttcgattcccataatcacaccaccagtaccgattttgctttcaggaagcgggcgcgccggttattaatcccgttttgtccgccgttgataatctgcgtgatccggacaagatcacccggatatttcaagcaaccttttgagacatag

SEQ ID NO: 235888 - DNA, 462 bp, Klebsiella pneumoniae
atggtagagccaaacctcaaagaagccgtcaaagcgatgtgcaaagcatatccgggcggccgcgaagcaatggctggcgccttgggtatgaccgtaacgcagttcaacaacaacctctacgagaaaaacggctgtcgattttttgaagtatcggagctggaagcgatggaagacatttccaacacgtcgctgctggcagactacttcgcccgccgtcgtggcgccctgctggtggatgtgccgcacctggaagaactcgatcgcgtggacctgtttagtcgtgcaatgcgtacatctgctgccaggggacaggttgatcagattatcgaacaggcgcttgaagatggcgttattgaaaggcatgaggccgaagaaatcatggtgcatcaccgccgccatctggcagctcgggaagaagagattgccgcaattatcacgttattttcacgcaaaaagaagtga

SEQ ID NO: 235889 - DNA, 198 bp, Klebsiella pneumoniae
ttgttcttctggttctttgtaagacagaaggtcgcaaagctggttaattactttacagaactggaacatgtccgtacctgcctggtgacgccagcggtaggctttgtcgtcatcatcagaataatcattatcctgggtatcaatccgccggaaatggaactggtctgtaagcagaaaagagacaccacagccttttaa

SEQ ID NO: 235890 - DNA, 231 bp, Klebsiella pneumoniae
atggaacgggagctgatcgtagagagaacgcgcgccggtttagccgctgcgagggagcaggggagaatcggcggccgccgccggattatgaccactgaggtagtggaacgctgccgccagatgctggtgaacggagccagccggcagcaggtttccgcggtgattggtgtcgatgtgaaaaccatctatcgctattgccccgcatcagaggtcatcgtcgataagaaatag

SEQ ID NO: 235891 - DNA, 864 bp, Klebsiella pneumoniae
atgaaaagagggattgttacatccccgggtgtttttgggagaagatcgagtggatttacactaaaaagaatgatttcccatctggaaataaattatttctgtctttattgggatagtgttgttattccagagagtggtcaaatgagatttttaccacaacttatggatgaaatggaagcttgtggcgtgctaaggcgattgatattcaatcgcaatgtgttttccagtgatacatatatttctgagcttgtggacgcgcaattctacgctcttaattctctcagaggaaaagaaagtgatactgattggcgaatacatcagttaggtgatgaagttatttaccaagaaagtgaatctatagagttggttcggagggaatgtattaggcttgagttattgggtatgttgcctgtaccggacgaaagtgttcatttacatgatattctagaatttaaacttagaaggaaatctgagttagttgcccttcattcttattgtgatgagttatatttagagattttgaactcagccgatcctaacttgctacgcgccaggagcttttctaaacttaaaaaggcaatagaggatttagataaaataaataatgaaggctggcaaagtcctataaagtttaacttagacatatcgtctgaatttgatatatctaacataagagcagggtttgctacgttacttggcgcgtcacagtctccaatgccactaactacggctattattggaggggcattatctgtagcagaagggtttgttaaactaaaggttgagttaagaggaataagaaaaagaaatggtatcaatcatatagtctatttgtctaacgccaggcaagaaggaattatttaa

SEQ ID NO: 235892 - DNA, 237 bp, Klebsiella pneumoniae
atgatgaaactgaaagactacttaaaaacatctggtgttagtcagcatgagttcgccgtactggttgggaaaactcaaggctatgtaagccgaatcgctacaggtaaatgcctgcttggggctgcaacggctttgaaatgggctgcggccaccgagtatcaggtaacaccacatgacctgctaccaaacatttatcggaaacctaccgatggcatccccgaacagaacgcagcttaa

SEQ ID NO: 235893 - DNA, 1203 bp, Klebsiella pneumoniae
atgacttacaagcgtgacagatatctgattcttgaccattgtggggtttacatggtgcgaatcgttataccgtcctacatgaaggcttacttcaacggtaagcgctactacatgaaatccacagccaccaaagatatcaggcaagcaaggcttttcagggatgctgtagcggtagagttcatcaagctaagagaacagcttaagccaaaacaaaacggctcaaaggttgagcagataatcaatgaactgcgtggtatcagcaactttgcaaaagaatcaccagtgaattatggggctaatatcgagcgctgtcctacactaatacaaatacgtgacctttatttgctgcaatatagcgataaacgcaaactaacaacgctatcaaagataactaaagccgttgagttaattctttctcacattaaacagcgtgattcacagcttcaggatattaacagaacggtagtaaccggatggcttgaccaactgaaaaaagagaaagcaactcaaacgctacaaaactatataagcgcactggctcaactgttcgattttgcaaagaatcgttatcacgatgcacctaaagataatcctttcagagggcacaggttagaggccaaaagttcacatgatagttatgaacctttccttatttctgagttaagcaaggtctttgagttacttaatgatgagatgaaacaggtaaccttaatcggcctttattcagggatgagattgaatgaaatttgtagcctcaccactgatgatattgtgacagaggaaaacgtaaggtgtttacgcatctcaaaaggcaaaacaaagaatgctgcccgattggttcccattcatccttcaattaacggacttattgacacgctgattcaaaaccatacggataagtttcttttcagacatgcagcgttaacagacagggctgatggtaagcgctctacatggcatacacagcaattcaccagagcaaagagaaaggctttaggcgagaaggaaacggagaggaaagtctttcactcgttgcgtgggatgttcatcaccgaacttgaccgcctcaaagtgcctgaagacaggatagcgcttcttgtaggtcacgagagggggagcacagagtctttcaagacttacagtcaaggggcttcactcaaagagcttgctcagtacgtggaaaaggtcaattttgacctgtaa

SEQ ID NO: 235894 - DNA, 1035 bp, Klebsiella pneumoniae; identical to SEQ ID NO: 167047

SEQ ID NO: 235895 - DNA, 624 bp, Klebsiella pneumoniae; identical to SEQ ID NO: 162759

SEQ ID NO: 235896 - DNA, 291 bp, Klebsiella pneumoniae; identical to SEQ ID NO: 179905

SEQ ID NO: 235897 - DNA, 522 bp, Klebsiella pneumoniae; identical to SEQ ID NO: 162762

SEQ ID NO: 235898 - DNA, 354 bp, Klebsiella pneumoniae
atgactaacaaagtcactgaagccgcttacaaggctcagattgccactttacaggctcagttaatgcaacgtcatacagtgactgccatcgacgctgtacagcctttctgtgaagctataggtatcaatcccgctgattacgttaaggccaccagcgctatgagtaaccagcataaagcgttctgtgacgggattctgaaagcggcttcttcaaaggtcacccgcttgcagcgtgatgcaactgtacgaatcctcgaagcacagacaaaacgaaacaaagccataacagcagcctcagaagcggctgaagttgctcagtcgatgggagggctaaatgaatcagctcttcaatga

SEQ ID NO: 235899 - DNA, 3711 bp, Klebsiella pneumoniae
atgaaagaactggcgcaaaacagcagtaaaacgccggtactgattgccggtaacgtcaaagataagaaccagtactcagaacaccattcagtgatggccataactgtaaaagaactggccacaaccgaattacctgaaaatacgatgcttatcattcctgaagccgaaaagctaaacgtcccggccatgtatgaagtcctcaaaacggcaaacgccgttaatgctccgacggttgtcattgatacgcatacccgcagggcgacgggctttgccagtgaagttttgagaggtgcaggcgcaccggtactctcatcttcgccaggaatggaaaagagctccttaacgttagttcagaaagatacagtggacgatcgcctccaggttgcagccaggtatgtcagccagcaaaaagcggccggcatccatgtcgttgctcaggcgggcaatgatcgcacccggggacagttaacgcgcgagatccgaaatgctcttcaggagaacgggatacttggtgagacggttgccactatttcaacgctttcacctgtgtggcttgatggtacaaaccggaaccttagaagcacatatcagaccggaatggtgcttgaacggtatgagggaaaggaactccaggagacaatgacgatcaccggtatcagcgataaccacaatactctgcgagtagtaaatgaacatggcgaatcgcaggggctgagattaaatgcgatcgacagtcagtatcgcctgtacaaacaacgtgaactggagattagagaaggagaacagctaaaggcaacaggtgcatcctctcaaatgaatgccggcgataacttcagagtgagtggcgtgcgtaacggtaactggctgtttcgcgagaaacttgtccttgaaactgctaatggtaaaaccatcaaggttcggatggatcagccactcaagctcgattacggctatacagaagggcttggtgccagccgtaactccgacgggcatgtagtggccgtgctcagcagtaaagaagtcacggacacaacggttaaccagctgcgccgcagcggcgaaaatatcattgcttttactccgctagatgaggccagtataacagcacgcctggagtatgaacggacgtctgtcagcgtaactcagggaattaaaaatctctccggtaatgacgatatcacccttgcgctgcgtgaactccagaacaaccgtcttgcccccagagaaagagccgtaagacaggctattgaacttgtacagggcacaaacgtcacgttttcaagtctgaacgtagtcagtaccgcgcttaaaatggaccagtcactatccccccttgtcgcccaggccgaacttctgcgtctggagaaccggggtgaaattatcgcgctggatggcaaccaggggcgtttcggggattatgtgcagcgtgagaactggcaaaacgaaaagactatcctgaaaaatattctggaaggaaaaaacgctgtcgatccgctgattgcagatgcccggcatgaaactgaaggtaagggactgacggatggccagcagaatgccgcgggtcttatcctcgaatcgcgcgatcgttttgttactgtacaggggtatgccggcgtggggaaaactacacagtatcgggtagtggcagcggcagttaatcaggtggagggattagaaatacgtgggctggctcccacacaccgcgccgtgggcgaactgcaggcggccggtattccggcgcagaccattgccagttttctttcagaacagggggagcgtcaggcaaacggccagacgacagattacagtcggacgctgtttgtgattgatgaaagctccatgatcggaaaccgcgacctggccacattgaccgatattatcgtggccggtaatggaagagcggtaatgagtggggatgaggcccagctgaagcctcttgaatccggcgttccgttttcactgacgttaaatcgtagcgcagcggatgtggccattatgaaagaaattgtccgtcagacccctgaactgagacctgcagtggaacacatcattgcagggcaggtgcaggaagcgctgaatgtggccgatatggttagcccttccattgtcccgcgtgacaaggatgcgacggttccggagaggagcatcattgatctgaaagacagcgataaaatagcagtcgatgagatcgctacggatttcgctggccgaaccagtgaagcacgggataagaccctgatagttgcggaactgaaccgggaccgcatggcgatcaacgaaagtgtgcatgacctgctgcaggcgaaaggtgagctgggtgacagtgtcacggtaaatcatcttgtccgtgtcagtaattcgatggctgatttaaaccgcccgggattctggagtgaaaattataagaataccgttcgtatcggggagcaatatctcacgattggcctggtagatccgaaaagcaaccttgtagagcttaatcatcaggagacggggagcagccgctggatatctccgcttgaactgcgtgcgtcaaacgtagcagtgttcgagacaaaagaaatggaggtttctgtcggtgaacgtattcgatttacggccacagaccatgacagaaaggtgaagtcgaatgacttagctgttgttaccgaaattgataaggttggaaagatcacgctcgatgccggcggtcggaaagtcgtcctcgatccccgggagcagaaagaccaacatttcgattatggctatgctgtgaccacctatagctcccagggtgcatctgtaccctatattattgggctggttggcgttgacggtgccagagagcggatggcctccctggacagcacgtatgtacagttgtcccgttccgtcgaacatatacagctatatgcagatgacctcaataagtgggttgagaaggtgaaggagcgttctggagagcgtgaaacggtccatgatgtgatgttgcgtggagaagatcttaaggcaactaacgaacttaatatatggaaacgtagccaacctgtttctgcgacccggctggctgcaaaaatcgaagacggaaccgcagatgccgcacatttccggagtggaaagacgccggagctgctgtacgcggtactgaatgaacatgggcgccagaggggcaactggcatgtgccagtttcgccaacgactggcagactcgatgttgagaatgcgtactatgctggggcgagtgacggtgtaatggttgtcatgcagcagggagagagtgaagggaaaccgatttatacagataacctgccgcaggcgctgtccgagatggcggagcatcctgataaggctgtcattattctcagggatagcgacagaaatgaaacgaccgacgtcagcgcagctgaaacgattgatataaaactggaagacgaaattgaaaaagaaaaaattaaagaactgctaaaaatcgacacagaagaaccgctaaaaggtgatgagctaaaagataaaatagagtctgagagagacactaaagagctgaatgatgagaagcttatagagcaaatcaacagagaaattaatgaagaggaaaacaaagagcggcaggagaactatcatgttgagttaatgaatgacgagcttaatattgtccgccatgataaagagaaagattaccaacctgattaccaacccgaaatcatcagagaagtacaaaagacgattgaataa

SEQ ID NO: 235900 - DNA, 2040 bp, Klebsiella pneumoniae
atgaccaaaagactgacttgggagcagaaaagtattgtcagccatgacaccggacatgcgttggtaaaagccgtacctggtagcgggaaaacaaccacacttgtaaagcgcgttgagcggctggtcaagacgggaactgatcctcgctccattctgatcctgatgtacaacaagtcggcgcaggtgagcttcacggagaacttgaagacggcactgatgtcgagcgtgattccagaaatccgcacgttccacagcttggccttaaagattgttggttacggagaacgccaacagataatcaagaagaaagacctcattactccaagcgactaccgctatgagcaactggtaaagcaagcctaccgctatggctttgaccatgaggcgaattatattgaccccaatgaaattgaaaacttcgagctgtttattgctcgctgccgggcggcggccgtaactcctgttgatgctgccaatgatccaacgttcagcaacatcaaacgggagtttattcacgcctatggccgctattgtgagctgctggaggaaaacagtctgcgaacctttgatgactgtttgattgaggctgtcgcactgttgcgtaatgacagcagccttggtgcccacttcaagcacatcattgttgatgaatatcaggacgttaacctgatacagcatgacatgacccgcttgctatctaagtcggatacgtcggttatggctgttggtgatgttaaccagtgtatttatgagtggcgtggtgctcgaccagactttatcggcggactgtttgaaaggcactacccgaatacgaaggtgtttcaactgtcatgcacgttcagatttggccatgagctttccttgatggctaactcggtaattcggcgcaactctacaaagctgaccaagctttgtgtcagtcatcctagcacccccaaaacagaggtcagattgcactttgataactgcctatccaaggtgctatcaaacctctcggtgagcagtggaacacaagccatattgtcccgcactaagtcgaaccttgctgaggcggaaattgctttacgcctgtgtgggctaccttatcgctacctcaatggttcaagcgcattacacacccgcaccgaaatcgggatactggtagttggcgtcttgctgtctgtgtacggcgatctgcggctactggaaaaccatcccaacaaacaagcgattgtttacggctttctgaaggaggctggttttagatggcagaaagggcaattcaaagcggcgctcagtggattgatggctccgcacgccgacctatggtctgctctaggtcagttattcgagggcgcacaataccaaaaagatcggctgggcaggctcgccactatctgccagaaagacggagaggaaacgcctgctatcgatgtgttacgacgcctgagtatggagggtttcattgatagtgttggctctgagggtgtaactcgcactggatcgaacgaccagcaacgaggggtcgtgaggatcggggagctacttgactccagtaagatcgattcccgcacgtttttaaaccttatcttgaatccaggcgaggctgctactgactgcgatcccttcatcctttccacactgcatggttccaaggggctggagtgggataacgtaatactgatcgggctgaatgagcaggaatttcctggcggcaaacccgatgatgtttacagcgttcgcacatcgatgaacacccctccggccgaagaggaaatcgaggaggaacgtcggctgttttatgtcggtatcactcgcacaaaacagcagctaaatctggtggtccctcttgatgaagggcttgcgcggtggctcaaaaaccgctgggatagcaccccgaagaagtcaccgatagctactcgcttcgtctatgaggctggctggactgcttgtgcggttaccagtgatgcgatctataacagcacggtagagaaacagaaggctgacttcagcaagtttcaccaatggtatctaagagatcttcagcggctaaaagtctag

SEQ ID NO: 235901 - DNA, 600 bp, Klebsiella pneumoniae; identical to SEQ ID NO: 202566

SEQ ID NO: 235902 - DNA, 495 bp, Klebsiella pneumoniae
atggccgccaatgttgtaagtttcaccgctctcgccctcggtggcgactttataaagtgcacgcgcgtgatcttccacatagagccagtcacgaatctgttcgccgttgccatacaccggcagcggtttacccgccagcgcattgagaatggtcagcgggatcagtttttccgggaagtgatacgggccatagttattggagcagttggtcaccacgaccggcagaccgtaggtacggttccaggcacgaaccaggtgatcgctaccggccttggaggcagagtacgggctgcttggcgcatacggcgtttcttccgtaaacaggtcatcagtgccgtgcaggtcaccataaacttcatcagtagagatatggtggaaacggaacgcctgcttctgcgcggcatccagggtagagtaatagtgacgtgccgcctccagcagggtaaatgtgccgatcaggttagtctgaataaaggctgccggaccatcaattga

SEQ ID NO: 235903 - DNA, 261 bp, Klebsiella pneumoniae
atggctttctgccgccaggtgcatcacgatatccggacggaaatcgctgaactgctccgagacggatttagcatcggtgatatccgtctgagtaaaggagtaacgttcgctatcggcaaccgtcgccagagattcaagattccccgcataagtcaggcaatccatcacgcgtacttcgtcctgggtattttcaataatatgacgtacaactgcagaaccaataaaacccgcgccgccagtgacaaggatcttcatatttaa

SEQ ID NO: 235904 - DNA, 1407 bp, Klebsiella pneumoniae; identical to SEQ ID NO: 226493

SEQ ID NO: 235905 - DNA, 564 bp, Klebsiella pneumoniae
atgcatcatgaccttaaacaccgtattcaggcgatgcgggacaaactggaggggcgcgcccctgtcgctgaaattcaggggacctcgcagctttttgtcacccccgccccggaatgtcgccggctggttgagctggctgatgtccgggaaaccgatcgcattctggaacccagcgccggaacgggcgccatactgcaggcgatcagggatgcagtcccccgggcgaagtgtgacgccgtggagctgcacgccggattagtcagccacctgcaggcacgtttcccggaggtccggacctggtgcggggattttctcgaatatcatccggatcgccggtacacccgaatcatcatgaatccgccgtttcatcgcggtgatgatatccggcatatccggcgggcattaactttgattgaacctggcgggattctgactggcatatgtctgaacgggccgcgtcagcaaaaggcgctgcagtccctggcggacgtctgggagccgttgccgcggggaacattcacatataccgaggttgcgaccgccatcctcagaataaccgtctga

SEQ ID NO: 235906 - DNA, 1356 bp, Klebsiella pneumoniae
atgacacagaccaccgagctgattatgactgaaaataccgtcagccagacctaccgggcaacctattcacccgatgacaacaaactgcgcctttacgcatcattacggctggatgaaaaaacgtattccctgatcaacaaagctggctttcgctgggcgcccaaacaggaactctttgtggcgccagcctggacgccgggacgggaggatgtcctgctttccctcgccggtgatatcgaggacgaggacagcaccctgtttgatcgccaggagcagcgcgccgggcggttcagtgactacagtgaccggcgggcggttgaatcggagcaggcgcttgcgcatgttgattcgctggcatcggctgtcccgctgggacagccgatcctggtaggccaccacagcgagcgccgcgcgcgccggcatgcgcagaaaattgagaacggcatgaaacgtgcggtgatgctgttcgagcgcgcggaatactgggaacagcgcgcgcaggcctctctgcaacacgcgaaatacaaggagcgtccggatgtgcgttaccgccgtatcaaaaaaatcgaggcggaattacgcaagtcccaaaagcacattgcccggtctgaaaagtatatgacgatgtggcgtgcgcagacgctcgatctgaatatggcgttactggtcagtaattatgaccatatttatgcctgcttcacgctcgacaaatacccccgcccggcagaaaaaagccagtatgagggttcgatgtctctccattctgccctgactgaggagatcattacttttgaacaggcgcgggatattgcgatccgctgtcatgagcgcacgattagccaccaacagcgctgggttaatcattaccagaaccgcctggcctacgaacgcgcgatgctcaatgaaaacggtggcgttgtcacccgaacacaggaatttgaaccaggcgggcaggtactgagccggggagaatggttaaccattatccgggttaaccggagtcagggggaggtgagttcagtcgaaacgccctgttatcgctttctgggctacagcggcacgatgaaactcacgcccgaccgtatcacggactacaaagccccgacagcggaggaagccagcgacgcgaagaaagcggcgaagcgcccaccgatcgtcaactatccgggggaagggttccgggaaatgacaaaggccgagtgggcgaaattacccgctgattataaaggcgtgcggggtgctgcagaaaccgaaacacacggcgcttaccgcttccgccggtgcatgacgcacggctgtacgcttgtgaatgtgtatatcacagacatgaaaaccgttgaaattccgaaaaaatga

SEQ ID NO: 235907 - DNA, 168 bp, Klebsiella pneumoniae
atgatccataagattgtgccgctgatcgcctatatgtcgcgcttctttaccctcaaagccggggatgtgatcctcaccggcaccccggaaggcgtggggccgctgcacagcggtgacgagctggaggtcggcttcaacggcctggcgctcactacccgcgtgctgtaa

SEQ ID NO: 235908 - DNA, 660 bp, Klebsiella pneumoniae
atggaaagtcaggaggtaactgctacatctttttttgtcgacgtagcagctaaactacaacaaaaggcaccgaaaaactcgattatgataggtgatagtttagcaaaacttttaggctttgataccaatcaactggcagtgagaacaaaaataaaaaataatgaagaggtttctcttcattatatcaccccgaattataaggatgcgtcggggaaatcaattaattacaggcagcatcttttaaagaatgagtcatactacaagcttttgccaacagggatgcttgatagtgatttctatatacgagccagtctgaaaagggacaaaaacgatccatctgatgataattatatttcttgctctcgggtggttagaaaaggaatgggtatttcatttaaggggtattatcattctacgatcacttacgacaaccccaaatttaaatttagagtaaaaaatactggagcggaagcggcagatgctgagaacaatggagatcattatttttttgagcctgcaaagtattcagatggtagatatttcgctccgcattgggaagatacaaaatataaaggccttcatcatatgtatgtgtctttctgggatggtgaacaactaattgaaccggaaaaatgcttctcagtattcataaatgactga

SEQ ID NO: 235909 - DNA, 291 bp, Klebsiella pneumoniae
atgagcattttacaaaatttggttgccgccagtcagttggatgaaagcgcactgcgccagcaggcccggtcacgccaggcgcagtggcagtcctggcttgcgccagtcagtgacgcccaaccaaccggggacgatccgggctatgacgatgattttcagcgtatccgcgaggaggtcaataagatctccggtgtcgataccgtactgatttgccagttggctggacagttactggcaacaacaaaagatatccggattgttacctattactgctgggcccgtttgcactag

SEQ ID NO: 235910 - DNA, 441 bp, Klebsiella pneumoniae
atgacaactgatatcaccgaactggcgcagagcctgaaagcggcagcagagaaggctactccgggtgaatgggtttattttccgaaaaataccagcattgagtatgacgtaggcagtgatgaatctcagggctcaatcctctatgtcgatagtggtgatttcacccaagttcagacagacaggaatggggagttcatcgccctggctaaccctgccaacgttctcgcgctgctagaggcgctggagaggtcgcagcagcggattgatgaactggagtcccgcaccgtcacctttaagttgccagttacaccagagccaagcgcgtattctccgtgggtagccaaagcgttttaccaattccacagggatacagttaagtcatgttttgcggtgttttcagatgcgtgcgccgccgctggcatcaaggtggaggctgagtga

SEQ ID NO: 235911 - DNA, 291 bp, Klebsiella pneumoniae; identical to SEQ ID NO: 110830

SEQ ID NO: 235912 - DNA, 387 bp, Klebsiella pneumoniae
atggctccgctcataaccggaggtggttttacccgtgacagcggtttccagcaccgtctgccaggcgccgccgtcggtctgcaggtcaatcgcatacttgacggtattgcccaccacgtcgccgtcatcttcctgtttcatcagggacggccatttcaggcggacacgaacggcagaaagctgggtattagtaaaggtatgggtccaggctgtcttgctggaaacttccgttcctacactgatttcattttcagtaccgggaataccctgaatataagtctgagcctgcgtgccggggcgaaattcccaggacacgccactgaagttttgcgaaccatcagcattttcaagcggggtgccatcaagataaatatctttcccggttaa

SEQ ID NO: 235913 - DNA, 351 bp, Klebsiella pneumoniae; identical to SEQ ID NO: 180567

SEQ ID NO: 235914 - DNA, 396 bp, Klebsiella pneumoniae; identical to SEQ ID NO: 180578

SEQ ID NO: 235915 - DNA, 423 bp, Klebsiella pneumoniae; identical to SEQ ID NO: 199877

SEQ ID NO: 235916 - DNA, 432 bp, Klebsiella pneumoniae; identical to SEQ ID NO: 180584

SEQ ID NO: 235917 - DNA, 1209 bp, Klebsiella pneumoniae; identical to SEQ ID NO: 199873

SEQ ID NO: 235918 - DNA, 225 bp, Klebsiella pneumoniae; identical to SEQ ID NO: 199872

SEQ ID NO: 235919 - DNA, 174 bp, Klebsiella pneumoniae; identical to SEQ ID NO: 199871

SEQ ID NO: 235920 - DNA, 792 bp, Klebsiella pneumoniae; identical to SEQ ID NO: 180612

SEQ ID NO: 235921 - DNA, 168 bp, Klebsiella pneumoniae; identical to SEQ ID NO: 180609

SEQ ID NO: 235922 - DNA, 174 bp, Klebsiella pneumoniae; identical to SEQ ID NO: 199871

SEQ ID NO: 235923 - DNA, 225 bp, Klebsiella pneumoniae; identical to SEQ ID NO: 199872

SEQ ID NO: 235924 - DNA, 1209 bp, Klebsiella pneumoniae; identical to SEQ ID NO: 199873

SEQ ID NO: 235925 - DNA, 1077 bp, Klebsiella pneumoniae; identical to SEQ ID NO: 199874

SEQ ID NO: 235926 - DNA, 432 bp, Klebsiella pneumoniae; identical to SEQ ID NO: 180584

SEQ ID NO: 235927 - DNA, 1482 bp, Klebsiella pneumoniae; identical to SEQ ID NO: 180663

SEQ ID NO: 235928 - DNA, 1482 bp, Klebsiella pneumoniae; identical to SEQ ID NO: 180663

SEQ ID NO: 235929 - DNA, 147 bp, Klebsiella pneumoniae
atgagcggcgtcgatggcgctgccgacatcgcagaaaatgccctgctcttgctgggggcagggggcgtcggcgcgagcttttcactgaggatggtgcggataagggtttccagttctgctgtattcattgatgagttctcacgttaa

SEQ ID NO: 235930 - DNA, 189 bp, Klebsiella pneumoniae
atgaccagaaagatccccctgctggccttaggattcggcatggctttagccagcgcccaggcgttcgcccacggcaaccatagccatggcccggcgttaaccgaagtggagcgtcaggccagcgaaggcatttttgcggataaagatgtgcaggaccgcgcgctgagcgactgggaaggcgtctggtag

SEQ ID NO: 235931 - DNA, 186 bp, Klebsiella pneumoniae
atgctgcggcttatgttggtgctgcgtcaaaaattcttattactggggaaattgaggttgcgagcacttattgaggttataatgacagaagaacaacttgactacagaagtaagactctcgctgacgtgattaaagagtctaaggaagctgaggatgaaagtgctcagcgcgattctggcgaatag

SEQ ID NO: 235932 - DNA, 1116 bp, Klebsiella pneumoniae
ttgagagttttacacgtctataagacctattatccgaatacctacggtggtattgaacaggtcatttatcagttgtgccagggctgcgctcgtcgggggatcgcggccgacgtcttcaccttttccccgaataaaaataccgggccagtgacttacgaacagcatcaggttatctataataagcaattaattgaaatcgcctcgacgccattctcactcggcgcgttaaagcgatttaataaaattaaagataactacgatattattaactatcatttcccgtttccctttatggatatgctacatctgatggcgcatcctaaagcgaaaaccgttgtcacctatcattccgatattgtgaaacaaaagcggctaatgaaattatatcaaccgctgcaggagcaatttctctccagcgttgactgcattgtggcctcatcgccaaactacgtagcctccagccagacgctgcaaaaatacctcgataaaacggcggtcattcccttcggcctcgagcaaaaggatgtgcagcataatccgcagcgcctggcttactggcgagagaaagtcggcgagcgctttttcctttttgtcggcgcatttcgttactataagggattgcatattctgctggatgccgcagagcgcagtcgactgccgatcgttattgtcggcggcggcccgctggaagcggaagttcgccgtgaggctgaacagcgcggcctgaataacgtgatattcaccggcatgctggacgatgaggataaatatattctctttcatctgtgccgcggggtggtctttccctcgcacctgcgctcagaggcgtttggcattaccttactggaaggggcgcggttcgcccggccgttgatctcgtgtgaaattggcaccggaacctcgtttatcaaccaggataaggtcaatggttgcgtgatcccgccggataacagcgcggcgttggtcgaagcgatgaacgaactgtggcacagtgatgaaacggcagcgcgctatggcgcaaattcacgtcgccgctttgaggagatgtttaccgccgaacatatgattgatgcctacgtgaatctctacagcacgctgctggagcagaaaccctga

SEQ ID NO: 235933 - DNA, 483 bp, Klebsiella pneumoniae
atgaagtacgtccacaataccgttaccggaactccagctgattatatgtggtccatcgacgcaaaccggttgtacaacaatacgatttcacgcttccaaggaacgtttacgccgactttgctttctggtgcaggcgttacagttacttcagctacgggctattacagcatcaacgataaggttttgagattcagcatgtatctgacgttgtccggggccacaccttcaggaaatctggtttttggatatcttcctggtatgtccagtgcaaccatccgaatatcgttagttagtgccaacaacgcgactggatggaaaacgatgacaggttctttgaaggcttaccaggacttgacgaacaaagaccagattatcgtttaccgtgacactgggggggttaggaatttagatgctgcggcttatgttggcgctgcgtcaacaattcttattaccggggaaattgaggttgcgagcacttattga

SEQ ID NO: 235934 - DNA, 129 bp, Klebsiella pneumoniae; identical to SEQ ID NO: 194609

SEQ ID NO: 235935 - DNA, 837 bp, Klebsiella pneumoniae
atgatatatcattatacagatttaactgcagccaaatctatagctgaaaatgaaaaaatctggcttactgaatgtcgctatcttaatgataaagaagagttcacaacaggactatatttatttaaaaatgccttgcaatcaaataataactatacaaatgattatccttttgagtttgtgattgaattagaaaactctatgagttatttaagtaaaactgaattaacttcaccagaggctgcagaaaatcttttcgttgcatcctttagtcacactccagactcgttgagtcaatggcgtagctatggaatgttcatgctagagtttgaagaaaatttcatttctacaagtttaattgaagatgatttttttgcgctcgattgtttttacgcaaaatcttttaaagaaggtgtggcacacgctcaatccatattagaacaaaaaataatcccacgcctttattctatatgcaaaaataataacatacaaactatggattactggctcagattgttaatagaaatatacgcactctcatttaaaaaccaggcgtttgaaagtgaacatgaaaaaagactagtaattgcatgtaaaaatgacgatgcaattattaattttcgggtcaaaggcgatttattaatcccatatatatcattagacattaacccctgttctcttatgtctataaccgtaggacctatagaaaatcagtacttatcaatttcatcacttgagaaatttgcaacgaaaataaccaacagcgttaggaaaatacattctaagcatgactacaatctgcatataaatggctctagcattccctatcgaaaactttaa

SEQ ID NO: 235936 - DNA, 1014 bp, Klebsiella pneumoniae
gtggtcacgcgggcctacgactcaggaacggccagaaccatttcgggagcgctgctgcatgtcgggaactcgctggggctggagatggacgtcgacaccatcaacgtgctggagtctgcatactggacaccacggggcgaaaatttcgatttcgccacgggcgacagtatctcagcgctggaaatgctgcagaagatagccaatgccgggaagtcacgttttctgctgagtgatggccttgcaacggtcaaccgtgaggggattaagccctggactggcgtgatcactccgcatgagatggtggaggagctgcagagcggatttaccgtaccgtccgacgatgattttgatggcgtcgacgtgacatacatcaacgggactacctgggcggaggagaccgttaaatgccggacgcctgataatcccacgccggtgaaaatcgagaactacaaactcgatggggtactgaatcaggatcacgcctaccagatcggcatgcgtcgcctgatgaaatacctgcagcagcgggtgacgttccagaccactaccgagctggacgcgctgtgctacaacacgggagatcgcattgtgctcacggatgatattccgggtaacaacacgatttcctgtctggtggaggcgatgacaacggctggtggcgtgacaacgttcaccgttacggagccgctggactggtctttcgaaaacccccgagcgctgatccgctatcaggatggctctgcatccgggctgatggtggcgagcagggcgggtgattttcagctgtcagtcccgtacctgagcgagtttgatgacccgatgaaggttgacctgtcgtcggcaaccatcgagccgatccgcctggtgttctgcggctcaacgcgccacgtctacgacgccattgtagaggagatcgctccgcagtcagacggaacctgtcaggtcaccgctaaagaatacctcgaatcgttctaccagtacgacgacgccacataccccggcgacgtcgcttaa

SEQ ID NO: 235937 - DNA, 2289 bp, Klebsiella pneumoniae
atggcctttaacccggagctggggagcacgtctcccgctgtgttgctcgataacgccgagcgcctggataagctggtcaacgggcccgccgcagatgttcccgaccgtggtggtgatcctctttattcatggcgccagatgatggcgaaaaacgatgaggtcaggcagaaccttatcccgctcagcaaacagtaccagacgctggcagcggcgcaggcggatatcgcgaatatccccgaggggagtaccacgtattaccgcagcccggacgacagcgcgctcgcaatcgaggtgatgaatgttggcgggacgctgcagcctaccgggcgaaaaatgccttctcagcaggctgtagaccagatcaggcaacagattaaatacgacgctgtgcagatccttaaaagcgcctatgacgaagatggcaatgtttatcttcttctcgatgagtttggtgagctttttattgcgaacctcggtccggtttcagttcaggaaaagttcagaaagctggatgcgctaattcataaagaccgcgctgctaacctgcatgagtttccggacaaaaatgcaaacgtacccgcttttattgatgaactgggtgatttgtatatcgctggcctgggccccttttctgttgcacaaaaaatcagagccatcgaatcttcaattgttaataacgatgaacatgacataacgcatcagtacgatttcaacgggcgtctgatttcctttcaggatgcttttggggaggtgtttatccccggtcttgataaatcagttcaggagtcgataaaggggatcagggagaactaccagcgcgaccgtgcgccgcatattcgccgcctgacggatgcgcagaaccgggcgcttgaatttactgatgaggatggaagttattatctgaaggggtttggtggaaaatcgctggaggagcattttaactcgctgaaaaagcgcgttaacacactgtataaggcgaaagcgatttttgatgcctggctggactttggtattgactggaacggtaacgaatccgtctccctgcagctgcagaccgcagtcaaccaggtaagcaagttgccatatggtggcgaaatcgtttgtcgccctggcgtgtatcgcctgcatacctatatcactgcaaaacctaacgtgacgatccgctgcgttccaggcgcggtattcatgccgatgctggcgaatgccgcgttttattaccgttcgccgcaggaaatctacctcgaaaactttaacctgattgatgtcgagattgacgggtcagaacagcactcaccgtcttatgacgtgggggcaaagggaacatacctgcagtatttccgtcagtgtatgttcctgcgctgtaacgttcacgataccggggccaccggtatcggtaatgattatcctgacaggtcttttgttctggactgccagacggataactgcggacgcctggcacctgacggcagcggcggtgcttccggtatcgggatcggcctgggtgccatgcaggacgaagccctgatagtggcacgcaccattaaccgaaacagcaaaaacttcggcattttctttgagcagcagcgcctgtcagggcccggtcagccttacgtttcccggcagattatcgtatccgatgccgtgtgtaccggaaacgggcatggcttcggcgactgtggcgcatccggactggtggtggtcaacggccagttcaatgacaacctcaaaaccggtatcagcattgacgctgggacgctggctaacaacggtatcgctccccgcccgggtaagaacgggctgatgctgaactgtcaggcggagcgtaacggggtgaccgggctccattatgactcgaccaaaattcaggccgatggcggctattcattctccgacatgcacatcaacgataacgcccaggatgcgattttaatcgaggctggcgctaacaccctggcggatgttcgcttcgacaatatggatatcaaaaataacggtcgttatccggtgaatgttgccagcggcacctttaccgacctcgacttcacgaatcttcgcatgctgcgaaatggcggtgataccgcgtttaagctggacggcaatatcacgcggggctcgattcatggctgtaagctgcgttcgcagaatgacgctgcagcgattaccggctcagggactatcagccatttcgacatcgccgaaaaccagtacaccgataccaacagcaaccccatcaatctcaccggcacactgactaacgtcacctacggccgcaacccaggactggagtaa

SEQ ID NO: 235938 - DNA, 579 bp, Klebsiella pneumoniae
atgccggtaacgcagggacagctggcgtataagccattgcagccgggtgaaaacccggcgataagtgacgggctgaaaatggggattcagtctgcgaaatttgcgtttgatggcgagtggttgtcgcatatcacttaccgtttcagaaccgtggatgatccttccgggacctggttcagtaagttcggggtctacgttgcgacatgggcggggtctgcatggagcgaacagcagatcgcgaatgtcccgccggagaggggaaacacttccgcagcacttgcggcaaccgttcagggaggcaagaggagggggtatttttcggtggaatacacgtcttccgggaatactgtctctgtcattgtcctggcggaaaatgcaggttctggatgggtctactcggtacttggcaacagtgctgccacacttctgcgcctcgggtctgcacctggatacggcggtgatgtgctatacgtctcagcaccatttgaggctaaggtgtatcgctattttgtgccggaagattattccccggctcagcaattcacgaattttgatgtgctgctgtcgattctggtgtaa

SEQ ID NO: 235939 - DNA, 213 bp, Klebsiella pneumoniae
atgcgccgtttgttcaatctgaccaaggtgtggggctactgtcccgacggcaccaacccgtgccaccatgttccaatgtaccccaacggtaaggccactcaactcatcagcaacgagaacatgggcaggttgttccggcaactcgacaagattgaggcggaagatctggagaactacgagattatgttggctatcgactgcaccgagacatga

SEQ ID NO: 235940 - DNA, 1368 bp, Klebsiella pneumoniae
atgtcagttactatcgagtacgtagcagaattcatttttgcctacatccgcaagtatcgggaagcctatacaaaggcgacaacttctcctcctagaggaccgggctatccggcgattgtgaaatcaccgtttctaaatgcctcgtcgctagatgtctatgtcgcagtcgatggagttgttttggtccaactcggtgacaagccatatgattggaacatcgcgggtggtccggcatttaagatcgactatgagccgacgcgtacaccgccctacgtctcaaagatacttgccgctcatgatctcctaggcaagccaatcggtatttatagaatcgttcccgaatcggaattacccgtgacagtgtggcgaggtgaagttcaaggaatcgaacgagaggaaatccagcatgattcatcaacaggggtttcgcttaatttgagggaggtgagggcctcgcttggtgatgtagtcaatgcgctcacatttggtgcatatggggcaatactaaacgtatacctgccgaccagtgattcgccaattggtgagactcacctaactcgaggtttcgggatgttcccagcagatttatcgacgcgccggtttttcgagtatctggaaatattcggtcattcggattcatgcgcatgggacttgcgaattgtagacctgcgggtgcagcgggatctgagaagagatctcgcgcaggcgatgagtaatcccgatggtaatagcggaattatatcgttcggagacatcccaccttggattgagtcttacggaagtaggcttgagcttctcaagtctgcaatagacgatcttaagtcggctctacagcaacgagatgaagatgttgaggcagtctttcataccttgcttgagcggcatccactgcttctcgacgtgtatgggactgtcgaaagtaagccggggttcaactatcccgatggggttacatcaccgattgggaaaacaaaactgcagcccgattttatcgtccgctacccggatcaatcgtataagcttgtcgagatcgaaaggccagcgaaagctattgcaacatcacagggacagccgcgtgcggaagtctcccaagccgtctttcagacggctgagtggaagcacttcattaagactcactatcaaatcattgcggagcgctatccaggcattcaagctaagtgtaagacggcagttgttatgagtcgatcacggcaagaaaatttcaaaaatattggggatatgcgagcatatatgggcctgatgatggagcaatttaatattgatgagtttttgaccttcgatgatctactcgatcgggcatcgactgcattcgtacagctatcaggcctcggcggatcaatcagctga

SEQ ID NO: 235941 - DNA, 441 bp, Klebsiella pneumoniae
atgggatggtctctgccggaagtgcctgaaaaagatcaggcaccatcctggtcaccgtggatctgtctgttgattattattctcggacttttcactgggctgcttaatgcggtgctgaaatcactaacgacagggttactttcattgagcagtggggcttggttaccactgacgatcaagacctttgcgggaatttcggcagccatcgcggtctatactttcagccaggaaatgctagcaattcgtgtctggaactggaatgagtggtgcaggaacatgcgtctgaagtggcgtttacgtgcacaacagcatcttgtcattctcagccatgttttcatcactgccgatacgggattgttaggtcggcttgcaaatacgcaggaaggggaacagacctggaacgcgacggcacggaatttatccctgaaggacgcgggctga

SEQ ID NO: 235942 - DNA, 825 bp, Klebsiella pneumoniae
atgagatggaatcagtcagacagaaaagtgcttacaattatagccattgtcggtgtgctcctctatgtcatttataaaggcctgcagttcctggcaggggccagtatgggggccagttttggagtgggcctgggaggaatgagtggctctcaaaaggttgaagtgtcgcggaaagttgaaacggatgctccgccacaaattatttatcgcatagataaaaatcgatacttgacgctggaaaactacatatcctgtgataagggtggacaggtatattacaatgactctcagcggggaataaaaacacacctgggatgggatatcgaattttatgatatttcctatcgccggggaaataatttagtagcttataaaggctctgttattaatggggcagataatggttatctggcactccccggcgcatctaccagacaatattgtggtagtggaaggtcagagcgaggttgtcctttgtttttcttcttttcggcagatcatggaaaaacctttatctataaaattatagctgaggagtacagtacccctgaacggttcagtaagcttaaagtggtagtggctaatgatggggtttatttaaaagatgagtctcaaacagagagtgtattttctcaccctataggtcttcgcgatcttcattcagtgaataaattaagattttcagacggaaaattaatcagtgtttatgatgattggcagaaaaaagttcatgagttagtgagaaaagaactgataagaaaaaaatgccttatgcaaatgattatggacccacatttcatatattcgactatatcagaaaattaa

SEQ ID NO: 235943 - DNA, 294 bp, Klebsiella pneumoniae; identical to SEQ ID NO: 111049

SEQ ID NO: 235944 - DNA, 495 bp, Klebsiella pneumoniae
atgcgaaagccaataaatgtatttattatattgatatcggtgctgatactcaccgggtgtgataacaaaccagataacatgttatccggttattcgcatggagaatttgtatacctttcatattctggtaatgaaaaaatagaacggatcttgatcaataaaggagataacgtcgccgcaggacaggagttagtgaagattgagtccttcgatgcgcaaaatattttcctgcgcgctgaggaaaagctatcagcagagagcgctctattacgaaatctggaatctggagaacggcctgaagagctggatattatacgttcgcagattaaaaaagcacaatcggcagaatcccaggtaaagcggcagcttgggcgatatcgtaatctttacgccaatcatgccatatcgcttgcggaatgggaggatatccgggatgaattaactcaaaaaggcgcacaggttgaagagctaaggaaggtgcgaacaagtccctga

SEQ ID NO: 235945 - DNA, 786 bp, Klebsiella pneumoniae
atggctaagaattcaatcgatgtatacggtgccagcggcaaaacaaacgtgctcaatttcgagcctgaaaacctgcacctggtcaccgataagacccacccactttacgatgagcgagtacacctgccgatcgaggaagggatggtactgaacattgcggagctgggtgtactggagccaatcatcgtctggaaagaccctgaaacggggctcacctgcgtagttgttggccgtcagcgcgttaaacatacccttgaggcaaataaactccgtctgaaagaaggcaaagacccactgcttgttcccggagtcgttaagcgcggatcagcaaatcagatggctaaatacatggtcagcgaaaacgaaattcgccgacctgatacaccgcttggccgggctaaaaaaatgtcagacgcgctcgaccgcggactcgatgaggacgacattgcggtgttgtttggctgcagcgttcaaaccgttcgtgcaacgctctcccttctcgatgccacccaggccgtccgggaagcagtggagtcgggcacagttaccgttacccaagcccgccagcttggcacacttcccccggaagagcagcgggaaaaagtgaaagagattgaatctgcgaccgctgggactaccggtcatgaaaaagcccggcgtcagcgtcagatcctcggtgaggcaaagccgcgcctgaaaacccgcaaagaaattactaaagccctggaatctgccgagggtgagtatgcgagcgcactccgttgggtgcttggggaggccgtatga

SEQ ID NO: 235946 - DNA, 204 bp, Klebsiella pneumoniae
atgacaatcgtaaaaacccataccggcaccgtgatcaccaaagacggtccgaaggtaaaaaaactgcaccagacagagcggatgtgggtcgtcggcaaaaacgagttttaccacaaagaaacagggcgccgtcactttgcagaaaatacgcgccgccggctgctgctcgacaccatcaagcctatcgaggtgaagcatgtttaa

SEQ ID NO: 235947 - DNA, 234 bp, Klebsiella pneumoniae
atgaaaattaaatgcatcaaagacacagagggatactggactgaaggtgaaatgtatccggcccgtgtagttgctggcggttttgttcaagttggcgacgattacgatcgcattggcgagggctggagcgctatgcctatcgaataccgggatgacggctcgatcgtttatgaattggggggtattgaagatgacgttcagtttgaggaacgtgcagcatgcgcaaatcattaa

SEQ ID NO: 235948 - DNA, 654 bp, Klebsiella pneumoniae
atgaggggtgacctatgtgacctctacgccttggaaaacaaaatggatatctgggataagagcaaaattgtaatatttttactattcgttatacctggcttcataagtatgaagatgtatagcgtacttagacccaatgctttttttgatacatctaaagcaattattgaaattgtctcgtatagctgtattaattatgcaatctggtttatccctgtgtattttatagaatctaacaaggtttatgcagcgcatcctttcgcttactttttattttacttgttcatattatttgctagcccgacactgttggcttttttgttttcgaggatgcgcgaatgggattggctatgtaaatacatgcctcaccccacaggtagggcatgggattatttttttggtctgaaagttccatgctggatgattatcacgctaaaagatgggaagaaaatagcgggtaagtatggagctaactcgtttgcgtccagcgctccagaacctgaacagatctatcttgaggaacattgggaattaaacagcgacggtggttttgaacgtcagcgcacttccactttaggaatactgattttaagtaaggatatcgagcacttagagtttttccgctttgaacagcagcaaactacctacccatag

SEQ ID NO: 235949 - DNA, 738 bp, Klebsiella pneumoniae
atgttcgcagaaatgctcagcactggggcaactctcgacgatatctcatatcgtcgatttctgcgtgaaattgaacagattacatctcctttttctgcaaccgccttggggttgttatatgcagtagcaggcaaattcgaaaaatcaaatgctgctttcgtagaagcaagtaaagagtacgatgatgtttctataccttacaatcatttagtaactctacgcttaacttggcaggaccacttactgaaagatagctcatatgaatatgcggatcgatatgagtcaaaaagactgacatctctcgcgttttcttatgcttaccgattcggagatcgagatggtcttgtccgctatatggaccgtcatatcaggctgctatccaatgaggagggcagggaattggctgaaaaacataaagaagaattgcttttagagttagatgacgcttactgctcttcaggttgtacgcaacaacaatttgaaacactagccttgattataggacgcatagcaaaagaatttaatgctgagttagggttggttgaggtgagtagaagaggcaattgttgctatgttgccgatattaaaaacaaagaccctagaacgattgcagaaatgaattatgccttggcagaagctgtttgtgatgagccactgcttgatgattgtaaccttattggccgattctctcctcaacgagagctacacgtgggaatgacctatgtctatcaacagtga

SEQ ID NO: 235950 - DNA, 396 bp, Klebsiella pneumoniae
atgtctatcaacagtgaggatttcattagttcggcaaaattctgcctcagccatgaaaatgaagtgggttacagaagttgcatatctcgtgcatactatgggatgtttcacgaggctatggcttctcttacaaatgtccctgcttttagtagcaatcaccatggcaatctcattggctatatgacgaatgctgcagaatgcaaatctgaaccttatgacaagcgcaagttgaaggctatgggttataacttaaaacaaatgcgagactcaagaaatgaagcggactatcacattactgaaatcacaataactaaggaaattgctgatgccgcgattttctcagccgaattgttttttagtaaatggacagcactaaaagaagttaaagcatcataa

SEQ ID NO: 235951 - DNA, 471 bp, Klebsiella pneumoniae
atggataagttcgacagaaatgtacagcgtgaactgctgaaagaactatatgaaacatcaccgtatggtattaaccatgagcgagaaggtcactataaatcagcatttggtagcgaggataacctagtagcaaaccttatctaccttcgtgaccatgagttgatagactgtcatttagagcaagtcatgtccggatcttatattgttatgctcgataacactaaaataacgaataaaggaattgactttattcgggatgatggtgggcttagtgcaatattgaacgttcaaaccatcaaattccatcgagaagccatcgtagtcctcgaagaccttattgcaatgtccaacatgaacgacgagcaaaaggaaaaggctaaatccacactcggcgaactatcaactgaggctcttaaaacagtggtgcaaaccgcgacgactgcaggattatccgtattatttggaaaatga

SEQ ID NO: 235952 - DNA, 165 bp, Klebsiella pneumoniae
atggaaaactctatcaatagatttgatgtatataacagcgctttcctggaatttagatttttatactacttaatgtcgtggcttgtggcagatcaatttttgctggacgatattgtgagggttatatgtgatgcagaacaaaaaagccatagtgaagactattaa

SEQ ID NO: 235953 - DNA, 630 bp, Klebsiella pneumoniae
atgaactggcaggttgtcactttttttggcgatagcaccgtactgttacccagtgcggccgtgttgtttatcgttctttttctgcgcaaagattcaaagcaggtcgcctggcactgggcgctgctgttcggcatcactggcgccattgtctgcgcatcaaaactggcatttatgggttggggtattgggattcgcgagctggacttcaccggctttagcgggcataccgcattatcttcagctttctggccaattttcttatggctgctgtgcgcgcgtgctacaccagctcttcgtattgcttctgtcgtatttggttatgcattagccggtttggtcggctattcccgcctggtgatccacgctcattcaacgtctgaagtgattgccggcttactgctgggaaccgcaggcagcgcattgtttctgctgctgcagtcgcgcacccgcggcactcatacagcgcagttatcatggggagggctggcaagcgtggtcatcatcccggctctgctgttgaataccggcgctaaggcgccaacgcaatctcttctgggtgagatcgcagtgaagcttggtccgctggagaaaccttttacccgggccgatctacacaagcgcttttactga

SEQ ID NO: 235954 - DNA, 1071 bp, Klebsiella pneumoniae
atgccgggacaggggttaaatagtctgcgtaagaacgtagttgaattaccggatagcgactacgatttggataaactggtgaatgtctatcctatgacgccggggctgatagatcaacttcgccccgaaccagttattgcacgttcaaatcctcagctagacagcttgttaaaaagctatgaatatcgcattggggtgggcgacgtactcatggttacggtatgggatcacccggaattgacgactccagctggtcaatatcgtagcgccagtgatacgggtaactgggtgaattccgatggaacaattttttatccttacataggtaaagttcaggtagctggaaagactttaagccaggttcgtcaagatattgcaaatagattaacaacatatattgaaagtccccaggtggatgtcagcatcgcagctttccgctcgcaaaaagtttatgtgacaggggaggttacaaattcggggaaacaagcaattacaaatatccctttaactgtgatggatgctattaatgcggcagggggcctagcggctgatgctgactggcgaaatgtcgtactgactcataatggtaaagatactaagatttccttgtatgcgctaatgcagaaaggcgatcttactcagaatcatttgttattcccaggcgatatactttttattccgcgtaatgatgatctcaaggtttttgtcatgggagaggtgggaaaacagagtacgcttaagatggatcgcagtggtatgactcttgcagaagcgttgggtaatgctgatggattatcccaatcaatgagtgatgcaacaggaatattcgtagttcgtcagttaaagggtgacaagcagggtaagattgcaaatatctaccagctaaatgctcaagatgcatctgcaatggttttgggaactgaatttcaattacaaccatatgatattgtatatgttactactgcaccgcttgttcgttggaaccgcgtaatatctcagcttgtaccaactataactggtgttcacgacatgacagagaccgtacgatatatcaagagatggccaaattaa

SEQ ID NO: 235955 - DNA, 939 bp, Klebsiella pneumoniae
atggaacaccgcttcacctctctgccccccgatccctttatgtgcagcagcgacgaaaagcagagccgcagcccgctggcgctctactccgagtatcagcgtatggatatcgaactgcgcccgccgcacgccatgcccaccagccactggcacggccaggtagaggttaacgtgccgttcgatggcgacgtggagtatttgattaataacgaagtggtgcgcattgagaaaggctatatcactctgttctgggcctgtacgccgcatcagctgacccgccccggcgattgccagcagatggcgatattcaacctgccgatgcatctgtttctctcatggccgctggaccgggagcttatcaaccacgtcacccatgggatggtgattaaatccctcgccgcgcagcagttgagcgccttcgaagtgcgccgctggcagcaggaactgagccacgagaatgaacagatacgccagctggcgatcgatgaaatcgccctgatgctgaagcggctgagcctcgccggctggcagccgattctggtcaataaaacctcacgcacccacaagaacagcgtctcgcgccacgcgcagttttatgtcagccagatgctggagtttatcgctgcccactacgaccaggcgctgaccgtcaatgccgttgccgagcacgtgaagctcaactcgaactacgcgatgggggtctttcagcgggtgatgcagcagaccatgaagcagtacattaccgccatgcgtatcaatcatgtgcgggcgctgctgagcgataccgacaagaccatcctggatattgcccttaccgccggttttcgctccagcagtcgcttctacagcacttttacccgctacgtgggcatgccgccgcagcagtaccgtaaactcagccagcagcggcgtcacggcctggccttgccgaaggcataa

SEQ ID NO: 235956 - DNA, 888 bp, Klebsiella pneumoniae; identical to SEQ ID NO: 208848

SEQ ID NO: 235957 - DNA, 600 bp, Klebsiella pneumoniae
atgaatataaaagaatatttaggcgatcttatcggaggcagtttattgataactgaatctagaataatcgcagaatcgctattgaaaaaacttccagaagatgagtggaagtcgctgatcgttgagcaaaatgttcttcagaaaaaatccggtcagacggctattcgttatgccagaacaatccgttggcgtattgaaggtctgggtgatgagtttatgactgatcttttagtcgcgagtgaacgcgcctatgtccaaatgctgatgatgtcattactcattcattctccggttgtcgctgattttatgcgacttaccttagccgaagctcgtcgcacctataaaccctctttaaccgctgatgcatggtctgagttttatgacacgagagtgcgggcatatgccgagcttggcggtttttctgactcaactgtcaaaaaaatgggtaacaacgcaattaaggcactggttgatagtggctacctgagtgatagcaggacaaagaaaatacaacctgtttacctaatgccagaagttaaagactggttagttcgtctgggccgggaagatttgattgaggtaatggagtgcacaatatga

SEQ ID NO: 235958 - DNA, 585 bp, Klebsiella pneumoniae; identical to SEQ ID NO: 208846

SEQ ID NO: 235959 - DNA, 3678 bp, Klebsiella pneumoniae
atgaaaattgaacagattttttccaagaagttgacgcgtgatattaacggcgttgttaaagcggaacagaaagacaatgacagtgtgtatgtcgaacttgatgagtatgttgtaacccgagagctagatcgacattttcgcgctttctttgaggcttacgttccatctgtgacgcaaagtggcgcatcaatgtcaggaaaaattggtgtgtggatctctggcttctttggttcgggtaagtctcacttcctgaaaattttgtcttacctcctcgaaaataagtctgtcgaaaaggatggccaaggccgtcaagcatttgagttttttaaagacaaaatcaacgatgccatgctgttggccgatatccaaaacgctgttaccaaagacactgatgttattctttttaacatcgattcacgagccaatacggatgaccgagaaaatgccattcttaaggtcttcctcaaagtctttaatgagcgtgtaggatactgcgctgattttcctcacattgcgcatttagaacgcgagcttgataagcgtaatcaatacatgtctttcaaggacaaatttgctgagttgactcaatcaacttgggaaaaggagcgtgacgcctatgacttctatcgagacgaactttcagaagcactcgctcatgccagtgagcaatcattagagtctgccaaagcgtgggttgaacaggttgaaaacaatttcccgctagatatccgaaacttctgtaagtgggttaatgaatacttagatcgaactggagatcgtaaccttcttttcttagtcgatgaagtcggtcagtttatcggtaagaacacacaaatgatgttgaagcttcagaccattactgaagatcttggcacatattgtggtggcagagcttgggtcgttgttacctctcaggcagacattgatgctgccattggtggtatggataagcgcgatggcgaggacttctctaaaattcaagggcgttttagtacccgcttgcagctgtcgagctcgaatacctcggaagttattcaaaagcgtttgttgtccaaaacggaagaagctcgtacacacctcatcgatgtgtttgctgaaaagggcgacattcttcgtaaccagctgacatttgataaaacgacaactgcgtctctaaagggctacaccgacgctccgtctttcgtggacaactatccgtttgtgccttaccactacacgctggttcaaaaagtgtttgagtcaattcgaacaaaaggcgcgacgggtaagcacttagccatgggtgagcgttcattacttgatgctttccaatcagctgcaaaacagatgaaggactctggccttgatgtgttaatcccgttttacagtttctatgcaccgattgaaagctttttggagccagcggttaagcgaacgattgaccaagcctgtgagttggattccttaacagaattcgatggcaagattctaaaaactcttttcttgatccgttatgtggacgttgtcaaaagcacactagacaaccttgtgacgctgtcaattgatcgaatcgatgcagataaaattgcgctgcgtaaacaaattgaagagagcttgaatcgtcttgaacgccaattgctgattgcgcgtaatggtgatgaatttatcttcctgaccaacgaagaaaaagagattgaaaacgagatccgccacactgacgttgaaatgtcagaggtctctaacaagctttcagcaatcgtatttgacggtattttgaaaggtaatcgtgcctatcgatacccgattaataagcaagactttgcggtgagccgtttttgcaatggtcatccaaaagatggcaccacgctggaagatctagtcattaaagtcatttcacctttggattcgcacattgaaaattactcccacgatcaagcctgcatcaatcatacgcttgaggctgatgggtgcgtgctcgtcaagctgggcgaacataaacgtctttgggatgacctgacaaactttataaaaactgaccgattcttaaaacaaaattcaggacagcgaccagagcaagaacaccttctccgcgaaaagcagatggaaaatattgagcgtgaaaaacgcttaagaacggattttgaagctttgtttgcagaggctgacgtttacgctatcggcacaaaactaccgaagaaatcagcaacgccaagtgccatcgtcgaagaagcatacaaatacgttatcgaaaacaccttcgctaaattgaacatgctcaaggcgacgcctggtgaagttttgcgtgagctacaggccgtacttgttgctgatgatattgctcagattggactggatcttcaagcggatgaatgtaacccagaagctacgcgtgaggttgagcagtacgtaacgctaaaagtcgagcgtaatgagcctgtttacttacgtgacatcgttgcccacttcggcaagcgcccgtatggctggccagacaatgaaatcttattgctcactgcaaggctgggcttggctggaaagttatcttttagtacccagggcacagatctggcgttgaaaaaagcttacgagccgtttaccagcgtgcgtaaacgcggtgagatccgtgtacataaaatcaggcaacatgacgagcgccaaatcaaaaaggctgctggtcttgttaaagagatcttttcaaaaacctttaccggctctggtgaaaaggagctctacgaattagtgcgcgatgaattactggcttggaatgaagagcttaaatcattcagaaccaagtcacagacaggccatttcccaggtaaatctcaaattgacgatggtcttgcattggtcgcgggtattcttgagcaaacttcaagcttcgctcttatcacccgattcttagaaaacgctgatgcccttgaagagtttgctgaggactttgaggatcttgatgacttctacaatagccaatttcaaacttggcaagcccttgctggcgcattgaacgagaagtttaaggccaatagacctgcgttagaaaaagacagtgaagcattaaaagcgctcactgaattagaacgcatttacaatatgccctcgccgtatgagcagctgcgccacattaatccgcttatcgagcaggtggcaaaaattaactcaacattggttgaagaaaaacgcactcatgccttagagcgtgttgatctgcgcatcggacgtgtaaaagaagcgctagctgaagctcatgcaccgtctgaattacagaaccaagcactgcgcccgttacaaatgtgcagacagcgtattgaagcgacctcttcaataccacaaattatcagtgagcaaactgaagcggaaggttacgaggacgaagcttatgagttgctgaatggctttatcgaagatcaacgcaaaaaagctgaagctgagcaaagacgtcgtgaactcgaacagaagaaacgcgaagaggaagcagcgaaagccggtaaggcagctccagcacctgagccagcccctgaaccagtgcagccacagccggttgcaaaacgtaccgtaacgattaacccaaccgatgccatagctaagtcagtaacaaccggattcattgaaagtgaagccgaagttgatgcctatcttgccgctttaagagagcagctgattgctgcggtcaaagctggcgaccgagtaagaattaagtaa

SEQ ID NO: 235960 - DNA, 1764 bp, Klebsiella pneumoniae
atgtatcaagcgggtggaacaataagatcattactcgacaaggttgctgagcaggaatacctgttacctgccatccagcgagagtttgtatggcgaccagaacagatctgtcgtctatttgatagcctgttgcaaggttacccgtttgggacctttctattctggaagataaaaccagagaaccgggatagctatcagttttatcagttcatgcagcattaccatgagcgagataactaccattgtgaaaatgtcactcagttaccggaacgtgagttcattgccgtcctagatggacagcagcggattactgctttgaatatcggcctacgcggctcatttgcgtggaagctgacaggaaaatggtggagcaatgatgacgccttcccagtgcgcaggcttcacttaaatctgttaagccagcccgacttagaaactgggtcgatgtatgactttgagttcctaaccgacgataaagcctctctggatgcatctgaacagtactggttccgtgtaggccggatcatggaagaggaagaagatgcacttatcgatgaagttgctgatgatgctaggttgagctcggagcaacgcaaagaggctcgctcaactcttcgtcacttgtatcgaaccatccatgacaaggacaagatttcgttttacgaagaaagtgatcagagcctagaacgtgttctgaatatatttatccgcatgaatagcggtggtactaccttgtcctactcagacttactactttcaattgcagtagcccagtggagctcgttagatgcccgtgaagaaattcatgcattagtggatgagatgaaccgtgttggtgatggattcaacgtatcaaaagatctcgttttaaaagcaggcttaatgctctctgacatcggtagcgtgggctttaaggttgagaactttaacaaggaaaacatggcgattctcgaaaagaactggacgccaattcgtgatgcgttattgctctcaatgcagctacttgcaagttttggttttaatgcacaaaacctcagagcaacaagtgccatcctcccgttggcctattacctgcaccaccgaaagttaacggcaagctacctttctagggttgaatatgcggtcgatagagaatgcatcagaaactggctcattaggtcgttgttgaaagcgtcaggcatctggggaagtggtttggataccctgcttactatgcttcgctcagacattaaacaatcgggtgatacgggcttcccgctagcgaaaattgaagcgaccatgcaacagcgtggtaaatcgttgcgctttgacccagaggaaattagtgaactagcgcagttggattatggtaatccgcgtacctttgccttgttgactttgttgttcccaggattcgatttttcacgacactttcatgtggaccacatttaccccaaaggtttgtttacacgtaacaagcttgcaaaatttggtgtcccagctgatcagctagatgaactcattgaggcatctaacaagctgccaaaccttcaactgttggaagggactatcaacaatcagaagcggcaaaaaatgccccatgaatggtatgtgcagcagtggcctgatgtgaatgcaagacaagcacatctgcaatcgcaagcaataacatcattacctgaacaactaaaccagtttatggacttttatcgcgagcgtcaggaaacactgcttgcccgcattagaaccgcattacaacccgcaaacagcgtagagacagaataa

SEQ ID NO: 235961 - DNA, 3693 bp, Klebsiella pneumoniae
atgaatacgaacaacattaaaaaatacgcaccaaaagcgcgccgcgaatttatggatgcggttgctaaacgattaaatacctttggtatcaccgcaaataaaaaaggcgagctacaaattgcagaagcgaatctacaaggttctgtgcttcaaatcgccggtaacagttttgacggtaaactggctgagcccagaaaacgcatagtggccagaagccagaagctggggtatgcacaacttattgaacaagtagcttatacctggttcaaccgtctgtgtgctattcgctatatggaaatccatgactatctcggtcatggttttcgtgttttgtcgcacccagacaaccctaaaggatttgaaattatcgaccatgcgcaagacgctgcggatgagctcggattagatagagctcgcattattgaactcaagcttgcgggcaacaaagacgaagagctttatcgtgaattgttgttaggccagtgccataagctacatgaggcaatgcctttcttatttgacgcattggacgatgaaacagaacttctgctaccagacaacctaacgcgtaccgactcaattctgcgtggattggtagacagcattcctgaagaggactggcaacaagtcgaagtgattggttggctttaccagttttacatttctgaaaagaaagatcaggtaatgggtaaggtggtcaagagtgaagacatccctgccgccacccagctatttacacccaactggattgtgaagtacctggtacaaaactcagtcggtcgccaatggctgcaaacctacccagactctgccattaaaacgcagatggaatactacattgagcctgctgaacaatctgacgaagttaaccaacagctaaaagctataacacccgaatccatcgagcctgaaaccatcaaagtactcgatcccgcttgtggctcgggccacatactgattgaagcttacaacgtactaaaagccatctacgaagaacgaggtttccgctctcgtgacattccaaagatgattctggagaacaacctctacgggctagacattgatgatcgtgcagcgcagttatctggttttgcgctgatgatgatggctagagatgacgataagcgtatttttacccgtaacgtgcgactcaatgtactgtcattgcaggaaagtaaccatattgatctaccgaccttatggaaagcactcaacctatcgggaagttggcaaagcggcacgtcccagggcttgttctcagatgaagagcaagatttaagctcgttcaatgcagacaaccgttaccaactgctgaagcgaacattggcaagatttactcaagccaagacctttggttcattgattgatgtaccaagcgatgagcatgagcagctaaaagaactaatgagtactcttttcgaattgcaagagtcaggtgactcaatgcaaaagccagcagctaagcagttgattgaatttgttcatcaggcattggttctgtcgattcgttacgatgctgttattgctaatcccccatatatggggagcaatggcatgaatgcagaactgaaagatttttcgaagaaaaactttccaaatagcaagtctgatctgtttgccatttttatggagcgagcatttaaattgctgtcgcaatatggatttaatgctcaaataaatatgcaatcttggatgtttttgtcgagttatgagcagctaagaagcaatttattggaagaccatacatttataactatggcgcacttaggcgctcgtgcctttagtcagattagtggtgaggtagttcaaacaaccgcttgggttattcaaaaagagcacattaagcaatatcaacctagtttttataggctagtcgaaggtaatgagcaagaaaaacaagatgctttgcttaacagagaaaatgaattttccgctacagttcaggaagactttgaaaagattgcaggaaatccgattgcttattgggttagcaaagaattgagatatacatttggtaaattcaatagtttttcacatttttcagacactcgtattggactaattacaggtgataacaatcgttatattcgacagtggcacgaaattacgcatgccaaattaggtctaaattttactagagactcatctaagaactccggctgtaaatggtttcctcagtcaaaaggaggggaatttcggaaatggtacgggaataatgacactgtcgttgattggtctaatgatgggtttgagcttcagacaagaatgcatgattctggcacaagaacactggcacataatttcaatttagataaaatttttgatcctgcaattacatggacaaagatatctggtggatctttttcagcccgttatcagcctatggggttcttatttaatgatgcttctgcaaacgctttccctaaaaatgaagatgactgttgggttctgcttgcatttttagcatctaagctacctgttgaaatgcttaaagcagtaaatcctactttaaacttcctaccaggtaatatttctatacttccaatttcaaatgaaataatgaccagtgaaggtatcaaaaatagaactaaaaagcttgtcgaaatggccaaggtagattgggactctcaagaaacctcgtgggacttttgtaaattgaattggggcattatttctgatacgccgagtttgttacgtgaatcttacaattcccaacgaaaaaaatggagtgagtattctagtgaggttcagcaattagaacaagataacaataaggaattaataagtgcatatggccttgacgcagaaattactccgttagttcctttgtcagaaattactcttatgtgcaatccatattatcgatatggtaataataggaccgatgatgaattagaactaatgttgcgttgcgataaaacacgcgaattagtttcatactcacttggttgtattatggggcgttattccctcgatcgtgaaggtttagtttatgcccattcagctaacgatggttttgaacagctagttgccgaaggagctttctcaacctttcctgccgacgaggatggcattatcccgttaactgaccaagaatggtttaaagatgatgcaaccaaccggttccgtgagtttgttcaggtggtttgtggtgaggaatacttacaagaaaatctcgattttgtcgccgaatcactatgcctaaacgccattaaaccgaaaaaatctgaatcagcgctggagacgatccgccgttacttatcgactcagttctataaagatcatctgaagacttacaaaaaacgacctatttattggctgtttagctcaggcaaacagaaggcttttgagtgcctggtttacctacaccgttacaacgagggcacgctttctcgtatgcgtactgagtatgtcaccccgttactaggcaaatacgatgcgtatgcagagcagcttgagaagcagattgaaacggcagactcgaccagtgaagcgaaccgcttcaagaaagagttggatgctttaatcaagaaacaggttgagctacgagagtttgatgacaagctaaaacactacgcagatatgcgtatttcactggatctggatgatggtgtgaaagtgaattacggcaagtttggtgatctgttggctgatgttaaggccattaccggttcggccccggaggttaactaa

SEQ ID NO: 235962 - DNA, 2658 bp, Klebsiella pneumoniae; identical to SEQ ID NO: 164708

SEQ ID NO: 235963 - DNA, 2076 bp, Klebsiella pneumoniae
atgacaactgatttttcacaagatcataaagacgaaaaaaatcagatgcaaagcgccgatttagacgcattgctcaaccaatattttaaaggccgtgtcgttcgaaaagatctgacaaagcaattgaaagaaggcgctaacgtccctgtctatgtgcttgagtatttactaggcatgtattgtgcgtccgatgacgacgaagttgtaatgcaaggccttgataatgtgaaaaaaatcttgactgagaactatgtccgaccagatgaagcggagaaagtgaagtcactgatccgtgaacgcggcatgtttaaaatcatcgacaaagtaagcgttaagctcaatcagaaaaaagacgtctatgaagctgcgttgtcgaacctgggtatcaaggatgcccttgtaccgaccaaaatagtacaagacaacgaaaaattattaactggcggcatctggtgcattattaccgtgcagtatttctttgaggaaggtcagaagacatcacctttctccattatgagtttaaaaccgatacaaatgccgtccatgaacatggatgaggtgttttcaaccagaagacattttagtaccgatcagtggatggatgtgttgcttcgttccgtgggtatggagccaaccaacttagagcatcgggtgaaatggcatcttatcactcgcatgatcccattcgttgaaaacaactacaacgtttgtgagctcggaccaagagggacaggtaaaagccatgtctacaaggagtgctcaccaaactcattgcttgtctcgggcggacaaacaactgtggcgaacttgttctataacatgagctcgcgccaagttgggttggtcggaatgtgggatgttgtcgcctttgatgaagtagcgggtattaactttaaagacaaagacggcgtccaaataatgaaagattatatggcgtcagggtcttttgcccgtggtcgtgattcaattgaagcgaaggcttctatggtattcgtcggtaacatcaatcaaagcgttgagacactggtgaagaccagtcatctgttggcaccttttcctgaagccatgattgacactgctttttttgaccgtttccattcctatattcctggatgggaaataccgaagatgcgtcctgagtttttcaccaatagttacggattaatcacagactatcttgctgaatacatgcgtgaaatgcgcaaaagaagttttgcggatgctatcgataagttcttcaaactcggtaataaccttaatcagcgtgatgtaattgctgtacgcagaactgtttcgggcttgttaaagctactacaccccgacgcacagtacacaaaagatgatgtaagagcctgcctgacctatgcgctggaaactagacgtagagtcaaagagcaattgaaaaagcttggcggaatggaattttttgatgtgcactttagctacatcgataacgattcattagaagaattcttcgtcaatgtaccggaacaaggtggcagcaagctaattcctgagggcttacctcgcgctggtgtcgtgcacttggttactcagggaagcactgggcagcttgggttatatcgctatgaaacccagatgatggctggttctggtaaacactcagtgtctggccttggttcgaataccgcagcgaaagaagctgtgcgtgttggctttgattatttcaaaggtaacctgaatagaatcagtgcgtcggcgaagttttctgatcatgagtatcacctccatgttgttgagctccacaatacggggccaagtacaaagtcatcgctcgctgcattaattgcgttctgttcaattctgatgaaccgaccgattcaagagcagatggttgttttgggtgagatgactttaggtggtgtcgtcaatcctgttcaagatcttgcaggcagtcttcagttagctatggacagtggcgcaaagcgtattttgctcccaatggcctcagcctcagatattccaacggttcctgctgagttgttctcaaaattccagatcagcttttatgcagaccccgtcgatgccgtgtttaaggcgcttggggttaattga

SEQ ID NO: 235964 - DNA, 687 bp, Klebsiella pneumoniae
atgaaaatttgtttttttgacatggaaggaactttacttgaaaagaattcatttttagataatggaaaggttgcgccaagtgcatggacagtgcttgcaaaagaaataagcgaagcctgttttattgaagaggaaaaaacaaaagatttatggctggctaataaatatatcagttatacacaatggatgaaagaaacagtagaaatacaaatcaagcatggaatgcataaaaggcatctacaaactatattatctcaagcaaagatacaaaaaggtgctctagaccttgttcactttttgaaaagccaagggtttctaacagtattgatatcaggtgggtttaaagaactggcagatcttacccaaaggagtcttaaaatagatcatgcatatagtgcttgtgaatacttctttgataataatggtagggttgagcacttcaatctattaccaacagatgaggaaggtaaattagttttcatgaaacaccttgcttctgaatataattcagaacttgaaaattgcatttttattggagatgggaaaaatgacgtctttatagcgaaaaatgtaggtacctctatagctttcaatgctcagaaagaattaagagaagtatccacatttattcttgaacaagaagtccctgatttatcagcgattattgaccttcttagaacccactaa

SEQ ID NO: 235965 - DNA, 834 bp, Klebsiella pneumoniae
atgcagattagtgctcaaaaagcaattgaatatggatttgtttgcgacagaaataacaataaaatcacaacagatcattccaataaatcaagtgtagatctctctattagggaaattctttttaaagatgaaaaaaataatgtcagatctctcgggagaactttacttaaaccgcaagactcggcttttgtaatatcagaagaaatacttcatgtaccagagggattcattgcatatgtttttttaaaaaatagattatctcaaaagggtttcctagccctcaatactggcattatcgattcaggatataatggtcctatttcaacattgttaataaatttttcagctgtagaggaatacctcccaattactgatagtgatcaagataaatctttctttagagttgtgttccatgaaatcgaaaaaaaccctaattatcagccaactactccgataccaggttcttacaatgttacagataaatataatgcctatagagcttatcgagttacagatataactaagttccctaaaactttcttagagccaatagtcctaaaagaacagataagcaaagagttaactgaaaagctatcaagtatatctatagttaaaataggaatagtgattgcttttgttggggcgtttctctcactgattccttttggaagagattactatttcgctgaaagatttgatttgaatgaatttaatcaatacaaattacaatctgagaaaaaaataaaagacttggaagatcaattggatattatcaaagccaggattgactcaaaaaataatttagtgggttctaagaaggtcaataatcgctga

SEQ ID NO: 235966 - DNA, 1665 bp, Klebsiella pneumoniae
ttgcaatttgactacatcattattggtgccggctccgccggcaacgttctggcaacacgactgactgaagatccaaacaccaccgtcctgctgctggaagccggcggccctgactaccggttcgatttccgcacccagatgcccgccgcgctggcttatccgctgcagggcaagcgctacaactgggcctacgagaccgaacctgagccgtacatgaacaatcgccgcatggagtgcggacgcggcaaagggctcggcggatcctcgctgatcaacggcatgtgctacattcgcggtaacgcgatggatctggataactgggccaaagagccgggtctggaacactggagctatctcgactgcctgccctactaccggaaagcggaaacccgcgatatcgggcctaacgactaccacggcggcgatggcccggtgagcgtgacgacgccgaagccgggcaataatccgctcttcgaggcgatggttgaagccggggtgcaggcgggctatccgcgtaccgacgatctcaacggctaccagcaggaaggctttggcccgatggaccgcaccgtgacgccgcagggccgtcgcgccagcaccgcccgcggctatctcgaccaggcgcgcggtcgcccgaacctgaccatccgcacccatgcgctgaccgatcacattatttttgccggcaagcgcgcggtgggcgtcgagtggctggagggagagagcacgatcccgtcaaaagcgacggccaacaaagaggtgctgctgtgcgccggggcgattgcctcgccgcagatcctgcagcgctccggcgtgggtaacccggagctgctcaggcagttcgatatcccggtggtgcacgatctccccggcgtgggtgagaacctgcaggaccatctggagatgtatctgcagtacgagtgcaaagagccggtatcgctctacccggcgctacagtggtggaaccagccgaagatcggcgccgagtggctgttcggcggcaccggcatcggcgccagcaaccagttcgaagcgggcggttttatccgcagccgcgcagagttcgcctggccgaacattcagtaccacttcctgccggtggcgattaactacaatggctccaacgcggtgaaagagcacggcttccagtgccacgtcggctcgatgcgttcgcccagccgcggccacgtgcgcctgaagtcgcgcgacccgcacgcccatccggcgatcctgtttaactatatgtcccatgagcaggactggcaggagttccgcgacgccatccgcattacccgggagatcatgaaccagccggcgctggataagtatcgcggccgcgaaatcagtccgggaatagaatgccagagcgatgccgaactggatgagtttgtgcgcaaccacgccgagaccgcgttccacccgtgcgggacctgtaagatgggttacgacgagatggcggtggtcgatggcgagggccgcgtccacggtctggaaggattgcgggtggtcgacgcctcgatcatgccgcagatcatcaccggcaacctcaacgccaccaccattatgatcggcgagaagatggccgacgccattcgcggccgccagccgctgccgcgcagcaccgcgacgtattatgtcgctggcgacgcgccggttcgccgctaa

SEQ ID NO: 235967 - DNA, 432 bp, Klebsiella pneumoniae
atgtataaaaatatcgttgttcccgttgacgtgtttgatgcgggcctggccgacaaagcgctctctcatgcgaaattcctcgcccaacattctgccgggcaaattcatcttatccatgttattccggccttttctcctgtattaacccgcggatttatctctgatgcccgaaagatggaagaccatttgcttaataccgctaaggaaaagctgagcgagctggtgaagaaaaatgggcttgcggaagacgccagccatctttatgtgcgcagtggcaatgttcgcgatcaagtgattgccctggccgatgagctgaaagcggatgtggtgattgtcggttcgcgcaatccggggatccagactcatctgctgggctcggaagcggccaatatcgtgcgctatgcccatgtaccagtgttcgttgtgcgctga

SEQ ID NO: 235968 - DNA, 1167 bp, Klebsiella pneumoniae
atgaaaattactatttccggtaccggttatgtcggtttatcgaatggcatcctgattgcgcaaaaccacgaagtggtggcgctggatatcattcaatccaaagttgatatgattaaccaaaagatttctccgattgtcgataaggagattcaggaatacctggcggaaaaaccgttgaattttcgtgcaacaactgacaagcatgatgcttatcgcaatgcagattatgtcattatcgccacgccgactgactacgatccgaaaacgaactacttcaatacgtcgaccgttgaagccgttattcgcgatgttaccgagattaaccctgatgcggtcatgatcattaaatcaaccatccccgttggtttcactcgtgatattaaagagcgcctgggcattgataatgttattttctctccagagttcctccgtgaaggccgcgcgctctatgacaacctgcacccgtcgcgtatcgttattggtgagcgttcagaacgcgcggaacgttttgctaacctcctgaaagaaggagcgatcaagcaggatatcccgacgctgtttactgattctaccgaagctgaagcaatcaaattatttgccaatacctatctggcgctgcgcgtggcttatttcaatgaactggatagctacgctgagagccagggcctgaacagtaagcagattatcgaaggcgtgtgcctcgacccgcgtattggtaaccactataacaacccgtcctttggctacggtggttactgcctgccgaaagataccaagcagctgcttgcgaactacgaatctgtaccgaataacattattggcgccatcgttgacgctaaccgcacgcgtaaagatttcgttgctgactccatcctggcgcgtaagcctaaggtcgttgggatttatcgcctgatcatgaagagtggttctgataacttccgcgcttcctcaattcagggcatcatgaagcgtattaaggctaaaggtattccggttattatctatgaaccggttatgcaggaagatgaattcttcaattcccgcgtagttcgcgattttgaagcgttcaaacaagaagctgatgtgattgtctctaaccgtatggctgaagagctgtcggatgttgctgataaggtatatacccgcgatttatttggcagtgactaa

SEQ ID NO: 235969 - DNA, 1812 bp, Klebsiella pneumoniae
atgattgattgttatgtaaacatttataatgataatgatgaattcagaataccactaacagacagtggtagttatgaggttagggaaaatgacaagctcgttttccacttaattataagtgagcatgacctgctaactcttggtgagccagttatggtaatcggcgatatcccaacaaagtttttaaaaaatgaaaactccccacatggggagtgtcattttgtaacttgcgaaccatcatattctcattcatcacgttacttctttaacttttttggtgaaagcgaggttacaatttattttgaaaaatccgaggggaaaactctaacatttaggttcaatattttagctagaaaagaaaatgcaaagttagctgaagaaatgttggggtttataagcgataatgttgatgatgctgtagccatttgtttttccagaagcaaaaacggaggtggctttaatagtgatgaagaacataagtttagcaagtatgatgctgtgatttatgctgtgaactatttatcaagaacattaccttcttttattaatgacaaaaaaacccactggaaacagaaggtcattttgtcgcaaaatgggcaaccaacggggcctgattctgtatattgggcacttacgaatttagataaattatctccctctacagcggagaattataatatatactttaacaatcgtggctatcattttgatgaacaacccaaggaagtgctaattgatgacacgaatgtctatgagaatatagtcataaactcattcttgtacaatgctgataagttcttatatgctttaacaaaacattattcagagttcgcaagtaaagaggttggctactctgatactgaatatgttcgctttgatcatacaatgacaaaatatgcgaagatagctttaaaaatgcgaataaaggaaattgaagaaaatcatgccttagtgaagaaattgatgtttttttataaaaaaataattaactctaagattaacccaaacatcattcctaaaataacagcatttgtagcaaaaaaaggacattatagagaagcgtttagattaataaatattgcgaacttatcatcagcacctgcttttgatgacactaattttttattcgggttgaaaaacctgtctattgtttatgaaataactagccttatcatgctccataagagtatctccgaaattttcggagtaagtttaagccttcaatcataccgagagcattctgaaaccaatgggttcggtggggtagcggttaacaggccaaccggagcagtcaataatcactttatgttctctggagacactttccaggtggagcttttatatgagccaaagatttttccaatgacaagctcaacacgtccaggcgatttgatcgataccagcaattcctatgccacatctctatatggaaaacatcatttctgtcctgactttgtaattaaaatacattcaaaaaaatggaaaaaatcattaacactaatccttgattctaaatataaagatgcaagaaatgtacgggattacgatattcctaaactagtaccacgctatctctttaatattcattctctatcaaacgacaactcagtaacaccaattgacttgctgattgttttattcccacacgacaaagcaggaacattagtaaaaaccgtttcttctaagcatttcatcactggatctcatccagtattacctcaagcacttggaacaatatacacaccacttaataatgggctagatgacaagttaaaaagcttagtgcaatattataatcttaaaatgatgtag

SEQ ID NO: 235970 - DNA, 633 bp, Klebsiella pneumoniae
atggctgacaacgcatccccaaaaactgaaccgcgcaatcaacgtaacgctggcaataaccgcccgttagggatggtcatttcaaaattaaagccactttcaagtgagttctatacgcactttcatgaaaaaaacagagccttcctgcgccagtttaacgccatttccaatgcaatttataatattttccggctggtagaaggtgaccaggcgacaagcactaaagttcagaaatggctctccggtgtttacgatgaactgtcgggtaatgtaaatactttcaaagagcagattgacaaaaatgtcgccagactgcctctggatgattcatcattcgaagggtttgactatggtgaatttgaaattcgctggaaccacccaatgacctataaattgctggatattatccagaccatcaacgtcctgactcgtcaggcacatcagttgtggttatatggtcagatatcacaacaggttcatgaccgaattatcctgcaactcctgagctcactgcgggttgcgatggacaacatcactaaaatactgaacgctgaaaaccgcgtgggcagctacagttcacttacaccgcctctcagcccggtacgcaccagaaaatcattgatatggccatga

SEQ ID NO: 235971 - DNA, 195 bp, Klebsiella pneumoniae
atgacaaacatgatctcatatcagggacttgttcgcaccttccttagttgttttaaaaatgccctagactgggaactggagatgatcctgaaaacagaaaacaaaattaaaccgatccgtgaactactcgcggaataccatcaacgaaaactggccgatatcaaaagactggaaaaactgaagaggttaatataa

SEQ ID NO: 235972 - DNA, 606 bp, Klebsiella pneumoniae
atgaaacaatttttgatgaagcataatctggcgttattcagtctggtggcgacctgcgttctgatttatacgctggcaaactggcaggtcatgccctttacacaacgaatgctggggttatttgtctttggtattaccttacatttgtgggaagaaggccggttcccgggtggttttaccgaaatgattgctgagaagctgaattttaaagctgacgacatccattttgggcaaatcatcacatcctgctatgtggtgtttatcgttttcgtcccgctatttttcccgcatgtattgttcctggcaatcgcaccgatgttgcttggcttgctggaacccgttgcgcatttgctggcaatacgcatgtcatcaacgcgctattattcaccgggactggtcaccgccgttgtggtgctgatgccgatttcgctgtacacgctgcaccatatagcaacccatatggagacgcatttctccacctggctaatggcctttctatacatgttagtcgggttattgatagcccagcgactcgtcatctctgcaagcgggatgaagtacagtgagtttttgaagaatgtcagacgtcgtttattcgcaaaatga

SEQ ID NO: 235973 - DNA, 327 bp, Klebsiella pneumoniae
gtggtattacgtgaaaccgatcagcagcaggcggctgttgatttccacaaaaccgtgctgaaagcctggcaggaaattgatgatgcactcagccgttacgctgctgcgcaacaaaaactggttgagcaggaacagcgtgagaagagcgcaggagaggcacaatctcttatacaggcccgttatgacggtgggttgaccagctttatcaacgtgctcgacagccagcgaagctacatccaggcgcggcagtcgctggcaatgtgtcagcgggatgtgaaaactgcatgggccgcagtgaaccgcgcagtgggcaattacccgcgctag

SEQ ID NO: 235974 - DNA, 414 bp, Klebsiella pneumoniae
atgggctttaaaaagagcgaggtaagccagctaaatagtctggcaagtgccataaagttaatagaatttgatgccaataaatataccataacacatttgtatggtcgtaaagttgccgacagcctggagtactccaaagggataaatacaagaaaaggggtaggtaaatggctcggtgaaaaatccgccatgttgctgtcaaatgtcgttgtaaacaatgctattcatattttcggatatgaccctcaaaatcctacagaatcaaccagagaaatggattttaatgcacttgttgatttgttaattaacacgggctatacgccggaatactacccgctcaaggtcaacaggattgtcgaagttctcaacgggatgtcggaagctgactataaagacttattgcctggtatgtaa

SEQ ID NO: 235975 - DNA, 396 bp, Klebsiella pneumoniae; identical to SEQ ID NO: 166540

SEQ ID NO: 235976 - DNA, 1260 bp, Klebsiella pneumoniae
atggctttatataggttagaaatgcagaacgtcagccgttctgatggtgtcagctcagttgcaaaggcggcttatcgtcatcgttccgtcatgatagataaacgaacaggagaaatacacggcgagaaatcagctaaccgtgatgatctggtttatgctgaaatattagcacctgataacacgcccgattttttgaaaaaatctagcaacgatttatggtgtttcgtcgaacaaacagagaggcgaaaggatgctagaaccgcaaaagaattcaaaattactttgccccgtgatttatcgaatgaacaaaatatagaactaatgaaagattttttattaaaaagttttgtcgataaaggcattatatgtgactttgttttacataatgataaagataataaaaatccacatgcacacgttatgattactacaagagaaataaagccagatggcttcggaaaaaaagtacgtgaatgggatgaagaaaaaactttgcatgaatggcgtaaagattgggcaaaagttcaaaatcagcatttaaaaaaattaggtttaaaatctcgtgttagccatagaacgctagaagaacaaaaaaacataatgatcgatttagctaaaaaagcagaagatgcaaaagattttgacaagtctattttgtatttagcaaaagctattgaactagatcgaccaccgatgcagaacctatcacgtaaaaaatggaggacaaaagaaggtcaggagcaacgcaaacgtgaccaagcgatcagagatagagcgaagcaggatgcaagggctgtcaggttgttgagaggtgttgcagttgtggatgttgcttcattcgtggttcatcctttggagaaaaaagagcattcaaaaaataatgatttttcagttaaaaaatcgtggtggcgttctactgttaattttataaaaaatattaaagctaagttctcaactaaaaaagatattaaaaacgttcacgaaaaagaaccggagttaataactgatccagtcactggtttaccgattaccaaagagaaatggcaagagatgagcgacagagcaaacgtgaggactccacaagctgcgatctcataccaagttaagcaatcacacggggaagggctaaaaacggctcagaatgcgttacaggacgttttagacgtatcagagggtaaaacgttaaaggtgaagtctgtgcatgttccgggttctcgtaggcgtcgagtgatagaccaagacagcagtgacaagggttaa

SEQ ID NO: 235977 - DNA, 858 bp, Klebsiella pneumoniae
atgatactacaaaaagaatatagcagaagtgattttataaatcaaattatatcaagacctttttgcactgacgacttcaaaagagacggtatttatagaacaaacaaaagacgagctttaaacagcgtttatattgagcataacaacgatagctttattaactctattgtgtttgatattgacagcgatacagcagctatcgcatggcaagacgcagatataccaaagccaaattttattactcaaaatcctgctaatggtcatgctcatttattctatgccttatcgtctcctgtatgcatcacagaaaatgcaagaagaaagccgcagaagttattacgcggagttatagagggtttaactgaaagattaggagctgatccttgttatactggcaagataacaaaaaacccgctaaatcctcgctggcgtaccttttggaacgaacaaccgcgatttgaattgaactatctatgtgagttcatagatacaaataaaagagtaaaaaaagaagtaagaaaatcaatagttgcagaaggaagaaatacagcactatttgatagcctgcgtttttacgcttacagcataatttttaaatatcaaaaaaatgacgatttctgcggtttcatgtcagcattacaagaagaagctgaaaacataaacgattcatttgaagatcaactttgctttaaagaaataaatcacacaataagaagtatttctagctgggtgtgggggacttttgatagtgatactttcagtgatatacaaaaagctagaagagaaaaaagaacaataaaacaaaaagaaaaaaccaaggataaattatcaatgatgttaatgataaatcaggagtaa

SEQ ID NO: 235978 - DNA, 528 bp, Klebsiella pneumoniae
atgaatttaatatcaaatgctaaatggaatgccttttctcaatttatcaaaatggctatccaagttgtaaatcttgtttatttagctaagattatacccccagctgaatatggcttgatggctatggctgtcgttgttatgaatttgggtattctcttaagagatctaggaactgcagctgctattattcaaaggaaaaacatttctaatagccaaattaattctattttttggttaaatgtttttttaggagtgatgcttgcaattttaatgattagcctagctcctttcatatcatatatttatagcgaaccttccttaacactggtcttaatttttcttagtgttacatttcccctatcaagttgtgccgctacgcatctagcattattggagaaggtgtctcattttagaaaaatctcaactatcgagatttcatcttcattacttgcggccatatttgcaatagtttttgcaaacttgggttatggtgtttatagtattagtaatacaagctattgttcttaa

SEQ ID NO: 235979 - DNA, 774 bp, Klebsiella pneumoniae
atggtgtttatagtattagtaatacaagctattgttcttaatttatgttcggatttgcaattttggtttgcatcatcctggcggccatcctttaaaaaactaattttagtggaagatcttaaggatatttttggtttcagtgctcatttgtcgatatttaatttaattatttatttttcccggaatgctgatagttttttgatcgggaagttcatgtcgtccttcattttgggtagttacaatcttgcatatagaattatgctctttccgattcaaagtttgacttatgtagcgactcgctctttatatcctattttaagccatcatcaagatgataataataaaatcaaagacacatatcttaattgtgttcttgttattctggttttaacatgtcctctaatgagtggtatagcaattctaagtcgaccctttatatcaatagtctttggtccacagtggcatattgcagcagaagttttgcagtggttagctccgacagctattatacagtcggttctgagtaccaccggttctgtatttatggctaaaggtaagacgaatgttttaatgaagttagggtttgttggtgcttttttgcaagtaggttcttttatcattggtgttaattattcaatatcagttttagcaaaattttatttgcttgctaacataattaatttcttccctgtcatgttgtgcttatttagtactgtctccataaatttttcagacttcattaaaaaatatggccagccattatttcgactttag

SEQ ID NO: 235980 - DNA, 801 bp, Klebsiella pneumoniae
atgaataatccgggcgcccggctgcttctgcaggaacgcttccgccagcaggccaacaatataatagccttcgataaattctgcatcgttatcaaacataaagcagcggtcgaagtcaccgtcaaaggcgatacccatgtccgcgccgtgctcgcgcaccgcatccgcggtgtcctgccggcactccggcagaagcgggttcgggataccgttcgggaagtggccgtccggctggtgatgcaccttgataaaggtcaccggcacgcctgccgccacaaaacgtttctccacctcatcaatcacgtgaccggctgcgccgttgccggagtttaccaccagcttcagcggacgggtgaagctggccaggttcacgtagcccatcaggtggtccacgtactcctgcagcaccgatatctgacgcagggtgccgcgacgggacgcgtccaccggcgcaaactgattctcttccgccaggcgctggatatcgcgcagcccggtgtcgccgctgatgggcttcgcgttttcacgcaccagcttcatgccgttgtagttcatcgggttatggctggccgtcacctctatcccgccgtccacgcccaggtggaaggtggcgaagtaaatctcttcggtcccgctcagaccaatatccagcacgtccgttcccgcatccatcaggcctctggccagcgccagcttcagcgactcgctggtcagacgcacatcgccacccaccacgatcgttttcggcttcagaaattcgccgtaggcgcgtccgatacggtaggcgatatcttcgtttaa

SEQ ID NO: 235981 - DNA, 849 bp, Klebsiella pneumoniae; identical to SEQ ID NO: 216619

SEQ ID NO: 235982 - DNA, 801 bp, Klebsiella pneumoniae
ttgatttcttcatcaggactgatggcgattttttctatattgtgtgcatcccaggttataaaagtatcccgtatctcaaagtggatactcatcgttagttgcattgtgcttttctctatattcgtgcaaggcagaagagagactcttctacttttaataatgacatttgcttcatatagatttttatctgaaaagatctcaattaagacaattacaaaatctcttttattcgttttcctgttatttgtgttcgcaggccttggtttataccttcgtgcctcatctgaaacttcaggtggatcctttttatctgctattatcaacgcagttttatttgaaacacattttaccatcgcaaaccttgctaatgaaattgctacccactcctataataatattccatacggtgggttgatgtttttgttttaccctgtgttttttattgtgcctagctttatattttccattttcggatatgataaatcagaggttttttccttcaatgagccaaaaatatatgacgacaaaggtggtagcttcatatttactgaagcctatcattccttgggtaatattggagtgatttgccatggagtattattgggatttttaattgcatatttttattcctcagctaaagctagtaggaatatgatttttcattttcctttagtgtcattaattttagttgcaagtaggaaagatattatttatggcattaaatatatatcacttgaattcattttaatgtttgtattttatcttttttatattcttcttcctaagaaaacagcaaggtag

SEQ ID NO: 235983 - DNA, 150 bp, Klebsiella pneumoniae
atggacgtacaacccaacgtacacactgacacggtcattaaggcttttctccgctcggagttgcagttgatacgtagtcagaaaaaactcctcagtgtgttgcctcgtgatctcgcgtcggactaccgctattaccggagaacctgctga

SEQ ID NO: 235984 - DNA, 1026 bp, Klebsiella pneumoniae
atgaaaatctttatcactgaccaacaaaaagctgaacttgagcgtcttcatgactccagtcgtgataagcgcgtttgcgatcgcattaaagccattattctggcctccgagggctggagttcggccatgatcgctcaggctttacgcctgcatcagactactgttgaccaccatatcagcgagtttctgaacaaaggcaagctgaagcccgaaaatggcggctcagacagcaaactcagcgctgaacaaacggcttttttaatcagccacttatccgacaatttattttaccatacccgtgatattgtcgcgtttgtcgcgcggacatggaacatcgttttcagcattccgggaatgaataagtggctgcaccggaacggcttcacctataaaaaaccgtcaggcgtcccgcataaattcagtgaagagaaacaaaagcaattcattgaatattatgaggaactcaaagccaccgcaggtgatgaaccggttctttttattgatgctgtccatccgactcaggccaccaaaataggttatggctggatacgtaaaggccagagaaaagcggtaaaaacaacaggtagtcgtacacggctgaatatcatgggggcgctgaatctgaaggccccggaacatccgctaatctgcgaatataaaacggttaatgaatacaacgtatctcgttttttcaatgagatacgtaaaatttatccagattatcagcagaaagttcatgttattctggatggtgctggttatcaccgttcacagttagtgaaagactgggcggaggtggtaaatataaaacttcattacctcccgccgtacagcccgaacctgaatccgatagaacgaatgtggaagttaatgaacgaacatgcccggaataaccgctacttcagcaacagcagggagttcagggatgcaatatctgaatttttcagccatacgttaccggggatagcgggttttctgacgtcccgaattaacgatcattttcaggtgctcaaacctgcatcttga

SEQ ID NO: 235985 - DNA, 264 bp, Klebsiella pneumoniae
atgcgccctcagcgccgtacctacagcaaatctttcaaggctcaggtcattcaggagtgttctgaacccggtgcctccatcgcaaacatcgccttgggctacagcctcaatgccaacctcgaccacaaatggattcggctgcctacccagaaaaccacggctatccagccagcgttcatcccgttgccttctcaaatgctcggcgtgggttcgcatactcaagcgcgctactgcgatcatgagtttgatccagtcggcccgtaa

SEQ ID NO: 235986 - DNA, 498 bp, Klebsiella pneumoniae
atgaaaaaaatattaatggcttttgtttttttaatagctcctgttttagcgatagctggaggggcaggctacggcaatactaagtgggatatgaccccaacacaggtggtttctgctcagggtaatggtgcgcatctgatatccccagaaaagtttaaggggagttttgggaaggtgcgaattgataatgtatcgattggtagcgatttgtataccgtcacattcctatttgataattctgatcgcctcgtccaaacgaacgttgccagcaatgaaaagaaaaatgaagggattattgctcgtcaatttggtactttgaatcaacttttaacacagaaatatggtaaacctgagttctcagattctgataaggctacatggaaactatcagatacaactattgagttaagtaaaatggttatatctggaatcatggcgcagaccatcattcgctatattcccaatagcagagttgtgagtgatacttctaatctttaa

SEQ ID NO: 235987 - DNA, 1119 bp, Klebsiella pneumoniae
atgagaatgagtgtcaaacagttacgcgcgtttttagcggtagctcacactctgaatttcgcccacgccagcgaaaggctgaatctgtcgcagccagctctcagcctgaccatcaaagggttggaggaggcgctgggcggcgcgctgctgcagcgcagcacccgcaaagtgaccctcacccaggagggggaactctttctgccgatggcccgtcagctgctggccgactgggataacgtcgaggaggccatgcgtcagagctttaccctgcagcgggggaaaatttcggtcgccgcgatgccgtcgtttgccgccaacgttctgccggaggcgctgaaagcctttcgcgaccgctatgccggggtgaacgtcactgtgcatgacgtgattaatgagcaggtgatcgagatggtgcgcgaggggcgggtggagatgggcatcgctttcgagccatcgcccaaccacaacctgctgtttaccccgctggcggtggaccgcttcgtggcgatcgttccccaacaatccccgctggcgaagaaaaagcagctcacttggcaggagctgttgaccctcgactttattaccctgcagcgcccctcggcggtacgcctgatgctggaggaggcgctggcgcgcagcggacgtcagctggacgtggcgctggagagtcatcagttggtgacggtggggagaatggtggccagcggcctggggggcagcgcggtgccggcgctgtgtaaaacgcagatggcatcgttgggcgccgtctgcatcccgctcagcgatccgccgattgagaagtgcgtcggcgcgatccatgccggacatctgccgctgtcgaaggcggcgcaggcgctgctggatacgctgaaagggtttttacccaccagaggtgtgggcgtcaaaaaaaaccggcctgctggccggtttgacaatcagattttgcaggcgtcgccgcagtcgtcgtcggcaacgatcgcctgggcttttttgtccgcttcttccagacgctccgcgttgcgctcttccgcttcatccaggccgctgaagaccaggttgtcgagatcaatttccataagttacctatcgttgctggttttgaatcagggtcaagtatag

SEQ ID NO: 235988 - DNA, 243 bp, Klebsiella pneumoniae
atgcccgcgctggtggcggcggtgacgctaaacctggtctcgatgatcgagtattcggctatcgccgggaccatcggcgccggcggcatcggctacctggccgtggtgtacggctatcagcgcttcgacaaccacatcatgatcgcgacgatcgttgccctgatcgccacgatccagttgattcaatttttgggtgaccgtctggtcaaccgtttacgccacacgcaggggaaccttgtatga

SEQ ID NO: 235989 - DNA, 330 bp, Klebsiella pneumoniae
atgcaaaccatatcatcacacccgacgcgggcgagtcagccctgcctgtcacccgttgaaatctggcagttgctgctaactcatctgttatcgcagcactatggcctgacgctgaatgacacaccattcagcaatgactccaccatccaggaacatattgatgctggaatatcgctcagtgatgcagtgaactttctggtagaaaaatacgggcttgtccgtatcgatcggaaaggattttcgtggcaagaacaaaccccgtatatttccgtagtggatattctgcgagcaaggagctctaccggcttgctaaaaaataatgtgaaataa

SEQ ID NO: 235990 - DNA, 366 bp, Klebsiella pneumoniae
atgaacaatcactccgaatccggtactaagccggagagtcccgcctgccagctgtggggactaaaacgtgctattaccccctgttttggggctcgtctggtacaggaaggcaatcgggtgcattttctcgctgaccgcgccgggtttaacggtgctttcagtgacaacgatgcattgcgcctcgaccaggcctttccgttgatgctcaaacaactggagttgatgctgattagcagcgagctcaatccccgctatcagcactgcgtcacgctttaccacaacggactcacctgcgaagccgacacactcggctcctgtggctatgtctacattgctatctattctgagcagactgagccgcagtaa

SEQ ID NO: 235991 - DNA, 1464 bp, Klebsiella pneumoniae
atggaaaacaccctcttaaccgctaacgccacgctgccgacctacgatcgcagcgcactgatcccccgtatcgttcatcttggttttggcgcgtttcatcgcgctcatcaggctgtgtatgccgatatactggccagcgagcacggcagcgactggggctacaccgaagttaatctgattggcggcgagcagcagatcgccgatctccagcagcaggatctgctgtataccgtcgccgaaatgtccgccgacgcctggaccgcgcgcgtggttggtgtggtgaagcaggcgctgcacgccggggttgatggtctcgaagcggtgctggcggcgatgtgtcagccacaggtggccattgtctccctgacgattactgagaaaggctattgccattcgccagccagcggcgaactgcagctcgatcacccgctgatcgccgccgatctgcataacccgcaccagccaaaatcggcggcgggggtagtggtggaggccttatctcgccgccgggcggccggcctgcctgcttttaccgtgatgtcctgcgataacatgccggaaaatggtcacgtgatgcgcaacgtcgtctgcgcctacgcccgggctttagacgaggatcttgccgcatggatagagcagaatgtcacctttccgtcgaccatggtggaccggattgtcccggcggtgactgccgaaaccctcgataaaattacccagctgaccggggttcgcgacccggccggggtggcctgcgaacctttccgtcagtgggtgattgaggataactttgttgccggacgtccgcagtgggagaaagcgggagcggaactggtcgccgacgtggtgcctttcgaagagatgaagctgagaatgctcaatggtagccattcgttcctcgcttatctcggctatctggccggttatcagcatatcaacgactgtatgcaggacgataactaccgtcgcgcggcgctgtcgttgatgctggacgaacaggcaccaacgctgaaggtgcagggggtggatctgtcacgctatgccagtttgctgattgaccgttactgcaatccggcgctgaagcaccgcacctggcagatagccatggacggcagccagaagttgccccagcgcatgctggactcaatacgctggcatctggtgcatcagcgtgattttacactgctggcgctgggcgtggcagggtggatgcgctacgttggcggcgttgacgatgcgggccaggcaatcgagatatgcgacccgttgttgccggttatccagcaagcggtggctgccagcgccgatggcgaagcgcgagtcaaagcgctgctgggtattgaggcgattttcggcgtcgaactgccgcaggagttacgctttgtcacggcggtgacccgcgcctacttagcgctgcagcggcagggggctaaagctaccgtcgccgcgtgggccgccgcgcaataa

SEQ ID NO: 235992 - DNA, 1119 bp, Klebsiella pneumoniae
atgtctgaagataacgaaatttcccaaaatgaaaccactccagaagttgcatctgaaacaacgcctgtagttaaagtaaggaagcctagaaaaaaagcgaccaaaccaaagcgtgacttccctcaatactctctagaagattgtagaaaaatagctgactgtctgaaggaatttaacgccggtaacccatgggcaccaggtgaagttgctaaagcactgggtttaggtaaagggccaaattttttctacatgactgcgtctgctcgagattacggcataaccgtgggtactcgcgacacaagcaaaattgaacttacggaattagggaagagtttagtatatcctaaatcacaggaggaagaaggcaatgcaatattaagtagcttcttaaatatagacttatttaagaaagtatatgattactatcaaggtggtaacctacctgagattgaatatttaaagaatactctaaaaactgaattcggtatagatgatcaattacaagacgacttttataacttatatcaacaaaacctcaaatacgttcgagaaaaagtcgctagagaagatagcattagtactaactcagttaatgacaaaactgccacagctagtagttccattatgctcggtgaatctcaagggcaaagtaaacttattgcatttgttgctatgcctttttcagaaaaaacgtctaactacccgcatggttattttgatgaagtacttaaacatctcattacgccttctgcggtgaaggctggatttaatgctaagacggcaaaaaaagcagggagtgaagttattcaatctacgattgtcaacgatcttgatgctgctgatcttgtgatagttgatctaactgaacacaatccaaatgtgctttttgaattaggtatgaggattgcctttagtaaacctgtctgtttgatcagagcaaaaggtactgcacctatatttgatatagaccacatgttaagagtctatgattataatccttgcttatggccttctacgctagaaagcgatattccacaattgtcagagcatataaaagaaacatggataaataggagagagcgttcatacctcgatattcttagagaaaataaaagctaa

SEQ ID NO: 235993 - DNA, 204 bp, Klebsiella pneumoniae
atggttactatcacaaaaggcgtccaaacgtttgacgggaaaatccccgttactctgttggttgatgacgtcgaaacagctaatactttggtaaaaatggcaaaagatgccaacgtcactgttattgaacaggacgaagatttaaataaatctacaatcaatccagtattcaaacatctggataagattgcatctaataaataa

SEQ ID NO: 235994 - DNA, 1695 bp, Klebsiella pneumoniae
atggatggtgacacgcttcgccaaaatctgggttcaggcgaaggctttgctttggtggggcaggtatcatcatttactgctctgcgctctattgttccttcatatgaaggtcaaagtattttattgcgcgcccatcctgtcggttgggctgcaatgtctcacggtcccgttggtggcggagaatttatttcaaggcgaggctcagctgaggatgatggtggttatatatgcgtgccgacaggtcaatctgagtactactggcaacgcatcccaaaaaaccctggcaaagtctgcgcgacagagttcggtctttatgatggtgctgctcttgacgacatctggaccagtgcaattaactattgcattaagaactccattggttacttctcaaccccgtcactggggcctgccgggtatacgttagttggtgggctggagttcattaactcaacaaacgggcttatcattgaaggccctggcatgggaacgaagggtagcactccagtaattacccataccggtgcgaatgtcgccctgacgtttaagcgggcaacacaggcacagagcctgtttaatagagtcattcttaaaaatttcacggcagtggggaatgcgctggctactgctttcgtccggttttccgatttcgcctgcggatctatttttgattccgtcattcgagattacacgactggaacagcaatagatatatacaacgacaaggggtggactgagcttttcagggtagataatgtcgtcgtcaggacgtcacagcgtgggatctggttccactcaaaccctgcatctactgacgatcagacgctgtctttttacggtgccagcatttccaactttgacttccagcacggaatcactgcggcgtcatatggcatctatgtcggtgacggctcacgcgcagataatctgtataactgcgatatcgacatgatggggtggtgggaggccggcggtaacagcacggcactttatgcagctgataaagcgtgcgttgatggatctgctgatttccggtatgacggttttgccgcaaacccaattacatcaagctctcaaccatgccgccttgtaagaaaggctggattgactgggtatgtaaaactaaactgcaaaaactataaacataatgcaggtttaggcctgactgctggggttacacagctaacaatccgtccatggttagccattgcggaggcagttgccggtgtggcaaccccacacccgactcttccggctgaaagcataatcagcgtgcctggaatgaagtgcaaactaacggggactttatttaaagggcagaactcagttatctctgtcgttggaatgccgccatggcacagatataaagttactacccggtgtgatttatcaagcacctctcagcagcaatatatcgtaaatattccaaacggagcgaacgctggcattactacacgcaccgactcagttccagctgtaacgacaacaaccactataagcggagggttagcaaccagtacctcaactgctaaaaataaaaacttcgagccagtatttattactaatgctggaaatcttcctgataatacatttagcgaaacaaataagcagggattcgatattcatctggatggcacacaaccaaacgttattaatgacgagtatccggtatccattgagattgaagctatagattaa

SEQ ID NO: 235995 - DNA, 261 bp, Klebsiella pneumoniae
atggcccgtacgatgacggtggacgtaggcgacgagctgcgtgaatttatcgattccttggttaaggccggtgattatcgtacccagagcgaggtcatgcgtgacgcgctgcgtctgctgcgcgagaagcaggctgaatcacgccttcagcaactgcgcgacctgctggccgaagggctcagcagcggcgaggcgaaaccatggaacaaggatgcattcctgaataatgtcagggccaggatggcaaatgaaagagattga

SEQ ID NO: 235996 - DNA, 942 bp, Klebsiella pneumoniae
atggcaattattaatatttattctaagagacaaagaaaaattcgtggcgaagtaaatgacgtatatcaatataacaatattccacatgcactcagggtgcaaataattaaaataataactgattctatcggcttcccctcttctaatgtacgctacacatcgtatagaaatgaagctgacaaagtatatgcatatatccatgagatactttctaaggaatatggtgttttttctttgaaggaatttgcaaagaatgactttgacgctcttgtcgactttttccttaaagagagaaatacagagaaatgcctagatttcatagaaatatgcttccagatactagtgagccacgttgcgaaaaaccattatgaattcaaagacataacaagtcaaagtcctggggatgcagttattgaactaaatgaaaggtttagagaacatggggttggttatcagtttgaatctgaagagataataaggatagactctcaattgattcatgctgatgtcgtaaagccaaccctgattcttttaagtggagaacccttgtttgaaggcgccaatgatgaattccttgctgcgcatgagcattacaggcataagcgttataaagaatgtctaaatgattgtctgaaatcatttgaaagtataatgaaagcaatacatgataagaataactggaaatatagtcctaatgatacagcatcaaaactaataaatagctgtttaagtcaaaatttaattccggcatatttacaaagccagttcacaagtctgaaaacaatgctggaaacaggaattccaaccatcagaaacaaaaatgcaggtcatgggcaaggagctgatattaaagaggttccggaagaattggcaagctatatgcttcatcttactgctacaaatttactatttctcttaaaatgcgagaagaacattaagtga

SEQ ID NO: 235997 - DNA, 1401 bp, Klebsiella pneumoniae
atggctataaatgacgccggaatgttcaccgtgaaagaaatcaatcgcctcaaaatccttcaggatgtcatcgatcgcaatatccgtcctggacaggctgccgaaatgctgggcatcacgccacgtcattgcagccgtctgctcaaacgttatcgccagtatgggccgcttggcatgaacaaccagagtcgtggccgcactggtaaccgtctgttgccagcgtcactgacagatcaggcactcagtataatccgggagcactaccgtgattttggccccacgctagcgcgggaaaagctggaggaagttcacggtctagtccttggaaaggaaaccatccgacgtctcatgataaaggccggactctggattccccgcagacaacgcgcaccgaaaattcatcagcctcgttaccggcgtccttgtactggcgagctgatacaaattgatggctgcgaccaccactggtttgaaaaccggggtcgaccctgtactgccctggtctatgttgacgatgccaccagtcgcctgatgcacctgctgtttgtgaaatctgagtccacatttacctattttgaagctacacgtggctatatcgagaaatacggtaaaccgatgatcctctacagcgataaagccagcgtattcagagtcaataataagcacgccaccaccggccccggcgaaacccagtttgccagggccatgcgctgccttaatattactcctttgtgtgctgaaaccagccaggcaaaaggccgcgttgaacgtgctcatttgacacttcaggaccgactcgttaaggagctcaggcttaaggggatctgtacaatagaagcggccaatgcatttgcagaagaatacatggcggattataaccggcgctttgccaaagaacccttgcatgattttaacgcgcaccggccgctggcattagacgatgaccttgatgcagaatttacctggcgagagcctcgccgggtatcaaaaaatctgactgtacaatacgataaaatgctctatctgattgaggacaacgagtacagtcgaagagccatcggcaagtatattgatgtctggcattatcctgacggacataaggagctgcgactaaatggcgtgctgctgccctactccacctatgaccggctttctgaggttgatcccgtcgccattgtagataacaagagacttggccatgtgttggatgttgcccgtcaggtccagagaaaacgggacaataatcgctcacaatcgttaccttgttctggtgatgagccttcccgcagacggcacgcccctagcatcaacaaatctcagcgctcactgaacgaagatgacctacttgaagccatgataaagcttcagggaagctctgaggccatctttggtaaaaggtga

SEQ ID NO: 235998 - DNA, 633 bp, Klebsiella pneumoniae
atgagaggtataaataaaggaaatgagcctcattcacttaccatgtatcgtgcagcaggtggagtatacgacgggcatgattttaccccggtaaagcatgcgataaaattatcccttttgaaggagcaggggcatctttgcgcttactgcatgagtcgaattgcaatagataatatgaaagttgaacattgggcatgccaatccgacaacccagcacttcagcttgactattcaaatttgctaggttgttgcaagggagatgaaggggagaaaggggttaatcagacctgcgatagccgtaaagggaatagccccctgaaatttaaccctagttgcccacaggatagaattagcacaataatacagtacggtgggcaaggaaaaatatattcaactgatgcagttttttcggtacaactaaatacagtactcaaccttaacaaggcccggcatgtaggcaatagattgcaagttataaagtggttacgttcaaaactttcatgcaaatcaggaaggcgtcgtactaaggctgaaattagacgattattagatgaatatatgattgttaatgctcaagggcacttgagagcttattgtggtcttgttgaaaattatctttcacataggctatga

SEQ ID NO: 235999 - DNA, 1587 bp, Klebsiella pneumoniae
atggaacctataaaaaataaaaaatttatcaaactcatatctaactctcagaagggagatatcaatgcgtcctacgaattatattccaactataatagcggaaagtttttggaaaagaatagtaataaggcaaatgaatatcttgatttggcattaaagcagtttcgacagcaacacattgaattatctcacttatccattcttaattttagaattgtagatcgccttagcttaaacctcaccagcaataaaatccaagtattagttggtaataacggcgcaggtaaaactactgtgttggatgctatctctcaaagccttagttggcttatacaacggatagtacacaaaggtgggaaaggtaaggatattgataagtctgatataacccttgagaacaatgatggttatagctcaattattactgaaattaagctgagaaaaaattacagttcaaaactcgaattgtgcgaagttgaggatggaagtgttgtaaataaaaaaagttattacaatgattttactaaattaggtaatttatacaaactagcttgtgagaaagatgagcaattcgaactaccaatcttagcttactatggtgtaacacgtgcgactgatatacattcaaaagatgtggcggaatttgatgaaacatcttctatagagattcctaatcgtttcgatggttatactaatgctcttgcaggtaaagctgattttaaaggattcttccgctggtataaacgtctcgatgatttagttaagcacgaagataaaaacattactcatgctcatctttcaatgcttgactctcttgaaaaactagcagaatcggatgaagatcctcgagatttattgaatgatttaattaccaaggctcgtcaaggagggaaagaaagtagcagtgcaaaaaggacacaacaaataataaatgatgcagtgacaattttcatgggtgatttcagaaacttaagaatcgagctaaaaccaacattacatatttcagttgaaaaaaatgatataaaaatcaatgtgcttcaactatctcagggtgaaaaatctttactcgcattggttcttgacatctgtagaagaatgataatacttaaccctttatcagaaaaccctttactttcttccgggatcattttgattgatgaaatagatctacaccttcatccggaatggcaaagaagtatattgcgtaagttaagcaatgttttcccaaactgtcaatttattgtatcaacacactcacctcaaattattagtgaggttacatacgataaaatattcatactcggcagagatgacaataataaattcaactgttcatcacctaagcagtcctatggtctgacatcaaaccaagttctcaatgaaataatgaaaactgggattactgatttagatcgctctccagaagtgcaggaaagaattgataaaatatttttgctaatagctaatggaaaatttgaagaagcgaaatcaaatatttctgaaatggaaatagagctcaatggagagatccctgaatttattggtgctaaactcgatatagaaattcaggggtgggatgaagaatga

SEQ ID NO: 236000 - DNA, 963 bp, Klebsiella pneumoniae
atgcgcctcaacctttatgcgaaactgaccgaaatacaatcccgtaatcgcagacaaattgatagcttcctctttaacgcgcctaaccgatataaagtgtacagtatccccaagcgtaatggtggggagagaatcatcgcgcatccatcaagtgagctgaagtcttttcaacatagtctgattgatattttggaatccaatttcttaatccataagagcgccgtagcctataaaaaaggttggggaattaaacataatgcagccttgcattctaataatccatatatcctcaaattagattttacagatttcttcaacagtatcacaccagatctgctcttaatggcatgtgcatggaatgggtacactttatctattgccgaggaaagagtcctaacaaaaagtttattttggaataaagctaaaagccagtcaggtaggctttctttaagtgttggagctcctagttcgccactaatttctaatatcgtaatgtatctctttgacgaaacattcagcagcctttgtgagcaacgcgagattatttattctcgttatgcagatgatcttacattttccactcaacataaaaacattttgtttagtttacctgatgaagtaagaacttttctcaataagaactatcacaatagaataacattaaatgaacgtaagacagtatttacttctcgagcccataatcgccatataacaggaattacactgaccactaaaggcacactatcagtagggcgagagcgtaagagatttatttcctctctaattcataaatataaattaggcttactcgaacccgagatgacctattatcttcaaggcttgttatcatttgccatttacattgaacctgagttcagaacccgaatgtccaagaaatactctcaagaaatcatcttagaaataattaaactgaggaaggaagatggaacctataaaaaataa

SEQ ID NO: 236001 - DNA, 573 bp, Klebsiella pneumoniae
atggcgtggtggaaagaccttagcaaagacagcatatcgggtgttatcgttacacttgtcactggcggtagtgggattgccgttattgtttggctatggaactacattaaaaagttcttccattggctggtagatatttttgtttaccctgtaacattgcctgtttgggctttacttctcatttctatttccctattagttttattgccaactgttggattcgtattgcggcggaaagtcacatcagaagcgaataatcatttaaagagtttcttggactacaaaaccgataccatttttgggattttagtttcttggcgctgggtaagaagattagggagtcagaattattcgttagactctctcacaatgaggtgtccagtttgttcgggaatgctggttcagcatgcaaatgatctctataatttaaatccgtacccgcttataaaatgtcaaatacatggttgtgattggaagatatcgcgtgaatttgaacgtttaacttatggagatatgcgtattaaattagagcaagaaattgatcgacgttgttttcaacggtttggtgactaa

SEQ ID NO: 236002 - DNA, 777 bp, Klebsiella pneumoniae
atgaaaggtatctgtaagctatgccttgaagagaaagatctaatggaatctcatagcattccgagaagttatttcaagcgattgaagaaaagtgactctcaattgattgtatttcagaaaggaagcaaaccaaaacgagaaaatgtagaccctaaagagccgctgctatgtttcgaatgtgagcagtttatcagcaatgaatatgaatcgtatggaacaaggttattgagaaaccatcataatattcgtaaaaactctgaccatataatcatcaactcatttgattataagcgattctatctatttttattgagcatactatggcgagcatctatctctaaaagcgttcattattcaaccgttaatggtgttcctgaatttgatgacttgatgaggcattgtattaaaaacaagcaagtgcgtataaataaaataagtcacttgaaggtggataatttcattcgaatttgtgtttttagattgattgacaccacgaacaacgttcctgaccatgttattaaatcgattcttagcaattttgcatttataagaaaagatgaatcagatagtgtgctttggtattttgtagtagaagggtttgctatattctatgtgttctccgcttcaaaagattaccatgaagtcatgagaatgcgattaaaatcacaattgacttctggtagtcatcagaagatctttaaaatagatatttttaaagacgcactcttttccgaaatatttattgatttgcttactgctgctaatgaaaataaataa

SEQ ID NO: 236003 - DNA, 561 bp, Klebsiella pneumoniae
atggcgaccacgaagataatcacccaggcagaggcgtttaagctgatacgctggcttgagagtcataacaaacagctattcgcagatgtagcgataacaatggcctctttatgtttacgtgtcggtgacacggtgaatttgaagttcagccagttcaaggagggaaatacgctggaagtgctggagagtaagacgggcaagaagaaagaaatcatcgtccctgccaaggtgtgggagattgtagaacgtcgccgccaggccttcccgaaagacgaatatgttttcacttcacacagcaaccgagcatcaggaaaatcccctgtcagccgtgaacaggtgaaccgtgagatcaaacaggctgctgagaatgtggggatcaaaggaactgtaggctgtcacagctttagaaaatttgcatccacacaaatttttgagcaatccaatggaaatttggcgttagcaatgaaagcgctgaaccattcagatcctaaagttacgatgaactatttgaagattgacgttaagagcgtgggcgctgcccttgcaaacatttgggagtga

SEQ ID NO: 236004 - DNA, 177 bp, Klebsiella pneumoniae
atgagcgaaatccagaagaagaaaccagccggaacattcgtaaaactgcctgatgaagtgtttagcactttgttcaaagaggcgcgagcgagaggcgtaacagtgcaggagatgttaattgacgctgcaaccacactttccacatcaattaagaacggagaacgttctaccaaataa

SEQ ID NO: 236005 - DNA, 816 bp, Klebsiella pneumoniae
atgaccgacattataaacggagacatttacagatactttggtacagaagaagcattaatcgaagcaagccacattaccaaccttaaaacaggcgagcgcgtggaactctccaatgatgcaaaaattttatactcgcgtatgcgcaagcgttatcacttctttaccacgtccagcgctggcggcaataaagggatttaccatgacaacattgaagagttgaaagatagtgctaatctctcgaagagtacaacgctacgatgtttgagggtgttaaaacaagttggtttagtggttgccactctgtcaggccgatctaatcaatggactgtagccaacattacaccggattctttcttgcttgaacgcaacgcgggaacaacagccgatccagtgtgggtagattgtctaaaacatccagtgtttggcaaatctaatgaagacgtaactccagaggtgcaattagaggtgcaacgcgaagaggcgaaagccgatccgatgtgcgaacttgaggaagcaccggaagaagaagcgccagcgccggaaaaagtgaagcccacgaagaaaccagcggcaaggaaagcacccgccaaacagcaaaccgtttccccattcgagtttaaaacgccacgagacgaacgttttgatgggttagcctttgaaaggttaaacgacgcatctgatcgcttcttagttttccaggattacgatctgccatacctcgtgttattcgaaagtcaggggaaactaaccaacccagccgcaatagaacatttgaaaatgaagaggaatctcttcgaaacaacagggcgcttgtag

SEQ ID NO: 236006 - DNA, 279 bp, Klebsiella pneumoniae
atgatccaatacttagtgaaatacggcgttgaccgtattcagattaatgacgctggaaagcgtgtgttagaaaccctgcattacttctataaatccaaaccgacaaagatcagctacggtgacattatcgaacgttctggatgttcgcaaggtggtgtgatgttctggctacattctcttaaatctttcggtgtgatcgcttttaaggaagctggacatttcgacataacaataaaatctatgatctcggattatgagatcatttattcgaacgactaa

SEQ ID NO: 236007 - DNA, 342 bp, Klebsiella pneumoniae
atgaataataaaactatggacaccgtgaacaacgtgaacaccctaattaactatttccacgatatttggcatctaccagccctgcggcttgttaataaggcgtggtgtgagagaacgccctccgcgctcctggaggcggtgcaatacactgaacaggcaatcaccgcccttgagcactggaacgctgctgtagagcacctggtgcagatgaacggggataccgtcaccgtggatcaggcgtggcgcattgccaatgatgtggaggaactcgccctcgctatggaacacatcaccgttgaactcggagagcttgccatccagatcgcggaagaatgctcataa

SEQ ID NO: 236008 - DNA, 1503 bp, Klebsiella pneumoniae
atgaaaaatgaaattatagaattgaaattagatttcacgaagtttcctgttttcttacagaccctcataaagtggattcagatgagaacaggggcagctgttgagatgattttatcgacagcattaggggtcatggccttagcttgtcaggacaggtttgatgtcaaacctgagggcaggccagggcatccaatatcactctttatcttggttctcgcaggttcgggaaaagggaaatcaacagtatttagattactaatgcgggcagttactcgcctggagacaaggatgggggaagaatatcgactactgctgatacagtacaaaaaggatattaccagctggaaaattgaacataaaaatgctgagaaaaggtacaggcaagtttgtgatctctctcctgagaaccctttacggcttgagaccttggaaatcttaaatgcatgtactggccgtgaaccggaaaaacccataagaaagcgttttacaatcagtgatacaacaagtgaagcactgaggaaagaacttggcctcgagtacccgaacctcgtgattgcttctgatgaagcaggggggcaattcgagagtaatttgtatcgccaaacaccgtggattaattccctctggagcggagatagaattgcagctatcagagcatccagtaagtgttatgccatcgaggatgcccgactgggtatcctgggtatgattcagccccaattattcggaaattttatgatgcgtcaggggaaaactgcccgactgtcgggatttttgccacgttgccagatgatggatttggatcttaatccatatccctgtgatatcagtagatatccggacccccacagctctgtactggatgattttgaagcgatagtcaccgagcatttactggcaggtatcagtcgtcgggaaaaaaaagaacaacgcctatgtattacatttaccccggatgctcagctggaatgggataaatgtgatagcactataaaaaagctgatggagccaggcaatatcctcgaaatctacaatgatgccgctgcaagatttatggaacaggtaacacgaactgcagctgtactgcagatgttcatcacaccaaactcagccatcattacgagggatacgctgctctcggcgatacatatagcaaactggtatcttgatcatttcattgccaaggtggaccaattcagaacgccaacggatgctgaaaaaatagagcgttttatggaaaaacagcttattaaaaacgagtctttcacttttgttcgtcgtgaaattcgtatcaatgggcctgtcagagattcagaacggctagaatctgcgcttgaggtgctcagctcacaaggaaaggtacagttgcttaaaaaggacaacactaattatgtcagattcattggctcaaagacgagtccgcaacaactgtgtatccgacttaatcttcccacagaattgtggggaagcgttgtactgagtaagttacctgagcctgaataa

SEQ ID NO: 236009 - DNA, 222 bp, Klebsiella pneumoniae
atgtcaacgatatgtgaactaaaaaatcagccactgcgcatcctgcgcatgcctgaactgacgatgatactcgggatatctcgctcgagtatttaccaaaagctgaatcccaaatcccgatattacgatgctgaattccccagacctgtcaggcttggagctgcatccgtgggctggccgtcaacggccgtagaagcgtggattacctctcgttccgtttga

SEQ ID NO: 236010 - DNA, 189 bp, Klebsiella pneumoniae
atgaagcatgtatttgcgaatctgatgtatgacgcctgtcaggtttttgggatattcagggaaggaggtaaagggcgggacatccgtgcacgcggaagctattggctgcatcaggagttttttaatcaacgttacaacgagatagcagaagcaattgaagtggtcaacaaaaactggccaccgcgttag

SEQ ID NO: 236011 - DNA, 795 bp, Klebsiella pneumoniae; identical to SEQ ID NO: 140057

SEQ ID NO: 236012 - DNA, 276 bp, Klebsiella pneumoniae; identical to SEQ ID NO: 140056

SEQ ID NO: 236013 - DNA, 843 bp, Klebsiella pneumoniae; identical to SEQ ID NO: 140055

SEQ ID NO: 236014 - DNA, 222 bp, Klebsiella pneumoniae
gtggtgtgcgtggccgagggactatggaaggtgccggacgatctgcccgagcagggccgccgctatgacgcccagcgtcttggtggcgtgacggtggagctgaaatcgcacctgcccatcgagcggcaggcccgcgtgatcggtgccacctggcttgaccagcagttgatcgacggtggctcgggcttgggcgacctgggctttagcagtgaggccaagtag

SEQ ID NO: 236015 - DNA, 1188 bp, Klebsiella pneumoniae
atgcaggaaggcgcttaccgatttatccgcaatcccaacgtttctgccgaggcgatcagaaaggctggcgccatgcaaacagtcaagttggctcaggagtttcccgaactgctggccattgaggacaccacctctttgagttatcgccaccaggtcgccgaagagcttggcaagctgggctctattcaggataaatcccgcggatggtgggttcactccgttctcttgctcgaggccaccacattccgcaccgtaggattactgcatcaggagtggtggatgcgcccggatgaccctgccgatgcggatgaaaaggagagtggcaaatggctggcagcggccgcaactagccggttacgcatgggcagcatgatgagcaacgtgattgcggtctgtgaccgcgaagccgatattcatgcttatctgcaggacaaactggcgcataacgagcgcttcgtggtgcgctccaagcacccacgcaaggacgtagagtctgggttgtatctgtacgaccatctgaagaaccaaccggagttgggtggctatcagatcagcattccgcaaaagggcgtggtggataaacgcggtaaacgtaaaaatcgaccagcccgcaaggcgagcttgagcctgcgcagtgggcgcatcacgctaaaacaggggaatatcacgctcaacgcggtgctggccgaggagattaacccgcccaagggtgagaccccgttgaaatggttgttgctgaccagcgaaccggtcgagtcgctagcccaagccttgcgcgtcatcgacatttatacccatcgctggcggatcgaggagttccataaggcatggaaaaccggagcaggagccgagaggcaacgcatggaggagccggataatctggagcggatggtctcgatcctctcgtttgttgcggtcaggctgttacagctcagagaaagcttcacgctgccgcaagcactcagggcgcaagggctgctaaaggaagcggaacacgtagaaagccagtccgcagaaacggtgctgaccccggatgaatgtcagctactgggctatctggacaagggaaaacgcaagcgcaaagagaaagcaggtagcttgcagtgggcttacatggcgatagctagactgggcggttttatggacagcaagcgaaccggaattgccagctggggcgccctctggtaa

SEQ ID NO: 236016 - DNA, 222 bp, Klebsiella pneumoniae
atgccgaacgccatcacaaagatcaccgcccacgccagctcgggcatggtgcgcaaaaacgccaccagcacgcgaatggcaaagcgcactggcgccggggaccaggcgttattggcggcaagaaacgcgaaaaccgtggcgatggcgaccgccaccagggtcgaggccagcgccagctgcagggtttcccagatcagcggcagctggatcggcaggcgatag

SEQ ID NO: 236017 - DNA, 213 bp, Klebsiella pneumoniae
atgaaattgtggttagttcgccatggcgaaaccgaagccaacgttgccgggttatacagcggccatgccccaacgcccctgacgccgcgcggcgtcgctcaggcgcgcgcgctcggcgaacggctgcgcctggcgcctttcgataaagtattctgtggcgcggaccgggacaacggccgatctgctgcttggcgaccgcgctattccgcgtga

SEQ ID NO: 236018 - DNA, 1365 bp, Klebsiella pneumoniae
atgacaaaaaaactccatattaaaacctggggctgtcagatgaacgagtatgattcatcaaagatggccgatctgctggatgcgacacatgggtatcaactgaccgaagtggcggaagaagcagatgtgctgttgctcaatacctgctcaattcgtgagaaggcccaggaaaaagttttccatcagcttggccgctggaagctgctgaaagagaagaacccggacctgattattggcgtcggcggctgcgtggcttcccaggaaggcgaccatattcgccagcgcgcgcactatgtcgatattattttcgggccgcaaaccctgcaccgcctgccggagatgattaactccgtgcgcggcaaccgcagtccggtagttgatatcagcttcccggaaattgaaaaattcgatcgcctgccagagccgcgcgccgaagggccgaccgcctttgtctcgattatggaaggttgcaataaatactgcacctactgcgtggtgccgtatacccgcggagaagaagttagccgtccgtgcgacgatatcctgtttgaaatcgcccagctggcggcgcagggcgtgcgtgaggtcaatctgctggggcagaacgttaacgcctggcgcggtgagaattacgacggcattcgcttcaccaccagccacccgatcgaatttaccgacgatatcatcgacgtttatcgcgatacgccggagctggtgagcttcctgcacctgccggtgcagagtggctccgaccgtgtgctgaacctgatgggacgcacccataccgcgctggagtataaagcgattattcgcaagctgcgtgaagcgcgcccggatattcagataagctccgactttatcgtcggcttcccgggcgaaaccacggaagatttcgaaaagaccatgaagctcatcgccgacgtcaatttcgatatgagctacagctttatcttctccgctcgcccgggcaccccggcggccgatatggtcgacgacgtgccggaggcggacaaaaaacagcgtctgtatatcctgcaggaacgcattaaccagcaggcgatggcctggagccgtcgcatgctcggcacggtacagcgcatcctggtggaaggcacctcgcgtaagaacatcatggagctctccggacgtacggagaataaccgggtggtcaacttcgaaggtaccccggacctcgtcggtaagtttgtcgatgtcgaaatcgtcgatgtatacaccaactcgctgcgcggtaaaatcgtgcgcaccgaagcggagatgggtctgcgtatcgctgaatcacccgaatcagtgattgcccgcacccgtaaagagaacgatcttggcgtgggaatttaccagccatga

SEQ ID NO: 236019 - DNA, 729 bp, Klebsiella pneumoniae
atgttctcccacgccgctgtcgccagtctcaataatcttgagatgatggtctaccactacgtcattaaaaatcgtgacaaagtgatgtacatgaccatccgcgaactggccgaggccgccggggtctccacgaccaccgtgttacgcttctgccgcaaactgcagtgcgagggctactctgaatttcgcgtgcgctttaaattatatctcgagcagaatgagcctcaacaggcaaatatcggcgccagcgaaataatgagcttttttaaaagcgtcaataatgacgagttcgatgaattactcgagcaggccgtcgatattattctcgcctccgaacgtattatttttgtcggcgccggcacctccggcgcgctggcgaaatatggcgcacgcttcttctccaacgtcggtaaattcagcaaccatattgacgacccctattttccggtaaccaacgatatggcccgcaacgcgctggcgatcgtgctttccgtctctggcgagacggaagagatcctgcgctttgccagccagttcagcctacatcattgcaaggtgatgtcgattaccagccatgagcattcgcggctggccaaactggctgatttcaatctctcctggcacgtgccgcagacgcgcattggcggcgtctacgatattacaacgcaaattccagtgatctatattctcgaatccctcggacgtaaattagcgcgcaaaatcagctaa

SEQ ID NO: 236020 - DNA, 1056 bp, Klebsiella pneumoniae
atggacgccgaacatcaccgccagcaggaacaggccggccagcaccgccgagccaaacgggttgccgttaagatgcaggaacagccacgacatgccggtaaacaaccagccgccaatcggcatgatcaccgtaaaggtcaccgcgcccatgatcagcagcgtcaccgccgaagtgaggatcatatcgaggttggccggcatcacccgccgcacctggcgttcaacccacgcgccaaggatagcggcgatcagtacgccgatgatattgccgcgcggatcgatgccatggccgaagaaggtggaaatgccggcgtagaagccgctggttgcctccgggttgtagcccagcacgaacagcgaggcgataatcgcgccgttcacgccggagccgccgaacgccttctgcgcgttatagccaatcaggatactcagaaaggtgaacatccctttgctgaagaccttcatatagccaatcagcgccaccaggctggcgttcggatgggcgttctccagcacgaaaacctgttccgccagggtggcgaagcccagcagcagcccgacggcgataaagccggggatcagcggcgtaaagatagtggcgaatttggcgagaaacttctgcaccgcgctggtctgcctgcccttcagcgcctgctttttctccgccgcgacgtcggccagcgtcggcgcggcggcgggcgctgcctccagcaggccgttcatcatttcggcggcggtttgcgccttgccggggccgagcaccacctggaactgctcgtcgctgacgatcacccccatcacgccgtcaatctggcggatggcggcgctgtcggccagactttcatcgcgcagggtcaagcgcaggcgcgtcatgcagttgcccgcctgcgcgacgtttgcggcgccgcccacgtgggcgaggatccgcgctatcatctctttcgttatttttgccattgcccgttacctgtctgtcggcgctcaggtgttgctgagcgccttgcggatatagccgttgtttttcgccagcagcgactgcgcctctgcggcgcttaa

SEQ ID NO: 236021 - DNA, 1041 bp, Klebsiella pneumoniae
atggctggtcagtcttcatctcaggcggcgtcaccatttcaatggtggaaacccgcgcttttctttctcgtcgtgattgttggtctgtggtacgtcaaatggcagccgtactacgggaaagccttcaccgctgcggaaacccacagtatcggtaaatccattcttgcccaggccgacgctaacccgctgatgggggcgtgggactatgcgatggtttacttccttgccgtctggaaagcggcggtgctcggcgtgctgctcgggtcattgattcaggtactcattccgcgcgactggctgctacgcaccctgggacaatcgcggtttcagggcacgctgctgggagcgattttctcgctgcccggcatgatgtgcacctgctgcgccgcgccggtcgcggccgggatgcgcaaacagcaggtgtcgatgggtggggcgctggcgttctggatggggaacccgctactcaatccggcgacgctggtgtttatgggttttgttctgggctggcagtttgcgctggttcgcctggtggcgggtctggcgacagtattaactgtggcgacgctggtgcagaaatgggtgaaagaggcggcgacgcagccggtagcggtgcctgctgcaccgtcggaagcgactcagggcggcttctttagccgctggctgcaggcgctgtggacgctgttctggaacacgatcccggtttatatcctcgcggtgctggtgctgggagcggcgcgcgtctggctgttcccgcacgccgatggcgtggtggataatacgttgttctgggttatcgcgatggcgatcgccggctgcctgtttgtgatccctaccgcggcggaaattccgattgtgcagacaatgatgctggcgggtatggggacggcgcccgcgctggcgctgctcatcacactgccggcagtgagcgtgccgtcgctgattatgctgcgtaaagccttcccggccaaagcgctgtggctgacgggcggactggtggcgctgtgcggggcgattgtcggtgcgctggcgctggtgtag

SEQ ID NO: 236022 - DNA, 288 bp, Klebsiella pneumoniae
gtgcgcttcaacgcgcgctttggcggggtaccacgcaacgtgtctgtcccgctggctgcggtactcgccatctacgcccgtgagaacggcgctggtacgatgttcgaaccggaagcggcctatgacgaagacgtcagctgcctcaacgatgatgacgtcgcgccggagagtgaaagcgaaacggtgatgtcggtgatcgatggcgataagccggataatcacgacgacgatcctgacgacacgccgccgccgcgcggtggtcgcccggcgctgcgcgtggtgaagtaa

SEQ ID NO: 236023 - DNA, 1434 bp, Klebsiella pneumoniae
atgcaggtcttacatgtatgttctgagatgttcccgctgttaaagacgggcggtctggcggacgtcatcggcgcactgccggcggcgcaaatcgcggagggtatcgatacgcgcgtgctgttgccggcgtttcccgatatccgtcgcggcgtggtggatgcccaggtggtgacccgccgggataccttcgccgggcggatcacgctgctgtacggccactttaacggcgtggggatctacctgatagacgccccgcatctctatgaccgtccggggagcccttaccacgataccaaccagcacgcttatcccgacaacgtcctgcgctttgcgctgctgggctgggtgggaagtgaaatggccagcggactggatccgttctggcgcccggatgtggtgcatgcccatgactggcacgccggcctgacgccggcctacctggcggcgcgcggacgcccggctaaatcggtgtttaccgtgcacaacctggcgtaccaggggatgttttactcctggcatatgaatgacattgagctgccttggtcgttctataacatgcatggcctcgagtttaacgggcagatctcgtttctcaaggccggcctctactacgccgaccatattacggcggtgagcccgacctacgcgcgcgagatcaccgagccgcagtacgcctacggcatggaggggctgctgcgccagcgccatcatgaaggtcggctgtcgggaattctcaacggcgttgacgacggtatctggagcccgcaaaacgatctgctgctgccgatgcgctacgatcgcgacacgctggaggagaaggcggagaacaagcgtcagctgcagattgccatgggcctgaaggtcgatgataaagcgccgttgtttgccgtcgtcagccgtcttaccagccagaaagggctggacctggtgcttgaagcgctgccgggtctgcttgagcagggcggccagctggcgctgctgggcgccggcgatccggtgctgcaggaaggtttcctcgccgccgccgccgaacacccgggcaaagtgggtgtgcagattggctaccatgaggccttctcccaccgcattatgggcggcgccgacgtcattctggtcccgagccgctttgaaccctgcggcctgactcagctgtatggtctgaaatacgggacgctgccgctggtgcgccgcaccggcggtctggcggacaccgtcgctgacagttcgctggagaatctggccgatggtctggcgacagggtttgtctttgaggacagcaatgcgctgtcattgctgcgcgctatccgtcgcgcctttgtcctctggtcgcgcccgtcgctctggcgctacgtgcagcgtcaggcgatgaatatggattttagctggcaggttgccgcgaactcctatcgcgaactttatcaacgcttgatgtaa

SEQ ID NO: 236024 - DNA, 1296 bp, Klebsiella pneumoniae
atggttaggcttgaaaaaaacgatccgctgatgctggcgcgtcaattacccatcaaatccgtggcgttgatcctcgcgggcgggcgtggcacccggctgaaggatctcaccattaagcgtgcgaaacctgccgttcactttggcggcaagttccgtattatcgatttcgcattatctaactgcattaactcagggatccgccgcatcggcgttattacccagtatcagtcgcacacgctggtgcagcacatccagcgcggctggtcgttcttcagcgaagagatgaacgagtttgtcgatctgctgccggctcagcagcgcgtgcatggcgaaaattggtatcgcggcacggcggatgcggtgacgcagaacctggatatcatcagccgctacaaggccgagtacgtggtgatcctcgcgggcgaccatatttataagcaggactactcgcgcatgctgatcgaccatgtcgaaaaaggggcgcgttgcaccgtggcctgcatgccggtgcccattgaagaggcatccgccttcggcgtcatggcggtcgacgaaaacgaaaaaatcattgagtttgtcgagaaacccgccaacccgccggcgatgccgaccgacccgaccaaatcgctggccagcatgggcatttatgtctttgacgccgcctatctttatgagctgctggaagaagacgatcgcaacgagaactccagccacgatttcggcaaagacatcattccgaagatcaccgaagctggcatggcttatgcacatcctttcccgctctcctgcgtgcagtccgacccgaacgccgaaccttactggcgcgacgtggggacgctggaagcctactggaaggctaacctcgatctggcgtcagtcacgccggagctggatatgtacgaccagaactggccgatccgcacccatatggaatcgctgccgccggcgaagttcgtgcaggaccgctccggtagccacggcatgaccctgaactcgctggtttccggggggtgcattatctccgggtcggtggtggtgcagtcggtgctgttcccgcgcgtgcgggtgaattcgttctgtaacattgattcggcagtcttgttgccagatgtctgggtggggcgctcatgccgcctgcgtcgctgcgtgattgaccgcgcctgtgttatcccggaaggaatggtgattggtgagaatgcggaagaggatgcacgccgcttctatcgctcagaggaaggtatcgtgctggtgacccgcgacatgctgcggaaattagggcacaaacaggagcgctaa

SEQ ID NO: 236025 - DNA, 210 bp, Klebsiella pneumoniae
gtgccgcgccacgactaccgcttcggcattaaccagccgggccgctggcgcgaggcgctaaataccgactccatgcactatcacggcagcaatcagggcaatggcggcgtggtggaaagcgacgctatcgccagtcatggccgcgaacattcgctgtcgctgaccctgcccccgctggcgacgatctggctggtccgggaggcgcaatga

SEQ ID NO: 236026 - DNA, 1266 bp, Klebsiella pneumoniae
atgcacgccttcgtggctttgatggtggtttctattggcgccggtctcttctccggcatgccgctggataaaatcgcggcgacgatggagaaaggaatgggcggtacgctgggcttcctggcgatcgtcgtcgcgctcggcgcgatgttcgggaagatcctgcatgaaacgggggcggtcgatcagattgccgtcaagatgctcaaatcctttggccacaatcgcgcgcactatgcgattggtctcgccggactcatctgcgcgctgccgttgttcttcgaagtggcgatcgtactgctgattagcgtcgccttctcgatggcgcgccataccggtactaacctcgtgaagctggtgatcccgctgtttgccggcgttgccgccgccgcggcgtttctgttgcctggaccggcgccgatgctgctggcgtcgcaaatgcacgccgactttggctggatgatcctgattggcctgtgtgcggccattccggggatgattatcgccggtccgctatggggcaacttcatcagccgctacgtcgaattgcatattcctgacgacgtcacggaaccgcatctcggcgaaggcaaaatgccctccttcggcttcagcctggcgctgatcctgctgccgctggtgctggttggcctgaaaaccatcgccgcgcgctttgtgccggtgggttccactgcctacgaatggttcgagtttatcggccacccgttcaccgcgatcctggtggcctgcctggtggcgatttacggtctggcggtacgtcagggaatggcgaaagaccgggtgatggagatttgcggccacgcgctgcagccggccgggattattctgctggtgatcggggctggcggcgtcttcaagcaggtgctggttgactccggcgttggcccggcgcttggtgaagcgctgaccggaatggggctgccgatcgctattacctgcttcgtactggcggcggcggtgcgtatcattcagggctctgccaccgtggcgtgcctgacggcggtcggcctggtgatgccggtgattgagcagctgaactacagcggcgcgcagatggcggcattgtctatctgtatcgccggcggctcgattgtggtaagccacgtgaacgacgccggcttctggctgttcggtaaatttaccggcgccagtgaagcccagacgctgaagacctggaccatgatggaaaccatccttggcaccaccggggcgattgtcggtatgatcgccttccagctgctgagctaa

SEQ ID NO: 236027 - DNA, 1473 bp, Klebsiella pneumoniae
atgaatacaactgcacctacgggcttgctgcagcaacctcgtccgttctttatgatcttctttgtggagctctgggaacgttttggctattacggcgttcaggggatcctggcggttttctttgttaaacagctgggcttctctcaggaacaggcctttatcaccttcggcgccttcgcggcgctggtttacgggctgatctccatcggcggctacgtgggcgaccatttgctggggaccaaacgcacgctggtgctcggcgccattgtgctggctatcggctactttatgaccgggatgtcgctgctgaaaccgcagctgatctttatcgctctcggcaccatcgccgtcggcaacggtttgtttaaagccaacccggcgagcctgctctccaaatgctatccgccgaaggatgcccgtctcgacggggcatttaccctgttctatatgtcgataaacatcggttcgctgctgtcgctgtcgctggcgccggtgatcgccgaaaaatttggctacgcggtaacctataacctgtgcggcgcggggctgattatcgcgctgctggtctacttcgcctgccgcgggatggtgaaagatattggctccgagccggatcatcgccccctcagcctacgcaatctggcgctggtgctggccggtacggtggtaatgatttttctctgcgcctggctgatgcataacgtgatgatcgccaacctggtgctgattgttctgtcggtcgtggttattgcgttctttttccgtgaggcgtttcgcctcgataaaactggacgcaacaaaatgttcgtcgcctttattctgatgatcgaggcggtgctgttttacattctgtatgcccagatgccgacctcgctgaacttcttcgccatcaacaacgtccatcatgagatccttggctttaccatcaacccggtcagcttccaggcgctgaatcccttctgggtagtggtcgccagcccggtgctggcggcgatctacacccatctcggtcataagggtaaagacctgaccatgccggtgaaatttaccctcgggatgttcctctgcgcgctgggcttcctgaccgccgcggcggccgggatgtggttcgccgacgcccaggggttaacctcgccgtggtttattgtgctggtctatctgttccagagtctgggggaactgttaatcagcgcactggggctggcgatggttgccgcgctggtgccgcagcatctgatgggctttattctggggatgtggtttctgacccaggccgccgctttcctgctgggcggctatgtggcgacctttaccgcggtgccggaaaacatcaccgacccgctgcagaccctgccggtctacaccaatgtgttcagtaaaattggcctggtgacgctgggcgtcacggtggtaatggcgctgatggtgccgtggctgaaccggatgattaataccccggccagcgccgaataa

SEQ ID NO: 236028 - DNA, 1272 bp, Klebsiella pneumoniae
atgaaaaggcaactctcgctgctggccgtcgcgctgctgctggcgcaaccggttctggctaaagacaccccgctgaacagggcggcggccctcgccaatagcgtgacgccggctgcctccagccaggcgtatgacgatcttgagcaacaggcgctggcgcagctacgccacgctctgcagggggatgccgccacgctgacccgcgatcggctggcgcacaccaaacaaaaccaaactcaggccgataccgcctggctgaaggccagcggctatgacttccagacccgggccaaccagcaggcgggcattgcgctgctgtcggcgttcagcaccctgccggagaccgtcgtgaagcagaatctggcgacagtgaccgccatcaatcgcgacgccgtgcagaccacgcgccgtcaggcgctggccgatgcggaaggcattagctacctctacttcctcagcgacgcgctggggccacgccttggcaaagcgtttctgaccgcctatgaccagggcgcgctggggaaagcggcagcgttgatcaaagcctcggaggtcagcaccggcgaggcgaaaaagcacttcaacaatccgcggccgtttctggtgcagggcaacaccattcacctggtgcctgacgatgtggtggtgaaagataaccagccctacaccgccgacggcggctcgttccccagcggccacaccaacaccggctataccgatgcgttgctgctggcggcgatgatcccggagcgctacgacgcgctggtggcgcgcggcgcccgctatggctactcgcgcatcgtgctgggcgtccactacccgctggacgtgatcggctcgcgaatggtggccgagcgcaacgtggcccactatcttaacgatccgcactaccgggtattatttaacgaagcccgcgatcagctgcgcgccgcgctggcgaaggcctgcggcacatcgcttgccgagtgcgcgaagagcagcgtgaaagacgatccctggcgcgatccggagatgcgtgatttctctcgcttcaccatgacctacgatctgccgcagcagaagggtccgcagccgcgtttacaggtgccggagggggcggaagtgctgctggaagatgccctgccgcatctgtcagcggctcagcgtcgggcgctgatggtcaacaccgcgctgccggcgggttacccgctatccggcaccacccccgaacagcaattctggcagcggttgaatctgtcggcggcctgggagatggcgcaaaaaaggcagtaa

SEQ ID NO: 236029 - DNA, 762 bp, Klebsiella pneumoniae
atgagtatttgcgctgaaaatatcacctggaaggcaggcaaaaaggtcatcgtcaataatgtctcgctgcgggtgccgcgcggcgaaacggtcggactgctggggcccaacggctgcggcaaatcctcgctgctgcgcgttctggcgggcctgcgccgcccggatgcaggtcgcgtcaccctcgagggccaggatatcgcccggatggcgaaaaagcagctcgcccgccgcgtggctttcgtcgagcaacacggcatgaccgaggccaatatgcgggtgcgcgacgtcgtgcgcctgggacgcattccccaccactctccgttctcaaactggagcgctcaggatgacgaggcgattgccgccgcgctgcagcgggtagcgatgctggagaaaagcgaacagggatggttaagcctctccggcggcgagcggcagcgggtgcatatcgcccgcgcgctggcgcagagcccgagcgaaatcctgctggatgagccgaccaaccatctggatatacaccatcagatgcagttaatgcagttgatcagcgagctgccggtaaccagcattgtggccattcacgatcttaaccatgccgcgatgttctgcgattcgctgatcgtgatgcagcaggggcagatcctcgccagcgggacgccggaggagattttgtccgaagggctgctgtgggacgttttccgggtgaaaaccaaaatcgagatctccccttaccacggcaaaaagcacattcatttcatcgtttag

SEQ ID NO: 236030 - DNA, 252 bp, Klebsiella pneumoniae
  misc_feature (164)..(173): n is a, c, g, or t
ttgagtaaaaataaactctccaaaggccagcagcgccgcgtcaaagccaaccaccagcgccgtctgaaaaccactgcggagaaggccgactacgatgacaacctgtttggcgaaacgtcggaaggcattgtcatcagtcgctttggtatgcatgccgacgtcgnnnnnnnnnnatccgccggacgatccgctcgctggtcaccggcgaccgcgtggtctggcggtcgggcaaagacgccgccgacggcgtaa

SEQ ID NO: 236031 - DNA, 570 bp, Klebsiella pneumoniae
ttgcgccgccgctttgatggtcaccgccgtatcgcccccggccagcgacagcagctggttctggttgaggttgaagccatacgctttttcaaacgccggcagcgcgtccgggcgctcaataaattccgccgaagccgccagcttaaattcgccgccctgcttcaggtagcgactgaggtcggccagcgaggtcagcttatttttctccgccaggtcctggcgcacggcgatagtccaggtgttgttggccggcgccggggtgagccataccagctgatgtttctcctgatcgaggcgcttcaccttctcatagccctgttgggcattcttccacgccgggtcgttttcatctttgaagaagaaggcgccattgccggtatattccgggtagatatccagctcgccggcgacaatcgccccgcgcaccaccggcgtggtgccgagctggattttattaatcgtttttacgccgtggctttccagcacctgctggatcatattgcccagcagcgcgccttcggtatcaattttcgagccgaccttcaccggctccgccgcctgcagcggtaa

SEQ ID NO: 236032 - DNA, 354 bp, Klebsiella pneumoniae
atgcccgcagaggccccgttactcgacagtgatttagaaattcgcgaagcgctgcccgacgatgcgcacgccatcgccgcgctgtatgtctggcacgtgcttaatggccgcgcctccttcgaagagatcccccccaccgttgacgaaatgcgtaaacggatccagaccgtgcgcgacaacgggctgccgtggctggtagcgctgtggcgctgtggcgcggagctatcgtgggctactgctatgccaccttctatcgcccgcgtccggcctatcgctacaccctcgaggaatcgatatacgtggaatccggaatgggcggacgcggcatcggcagcgcgctgctgtccaggctaa

SEQ ID NO: 236033 - DNA, 561 bp, Klebsiella pneumoniae
  misc_feature (503)..(512): n is a, c, g, or t
atgcgtacagaatattgcggacagcttcgacagtcccacgttgggcagcaggtgactctgtgtggttgggtcaaccgccgtcgcgatctcggtagcctcatttttatcgatatgcgcgaccgcgaaggcatcgttcaggtgtttttcgatccggatcgtgcggatgcgttgaagttagcctctgaactgcgtaatgagttctgcattcaggtcactggcaccgttcgcgcgcgtgaagagaaaaacatcaacgcggacatggccaccggcgctatcgaagtgctggcttccgatctgacgatcattaaccgctcagaatcgctgccgctggactccaatcacgtcaacaccgaagaagcgcgtctgaaataccgctacctcgacctgcgtcgtccggagatggcgcagcgcctgaaaacccgcgcgaaaattaccagctttgtgcgccgctttatggacgaccatggtttcctcgacatcgaaaccccgatgctgactaaagnnnnnnnnnnacactgcatatcgtcggcagcgtcagatgtgtataagagacaggactaa

SEQ ID NO: 236034 - DNA, 1095 bp, Klebsiella pneumoniae
gtgaaagcggtagagtatttcctgaaagaaaaagtcgctgacgtcgccgagctgcacgcggtatcagagtttattcacttcgcctgtacgtctgaagacatcaataacctctcccacgcgctgatgctgaaaaccgcccgcgacgaagtggttctgccttactggcgcaagctgattgacgcggtaaaagatctggcgacccagtatcgcgatgtgccgctgctctcccgtacccacggccagccggcaacgccgtccaccatgggtaaagagatggcgaacgtcgcctaccgtatggagcggcagtatcgtcagctgaaccaggtggaaatcctcggtaaaatcaacggcgcggtgggtaactacaacgcccacatcgccgcctacccggaagtcgactggcatcagttcagcgaagagttcgttacctcgctgggtattcagtggaacccgtacaccacgcagatcgagccgcatgactatatcgctgagctgtttgactgcatcgcgcgcttcaacaccattctgatcgacttcgatcgcgacgtgtggggctacatcgcgctcaaccacttcaaacagaaaaccatcgccggggaaatcggctcctccaccatgccgcacaaggtgaacccaattgacttcgaaaactccgaaggcaatctcggcctggccaatgcggtcatgcagcacctggccagcaaactgccggtttcccgctggcagcgcgacctgaccgactccaccgttctgcgtaacctcggcgtgggcatcggctatgcgctgatcgcctatcagtccaccctcaaagggatcagcaagctggagctgaaccaggatcgcctgctggacgaactggatcacaactgggaagtactggctgagccgatccagaccgtgatgcgtcgttacggtatcgaaaaaccgtacgagaagctgaaagagctgacccgcggcaaacgcgtggacgcggaagggatgaagcagtttattgacagcctcgccctgccggaagaggaaaaagtgcgtctcaaagcgatgaccccggccaactatatcggtcgggcaatcaccatggttgacgagctgaagtaa

SEQ ID NO: 236035 - DNA, 582 bp, Klebsiella pneumoniae
gtgcatggcctgctgcgtggggaagcagcgcgtgagcgggtcgcctggctgctgaagcgcgtggggttgcagccggagcatgcctggcgctatccccatgccttttccggcggccagcggcagcggatctgcattgcccgcgcgctggcgctgaatccgaaggtggtgatagccgacgagtcggtgtcggccctggatgtctccattcgggcgcagattatcaatctgatgctcgacctgcagcgcgagatgggcatcgcgtttctgtttatttcccatgatatggcggtggtggagcgcatcagccaccgcgtggcggtgatgtatcgcggtcgcattgtcgaaataggcccgcgccgcgcggtgtttgaaaacccgcagcacccctatacccgtaagctcatggccgccgtaccggtggccgacccgggccaccgtcatccgcagcgggtcctgctgtctgatgacgtcccgggcaatatttataagcggggcgaggagatcgccagcgtgccgttgcagcaggtcgggccgggccacttcgtcgcccgcgaatccgccgatgtgctgggcagaacataa

SEQ ID NO: 236036 - DNA, 234 bp, Klebsiella pneumoniae
atgcgcaccctggcggcctacgatatcgccgccctgatggagtatgggcagctcagtctctattccgcctgcgagcgggtggtgatggagaaactgccggctctcggcggcagcggcgggctgatagccgtcgatcgcgaaggcaacgtcgttttaccgtttaacagtgaaggcatgtaccgcgcctggtgctatgccggcgatacgccgaccattggcatttatcgcgaatag

SEQ ID NO: 236037 - DNA, 909 bp, Klebsiella pneumoniae
  misc_feature (348)..(357): n is a, c, g, or t
atgatcttcaacatccagcgctattccacccatgacggcccagggatccgcaccgtcgtcttcctgaaaggctgctcgctgggctgccgctggtgccagaacccggagagccgcgcccgtagcgaagatctgctgtatgactcgcggctgtgcctgcccggctgcgagctgtgccagcaggcggcgccggcggttatcacccgcaccctcgatggcctgatcattcaccggcaaaacgttaacgacagccatatcgccgcgctgcgcgactgctgccccaccaccgcgctcacggtgtgcggcgaggagaagagcgtcgaggagatcatggcgacggtgctgcgtgannnnnnnnnnaaaccattctacgatcgcagcggcggcggcatcactctttccggcggcgaaccctttatgaacccaacgctggcgcaagcgctgttcgaagccagtcatcaggcaggcattcacaccgccgtggaaacctgcctgcacgtgccgtggaaatacattgaaccgtctttaccctttgtcgacctgtttctcgccgatctgaagcacgttgacgaggccgtttttcagcagtggaccgacggcagcgcccgccgggtgctggataacctgcagcgtctggcgcaggcggggaaaaaaatgattattcgcgtgccgttgatccagggattcaacgccagcgaagccgacattgccgcgatcaccgattttgccgccgatcgcctgcaggtcagcgagatccattacctgccgtaccacacgctgggaatgaacaaataccagttactcagtcagccctacaccgcaccggacaaaccgctggacgctcctgagctgctcgccttcgcgcaggattatgcgcaaagcaaggggctaacggcgatattacgaggataa

SEQ ID NO: 236038 - DNA, 2433 bp, Klebsiella pneumoniae
atgactaccctgaagctcaacaccctcagcgcccgtatccaggcccataaaatggcgctggtgcatatcgtcaagccgccggtctgtaccgagcgcgcccgccactatacggagatgtatcagcggcatctcgataaaccgatcccggtgcgccgcgcgctggcgctggctcaccacctggcggagcgcaccatctggatcaagcacgatgagctgatcgtcggtaaccaggccagcgaagtgcgcgccgcgcctattttcccggaatacaccgtcagctggattgagaaagagatcgacgatctcgccgaccgccccggcgccggcttctcggtcagcgaggagaataaacgcgtattgcatgaagtgtgcccatggtggcgcggccagaccgtacaggaccgctgctacggtatgttcaccgatgagcaaaaggcgctgctcgccaccggcattattaaggcggaaggcaatatgacctccggggatgctcacctggcggtcaactaccccttgctgctggagaaaggcctcgacgggatgcgtgcgaaagtcgccgaacgccgctcgcgtatcaatttgacggtactggaagacctgcatggcgagcagttcctgaaagcgattgatatcgtgctggaagcggtcagcgatcacagcaaacgcttcgccgcgctggcgcgcgagatggcgacagcagaatcccgcgaatcacgccgccacgaactgctgacgattgccgaaaactgcgacgtcatcgcccatgagccgccgaaaaccttctggcaggcgctgcagctgtgctacttcattcagcttatcctgcagattgaatccaatggccattcggtatcctttggccgtatggaccagtacctctacccgtactaccgccgcgacgttgagttgcaacagtcgctggatcgcgaacaggccattgagctgctgcacagctgctggctgaagctgctggaggtcaataagatccgttccggctcgcactccaaagcctctgccggcagcccgctataccagaacgtcaccatcggcggccagaatctggtggatggtaagccgcaggacgcggtcaacccgctgtcctatgcgatcctggaatcctgcggtcgcctgcgttctacccagccgaacctcagcgtgcgctaccacgccgggatgagcaacgacttcctcgacgcctgcgtccaggtgatccgctgcggtttcggcatgccggcgtttaacaacgatgaaatcgtcatcccggaattcattaagctgggcattgagccgcaggacgcctacgattacgcggctatcggctgtatcgaaaccgcggtcggcggtaagtggggctaccgctgtaccggcatgagctttattaacttcgcgcgggtgatgctggcgacgctggaaggcggccgcgatgccaccagcggtcaggtgttcctgccgcaggagcacgccctgtcgaaaggcaacttcgctaacttcgatcaggtgctggccgactgggaccgccagattcgttactacacccgtaaatccatcgagattgagtacgtggtcgataccatgctggaagagaacgtccacgatattctctgctcggcgctggtcgatgactgcatcgaacgggcgaaaagcattaagcaaggcggcgcgaagtatgactgggtttccggcctgcaggtgggtatcgccaacctcggcaacagcctcgcggcggtgaaaaaactggtcttcgatcagggcgccatcggccagcaggagctggcgaaggcgctggcggaagatttcgacggtctgacccacgagcagctgcgccagcggttgatctacggcgcgccgaagtatggtaacgatgatgacagcgtcgacgagttgctggcgcgggcctaccagacctatatcgacgagctgaagcagtatcacaatccgcgctatggccgcggcccgattggcggcaattattacgctggcacctcctctatttccgctaacgtcccgttcggcgcgcagaccatggcaacgccggatggccgtaaagcgcataccccgctggcggagggggccagcccggcctccggtaccgatcatctggggccgacggcggttatcagttcggtgggcaagctgccgaccggggcgatcctcggcggcgtgctgcttaatcagaagctgaatccgtcaacgctggagaacgagtccgataagcagaagctgatggtgctgctgcgcactttcttcgaggtgcacaaaggctggcatatccagtacaacatcgtgtcgcgcgacacgctgctggaagccaagaaacatcctgaccagtaccgcgatttagtggtccgcgtcgctggatactcggcgttcttcaccgccctgtcgccggatacccaggacgatattatcgcccgtaccgaacatacgctgtaa

SEQ ID NO: 236039 - DNA, 1125 bp, Klebsiella pneumoniae
atgaccgccgatatggacaacaccgagaaagtggttggcctggtggatgagtgctggcgaatggggctaaaaatcctgcccccggatattaactccggcctgtaccatttccacgtcaacgacgatggcgagatcgtctacggcattggcgccatcaagggcgtcggcgaaggaccgatcgaagcgattattgaggcgcgcaacaatggcggctatttccgcgagctgttcgacctctgcgcgcgaaccgatattaaaaagctcaaccgtcgggtgctggaaaagctgattatgtccggggcgttcgatcgtctcggcccacatcgcgcggcgctgatgaattcgctgggcgatgcgttgaaagccgccgaccagcacgcgaaagccgaggccatcggccaggctgatatgttcggcgtgctggcggaagagcccgagcaaattgagcaatcctacgccagctgccagccatggcctgagcaggtggtgctggatggtgaaagggagaccctggggctatacctcaccggacacccgattaaccagtatctgaaggagattgagcgctacgtcggcggcgtgaggctcaaagacatgcatccgaccgaacgtgggaaagtcaccacggcggcggggctggtgattgcggcgcgggtaatggtcaccaagcgcggcaatcgtatcggcatctgtaccctggatgaccgttccgggcggctggaagtgatgttattcaccgacgcgctggataaatatcagcagttgctggaaaaagaccgcatacttatcgtcagcggacaggtcagctttgatgactttagcggggggcttaaaatgaccgcccgtgaagtcatggacattgacgaagcccgggaaaaatatgctcgcgggcttgctatctcgctgacggacaggcaaattgatgaccagcttttaaaccgactccgtcagtctctggaaccccaccgttcgggaaccattccagtgcacctctactatcagagggcggatgcacgcgcgcggttgcgtttcggcgcaacatggcgcgtctctccgagcgatcgtttacttaacgatctgcggggccttatcggctcggagcaggtggaactggagtttgactaa

SEQ ID NO: 236040 - DNA, 1293 bp, Klebsiella pneumoniae
  misc_feature (968)..(972): n is a, c, g, or t
atgttcgtggatatgacggctgatattgcgcatacgcttcatccccatcgccagctgctggtggccttcagcggcggtctggactcgacggttcttctgcatcagctggtgctgctgcgggaacaggatccctcgctgacgctgcgggcggtgcatgttcaccacggccttagcgcctacgcagacgactgggtggcgcattgtcggcagatttgccagcagtggcaggtgccgctggtggtgcatcgcgtgacgttagcccggggagggctgggcgtcgaggcccacgctcgtgcggcgcgctatcaggcctttcaggatacgctcaatgccggcgaggtgttagtgaccgcccagcaccaggacgatcagtgcgaaaccctgctgctggcgttaaaacgcggcagcggtcctaccggcctgtcggcgatggcgccatcctctgcctttgccggcagtcgactactgcgtcctctcctcaatgaaacccgcgaatcactacgccagtgggcgctcacccatcagctgtcgtggatcgaagatgagagtaatcaggatgatacctatgaccgcaatttcctgcgcctgcgggtgatcccggtgctgcgcgagcgttggccgcactttagcgaggccgtcgcccgcagcgccagcctgtgcgccgagcaggaacaactgctggacgagatgttggcggcggagctggcgtcgctggtggccgaagatggctcgctggctatcgcgccgctggcgacgatgagtccgccgcgccgagcggcgctgctgcgtcgctggctcgccgggcagcaggcgccgatgcccgcccgcgaggtgcctgagcgcctctggcacgaggtggcgctggcgcgggaagatgccagcccctgtctgcggctgggggaatttaccgtccgccgttttcaacagcgtttgtactgggtgaagtatcttcccggtcagacggacannnnncagccgctgcggctggcggacggtctcggcgagctgacgctgcagcccggcggcaggctgcgcccgccgtcggcggatgagccggtcaccgtccgctttcgcgccagcggccacctgcatattgtcgggcgccatggcggacgcaagcttaagaagctctggcaggagctgggcgttgctccgtggcgacgagacaccacgccgctgctgttttacggcgaaacgccgattgccgcagcggacgatctgtttgtgaccacagaaggtgaagtgaaggacggggaaggggtcaggctgatgtggaggaaaacgggcgattaa

SEQ ID NO: 236041 - DNA, 1320 bp, Klebsiella pneumoniae
  misc_feature (1299)..(1308): n is a, c, g, or t
atggataagatcgaagttcggggcgcccgcacccataatctcaaaaacatcaacctcgttatcccgcgcgacaaactcattgtcgtcaccgggctttccgggtctggcaaatcttcactcgctttcgacaccctgtatgccgaaggccagcgtcgctacgtcgaatcgctctccgcctatgcgcgacagttcctgtcgctgatggagaagccggacgtcgaccatatcgaagggctgtcgccggcgatttccatcgaacagaaatcaacctctcacaacccccgctcgacggtgggtactattaccgaaattcacgactatctgcgtctgctgtacgcccgcgtcggcgaaccgcgctgtccggatcacgacgtgccgctggcggcgcaaaccgtcagtcagatggtcgataatgtcctcgcccagccggaaggcctgcgcctgatgctgctggcgcccattattaaagagcgcaaaggcgagcacactaaaaccctggaaaacctcgccagtcagggctacatccgcgcgcggatcgacggcgaggtctgcgatctgtcggatccgccgaagctggagctgcagaagaagcacaccattgaggtagtcatcgaccgcttcaaggtgcgcgacgatctggcgcagcgcctggccgagtcgttcgaaaccgcgctggagctctccggcgggaccgccattgtggctaatatggatgatgagaaagcggaagaactgctgttttccgccaacttcgcctgcccgatctgcggctacagcatgcgcgagctggagccgcgtctgttctcctttaacaacccggcgggcgcctgcccgacctgcgacggcctcggcgtgcagcaatatttcgatcccgatcgcgtggtgcaaaatcccgagctgtcgctggcgggcggcgccatccgcggctgggatcggcgtaacttctactacttccagatgctgaagtcgctggcggagcactataaattcgacgtcgaagcgccatggggcaccctcagcgccaacgtgcagaaagtggtgctgtacggttcaggtaaagaaagtattgaattcaaatacatgaatgaccgcggggatacctcggtgcgccgccatccgttcgaaggcgtgctgcataacatggagcgccgttacaaagagacggaatccagcgcggtgcgcgaagagctggcgaagttcatcagcaaccgtccgtgcgccagctgcgacggcacgcgtctgcgtcgcgaggcgcgccacgtgtttgtggaaaacaccccgctgccgaccatttccgannnnnnnnnntttccgatatga

SEQ ID NO: 236042 - DNA, 567 bp, Klebsiella pneumoniae
gtgagcatctctaactgccagcaggccattgcccacggcatcgccatggtgccggaagaccgcaaaaaagacggcatcgtgccggtgatggcggtgggcaaaaacattaccctcgcggcgctcaaccagttcaccggcgcaatgagcagcctggacgacgccgccgagcagcactgcatccagcagtccattcagcgtttgaaaattaaaacctcctcgccggagctggcgattggccgtctgagcggcggcaaccagcaaaaggcgattctggcgcgctgtctgctgctcaatccgcgcattctgatcctcgacgaacccacccgtggcatcgatatcggggcgaagtatgaaatttataaactgattaaccagctggtgcagcagggcatcgcggtcattgtcatttcatccgaactgcccgaggtgctcggtctcagcgatcgggtgctggtcatgcacgaaggcagactaaaagccaatttggttaatcaacatctgacccaggaacaggtgatggaagccgcgctgaggagcgaacgccatgtcgaagaacacgtcgtctga

SEQ ID NO: 236043 - DNA, 537 bp, Klebsiella pneumoniae
atgcccgctccggcgccctgccgccgcggcgtcgaacgtctggtttatccgggaggcgatacggcgctgctggtctttattccgctgccggatggcgcctcgctggcggccctgcggctgctggcgcagcattgtgagccgctatttttccagcgcctgcgggtggagcagcagattggctatgtggtgagctgccgctatcagcgggtcgccgatcgcgacgggctgctgatggcgctccagtccccggatcgccgcgccggggaattgctgcgctgtggtaaagactttctgcgccagctggcccccatggatgaggcgaccttcagaccgctacagcagcgcctggccgctcagatccgcgccagcaggccgccagaggcgcgggcgctgtccgccctgcgtcaggagtatggtttaccagagctaacgccgcaggcggttgacgcgctgcgcgttgcagaggtggccgttctggcacgcgaaatgacccgccggcgtcgccgctggcaggtgctgttcacgacaggggattaa

SEQ ID NO: 236044 - DNA, 495 bp, Klebsiella pneumoniae
atgcgcttccgccacttcgtcaaagatttcggtaactatgcgtcccagcccccagcttttctctacctgaataccgatagattccgccagcgctttcgccgcgtcgaagttatccagatccgccatgttggtttccggacggtgtttcttgatcgcttcccgcatggtcagtttttcaaacggcttgccgaaatcaaacacctggtcgccatacggcacttcggttttgcccagcaccgtctgcgccagggtgcggaacagcgactcggtcagttcgatcaggtctttgtagtccgcatacgccatatacagttccatcatggtgaactctgggttatggcgtaccgagatcccttcgttgcggaagttacggttgatttcaaacacgcgttcaaaaccgccaaccaccagacgtttcagatacagttccggcgcgatgcgcaggtacatatccagatccagggcgttgtgatgggtaatgaacggacgggctga

SEQ ID NO: 236045 - DNA, 561 bp, Klebsiella pneumoniae
atgacgcgactcttcgttggcgatcagatccagatagcgctggcgatagcgaacttcctgatcctgcaggccgtggaatttatccggcagcgggcgcagggctttggtcagcaggcgcagctcggtgcagtggatcgagagttcgccggtttgcgttttgaacagcttgccgcgggcggcgatgatatcgccgaggtcccatttcttaaactgttcgttgtagacgccttccggcaggtcatcgcgcgccacgtacagctgaatgcggccgccgacgtcctggagggtgacgaaggaggctttgcccatcacgcgacgggtcatcatccgaccagccaccgcaacttcaacgttcagggaagcgagttcatcgttgtccttcgcatcgaattcagcatgcaattggtcagaggtatggtcgcgacggaaatcgttggggaaagctacgccctgctcacgcagcgcagccagtttttcgcgacgagctttcagttcattattaaggtcaatggcctcatcggcaccttgtgcttgttgttcagacatatggattcctcataa

SEQ ID NO: 236046 - DNA, 1371 bp, Klebsiella pneumoniae
  misc_feature (1277)..(1286): n is a, c, g, or t
atgaaactcagggagatcaaggttgggttgatgctgctccttccctggcaggaggcatgggcggcagaggcgtttagttttaaccgcgcccatttgcacggcgccgcgcaggttgatctccagaaatatcaatacggtaatccactgcacgccggacagtaccgcagcacgctctcggtgaatggccgggacctgggggaagaaacgtttgttatccaggaacacgatggccagcttgagccctgcatctcaccctcgctgttcgacgctctgcagctgaaggatgcccagtggccaaccgcggccacctgcctgcgtttttcgcagatcgataaggcgatcggctgggagtatgacagcggggaaaacgtcctgcgggtaaatatgccccaggcgctgctgcaaccccattatcggggggcggtgaacctgaaaaaggtggatagcggcgtgcccgccgcggtgctgcgctaccaggccaatagctatcagagcatcgtcgacggggatagcagcagccatcattatctcgggctggatgccagcctgcgcgcctttggctggcggttacatcaccagtccagctaccaggcgcaggaagggaatacgcactgggatagcattgccacctgggctgagagaagtgtagtgaactgggcgtccacgttacggctgggtcagggatggaccgacggaaccttctttgacagcgtcagttttatcggcggcaggctggctaccgatgtgcgcatgctgccgggctctcgccgcggttttgcgccgtcggtcagcggcgtggcgcgcaccaacgcccgcgtaacggtcacccagaacggcgctctgttgtacgaggcaacggttccgccgggcaaattcaccttcgacgatctctatcccaccaacgccggcggcgatttacaggtgacgatccacgaggcggatggcagtcaggacacctttaccgtgccgtacgccacgctgcctggcctggtgcgggcaggcgcggtctattatgatctgtcgctgggctatctggatgaggacgggatcgccgggcggccgggatttggcgaagccacgctgcagtacggcttcaatgactatatcagcggctataacggcgctaacgcgacgacagattattactcgacgctggtcggcagcgccttcaatacctactggggcgcgctggcggtcgatctttcccgttctgcggcgaagggcagggagcacggctggcaggagggctaccgctggcgggtgtccgcatcaaaatnnnnnnnnnnagccacagcaacgacggcaattatcgctccattcgcgatgccgcctgggagcacgaccggcaccccaacgactggcgggagatga

SEQ ID NO: 236047 - DNA, 393 bp, Klebsiella pneumoniae
gtgcaaaaactggagtatttaccggaagcgcacactgactttatcttcgccattatcggcgaagaactcggttatatcggtgtggtactggcgcttttaatggtattcttcgtcgctttccgcgccatgtcgattggccgtaaagcgctggagatcgatcatcgcttttccggcttcctcgcctgtgcgattggtatctggtttagcttccaggcgttagttaacgtcggcgcggcggcggggatgctgccgacgaaaggtctgacgctgccgctgatcagttatggtggttccagtctgttgattatgtcgacggccattatgttgttgttgcgaattgattatgaaacgcgtctggaaaaagcccaggcgtttacacggggtgtgcgatga

SEQ ID NO: 236048 - DNA, 234 bp, Klebsiella pneumoniae; identical to SEQ ID NO: 138351

SEQ ID NO: 236049 - DNA, 1326 bp, Klebsiella pneumoniae
atgacgctcggtaccgatgatgtgcagaccgcctgcggccagtaccgcatcgtggcgtacctgccagtcggctttgattttctcaatctgctctggcgttgggttttccagcgcagcgacttccgcctgccagctaccgccgagcataatatcggtaccacgacccgccatgttggtggcgatggtcaccgcggaagggtagcccgcctgggcgacgatatccgcctcgctggcgtggaatttggcgttcaggacgttgtgcttgatgccggctttagtcagttcgcgggaaaccacttcagatttttcgatcgagatagtccccaccagcaccggctgaccggcagcggtacgagttttgatatcttcgataattgcctgaattttttccgcttcggtcatatagaccagatccgccatgtctttacggatcatcggacggttggtcggtacaaccacggtatccagcttatagatagagctgaattcaaaggcttcggtatcggctgtaccggtcatccccgccagcttctcgtacagacggaagtagttctggaaggtgatagaggccagagtctggttctcgttttggatctccacgccctctttggcctcaacggcctggtgcagaccatcggaccagcggcggccctgcatcgtacggccagtgtgctcatcgacgatgataacttcgccatctttgacaatgtagtcaacgtcgcgggtgaacagcgcatgggcgcgcagcgcggcggtaacgtggtgcatcagcataatgttggttggagagtacagggactcaccttcatccataatgccttcctgtaccagcagctcttcaatcagcaccagaccacgttcggtcaggttaacctgacgcgctttttcatccaccgagaagtggccttcgccagtgaaagtatccgaatcctctttttcctggcggatcagatgcgggatgattttgtttaccttgcggtacatttcagagctgtcttccgccgggccggaaatgatcagcggcgtacgcgcctcatcgatcaggatggagtccacctcatcaaccagcgcatagtgcagtttacgctgaacgcgctcttccgggctgaaggccatgttgtcgcgcaggtagtcgaagccgtattcgttgttggtgccataggtgatatcggcagcgtaagcttcacgcttcgccggcgccggcaggccggacatgttgatgccaactgtcatgcccaggaattcaaacagcgggcggttattttcggcgtcacgctgggccagatagtcgttgacggtcactacgtgaacgcctttgccggttag

SEQ ID NO: 236050 - DNA, 429 bp, Klebsiella pneumoniae
atgcagctccggctctttatccagccactctttgattggcaggtcgaggtcgaagtcgtttttcagacgctcctgcagaccttcgatatcccacatctcctccagcgactgcggcggaatatgggcatcgatcgtcgccttaaagacgtcttcgcggatgctgttgatggtttcgctgacgtcagacacgtccagcagctcgttacgctgggtgtagatcgcccggcgctggtcgttggccacatcatcatattccagcagctgcttacggatatcgaagttacggctttccactttacgctgggcgttggcgatcgccttggtgacccacgggtgctcaatcgcctcacctggtttcattcccagtttacgcatcatgccagacacgcgatcggaggcgaagatacgcatcagggcatcttccattga

SEQ ID NO: 236051 - DNA, 636 bp, Klebsiella pneumoniae
atgctgcgcgaacgttacaaatactattgcgaaagggtggtgaaggggttctacaaagagcacttcctgcgcttcgaccggcagattgtgctggtggactgtctgcagccgctcaacagcgggccgcaggcgtttaacgatatgcgcctggcgctgacccagctgatgcaaagtttccattacgggcagcgcaccttgttccgccggttgttttcgccggttatcgacaagctgctgtttgccgctaccaaagccgatcacgtcacgatcgatcagcacagcaatatggtgtcgctcctgcagcaactgattcaggacgcgtggcagaacgccgcctttgaagggatcagtatggattgcctggggctggcgtctattcaggcgacccagagcgggctgattgaggtgaatggcgagaaaattcccgccctgcgcggcaatcgcctgagcgacggccagccgttgaccatctatcccggtgaggtgccggcgcgcctgccgggccaggccttctggcagcagcagggatttcagtttgaaaactttcgtccgcaggtcatggatgtcgatcggcctttgccgcacattcgtctcgacgcggcgctggaatttttgattggagataaactgcgatga

SEQ ID NO: 236052 - DNA, 2115 bp, Klebsiella pneumoniae
  misc_feature (2050)..(2059): n is a, c, g, or t
atgagcgatatggcagagcgccttgcgctgcatgaatttacggaaaatgcttacctgaactactccatgtacgtgatcatggacagggcattaccgtttattggcgatggcttaaaaccggtccagcgtcgcatcgtctatgcgatgtccgagctggggctgaacgccagcgcgaaattcaaaaagtccgcccgcaccgtcggcgacgtgttgggtaaatatcacccgcacggcgacagcgcctgctatgaagcgatggtgctgatggcgcagccgttctcttaccgctatccgctggtggatggtcagggaaactggggggcgccggacgatcccaaatctttcgccgccatgcgttacaccgaatcccgcctgtcgaagtatgccgagctgctgctcagcgagctggggcaggggacggtcgactgggtgccaaactttgacggcacgctgcaggagccgaaaatgctgccagcgcgtctgccgaacatcctgctgaacggcaccaccggcatcgcggtaggcatggcgaccgatattcctccgcacaacctgcgggaagtggccaaagcggcgattacgctgattgagcagccgaaaaccaccctcgacgaactgctggatatcgtacaggggccggatttcccgaccgaggcggagatcatcacctcgcgggcggaaattcgcaaaatctaccagaacgggcgcggctcagtgcgcatgcgcgcggtgtggagtaaagaggacggcgcggtggtgatcagcgcgctgccgcatcaggtctccggcgccaaagtgttggagcagattgcggcgcagatgcgcaataaaaagctgccgatggttgacgatctgcgcgacgaatcggaccacgaaaacccgacccgtctggtgattgtcccgcgctccaaccgggtggatatggaacaggtgatgaaccacctgttcgccaccaccgatctggagaagagctaccgcatcaacctcaatatgatcggccttgacggccgcccggcggtgaaaaacctgctggagatcctcagcgagtggctggtgttccgtcgcgataccgtgcgtcgccgtctaaaccatcggttagagaaagtgctgaagcgcctgcatatcctcgaaggtttgctggtggcgtttcttaatatcgatgaagtgattgagatcatccgcactgaagatgaaccgaagccggccctgatgtcgcgctttggcatcagcgaaacccaggcggaagcgattctggaattaaaactgcgccacctcgccaaactggaagagatgaagatccgcggcgagcagagcgagctggaaaaagagcgcgaccagctgcaggcgattctggcgtctgaacgtaagatgaacaacctgctgaaaaaagagttgcaggccgatgccgatgccttcggcgacgaccgtcgctcgccgcttcacgagcgtgaagaagcgaaagcgatgagcgaacatgacatgctgccgtctgagccggtgactatcgttctgtcgcagatgggctgggtgcgcagcgccaaaggacacgacattgacgcccagggcttgagctataaggcgggcgacagctggaaagcctcggcgaagggcaagagcaaccagccggtggtgtttatcgataccaccggacgcagctatgccatcgatccgattactctgccttccgcgcgtggccagggtgaaccgcttaccggcaaactgaccctgccgccgggcgcgaccgtggagcatatgctaatggaaagcgacgatcagaaactgctgatggcttccgacgcgggctacggtttcgtctgtaccttcaacgatctggtggcgcgcaaccgtgccggtaaagcgctaatcaccctgcctgacaacgcgcacgtgatgccgccgctggtgattgaggatgagtccgatatgctgctggccatcaccgccgccgggcggatgctgatgttcccggtcagcgatctgccgcagctgtcgaaaggcaagggcaacaaaattatcagcattccggcggcggaagccgcagccggccagnnnnnnnnnnacactgcatatcgtcggcagcgtcagatgtgtataagagacagcagagtacgctga

SEQ ID NO: 236053 - DNA, 192 bp, Klebsiella pneumoniae
gtgtataagagacagcagagtacgctgaccattcacgtcggcaaacggaagatcaaactgcgtccggaagagctgcaaaaagtcaccggcgagcgcggccgccgcggttcgctgatgcgcgggctgcagaaaattgaccgcgtggaaattgactcgccgcgtcgtgccgcggcaggcgatagcgaagagtaa

SEQ ID NO: 236054 - DNA, 984 bp, Klebsiella pneumoniae
  misc_feature (629)..(638): n is a, c, g, or t
atggcattatgcgccccttacgacaaaactggcatcgaccaggttcaggcagaaaggttatcaatgagctggattgaacgaattaaaagcaacatcactcccacccgcaaggcgagcattcctgagggtgtatggaccaagtgcgacagctgcggtcaggtactctaccgcgccgagctggagcgcaacctggaggtttgtcctaagtgcgatcaccatatgcgcatgtcggcgcgtaatcgcctgcatagcctgttggatgaaggttctctggtagaactgggtagcgaacttgagccaaaagatgtgctgaagttccgcgattcaaaaaaatacaaagaccgcctggcgtccgctcagaaagagacgggcgagaaagacgcgctggtggtgatgaaaggtacgctctacgcgatgccggtggttgccgccgcctttgaattctcctttatggggggatcgatgggttccgtcgtcggcgcacgctttgtacgcgcggtggagcaggcgctggaagataactgcccgctgatctgcttctccgcctccggtggcgcccgtatgcaggaagcgctgatgtcgctgatgcagatggcgaaaacctccgcggcgctggcgaaaatgcaggnnnnnnnnnngccgtacatctccgtgctgaccgacccgaccatgggcggcgtatcggcgagctttgcgatgctgggcgatctgaacattgccgagccgaaagcgctgatcggctttgccggtcctcgcgttatcgagcagaccgtacgcgagaagctgccgccgggattccagcgcagtgagtttctgattgaaaaaggggcgatcgatatgatcgttcgccgtccggaaatgcgtctcaagctggccagcattctggcgaagctgatgaacctgccggcgccggttgccgtttcggaagcgcctcatgaaggcgtggtggtgccgccggcaccggatcaggaacctgaggcctga

SEQ ID NO: 236055 - DNA, 2280 bp, Klebsiella pneumoniae
atggatgagcagttaaaacagagcgccctcgacttccacgaatttccggttcccggaaaaatccaggtctcgccgaccaaacctctcgccacccagcgcgatctggcgctggcctactcgccgggcgtcgcagccccctgcctggaaatcgaaaaagatccgctggccgcctacaaatacactgcccgcggcaacctggtggcggtcgtctccaacggcaccgcggtgctggggctcggcaacatcggcgcgctggccggtaagccggtaatggagggcaaaggcgtcctgtttaagaaatttgccggtatcgatgtgtttgatatcgaagtcgatgagctggatccggacaaattcattaacgtcgtcgccgccctcgaaccaaccttcggcggtatcaacctggaagatattaaagcgccggagtgtttctacatcgagcagcagctgcgcgagcggatgaatatcccagtcttccatgacgatcagcacggcacggcgatcatcagcaccgcggcgatcctcaacggtctgcgcgtcgtcgagaagaatctgtccgacgtgcggatggtggtctccggcgcgggcgcggcggcgatcgcctgtatgaatctgctggtggcgctggggatgcaaaagcacaacatcgtggtctgcgattcgaaaggcgttatctataaagaccgtgagccgaacatggcggaaaccaaagccgcctatgcggtggaagacgatggcaaacgcaccctcgatgacgtgatcgacggcgccgacattttcctcggctgctctggcccgaaagtgctgactcaggagatggtgaagaagatggcgcgggcgccgctgatcctcgccctggccaacccggagccggaaattctgccgccgctggcgaagcaggtccgcgatgacgccatcatctgtaccggccgctccgactaccctaaccaggtcaacaacgtactttgcttcccgttcatcttccgcggcgcgctggacgtcggcgcgacggcgatcaacgaagagatgaagctggcggcggtgcatgcgattgccgagctggcccatgccgagcagagcgaagtggtggcctccgcctacggcgatcaggatttaagctttggtccggagtacatcattccgaaaccattcgacccgcggctgatcgtcaagatcgcccccgcggtggcgaaggcggcgatggattccggtgtggcgacgcgcccgatcgccgattttgacgcctatatcgagaagctgagcgagttcgtctataaaaccaacctgtttatgaagcctatcttctctcaggcgcgcaaagagccgaagcgcgtggtgctggcggaaggggaggagacccgggtgctgcacgccacccaggagctggtgtctctgggactggccaaaccgattctggtggggcgcccgagcgtgattgaaatgcgcatccagaagctgggcctgcagatcaaggccggcgttgactttgagatcgtcaataatgaatccgacccgcggtttaaagagtactggagcgagtactaccagctgatgaagcgccgcggcattacccaggagcaggcgcagcgggcggtgattagcaacaccacggtgattggcgccattatggttcatcgcggtgaagcggatgcgatgatctgcgggactattggcgagtaccacgatcactaccgcgtggtgcagccgctgtttggctatcgcgacggcgtcagcaccgccggggcgatgaatgcgctgctgctgccgagcggcaacacctttatcgccgatacctatgtcaatcacgatccgtcgccggaagagctggcggagatcaccctgatggcggcggaaagcgtgcgtcgcttcggtattgagccgcgggtggcattgctgtcgcactccaactttggttccgccgactgcccgtcagccagcaagatgcgcaaaacccttgaactggtgaaggcgcgcgccccggagctgatgatcgatggcgaaatgcatggcgacgccgcgctggtggaaagcatccgcaacgatcgcatgccggacagcccgctgaagggggcggccaatattctggtgatgccgaatatggaagccgcccggatcagctataacctgctgcgcgtctccagttcggaaggggtgaccgtcgggccggtgctgatgggggtggcgaagccggtgcatatcctgacgccgatcgcctccgtacgccggatcgttaatatggtggcgctggcggttgttgaagcgcaaaccgaaccgctgtaa

SEQ ID NO: 236056 - DNA, 957 bp, Klebsiella pneumoniae
atgaatcagttagacagcatcaagcagttcaccacggtggtcgccgacagcggagacatcgaatccatccgccactaccatccggaagacgccaccaccaacccctctctgctgctgaaggccgccggcctggcgtcctatagcggcctcatcgacgacgctatcgcctgggccaaaaaacagggtggcggccgcgaagcgcaggtggctcacgcctgcgataagctggcggtcaattttggcgcggagatcctcaaaagcattcccgggcgggtctccaccgaggtggacgcccggctctccttcaaccgcgagaaaagtatcgagaaggctcgccacctggtggcgctgtatcaggagatgggcattgataagtcgcggatcctgatcaagctggcatccacctgggaggggatccgcgccgcggaggtgctggagaaagaggggatccactgcaacctgacgctgctgttttccttcgcccaggcccgggcctgcgccgaggccggggtttatctcatctccccgttcgttgggcgtatttatgactggtatcaggcgcgcaaaccgctggagccttacgtggtggaggaagatccgggggtgaaatcggtgcgcaatatctatgactatttcaaacagcataaatacaacaccatcgtgatgggcgccagcttccgccgcaccgagcagatcctggcgctggtcggctgcgaccggttgaccatcgccccgcctttattaaaagagctgcaggccagcgataccccggtggtgcgcaaactgatccctgccagccagatcctgccgcgtccggtgccgctcagtgaagcggagttccgctgggaacataatcaggatccgatggcggtcgaaaagctagcggaggggatccgcctgttcgccgtcgatcagcgcaaactggaagatctgcttgccgccaaactgtcactttag

SEQ ID NO: 236057 - DNA, 801 bp, Klebsiella pneumoniae
  misc_feature (756)..(765): n is a, c, g, or t
atgcagcgtactggctttaataacgcccgggtccggcaggccaataagtcaatttttctttctcatctgtggcgggaaaagcagctcagtaaatcacagctctctcaactcaccggtctctccattccggcggtgagcaatattctggccgagctgcttagcgagggattgatcggtcactcaacggaacacttgagcaaacggggcgtgaacagcggcagctaccagatccccgagcacggcgcctggacactgtgcatgaatatcaccccgaccagcattgaatatcagcttgccgacgcccgcctgctggcagtggatggccatcagcatttgccggtcaacgcgcccactcctcaggccctgcttgaggccattgttgaatgctggcggcatatccaccgccgctacccgcagcacagcatcaatctcgcccttggcgtgcatggacaggttgatccgattaccggcgtttcacaaaccatgccccaggcacgctggaaaacaccgatcgaaataaagtatctgcttgaggagcggcttggcgtgcaggttcgggtggataacgactgcgtgatgctggcgctggcggagaagtggcagcatcagggtacacagcaggatttttgcgtgatcaacgtcgactacggtatcggctcgtcatttgtgattaacgatcatatttatcgcggcagtctgtacggcagcgggcagattgggcatacgattgtcaatcctgacggcaacgcctgcgannnnnnnnnngttgcctcgaaaccgtcgcctctctcagcgcgctga

SEQ ID NO: 236058 - DNA, 216 bp, Klebsiella pneumoniae
atgctcgccgatctgatcggccagccgcagttcaaaatcccacttcacggattcacggatcagcgccgcctggtcgcgcatctcctggccgtagccaatcggcgtattgcggcagccgaagtgggaatgttcgcttatcggcgtgcggccgccaaaaatcagcaccgggatattgctgttcgccagattgatgacgccgcaggcggcgttggctag

SEQ ID NO: 236059 - DNA, 885 bp, Klebsiella pneumoniae
atggtggcagaccgcagggttggcgaacaggtacgacccgtcgccgacggcggcaataatcagctcttcccggcgcgcaagctgcagccccagcgcgatgggcagggcttcgcccaggccgccggccagcgcttcctggtaatagctctcggcatgggtcagtccggcaaactgcggcagcgtggtcagttcagaaacgatccggccgcggtgttgattagccagatggccgaggcagtagctgagccagggtttggtaatggccccggtctggctggcatggagaagcgcgtcgcgctggtttttctgttgctggatgcggctctgcgtatatgccgcccgctccgccacatgctgctggcgggcggcctgcagcgggcgcagcgcctcttccagcaggctgaagacttcatcggtctcgcccgccaggttgatgtccgcgcgatagccgcgcaccgggtagcgggagaagagcggatcgggccccatctggatcacggtgcagtcctggcgacagtcgccctcggcgatcatccatggcgcctgcgagtcgaccaccagaatcacatcggcgtcagcgagccagacgctgggatcagccccggcgagcaggggattatcggcgctcagggtaacctcggtgccccagtattccaccagagggatcgcccattcgcgcaccagactatcgaggcgcgcaaagccttccgccgttcgggcgccgcgctgggcgaagatgaccgggtgtctggcgcaggcgattgcctcggctgcgcgggcgatatcttcccggactggcgcatagcggaccggctgctgcgaagggccagcctgcagcgcggcctcatcgacggcaaaggtttcgcacagtggctcacgcggtaa

SEQ ID NO: 236060 - DNA, 687 bp, Klebsiella pneumoniae
atgtccagaatcggaactttagatcttttagcagaagttgaagaaaacttagaagcaataaaaaacatggaaataaaaccagtaaaagtcaagtctattttggagcacttacgaagtgctcttgaatatgtagcaaatgatacttatgataaatatgctgataaatcaagcacgccaagaccaaaaatatctttcccatatggcgaaaaaaaatttatcgatagtttttttattaaaaaactaaacattccagtaccaacatcgtctccactttatgagatattcaactcaatacaagaataccgcacaggtgatggttggctaacgatgatgtgtaacttgacgaatgaagtaaaacatagaaatccaatacccttagacgaagaggaatatataaaagaaatcgaaataaatgtagatggcgtagcattaataagggctgacagccaatcaagtatcatttttgaaaataattatgtcaacggaataaaaatggaagacattgcttatgaaaatgggaaaattgaaaggagcggaaacggaaagccaataaacataacatttaccaatgacaaaaaaatacgattccatggccatgattatgaagtcattcctttcattgcattatgtcatgaaaaaatcaaggagtttgttcaaaaatcttatgatgaattaaacaaactctaa

SEQ ID NO: 236061 - DNA, 1089 bp, Klebsiella pneumoniae
atggaacttaggctaaaaaatgtcacaagttataataaaaacattttcacaaacttagatctctcaaaaaaaataaatattctatatggtcaaaatggttgtgggaaatctacaatctcaaatttcttttataatacagcccacaaagattttgcagaatgcgaatgcacattactaaacgactaccgttcaatcgtttataactcaaagtttattgaagataacttctatcatgcaaaagaacaaaaaggcgtattcacactcagtaagaaaaatgcagatatagaaaaagacctagcaataaaagaaggtttaagacaagatctaaaagagcaatatcgaaataaaagagatgcagcagcaaagttaaaagaagaacaaaacaccaaagaaaatgactgcatcgaggccatttgggtaaaaacagaatcgataaggtcttctgatctaaaaaatgtcatgcgaggtccactagggagcaaaaaagctttttttgctcaattacaaaaaacacttacattaccagttgcaaacttggagcaactatctaaagactacggcgaactaataaagcacaaaaacaaagaaatacctctcataactactttattatcacttacactttcagaagaagataagaaactgttagccacaccgattatagactcaagtaatagttatttatcagaaacaataaaacgacttcaaaatcttgactgggtaaaaaaggggaaagaactttacctaaaagataacacatgcccattctgccaagaaagtacaatcaacgctaaattcatcgaggcaattgagtctatctttgatgaaagttactctaataaaacaaatcaaataagcgtcataaaatcatcttatgagttagctacaaagccaatttatcaaaaactaactcaagaaatatctacttgtgaactgataagtgaagaggaaagagaaatcaccacttctcacatcaaaattctagatgagattgcaagcaggaatatagagttaataaccagcaaatttaataacccttcatctatcctgtctcttatacacatctccgagcccacgagaccgtactag

SEQ ID NO: 236062 - DNA, 984 bp, Klebsiella pneumoniae
atgaaaagaaaatttatacatgaatttgcttttgggtacttaaatagctttacggcaatggttactgctcagcaattgacgtctgatgcaaaaatcaatttagaacaagaagtgcagctttcaaaatgccatatatactttatatgtgctcgtccaatcttttatttcattgatggtacaattaaacatgaaaataacatgttgtcaggggatatagggtacaagatagagggtaaagaaagcaagtttcattttgaatacaattgggtgctagaagatgatgcaattaatgtaatatgtaactatcctttcaaagatgttgttagtgtaaatagcgaagggaaggaagtgacttatatgtctgcgtctatgatcgcaaccatctattcaggtaagttagattgctattcagatctatcctcctacgaagttctttatattggacaatcagtaggtagaaatggtaataggaatgcagttgaacgtttaaagaatcatgcaaaatttcaaaagatattagcgcaaacacattataacaaaccagatcaagagattatgctttttatgtatgcttttgagcatgagcaagtattctcgtctctagatgggaggtctggattaattgatgatacggatagcgatgacaaaagatttaagtcggcattaaaaaatcgcccaaatcaaaatcaagctattaatatgattgaggctgctctgataagatattttcagccagaatataatgaaaaattcacagagagtaaaatatcaccaaaattaaaagcattagcgaaatgttatgacttagatatgtctggaatcgttgtagaagttaacacggaagatcttttttactcattatactctaaaagcgttaaaaaaaactatcatcatattgtgaagatagatttggtttctcatcagcaaaggtcatcctttttccgaccgactggctttaatgccctgccagatattattcaataa

SEQ ID NO: 236063 - DNA, 144 bp, Klebsiella pneumoniae
atgattattattcaggctgtatttttccatgatcttattcttatgataggcggcggtgcggggactcacacgctgcagggcggcgattttactcatatccagcccttcgagaataccgtgcactacggcggtctgcgatcgtga

SEQ ID NO: 236064 - DNA, 1404 bp, Klebsiella pneumoniae
atgctgattaaagagggggcggagcaggtcagtaaactggactacccgaatttctggcatctgggcaacctcaagctgcggcttagctatcagtttgaacctggcgccgatgccgatggcgtaacggtgcatattccgctgccgctgctcaaccaggtagaggaagccgggtttgaatggcagatccctggcctgcgtcgcgagctcattatcgcgctgataaaatcgctgccaaagccggtacggcgcaatttcgtcccggctcccaactatgcggaagcgtttcttggccgggcgacgccgcttgagctgccgctgctcgattcgctggagcgcgagctgcgtaagatgaccggcgtgaccatcgaccgcgaagcctggcagtgggatcaggtgcccgatcacctgaaaatcactttccgggtggtggatgataaaaacaagaagctgcaggaagggcgctcgctgcaggcgttgaaagacgccctgaagggcaaagtgcaggagacgctgtcggcggtcgctgatgacggtattgagcagagcgggctgcatatctggagctttggcaccctggcggaaagttacgaacagaagcgcggtaactataaggtgaaagcctggccggcgctggtggacgagcgcgacagcgtggccatcaagctgtttgataatccacaggaacagcagcaggccatgtggcgcggtctgcgtcgcctgctgctgctcaacatcccgtcgccgattaagtatctgcacgagaaactaccgaataaagccaagcttgggctctactttaacccgtacggcaaagtgctggatctgattgacgattgcatctcctgcggtgttgataagcttatcgacgaggcgggcggtccggtgtggacggaagagggctttagtcagctgcacgataaagtgcgagccgagctcaacgacacggtggtggagatcgctaaacaggtcgagcagatcctcaccgcggtgttcaatatcaacaaacggctgaaaggccgggtggatatgaccatggcgctggggctgtcggatatcaaagcgcagatggcgggtctggtgtatcgcggctttgtcaccggcaacggtttccgccgtcttggcgatacgctgcgctatctgcaggcgattgaaaagcgtctggagaagatggctatcgatccgcaccgcgatcgggcgcagatgcttaaggtggagagcgtgcagcaggcgtggcagcagtggctgaataagctaccgccgaaccgccgtgaggacgacgatgtccgggagatccgctggatgatcgaggagctgcgggtcagcttcttcgcccagcagctgggcaccccgtatcctatctcggacaagcgagtgttgcaggcgatggagcaaattaccccatag

SEQ ID NO: 236065 - DNA, 1617 bp, Klebsiella pneumoniae
atgaacaggatgagcatcgttatcctctgggcgctggcgctgctggtgctccagccggcgctggccgccgaaccgcgacagcagccaaccgcgcgcgagcaggcacgcacggtcacgattttccaccaacctgtcgtcatgttgcaggccacctttggccagaccacgcccgaagagcgcgttttgcgcacccgtagcgccctgcgcgccttcaccgaagatgatattcgccagccgctgcgggtcgtgccggttatccgctatggtcagccaggcagactgtttctgatgaacggcaaaccggtgctgctgctgagccaggcggatctcgacgagggcgatgatttaaccctcgaccaggcagcccagcgggtgctggcgcgtatggaagcccagcgcaccagcctccaggagcagttcaacaaccgctatctgttcatctccgccggtaaagccctggccggggcgctgctgctggcgctgttttactacggcgccttccgcgcctggcggcgggtgcgacgctttttcctgctgcggatcctcgaaaaacgtagcgccataccgcagcactggcggcgctatctcggcaatattgaagttcgactctatgctgtgctggtcatccttctcggcatgctggcctgttatctctggctgagctgggccttcagcctgtttccctggacgcgggtgtggagcgaatcgctgggggactggtcgctgggggtgatccgcgacctctctctgtcgattgtcgcctccctgccggggctgatgatcgtggtgcttattttccttctcacctggcttatcattcgcctggtgaaggtggttctcgaccaggtcgccgccggccgcattcaggttcccggcattcatccggagaccgttagcgccacccgtcggcttatctcggtggtcatctggttgtttgccctctccgccgcctacccgttccttcccggcgccaactccctcgccttcaaaggcattagcgtgttcttcggcctgatgctgaccctcgggtcaaccggggtgatgacccatgcgatgagcggcctggtgctgatctactctcgggcgctgcgcaaaggcgactggatccgcctcgccgataatgagggtcaggtcagcgagattggcgtgctggcgaccaaaattctcacccgcgaaaattacatcgttaccgtcccgaacgcggtggtggtgagcgggaaaattattaatctcagcgccgaaagcgccgacggtggagtcaacctcaccaccagcgtcaccatcggctacgatacgccgtggcgtcaggtccatgcgctgctggagctggcggcgagacgcgccccggggatcgatcagcaaattgccccggtggtgcgtaagctgggattgctcgactggtatacctcgtatgagctgcaggtgcgcttactccccacagccaagctgccggatggccgcaacgcattgcatagcagcattattgatgtgtttaacgaattcggcgtgcagattatgtcgccgaactttgtgatgcagccaaaggcggcggtagtggtgccgcaggaagcctggtacgccgccccggccgtcgcgccgcaggagccggagaaataa

SEQ ID NO: 236066 - DNA, 381 bp, Klebsiella pneumoniae; identical to SEQ ID NO: 97410

SEQ ID NO: 236067 - DNA, 429 bp, Klebsiella pneumoniae; identical to SEQ ID NO: 168645

SEQ ID NO: 236068 - DNA, 1194 bp, Klebsiella pneumoniae
atgagtcattcaaatgaaaccaaaccccatgcacgcgagctggcgcgaccaaactggtcggcggtcttcgcggttgctttctgcgttgcctgcctgattaccgtcgaatttctaccggtcagtctgctgacgccgatggcgctggatttaggcatctccgaagggatggccgggcagtcggtgacgacgacggcattcgtcgcgatgttttccagcctgtttatcaccacggtgataggtaaaaccgatcgccgctacgtggttatcctgttttcgctgctgctgaccctttcctgcctgctggtatctttcgctgatagcttcaccctgctactactggggcgcgcctgtctgggcctggcgctcggcggtttctgggcgatgtccgcatcgctgaccatgcggctggtgccgatgcgcgtggtgccgaaagcgctatcgattattttcggcgcggtatcgatcgcgctggtaattgctgccccattgggcagtttccttggcgggcttatcggctggcgcaacgtctttaacggcgcggcggtgatgggcgtgctgtgtacgctctgggtgctgaaagcgctgccgtcgctgcccggtgaatcggcttctcagcagcaaaatatgtttggtctgctgaagcgtccgggggtgatggccggaatgtgcgccattttcatggcctttgccggacagttcgccttctttacctatattcgcccggtttacatgaccctcgccggttttgacgtcgacggcctgacgctggtgctgctgagctttggtatcgccagctttatcggcacctcgctctcctcggtgctgctcaagcgttcggtaaaagcggcgctggcgatcgcgccgctggtgctgaccgcctgcgcggtggcgctggtgctgtggggagagagcaaaatcatcgcctcgacggtggcgattatctggggcttcgcgtttgcgctgatcccggtggggtggtcaacgtggatcacccgttccctctccgatcaggcggaaaaagccgggtcgattcaggtggcggtgatccagctggccaacacctgcggcgccgcggtcggcggcattgcgcttgaccacttagggctgctgtcgccgctggtgttgtcagggatattgatgctgtttaccggcctgctggtggcggccaaagtgaaggtgaattcacccgcttaa

SEQ ID NO: 236069 - DNA, 951 bp, Klebsiella pneumoniae
atgctgagcgcatttcaactggaaaacaatcgtttaacgcgcctggaagccgatgagatcaaacacctcgccagctcggtgtgggtcgatctggtcgagcctgacgacgatgagcgaagccgcgtgcagacggaactgggtcaaaacctggcgacgcgcccggaactggaagatatcgaagcctccgcgcgtttctttgaagatgaagacgggttacacatccactcgttcttcttttttgaagatgccgacgatcacgccggcaactctaccgtggcgtttaccatccgcgaaggccgcctgttcacactgcgcgagcgcgaactacccgctttccgcctctaccgtatgcgcgtgcgtaaccagacgctggtcgacggcaacgcctacgaactgctgctcgacctgttcgagaccaaaatcgagcagctggcggatgaaattgaaaacatctacagcgacctggaaaagctgagccgcgtcattatggaaggccatcagggcgacgagtacgacgaagcgctgtcgacgctggcggaactggaagatatcggctggaaggtgcgcctctgtctgatggatacccagcgcgcgctgaacttcctcgtgcgcaaggcgcgcctgccggcgggccagctggagcaggcgcgggagatcctgcgcgatatcgaatctctgctgccgcacaacgaatcgctgttccagaaggtgaacttcctgatgcaggcggcgatgggttttatcaatatcgagcagaaccgcattatcaagatcttctcggtggtctcggtggtattcctgccgccaactctggtggcctccagctacgggatgaactttgaatttatgccggagctgcattggagctttggttatccgggagccatcgtgtttatgatgttggccggcctggcgccatatctctacttcaagcgtaaaaactggctgtaa

SEQ ID NO: 236070 - DNA, 189 bp, Klebsiella pneumoniae
gtgcacccgcacaagctgcgccactcctttgccacccatatgctggagtcgagcggcgatctgcgcggcgtgcaggagctgctggggcatgctaacctctccaccacccaaatctatacccatcttgattttcaacaccttgcctcggtgtacgatgccgcgcatccgcgcgctaaacgggggaaataa

SEQ ID NO: 236071 - DNA, 1785 bp, Klebsiella pneumoniae
atggccaccgtattgaaaaaaaccgatgtcgcgatcgtcggcttcggctgggttggggcgatcatggccaaagagctgaccgaagcggggctcaacgtcgtcgcgctggagcgcggcccgatgcgcgacacctggccggacggcgcctatccgcaggtgattgatgagctgacctacaacatccgccgcaagctgttccaggatctgtcgaaaagcaccgtcaccatccggcataacaccagccaacaggcagtgccctatcgccagctggcggccttcctgccgggtaccggcgtgggcggcgccgggctgcactggtccggcgtccatttccgcgtcgatcccattgagctgcggatgcgcagccactatgaagaacgctacggcaaaaacttcatcccccaggatatgatcatccaggatttcggcgtcacctacgacgagctggaaccgttcttcgataaagcggaaaaagtattcggtacttccgggaccgcctggtcgatcaaaggcaaggtcgtcggcaaaggccgcggcggcaacgccttcgccccggaccgctcggacgacttcccgctgccggcgcagaaaaacacctggtcggcgcagctgtttgaaaaagcggcgctggaagtggggtatcacccctataacctgccgtcggccaatacctccgactcctataccaacccctacggcgcgcagatgggcccgtgcaacttctgcggtttctgcagcggctacgcctgctacatgtactctaaagcctcgccgaacgtgaacattctgccggcgctgcgccaggaaaaacgctttgagctgcggactaacgccaacgtgctgaaggtcaacctgaccgacgacaaatcccgcgccaccggcgtgacctacgtcgacggccaggggcgcgaaatggaacagccggcggacctggtgattatcggcgccttccagttccacaacgtgcacctgatgctgctctccgggatcggcaaaccgtacaatccggagaccggcgaaggggtggtagggcgtaacttcgcctaccagaacatgaccaccatcaaggccattttcgacaaagacacctataccaatccgtttatcggcgcgggcggcaacggcgtcggcgtcgacgacttcaacgccgacaacttcgaccacggcgcggcgggctttgtcggcggttcgccattctgggtcaaccaggccgggaccaagcccatctccggtttcccggtaccgccgggcaccccggcgtggggcagcaagtggaaagcggcggtggccgacacctacacccatcacctgtcgatggatgcccacggcgcgcaccagtcctatcggcagaactacctcgatcttgatccgaactacaaaaacgtctttggccagccgctgctgcgcatgaccttcgactggcaggaaaacgacatcaagatggcgcagtttatgttcgataagatggcgccgatcgccaaagcgatgaagccgaaatatatcctcggcagcccaaaaaacgccaacagccactttgataccaccacctaccagaccacccatatgaacggtggggcggtgatgggggaagatccgaaaaccagcgccgttaaccgttatctgcaaagctgggacgtgcataacgtcttcgtcatcggcgcctccgcgttcccgcaggggctgggctacaacccaaccggcacggtggccgcgctggcctactggtcagcgaaggcgatccgtgagcagtatctgaaaaatccgggtcccctggtgcaggcataa

SEQ ID NO: 236072 - DNA, 900 bp, Klebsiella pneumoniae
atgcggcggcagctgttccgccagccgcgctttcagcgccgcggtatccagcggcaggccggagtcagagaccagatagcccaccagctgtcgggcatcaccgccggtcgccgccgcctggttgaagacgcaggcgtgactcaccgcctgccccacgtccggcagggccgacatcacccgatcaatctcgccaagctcgatgcgctgcccgcggatcttcagctgatcgtcgctgcggccaaggtactccaccgcgccgttcgtcagccagcgcgccacgtcgccggtgcgatacatccgctcgccgggggcaaacgggtcggcgataaagcggctggcggtgagatccgggcgccccagatagccctgcgccagctggatgccggtgagataaagatcccccgccacccccggcggtaccgggcgcatcgcggcatcgagaatgcgcagcccggtgttccacaccggccagccaatcggcacgctgctgccggtcaccgccgccagctcagggccgcaggccggataccagctgacgtccaccgccgcctccgtcgggccgtacaggttatgcagcggcgcgccggtcaagcgctcccactcgcggcacaattccgtcggcagcgcttcgccgctgcagaatacccgccgcagcgtgcggcaggcagcgacgctgtcggcatccagcgaggcgacaaacgccgccagcatcgacggcacaaagtgggtggtggtcacgccgtagcgggcgaagaactgctgcatcgcctgcgggtcgcggtgcgcctccggctcggccatcaccagctgcgcgccggcgataaacggccaccagaattcccacaccgacacgtcgaaactgcacggcgttttctgcgccaccacgtcgtccgcagataa

SEQ ID NO: 236073 - DNA, 258 bp, Klebsiella pneumoniae
atggcacaccagcgggttgccgccgtcgacgcgcagatcctgcgccagatccgcctgcatccgctccgtggcggcgcgatgcggatccggcgccgtccgcaggtcaatgatcgacggttcggcaaaggtgcggtcggccgccagccactgccagacttccccctcctcttcctcaaagcgcaggctgagggtgtccgcctgctgcagaccggcgacaatcgcttttcccagcagcgtcgggtcgagggcgccgcgtag

SEQ ID NO: 236074 - DNA, 249 bp, Klebsiella pneumoniae
atgttgcgtttctcccagcgggtggtgcccatgggccaggtgccgtccggcggcagggcagagaccggcagcgcatcgccgagcccggccagcatcgcggcggtgaccgttttgacgaaatccggcgcggcgtcggagaccaccggcgggcggttcggactgctggcgttcaccggctggagcggtacttccgccagtgattcacgggccagggccagcgcctgccagttgcgctccaccagctcctga

SEQ ID NO: 236075 - DNA, 276 bp, Klebsiella pneumoniae
atggaaaaaggccatctgcatcacggtattaatgcgcgccccgaggctgcattcgcgggcgatctttgccgcgttgaccacgtaaaaacgcgcttttttctgattcagggtggcctggacttcctggggcaggcgggaccagacctcatcggcgctgtacggcgtgttgagcaggaaaatgccgccgggcttcagccgctcggccatctggtatttatcgataaactgcagctggtggcagccgacgaaatcagcctgcgaaatcagatacgatga

SEQ ID NO: 236076 - DNA, 381 bp, Klebsiella pneumoniae
gtgttccgggttgagcgcgcgctggcgatgctcagcgatcttatcctgcggcagcagggcgcgaatggtgtcatccgccagcggggcgattttgttgatttcgtgcgaagtacggaaaccatcaaagaaatgaataaacggcacccggctttgcagggtggcgatatgcgagatcagcgcgaaatcctgcgcttcctggacgctgctggcgcacagcatggcgcacccggtctggcggacggccatgacatcggaatggtcgccgaagatcgacaacgcatgggtagcgacagtgcgggcggcgacgtgcagcacaaacggcatcagctggccggccagtttgtacagcgtggggatcatcagcagcaggccctgcgatga

SEQ ID NO: 236077 - DNA, 2511 bp, Klebsiella pneumoniae
  misc_feature (2424)..(2433): n is a, c, g, or t
atgacagaacaacaaaaaatcaccttcccccagctttatcaacagctcgacggcctgatgctgcgcgacaaaacgcgctttgcccgccgtctacacggcgtgaagaaggttaaaaatcctgaatcgcaacaggccattctgcaggagatggcgctggagataagccaggcagccggtaaagtcctgctgcgcgaagcggcgcgtccggccatcacctatccggaaaacctgccggttagccagaaaaaacaagagattctcgaggcggtgcgcgaccaccaggtggtgatcgtcgccggggagaccggttcgggtaaaaccacccagctgcccaaaatctgcatggagctggggcgcgggctgaaaggactcatcggccatacccagccgcgtcgcctggcggcgcggaccgtcgccaatcgtattgccgaagagctgcagagcgagccgggcggctgcatcggctataaagtccgcttcagcgaccacgtcagcgaaaaaaccatggttaagctgatgaccgacggtatcctgctggcggagatccagcaggatcgtctgttgatgcagtacgacaccatcattatcgatgaggcgcacgagcgcagcctgaatattgactttctgctcggctatctgaaagagctcctgccgcgccgcccggacctgaaaatcatcattacctcggcgaccatcgacccggaacgtttctcaaagcatttcaataatgcgccgattatcgaagtctccgggcggacttacccggtggaagtgcgctatcggccgatagtggaagaggcggacgataccgagcgcgatcagttacaggcgatctttgatgcggttgacgaactggggcgcgaagggcccggcgatattctgatctttatgagcggtgagcgggaaattcgcgataccgccgatgcgctgaataagctggatctgcgccataccgaagtgctgccgctgtacgcccgcctgtccaacagcgagcagaaccgcgtcttccagccgcacagcggaaggcgcatcgtgctggcgaccaacgtggcggaaacctcgctgaccgtgccgggcattaagtacgttatcgatcccggtactgcgcgtatcagccgttatagctaccgcaccaaggtgcagcgcctgccgatcgagccggtttcccaggcgtccgccaaccagcgtaagggccgctgcggccgcgtttcggaagggatctgtattcgtctttattcagaagacgatttcctgtcgcgcccggaatttaccgacccggagattctgcgcaccaacctggcgtcggtcatcctgcagatgaccgccctgggcttaggcgatatcgccgcctttccgtttgtcgaagcgccggataagcgcaatatccaggacggcgtacgcctgctggaagagctgggcgccatcaccaccgatgcgcaggcaacggcttataagctaaccccgctgggccgccagctcagccagctaccggtggatccgcgtctggcgcgcatggtgctggaggcgcagaagcacggctgcgtgcgggaagcgatgatcatcacctccgcgctgtcgatccaggacccgcgcgagcggccgatggacaaacagcaggcctctgacgaaaaacatcgccgcttccacgataaagagtctgatttcctcgccttcgtcaatctgtggaactacctcggcgagcagcagaaggcgctgtcgtcgaatcagttccgccgccagtgccgggtcgattttcttaactatctgcgcgtgcgcgagtggcaggacatctacacccagctgcgccaggtggtgaaagagctcggcctgccgatcaacagtgagccggcggaatatcgcgagatccatactgcgttgctgaccggtctgctgtcgcacatcggcatgaaagatgccgataagcaggagtttaccggcgcccgtaatgcgcggttctctatcttccccggctccggtctattcaagaagccgccgaagtggacgatggttgcggagctggtcgagaccagccggctgtgggggcgtattgccgcgcgcattgagccggagtgggtggagccggtagcgcagcacctgatcaagcgctcatacagtgagccgcactgggagcggtcgcagggcgcggtgatggcgacggaaaaggtcaccgtctacggcctgccgatcgttggcgcgcgcaaggtcaactacagccagattgatccggcgctgtgtcgtgagctatttatccgccacgcgctggtagagggcgactggcagacgcggcacgccttcttccgcgataacctgaagctgcgcgcggaaatcgaagagctggagcataagtcgcgccgccgcgacatcctggtggatgacgagacgctgttcgagttctacgaccagcgcattagccacgatgtcatnnnnnnnnnncccgccacttcgatagctggtggaagcgggccagccgtgaaacgccagacttgctcaattttgaaaagagcatgctga

SEQ ID NO: 236078 - DNA, 321 bp, Klebsiella pneumoniae; identical to SEQ ID NO: 213778

SEQ ID NO: 236079 - DNA, 1095 bp, Klebsiella pneumoniae
atggagaggcttactgttaccctcggggaacgtagttacccgattaccatcgcggctggtttgtttaacgatccagcttccttcctgccactcaagtcgggcgaccaggctatgctggtcaccaacgaaacgctggcgccgctttatctggataccgtccgctctgcgctgaagcagtcaggggtcaacgttgacagcgtcattctgccagacggcgagcaatacaaaagcctggcggtgatggataccgtgtttactgcgctgttgcaaaaaccacatggccgcgacaccactctggtggcgcttggcgggggggtgatcggtgatttaaccggtttcgccgcggcaagctatcagcgcggcgtgcgtttcatccaggtccctaccaccctgttgtcgcaggtcgactcgtcggtcggcggcaaaaccgcagtgaaccaccctctcggcaaaaacatgattggcgccttctggcagccggtttccgtggtagttgatcttaactgtctgaaaactctgccgaagcgcgagctcgcttccggactggctgaggtcatcaagtacggggtgatcctggatggtgaattcttcagctggctggaaaacaacattgatgcgctgctggcgctggacgataccgccatggcgtactgcattcgccgctgctgtgaactgaaagcggaggttgtggctgccgacgagcgtgaaaccgggttacgtgctttactcaatcttggacataccttcggccatgctatcgaagcggaaatgggctacggtaactggctgcatggcgaagcggtggcggcaggtatggtgatggcggcacgcacgtccgaacggctggggcagttccgcgcgcaggatactcagcgcattatcgagctgctcaagcgtgcaggcttaccggtacgcggcccgcaggaaatgagtgcgcaggcgtatttgccccatatgatgcgcgataaaaaggtactggctggcgaaatgcggctggtgctcccgctcgcaataggaagcagcgagctgtgcggcggagtgccgcacgatgtggttcttggcgcgattgctgatactcagcaggcgcaacaataa

SEQ ID NO: 236080 - DNA, 228 bp, Klebsiella pneumoniae
gtgtataagagacagagcttctaccaggcggcaattccaacctattacggcgggatcatgacctttgcctgggcgagcgacaatgaggcgctgcgccatctctccagcgaaatcattcaggcgcgctttcacaaagccaacctgacctgccgttactacaatccggcaatccatacggcggccttcgccttaccacaatatctgcatgatgctctgtccgcaccgtga

SEQ ID NO: 236081 - DNA, 435 bp, Klebsiella pneumoniae
atgatgcgccacttcgagaaaggcgtgatgctgcagactctggattcgctgtggaaagagcacctggcggcgatggattacctgcgccagggtatccacctgcgcggctatgcgcagaaagatccgaagcaggagtacaagcgcgaatcgttctcaatgtttgccgcgatgctggagtcactgaagtatgaagtgatcagcaccctgagcaaagtccaggtgcggatgccggaagaagtcgaggcgatggaacagcagcgtcgtgaagaggccgagcgcctggcgcagatgcagcagctcagccatcagagcgatgatgaagccgcagcccaggatctggcggcgcaaaccggcgaacgtaaagtgggccgtaacgatccgtgcccgtgcggctccggcaaaaagtacaaacagtgccacggccgtctgagctaa

SEQ ID NO: 236082 - DNA, 618 bp, Klebsiella pneumoniae
gtgccgcgcagcgaactggccgaaatgcgtaacccgtcgatggcgggactgatggtcaggctgatggggtcgtggggggagatcgtcattgccgccgggctgatcgtgtcggtgtgcggcgcttatctcagctggaccatcatggccgcggaggtgcctttcctcgccgccactcataaagccttcccgcgcctgtttgcccgtcagaatagcaacaacgccccctcctcctcattgtggttgaccaatatcagcgttcaggtatcgctggtgctgatctggctgaccggatcggactacggcacgctgctgaccattgcctctgagatgattctcgtgccttatctgctggtcggcgcctttctgctgaaaatcgccactcgcccgctgcataaagcggtggctatcggcgcctgtatttatggcatatggttattatacgcgtcggggcctgtgcatttgctgttgtcggtggtactttacgctccgggtcttctggtctttttgtacgcccgacgtacgcaccagcacgatcgttcgctcaaacgccgcgaagtggcgctaattggtttattgctggttgccgctgtgccggcaacgtggatgctggtggggtaa

SEQ ID NO: 236083 - DNA, 1227 bp, Klebsiella pneumoniae
atgtcgtctgctgaaacccccattaactggaaacgaaacctgaccgtgacctggcttggctgctttttaaccggcgccgccttcagcctggtcatgccctttctgccactctacgtcgaacagctcggcgtcaccgggcatagcgccctgaacatgtggtccgggctggtctttagtattacctttcttttctctgccatcgcctcgccgttctggggggggcttgctgatcgcaaggggagaaaaatcatgctgctgcgttccgccctcgggatggccatcgtgatgatgctgatgggaatggcgcagaatatctggcagtttctgctgctgcgcgcactgctcggcctgctgggcggctttattcccaacgccaacgccctgattgccacccagatcccgcgccataaaagcggctgggcgctggggacactgtctaccggcgcggtaagcggcgccctgctcggcccgctggcaggtggcttcctggccgaccactggggattgcgcaccgtcttctttatgaccgcggcggtactatttatctgtttcttgtttaccctgtttttaatccgcgaaaattttgtgccgatcgccaggaaagagatgctcagtgccagagaggtgttctcttcgctgcagaatcccaaactggtgctcagcctgtttgtgacctcgctgataatccaggtggccaccggttccattgcgccgatcctgacgctttatgtacgcgatctcgcgggcaacgtcagtaacatcgcctttatcagcggaatgatcgcctcggtgccgggcattgccgcgctgatgagcgccccgcggctgggcaaactgggggatcgcatcgggccggaaaaaatcctcatcgtggcgctgattatctcggtgctactcctgatcccgatgtcgttcgttcagaccccgctgcagttaggtatcctgcgattcctgctcggcgccgcggacggcgcgctgctgccggcggtgcaaaccctgctggtgtacaactccaccagtcagatctccgggcgaatcttcagctataaccagtcgttccgcgatattggcaacgttaccggccccctgattggcgcgtcggtttccgctaactatggcttccgcgctgtatttctggtcaccgcaggggtggtattgtttaatgcgatctactccaccctcagcctgcgtcggccagccgcggatacttcgcattcagtaaattaa

SEQ ID NO: 236084 - DNA, 1092 bp, Klebsiella pneumoniae
atgaaaattggtgttttcgttcccattggcaacaacggctggctgatctccacccatgccccgcagtatatgccgacctttgaactgaataaggccatcgtgcagaaggccgagcactaccatttcgacttcgcgctctccatgatcaaactgcgcggcttcggcgggaaaactgaattctgggatcacaacctggagtccttcaccctgatggccggcctggccgcggtgacctcgaagatccagatctacgccaccgccgccaccctgacgctgccgccggcgattgtcgcccggatggcctccactatcgactccatctccggcggccggtttggcgtcaatctggtgaccggctggcaaaaaccggaatatgaccagatgggcatgtggccgggagatgactatttcgccagccgctatgactatctcaccgaatacgtccaggtgctccgtgacctgtggggcaccgggcgcagcgatttcaaaggtgactacttcaccatgaacgactgccgggtcagcccgcgcccgtcgcagccgatgaaggtgatctgcgccgggcagagcgatgccgggatggccttctccgcccagcatgcggactacaacttttgctttggcaaaggggtcaacacgccaacggcctttgccccgaccgccgcacgcatgatgcaggcggcggaaaaaaccggccgcgacgtggggtcctatgtgctgttcatggtgatcgccgacgaaaccgacgaggcggcgcgcgccaaatgggaacattacaaagcgggcgccgatgaagaagcgctggcgtggctcaccgagcagagtcagaaagatacccgctccggcagcgataccaacgtgcgccagatggccgaccccacctcggcggtcaacattaacatgggcaccctggtcggatcgtatgccagcgtcgcccgtatgcttgatgaagtagcgagcgtgcccggcaccgacggcgtgctgctgacctttgatgattttcttgccggcattgacgcctttggcgaacgcattcagccgctgatgcgctgccggaaccacattgcttctgttacccgtgaggtggcctga

SEQ ID NO: 236085 - DNA, 3963 bp, Klebsiella pneumoniae
atgggcaccaccaccatgggtgttaagcttgacgacgcaacccgcgagcgcattaaatccgccgcgagccgtattgaccgcacgccgcactggctgattaagcaggccatctttaattatctggaaaaactggagaacgacgagacgctgcctgagctgccggccctgctctccggggccgccaacgaaagcgatgacgccagcgaaccaacggaagagccctatcagccgttcctcgaattcgccgagcagatcctgccgcagtcggtgagccgcgcggcgatcaccgccgcctggcgacgtccggaaaccgacgcggtaccgatgctgctggagcaggcccgtctgccgcagccgctgggcgaacaggcgcacaagctggcgtatcagctggcggaaaaactgcgcaaccagaaaaccgccagcggccgcgccggcatggtgcagagcctgctgcaggagttctccctctcttcacaggaaggggtggcgctgatgtgcctggcggaagccctgctgcgtattccggataaagccacccgcgatgcgctgatccgcgacaaaatcagcaacggcaactggcagtcgcacatcggccgcagcccgtcgctgttcgtcaacgccgccacctgggggctgctgttcaccggaaaactggtgtcgacccataacgagaccagcctctcccgctccctgaaccgcatcatcggcaagagcggcgaaccgctgatccgcaaaggcgtggatatggcgatgcgcctgatgggcgagcagttcgtcaccggggaaaccatcgccgaagcgctggccaacgcccgcaagctggaagaaaaagggttccgctactcctacgatatgctcggcgaagccgccctgaccgccgctgacgcccaggcctatatggtttcttatcagcaggcgattcatgccatcggcaaagcctccaacggccgcggcatttatgaaggtccgggtatctccattaagctctccgcgctgcacccgcgctacagccgcgcgcagtatgaccgggtgatggaagagctttacccgcggctgaaatcgctgaccctgctggcgcgccagtatgacatcggcatcaatattgacgccgaagaggccgaccgtttggagatctccctcgacctgctggaaaaactgtgcttcgagccggaactggccggctggaacgggattggcttcgtgattcaggcctaccagaagcgctgtccgtttgtcattgattacctgattgacctcgccacccgcagccgccgtcgcctgatgatccgtctggtgaaaggcgcctactgggatagcgaaattaaacgcgcgcagatggaaggtctcgaaggctatccggtatacacccgcaaggtttacaccgacgtctcctacctcgcctgcgcgaagaagctgctggcggtgccgaacctgatttacccgcagtttgccacccataacgcccatactctggcggctatctaccagctggcaggccagaactactacccgggccagtatgagttccagtgcctgcacggcatgggcgaaccgctttacgagcaggtggtgggcaaggtcgccgacggcaaactgaatcggccgtgccgcatctacgccccggtgggcacccacgagacgctgctggcgtatctggtgcgtcgtctgctggagaacggcgccaatacctctttcgtcaaccgtatcgcggacaataccctgccgctggacgagctggtagccgacccggtcagcgcggtagaaaaactggcgcagcaggaaggccaggccggcctgccgcatccgaaaatcccgctgccgcgcgatctctacggcagcggccggagcaactccgccggtctcgatctggcgaacgagcaccgtctggcctccctctcctcttccctgctcaacagcgcgctgcataaatggcaggcattgccgatgctggagcagccggtggccgaaggcgaaatgcagccggtggttaacccggcagagccgaaagatatcgtcggctacgtccgcgaagccagcgacgctgaagtgcagcaggcgctgaccagcgctatcaacaatgcgccgatctggttcgccactccgccgcaggagcgcgctgccattcttgagcgcgccgcggtgctgatggaaagccaaatgccgaccctgatggggatcctggtgcgcgaggcgggtaaaaccttcagcaacgccatcgctgaagtgcgcgaagccgttgacttcctacactattacgccggccaggtgcgcgacgatttcgataatgaaactcaccgcccgctgggtccggtggtctgtatcagcccgtggaacttcccgctggcgatcttcaccggccagattgccgccgcgctggcggccggcaacagcgtgctggcgaaacctgccgagcagacgccgcttatcgccgcccagggcgtggcgattctactggaagccggcgtgccgccgggcgttattcaactgctgccgggtcgcggggagaccgtgggcgccgcgctaacctccgatgagcgcgtacgcggcgtgatgttcaccggctccaccgaagtggccaccctgctgcagcgcaatatcgccagccgcctcgatccccagggccgcccgacgccgctgatcgccgaaaccggcgggatgaacgcgatgatcgtcgattcgtcggcgctcaccgagcaggtagtgatcgacgtgctggcttccgcgttcgacagcgccggccagcgctgctccgccctgcgcgtgctatgcctgcaggaagaggtcgccgatcacaccttaaccatgctgcgcggcgccatgagcgagtgccggatgggcaatccggggcgcctgaccaccgatatcggtccggttatcgatgcggaagcgaaagagaatatcgaacgccatattcaggcgatgcgcgccaaaggccgcaccgtctaccaggcggtgcgcgagaatagcgaagacgcccgcgaatggcgtcacgggaccttcgtgccgccgacgcttatcgaactcgacagcttcgacgagctgaaaaaagaggtcttcggcccggtactgcacgtggtgcgctacaaccgtaacgagctggacaaactggtcgagcagattaacgcctctggctacggcctgaccctcggcgtgcatacccgtatcgacgaaaccatcgcccaggtcaccggcagcgcgaaggtgggcaacctgtacgtcaaccgcaatatggttggcgcggtggtcggcgttcagccgttcggcggcgaagggttgtccggtaccggtccgaaagccggcggtccgctgtatctgtaccgtctgctctccagccgtccacaggacgcggttggcgtaaccttcgcccgccaggatgcggagcgtccgctggacgcccagctgaaaacgctgctggaaaaaccgctgcaggcgctgcagcagtgggccgcgggccgtcctgagctgcaggcgctgtgccagcagtacagcgagcaggcgcaaagcggcactcaacgcctgctgccggggccaaccggcgagcgcaacaccctgacgctgatgccgcgcgagcgcgtgctgtgcgtagcggataacgaacaggatacgctgatccagctggcggctgtgctggcggtgggttgtgaagtactgtggccggacagcgccctgcagcgcgatctggcgaagaaactgccgcgggaggtcagtgagcgcattcgctttgccaaagcggagcagttgcctggccaggccttcgacgcggttatctaccacggcgattccgaccagctgcgcgagctgtgcgagcaggtggcggcgcgcgatggggcgattgtctccgtgcagggtttcgcccgcggcgaaaccaatctgctgctggagcggctgtatatcgagcgttcgctgagcgttaacaccgcggcggcaggcggtaacgccagcctgatgaccatcggctaa

SEQ ID NO: 236086 - DNA, 1203 bp, Klebsiella pneumoniae
gtgaataataacgccctgacgctgcccgattattttaccggccgttttgaagataaaagccgggtgctgagaattatttcggcgctggttattctgctgttctttaccatctattgcgcttcaggaattgtcgcgggggcgcgtctgtttgaaagcaccttcggcatgagttatgaaaccgcactgtgggccggggcggcggcgacgattatctataccttcgtcggcggcttcctcgcggttagctggaccgataccgtgcaggccagcctgatgattttcgcgctgatcctcaccccggtgatcgtgattatttccgtcggcggctttggcgattcgctggaagtgattaagcagaagagcatcgaaaatatcgacatgctgaaagggctgaacttcgtggcgattatctcgctgatgggctgggggctgggttatttcggtcagccgcatattctggcgcgctttatggcggcggattcgcaccacagtatcgttcacgcacgtcgcattagtatgacctggatgatcctgtgcctcggcggggcggtggccgtcggcttctttggcatcgcctacttcaataacaacccgagcctggcgggcgcggttaaccagaacgccgagcgcgtgtttatcgaactggcgcaaatcctgtttaacccgtggattgccgggatcctgctgtcggcgattctggcggcggtgatgtccactctgagctgtcagctgctggtctgctcgagcgcaattaccgaagacctgtataaagccttcctgcggaaaaacgccggtcagaaagagctggtgtgggtgggccgtatgatggtgctggtggttgccctggtggccattgccctggcggccaatccggaaaaccgcgtgctgggtctggtgagctacgcctgggctggcttcggcgccgcctttggcccggtggtcctgttctcggtaatgtggtcgcgcatgacccgtaacggcgcgctggccgggatggtgattggcgccctgaccgtgatcgtctggaagcagtttggctggctgggcctgtatgaaatcattccgggctttgtcttcggcagcatcgggattgtggtctttagcctgctggataaagcgccctcggccagcatgcagcagcgctttgccgaagcggatgcccactaccatacgccgccgccggtacgcgccacggctgagtaa

SEQ ID NO: 236087 - DNA, 1590 bp, Klebsiella pneumoniae
atgtggcgcaggctgatttaccacccggaagtcaactatgcactgcggcaaacgctggtgctgtgtctgcccgtggccatcggtcttctgctcggccatctccagcaggggctgttattttccttagtccccgcctgctgcaacattgccggtcttgataccccgcataagcgctttttcaaacgcctgattatcggcggctgcctgtttgccggatgcagtctggtggtgcagttgctgcttgcccaggcgatacccctgccgtttattctcagcggcctggcgctcttgctcggcgttaccgcggagatcagttcgctgcacgcgcggctgctgcccgcgtcgctgatcgccgccatctttaccctgagcctggcgggcaatatgcccatctgggagccgctgctgatctacgccttcggcacgctgtggtacggcgtgtttaactggttctggttctggctgtggcgcgaacagccgctacgggagtcgcttagcctgctttaccgggagctggcggactactgtgaagccaaatacagcctgctgacccagcataccgatccctcgaccgccctgccgccgctgctcacccgccagcagaaagtggtcgatctgattacccagtgctatcagcagatgcatatgctggccgctaaccaacgcaacgatcataagcgcctgctgcgggcgtttcagatggggctggatctgcaggagcatatttcggtcagcctgcatcagccggaagaggtgcaaaagctggtggaacgcagccatgccgaagcggtgatccgctggaacgcgcagaccgtcgccgcccgcctgcgcgtgctggcggatgacatgctctatcatcgctttccaaagcgctttcagatggataaacagatcgaggctctggaaaagatcgccagacaacatccggataacccggtcggccacttctgcgcctggcacttcagccgcatcgcccgggtgctgcatacccagcgcccgctgtatgcccgggacctgatggccgacaaagagcgtcgtttaccgctatttcccgcgctaaagaactacctgtcgctaaaatcgcccgcgctgcgcaatgccgcccgcatcagcgtgatgctgagcgtcgccagcctgatgggcaacgccctgcacttgcctaagccctactggatcctgatgacggtgcttttcgtcacccagaacggctatggcgccacccgggtgcgtattgttcaccgggcggcggggacgctcgccggcctgacgatcgccgggctgaccttgcattttcacgttccggagagctacaccctgagcgggatgctgctgattaccctgctcagctatctgatcattcgcaaacactatggctgggcgatggttgggtttacggtgacggcggtatataccctgcagctgctgacgcttaacggcgaacagtttattatcgcccggctgatcgacacccttatcggctgcctgattgccttcggcgggatggtctggctgtggccgcagtggcagagcggcctgctgaaaaaaacgcccacgatgcgctggaggccgaccagcaggcaattcgcctga

SEQ ID NO: 236088 - DNA, 1047 bp, Klebsiella pneumoniae
atgactgcacaaacctggcgagcacactacgcacaaaaatatcaatattccttacggctttttttactgcttaatttcatttcttcctcgctgtcgctggtcacccccctatttacggtagttcgttttacgctgccctgcgccctgatcgtcgtctgcagcgggctgctgctgctctggcactggaaatggccgcaatcgaaaataaatattcccactatctcgttgttatttggcatgctatgggcatggcacgtagtgacaaaagcgatgctattgacaccgccgcattttaactatctggtgatcgccctattaagcattctgtttatcggcaccatcgctttttccaataatatcactgcctttaccctccactctttaccaactttccttgcctgcctgataatggcggagggggaacaatggttgcgtatgacttactgctttatgctgcctatagccggtattaccctgcaaaatattatccagaagcgcagcgatgcctttacgcagggtttaatggataaactgatgcatgaacgcaatacgctcaacgatctcagtatgctcgatcccctgaccggtttgtataatcgccgcggactgcagaaccgcctcgataccctgctggcgctggacggcgacaaccactacgtgctgctcctcgatatcgatcacttcaaggcctataacgatcactatggtcatatgatgggtgaccaggcgcttattcgcgtctcagctgccattcgcaacgctgtacgctcacgcgatattgtcgcccgctttggtggagaggagtttatggtgctgctgaccaatagcagcgaagaaacggcctggaagacagccgaacgtatacgtcagcgggtctatgacctgaagatcccgcatatgtttaatgaaagcgtcgccaccaacgtcaccatcagtattggcctgacgccgctcattaatgacaacattgaacaagcgctggcgcgcgccgacggcgcactctatgaggccaaaaataaaggccgcaacattattcttgccagttga

SEQ ID NO: 236089 - DNA, 186 bp, Klebsiella pneumoniae
atggcgtcggcgatcaccttgtcgatcccggcgccggaggcagcgctgacggtggccgccagcgtcccttccaccagcggcgcggcgcacagtcgcaccttcgcggcaatcgccggatcgagcagatcgagggcggtttcggcgctgagcaacgcgctgccgatatccatcatcaccagcacgtga

SEQ ID NO: 236090 - DNA, 1071 bp, Klebsiella pneumoniae
atgaaaaagctgattaaccgtgttgaagatgtactgaatgaacaattacaggggctggctaaagcccatccgcagctgaccctgcatcaggacccgctgtatgtgacccgcaccgacgcgccggtggctggcaaggtggccctgctctccggcggcggcagcggacatgaaccgatgcactgcggctatatcggccagggcatgctctccggcgcctgtccgggggaaatcttcacctcgccgacgccggacaaaatgtttgaatgcgcgatgcaaattgacggcggcgaaggcgtcttgctgattatcaaaaactataccggcgacatcctgaattttgagaccgccaccgagctgctgcatgagagcggcattaaagtcaccaccgtggtggtcgacgacgacgtggcggtgaaagacagcctctataccgccggtcgtcgcggcgtcgccaacaccgtactgatcgaaaaactggtcggcgccgccgccgagcgcggcgactcgctggaagcctgcgctgaactgggccgccgcctgaacaatctcggccactcgattggtatcgccctcggcgcctgcaccgtaccggctgccgggcaaccctcctttacgctgaaagatgacgagatggagttcggcgtcggcattcacggcgagccgggcatcgaccgccgccgcttcagctcgctggaccaaaccgtcgatgagatgttcgataccctgctggaaaacggcgcttacagccgcacgctgcgccagtgggataccgtcaagggcgcgtggcaggaagtgcagcagagcaaaaccgcgctgcaaaacggcgaccgggttatcgcgctggttaataacctcggcgccactccgctttccgaactgtatggcgtgtataaccgccttgcccagcgctgcgaagcgtccggcatcatcatcgaacgcaacctcatcggcagctactgtacttcgctggatatggcgggcttctccatcactctgctgaaagtggatgacgagacgctgacgctatgggacgccccggttcacaccccggcgctgaactggggaaactaa

SEQ ID NO: 236091 - DNA, 597 bp, Klebsiella pneumoniae
atgatacccgcgcgcggctttgctcaggctcccctgacgcaggacgccgctctccagcaaacgatgcgcgaggcgcagcagatcggcggtctccccggcgagcagctccagctccagttcgcagatcggctcctgatgttcgcccgccttcacttcgccacgatcgagggcaatctcaatctcactctttccttcctggatcacccagcgttcacgggcaaaatcggtgctgaacagcggctggacatgctccgccagcgcggccggaagttccccttgcggccagacctccgccggcaggcgctcaagcgccagctccggtttatccagtggaatattatattccgggcgctggtgcaggccgccgaccacccgaccggcgattttcagcgtcatctcataacgcccctgatcgccgcggatgcgcagccccatatcgtgacgacgcagccagttatcggcggtttcgtaataaatgttcagcaactggcccgcgggcgtatgtttcgcctcgagcgcattgagctgctcgcgcagcgtctctaccccatcctgagcgacgataaacttgagttcgatttcttgagccatgactga

SEQ ID NO: 236092 - DNA, 1197 bp, Klebsiella pneumoniae
atgaccaagataacgactgcaaccccctcgcgcctggtggtcaccatcgggctctgttttatggtggccctgatggaagggctggatctgcaggcggcggggatcgccgccgtcggcatggcgcaggcctttgcgctggataaaatgcagatgggctggatcttcagcgctgggatcctcggcctgctgcccggcgcgctggtgggcggcatgctggcggaccgccacgggcgtaagcgcattctgttggggtcggtgctgctgtttggcctgttctcgctggccaccgcgctggcatggagcttcccgacgctgctgctggcgcgcctgctcaccggcgtcgggctcggggcggcattgccgaacctgattgccttaacctcggaagccgctggctcacgtttccgcggccgggcggtaagcctgatgtactgcggcgtacccattggcgccgcgctggcggcagcgctgggcttttccggtctcgccgcggcctggcagattattttctggattggcggcgtggtcccgctgctgctgatcccgttgctgatgcgctggctgccggagtcgcaggcgtttcagcgcgcggaggccagcgtgccgctgcgcaccctgtttgccccggggcaggccgccgctacgctgctgctgtggctgggttattttttcaccctgctggtggtctatatgctgatcaactggctgccgatgctgctggtgggccagggattccgtgccagccaggcggcgggggtgatgttctctctgcagatcggcgccgcctgcggcacgctgctgctgggggcgctaatggataagctcaccccgctgcggatgtcgctcctgatctacagcggcattctggcgtcgctgttggcgctgggcagcgcgtcgtcgctgactggcatgctgctggcggggtttgtcgccgggctgttcgccaccggcggacaaagtgtgctttacgctctggcgccgcttttttatcccgcggccatccgcgccaccggggtgggcaccgccgtggcggtggggcgtcttggggcgatgagcggcccgctgctggccggcaagatgctggccctcggcaccggcaccgtcggggtgatggcggcctcggcgccgggcattgtgctggccggcgtggcggtgttctggctgatgcatcgccagcagcgcgcggccatggtctga

SEQ ID NO: 236093 - DNA, 801 bp, Klebsiella pneumoniae
atgacgacactagccgcgttatcgctgcactttccctttgtctggtatggctttctactgctgttcggcctggcgctgggcagcttttacaatgtggtgatctatcgtctgccgcgcatgttgacccagaccgcggacgacgagcggataaccctcagcaccccgggctcttcctgcccgcagtgccgccagccgatctcctggcgggacaatatcccgctgctcagtttcctctggctgggccgtcgcgcccgctgctgtcaggcgcccatcgcgtggagctatccgctgaccgagctggccaccggcctgctgtttatcctcgccggagctttgctggcgccgggcctgccgctggcgggcggcctggtgctgctctcgttcctgctgatactggcgcggattgacgcccggacccagctgctgcccgatcgcctgactctgcccctgctgtgggccgggctgctgttcaatcttaacgaggtgtacattgccctgccggatgcggtcgccggggcgatggccggttatctggcgctgtggtcggtctactggctgttccgcctgctgaccgggaaagaggcgctgggctatggcgattttaagctgctggcggcgctgggcgcctggtgcggctggcaggttctgccgcaggtgctgttgctcgcttcggccagcgggctggtgtggaccctgctgcaacgcctgtggacccggcagtcgctgcagcagccgctggccttcggcccctggctggcgctggccggcgggggtatttttctctggcagcagatggtctag

SEQ ID NO: 236094 - DNA, 207 bp, Klebsiella pneumoniae
atgacgtgccgggcgcgctcatcaatcaccaccaccgccgggtcgctgagcttgtcattcaccagcggggccagcacccgcacggcaatcccggtggcgccgataaaaatcagcgccgagaagctgctgaacgcctcgcgggcagcgctggcaaagccgccgttgaaggggataaacccctcttcctgcagcgcttcgctgctgtaa

SEQ ID NO: 236095 - DNA, 303 bp, Klebsiella pneumoniae
atgccgctgcgtcacgtgggagatttcgtgcgccatgacagaggccagttcgctctcgttatcagagtagcggaacagggcggagtggaggaccacattgccgccgaagaaggcgaaggcgttgatctggtcgttattaatcaaatagaagtggaacggggtacgcaccgagttggcgtgagccaccagacgcatacccagcccgttgatatattgcaccagcagagggtcgttgatcagcggcgcgctaccgcgcagttggcggacgtagtaatcccccatctgcatttcctgaccgattga

SEQ ID NO: 236096 - DNA, 471 bp, Klebsiella pneumoniae; identical to SEQ ID NO: 136690

SEQ ID NO: 236097 - DNA, 714 bp, Klebsiella pneumoniae
atgacggtcgaagaccaccggctggacgccgtggcgcaccagcatatcggcgcaggccagcccggccggcccggcgccgataatcgccacccgcttgccgctcggcttaacctgcgaaaggtccggacgccagccgctggccagcgcctggtcggaaatatagcgctcaatattgccgatggtgactgccccgctttcatcgcgcagggtgcaggcgccttcacacagccggtcctggggacagacgcggccagtgatctccggcaggcagttggtctgatgggaaagcgcgaccgcggcggcgatattccccgctttaaccagctcaatccactgcgggatatggttatgcagcgggcaggtccattcgcaaatactgtgctccccacacgtgagacagcgggcggcctgctgctgcgcctgctccggggtgaacggctgatagatctcctcaaagtggctcttacgcacctccgccgccagcttatccggctccccgcgcgggggcgtcatcgccatttgcctgaccttcgcgccagcattgggctggctgcagagcggcgtagcgcgctgccacggctgcacctcctggcatgccgagcgcagtcgccgctgcttcgccagggtgatcaacgtctcatcgtcggcgagggtcagcgcctgcgcgggacagttttccacacaggccggccccgcctcgcggccctggcatag

SEQ ID NO: 236098 - DNA, 1233 bp, Klebsiella pneumoniae
atgcaaacaacaacggccctgcgcctgtatggcaaacgagacctgcgcctggaaacctttaccctcccggcgatgcaggacgatgagatcctcgcccgggtggtcacggacagcctgtgtctttcctcatggaaagaggccaatcagggtgccgatcataaaaaggtgccagatgatgtggccaccaggcccattattatcggtcatgaattctgtggcgaaatccttgccgtcggtaaaaagtggcagcataagtttcagccagggcagcgctacgtgatccaggccaacctgcagttgcccgaccgacccgactgccccggctactcattcccatggatcggtggcgaagccacccatgtggtgatccccaatgaggtgatggcgcaggattgcctgctcacctgggagggggatacctggtttgaaggatcgctggtggagccgctctcctgcgtcattggcgctttcaacgccaattatcatctgcaggaggggagttacaaccacgtgatggggatccgtcctcagggacacactctgatcctgggcgggacggggccgatggggctgctggctatcgactatgcgctgcacggccccatcaatccttcactactggtagtgaccgataccaataagccgaagctcagctacgcccgccgtcattacccctctgagccgcagacgctgatccactacctcgacggccatgaggccagtcgcgatacgctgctagcgctcagcggcggccatggcttcgacgatatcttcgtgtttgtgccaaacgaacagctgatcaccctggcctcctcgttgctggctccggacggctgcctgaatttctttgctggcccccaggataagcaattcagcgccccgatcaacttctacgacgtgcactacgcctttacccactacgtcggcacctccggcggtaatactgacgatatgcgcgccgcggtggcgctgatgcaggcgaaaaaggtccagacggcgaaagtggtcacccatattctcggcctgaacgccgcgggcgaaaccaccctcgatctgcctgccgtcggcgggggaaaaaagctggtgtataccggaaaagccttcccgctcacgccgctgggcgagatcgccgatcccgaactggcagcgattgtggcacgtcaccatgggatctggtcccaggaggctgaagcgtatctgctggcccacgcggaggatattacgcatgattaa

SEQ ID NO: 236099 - DNA, 240 bp, Klebsiella pneumoniae
atggcgcagggtggcgtcatccggcagctgttggccagcctgaccagcattgagcttaaccgattgcatcaaaccatcgacgtcgctttccagcacgacgccattattgacgacggccgctactttatcgaccacctggggggcagcgaaactggtattcgcgatcatggcgataccgagaagcagcgttttccagttcttcatactttttccatttcgattaaccgcaaatgcggatga

SEQ ID NO: 236100 - DNA, 2358 bp, Klebsiella pneumoniae
atgattgatagcttaagcagcctggcgcagaaggcgatggatgaagccctgagcctgtcccgctaccgggttgctgtgcatgaatgcagcgatttcctggatgttctgcgttacagcgcggtggaatccctcagtcagccctggcggtatgacgtggcggtcacctgctcctctgcggatattgcctgtgacacgttactgctgaaacccgcatcatttactttcatgaccccggtgtttgacggcaccccggcgctgccggtccggacggtttatggcgtggtggagtcgtttcgccggatatccacgtcaaatgacgatacccgttatgctatgacgatcgttccccgcatcgcccttctggactatacgaaagggagcgaaatctatctcaatcagtcagtcactgaagttgtggaaaaggtactgcgtaaatacggtctggaagggcctgatttcgagttccggctttcccgcgaatatccgtcccgggagctcatcacccagtggcgggagactgaccttgagtttatccagcgcctgctggcggaggtgggtatttactggcgctatgaaatggacagccgacttgaacaggacgtggtgatttttcaggacagccagcagcagtatgaatttggcgtcacgctgccactgcgcaaccaggccgggatgagtgacagcggacaggagagtatctgggatattcagacggcatataacgtggtgagcggaagggtggccacccgggactacaactaccgggaagcgctgacgccgcaggacagcacggaaagtatcagctgtcaggaagggatcaccgccggtgaaatttaccactacgcggagccgttcctgacagcaggtgacgcggaaagcaccgagaacggtgcgttctttgcccgtctgcgacacgaacgcattctgaacgcgcaatatcatgtcaccgggcattcctccagccctcatctggcgccgggtcaggttctggaaacggacggctccttacccgatgccgttaaggaaggtatcgtcatcaccacggtacgcaccagcggttcacgtaaaagtagctttacgctgacgtttgagggtatcccctacagcgaaaccgtctgttaccgtccggcgctgctcagtcgcccggtgatatccggctcgctgcctgcccgggtggaaagcacacagaaaggtgatacgtactcctggctcgacccggagggccgctatcgtgtgaaactggactttgaccgcaacagtaccgaacagggttatgcgtatctgtggctgcggctggcgaaaccctatgccggtgatacttacggcttccactcaccgcttctcgacggaacggaagtggccgtcgtatttgacggtggagacccggatcgtccctacatcgcttatgccctgcatgattcagagcatccggaccatgttaccagcgagaatcatacgcggaacgtgtggcgcacgccggcgaacaataagttgcgaatggaagacaagcgcggcgaggagcatatcaagctcgcaacggaatatggcaaaacgcagctgaacatggggcacctggtcaatggccagcgtgaaaaacgcggggccggttttgaactgcgaacggatgagtatggcgcagtccgtgcggcaaaagggctgttcctgacggcggatgaacaggccaaagcccaggggccggtactggaaatggcccctgccattaatcagattaaccaggcgaacagccagatgcaggccctgaacagcgccgccgaagccgccggagccctgatctgcgacatcaatacccagataaattttgtgaccgacaaaatcaaagacctccagtctgcggtcctgctggggagtgcgccgcagggggtggcactgacctcaggcgaacaccttcagctcagcagcacccgtaacaccatgatcaatgcaggccagcatcttgatatcggtgcgatgaaaaatctgtcggtaacggtggaaaaagcccttggtctgtttgtgcataaagagggggctaagctcgttgccaaccagggagacatcgagattcaggctcaacacaacacgatgtccctgttttctgaaaaacagctgacggtgaccagcagtgaagatgaaattattatcagcaccccggaaacgctgacgctgaacggcggcggatcttacctgaggctgagtaagaacggcattgaacatggctcatcaggtgagttcattatgaagacgtctgactatctggtaccaggatcgggcgcaaatctccccaacgaaacacccaatttcagcctgacggatatcactcaggaaagcaaaatcagcagcaaatctttcaatgactaa

SEQ ID NO: 236101 - DNA, 2745 bp, Klebsiella pneumoniae
atgctggacaagaatgtagcagttagtgttttaaacactcaagccctggccagagcgaaaattaacgccgagaattttaaaaatggcatagataaaaagcttaaatatggcgagtcaaaatgtgcccgctatgttaaaaaagcattaatcgctggaggggcatctgcaaaaaattcaggaattgaatcagctaaaaattatggcccatggctgcttgaaaataactttaaagttgtgggtggcgctacaacagtgtgtactggcggtgtattcacaatttctggtcagcaagtgggggatgttgtcgtaatccaggcagcaccacaccatgtgcatggtcatatggcgatgtttaatggtacacactgggtatctgattttgtccaggaaagggggttctatcctgcccagatatatcgtgatcaaaacataccctatacactttatcgttatggcgataataccacatcagagcagaacgccacggctacccaaaaaggaaaaattaaaattgtctggccgatcccttctaataaccggggaagtgagttcaataatcaggaagagatcctctctcatgtcgggggggaatccaccgggcagtatatgattggccgtagcgggatgtggcatggcgggatccatatcacggaagcaacgaccccgtggtgtgctctgagtggcaagtctcctcttgaagcattagatttcccagttccctttaaaggtgagcaggctgtgcgatgcatggctgatggagaagtcgttgcttatcgtgtctgcaaggattatctgacgattgcatgggaatccggcccactgagcttttccggttcgtttgttctggttaaacactttattcaaccgggggagaaggaatccagcgggctgtatttctataccctgtatatgcacctggctccctattcagcctatagtgtcaatcaggcggaaaccaagtggacagtccaggatacgctttctgcctacgatccagaatgggtcatgaccgccagtaccaacaataaaagtatcagtgaaagctatcgcaagggtacgatcccaaaaggatctattgttgagtgggataaaacagacagcagcctccataccgttgcatttaataagcgagagtatggccttgttacttttgttagcctctcagaacaggcgttgaaaaagggcaagaaaacatccctgaaaccagggcagcaatactggatgcttgtggacaaaaacaacctgtctcctggcactgatggggtggtacagccttcctggtggcagaaactcatgccgccagcaaaagaagcgatgaaatttgaccaggtagtatgcccgactccctttgttatcagtgcaggtgaccctgttggtcacatgggatattaccaggcacctaaggatggcggatatgaagcgcgataccaggttcatatcgaatgcacgagtatggatgataatctggaaacgttcctgaccaaccctgagcaggtgggagaaaagaacccactctggctgaagtacgctccgggcctagcgttgtacaaaaaagatgttgcaacaggaacattcacaaaggatacaaaggtaacaaccagggcggggatccttccactgagtcaaatgcaaacagaagtcgataagtcgaccaaacaggaatactggcagctgcgaccagaaaatgcttacgtccctaaaggccaggcggaacctcaacttttgtcgcagtatgatctggcaaagctgggcttcagaactgaaaccgcagaaccagccagctttgattacctggatggaaaaaaccagcccactggattcttccgtaacctcatcgattcgctctaccaggccgcgatagatgatacacgaaccagtcatgctctcgtgaagcataattaccagcgcctgctggataaaattgacagcggaagcgaccgctattctccaatggagtactggagagcacttcacaatcccgactatcgtgacgttattcagaaaacaattgtaaaacatccaagcgactggtacttcaaaaaaggcgatgctatctggcaaccattcctcaatgcgctgaaaaaagatgccccggagtggaagaaatatagcgaagattttatcgataaaatggcatggatgcaggatgttacatccgaaaaactagggccttcattgtggcatatgcaccccttaaaatttttagcctctctaattcagactaatgtaaatattagaatacttcgtttacgtgcatttctacgaatgatccgcattggtgaggggaccattcaggaagacggatacagaacgatgtttactggtgcaaaatttacagattttagtaaacaccccaataccagacatgaagctaatggtgttgtttcgactgctgctggagcttatcaatttttatacgggacatggagaaatctgcaacgtagatattctttctcagatttcagtcagagtaatcaagacctcggttgtatagcgctcattgcaggtcgaaaagcattagacgcagtaatgcaggacaagattagcgaagcaatacatttatgtcgtattgagtgggccagtttacctggttcaccacatggtcaaccaactgcaaataaaaaaatgatcatggaaaaatatgaagtctacttagctgaagaaaagctaggtaaaacaagtttacacgccacttcagaagaaatgacgaaatttattgaagataattatccggagtatttatga

SEQ ID NO: 236102 - DNA, 1029 bp, Klebsiella pneumoniae
atggctgccctcgaagctggcgtagaccgtggtcaggtcgtcggttttgttatagacgctgttatccgagttatcggagtagcgcaggatcaccttgttcaccccgctgtcgttggtgtggctcagcaccagcccgccctgccaggcttcgagacgcgcgtcgctgtccaccgccttcgagtcaaagccgtagttggcgtacacctcgacgtcgatcggcccggccttgatgttgtgggttttggtggtcagcgcgtagtggccgttgtcgccggtgtcggagctgccggtacaggtgatgcgcgacgggttggtctcgtcggccatcacttccgggctgcaggatttcacctgcgacaccgccgccacgtcgaactgcacgccgccgatatcaaagttctttaccccggcgccctggccgtcgtggttcatccagaagtagtcgttgatcccctgttgcggacgctggtggaagtcgcggccggcccagagataggcgttggggttggattccagcacgttggtgacgccgacgtaggccttcttcaggttaacttcgtcgctccagtggtcgaacatcacgttaagatcccagatagccccctgcgcgcttttgaaggccttgctgatctggaattcgccgccgttgctttcgttgcccaggcggccgatcgccgaggcgccgttataggagccgtcgacgccgacatatttctggtcgccggtctggaagtgggcgccatagcgggcgtagccgctgaacttgaggccgaacggaatggccatatccggcgaggcggcggtggtctgcgggttggtgatcacgtcgacctttttgtcggccgcggcgtcgatttttgcctggcgttcggccagcgctttatcaacggctttggcgacgatggcgtcgatctgttcctgagtaaattcttgcgccattacagaggtaagcggaaaaaacgcggcgataaccgccatggtgaatggaagtttttttatcattgtcatgagtttctcaatataggttaa

SEQ ID NO: 236103 - DNA, 1278 bp, Klebsiella pneumoniae
atgaacggtctggtgtttcccgatcgcacgccgcatccgtcgctggtggaggcgaagcacgcccagcagtattttcagttcacgctgctgtcgacctcgccgctgcgggtgcgcatcatcagcgaatacctgttccgcccaaccgataacgaagtgctgcgctggcaggtgcaggcggccggtgaacccctgtatcacggcgacctgaccctggcgctgccccctgagggcagcgacgagataacgctgctcgatagcctgatcctgcctgaaggcgcccgcgcggtgtggctgacgctggaggtgacccagccccaggcgaccgcctggtcagaagcggagcaccgcgtcgcctggcaacagtttcccctgcccgccccgctggcgctgccggcgcccaccgtgtctgccggcgctccggatcttatcgtcagcgatgaggtctggcagatccgcgccggttcgcaatgctggaccatcgatcgccggacgggtctgctgagccgctggtcggttggcggtcaggagcagctgttgacccccctgcgtgaccagtttattcgcgcgccgctcgacaacgacatcggggtcagcgaagtagagcgtatcgaccccaacgcctgggtggagcgctggaaaagcgccggcctgtacgatcttgaggcgcactgcgtccagtgcgatgcgcagcgcctggcaaatgaaaccctcgtcgactgccgctggcactacctgcgcggcgaagaggtagtgattgtcagccactggcgcatgcacttcactgctgacggaaccctgcggttggcagtggacggcgaacgggcggaaaccctgccgccgctgccgcgggtcgggctgcacttccaggtggcggatcagcaggcgccggtgagctggctgggtctggggccgcatgagaactaccccgaccggcggagcagcgcctgcttcgcccgctgggagcagccgctggcggcgatgaccaccccctacatcttcccgacggaaaacggcctgcgctgtgatacccaggcgctggactgggggcgctggcacatcagcggtcatttccacttctccgttcagccatggagcacccgtcagctgatggagaccgaccactggcacaagatgcaggccgaagacggcgtgtggatcaccctcgacggcctgcatatgggggtgggaggcgatgactcctggacccccagcgtgctgccgcagtggctcctgagccaaacgcgctggcagtacgaggtctcattgcgttgcttttaa

SEQ ID NO: 236104 - DNA, 2487 bp, Klebsiella pneumoniae
atggatacctcttcaataattaccggcaccacccttaaccgttaccagctggatattccttcatgtacagcatcgctggatgtggaagaattcagtggggcagaaaaactgagtgaactttattattacactattacgtttaccagcgcagagaaaaatattgatgccgcacagctcctgagcaaacccgccatgctgacgatgggcggcggcgcactgcagcagctggcggactgcaaacgcgtccatggtgtgattaccaccttccagcgcgtcaatcgttctgaagatcagtcgacctatcagataaccctccagccgtttctctccctgctggataaacagtttcgcagccatcgttttttcgtcaacaaatcggtaccggaggtggtggagcaggtattgcaggaacatcacctgcatgactgggaatatgagtttaatctcaagcaacactatccacggcgcgagcaaattaatcagtatcaggagagcgacctggcatttatccagcgcctgctggcagaggtggggatattttatttcttcaccctgcaggaagaggcgcagagcgaagtagttcacttcgccgacgcgcagcgggcgctgatgttcgataaaacacttcctgtaaacagcccgtccgggatgagcgacagcggtacggaatcgatatggggtctgagcatcacccacaacgtcgtagaggcgaacgtcactacccgggattataacccccgcgatgcgcagagcgttctccagtcggcaacagcggatatgacccggggaaatggtgaaggcatcacttacggtgaggtataccactataagcttcgccaccgggagcgtggcgataaaatcgacccgcagacggagaccgccaacttctatgcccgcctcgaccatgagcgttttctggctcaccagacgcttattaccgcgatcagtactgcagcctggctggcgccggcccaggtgctgaccgttaccgacagcctgccgtcgaccctgcctgcgcccgtacaggatccgctgttaatcatcggcaccggttttaccgccagccgccgggaggcgctgcgggtgtccctgctggcggtgccctacagcgaaacattgtgctggcgtccgccgctgctgccgcgcccgaaggtgactggcaccatgacggcgcgggtgaccagcgcgaaggcgaatgatatctacgcctggcaggatgcgtccggcctgtaccgggtgaaatttgacgctgacagagaggagaaagggcagggtcaggaaagcatgccggtgcgtctcgccaaaccctacggcggcgacgtgtacggctttcacttcccgctggtccagggcacggaggtggcgattgctttccacgaaggcgatcctgaccggccgtacattgcgcatgcgctgcacgactcgcggcatgtcgaccctgtgacggagaaaaacagcacccgcaatgtgattcgtactccggccaacaataagctgcgaatggaggataagcgcggcgaggagcatatcaagctcagcaccgagtacggcggcaagacgcagctgaacctggggcataacgtgaatgcgcagagggagttgcggggcgagggtgcggaactgcgtacggataaatgggtgagcatccggggcggtgcgggggtgtttatcagtgcggataaacagccttcggcaggcgacaggatgctggcaatggaggaggcgattgcgcagcttgaaaatgccctgggtattgcgaaaagcctggcgtcggcagcggaatcggctcaggccctgccatcggataccggcaaccagcagacgctgaacgatgcgctgaaagagctggcgcagccggggatagtgctgaatgcgccgcagggcgtgagcatcagcagtccgcaggcggtacggttgtcttcgggtagcgccagcgtggggattgtgtcacagcagaatacggacattagtgcgctgaaacgttttacggtggcggcgggagaagccgtcagcctgctggcgcgaaaggcggggatgaagctgtttgcggcgaagggaaagattgaaatccaggcgcaggatgatgcgctggaggcgacggcgaaaaaggatatcaccgtgaccagcgtggaagggcgagtggaaatcacggcggcggaggaactggtggtgaattgtgcgggagcgtatatcaggctaagtggtggcaatatcgagctgggctgccctgggaatattctgctgaaatcggccaatgtgcagaaaatgggtaaggcggattttcgggtgcctccgctggaattgcctaaagggttcgaagagcgttttactgtcaaagatcagaagaccggtgccattgtgccatttgcccgttaccgcatcaccactgaaaaaggcccggtattcgaaggccgggcagatgctgaggggaaaacggccagcgtttataccgcattgcctgaatcaataaaaatagagctactgtga

SEQ ID NO: 236105 - DNA, 3162 bp, Klebsiella pneumoniae
atgactaaggtaaaagtcaaaacactcatcggctctgttgtcactgtcgctttttttatgacggtcatcgtggcatttttgttatatgcctttccggaaaacgtagcttcggccacgggattcggtccctatgacggccagcgcatactcacattctgcgccatactggttgccgcgttgtttttactcggctggctgacagagaaggcttttgacatcgccggtaaatccggattgtatttccactggggacagaaaaagtctcagattaccgctccggtgacgaacaccatcgccagtgaagacgacgacgaacaacctgtcttcagcgaagaggcggtgtccgagcacctgcggtttcgctatgggcgccgctggcagcgtaaggtgcgactcctgctggtgatgggtaatccggatgacgtccagaaagcggccccgggcctgtgtcatgacctctggcaggaaggcgacggcaatgtgctgatttatggcggtgatgcgcagtcacttccggataagatcttcctttcaaaactgaagcgtctgcgatctggccagccggttgatggcatcattcaggtgatgagtacctcagccctcccgacggatagcgaacgggatgccttcttgcgttgccgccagaaagccgaccacctgttaggctggcaggcgcctgtctggctgtggctgactgataaggcagcgggtgctcagcaggacgcggaaacggctgcgacaggggtcatcttcgggccggaaggcaccgtaaaagaggctggtaaggcattgactacgctgtctcagcaccttcaaaaagccggtatggcgcagatactgagtaatccggcgcatgatggcctgctgcagttatcctcccgcctgagacatgaactaaaaaccagtctgaccgttttgctcagcggactgatgcagggatctgcggcctggcgtttacgcggtgtcatgttcagtcctgaaccggctgttgccggaacggtgccgaacacgcgcctcgacacgccgacctggaaagccgtcattgatgacagcgatgccgtcagaggcaggaaactgggcttcaactggctgaagatgctgcggttaatcctgctttccctgatagtcctgtggggggccggtacactgctgtccctcgtcgttaaccgtacccagatttatcaggcgcaggagacggccaggcaggcagcggatactgcaaaaccactggctgaacgcctgcacaaccagctcgtactacagcaagccattgcccgtctgcaacatcgcgaagcgaccggcgctccatggtacacccgctttggtcttaatcaggacagcgacacgctggctgcactctggccgctgtatgcgaaaaacaacgtacagctgatgagggatgccacagcagaccatctcaagcagcagctgaatgcctttgtgcaacttcctcctgccagtgatgcccgtacgcagggcacacagcatacctgggacgtgctcaaaagttatctgatgctggcccgtccggacaaagcagacgcaagctggctggcaaaaaacgtgctgacggcctggccgaaacgccagaatgtgccggatggcacatggcaggacctggcaccaaaactactgggtttttatgcgcagaacctcccgtctcatccggaatggaaaattaagcctgacgctgaattaatcagcacggtccgtcagatcctgctcaagcagattggccagcgtaacgctgagtccgggttgtaccaggacatgcttaagcgcgtggccagcaactggcctgatttaacgcttgccgatatgaccggcgataccgatgcctcaacggtattcagcactgacgaagtcgtcccgggtatgtttacgcgccaggcctgggaagagcaggtacaggatgcaattaacgaggtcgttaagacacgacgtgatgaaatcgactgggtcctgacggataaaacgcaccaggcaggaagtgatatctccccggaggcgctgaaggcccgcctgacagaacggtattttaccgattttggtaatgcctggctgaacatggtcaacagcattcagtggcaggaagccacgtctctttctgaagcaattgcccagctcagtctgatcggcgatgtccgtcagtctacgcttgtggccttaatgaatacgctggcctggcagggaaaaacaggagagaagggtgaggcactggctgattcgatagtggattcagcgaaaaaactggttggtcggaaaaaatatacccgacagttcattgagcaggcgcaggggccgaaaggtccactggaggacgtttttggaccactgacgggatttatggaaggtaaagagggcactggtagcaacggtaacctcagtttccagtcctggctggcccgcgttacccaggtgcggctgaagcttcagcaggtcaccagcgccccggatccgcaagcgatgtcgcagatgctggcacagaccgtattccagggtaaagccatcgacctgacggacacccgcgattacggcagtctggttgcggcaagcctggggcaggagtggaacggatttggtcagtcgttgtttgtgcaaccgctggatctggcctggcggcaggtccttgccccggcagcgggtagtctcaatacccgctggcaatcgaccattgtcgaacagtggaataaggcctttgcggggcggtatccgtttaaggccaccggcagcgatgcctccctgccgttactggctcagttcctgcgtagcgactcgggtcgaattactaacttcctgaaaactaatcttggcgggatcctccaccaggagggaaatcgctgggtcgttgatccttccgcaagtcaggggatggttgtcagtccggatttcctccgggcgattaatcagctggcagagctgtctgatatcgtgttctctcagggcgatgcaggtattcacttcgaactgatggcgcgtccttcaaaggatgttgccagagtgcaattgaccctcgatgagcagaacctggactacttcaatcagatggaaagctggcaaagcttcacctggccggggaatagctactatccaggcgtatcgttgagctggcgtagtgtaaacagtggtatggtacgacggcgacgtatatacggaaggtga

SEQ ID NO: 236106 - DNA, 1599 bp, Klebsiella pneumoniae
ttgcgccagagccagatcgtcctggtcgttccccgacaggtagagtcccgaggcgtagacccgttcggcgtcctgcggctggcggttgaccatcgtccgcatcagcgcgtcggcctcctggcgttcgccggcgctgaccagatcccgcgccagacggtaggttatccagacgctgtccggatccagcgccaggcgccgacgctgcacttccgccgcctgcgcccagttgccctggctctccagagtctgcgcctgtttctccagccggccgttagtcaggctgcgctcaatatcatcgatactgcgccgctgagcgggagggaggccggcgatccaggcgctggctttctccggcgattcggcgcgatagaggttggccaggccgcgcaccgccaggttattgccgcgatccaggcgcaacgcctgctggtaatagcgctccgccgccgccgcctctttgcgcgccgccgcgacgtcccccagccccagcacggcatagctgtcggtgcgatcgacccgctgcgcctgggcataatagctctgcgcctgcgaaagctggccggctttcagggcgttatccccctgctttatcagcagccagtagcggttagtttgcagcaggctgtcccacttgccgcggttcgggctgtcagggtccatggcaatcgctttactgagctgcgccactgcccgcgcgcggtcgccgcgctgggaataggcctggccgagagcgcccaccgcgtcgctgtcgcggctgtcggcctgaacggctttctgcagatccgcgaccgcctgcgtggtattcccggacttgaccgccgccagcccttccgagcgggcgcggaaagtcggatcctgcagctgcgcctgctgttggtcgagcagaacgcgggcgttcgccgccaccgagccggtgggaaactgcagaagaaattgctgcaacgcctgcacgctggccttactcaccggcatgcttttcacctcactgaaccacatatcggcggcgataccgcgtcccgaggccgatcgggccatctccgccagataggcgaacccctcctgcggtttgttatcggagaacatctgcttcgccagcgaagtcagcaggctgacgttgcccggcgcgctggcgttcagttttttcaactggctgacgccttcgctatggcgggccggcaggcgcgccaccagcgtccagtattcaatggcgacgtcaacgtcatccggcaccccgccgtacagtttttcataggcggcgatggcttcatcgaccttcccggccacgcccagcagtcgcgcctgctgcagcgcctggcggccctcgccggtgttgcttttcatctcattgcgcgacgccttcagctccggggagtccggcgccagcttcgtcagtcgttccagctctttttgcgccccggcggcatccccctgacgcagcagatagcgcatccgcgcggcaatcagctccgggttgttgggatcaatcagctccagacggtacagcgactggcgcaccaggtcttcacgattgctggcctcgccgaggcggacctgctccagcagatgctcctgggcaggcgtcgtcgccgcctgcgctaa

SEQ ID NO: 236107 - DNA, 192 bp, Klebsiella pneumoniae; identical to SEQ ID NO: 121260

SEQ ID NO: 236108 - DNA, 639 bp, Klebsiella pneumoniae
atggctgtcgctgccaacaaacgttcggtaatgacgctgttttctggtcctactgacatctatagccatcaggtccgcattgtgctggccgagaagggtgtcagttttgagatagagcacgtggagaaggataacccgcctcaggatctgattgacctcaacccgaatcaaagcgtaccgacgctggtggatcgtgagctcactctgtgggaatcccgcatcattatggagtatctggatgagcgtttcccgcacccgccgttaatgccggtttatccggtggcgcgtggtgaaagccgcctgtatatgcaacgtatcgagaaggactggtattcgctgatgaacaccatccagagcggtaccgcagcgcaagctgatgctgcgcgtaagcagctgcgtgaagaactgctggccatcgcgccggtcttcacccagaaaccttacttcctgagcgatgagttcagcctggtggactgctacctggcgccgctgctgtggcgtctgccggttcttggtgtggagctggttggcgctggcgcgaaagagctcaaaggctatatgactcgcgtatttgagcgtgattccttcctcgcttctttaactgaagccgagcgtgaaatgcgcctcggtcggggctaa

SEQ ID NO: 236109 - DNA, 237 bp, Klebsiella pneumoniae; identical to SEQ ID NO: 121649

SEQ ID NO: 236110 - DNA, 309 bp, Klebsiella pneumoniae; identical to SEQ ID NO: 150634

SEQ ID NO: 236111 - DNA, 846 bp, Klebsiella pneumoniae; identical to SEQ ID NO: 234325

SEQ ID NO: 236112 - DNA, 1728 bp, Klebsiella pneumoniae
atggatgcagaaagtatccagggatatgcacctgtagttcgcgggattgcgaaaagtaacgcaaaagttattattaaacaaagtggatatgttatttatcaatctttcgttcctcctggagcctttgagatcactgatctgtattcgacaggtggcaatggggacctcaatgtcactatcgaagaagctgacggcactcaacaaaattttgttgtagcttatgcttcacttcccgtattacgtcgtgaaggtagtttaaaatatagcattacatccggccaataccgctcctccgacggtagcgttgactatactccgttttcacaagcaacggccagctacggtttaccacacaacaccaccctatacgggggattccaggctgcttctaaatatcaatcagtggccattggcgtcggtaacaacctgggcgtacttggtgctgtttctttagacgtaacacaggcctggtcgacgaagcaagatcaagataagatatcgggccaatctgtgcgtatacgctacagcaaaaacctgaacgatataggcacaaatatagcgattgcaggctatcgttactcaacgagcggctttaataccctttctgatgttcttgaaacctatcgtgatgactataaatactactataacgatcgcgttaaaaatagaactgaaattaccgtaagccaaagcctcggtgataaattaggctattttaacatcggcggcgtaatggaagattactggaatcagcgccgcaggaataactcacttaacgtaggttacagcaatagctggagcggtattacgtataatttaaactattcccattctcgctcctcaactgactatgagggttacggtagaaactattctactgataatatattttcattcaacgtcaacattcctcttgatatttggatgccgaatacttgggtaacctatggcttgaatactagcgatccgggctcaaccagtaatagtgtgggtttatctgggcttgcgttggcagataataatctgagctggaacttgcaacaacaatacgataatcgagacttcagtagtggtaacgctggcgtcgactataagggtagctatggtgaaatttacggaagctacaactatgatcatgattggcagcgtctaaattatggtattaacggtggtgtaattgtgcaccgcaatggtattacagctggacaatcttttagtgatacaagtgctcttgtcaaagcgcccggtgtgaccggaacacgtgttataggaaataccggtgtgaaaacagactaccgtggctatgcgatagttccaaatattacgatgtatcggagaaatgatgttgttcttgatacagaaacaatgcctgaagacgttgatttagatacaaccaccgctacagtggtgccaactcgtggggcgattgtattagctcaatatacaggtaaaaaagggatcagagctatgtttcgtctagttgataccaataataaaccagtcccatttggtgctatggtaaacagcgttgcagagacgtcacaagaagttcgtaatggtatcgtcagtgataatggtcaggtttatatggctggtttgcctttggaaggggcactatcggttcagtggggtaaaaaggcttctcagcagtgtcgtgcaaattatcaattttcggatgctgaaaaaacaagcggtattcaacaaagtcaacttgtgtgccactactaa

SEQ ID NO: 236113 - DNA, 198 bp, Klebsiella pneumoniae
atggaaagtaaaaccactgaattttttgctgatcttgaacgcgaaaccgatgaaatgattaccgcacttaattatcttctggcagcaagtgaagaggataataaggcgtttcttgcctatctcgaagatgagccgctaccggagttgccagagttagatttagagattcctgatgagcttctggattgtgtctggtaa

SEQ ID NO: 236114 - DNA, 639 bp, Klebsiella pneumoniae
atgaaatctaatcgtgtttacgcatatctccgtgcctccacatcggaacaggacgccagccgcgctaaggaggcattgcaggagttcgccaaagaacacagctacacaatcgccgctgaatttatcgagaacgagagcggggcgagtcttgggcgcccagaactgtttaatttgctgaaagtggcgcaaccgggtgacgtgctgctggtcgagcaggtagaccgcctgagccgcttaaaggatgaagactggaagactctacggcagatgataagtagcaaagggattagggttgtagcgttagacctgcctacatctcacatgctgctgaatacaggtgatgaatttacgtcgcgtatgtttgaggcgctcaattcgatgatgctcgatatgctggcagcaatagctcgcaaagattacacggatcgccagcgtcgtcaggaagaaggcatcaagaaagccaaagagcaggggctatacaaaggtcgtccagtaaacgagaagttgcacaaacagatactagcgcttcgtcaggctgggcactcgtatagccagatacaggagctaacgggggcggctcgcaccactatcagcaaagctatcaacggtaagaatggcactgttgagccatctatttaa

SEQ ID NO: 236115 - DNA, 438 bp, Klebsiella pneumoniae; identical to SEQ ID NO: 208794

SEQ ID NO: 236116 - DNA, 552 bp, Klebsiella pneumoniae
atgcagccgcctatctcaatatcagccgcgctcgatttttcgatttccgtcgattcattccaacattcccgaagccagtcaaagcacgcctcaatgcaggcagaccccgccttgtgtggacacctgagcagctcgacgctttcgcgttatctttctggggtgatcgttcacatgggtaatctgacaagaaccgaagtcgctcgaatgattcagagcaaattactgagtggcggcaagctgacaccgaagcaacttgaccgacttttgcagaaaaacggaaatcacgaatgtagtcgcgttatggagcttttgcgttgtaagtggggtatacccatcaccacagactcgaagggctgttacagcgtctctgagagcgatttaagacagtttgccgatgaccccgatgatgttctgtcaggatggaaggaagacgcgaaaaagaatcgtgagtatcgccagctttatcggtttgtcacggcgtttactggattgaccggaatcagcagtgagacaagacgagaggtgttggcggcagttaaagccagaatttga

SEQ ID NO: 236117 - DNA, 387 bp, Klebsiella pneumoniae
atgaacagattcatgatttctgtgctttttatttcttctttacttatttctggctgttcaacatcaggcaaccagcatctaaaaaaagaaacatcacaaagtctgcagtcgaaaatcatcaaaaataaaacaacgaaatcagaaatcattaccgcattcggtcagcccgaaaccaaaactacacttgatagtggcaatgaagaatggacttactcgatggacaacaatcagtttgatgccaccacattcattcccgtgattggactgctgacagggggttcacagacgcaggccaaaacgctggaaatcgaatttaaaggcgaaacggtcagcaagtggacgttctctgaaaacagcagcaagatgaaaaccggtcttattcaataa

SEQ ID NO: 236118 - DNA, 321 bp, Klebsiella pneumoniae
atgaaaacatatgcatttaccacactcatcgcttccagttttttgctgagcggctgtaccggtgaaccgtctgagcaggatatttacactgcgatgaataaggtcgtggagcagacgaatgccatcgttaaatccatagcgagaaacgatatcacgcctgacatgctgcggacgttaaaatcagtcaaaaaacacgactgcgaaaaaatatcggataaaagctataaatgcaatgtaacagctgttgtcgataacgaaaaacgcacagcggctgtcgcgctggtcaaaacggatgatggctggcaggtcgttgataagtaa

SEQ ID NO: 236119 - DNA, 237 bp, Klebsiella pneumoniae
atgcgacagtcagacatcaatcaggcattccgcgagtcggtattgcgcaaatccaaaggctaccagtacctgcacacaaaggattttgtgtcagcgctgcgccggcgcggcattcactttacagaggtggaggcgaattcctggatcgcgcgcgagcaaacgtatttcgtcgataagacaccgtaccatagcgaaaacaggctgtggatgatggccaacattgggagggttctatag

SEQ ID NO: 236120 - DNA, 267 bp, Klebsiella pneumoniae; identical to SEQ ID NO: 138787

SEQ ID NO: 236121 - DNA, 393 bp, Klebsiella pneumoniae
atgcaatcccggatgacaaaggacattgtcctgaacgcactgctgatggctgtatggcggcgtaaccccaaaaaacaggtgctggttcactcggaccagggcagtcagtacacaagccatgagtggcagtccttcctgaaatcacacggcctggaggggagcatgagccgtcgcggtaactgtcacgataatgcggttgcagaaagctttttccagttgctgaaacgcgaacgtataaagaaaaagatctacgaaacgcgggaagaagcccgcagcgatatttttgattacatcgaaatgttttattacagtaagcgtcggcatggttcgagcaatcagatgtcaccgatagaatatgaaaaccagtattatcaacggctcggaagtgtctag

SEQ ID NO: 236122 - DNA, 498 bp, Klebsiella pneumoniae; identical to SEQ ID NO: 233982

SEQ ID NO: 236123 - DNA, 666 bp, Klebsiella pneumoniae; identical to SEQ ID NO: 214807

SEQ ID NO: 236124 - DNA, 639 bp, Klebsiella pneumoniae
atgctgattggcggctattcggtctgttacttcgaggcgatggccaacggcgtgacgccgggacttatcgccaccatcatggggatccagcccatccttacgctttgcgtggtggagcgccgcctgcaggggcggcggctgtcagggctgctgcttgccctggcggggctggtgctgctggtgtggcgcagcctggcggcctcgccgatggcgacggtggggatcctgtttgcgctggcggcgctgctgctgatgacctttggcgcgctgtggcaaaagcgcagccgtcaggcgccggcggatgtcctgccgctgcagtatgccgttagtctggggctgtgcctgctgattgccccggtcagcggcttccggtttaccgctaacgccgggttgattattccggtgctgtttctcgggctgctgatttcggtggtcgcccagctactgctgtaccgtctgctgagcgtgggaaatatcgtcaatgtcaccagcctcttttatctggtgccagcgatcacggcgctgctggattatctgctgctgggcaaccggctgccggcggcggcgatgatcggtatgatggcgatcgtcggcgggatcgtgctggtattccgcaccgcgaaggtccgcgccggctga

SEQ ID NO: 236125 - DNA, 1053 bp, Klebsiella pneumoniae
atgaaaaagagtactctggcattaatgatgatgggctttgtggcttcaacagcgacgcaggcagcggaagtttataataagaacgcgaacaagctggatgtgtacggcaagatcaaagccatgcactatttcagcgactatgacagcaaggatggcgatcagacctacgtgcgtttcggtattaaaggcgaaacgcagattaacgacgacctgaccggctatggccgttgggaatctgaattctccggtaacaaaaccgagagcgactccagtcagaaaacccgtctggcgttcgccggcgtgaagctgaagaactacggctccttcgattacggtcgtaaccttggcgccctgtacgacgtggaagcctggaccgatatgttcccggaattcggcggcgattcctctgcccagaccgataactttatgaccaagcgcgccagcggcctggcgacctaccgcaacaccgacttcttcggtctggtggatggcctggatctgaccctgcagtaccagggtaaaaacgaaggccgtgaagcgaagaaacagaacggcgacggcgtcggcacctcgttaagctatgatttcggcggcagcgacttcgccgtcagcgcggcctacaccagctccgaccgtaccaacgatcagaacctgctggcccgcggccagggttcgaaagcggaagcctgggcgaccggcctgaaatatgacgccaacaatatctacctggcgaccatgtactctgaaacccgcaagatgaccccgatcagcggcggctttgccaacaaagcgcagaactttgaagcggtggcgcagtatcagttcgacttcggtctgcgtccgtccctcggctatgtgctgtcgaaagggaaggatatcgaaggggtggggagtgaagatctggttaactacatcgacgtgggcctgacctactacttcaacaaaaacatgaacgccttcgtggattacaaaatcaaccagctgaaaagcgataacaaactcggcatcaacgatgacgacatcgtcgcgctgggtatgacctaccagttctga

SEQ ID NO: 236126 - DNA, 621 bp, Klebsiella pneumoniae
atgatcgaggatcagcagcgatcccttcgccgggaacatggtgatgcgcaggtcggcatattccgcaatacgctgtccccagatcccggcggcgttaaccaccatcccggcgtacagagtgcgggcctggtgaagttggcggtcgtatacctggacgccgcagacgcgatcgccccggcgcagcaggcctgttacttcgcagccggtaaggatctgcgcgccgtgttcgcgggcgtcgagcatattggccgcggtgaggcgaaacgggtcaatggtaccgtccgggacctgcaccgcgcccagcagcgtcgggttgacggcgggctcccggcgcagcgcttcctgccgcgagagcggcgtggcctctatgccagcctgctgacaggcgtcgataaaggtttgctgccatgccaggtcatcttcaggcagggtgataaacagcccgttggtcggttcaatacagtggcgggcgatgcggcgcaggatgcggttctcactgatgcattcgcgggcggattcgttgtcggtcaccgcgtagcgggcgccgctgtgcagcagtccatgattccggccggtcgccccggtggcgatatcatggcgctcaatgagcagcgttcgtaa

SEQ ID NO: 236127 - DNA, 126 bp, Klebsiella pneumoniae
atgtttatgcaagtattccagtttctgaaacctttgcaaaaaggatgtcaaaaaaacatgggtggcgaagtgacaatagaggtgagattcaagagttccttgccaaagcaaatcctgcagacttag

SEQ ID NO: 236128 - DNA, 237 bp, Klebsiella pneumoniae
atgcgacagtcagacatcaatcaggcattccgcgagtcggtattgcgcaactccaaaggctaccagtacctgcacacaaaggattttgtgtcagcgctgtgccggcgcggcattcactttacagaggtggaggcgaactcctggatcgcacgcgagcagacatatttcgtcgacaaaacagttgagcacagcgaaaaccgtctgtggatgctggcgaacatggggagggttctatag

SEQ ID NO: 236129 - DNA, 219 bp, Klebsiella pneumoniae
atgagttattatgaagaagcgcttgaaatgtgtaaaaccggcgtggatatgacccgggccgcctggccgcagggacagcgcatcacctggaatgccgctatctcagagtttcaccaggatccgtcggttgatttcgtcgatcagacaggcgttcagatgtcattcattccaggcgaccttgacgagatagctgacgactgggttgaattcttggaatga

SEQ ID NO: 236130 - DNA, 1722 bp, Klebsiella pneumoniae
atgtctaataatttcaccggcgtggctctggaactttggcccgatcagaactttcagcaagaaaaggcaaaagcacgcttacgtttattagacctgatgcgaaacattgtcggattaaagtctgcattaattaaaatcttcgcattctctgtcgtaatcgaagccattggccttttactccccattggtacccaactggtcacagaccatgtcatcatggcccatgaccagagtctgttatccgtcatttgtataggactggtctttttcactctcttccgtacctttgtcagtatgctaagggcatggacctcactgactctcaatactctgactaatattcaatggaaaacgacattgtttgatcacttgacaagtttgccgttatccttttttgaaaaacggcatcttggtgatatccagtcacgttttacttcattggatactatccgctcaacgttcactaacagtattgtcagtggcatcattgactcgatcatgacaattggtctgttaattatgttaaccctttacggcggctggctagtatgggtggtcgtaggatttacactttgctacgccattatgcgcttggcgacataccgtttttaccgtcgggtagcagaagaacaagtcattaaaggagcccgctcgagctctcatttcatggagtcactttatggaatatcaacgattaaagctcttaatttaaaagagcgccgttcgcagcattggcttaatattaacattgatgcatgtaatgcaggaattaaacaaactcgctttgatatgatgttcagtggcataaacaccttcatatcatctatagatcaagttgctatcctatggttaggcgccattatggtgattgataacaacatgacgttaggtatgtttatggcgtttaactcttatcgtggccagttttctcaaagagcatctaatttgatcgatctctttatgcaactgcggatgttatcattacataacgagagactatctgagattgttttcagcgaacccgagaaagagctcccggcacgtcgagttttcgatgagaatagtggagtgaagctggagattaaaaatctcagttatcaatatgacccgttctcgcaacctattttttctaactttaacctgcaggttgagccaggagaatctattgcgcttgttggaccttcaggggtcggtaaaacgactttactgaaagtgatgtgtggtttgttatctccaacttcaggtgaggtaattgccgataatcttgacatttataaaatagggcttaataactaccgcctggggacagcatgtgtcctgcaagaagatcgtcttttttcggggtcaattagcgataatatcagcgggtttgaagataatgcggatgaagaattaattgttgagtgtgctcgacgcagtaatattcatgatgaaattatgaaaatgccaatgggttatgaaacaatgataggtgagttagggctgggtatttcaggtgggcaaaaacaaagactcttaattgccagagcgctttaccgcaagccgagcattttgtttatggatgaagcaacaagtcatcttgatttgaagaatgagtctgccataaaccaatctattgccagtttaagtataacccgaatcattgtcgcgcatcgtccttcaacgatagcgtctgcagaccggatcattgatctttctcaatatggaaagcaagcatcataa

SEQ ID NO: 236131 - DNA, 549 bp, Klebsiella pneumoniae
atggcggcgttcgccggtggtgacgtcgctgtgcggtacgccaagaaaactgatgtggcggtgtccgcgctcgtagagccgctgcatcagcagcgtgatggccccctcgtcgtcatagcacaccgaggcgaagccgggagcgtcgcgggccatcagcaccagggtgtcgcgccagggggcgagcatcgcttcgtcgatgccggtaaaaccgaacagcaccacgccgtcaatattgcgccgggcgagcatgccgagatgctcctccaccaacgccggggagaactggctctccatcataatcggatcgtaaccctgctcataaaaggcgggcagcatggtctgcacggcaaggttttccgacagcgaatcgagacgggtgacgataatcgccaccactttatcgctctggccgcgcatggcgcgggcggaacgggagggcgagaaaccgtgctgctgcatcaccgcttcgacgcgctcgcgggtccgttcgctgaccccgctctcgttgttaaggacgcgggataccgtcgatttccctacgccgcttaa

SEQ ID NO: 236132 - DNA, 138 bp, Klebsiella pneumoniae
atgaccttttgcttcgacagcttcaccgccccgcgcgccagcgtcgaagtgacgatcatcggcagcatctccggcgtcaagccgaccgccaccgacagcgcgaatagcgccgcctcccaccagtcgcctttggtgtag

SEQ ID NO: 236133 - DNA, 1182 bp, Klebsiella pneumoniae; identical to SEQ ID NO: 160611

SEQ ID NO: 236134 - DNA, 1860 bp, Klebsiella pneumoniae
atgaacagagccgccacgctgaccctcaacgcgcccctgctgatgctcgtcgctgcgctggcgctttcaacccccttcaccgccggcgccgcgccggcctttcttgattacgcccaacagcaaacccagcaatctcaggcgcaagaaaaaaacgatgccgcaagcgcaaaacaaacacaagaaagccgccagagcgcagataataaaaaaaccggtaccaacacctcacaattacaaaaaagaatcaccagccagcaggcggcgattgcacaaaaagataagcttatacagcaattaaaaaaacagcttgccgctacgccgcaaacggatactgccggagcgaatgagcaagcggcgttgaataagagaattaatgaattacaggtcgccttaagcgccgctactgcagaaaaagaggcattaataaaaaaagcaggcgttgtgcagaataataatctacagcaaagccaggccgcggcgcgtcagcagatccagcaattaacgacgcagattcagcaagccgaagctgaaaataaacgcctcagcgccagctttaccacgcttaataaagataaacacgcgctaatgacccaactggccgctgcggaaaaagagaaacaggccgctcttgagcaggtcaaagcgcttaacgctgaaaaacagccgctgacgacccggctggccgccgcggaaaaagagaaacaggccgtcctcgagcaggttaaggcccttaacgccgataaacagtcgctgactattcgcctcgccgctgcggagaaggcgcagcaggccgctcttgaccaggctaaagcgcttaacgctgacaaacagccgctggcgacccggctggccgccgcggaaaaagagaaacaggccgtcctcgagcaggttaaggcccttaacgccgataagcagtcgctgactattcgcctcgccgctgcggaaaagacgcagcaggctgccctcgatcaggtcaaagcccttaacgccgataaacaatcactgtccacccggctggccgccgcggataaagcgccgcatggccccgctaacgacgccgctgcgccaaaaaatgagccaccagagatggcggccatagtggcagcctatcgcttgcaggcggataaagacaacgcccagctacggatgaaagaagatgaaatcgaactgctgagaacgcagctttctgtacagtccaaaacgcgcagcggcgagagcgccgctgccaaactcagcgcatcgggagaacagcaggcttatgcgatcggcgcctcgatgggaagcgaggcgctcaacgtccttaccacccgtcgcactcagggagttaccgtcgacgcaggcctggtgttgcagggcatcgaagatgcctttcgcggccagcttcgtctcggagagcaggaacgtaacaaagcgctgtttgatgtgtcgcagcaggtttatcagaacctgaataaaatagagcagaaaaacatcagtgccggcaagaaatatcagcaggcgtttgcgcgcaaaaaagatgtggtctttaaagagggcgtctacagccgcgtcgattacccgggtaaaggaaaaataagcggtaacgacctggttaccgtggtgatcaaagagatgctgacggacgggacggtgatcaacgatatggaagcgaaagatcaggcgcttacgcaaaagctggatgcctatcccccggtgtttcgcgaaccgctgaagcgtctacagaaccacggctctgtgacgctcgtcgtcccgcctgaaaaggcctatggcagtaaaggattaccgccaaaaatcccgccaggcgccaccatggtttattccgtgcggatagtagatagccaacccgagccggcaaaatag

SEQ ID NO: 236135 - DNA, 276 bp, Klebsiella pneumoniae
atgggtcatcatttcgtgatagatgaactcgtcgcgttcggtggtttgtacgacgccatccagcgccatcacccggccaaaggcgcggttatcaaagatgatcagatcctgatgatcggttttttcgtggtacagcacgttatcaacgctaaaatactgaccaaaatggtcatgcagcgtttcatgccacagtggattatcggccacgataaggctcctccttcgttaacatctgttacacccgtaaaacgagtgcaacatcatagacaactatag

SEQ ID NO: 236136 - DNA, 276 bp, Klebsiella pneumoniae
atggctgcctaccgcttcatcctgttgcaggaagcagacgccattctgggcaacaaagatcccacccgggttcaggcagcgtttgcagccttcataaaaagccgaggtgaacaggctttctcccgggccgataggatcggtacagtccgaaatgatcacgtcaaacgtttgcgtcgtctgattaacaaaattgacgccatcatcaatcaccagcgtaaagcgcggatcgtcataggcgccggcgttatggttcggcaggtactggcggcagaatga

SEQ ID NO: 236137 - DNA, 1434 bp, Klebsiella pneumoniae
atggcgctgccgattatcgttgccgtgctgttattgttcgtcccggtccccgaaggcctgccgccgtacgcctggcactacttcgctatctttgtcggggtgatcgtcgggttgatttttgaaccgctgcccggcgccgttatcggtatcaccggcgtggtagttattgccttgtgcagccagtggctgctgttcagcccggatcagatggccgcgccaggcttcaaaatggctggcgcctcctttaagtgggcggtgagcggcttcggcaactccaccgtgtggcttatcttcggcgcgttcatgttcgccgccggctacgataaaacgcagttcggccgccgcctggcgctgattctggtgaaatatcttggccgtcgtagcctgacgctcggctacgccatcaccttcgcggatctgctgctggcgccgtttacgccgtctaacaccgcacgcagcggggggactatctacccgattatcgctaacctgccgccgctgtacggttcaaagccaaacgatccgagcgcacgtaaaatcggttcctatctgatgtgggtagcgatcaccgccgcctgtattaccagctcgatgttcctgtcggctctggccccgaacctgctggccctggcgctggtcaaaagcattgttggcatcaatatctcctggggcacctggttcattgccttcctgccgctgggtatcctgctgattctggccatgccgctgctggcctactggttctacccgccggaagtgaaagtcaataacgaagtgccactgtgggccgcgcgtgaactggaaaaactgggcaaactgtcgcgcaatgaaattctgctgctggtattcgtctgcttcgcgctgatgatgtggatcttcgccgccgactggatcgaaccggcgctggctgccctgctggttatcgtgctgatgctgtggaccggcgtgctctcctggagcgatatcaccaacaacaaagcggcatggaacacctttgtctggttcgccaccctggtggcactggccgacggcctctcctccaccggctttatcgcctggctgggtaaagagggcggcgcgctgatgagcggcatctccccggggatggcaaccatcgtcctgctgctggcgttctacctgctgcactatctgtttgccagcaccaccgcgcacaccaccgcgctgctgccggccatgctgaccattgcctcgactatcccgggaatgaatatggaagtgtttgtcctgctgatggtcacctcgctgggcgtgatggggatcatcaccccgtacggtactggcccaagcccaatctactacggcagcggctacctgccgaccaaagattactggcgcctcggcaccatctttggcgccatcttcctggccgccctgctgctgattggctatccgtggatgtccatgatgttctga

SEQ ID NO: 236138 - DNA, 798 bp, Klebsiella pneumoniae
atgttgatttggtcgcgtaaaggccgcgcggcggcgggcgcgctggcggtgacgctttttgccggcattttcctgctgccgctggcggtgattttactctccagcctgagtaaacaatggaacggcctgctgcccatcggctttacctttacccactttgttaacgcctttcgcggcgcggcgtgggattcgctgttttcgagcctgatggtgggcttctgcgccagccttctggcgctgctgtgcgggatgtgggcggcgctggcgctgcgccagtatggcgcgaagttacagaaatatcttggcctggcgttttatctgtccagcgctatcccctcggtttccgtcggactgggcattctggtggcgttcagccaggggccgctgcagatgaatggtactttttggatcgtcctggcggcgcactttgtactgatttccgcctttaccttcagcaacgtaacgaccgggctggcgcggatttccgccgatattgaaaacgtcgcctccagtcttggcgcctcgccgtggtatcgcctgcgtcatgtgacgctgccgctgatgacgccgtggatgatttcagcgctggcgctgagcttatcgctgtcgatgggggaactgggcgcgacggtgatgatctatccgccgggctggacgacgctgccggtgactattttcagcctcaccgatcgcggcaatatcgccgatggctcggcgctgaccattgtgctggtgggcgtcacgctgctgttgatgatgaagcttgagcgtatcgcccgccgattaagccagagataa

SEQ ID NO: 236139 - DNA, 483 bp, Klebsiella pneumoniae
gtggataagcgtcagcgcaggctcaatttgcttaagggcgataaaagaggagatgacccagccgatggcccagtcgggaacggtctgctgctgcgcgatcaggctttggtattcgcggatgacctgcgcgtactcggcgctggcgtacagcgcgcccagacgatcaatacgcgcccggatgatgtcgggcgcagcctgtgggtcggggtgccaggcggcgatcatcgcgtcatactgcgtgagcgccgtgcgggccagcgcgtaacgcgccttttcttcgcgggaaggggtatcggcaaggcgcaccagttcggcggcggcgttcaactgcaagttacgcttttccgcaggcgtcagttcgacgctattcgccaggccgagagcaggggaatcaatccggttgcgggtcagggtcgccatcaggctggccagcgcggttttgttttgcggatcacgatcgaggatctgcgtgtccaccaatag

SEQ ID NO: 236140 - DNA, 174 bp, Klebsiella pneumoniae
atggatctcgcgcgctctggccaggcgctgggtgttcagatcccgtggcgagcgggcgacgacgtcgtcagtcagcagatccatttgccgccactcctgcagatcgagggcgacccaggcctgctggcgctccagctgcaggctggcgggttccagagattccgccgcttttag

SEQ ID NO: 236141 - DNA, 1017 bp, Klebsiella pneumoniae
atgaccttcaatattgctcttaattttgaggacggcgtaacccgttttattcagtgcaatgccggagagaaagtcctggatgccgcctatcgccagaaggtgaatctgccgatggattgctcggacggcgtttgcggtacctgcaaatgccactgcgccagcggtgagtacgacctgggcgaagattatctcgacgaggcgttaagcgacgacgaagcgcaggcccgtcaggtgctgacctgtcagatggtcccgaccagcgactgcgtgatcgatgtgccggtggccgccgcgcagtgtaaaaccgcgctgaccaacaccggggcgcaggtgcggcaggtgaacttactgtccgataccgccatcgaactggtggtcgccctcgatgagccgctggccttcctgccggggcagtacgtcaacattcaggtgccgggtacgcctcatgtccgcgcctactcattcagctcgcaaccgggttccctcgaagggcgttttctgatccgtaacgtgcctggcgggatgatgagccagtggttaacccagcgggcgcggcccggcgatcgcctgaccctcagcggcccgatgggcagcttctatctgcgccacggcgaacgtccgctgctgatgcttgccggcggtaccggcctggcgccgctgctctccatgctccataccctgcagacacagggcagccagcgtccggtgatgctgctgtacggtgttacacgtgactgcgatctggtgaaaaccgacgcgctggatacctttactcaacagttgacggggtatcgttggctaccggtggtggccgatgaaaacagcacttgcccgcagcgcggctttgtcaccgaccatctcgacgacgcgatgctgaacaacggcgacgtggacatctatctctgcggcccgccgccgatggttaacgcggttgccacggcgttgcgcgaccgcgggatcaccccggcggggttctggtatgagaaatttatcgccagccagagcgcggcggcataa

SEQ ID NO: 236142 - DNA, 342 bp, Klebsiella pneumoniae
gtgctcattaaaaatctgaaagaagaaatgttaagatttgaagatgaagccaaaactgactggctgtttcctaatcctatgccgtttggtctggaacgagttatgattcaccagtgggtgcgggcttatctaggatttccgatggtttacgttgaagcaaaaattgttatgactgcttataggggggaagagatatataccttacctatacctcatcaaaatagttctgtcggatttacctataacaatgatttattttcagaaaccgtgactttttatccactggagcgagaaaaggagattcatattgcgcttgataaaaagcgacttggtggcaaatga

SEQ ID NO: 236143 - DNA, 366 bp, Klebsiella pneumoniae
atggagctcagccagcagtatcgccagctggatgacccctacctgcaggcgcgctatatcgatatcgaagatattttgcagcgcaccctgcgccatctgcagggcgttcaggagagagtgccgacgcccggcgagccaacaattattattgccgacaacatttatccctcaaccgtcttacagctggatgccagcttcgttaaaggcctgtgcctgcgcgatggcagcgaacaggctcacggcgcgattatcgcccgcgcggcggggatcgcctggctgagccagcagggcgaggcgctgaacagcgtgcagcccggcgagactatcgtgctcgatatgcgccaccagcgccttatccgtgactaa

SEQ ID NO: 236144 - DNA, 192 bp, Klebsiella pneumoniae
atgctgcagaatatggttaatctggccaaccaggacaataacggtcgcttcgatgtgaagcagcatctgcagtcgccatggaacgttctggtgggcgcgcaatacgagctgacgcagaattttaatattactaccgagtttggctttgccgaacgtaacagtttctttattgccggcgagtatcgcttttga

SEQ ID NO: 236145 - DNA, 951 bp, Klebsiella pneumoniae
gtgccgccgattccgggcctgaaagagtcaccctactggacttccaccgaagcgcttgtcagcgacaccattcccgcacgcctggccgtgatcggttcgtcggtggtggcgttggaactggcgcaagcctttgcccggctcggcagccaggtcacgatcctggcacgcagcaccttgttcttccgtgaagacccggccatcggcgaggcggtgacagccgctttccgtgccgagggcatcgaggtgctggagcacacgcaagccagccaggtcgcccatatggacggtgaattcgtgctgaccaccacgcacggtgaattgcgcgccgacaagctgctggtcgccaccggccggacaccgaacacgcgcagcctggcattggaagcggcgggggtagccgtcaatgcgcagggggccatcgtcatcgacaagggcatgcgcaccagtagcccgaacatctacgcggccggcgactgcaccgaccagccgcagttcgtctatgtggcggcagcggccggcactcgtgcggcgatcaacatgactggcggcgatgcggccctggacctgaccgcaatgccggccgtggtgttcaccgacccgcaggtcgccaccgtgggctacagcgaggcggaagcacatcacgacgggatcgagaccgacagtcgcctgctaacactggataacgtgccgcgtgcgcttgccaacttcgacacacgcggcttcatcaagctggtcatcgaggaaggtagcggacggctcatcggcgtgcaagcggtggccccggaagcgggtgaactgatccagacggcggtgctcgccattcgcaaccgtatgaccgtgcaggaactggccgaccaattgttcccctacctgaccatggtcgaagggctgaagctcgcggcgcagaccttcagcaaggacgtgaagcagctttcgtgctgcgccggatga

SEQ ID NO: 236146 - DNA, 951 bp, Klebsiella pneumoniae
gtgccgccgattccgggcctgaaagagtcaccctactggacttccaccgaagcgcttgtcagcgacaccattcccgcacgcctggccgtgatcggttcgtcggtggtggcgttggaactggcgcaagcctttgcccggctcggcagccaggtcacgatcctggcacgcagcaccttgttcttccgggaagacccggccatcggcgaggccgtgacagccgctttccgcgccgagggcatcgaggtgctggagcacacgcaagccagccaggtcgcccatatggacggtgaattcgtgctgaccaccacgcacggtgaattgcgcgccgacaagctgctggtcgccaccggccggacaccgaacacgcgcagcctggcattggaagcggcgggggtagccgtcaatgcgcagggggccatcgtcatcgacaagggcatgcgcaccagtagcccgaacatctacgcggccggcgactgcaccgaccagccgcagttcgtctatgtggcggcagcggccggcactcgtgcggcgatcaacatgactggcggcgatgcggccctggacctgaccgcaatgccggccgtggtgttcaccgacccgcaggtcgccaccgtgggctacagcgaggcggaagcacatcacgacgggatcgagaccgacagtcgcctgctaacactggataacgtgccgcgtgcgcttgccaacttcgacacacgcggcttcatcaagctggtcatcgaggaaggtagcggacggctcatcggcgtgcaagcggtggccccggaagcgggtgaactgatccagacggcggtgctcgccattcgcaaccgtatgaccgtgcaggaactggccgaccaattgttcccctacctgaccatggtcgaagggctgaagctcgcggcgcagaccttcagcaaggacgtgaagcagctttcgtgctgcgccggatga

SEQ ID NO: 236147 - DNA, 744 bp, Klebsiella pneumoniae
atgggggattttggcccattagtcggtcaaaaactacctttcagcataaaccaggatgataaggtattacataaggttgtattaagtgatttttcgatatcaaagtttaaagttaccaacgatgattataacaaatatctgcaaataacaggggtaaaaaaatcacccatccatatttttttaaaaaattatccatccttgcaaaaaggagattattctgttggtgttacctggcaacaggcaaaagactattgtcagtggttaggtaaggggtctggtaaaaagattgatttaccaacagaggcgcaatgggaatatgcagcaagatccagaggtcaatactttcagtttccaacaaataatggtgagtatttacctgaaaaaaatgttccgggtaaagatgaattagataaatatacagatggttttggtttcccattttacccagtaggcaaatattccccaaaccccctgggtctgtatgatatggggctcagtggctctgaatggactaatgactggtatgcagcagattattactctcattcaccggtaaacgatccccagggacctgcgcagggtactaaaaaagtcctgcgtggatatattggtggcgacagacagtacgctttaaccatgttcaggcaatcaaaattgccagttccgaagatcgataaagacgatgactatgaaaaatatggtgttggtccgcagtatgtatttcgttgtgtcgttaataaataa

SEQ ID NO: 236148 - DNA, 672 bp, Klebsiella pneumoniae
gtggagaaatccgtctggctgatcggcggcgacggctgggcttacgatatcggcttcggcggcctggaccatgtactgagcctgacggaaaacgtcaatattctggtgctggacactcagtgttactccaacaccggcgggcaggcgtcaaaagccaccccgctgggagcagtgactaagtttggcgagcatggcaaacgcaaggcgcgtaaagatctgggcgtcagcatgatgatgtacggtcatgtttatgtggcgcaaatttcgctgggcgcgcagctgaaccagacggtgaaagcgattcaggaagcggaagcctatccggggccatcgctgatcatcgcctatagcccttgcgaagagcatggctacgatctggcgctcagccacgaccagatgcgtcagctgaccgccaccggcttctggccgctctaccgcttcgacccgcgtcgggcggaagaaggcaagatcccgctggcgctagattcccgtccgccatcagacgcgctggccgagacgctgcttaatgagcaacgtttccgccgcctgaacgcccagcagcctgaagtggcggagcagctatggaaagacgccgccgccgatctgcagaagcgctatgacttcctcgcccagctggctggcaaagcggagaaatcgccaagcgaaggttaa

SEQ ID NO: 236149 - DNA, 708 bp, Klebsiella pneumoniae
gtgctggagcacacgcaagccagccaggtcgcccatatggacggtgaattcgtgctgaccaccacgcacggtgaattgcgcgccgacaagctgctggtcgccaccggccggacaccgaacacgcgcagcctggcattggaagcggcgggggtagccgtcaatgcgcagggggccatcgtcatcgacaagggcatgcgcaccagtagcccgaacatctacgcggccggcgactgcaccgaccagccgcagttcgtctatgtggcggcagcggccggcactcgtgcggcgatcaacatgactggcggcgatgcggccctggacctgaccgcaatgccggccgtggtgttcaccgacccgcaggtcgccaccgtgggctacagcgaggcggaagcacatcacgacgggatcgagaccgacagtcgcctgctaacactggataacgtgccgcgtgcgcttgccaacttcgacacacgcggcttcatcaagctggtcatcgaggaaggtagcggacggctcatcggcgtgcaagcggtggccccggaagcgggtgaactgatccagacggcggtgctcgccattcgcaaccgtatgaccgtgcaggaactggccgaccaattgttcccctacctgaccatggtcgaagggctgaagctcgcggcgcagaccttcagcaaggacgtgaagcagctttcgtgctgcgccggatga

SEQ ID NO: 236150 - DNA, 708 bp, Klebsiella pneumoniae
gtgctggagcacacgcaagccagccaggtcgcccatgtgaacggcgaattcgtgctgaccaccggacacggtgaattgcgcgctgacaagttgctggttgccaccggtcgggcaccgaatacgcgcagcctcgcgctggacgcggcgggggtcactgtcaatgcgcaaggggccatcgttatcgaccaaggcatgcgcacgagcaacccgaacatctacgcggccggcgactgcaccgaccagccgcagttcgtctacgtggcagcggccgccggcacccgtgccgcgatcaacatgaccggcggcgacgcagccctcaatctgaccgcgatgccggcagtggtgttcaccgacccgcaagtcgccaccgtgggctacagcgaggcggaagcgcaccacgatggcatcgagaccgacagtcgcacgctgacactcgacaacgttccgcgagcgcttgccaacttcgacacacgcggcttcatcaagctggtcatcgaggaaggtagcggacggctcatcggcgtgcaggcggtggccccggaagcgggcgaactgatccagacggcggtgctcgccatccgcaaccgcatgacggtgcaggaactggccgaccagttgttcccctacctgacaatggtcgaggggttgaagcttgcggcgcagaccttcaacaaggacgtgaagcagctttcctgctgcgctggataa

SEQ ID NO: 236151 - DNA, 375 bp, Klebsiella pneumoniae
atggcggcgattgtcgccaccattggcgcgatgaaagaggagaaggtggttgagaacgcggcctctatcggcaacgaggtgctgcgccccggtctcgaggcgctggcggagaagcacgccattatcggcgaggtgcgcggtcgcggcctgttccaggcgctggagctggtgagcagccgtgaacaaaaaacgccgctgaccgccgccgacatggctgcgatcaaaggggccctgaccgaagccgggctgctggcctttgtggtggagaaccgcattcacgtggtgccgccgtgcaccattactgctgagcaggtggcgcaggggctggcgatttttgatgcggtctttgctcgctttgccagcctggcgaagtag

SEQ ID NO: 236152 - DNA, 213 bp, Klebsiella pneumoniae
atgtatatctatcaatattcatgctcacggctctttgtctcacaacactggacaatcatcatcatccttacctgtacgattgataacgaatgtcacaaccccgacaactgtaacatcatccagggcctcgccttccagagtctcaccgtctcttgtaataaatgcccggcccataatttttgcaaaatcagtgccgccgccgtattgaattaa

SEQ ID NO: 236153 - DNA, 501 bp, Klebsiella pneumoniae
atgaaaagcgggctcacggttcgctctgacaattacgccgatgttctggatgcgctgaagcagctgtctggcaccgatgtgctggtgggcattcccgctggccctccacgtgaggattcgccactgagtaatgccgaaattggttacctgcagtctaccggggcgaccgtggagattgacggcgatatcgtcacgctcccgccacggccttttctcgatatgggtatagaggattctcgggataaaaccaccgcccggttaaaacttgccgcacaggccgcgcttgagggtaatgccggtctggcggatcagcatcttgaagctgccggacagattgcccgagacgcctcaaaagcggttatcggtgacggtgaccgcctcacgcctctctcggagaaaacgctccagcgccggcgagcgcagggattacctggcgacaagccgctttatgcgcatggcttcctgttgcgggcgattaactacgtcgtgaggaaaaaataa

SEQ ID NO: 236154 - DNA, 555 bp, Klebsiella pneumoniae
atgaccaaatcaaccataaccagagagcgaattcagcaaatttttctgggaaatggaccagagctgagcgcatcagaagaacgagagttggcccgcatgacgctggtcgcaatggacagcgagccggtggcttacatcttcaagcatccagcagggaggttgttctggtcgctgacggatgaaagtaacaagggtcacgatgatgtcatgccggtctacgccagcccgcagccagcgccggaggaatggactattgctgatgccgtgaagttttgcaaagaaactggtaggcaagatgccggagctgcaatggacgcctggaacgcctgccgcgccgccatgctgcatgctggcaactctccggccaaaaacggcgtcgctccggcgcaaagcggcaactctccggcaattccggatggttacgtgttggtgccgaaagaggcgacgaaggagattctcgacgagttcgactcaattatcgactatggcgcagaagactctgtagacgcctggcacagactgctcgcagccgccacgcaggaggtgaaaccataa

SEQ ID NO: 236155 - DNA, 213 bp, Klebsiella pneumoniae
atgaccatcactgaaggactctgcgcggacctctattgcgactgtgatggttgtcagtcagggaaaatctatccgcaggggcaggctgattttattggccggaatatgaccgacatttctcagcaggctcgcaaagctggctggcgcatcagcaaagaccgccaacgctgctatgcgccaggccacaaaatttcacggggatccaaccaatga

SEQ ID NO: 236156 - DNA, 846 bp, Klebsiella pneumoniae
atggaaaatcatattttaatgttccccgatatgtttataaactcgacaagcgaaagcatccacatatccaatgcaggattagattatagaaaactgcttataaatgcgttatattgggataaaataataacaacaaacaataatatcattaatatatcatacgatggtgctcctggagtttcattgctaaaaaaagaaggtatcctaatagaggtaaaatttaacattatcaatggaacaataagcacaatatacgatgcaaatatgaaattcttgattgactctctcgcaagaaaagacataaatttcattgcaagcgatgccagcaaggtattaataaacaacaaaattgaagtcagtgaatacggtggtgaattgctaaccttagtaaatgcaatcccagagccagacgaaagcgttaatatcaatgatgttcttgaattcaggctgaaacgaaaagacaatctaaaaaacctcatggataccctaaacacattaaacataagggttatgaaagctgaaaacaaagatcatgaattaaaaacagttataaatgaaatagacatagcatgcgctgagattataagactatacaaagaaagagggattaaattcaacttatcagaagttaaactcaactttaatctcccagagattgctactaaagccggcgctgcttatgttggcgcaaaagaaattggactttctgaaacatctgccgttctggcttcgacattattcggaataaatacatttatcacatttacctctgcaatatcacttagaaaaattgataaagcaaatcctttcaactacgttggtgaaatgagtaaaaaacttaactag

SEQ ID NO: 236157 - DNA, 606 bp, Klebsiella pneumoniae; identical to SEQ ID NO: 137661

SEQ ID NO: 236158 - DNA, 276 bp, Klebsiella pneumoniae
atgattaattttgaacagcacaagaatattgtagaagattttgtagaacagcattacccactggcgcatagtttgatgattgatagttacaaagatgcagaggtgtactattcaaattttcaaattctcatgcgggaaatgaatacacttccagaaaatccagagtactttttagagtggctactggaagatgaccccgcgttgtatataaacctgatggaactgattgtcatcgccagaactattcataacgtgtttgaacaagtttcgccttaa

SEQ ID NO: 236159 - DNA, 186 bp, Klebsiella pneumoniae
atgaaatattttacagtagagcaagtagtagaagcattaaaaactggcgcagcacgccgccaccagatttatgacaattttgctcaggcacgatatcgcggatttactgaacgcgcagcactttttaaaaccgcgcttgagattttcgaccagtggaaaaaggcgaaggagaacaaaacagaatga

SEQ ID NO: 236160 - DNA, 612 bp, Klebsiella pneumoniae
atgatcgagttcttgagcaaagtggcaagctctacagagttttggagtggtctgggaggggctgtagtcggtggttgttttacgctgtggggaacgattatcgaagggcgaagagacaaaattaacaaagagcaagaaaatttatctaagaaaataaacattctcaaaggcataaaagcagaaattgagcttataactaatttatataatgaaaggatgaatcatcatattgttgatcataaacaaggtgagatattagatgtttacttccttattactcaaaataattttgttttttatgagaggaatgctgaatttctatcagaacttgacgaaaaagttttaaacgatgtggtaaatttttatataacagctaagagcttgattgatacttataatacaaacaatttaagcataaccgaaattaaagcattgtctttaaaagttgctgataatccacacagtgaaactcatgtgaatcttctacatgcatatatggaactcgcagcagaatacgcccctatgattattgagattcatactaaaactcttgaagcaaaagaaaacgttatcaattcaatcaataaagagttaaacaaactcgaaaagtaa

SEQ ID NO: 236161 - DNA, 876 bp, Klebsiella pneumoniae
atgagtacattaccaaaggtcgcggtgctgggactcggcgccatgggacacgcttttgccagtaacctgctgaaaaacggctttaccgttgccggctggaaccgttcgccagcccgcggcgaagatttacaggcgcatgggttatctctgcacgccacgccgcagcaggcggtggccgatgccgaggtgatcatcagtatgctcgccgacggcgaggccaccctcgaggtactggcgcaaatcgcgcccgcctgtcagccgcaggcgatctattgccagatgggcaccattggcctgccggagacccggcaggccatcgcgttgttgcgggaacttcagccagcgatgacctatattgatgccccggtgtcggggaccaaagcccccgcggagaaggcacagatcctggtgctcgccagcggcgatagggaaaagggcgccgctgccgaaccggtgtttgcggctatctcccgcgggacgcagtggtttggcgaggcgggcaacagccagaaaatgaagctggtcctcaatgcctggctgatttcgatgatgcagggcatcgcggaaagcgcccagctggcgaagacgctgggcttcacccccgaccagctgtggagcgccctggaaggcggcccgctggcggcgccctatgtcaaagtgaaactggacgccatcgccagcgagcagtttaccccgcagatgcagctggcgcatgccctgaaagatgcccggctggcgctttccctggccgagccgcacaccatgccggggctggaaaacatcgccgaactgtggcagcaggcggcggacgcgggatatgccggagaggatttgtctgcggtatatcagtggctgtcgccgtcgtcaaaagcgtag

SEQ ID NO: 236162 - DNA, 885 bp, Klebsiella pneumoniae
atgcgactggatctggccgatctgcggctatttatcgccatcgtggataccggcagtatcaccggcggagcggcgaatgcccatctggccctggcgtccgccagtgagaggctgcgcaagatggaggccgagatcggcgtgccgctgttgcaccgtcatgcccgcggggtgacgatgacagaggccggggagatactggcgcgccatgcccgcccgcttcttgcgcagcagcagcgtctgcgccaggcgatgcacgccttcgcctgcggtcagcgggggacgctgcgcctgttcgccaacacctcggcgatgtcggcctttctgccggggaagctcgccgcctggatggcagcgcacccggcggtgcagatcgaaaccgaagaacgcaccagcgcggatatcgtcagctgtatcctggcgggcgtggcgcaggccggagtggtgtccgatgcggtcgaccccgggccgctgcgcctcgatcccgtcgctgacgacccgctggtgctgatcgtgccgccagctcgccctctggccgaaaaacaggaagtggcgtttgcggcggtgctcaacgagccgttggtcgccctctatcagaccagtgcgctacagcagcatatcgaacagcacgcagctgaactcggccaggcgctaaacgttcgggtcaggatgagccattttgcagggctttgcgagatggtggcgcacggcgccggcggggcgatcctgccgcgcgttattgccgagcgttaccggcagcgctattcgtttgccgtcatcgggttacaggaccgctgggcgcagcgccgtttgtgcctgtgctaccaggatgacgccagcctgtcgccagcgatgcgccgcttactggaatggcttcgtcagccttga

SEQ ID NO: 236163 - DNA, 555 bp, Klebsiella pneumoniae
atgttcgatttacacacgatctctttcctgttgatctttattgccgccgggctggtcaaaggggtgaccggcatgggattgcccaccgtggcgatgggcctgcttggcctgctgatgccgccgcaggccgcagcggcgctgctggtgcttccctcgctgctcaccaatctctggcagttactggcaggcccggcgctggcgcagattgtacgccgtctctggcttatgatgaccgggattattattggcacgttggccgggtcctcactgctgatcggcctcaatcctcggtggtcggcgctggcgcttggcgccgcattgatagtctatgccgggtatgcgctctgcagtccggtgtttcaggtttccggccgcgtggagaagtggctgtcgccgctcatgggcgggctgaccggcgttatcaccggggcgaccggggtatttgttattccggccgttccctggctacaggcgctgggctttcgtcgcgacgagctggtgcaggccctggggttgtcgttcaccctttccactcctgcacgatggctggcatga

SEQ ID NO: 236164 - DNA, 177 bp, Klebsiella pneumoniae
atggtcgagatattcgaaaataacgtgcgcagcggcgagggtcgcgtgaccgcagagattgatctcagcgagtgtggtaaaccagcgcagctcatagccctcgtcggtacggacaaagaaagccgtttcggattgattatgctactgggccattttcaggagcacatcgtcggctaa

SEQ ID NO: 236165 - DNA, 156 bp, Klebsiella pneumoniae
atgattaggcatgaaacagtcacgccgttaaattaccggatgaccgtttccggcagatccgattttcctgcgtataacaattttccggaagtgtacctcgcacacggaataagcaaagcggcgttttccggtggtgagcaggcggtcacggggtag

SEQ ID NO: 236166 - DNA, 936 bp, Klebsiella pneumoniae
atggttatccatgactctcaacgcgcgatgagaaagttatctcaggttggctattatcgcctttctgggttctggtatacctcacgaattatacgtaccagcgacgaaggactgtcattcaggagtgacgattttcttcctggcacatcatttgaacaggcttacgatctttatctatttgataaaaaacttcgaatgctgatgatggatgcccttgagcgaattgagattcacattcggtcagtcatcgctcatgaggtcggtaggtatgatcctcttgcttacagaaaggaatcctacatcaaccaacgcctcctaaatgatggtcggaatgggaaacccagtacttttgaaaaatggcgtaataaactggatctgaaaattcaggacagtagagatgagtgtattatgtggcatctcagccaacaaaaagaaatccctttctgggttgctgttgagacttgggattttggacagatgtctaaatactacgccatgctgaatggtggtatgcaggcaaaaattattaaacgccttcagctggataataaacaaaccctgacgaagtggttgcaatgtctcaatttacttcgtaatcgctgtgcccatcactcccgtatctggaatcgtaagcacgcagttgttccaattccgaaatctgtttttttcgatgaactaaagattgacgccagagccagtgaacgtctgtacagtgccatatgcataatgtggtacctagtcaaaatgattggccctgggtcaacttggatcagacaagttgcagagctcttcgataaaaaacctaatatgcccggctgttcatatgaatcgatgggcgttccgaaatcaggcttccctaaagccagattcggagacgcgctcggattcgtgcatgcagacaacgacccgcttcatgaaggccaagaaggggcctag

SEQ ID NO: 236167 - DNA, 663 bp, Klebsiella pneumoniae
atgagagcgccgacgcgggtttacacctctgcgctaccgcggattaacctccagtttctggcagatatgcaaagaaagctggtggattcgagcccgaaaacacaggttttttgtgataccgatagtggaagggtgtacttctctctggtctctggcgggtacagcgcgacaatcaacggggtaatgcgggttattggcgtcacgatcacccgggcaggttttggttaccggagatggtacatttgcccgcattgtggtggccgggttgcgaaattatttattggccggaaggacgtagggtgtcgtaaatgctggagccttcactatgccagccagagtgaagatgagatatctcgcttacggcgcagtgtgttgaagcagaggcatgatttatggggggatgattacccacctgcggacagcctgctaaatagcccgctcaagtttccgaagcctgccggcatgagatgggatactttcgagaaaaagcgctctcgcctgctaaagactgaatcagcttactggcggttgaaagaaccgagggacgctaaagggtttgcccgggtgatgcgcaaagctgaggcgtcaatgcgttcatttgaacgggcatcgaaaaaggctaataccaggctatcagtagagcatgtcagggcaaaaagctga

SEQ ID NO: 236168 - DNA, 159 bp, Klebsiella pneumoniae
atgatgctgcagattaggatgacgatggcattaattgccggggcaaacggtgccaatgagtttagtacttctaacatgtatacctccttggttgtgaatggttgtcagtgcttctcttgtgtaacttatgtctccctgtggccgctcctactccggtaa

SEQ ID NO: 236169 - DNA, 624 bp, Klebsiella pneumoniae
atgtcttcactcatctgcttctctacggatgaattcgcaattgtagcgacggatactcttggcgtggatgccgaagggaatccctttatccttaccaataaagcgacatatctaccaactataaaaacgattatatgcggcacaggaacgggtggatttcatgctcgctgggcggaatttgtaaacagccgcatgattttattagacgtggataatcttgattaccatgctccatccacactaaaggatatgtgggaggagtataagaaggaatacaacgtaggggatgagtgcacggttaccatctatcatgttggaatctctcaggcatcgggaagaataaagagatttgcctaccgctcttcagaatacttcaggtcagaggaaataactcatggttggttttacaaaccagagtgctcagtccctgacggggaagacatcctgggaattatcaaggcaatgatgtttgaacaaagggcaatacaggatgtaatgccaagtgctgaaagagtttatattggcgggcaaattaacgtcataatccttgagaaagattgcgttaggctcatgacgatagccgacttcccggacttttcatcggtgatcaacaagttgttttaa

SEQ ID NO: 236170 - DNA, 750 bp, Klebsiella pneumoniae
atggttaagttaatccctgaaaggcttaaagaaaatgctcttgttaatgttctgtttgagattaggttttcatcagaaaacaatacattttctaacattatgcctgggatattatttactgagctgagtttaaagaattcctttcggacccctcattttgaaatgcctgaaataattaggcaacagaacgcagatttcaaataccttccattagttggttttatatggggggattataatattttgctaggagataatgtgctgttgctttcagttaacagtcggtatcctggttgggagacgttcaaaaagcacatatgcattttgatgaacattgtaaaaaaacacgatttaataagtgttgtagagcgtttttctcttaaatacgttgatataattgaatatccttccgctgaaaatatcggcgaacaattaaatatgtgtattagcttaggtgatgaaaactatctcgacccttacctacacctcagaagtgagaagcacgaaggggacgtagtaattatcattcagctagctggcaatgctcgagcagaaggaccagcaataaaaacaagagaaggttttatgattgatattgactgtataataaagaagcgaaatctaacttttgagaatgttatacaaaattttgaaagcgagcttgactcattacatcataaaaataaaactgttttctttaacttcctaactgataaagccttagctaacttaggagccgtatatgagtga

SEQ ID NO: 236171 - DNA, 576 bp, Klebsiella pneumoniae
atgagtgacgttttaactattacaatatcaaacggaattagctcatctaactctgcaggggttgtttttggcaatacgatgcaactcagcaaagaccgtaatataagctaccgtaagaaggcagaaactgttttaagcaagcaatataattctaaaggtgaaggtgaggtttattccattttagaacgatttactacggaagcattaaggtcatttattgatcgtaaaaagagtgatatactaaaatacagcgaaatattcaatctttttgaaaagctcaaagatgtcaatacgttaggtgcggaagaaatagaccgacagactttacgctccgctgacttctttatgaggaattatgtggcagcctttggcttgactgcgccaaaaataaaaatttttgatgatggtgagctttcatttttttggaacgataagtcatgtgctgtagacttaacagtagaaccagatgagacttattctttttatgctaaaaataaaaatgagaggaaaggtataaaaggtaattataatattagtattacccctccagaacaattactgtcaatgcttaagtga

SEQ ID NO: 236172 - DNA, 171 bp, Klebsiella pneumoniae
atgcgctggatttataatctccccggtttcatcatcttttactggatcatagataatttcaaacataacatcttcattatcgtcgtcaactattcccataagcttttcaagcaagaatactccaataaaaatatctttcctcttatcagggacgttagcctgctgttttga

SEQ ID NO: 236173 - DNA, 369 bp, Klebsiella pneumoniae
atgctggacattgctgagttgctaaaggctcggaaaaaagaatttatcagtcttcgagagttcataacaagaattcatctctatcagcctcatgttagccttaaggacattgccgatttcctttatattgaggactccaatggagggctgcctgagtgggttaaaaagggcgttgctggttcaatagaaactacttgggttgatgataaccacatggaatctgatacatcattacattcccttttgaatgtaattcatgagtttgatgagatgcctgaggttttacctccagcgcttacttcgtccgccgtgactaggattgttccatcggaagcacctatggattttgatgatgatattcctttttga

SEQ ID NO: 236174 - DNA, 207 bp, Klebsiella pneumoniae
gtgctggatatatccctgaagccaaagcagggtagtcaggttctgatccagcactgcggcgggacggagcttgccacgccaagaggaaagtcactgattaccgaagatggcgaagcgatcgagggtgaagcccttgatgatgttactgtcatcggtgtcgtgacgtttactatctgcgatgtgcgccaggacaatgcggttgtttag

SEQ ID NO: 236175 - DNA, 456 bp, Klebsiella pneumoniae
atgattaagaatcaacagccttgtcctatcgtcgatgagaatgaacgctccttacgctttgaatatcgcttccgccgctatgggataattgttttgagtctcatcattcttaccgcgttaagcggcctgtggtcctccggttatttcagtgaaacacaccgggaaaccagtggaggcgaattaagcgtcgattatcagcgctatgccaggctgatgagtgaaaccgagcttaatattcagattaaaccggatacggccagcgacaccattatcagcttcgccgccccgttattaacccgctaccagatcggtgatatccgtccgcagccggataaaatgtatagcgccgacgggaaattacatctcgtctatcagcggtcgaaccccccttcaccgatatctgtgtggttagccgttaccccaaaaacgggtaatgctgccaacttactgatttag

SEQ ID NO: 236176 - DNA, 660 bp, Klebsiella pneumoniae
atgattctctataaatatatggaaaaaaaatgggccgatgagttcttgaaaacaggttctttacgtgtaggcacgctttatgactttaggaaagcggaccacaagccaggcgtatccgatgaccaagagggatttgcttacagcgtgtttgatgtagccgaaggtaaaacatttgctgatatgtctgaggttgagcgagctaactgcggtctcggcacgatcatcccttacagcctccttggcgatctatcgcaaggcgggattggccctaattccaacatgcaattcatccggacatcaactgacatgtacgtcatgtgcttctcaatgagccctaacaggtcagccatgttaaaaatgggatatgacacatgcctaaaaataaacaatgctgagattttcattaatcaattgacacggaagttaagaactagagcgagaatgctgtacattgcccaaaaagttgattattcaggaaaagagacaagctacagtgtagttgattgtagataccctttcttgacaaaacacgctgattttgcatatcaagatgaattcagagctgtctggaagcgcagggattatgcgcctcaaccgtcaccacatattgtatttatcccttcggctattaagtactgtgaaattattgagccaatataa

SEQ ID NO: 236177 - DNA, 483 bp, Klebsiella pneumoniae; identical to SEQ ID NO: 135172

SEQ ID NO: 236178 - DNA, 2160 bp, Klebsiella pneumoniae
atgtccttagtcacaaataagtctagttctaaagatgaagatgagcttgatttgggtcgcttgattggcgaaatcatcgatcatagaaaattaatagtatcgattacagccttctttactctgttagcgttggtttatgttgttttttctacaccaatctatcaagcagatgcattaattcaagttgaacaaaaacaaggcaatgctatattaaataatttaagccaaatgcttcctgacagtcagcctcagtcagcacctgaaattgctttaattcaatctaggatgatattaggcaaaactgttgatgatttaaatctacagacaataattaaaaaatcatattttccgatttttggacgtggttttgcaaggctccttggggaaaatgagggttcattatcaatatcaagactctatgttcacaatgtcggaaatgattcagttaaactaaaattgacagtgcgagatgggaaacattacgaaattgattttaataataaaaaaataaatggttatgttggccagttgtatgaaaatgacgacttttccattaaagttgataagatggatgccaagcctggtagcgagtacaatatatattatgaaagtcgtctcaaagctataagtgatttgcaaaatacgctttcggtagctgatcaaggtaaagatactggaatgctaacaatatctttgacgggtgaagatccttcaattattgaaagaatagtagagagtattagtgataattacttggcgcaaaacatagctcgccaagctgctcaagatgcaaaaagtttagagtttttaaataaacaactaccgcaagtcaggagtgatctggatattgctgaggataaactaaaccaatatcgaaggaagaacgactctgttgatttatctttagaagcaaagtcagtattggaccagatcgttaatgtagataatcagttaaatgaattaactttccgtgaatctgaaatttcacagctatataccaaagagcatcccacatataaagcattgatggagaaaagaaaaactttgcaggaagaaaaagcgaagttaaataaaaaagtttcgacaatgccagaaacgcaacaagaaatattaagattaagtagagatgttgagtctggacgagccgtatatatgcaactgcttaatagacaacaagagttgagtattgcgaaatccagtgcaattggcaatgtaaggataattgataatgcggttactcaaccaaaacctgtcaaaccaaaaaaagtcttgattgtgctcctcggttttgttttcggtggtgttatttcaatatgtattgtactgcttcgcgttttcctaaggcgtggaatcgaatctccagaacaattagaagagttaggtattaatgtatatgcaagtgttccagttgcagaaattatatcgaaaacagcctttaaaaaagggacttttacgaaaaaacaaaatgattttgataaaggtctgcttgcattagttaatccaacagatttagctattgaggccatacgaggtttacgtacaagtttacattttgcaatgatggaatctcgaaataatatattaatgatttctggagccagcccaaatgcaggtaaaacatttataagttctaatttagcggcagtgatatctcaatcaggtaaaaaagtcctgtttatagatacagatatgagaaaaggttatgcacataaactctttaatgtggagcccgaaaatggtttgtctgattatttatctaaaagaattgaattagaaaaagttataaaacaaacttctattgcaggcttggaatttatctctcgaggaatgataccacctaatcccgcagaattattaatgcatcaacggatgggagagtttcttaattgggctaatgaacattatgatatggttattttagatactcctccaattttagccgtaacagatgcagctgtcataggtaattatgcaggaacaactttgttagttgcacgatttgagttaaatacaactaaagaaatgacaatagcatttaagcgctttgatcaaagcggaataaatgtaaaaggttgtattttgaatggaatagtaaaaaaggcgagcagctattacggttatggttatcaccattatggctattcgtataaagaaaagtaa

SEQ ID NO: 236179 - DNA, 489 bp, Klebsiella pneumoniae
ttgtcaaatcttcttgcttttgttggagtgcttgtatctatagctagctgttattatgcatacaaagcgttcgcatcctctagagagatatcctttccggaaagaaatcctcgagaaaatctgtgcgttcttaaatatttctcaaaagaagctaaggaatttgaaagtttcataagcaaaaataaacataaaaaggtgtatttgaatattgagtttgaaggaagtgagtttgaaatcaatgaggatggggattccttctggttggttgtttggactgaggcctatcaagaagtccctaaaggcgaaagacctgacacttcaaactgtaacgggtatcaagtgacaatcattcctcatgaagatgggtttggtaattttcattggtttcgtggcgcctatcaactgtctggtcatttctacattgatgcatttgccggtccttatcaggggctaatggtggcagtcatttctgcagccaaaaccatttaa

SEQ ID NO: 236180 - DNA, 207 bp, Klebsiella pneumoniae
atgttggaaaactattataaatcaactgacggcagagtttctgactctgagtatcagcgcttaatggctacaaaagcagctcttgaaattattaaggcagcagtagcagctccgacagatgcgaagaacgtatcatacgatttagaggaggcaattaaataccttcctaagttgactgatgctattcagaatacgattggtaaataa

SEQ ID NO: 236181 - DNA, 582 bp, Klebsiella pneumoniae
atgaaccagtcagattttgcacggttacatggtgttagccgcaagaccgttacgatgtggaaaagccggggatggctgatcatgtccggcgatgatatcgatgttgccgcttcaaatgcacagcttgaaaagtacaggaaaagcgttaaccggcccgaaaaacagaaaacgtctgcgccagaaaaaaagagagctggccaggtgttgcctgcgcgcgagccgccggaagaaagtgacccgtcactggaggggcttgcgcgggatttcctccttgaaaacggcgctgagttatcgctggatgaagcgcgccgggtaaaggaaaactacctggcgttactgacaaaattagagtttcagcaaaaagatggccaactcattgagatggctgccgccgaggaggttcttttcaatgcctttcgccaacagcgtgacgcctggcttaactggccgtcaagagtggcaccattaatggctgctgatctgggcgtgccggcggacaggatgacagaggtgctgattgaacatgtccacaaacatatctcagtcctcggagaaccagagttttacccagcagaagattga

SEQ ID NO: 236182 - DNA, 1149 bp, Klebsiella pneumoniae
atgccatttaaacggaaaacactgagcgaactgcgcgaagagaatcgccagtttatgcaggcagagcttgaaagcgtcggcgcgctgctacggtttggaaaccttaaggtgctggctgatatggatgcgggtatggcgcatttgcactatgcctacctggattatattgccctgcaaacgaacccatttacggcaaccggggaacaccttgccggctggatggcgctgaaacaggtttaccgaaaatctgccagtgccgccagatcgagcgcttgcctggcgaacggaaccgtcggggcaattctggcatccgggtcagtcctgaatcgttcagatggataccagtacaccactgatgctgaattaaaaattggtgctgatggtaccggaagtgtatcggtgacggcggtgcttcccgatattagtgatgatgttagcggaggtggcgcatcaggaaatgctgatgccgggacgctgttaaccctcgatgcgaatgtttctggtgtgaataccactctgacgctgattgaagcggccagtggtggtgccgatatcgagggtgaggaagacttccgtagccgcggcctgctggcttaccagaacccactgcagggcggaagtgatgccgattataaaaaatgggcactagcggtttccggggtaacccgtgcctgggttaagcgccggataatgggggctggcaccgttggtgtttatattatgtgtgacgggagtgataccaccaataatggcttccctgtagggactgacggtgtttcacaactggaagaatggggagcgataaaagccaccggggatcagggacgggtggctgattacatttatcctcttcagacggataccgcgattgtctatgtgtgttcaccaatccggcgcgaagttaactttgatatagcgggtatacagagtgctgacagcaccgttgtgcaggctatcaaagatgccatcaatgacctgttttttgatgaaggtaacccggacggaacggggaaaatttatctgtcagatctcaaccgggtaatcagctccgtaagcggcacaacagggtattcgcttgagcagccggcagctaatattgtgctggccatcggggagcttcctgttctcggggaggtgatattctcatga

SEQ ID NO: 236183 - DNA, 597 bp, Klebsiella pneumoniae
atgagcctgtattcacaggatgattatgcacagagtttacattccctgttaccaaacgggcgcgcatggccacgcgaaaaaggtagcgtgcagtatgccgtactgaaagcgctagggagagcgttcgcccgatctgattcgagtgctcaggggctgattaccggggctttcccgtctacggcaacaatgatgcttccggaatgggaaagtacgctgggattacctgatgactgctctatcggcgaaataagcagtattggcgatcgacagcgcgtggtggtggcaaaatttatcagtaacggcggcctgaaccgggcctactatatcggtgttgccgaagcgctgggatataccatcaagataacgcagtttcgcccggcaatggccggaatgtcagtgtgtggagatgcgctgaacggtgatgaatggccgtttacgtggttaattactgcccctgaaacgacaatcaaatataccgtagcgggtcaggcttattgcggcgatcctttgcgtgcctggggcaataaacaactcgaatgcacacttagcaaaatagcgccttcacaccttaatctgctgttcggctacgtccagtaa

SEQ ID NO: 236184 - DNA, 666 bp, Klebsiella pneumoniae
atgctcaaaattagtgatgttgagccgtcaacagcgcttgatggattgtttaccgacggcaatgttgctggtggtatttcgccaacacggcttgttgctgcgtggtttaacgtgattcagactgaactggtgaatgttgttgagagttctgggatggatctagacccagatgattcgacacaggtattacaggcgctgacaaaaatgtttctcagccgctcaaacccgtttgctgatattgcggcggatggttcagaggcaattgctcaggccctctcgaatcttggtatcgatacggcattggcagaaaaatccgaccttgctactggcgtgttgtccagtagtggatatatcaaaattcctatttcagtcagcggtaattcctccactttgattttacagtgggggacgttcaccgggaaaacctcatcgtctgccggtaccgataatgtttatgaaaactcgtcgatttatgttacatggccgattacgttcccaacgggagttcttcaggttattacgggaggatcttctgatgtaccaggcgcaggcgttcaggagatagcctggaatttagcgaaaactaatacgggtgccacctttggtgtttcttgtcgtgaggcttctgcctcaatgtctggttcttatattgcaattggatattaa

SEQ ID NO: 236185 - DNA, 1944 bp, Klebsiella pneumoniae
atgaatatagaaaaatatgacacggtaagctttgatatatttgacacattagttagcaggagaatatatcgcccagcagatcttttctcactaatgcaaattgaaatagccaataattctaatattttattatctggccatgaagaaataatagataacttcgctgaaatgagggtccaggccgaagtttcagcgagagctaaacgagtcaataaattcggaggtgaaccagaagttactatttttgaaatatatgatgaaattaaagagttaaacgttggcatctcaaaagaaattatcaaccaacttattcaactggaaatcagcactgaaaaagcagtattatataaaaataactcaggatataaactatttcaggcagcagtggaaaatggctcgaaaataattataataagcgacatgtatttcccaactagtattttaaaggaattgttaatttcatgcggctataatgttgataacatccccatatactcatcaggagaaatgcgcgcatcaaaaaatagcggggaattatatactcttataaaagaacgtgagaaacctcgtcaaaattcttggctacatgttggagataatcctcgttctgatataagtaatgctaaaaaacatggaatccatacaattcaagcggactggtctgaatacgagcatggcacatcttttcattggagagcaaaagatgttgttggcgaatcattatataaagctttatcacttaaacaaacctcatcattttacacaaaagatccattaactgagattggttttaaagtatttgggcctttacttttaggctatatatcatggatgtcaaaccagttaaaagtccataaaattgataaagctcttttccttgctcgtgacgcacacttaatttacaaaatttataacaaatacttttcagacgatcagatagaaagcgaatatgtgtatatttctcgtgcctcttcttatatgataggtatgacagactggccaatgcatagaatatggcatctttttggcggtaaaaataaaaagagtctaaagaaaattctttctatagctggattagacgccaaaaaatatatttcagatatacacaacgttggttttcccaacgaggaatatatacctaaacaaggtgatgaacataaagttcactggctaataaataaactattttctaatatcttattaaaaaacactcaaaatagaaatgagtattctggttattttaaaaaagcttgtggtgaacataaaaatattgcattgatagatgttggctggatggggaatatacaatccgttttcgctcgctcacttagcgatggctgggctactaagaatatacacggattttatttggcaacatttcatggtgcaaatgataaccgctcaatatacaataaaatgtttggttggttagcgaactacggtatacctcaagaaaaatgtgatcttttctttgctggtggcattgaactgatggagttcgctatggctgacaacacaggctccacaataggttataaaaagactgctgacggcattatccccgtaagagaaaaaaacagtgattctgaggttagctatttaaataaagcacagcgacttcagtcaggaattattgcttttttcgaatatttacatcctttattaaataaagaaaatattgatgagttaaacagtacaacactgtctgagccattctttcaattagtctctaatccaacaacctaccaaattgaggcattgtcgtcactcactcattcagaatcggttggaggtaacgcggaaaggattatgctggcaaaaaaactacctttaaaagaaaggctgttccccggtaaaatttacgcatcagaattagagaccagttactggaaagagggcttcaaaagattaaacagaaagaaattttgggcagaatacaactaa

SEQ ID NO: 236186 - DNA, 846 bp, Klebsiella pneumoniae
atggaaaagatattaacgatagtacgacataaaccaggtaggttccgttttttattaagagcattacattctgtttataaccaaacattcaaggaagtaaaagtagcaatatattgcatgggtgctgaacaggatctctctaaagatgagtattcgtatattaacacaatccaggaaaaatataaccttagtctaataccgttcaatcaagatgtatcagaaataattaaaaaaagtgattgtgaatatatatgttttttagatgatgacgatacctgggctccagagtatctatctcgcatttcaagtacgcttacagcgacacgtcttaaatacccgtcaatcaatgccatagcatgccacagtaataaagtggtagaggttgcggagagaaatagaataattattaacacaacatacccatggaatcattacttagcagttggcccgcttagttttgatgtaattcattacaagaatagccttccaatttcatcatgtttttttgttaagaactcaatatttaatattataaataaacataacttttcttcgccatctttcttttggcccttcttaattgattatttatcacaaaatgatctttggattcttccagaacctttagcattctatcattttagagaaagtaccgatttcaagtacggcaatttcacagagattaacagagaagaatgtgagattgattatagattaatgattaacaatatgatgagagatagcaaaaactctacgctattaaacacactcctatcaaacctaactaatagcaatatggtatataaactatccaacattgaaaacaaattaaatgaaagaaaataa

SEQ ID NO: 236187 - DNA, 165 bp, Klebsiella pneumoniae
atgggttacatctccatgatgacgatgagcccccaacacagcctgcaggagactaactgctccagcggccatattcagtggatttgcccctatatttccagacacctgttatcacttaacccattactggcccgctgccgcagatattcccgtggcgagcgataa

SEQ ID NO: 236188 - DNA, 351 bp, Klebsiella pneumoniae
atgaatattgtcggcgttaccgcctgcacggtggggattgcacatacctatattgcgcaaaagaaaattgaaactgcggctaaaaaagccggacataacgttaaaatcgagacgcaaggaaccatcggcattgagaacccgttaaccgctgatgagattgccgcagcagatattgtcctgcttgctgccgatgtcaaagtaacgggcgaggagagatttgccggcaagaaagtcgttaaagtcgcgacggaaacggcagtcaaatcccccggtaatgactccaacttactgatagtgttttatgttcagataatgcccgatgaccttgtcatgcagctccaccgattttga

SEQ ID NO: 236189 - DNA, 147 bp, Klebsiella pneumoniae
atgacggaacctaaccggttaagaataactatccataaaaggtatatgcttcaactcgttatccatacaatggcaacaaaatgtctgggggcacaaaaaggggcatattttttagtttgtaatattaaatccttttgtatcaattga

SEQ ID NO: 236190 - DNA, 282 bp, Klebsiella pneumoniae
atgatctacagatggcattgtagcggcgtaagcgcccagaaaatgtcatcgtgcatacggtccgtggcgggctatgctattcagccggactatccggcattactgaagcggcacaacctacgcgtcatcatgagtgtaaagggctgctgttacgacaatgcatatgcggaaagcttcttccactctctgaaagtcgaatgtatccacggtgagcactatatcagtcgtgaaataatgcggacgacggtgtttaattatatcgagtggggttacaatcggtag

SEQ ID NO: 236191 - DNA, 171 bp, Klebsiella pneumoniae
atgcgcaaagcccgattcaccgaacaccacatcatcgccgttctgaattctgtcgaatccggacgtaccgttaaggatgtctgccgcgaagccgggatttccggagccagctattacaactggaaagcgaagttccgcggtatggaagcctatgatatcaaaaaaagatga

SEQ ID NO: 236192 - DNA, 1374 bp, Klebsiella pneumoniae
gtggaaagtaaaagcaagagtgtaaatgaatcagcagcttgcacaaaagaacacataaaaaagctgcgtgaaattctctggcctcaacgttttattaaagacattgcttatgctaatcaagatacgctcttgtgtacggctttgtggggtgatgacctagcaccagaaaagctcaacaacaattataatagtgtaaagtatggcaatggtttttggttgcttgatgtaaaacttgggatcttaagaggtaataatgtatacgttataaataatttagcaatcataccttcaccattcatgtttgctaggttttcattagattctgaaaataaaaaaataagtgcaatagttagtgatgagaaacatcaagctcatatcttcttcattgggaacaacactaacgacctttataaaatggagcaccacacacccaaaccgattggatatataatctcagaaaaatgcaatcatgaatttaatttatgcgcaacatcgggcatgtatatccaaagcgtattcgacatgcctatattaataaatttattattatttattctttcgttagccttggggttattaatgtttgtaagcattaatctttttttatctaagaaagatactattgtatttcgtctcaatcaggcattgaaaactgataagttaaatatagtttatcaacctattctatccatcaaagataataaagtgataggtgtggaggcattattaagatggtatgacaatgaatacgggcgagtatctcctgatatttttatttctattgctgaaaagcatgggcttataagttacgtcacaaggtttgtaatttacaaatcaataaaggaaatgcacgaattgataaatactcataaaattgagttgagtattaatattaatacaagcgatctattttcgccattattccatgaggtgctggcaaaagcaactaatttatataaagttagccctaagttcgttactcttgaactaacggagaggcgttctgatagtacatcattaataaatgagagtttggctaaattaagagtgttgggctacaaaatagcccttgatgattttggcactggatattccaatttaaactggttatccaaactggaagttgataaaattaaaatcgacaaattcataacaaacttaatctgtacagactcaattaatgctaatgttctgaacaaaattgtttcaatacttagccaaacgcataatgaaatcatatttgaaggtattgaaacagaggggcaactctcatacctagtggctaactttcctgatgcgtatgttcaggggtatttttatgccaagcctatgaacattgaggagtttaaaaaatacttagataagaaagcttaa

SEQ ID NO: 236193 - DNA, 843 bp, Klebsiella pneumoniae
atgttgttacttcacgaggtccgtcaccagcggctgcgcaacaggattattcttgccgttgcgctgctggccgctatcgcctccatttcgcccgaacagctcggcatcacgctatacaagctgtctctggtttccatagctgccattctcggctaccaccctgatcgagcactgtttccttacgccagcccggggagctatctgatagaagattggaaagagaacctcggcaagccggtgccagtgagccgctatgagcctgaataccccgttgcaacgggctatgagctgatttgccgccgttctgctgcgatgtgcaccgattgtcgcggcgatctgcttcggcgtgacgatggggctctaacgatgatccgactcgcgcagtctctcatcctgcttagcctgctgagtggttgtcacccgttcttcgctgccagcattcaggttgaggcccggcaataccagcgcgagctgacccgcaatgcacgcgctgtctgggggcttaatgccccagtaccatcccttcaacccagcaggcggtctgtaattttttgcgaaggccattaccaccgccaggtacggcggatgctgcagatctatcagcgtaatatggagatctacgcctgctggctgcaggagtttttcccctgcggcatctgtgttagccgcccgaaaggctgctttatgttatggttcgagctaccggagcaggtggatatggtttgcgtcgtgaagcagttgtgccggctgaagatcttggtcgcgtcaggatcgctgttttcggcatccggggagtatcgagcaactgcgccctgccgccaatcgagaagcataaagagttga

SEQ ID NO: 236194 - DNA, 705 bp, Klebsiella pneumoniae
atgtggcttatgaagacattactaacatcgcggtgtattaatcaacggggagcaggtcagtcggaagttattaaccagcacccagaacgggaaagatacattcgtcccttacctgatgcccacaggcagattctggctgcgatggtggtcagacgcagacagctcacgatcatgcttacagccgaacgaaaccgattacatccctcgcatcctctgagccatgcaagcatcagatcaattatttcggccctgaagggcgagttggcgcgtattgaaggtgaaatggcgattcacatcaaggagcatttcagtgaattatccgagcttctgaacgcagttaaaggagttggctctgcgacagtcgccgtactactggcagaagtcccagaacttggctcactgtcacgacgagaaattagtgcccttattggggttgctccagtaaacagggattccggtacgatgcgcggtcgccgaactgtattcggagggcgaacttcagtccgtacagctctctatatgtcagccctggttgggacgaggcacaaccctgtaattaaagagttctatacacgcctggttgccgcaggaaaacctaaaaaagttgcactgacggcctgcatcagaaaattgctgaccatcctgaatgcaatgctgaaaaagaatgaagcatgggatccgatgtatcaccagcatgcttcgtag

SEQ ID NO: 236195 - DNA, 411 bp, Klebsiella pneumoniae
atggacggtactacactgttgccgctgatcgggataccgatcgtggttattggttttgcattgcgcttcaacccgctgctggtggtcgtggtagcggggctggcgacgggtttgctggtcggtatggatttcggcatgctgctggaaaccttcggtgagaagttcgtgaacagccgttcgctggccaccttcattctgatcctaccggtcattggtctgctggagtattacgggcttaaggagctcgcccaggccttggtggcgaagatcgctagtgccacttcggcgcgtattctgatgctttattttgttgcgcgtgaagccacggccgggctggggctgatgtcgttgggcggccatgtccagacggtgcgtccgctgctggcccgatggccgaaggagcggcgctga

SEQ ID NO: 236196 - DNA, 789 bp, Klebsiella pneumoniae
atggctggcaacgcatccccaaaaactgaaccgcgtaatcaacgaaacgctgtaaataaccttcctttagggatggtcatttcaaaattaaagccactttcaagtgatttctatacacactttcatgaaaaaaacagagcctgcctgcgccagtttaacgccatctccaatgcaatttataatattttccgcctggtagaaggtgaccaggcgacaagcactaaagttcagaaatggctctccggtgtttacgatgaactgtcgggtaatgtaaataccctcaatgagcagattgacaaaaatgtcgccagactacttctggatgattcatcatacgaagggtttgactatggtatatttgaaattcgctggaaccacccattgttctataaattgctggatattatccagaccgccaacgtcctgactcgtcaggcacaccagttgtggttatgcggtcagatatcacaacaggttcatgaccgaattatcttgcaactcctgagctcactgcaggatgctatggacaagattactaaaatactgaacgttgaaaatcgtgtgaatggaaaatacgacatattaccattcatccagagcattaagcggtttaaatcggtggaactttatattgccagtctcgaaccgaaggcccttgctcagtccggttacattgacatttcagctgatactggcagtgagcagacattaaaaccagaggaagtggcaggctctggcaagccatctgacaaaacacaatcttctgccactcctgtttcggcacaataa

SEQ ID NO: 236197 - DNA, 837 bp, Klebsiella pneumoniae
gtgactgcgctatttttacctgccggtcagcctcagaagcctgcgggagcctatgccacctcggccttttcacaggggctgacgaatggttacctgaccatggataccctggccgcgctggctttcggactggtcattgtaggtgccattcagtcgcgcggggtcacctccggccgtcttatcacgcgctatgctgttatgtccgggctgattgctggtacggggctggctctggtttacctgagcctgttccggcttggcactggcattaccgggctgattgataatgccactaatggtgctcaggttcttagcgcctatgtgcatttcagctatggcaccggaggcaatattttccttggggtgctgattaccattgcctgtctagtcacggctatcggccttacctgtgcctgtgcaggctatttcagcagcattacccgcgtcagttatcgcgcatatgcctggttttttgccacgttctcaatgctggtttcaaatctgggtctgacgcagcttatcaatatttcagttccggctctgacggcggtttatcccgtttttgtggtcctcattctgacctattttatcagaggcttattccggtcagcagcacgcgtggtggtgccagctgctctcgttgcctttttgttcggcgtgcctgacgcgctggaagcagctgggattatacaatggccatttacgcttgcccgtcagctaccactccacaatcaagggcttgcatggctgctgcccgtactggctgtcatgatagtcgccgccgtgattgacaggctgagaggtgtgacgcgcccggctttgagccaggaaagctga

SEQ ID NO: 236198 - DNA, 315 bp, Klebsiella pneumoniae
atgattcgaacaaggactattccgggaaccgttgttcccggagcggtgctttatccgtgtctggctgctgctgcgctggtgttgtttacaggcattgaaaacctgatgtggcgcaccggcgttagctatcctgcagtgttcgctcaggttcgctatgttgatgacgtcagcctgctgacgccgcaggccttaatggacatttgtggtttaccgctgacgaagcctgagcttaaaagaaagcagaacggtctgtatctgagatgcggtacgccagtcctggaaggcgtttaccggatagagcactataaagattag

SEQ ID NO: 236199 - DNA, 471 bp, Klebsiella pneumoniae
atgcaggtgataaagttggataaaatagatcgggccattcttgcggaattacagaaagacggccgactccccaataatcttcttgctgaaaaagtcggcctgtctccatccccatgtcttcgtcgcgtaaaagcacttgaagatgcagggatcatcgatcgctacgtggcagtactcaatccgcaagctgtgggaatgaaactgacggttttcgtgcgggtctggctgaacagtcaggatgctgacacaactgaccatttttcccgggaggccagtctattgccggaggtaatggagtgtcacctgatggtaggagactgcgattttctactacgtgttatgacaactgacctggaggcctatcgtcagtttcagacacagcatctgacgcgtataaagggtgtgaaaagcgtcaagaccgaactgcccatgcagaccatcaagcaaactactgaaatcccgctgagttga

SEQ ID NO: 236200 - DNA, 207 bp, Klebsiella pneumoniae
atggaacgcttcttccggagtctgaaaaacgagtgggtgccagtgacaggttatataaactttagcgaagctgctcatgcgatcacggactatatcgttgggtattacagctcgctaaggccgcatggctataacggtgggttacccccaaacgaatcggaaaaccgatactggaaaaactctaactcggtggccagtttttgttga

SEQ ID NO: 236201 - DNA, 1047 bp, Klebsiella pneumoniae
atgaaaaaaacagtacttgtcgcgggggctgtaggcgttattggacgcagcgtattggcttattacgaagataaggacgttaatcttatcgccatctcacgcaccaaaccggactttgcaacctgggccacccatctccccctggatttattggacccatcatcctctgaagaacattcagcggcactctcctccgttacccatctcgtcttcgccgcctatcaggaaaagccaacgcccgctgagctggttgacgtaaatatgcagatgctccagaacctgatagaggcactggagaagcattctcccgattttcagcacgttacactcatgcagggggggaaagcttacggatgccatatcggtccattcccttcaccagcgaaagagtcagacccacgccacatgccgcctaacttttactacaaccaggaagatttcttacgcgagtacagtcagggtaaaaaatggtcatggacagcattgcgtccagaggcggtgattggtatggccgtgggcaaccccatgaacctgctgatgaatattgcggtgtatggttcgattgcaaaagccctcggcgtacctatgtccttccccggatcgcgcgcagcatatgatgctttgtaccaagttactgatgcgcgagttctggcgaaagcggtggattgggctggctcaacagccgcgtgtcgtggcgaggtttacaacatcaccaatggcgactatttccgttggtcaaggatctggccacgtatcgcgcaattttttgatgtctccccaggcgaaccattcccgctgatgcttgaaacgatgatggcagataaatctgagctttggagggagattaccgcagcacatggtttgaaagagtatccctacaataaaattgtcgcctggaaattcggtgatttcattttcaaaacggagtttgacaatattaccagtaccatcaaggcccgccagcatggtttccaggcgtgcattgatacagaagagatgtttatcgagatcctgcaagaactgagagaccagcgctttattccttga

SEQ ID NO: 236202 - DNA, 888 bp, Klebsiella pneumoniae
atgagccacctgacgcacctgcggacatttattgaagcctacagaacggggtcgctgtcgcgggctgcagagcatcttggcattactcagcctacagcaacattacatattcaggccctggaggcactggtaggtaaaccgctctttatcagacgatcacggggtgttgaaggcacagttgccgcggacgaactcgctcgttcggtatctcctttacttgacgggctggagcttaaaatatcctctttgcgtgctggctctgcgactggcggaaccgtgcatcttgccggcccccctgattttgttcactccagtatggctgcgtcactggttccgctgatggggctggggtaccagattcggtttcagccgggaaataagcagcgtatttatgagcttttgaccagcggcactgttgatcttgcgatcaccgcatcgatgcctgatgaaaaagtgtttggttttgctcatctcgtgacggaaagactgttgctcgttcattcaccgttgttgtcagatatcattgggacctcccctgatgccccgaccctgcgtagccttccgctcattgcatacgatgaggagctaccgatgataaggacattgtggagtgcgatgttccagacgagccctgatatgcaggccgccttcaccattcctgatttgcgaattattcgagaactggttatggaaggccacggatggtccgtcatcagcgatatccattgtgctaaaaatctcagggacggaacgctggtcacgccaacccatattgaaacagcgccaaccaataatctgtatctggtctggaacaagagaatgatcagtaacagtaaggtggcgcgggttaaggaagtgatcctcagcaaattcccgaggcagctttaa

SEQ ID NO: 236203 - DNA, 699 bp, Klebsiella pneumoniae
atgctaacccgtaatgcactcctgaatggcgactttgttgatgcccatgcgcatctggtagccagtaagcaatgcctgagccgggaacagattcttgactccatgacgatcagtttaaaggagcgcccggctggcgctcccgtctggatttttgcgtacggttcgttaatgtggaatcccctcgttaccatcgaagaaatgcaccgtgccagactgcaggggtggagtcggcggttctgtatccggcttatttccggcagggcaagcccggcacagccaggcagaatgctggctcttgataagggctcggaaacggaaggcatgatctttcgccttccggagcattgcctggagcaggaactggaactgatatggacacgggaaatgatcgggggattatacattcccgtctgggctgatgtgctgttgagcaacggtgatacagtcaaagcgctggtttttgtttcggaccaggggcatccttgttacgaggccgacagtactgtctcaacggttgcaaaaatcgtctctcgtgccacgggcagtattggttcaaatgcttcttatgtgacgcaacttgatacaacactttcggcctgggcaatcagggatgactatattcagcagattgcctcaatactaaacaacaaatattgggacataaatgagccacctgacgcacctgcggacatttattga

SEQ ID NO: 236204 - DNA, 1200 bp, Klebsiella pneumoniae
atgccactcgttatttgtgtatttaccatcagtgcttttgcattgggtcttgctgagtttgtgccaattggattgaccgatgttattggccacggactgaatgtcagcctggagcaggctggaggagcaatcacaacttatgctcttggcgcgacattcgcagcgcctgttctgaccgctttgacatcaggctggagtcgtaaaaatgccatgctagtgacgaccattattttcactgcaggtagtttgctttctgccctggcgtttaatctcacgatgctattaaccgcccggttcgtggcgggtatggggcacggcttattcctggccgtagcggccagtaccgccgcgcgtctggcgggttcaaagcgtgcgggtagtgcggttgctgttgtctttggcgggttgacctttgcaatggctataggtgttccgctgagcacctggattggtggtatcgtgtcctggcgacctgcaatggctattatcgccgcagcgggagcgattggttttcttgggcttctgttcggtatgaaggacccattgcctgcaacggaaactgagaagcaaggtggtgcgttaacaggtctttctgtcttgttgaacggtaaattacttatggctacgctggttactgtactcgcttacgccggttcatttgccgcctataccttcatcgcgcctgttctgacggaagtcaccggtgtcagctctggtacagtcagcctatttatgctggtttacggtgtgatggcggcggtaggtaatgttctgggtggaaaattaacggacagagcaggtgtcagccgtgcaaatggcatcattattaccggcataactgcggtcgtcggtgcaatgtggttgttgtccagctcagcgattgcaatggctatcctgatcggtttacttggcatgttgacattcggcgcggtgccggcgttacaggcccgactgatggggattgcacatgaacatgttccacacgctcagggcgttgcatccggcctcaatattgctggttttaattccgggatcgctcttggctccgttatggggagtctgacaatctcatgggctggaatttcatggacgggtatgaccgccgctatcatcgctctggcaggtctgatgctatttattagccaacgccgtcagcatggaaaagtcgattttcgtcctgctaccagctcaggacactaa

SEQ ID NO: 236205 - DNA, 480 bp, Klebsiella pneumoniae
atgagcagcaatcaattgtcggtactcagctttcttgaggctcagctgaacggtacgttgaagcccggcgacaccacgcacatgaactatccgacgccaatatcacagctcctggattttcatctggtggccattaatgagggaactgccacgctggagatgtatgccgatgcgtcaatacacgggaatcagcagggtacggtacacgggggattaataacagagttggccgatgccaccgtcggaacggcacattctacccttatggggtctggagaaagctttacgagtatcgatattaaagcttcttttctacgtccggtatggaaattcaggctgacatcacacgcttatgtcattcatcagggtaaggccatcagccactattgctgtgaaatcaaaagggatgacggtaagagcgtcgccatcgtacagagtacagttatgacccttaagggggataaggcgtccggacgatga

SEQ ID NO: 236206 - DNA, 354 bp, Klebsiella pneumoniae
atgtcacccgttattggcggcgttacaggcgtaataaccggtgcgaccggcgtattcgttatgccggccgctccctttctccagtcgcttcgctttagtaaagatgaacttgtccaggcccttgggctgtcctttaccgtttctacggttgcgctggccgcagggctttatcttcatgacgcattccggatagagcagttttcgctgtcatttatgtccatactccctgtcctggctggaatgtggctggggcagaaggtgcgggcacgcatcagtgcgatgcgtttcaggcagtgttttcttctgttcctgattgttctgggaatagagctgatttcacgcccctttatctga

SEQ ID NO: 236207 - DNA, 3075 bp, Klebsiella pneumoniae
atgacaatgattacggattcactggccgtcgtattacaacgtcgtgactgggaaaaccctggcgttacccaacttaatcgccttgcggcacatccccctttcgccagctggcgtaatagcgaagaggctcgcaccgatcgcccttcccaagagtcgcgcagcctgaatggtgaatggcgctttgcctggtttccggcaccagaagcggtaccagaaagctggctggagcgcgatcttcctgacgccgatactgtcatcgtcccctcaaactggcagatgcacggttacgatgcgcctatctacaccaacgtgacctatcccattgcggtcaatccgccgtatgttcccacggagaatccgacaggttgttactcgctcacatttaatattgatgaaagctggctacaggaaggccagacgcgaattatttttgatggtgttaactcggcgtttcatttgtggtgcaacgggcgctgggtcggttacggacaggacagtcgtttgccgtctgaatttgacctgagcgcatttttacacgccggagaaaaccgcctcgcggtgatggtgctgcgctggagtgacggcagttatctggaagatcaggatatgtggcggatgagcggcattttccgtgacgtctcgttgctgcataaaccgagcacgcaaatcagcgatttccatgtagccactcactttaatgatgatttcagccgcgctgtactggaggcagacgttcagatgtacggcgagctgcgcgatgagctgcgggtgacggtttctttgtggcagggtgaaacgcaggtcgccagcggcaccgcgcctttcggcggtgaaattatcgatgagcgtggtggttatgccgatcacgtcaccctacgtctgaacgtcgaaaacccgaaactgtggagcgccgaaatcccgaatctctatcgtgcggtggttgaactgcacaccgccgacggcacgctgattgaagcagaagcctgcgatgtcggtttccgcgaggtgcggattgaaaatggtctgctgctgctgaacggcaagccgttgctgattcgcggcgttaaccgtcacgagcatcatcctctgcatggtcaggtcatggatgagcagacgatggtgcaggatatcctgctgatgaagcagaacaactttaacgccgtgcgctgttcgcattatccgaaccatccgctgtggtacacgctgtgcgaccactacggcctgtatgtggtggatgaagccaacattgaaacccacggcatggtgccaatgaatcgtctgaccgatgatccgtgctggctacccgcgatgagcgaacgcgtaacgcgaatggtgcagcgcgatcgtaatcacccgagtgtgatcatctggtcgctggggaatgaatcaggccacggcgctaatcacgacgcactctatcgctggatcaaatctgtcgatccttcccgcccggtacagtatgaaggcggcggagccgacaccttcgcaaccgatattatttgcccgatgtacgcgcgcgtggatgaagaccagcccttcccggctgtgccgaaatggtccatcaaaaaatggctttcgttgcctggagagacgcgcccgctgatcctttgcgaatacgcccacgcgatgggtaacagtcttggcggcttcgctaaatactggcaggcgtttcgtcagtacccccgtttacagggcggcttcgtctgggactgggtggatcagtcgctgattaaatatgatgaaaatggcaatccgtggtcggcttacggcggtgattttggcgatacgccgaatgatcgccagttctgcatgaacggtctggtctttgccgaccgcacgccgcatccggcgctgacggaagcaaaacaccagcagcagtttttccagttcagtttatccgggcgaaccatcgaagtgaccagcgaatacctgttccgtcatagcgataacgagctcctgcactggatggtggcgctggatggcaagccgctggcaagcggtgaagtgcctctggatgtcgctccacaaggtaaacagttgattgaactgcctggactaccgcagccgaagagcgccggacaactctggctaacggttcacgtagtgcaaccgaacgcgaccacatggtcagcagccggacacatcagcgcctggcagcagtggcgtctggcggaaaacctcagcgtgacactcccctccgcgccccaggccatcccgcaactgaccaccagcgaaacggatttttgcatcgagctggataataagcgttggcaatttaaccgccagtcaggctttctttcacagatgtggattggcgataaaaaacaactgctgacgccgctgcgcgatcagttcacccgcgcaccgctggataacgacattggcgtaagtgaagcgacccgcattgaccctaacgcctgggtcgaacgctggaaggcggcgggccattaccaggccgaagcagcgttgttgcagtgcacggcagatacgcttgccgacgcggtgctgattaccacggtccacgcgtggcagcatcaggggaaaaccttatttatcagccggaaaacctaccggattgatggaagtggtcaaatggcgattaccgttgatgttgaagtggcgagcaatacgccacatccggcgcggattggcctgacctgccagctggcgcaggtagcagagcgggtaaactggctcggattagggccgcaagaaaactatcccgaccgccttactgcggcctgttttgaccgctgggatctgccattgtcagacatgtataccccgtacgtcttcccgagcgaaaacggtctgcgctgcgggacgcgcgaattgaattatggcccacaccagtggcgcggcgacttccagttcaacatcagccgctacagtcaacagcaactgatggaaaccagccatcgccatctgctgcacgcggaagaaggcacatggctgaatatcgacggtttccatatggggattggtggcgacgactcctggagcccgtcagtgtcggcggaattccagcttagcgccggtagctaccattaccagttgctctggtgtcaaaaataa

SEQ ID NO: 236208 - DNA, 219 bp, Klebsiella pneumoniae
atgctaccgcgccctaaaatcacggaaattctcgatgaggtaaacagctggacgacgtttacccgacatttttcgcatataaaaaatgacattacccgtctcgatacccggctgctcctcaccaccatccttgcggatggtatcaatcttggcctgaccaaaatggcagaagcctgccccggtagcaccaaatcatcactcgaagatattcaggcttag

SEQ ID NO: 236209 - DNA, 1119 bp, Klebsiella pneumoniae; identical to SEQ ID NO: 194965

SEQ ID NO: 236210 - DNA, 1473 bp, Klebsiella pneumoniae
atgaaagggaatgtagctaaaacagggagatcatttaaaaatagggttgattatatattaaaagatgatcacagttttatttgtagcaatatgtcagcagataaaaataacgttagtgagttaactgatgagtttaaaactgtaagcggctttagacaagatataaaaaaaccagtctttcatgcatttttatctcttccaaaagatgaaaaattaacagatgaaaaatggcaggagatagcaaaagactatttgaaagaaatgaatgttgatatagaaaaacatcaatatatttgtgtgcgtcataaagatacagatcaagaccatattcatattgtagcaaacaggatcggccttgatggttctgtatggcatggtcagcactcagcatttaacacaatagcagcttgtgaacgtttagaagtaaagcacagcttaaccattactaaaggcttacaggggcaaaaatcagacgtatcagcaccaaccaagaacgagatcgagctggcattgaggacaggtgagaaaccagcccgtttagtgcttcaagcctctctacaagccgctatggtaggaaaaccagacttagggacgttcgtagaacgtctgcaggccgtaggcattgaacctcagttcaatgttgccagcactggcaacgtggcaggttgttctttcagtgtgggagatgtggcatttaaaggctcacagttgggtaaaaaatttagttggaacactataaaaaacaaggtgaaatatgacaaaaatagagatgatgaactcgttagaagattcgcagcaagaaaaacagatgacgaaaatagtattagacgatcatttgttgaaccaaatatcaatgacgatagaaccattatcagaaacgatgatgatattatcggagtcagtcagcacagcattaaaccagacacaacagacactaataagagtgaacaactcattagaggcaacaacaatcgctttaaactcagcgaaaaatacaatagaccaacaagcccaaaagttagaagaacaacacaaaaagctgcacaagtactcaacagagttaaaaaacaataccataaagaaccaatcaaaacttatactaaaagtagcttcaatagtaggggttctaaacttatcagcggttctattggtaggatacttgatcatgcagaaacagcaaacgcagccacaaataaatttagactcaagagcggtagccgtttcaatagtagagcaactaagctcgaagagatgagatataggctgggaataataaaaccagttattaagtctaaaaataaagagaagaccatgaaagaagaaataaagaaaaaaccatcatatatggttgattatgagaatatatttaaatacaaggtaaagcacgattcaaaaggaaaacaacccaaggggcaattaacacaaattgaaggtggcaggattttaaaatctaaagcctttaaactgcgatga

SEQ ID NO: 236211 - DNA, 813 bp, Klebsiella pneumoniae
atggaccttttactaaataatgacaacctgtctattagccgttatggtgatggtgaacttggaatgacgacatttaataacataggatttcaatcatttgatgaaaacctatctattagactgaaggaaataatgcaagaaggaataaaaaacaagaactgcttaatatgcatgcccgatgcttttcgagggacaaaaaacatgagatttggcccatcattattctggttttttcacaaggcatttcgctttaaaagttatgaatacttattaaatgataaatatcaatatggtaacacatcaataacaagaccatatattgattataaagaaaaaaaacaatccaaggttattttcgagaaattcaaacagatatttaaagacaaaaaaatattaatcgttgaaggtgcaggaacacgcttaggtagaggcaatgacttactagccaatgcactagaaataaaacgtataacaacgataaacaaaaatgctttttcactatacactgttctttatagaacagtgctggaccatgctaaagattttgaccttgtgcttatttcactgggacctacggcaactgtgctatcttatgatataagcaagcatggaattagatgcatcgatacaggccatatcgatattgagtatgaatggatgtgtagttctgctcaaaataaggtagcagttaatagaaaaaacgttaacgaagctggtgtcttacttagtgatgaagataaagaaactgatgatgattaccagcgtcaagttattatgcatataggtattaaaaaccaaccccaaaaggggtaa

SEQ ID NO: 236212 - DNA, 315 bp, Klebsiella pneumoniae
gtgctgccccccctgctgacgcagttccgccagcgccagccagcggtgaagattgacttacgcctgagcgacgggcatgtgggcttaactgaagaggggattgatatagcgttacgaattggcgagctgcccgattcagggctcctgtcgcgtcgcctcccgccttaccggctttgttgctatgcttctcccgattatctcaataaaaatggaatgccccgacatcccggcgagctgatgaaccacgaaacagtcaacctgtactaccagagtacaggtcagcagtttcgctggccgtttaatagcggaaaatag

SEQ ID NO: 236213 - DNA, 357 bp, Klebsiella pneumoniae
atgaacattgataatagcgctctgattcagttcacttatgccatgaaagataaaatgggttttgaaagcctgaccgggcttattgcattcgcacgagcaggatcgctgggaatttacactgccgccgcacggacgctctccgtttctccctcggctgtcagcaaaagtattcagcggctggagcagcatctcggtatctcacttttcacacgtaccacacggtcgctcacgcttacgccagaaaggcgtgagctacatgggcgtgtgctgcagctgttacgggatgctgaagagattgagcaggcggcgaaaacggcccgtactgaacctgctggcacgctacgcattgccgcctaa

SEQ ID NO: 236214 - DNA, 309 bp, Klebsiella pneumoniae
atgacacaaataatgaaagctgtacgattacatgaatttggtgggcctgccgtactgcgttacgaagatactcctcgtccggaaccgaaggccggggaagtcctggtgcgggtgcacgcggcgggcatcaacccaccggatctttacctgcgggacggttatcgcacactgccacccgagtggcagcccgatcccctctttccgctgatcccgggtactgatgtatccggcgtcgttgcggcagtcagtgaggacacccgcgatgaagtggaacggcggataaccggagtactccgcaccgtaagctaa

SEQ ID NO: 236215 - DNA, 588 bp, Klebsiella pneumoniae
atgcgcgtccgtcagattttcggctatgcgcgcgatgactgcctagctatggtcaatagtgatgactccctggtttacggccctgacaaaatcccgacaccggggtcaattcgccagtggatctacccaacctgtcctttctggtacgggtgggcaggaaatgaggccgtgggaaccgacaacgatattcacgatatcactgctacgaatatcgggttaaccggtaacgagcaggtcagcaccattctgaccacgcagtttaaaatctacaacgtgacaatcagcggcataagcagcgttaactacatgacacccggtcgcggctgggatgaggttaatgcaatcctgaaatcgtatgccgggtttggtgatgcttcccgctataaggcaggtaatgtcagcaacatcagtattaataacatcattgagtgtgcatcaaaaaattacagtgtcgatataaccctggagggccggaatatccgcgtcaatcgttatatgaaactggacacccgcgcgaaaacaaaaggtgcgctgaacatcagcagttcagccgccccgtatgtaacgacctctaatattgtggaataa

SEQ ID NO: 236216 - DNA, 786 bp, Klebsiella pneumoniae
atgtatttttttaaacgattaaaaaggtctcaaactaaagtgatttcatgtgaccatgttgcatttgaatcgttcagcaaaattaagcagctaatcaaattaaaaacctatgctttatccgatgtattatgtgttttgacagaacacgacaaaaattacatatcaaaaaaaaatgctaatatcaaaaagatagttgttatgcgaaatatatcctcttttgcagaaaataactatgactatatggatatttttgctcaaaaaaagaactgtgtgttggccgttggacgtttaacatatcagaaaaacttcgaagctttgatacaaatttgggcaaacttacctgaacacatacgtagtgcttgggagttacatattgctggagatggcgaaaataaagatacgcttagaaagcttatttcagaattaaatgttacttcatcagttaagttattgggtaatgtttcaaatattaaaactgagtatttaactgcatctgtactatgcatgacatcgaggtatgaaggtctacccatggtattaattgaggcaaaagattttgccataccagtaatctccttcgattgtcctactggcccagcagaaattattacagatgatggttttttgataacaaaagatgattgttatgctttcgaagaaaaacttcgtctactattaagtaatagtcagttacgagagaaattaggacataacgccttcaccaacagatctatgtacggtgctccaaaaattttatccgaatggataacactaattaactcttaa

SEQ ID NO: 236217 - DNA, 555 bp, Klebsiella pneumoniae
atggtatatgctgatgatgatgtcatttatggatatgattggttaaaaactttagttgattgctttaatcggtacgataggaaatgtgttgttgcttccagagtgagaataattgataagaatatttttggtagtacgaaatcatattccagttttgatatttcaactagtgaggaaaaatataatgagcgttttattattacaggtgtaggaggtgctattttaacaaaagacctgattgatagtcagtatttgaacgatgatagctttattgtagtagcacctaaaacagatgatatttggataagtaaaattatagaactttcaggaacatcagtggtttcttgtcctcaggcattaagccaagtgcatgaaatccaacactcaaattcatctttaagttcacagaacactcttttttcgaaacaatatggtccgtttaagtattttgttaaattacaagagcggatattctcatattttggcttgctcaacacaaacaatgataaatcactaaaaaataccaatatacatttccaaagaaaattaagataa

SEQ ID NO: 236218 - DNA, 486 bp, Klebsiella pneumoniae
atggacgcgctggccaccggtcgcaggatcaagtgcctgacctgcgtggacgacttcacgaaggagtgtctgacaattaccaccgcattcgggatttcaggcgttcaggtcacgcgaattctggacagcattgcactgtttcgcggctatccggcgacgataagaactgaccaggggccggagtttacctgcagagcacttgaccagtgggcttatgagcatggggtggagctgcggcttatccagccgggcaagccaacacagaacggatttattgaaagttttaacggacgattcagggatgagtgcctcaatgagcactggttcagcgatatcgttcacgcgaggaaaacgattaatgactggcggcaggattataacgagtgtcgtccacattcatcgctgaactaccagactccggctgaatttgcggcgggctggcgaaacgggaaatatgaagaaaaaccaaccgacattactaactga

SEQ ID NO: 236219 - DNA, 192 bp, Klebsiella pneumoniae; identical to SEQ ID NO: 233181

SEQ ID NO: 236220 - DNA, 144 bp, Klebsiella pneumoniae
atgaccatggctgattttgagcgataccaagcagaaagcgttaagcgcgccagcctgccgccagtagcaaagcacagtcagaaaaaaagaaatcagtcgaataagttcgaacgcatctatcagaccctgggagagacagcatga

SEQ ID NO: 236221 - DNA, 195 bp, Klebsiella pneumoniae
atggcactatcaaaagaagaacagacccagcggctgattctgctaggcgcaatcagtcaactggatgaagcggagcgcgaagaaatatttgccctgaaaggtaagtttcttgaagtgtttaaggcggcaaccaagccagagtatgcaatggcggccttagggttggtctcagtggaagctcagaaggaagaatag

SEQ ID NO: 236222 - DNA, 420 bp, Klebsiella pneumoniae
atggcaggtctgacaccaaagcaagaggctttctgtcaggcatacatcgaaacaggtaatgcttctgaggcttatcggacggcgtatgctgctgacaagatgaagccggaagccgtgcatgtgcaggctttcaagttgcaggataaccctaagatcgccctaaggattaaagagctgcaaggtgaaatcaagcagcgccataacgtaaccgttgattctcttttggctgagctggaagaagcacgtaaagcagcgcttgcagcagaaactccgcaatcatccgccgctgtggccgctacgatggggaaggctaaattggtcgggctcgacaagcagattgttgaccacacgtcctctgatggcagcatgacgccgaagccgaccataatccagctactacctgttgagccgaaatcatga

SEQ ID NO: 236223 - DNA, 1254 bp, Klebsiella pneumoniae
atgagtgaagccgttcaactgccgatccccgccaagcttgcgccgctgttcactgctgtaaataagcgttataggtgctcgcacggtggacgtggtagcgccaagacgcgcacattcgcactgatgactgccgtgaaggcgtatcagtcgatgatgaatggtgaaagcggcgtggtgctctgcgcgcgtgaattcatgaactcgctggaagagtcgagcatgcaggaagtgaaacaggcgatactgtctgtcccatggctggcggctaactttgatatcggcgagaagtacatccgcacaatcgacaagagcgttaactatgtgttctgcggtctacggcataaccttgacagcatcaagtcgaaagcgcgcattctgctgtgctgggtggatgaggctgaatcagtcagcgaaatagcctggcagaagctgagtcctactgtgcgtgaagagggatcggagatttgggtgacgtggaacccggagcgtgatggaagcgccacggataagcgtttccgtaaagaagccggcgacgactgcatcaccgttgagatgaattacacggataacccgtggtttccggacgtgcttgaaggtgagcgacagaacgatcagcgccgcctcgacccggcaacatacgcctgggtgtgggaaggagcttacctcgaaaactccgataagcaggttctggccggtaaataccggatctctgaattctcggacaatctctggaaagaggccgaccgcctgttcttcggtgccgacttcggtttcgctaaagaccctaacacgctagtgcgttcgttcatcctgcataaccggctgtacgtcgaatatgaagcgtacggccagcagaccgagctcgaccacatgcctgagctatacgacacgatacccggcgcgcgtgactggcccatcaaggccgactctgcgcgtcctgagactatcagctatctaaagcggcaggggttcaacatctcagccgctgagaagtggcagggtagcgttgaggacgggatcgcacatctacgcggcttcgacgaaatcattatccatcctcgctgcaagaacgtagcgcgcgaggcccgcatgtggtcgtacaaaacggaccgcatcaccggcgaggtattgccgaaattggccgatggttacgaacactgttgggacggtattcgctacagcctcgacggacacattaagcgcaaaggccagatggccggaatgatgattcctaagcgcctgcaagggaggtaa

SEQ ID NO: 236224 - DNA, 951 bp, Klebsiella pneumoniae
atggcaacgaagaagacgaagccaccgattctaccgcgtaactatcaggacccgaccggagctgatgcgctggaacgccgggcgatgaaagacttcgccaggcggatgaataagattggcaaagcgtacaaagcagcactcgacaaaataccttcctctctcgcagcaaacgccagatacgaataccagctaaacccaacgctactctccatcatcctgaatgatgccagttatctggttgatcaagtgcttctggatggtaacgagtacaacctgtggttttatgagtatgtcgatttggcgtcagagaaaggcacaggacagtcgttctacaacctcagccagcagtcgccggtgtacgccgccggacgtgagtccctggcatccatccttgcaagcgacccgtaccagcaacgaatggcgttggtgcatgcgcgtgtgtttgaggaaatgaaaggcctgagtgcagaagtaaagcgcgatatggcgcgcgttctgactgatggtgtggggcgcggccttaatccccgcgacattgcccgcaacctcacagaacagacgggcatcgagaagcgtcgggctaaccgtatagcccgcaccgaagtcactaccgcgctgcgccgggctagatgggatgaagcggagtcatcaatggatgatctcggcttaaacatcaggcttctccacctttccgcattaagccccacaacgcgaataaagcacgccctgagacacgcgcatacatacacagtccaggaggtcagggactggtatgccgttgatgcgaactcaataaactgcaaatgcagccaggtagaagtgcttgttgatgcggatggtaagccgctttatccgaacgtcatcgaaatggctaagaaggaattcgacagtcattggaaaaagatgaaggtcaatcattcagtttgtcactgctgcaaaaaggcagcttga

SEQ ID NO: 236225 - DNA, 1077 bp, Klebsiella pneumoniae
atgtacttctctaaagagacgctggcgactaactcccgccttggcggccactggaacgagctgtgggctaaccgcaatatgtggaacctgcagaacgattccatcattgcggcaaaccgcgcaatcatgactcctgacatgctggcctgtaacgcagttggtggtttttcccgtgacttctgggctgagattgataaccaggtactgcaactgcgcgatcaggaagttggcatggaaatcgtgaacgacctgatcagcgttcagactgtgctgccggtaggtaaaaccgccaagctgtataacgtagttggtgacatcgctgacgacgtgtcagtcagcattgatggtcaggcgccattttcattcgaccatactgaatacgccagtgatggcgatccgatcccggtatttactgccggttacggtgttaactggcgccatgctgccggcttaaactctgtgggcattgaccttgtgctggactcgcagatgtcaaagatgcgcaagttcaacaagaagcgcgttaactactacctgaacggcgattcaaaaattcaggttcagtcctacccggcgcagggaatcaagaaccaccgtaacaccaagaagattaacctcgggtctggtgcaggtggcgcgaatatcgatctgaccactgctgacatgaccgcgatctttgcgttcttcggtaaaggcgcatttggtaccaccgcgcgcacgaacaaggtcgccgcatacgatgtgatgtgggtttctccggaaatctgggcgaacctagctcagccgtatgtggtcaacggtgttgtaagcggaactgtactgcaggccgtgctgccgttcgcaccagtcaaagaaatccgcatgagcttcgcgctgagtggtaacgagttcatcgcgtatgttcgtcgtcgtgacgtgatctctccactggttggtatggctgtcggtgttgttccgctgccgcgtccactgcctaacgttaactacaacttccagattatgtccgctgaaggtctgcaaatcacagcagacgatcagggcctgtctggcgttgtctacggcgctaacctggcgtaa

SEQ ID NO: 236226 - DNA, 1791 bp, Klebsiella pneumoniae
atggcagaagttccactcccaacgccgacgcaggttccggtaccgagtaccgatattcgtaatgcggtatttgcaggcgcgaagcttgacgaagaagttactggcctcggtgatttctatactgaccgtcttggtgcaaagcatctgacaaacaccgggagaaataaccagtttcaggatgcgcagaatcaaagggattctgatttcgttgcgtcacaagcggataaagaagcgcgttttcagcaattcctcttaacctctggctatcagtttttaggagattatgaaaacggaccgtatacaattacggaattaaaccaggtcattcgttatcagggtgaattatggcgattaaatgcttctaccactccaccatatacaacgactggtattaatagcacatcatgggcggttgatgttacacacttggtaagtgttggtgatgctaatttaaggcaggaattatctttctcttctggactaaaattaattggacaatgcgcaagcatagccgcgttgcgcgctattacacttgattatgtagggcagcaagtatttgttaaagagcacactgcgggtatggagcagggcggcggtattttttattgtcattctttgacaaatccaggctcacttgttgatgataacgggttccaaatagttacggcatctgggcaagtcttacgtagaaaagaccgcaacataatgtctgccgagatgtttggtgctatcggcggacaagatataaatcctgtattgaacaatatgatcatagcgtctaaaacgttcaacattcaagaggcgtatataccccatcctcttaataaaatcgcctatacaggtactggcggaagcgttgctgatgttactgatgggattggttttaatttaaagggagtagagattgtaaataaaggccctgcaataaatcacattgcagataacatctttttaaggtttagaaaagatgggactacaacaactagtttttatgaacaatgcagtgttacaggccttctcatccgaggacgcaatgcggaaaatacggcagcaggtaataatgggtatgctgtagaagcttctgacataattggcttctattgtgatctgttctgtaccggatatacaaataccgcggcggctgcggtgtcgctatacaatgatacgagttttacggagcaatctcgcattaagttacatattcgaaactgctgtaatggtatccatttccaccgtaatgcttcgactggagcgacaagtacaaactcattcatgggtacagaacttgacttgtctttccaagctgccgtttctggtaaaactaacaatggtattgttgtaggaaatttagatggtactgccacgtcaaacacatttgatgttaatttgtatgcttctaaaattaaaatgaaatattgggcagaaggaggttctgcgacacgggctattctagttacagctaaaggtatagtgccagaatcaacaacatttgacctgatatcagatggctacggatttggcacgtcagatacggatacaactacagatccggctacacagttaatccgtgttgaaaatggcggtgtattccgtgctaaatgcatcgatcagtcaatgcaaacagggttgagtcaccgacttaaccaactacagcgtctcaggaacagtattttttcattccaggacgatacgtataaatttccatataatgacgcacgcccttacatcaaccctgtgggcatgtcttgtatttgctctggcactattgatgtggctacgcggctttgttga

SEQ ID NO: 236227 - DNA, 396 bp, Klebsiella pneumoniae
atggaaaatgacagcgataacgtcatcactctggtgcagcccaagcgcgacgaagagaagctactgaacatcaccgtaaccgacagaaaggactacaggcagcaacagtgcaagcataaagccgttgaagtcgatgagaaggcgcggatcattctgtgccttcaatgcggctgcgctgttgacccattccagtacgttcttcagtgcgcgactgatggcgaggctgtggtgagagagattcagcagcttcataaccgtcgtgatgagctgcgtgaagccgtcgccaacctcgaacgcgaagagaaaaacgcaaaggctcggttacgctcagccaggaccgcaattctctttgcagagaacgacctgaaaaacacggagcagggagtaaaacaataa

SEQ ID NO: 236228 - DNA, 741 bp, Klebsiella pneumoniae
atgttagaatcacttaaagaatatttttcttctaccatcaatacagcagccaacagaatcagaaaccctgtttttggtgcatttgcactttcgtggtgtgcatttaactggaaatctatactttatctttttctcagtgattacggtgtttatgacaagataaattacatttctgaaaacagcagttggctgacagtcattctctatccaatcggatctgctatttttctgtgcggattgttgccttgggttaacaactacgtatcagcatggcaggataagccgcttgataatagcgactctattgaaaaccaccgcaaggctaaacgtattctccgcgctacacgcttacagcgacttaaagctaagcatgatgtaacctatgacagagttagaactggtgccgagaaagacatccagaccatgaaggaagacattactaaatcacaggaaaggatgggtgaattaacaaaagaaatcgacacccttaaatttgataataatgacttgacaaaactaaactcagggcttggcgataaggtcagatatttggaagcgacaatccataatacaaacattgaaaacgagaaattaaaaaaacaattagatgagattaagggatattttaatattgaaactaaaaccttagttgacaggaccataccaattactaataccaactctaacggaatggctgatttttttagaaatgaagcgaataatcactcccatgggtcatag

SEQ ID NO: 236229 - DNA, 132 bp, Klebsiella pneumoniae
atgatgaataagattaaaaataacgtgtgcaggaataacaaaagtggtgaggtttattttttaccaccagaaaaacgcagtatttttactggcaataaaataatctcctcgcgtaataaaaaaggtaactga

SEQ ID NO: 236230 - DNA, 1401 bp, Klebsiella pneumoniae
atggctactctggtaaaaagcaccagtaaatttatggggcgtaaggccgtcgcagctgatgcgccgctgcctgacaatgcgttaatgtatctggactttgaaaacggccagtttatccgcagaacctcaaccggggcggtaattcgcagcaacagcataactgacgtgatgtcatttacccgcgccaccgtggcaacgtatttcggtgatgacggcctgctgaaatatgcagcagctggtgaacctgttattgaatatgaccagaatacgctcgcctgtctggggttccgtcccgaagtgcaggccactaaccgggttatcaacagccagaactttttagcggcgaactggagcaaaacggggatcgaggttaccgataatgatgccgtgtctcctgacgggaacaagacggccagcaaaatcatagaggccacaggagcggctaataccgttcactctcttgccacgacggtcacctatgctgcggttgtcggccagccctacacattcagcatttttgcaaaggcaaacagcggatctgttatgcagattgcattgcctgcgggcgtcgtcgccagcgcgcagttcgctaattttgacctggtgaacgggaagatcacgcgctcctctccgctggtcatgcaggcgaatatggaaaagtgcccgaatggctggtaccgctgctcgctgacgatcaatcctgttgccgcgggcgaaccgggttttactgtctgccttaccggcggaaatacagcagctgaagcactcccggcctacagcgcaacaaccgtcgcatcgatttacatctggggcgcccaggcggaacgggccgcaggctatacctcatacattccgacggcgggggccgaagcgagccgcgatgcggatatattaacgaccccgtccggctatacactgattgattctgcaaaaggcgcgttctttgtctcggtggtgcatcctcacagcctgaaattattatcgacggcgtatgcttcgctggcctgcgccgtcgttctggataatgcggtggaaggtgcccattaccgccttgcctggcgaggcagggacaacatgaacgggcaggcggcatttgccgaactgaatgctgccggcgggacgacggtatccgtcaacctgccgccgttaatggcggtctctgattccgagcaggccgcattctgcatgttcagtaccggcgatttatccatgaaagcatttgatggtcaggtctggaattcggcatctcccacgatcatgcctgctgcgctgtcgcgcatctgcctggggcgctcatatatcggtgcatcaaactggtttaacgggcatatcaaaaagttcgtttactgggctgataacatttctcaggccgaagccgaagaatatttttcagttctgtaa

SEQ ID NO: 236231 - DNA, 840 bp, Klebsiella pneumoniae
atggcgagatttttacaatcagatgaatcgcccctggctggcggtggaaactattttgagaacgaccctgttattatccgcgggcagacgctgggcctgctcgatttcagcaatgatgtttgttatgccggcggcccccctgttccagcgtatgcgaatctgttaaatctggtttatggcgggaccaacgccaccaatggcccgaatgctcgcgtgctggaaacaggcatgctgaaattcgacggtaccgaacctaacactaatgattatgtgctgctgccgacggatgaattttcgttacccgctaactgtaagcgggccctcgcgagcgtggcggtaaaattgccggcgtcaggatatggcacgcccgcagctaaccggtatcctatgttttttgggcgcctcaataataccgctgccgccaatatcaattttggtatctgggggattatcagcacttccggggatatcacgtcagttcagggcgcattgatggggtcagtaccggtatcggccacagcccaacttgcaacactgaccgatgggaatgtgcatgtggtgtccgtctacgcagacggggagaccactgcgggaacactggttacacgaatttacgttgataatattctggtggctacagcgacgaataacgcgtggggtggtgttgtgcctcagccaaccaacctgccgcgtatcggcagttaccctgcaacaatacattccccgtggggcgggatgaaagttggtcgcccgatgctggtaaatctcaccgggaaaacaactgttgcgacagatttgatcgcccaggcggtgacgttagctaacgaatacctcatttaa

SEQ ID NO: 236232 - DNA, 1770 bp, Klebsiella pneumoniae
atggcctttaatccgccgttggggagcacttctccggaggtgctgctcgataatgcaaagcgaatcgatgagctggcgaacgggcctgcggctactgttcccgatcgcgccggtgaaccgctggactcctggcggaaaatgcaagaagacaacgccgcactggtggatgaaacacgccagaacctgatccccctcggcaagcagtacatgacgtttgaggcggcacaggctgatattgcgaatatcccggagggcagcgcaacgtatgtacgtagcgccgacgggagctcgctggcagacgagtacatcaataacgccggtacgctggaggctaccggacgcgccatggtgtccaagttctacatagacgtcagattgccttcctcaagccggagtcgtttatatgctgcggttctgggtgatgacggcacgattcttatcggcgggcgcaaatccgacgggaaaacggagattgcagacggaactgttttagaggacgttatcggcacgctgcgggtttataccaatctcgatacagcaatatcgaaaacggcaattgatatgtgcttcgtttatcttgacgccaataatgacgcagcgctttacgccaaagtcaataatacgcctgttccggtattttccatcatcacggaaaatcaaattacgaataaatttcagcgttcaggctatatagccggagccgccgggaaaaatgatgaactgctgtacggcagccggaaatctgacggggcatttttcacctatctgagcgggaatatcgacgaaaaaattaagtggctggaggataattccggcggcatcacgcatgcagttatcgcagacgcttacggcgacagtaaaacagccggtaccggtggcacgccatacccgacacaattagccgcgctcatcggcgatggatttgcgcaaaacaattacggtatcggcgggcaaaaatccgctcagattgcgatgcgaatgggggccgtaccgacatatatcacggtcagtggcaatgcgataccggcggcaaacagcgcggttaccatcacgcagtttaatggcgccagcgcaacggctacaccggcatacccgagccaggaccgccgcattctcagcaccaattcggacaatacaacgcgcacactggacgggtggatttgtggtgttaaatgccgcatcacccgcacggccagcggcgccaacgacaacaccaaaacggaggcgtacacgctgaccgcactggaggggactggtgtgcgttgcctgccagggtcgttgttcgtcccggattatgcgctacaggactattcggaccgggagatgtggatttgtgccggtattaacgattttcgctccggagcgacaacctctgctgattacgatgatgacgtggcggccatcaaatctaatgttgatgccatggtggcgtttgccgagaaatccggtcggaacatccttctgtttggtcagactacggataactattccgtcgagttttacggcggcatccgctatccgcgcattttagagctcaattactactggtcgcagaaataccccgattattacgtccgggggagtaatggcctagacctgcgcgaaacactggttgctgcctatgacggcagtatcgcccaggacgtgatcgactacggaaatgacatcactccctcatcgctgcgcagcgacaaccggcatcccaacacagccggctacggcatttatgcagctctgggctatcaattcagaacaaaacgaggctattga

SEQ ID NO: 236233 - DNA, 462 bp, Klebsiella pneumoniae
atgaaattagaaactgtttacaaagtattttcagatataaaaaatgaatgttgcacggagataagctcaacattaaatttaaaaaacaaattaatatcttatatcaataacaatgatttaataagcgcatcagtatcaacttctattacagataataaactcatcatcgacttctcatatttcaatttaaaacttgagtgcaaagagtctctaaagctgtatgactacccaccgaatatttcttcgtgtttagaaatgcacttcttttttagagaaaatgatatatttcattccgtattaaagatattcataacgcacgacggctatgtcgtgaaagatgttttctcaagcgattatatttgcaagaccgataacgaataccgagggaaaaaagttttcgaagaaataatatcggcacttattgataaaggatatatagcgttgaaccgtgaacaactatga

SEQ ID NO: 236234 - DNA, 519 bp, Klebsiella pneumoniae
atgccaaaaacggtgattaatatggataaattcgacagagacattcaacgggaaacattacaacttctttatgctgcttacccaaacgaactgactagcgttcaaatggatgaaatagaacgcctttatcctgatatggataacctcattgcaaaccttctctatctccatcagcaccaactaatctccagcggcctgaaggctagcactgaaggttacgttctggttaacagaccggaaataacacacagaggcattgatttcatccgtgatgatggcgggctgggcgctattctcaacgtgcagaccgttaaattacatgacagcacgatcattgccctggaagacataatccgtgttgcaaacattcctgaagagcagcggaagggactgatttcaaaacttcgtgagcttccggcagacgccataaaacatttgacgcttcaattactgactccggcggttctgcatccacaggccgtaattcagtcaattgaaaaattcctccagacgatgtga

SEQ ID NO: 236235 - DNA, 480 bp, Klebsiella pneumoniae
atgagcattagcgaaaaccgtcttaaagcaatcgtcgatggagcacccttcttcccgggtgaggtggtggcgatggcgcttgagcttctggcgtattctaaagaaacattgcggccggaataccctgaaacactcccctgcccggtcattcttgaacccggtttccggttcggtaaaggtgtcagcactcaccttgtcctgcgtgcgcctcagaaccgtgcggagcgttacgccgagctggacgcgatggggccagaagctcgtgcaaagcatgacgccgctatcgatgagcttcggaaaacgctggggtttggtgcgccaaataagctaagcatcaccctgcctgatatcggctcaaaagcgttctggagcgctacaggcaagagcgaagtcttccatccggagacgtacaaacgctgggctaaagaggcgatcgagcacggttgcgccattgcccggatcgaggtggaggtgaagtga

SEQ ID NO: 236236 - DNA, 342 bp, Klebsiella pneumoniae
ttgtgctttgccttaacgccaccagcttttaatccgccttcgattggcgaacgtaaaaagctggtcagtatcctcaagcggtccgggttgaccctgacgaccgcccggatcaaccttcttcaccacctgacgcaaaaccagatcccacttacggccttcgacctgtcaaagttggttaacctgccgctttcaacagtacatcgaaatctttcgatgttcgctgattttgggctggttgattatatcgttgaccgttcaagcgtctgccgctggtatcttctgaccgcaggccgtccgaacttctgcccgacctgtaaccaggctttcaacaccgcttactga

SEQ ID NO: 236237 - DNA, 288 bp, Klebsiella pneumoniae; identical to SEQ ID NO: 153274

SEQ ID NO: 236238 - DNA, 1863 bp, Klebsiella pneumoniae; identical to SEQ ID NO: 153275

SEQ ID NO: 236239 - DNA, 249 bp, Klebsiella pneumoniae; identical to SEQ ID NO: 153276

SEQ ID NO: 236240 - DNA, 270 bp, Klebsiella pneumoniae; identical to SEQ ID NO: 153277

SEQ ID NO: 236241 - DNA, 291 bp, Klebsiella pneumoniae; identical to SEQ ID NO: 153278

SEQ ID NO: 236242 - DNA, 1116 bp, Klebsiella pneumoniae; identical to SEQ ID NO: 153279

SEQ ID NO: 236243 - DNA, 189 bp, Klebsiella pneumoniae; identical to SEQ ID NO: 153280

SEQ ID NO: 236244 - DNA, 267 bp, Klebsiella pneumoniae; identical to SEQ ID NO: 153281

SEQ ID NO: 236245 - DNA, 966 bp, Klebsiella pneumoniae
gtggaacattttctggcattaaccctggcggggcgattgccccatcactttcacggcgagacggcccatttccgctggcactggctcggggaagggatccttgagctgacgccgcatgcgcgctgcgagcgcgggctggtactttcctgcgccattcatggcaacgaaacggcgccggtggagatagtcgaccacctggtgcagcgactggtccgggaggcgctcccgctgcgctggcggctgctggtgatcgtcggcaatccaccagcgctgcgggcgaataagcgctatctgcacagcgatatgaaccgcatgtttggcgagcgctggcggcagtttccgctcagtgaggagacgcagcgggcgcagcggctggagcaggcggtggcccgcttttatcgcgaccacgatggcccgcgctggcacctcgatctgcataccgcgatccgcgggtcgctacatccgcgcttcggcgtgctcccggcccgcgatacgccgtgggaggaggattttcttcactggctgggcggcgccgggctggaggcgctggtgtttcatcgccagcccggcgggaccttcacccacttcagctgcgaacggttcgcggcgctggcctgcacccttgagctgggcaaagcgctgccgttgggggaaaacgatctgacgcagtttgccgccgtccagcgggcgctctcccggctgctggtgggggatctggccattgccgacgccccggcgccgctgcgctaccgggtggtacagcagctaacccgccatagcgatgatttccgcttgcatatggcggatcagacgctgaacttcacccccttcgaacccggcacgctgctggcagaggagggcgagacgcggtatgtggtggggcctgagacggagtatgttctgtttcctaacccgacggtggcgaaaggactgcgcgccggcctgatgctggagaaattatcctga

SEQ ID NO: 236246 - DNA, 3309 bp, Klebsiella pneumoniae
atgctcagatatacctgtcatgccctatttcttggatcgttagtattattgagtggctgtgataacagctcttcctcttctacctctggctcaccgggttcaccaggcaatcctggcaacccaggcactcccggcacgcccgacccgcaggatgtcgtcgtccgcttaccggacgttgccgtcccaggcgaagcggtgcaggcttccgccaggcaggctgtcattcatctcgtcgatatcgccggcatcaccagcagcacgccggccgactatgcgacgaaaaacctctacttatggaacaacgaaacctgtgacgcgctgagcgcgccggtggcggactggaatgatgtcagcaccacgccgaccggcagcgacaaatatggcccttactgggtgatcccgctgactaaagagagcggatgcatcaacgttatcgtccgcgatggcaccaataagcttatcgacagcgacctgcgcgtctctttcagtgatttcaccgatcggacggtatcggtcatcgccggcaacagcgcggtctatgactcccgcgccgacgccttccgcgccgcctttggcgtggcgctggccgatgcgcactgggtcgataagactactctgctgtggccgggtggggaaaataaacccattgtgcgcctctattacagccacagcagtaaggtggccgccgacagtaacggcgaatttagcgataaatatgtcaagctgacccccaccaccgtcaaccagcaggtaagcatgcgcttcccgcatctcgccagctatccagcctttaaactgccggatgatgttaacgtcgatgaattgctgcagggcgagacggtggcgatagccgcggaaagcgatgggatcctgagctccgccacccaggtacagaccgccggcgtgctggacgatacctatgccgccgccgccgaggcgctgagctacggcgcccagctaaccgatagcggcgtgaccttccgcgtctgggcgcccacggcgcagcaggtcgaactggtggtctacagcgccgacaagaaggtggtggccagccacccgatgacccgcgacagcgcctccggcgcctggtcatggcaggggggaagcgacctgaagggcgcgttctaccgctacgcgatgaccgtttaccacccgcagtcgcgtaaagtcgagcagtacgaagtgaccgatccctacgcccacagtttgtcgaccaactcggagtacagccaggtggtcgatctcaacgacagcgcgctgaagccggaaggctgggacgggctgacgatgccgcacgcgcagaaaaccaaagccgacctggcgaaaatgacgatccacgagtcgcatattcgcgatctctctgcctgggatcaaaccgttcccgccgaactgcgcggtaagtatctggcgctcaccgcccaggagagcaatatggtccagcatctgaaacagctgtcggcctcgggcgtgacccatattgagctgctgccggtcttcgatctggcgacggtcaatgagttcagcgacaaagtcgccgatattcagcagccgttcagtcgcctgtgcgagatcaacagcgcggtgaagagcagcgagttcgcgggctattgcgacagcggttcgacggtcgaagaggtgctgacccagctgaagcagaacgacagcaaggataacccgcaggtgcaggcgttgaatacgctggtggcgcagaccgactcctataactggggctacgatccgttccactacacggtgccggaaggatcctacgccaccgatccggaaggcacggcgcgcattaaagagttccgcaccatgattcaggcgatcaagcaggatctgggaatgaacgtcattatggacgtggtgtacaaccacaccaacgccgccggcccgaccgaccgcacctcggtgctggataagatcgtcccctggtactatcaacgcctgaatgaaaccaccggcagcgtggaatcggccacctgttgctccgactcggcgccagagcaccggatgttcgccaagcttatcgccgattcactggcggtatggaccaccgattataagatcgatggcttccgcttcgacctgatgggctaccacccgaaagcgcagatcctctcggcctgggaacgcattaaagcgctgaacccggatatctacttctttggcgaaggctgggattccaaccagagcgatcgctttgaaattgcctcgcaaatcaatctcaaaggcaccgggatcggcacgttctccgatcgtctgcgcgacgccgtgcgcggcggcgggccgttcgactccggtgacgcattacgccagaaccagggcgtgggcagcggggctggagttctgccgaatgagctgaccaccctgagcgacgatcaggcgcgtcacctcgccgatctgacccgtctcggcatggccggtaaccttgcggactttgtgctgatcgacaaagacggcgcggtgaagagaggcagcgagattgactataacggcgcgccaggcggctatgcggctgatccgacggaagtcgtgaactatgtgtcaaaacacgataaccagacgctgtgggacatgatcagctataaagccgctcaggaggcggatctcgatacccgcgtccggatgcaggcggtgtcgctggcgacggtgatgctcggccaggggatcgcctttgaccagcagggctcggagctgctgcgctctaaatcctttacccgcgattcgtatgattccggcgactggtttaaccgcgtggactactccctgcaggacaacaactacaacgtcggtatgccgcgcagcagcgatgatggcagcaactatgacattatcgcccgggtgaaagacgcggtggctactccgggtgaaacggagctcaagcagatgaccgcgttttatcaggagctgaccgcgctgcgtaaatcgtctccgctgtttaccctcggcgacggcgcgacggtgatgaagcgcgtggacttccgcaatactggcgccgatcagcagacgggtctgctggtgatgaccatcgatgacgggatgcaggctggcgccagtctggacagccgtgtcgacggcatcgtggtggcgatcaacgccgcgccggaaagccggacgctgcaggacttcgccggcacatcgctccagctgagcgctattcagcaggcggcgggcgaccggtcgctggcgagcggcgtgcaggttgccgctgacggttcggtcacgctgccggcctggtcggttgccgttctcgagttgccgcagggcgagtcgcagggcgctggcctgccggtgagcagtaaataa

SEQ ID NO: 236247 - DNA, 843 bp, Klebsiella pneumoniae
atgccagtttctgtgatgaggttaacaaatataaataaagggataattaaattattaccacaaattgtgacgctcatcatattaataaccgctatcccacagctggcgaaattaacctggcgagtggtattccctgtgagtcctgaggatatttccgccctaccgttaaccatgcctccggcggcagatccggaattaaaaaatgtgcggcccgcatttaccctgtttggcctggcggtgaaaaatagccccacgccaacggatgctgccagtctcaatcaggtgccggtttccagcctgaagctacgcctggccgggctactcgccagcagcaacccggcgcgctccatcgctattatcgaaaagggaaatcagcaggttagccttagcacgggcgatcccctcccagggtatgatgcgcggatcgccgccattctgcctgaccggatcattgtcaactatcaggggcgcaaagaggccattttattatttaacgacagtcgcgcgccgtcgccgccgcccaccgccgcgggcaacccgcccctcgtgaagcgactccgcgaacagccgcaaaatatcctcacttatttatctatttcgccggtactcagcggcgacaaactgctgggttatcgactaaacccaggcaaagacgcctcgctgtttcgccagtccggcctgcaggcaaatgatttggcgattgccttaaacggcatcgatttacgcgaccaggagcaagcgcaacaggcgctgcagaatctggccgacatgaccgaaataacgctaaccgttgagcgggaaggccaacgacacgatattgctttcgcgctgggggatgaataa

SEQ ID NO: 236248 - DNA, 1131 bp, Klebsiella pneumoniae; identical to SEQ ID NO: 4874

SEQ ID NO: 236249 - DNA, 363 bp, Klebsiella pneumoniae
atggatctcttttccaaagagaaagctcgcataacagctgaactgtctcctttcgaaccttcagcgcaaactacctccctgctcctatcagaagcatgggggatgttcaccgcagaaaagggtaaaggctgggctgctaccattgccaacgagaatcagcgttattacgacgttttgatatatgttgttggtgaccttcctgtttcttcaatcagtaagcaaaatattcgacagacattggaagtcgtcaaaaacctcccacgtagaaataaaaaaccttactcagagtggacgcttgagcagtgtgttgaagctgatatcccggaagatgatctgatcagtagtgccaacgggctttgttga

SEQ ID NO: 236250 - DNA, 1122 bp, Klebsiella pneumoniae
atggatcaacatcccctggttattaaagggtacaagagcatcgcggagctttcccttgtggaaagcccaccgtttatcacttttgccggagccaatggtgcgggcaagagtaacattaccgatgcattggctttttttggtgctgtggtcaagaccggagcgactcaggctattcgcgatttcggtggttttcagcagattcattgctacaaactgcgtaaggaaaatcggactacggcttcactgcaccttcaaattgagctgggagggaaaaagtttacctatgacttgacgatcaaaaccatggataaaaaaccaacaatcactgaaaagttggtcattgatggagatattcatattgatcgtaagcacccagatactcttatgattcgcctaagcgatgatgaggaaacaccagctacttatatccctaattattcgtcggatatgacagcgctaatgttgctgggcaaaagtgaactgtacgcttttttgaccaatattgttgtttttcgcatcgacccgttacgtgctaaagagcccgatagcgccaaaactgactcgacatttctggacagtcatggtcgaaacattgcttctgtgcttgctgctctcgaatcgaatagcgaatttaaagagcaaatcctggagtggatggaactcatcgttccggggatggaaaatgtatcgaccgagaaacaaaaattggatggctcaacggtattgacctttaaagaacagggaactcgtgcccgctttcctgcccatcttatctctgacggcaccatcttcacgctttgtattatgacagccatcttgagtcgagcacagcaaacgggaatgaccattattgaagagcctgaacgaggtattcacccaaaagccattggggaactggtgcaattgatgcgtgaaaatgcctctttgaatcatccgattgttattactacccatagtgaatctattgttcgcaatctggaaccagacgaactgtggtttgttagtaaaaaagaggggaaaactcagctgatgcatgcttcagatgcgggggttgataaaaaggaaatcccactggatacagcgtggctgatgaatatgtttgatggcggtttgccatggtaa

SEQ ID NO: 236251 - DNA, 3657 bp, Klebsiella pneumoniae
atgaatacgtcaaatatcaaaaaatacgccccagtggcacgtaaacagttccgcgatgcggtcatgcaaaaactgaccacgctgggtattgaggccgataaaaagggaaacctgcaaattgctcaagcaaccgatcttggcgacagcgtgcgttatggtcagttctcgttggataaatcactggcttcacgccgtgagcgtctggtcaaacgagcagaaaagcagggctacgacgtgctggtggaacacattgcttacacctggtttaaccgcttctgcgctattcgctatatggagctgcatggctatcttgatcacggtttccgtatgctgtctcacccgacgctggaaggtggttttgaggttctggaccatgtgcctgaagtggctgatgcacttgggctggacaaagcgcgtttggtggagatgaagctggcgggcgatcgtgacgaagagctgtatcgcgaactgctgctggcccagtgtcatgcgctgcacggtgcaatgcctttcctgttcgaagcagtcaatgatgaaattgagctggtactgccggataacctgacccgtaccgactctattctgcgtgggctggtggacaccattcctgacgaagactgggaacaggtcgaagtgatcggctggctgtatcagttttatatttccgagaaaaaagatgatgtgatcggcaaggtggtgaagagcgaagatattccagccgccactcagctgtttaccccgaactggattgtgcagtacctggtgcagaactcggtgggtcgccaatggctgcaaatctacccggactccagcctgaaaggcaaaatgccgtactacattgagcctgcggagcaaacgccagaagtgcaggcgcagctggctgccatcactccatccagcattgaacctgaaagtatcaaggtgctggacccggcctgcggctccggccatatcctgaccgaagcctataacgtgctgaaagcgatttacgaagaacgcggctaccgtacccgtgatattccgcagctgattctggaaaacaatattttcggtctggacatcgacgaccgtgccgcacagctctccggttttgcaatgttgatgctggcccgacaggatgatcgccgcattctgagtccaggccgtggcgttcgtctgaatattgtttccctgcaggaaagtaagctggatattgctgaggtttggaccaagctgaacttccatcagcaggtgcaacgcggcagcatgggagatatgtttacccaagggacggcactggccaataccgacagcgcggaatataaactgctgatgcgcacgttagcgttgttcactagtgcaaaaacgctgggatcactgattcaggtaccgcaggaagatgaagcggcgttgaaagcgtttctggatggattgtatcgtctggctattgagggcgatattcagcagaaggaagcagcgacggagctgatcccatatatccagcaggcgtggatacttgcgcagcgctatgatgcagttgtggcgaacccgccgtatatgggtgggaaagggatgaatggcgagctaaaagagtttgctgaaataaacttctctaaagctaaatccgacctattttcgttgttcattgaaagaagtatttctttctgccatcaaaactctattttatcaatgatcacaccttatgtgtggatgtttattggttcattcgaggatttaaggaaagaaattttacgacgtcattcaataagcacattaatacaattagagtataatgctttcgcaccagcatgtatccctgttgcagcattcacattaacacaagattcacttagagaatataaaggcacatttataaaacttagtgatttcaaaggagtggatagccaatcccctaaggtcttggaggctgttggtagagaaaaatgttcctggaaatatatcgcttccaacagtttatttgatactctgccagggaatccattgctttactgggtaagccaagaactttccaaaacatttaactataataatggttttgaaaagcttggtgagttatgttcacctaggaaaggaatggctactggtgataataataaattcgtacgatactggaatgaagtcgactttagtcgctcaagtctaaatattgataatgagtattcttgggtgccttacaataacggtggtgaatataggaagtggtacggaaatatcgatcgatttatatattggaaagatgatggctttgccataaaaaatttcaaagatgaaaatggaaagctgcgttctcgcccacaagggttagatcttaaatttaaagaaatgttaagctggacttcattaagttcaacctatttaggagttagatattatcctaatggatttatcagcgatcaaaatggtaattttttagtacctaacaatcgtttcgagaatgatatttattttattcttggctggctttgcagttcaacagctaatagaattgtaaaaatgctcaaccctacaatgcatatattggttagtaatatttcaaatcttccaattcccatggacgaagttactatcaaagaggtttgtgatataacaaggcgttgcattgatatatctaagactgattgggataaatatgaatcttcatggggctttatacgtcctgcaataatcacttcacagattgatttgaaatctgctgttttacttgaaatcaaaaactgcaaatccatggtcaatgagctaaagagactggaacagcgaaacaatgatatcttcgcattgaagtttggggtttctgatttattaggttatgagctaacttccgacgatataacattgaatgtaaaggaagtaatgttatcaactgaaattttcagttcaaaactcattacggaattgctttcatacatcgttggcactcaaatgggccgctactccctcgatcgcgaaggcttggtttatgcccatgaaggcaacaaaggtttttctgaccttgttgaagaaggtgcctacaaaaccttccctgccgatgaagacggcatactgccattaatggattccaactggttcgatgacgatgtcacagcccgtgtaaaagagtttgtgcgcacggtctggggtgaagaacatctgcaggaaaacctcgactttatcgctgaaagcctctgcttgtatgcaatcaagccgaaaaaaggcgaatcttcgctggataccatccgtcgctatctttccacccagttctggaaagatcatctaaaaatgtacaaaaaacgccctatttactggttgttcagctccggtaaagagaaagcgtttgagtgcctggtgtacctgcaccgttataatgaaggcacactgtcgcgtatgcgtaccgaatacgtggttccgctgcttgcgcgataccaaggcaatatcgatctggttaacgatcagcttaagaatgctgaatccggcgctgccactacccgtctgaaaaaagagctggatgggttgagcaaaaaattcaatgagctgcgcagttttgacgaccgcttgcgtcactatgctgatagacgtatcactattgatctggacgacggcgttaaggttaactacggcaaatttggcgatctgctggccgatgtcaaggccatcactggcagtgctccacaggaggaataa

SEQ ID NO: 236252 - DNA, 3615 bp, Klebsiella pneumoniae
atgaatattgaacaaatttttgagaaaccgctaaaacgtaatattaacggcgtggttaaagccgagcagaccgacgacgaaagcgcctggatagaactggatgagtacgtcattactcgggagctcgatggtcacctgcgtcagttctttgaagtctatgcccctgctactggaccaggcagattacagcttgccgacaaaatgggcgtctgggtttcaggcttctttggatccggtaaatcacacttcattaagatcctttcctatctgctggcgaaccgcgaagttagccacaatggcgtcacgcgtaatgcgctctccttctttgaagagaaaattgatgatgcactgctattggccgatattcggaaatcggttcagcatccgactgatgtcgttctattcaatattgactcacgtgcgaatgttgaagatggcgtggatgccatcctcaaagtctttctgaaagtttttaacgaactggctggttattgtggggacttcccgcatattgcacacctggaacgtgagctcgataagcgtggacagtttgatacctttaaagccgcctttgcggacatcaccggctctcgttgggaagatgaacgtgatgtttatctgatgataaacgatcagatggctcaggcgctgagtgttgctacaggccagagtgaagagtcttctcgccagtggatcgagcaacttgataagaacttcccactggatatcaaaaatttctgtacgtgggtgaaagagtggctcgatagtaagggcaaccgcaacatcctgtttatggtcgatgaagtcggtcagttcattggcaaagatggccaaatgatgctgaagttacaaactattacagaagatctaggtgttatttgtggggggcgcgcatgggtaattgtgacatcccaggccgacatcaatgccgcgatcggtggtatgagtagcggagatggtcgtgacttctccaagattcaggggcgtttctcaacgcgcttacaactatccagctcgaatacctcagaagttatccagaaacgtttgctggtgaaaaccgatgccgcaattccggcgctggaagctgtctggcaggaaaaaggcgatattctgcgtaaccagttggcgtttgacacgacaacgacagctacgctgcgagcctatacaaacagccgcgagttcgtggataactatccttttgtaccgtggcattatcagatcctgcaaaaggtctttgaatccattcgtactaaaggggcggctggtaagcagttggcaatgggggaacgctctttgctggatgccttccagtcagctgcagtccagatttctgccgatggtctggatagtctggtaccgttttggcgtttctactcatcgattgaaagcttcctggaacctgcagttagccgcactattattcaggcctgccagtctccgtcactgacggaatttgatggcaaattgctgaaaacgctgttcctgatccgctacgtcgatgtgctgaaaagtactctcgacaatctcgtcacgctctctattgagcgtattgatactgataaagtggaactccgtcgacagattgaagccagtctcaatcgtctgcaggctgagatgctgatctcgcgtattgatgacaaatttgtttttctcactaacgaagaaaaagagattgaaaacgaaatccgcaatattgacgtggaattcaccaccatcaataagcagctctcaacgatcattttcgaagagatcctgaaaaacaaaagatatcgctatccggccaataagcaggattttgatatcagtcgtttttgtaacggacatccgctggatggtgcgaatcttaacgatctggtggttaaggtgctcacgccactggactcgaactacgagagctataagggtgcgcattctaatagtctgctgatgacggacagtaaggactgcatcttaatttgtctgcctgatgaggctcgtacctggcaagacctgaccatgtacgcgcagaccaaagccttccttagcaagcaaagcggacagcgtccggaacaggcaactctgttggcagaaaaaggccgtgaaaatggcatgcgcgaaaaaacgctgaaggcgcagattgaaggcttgctggctcaagctgatgtctgggcgctgggcgaacggctggataagaaatcctcttcgccgttagctatcgtggatgcagcctgcggttacgttatcgagaacagtttctccaaactaaaattgctgcgtcttagtaccggagacgtaaatcgtgaaactcacgcgctgttgacagtagaaaatgatacccagctcgatctcggggatatggaagaatccaacccagaggcgatgcgtgaagtggataactggatcagtatgagtattgagactcataagccagtttacctgcgggacatcctcaccacttttggccgtcgcccatttggctggccggaagatgaggtcaaattgctggttgctcggctggcgcgcagcggaaaatacagcttcactctgcaaggcagtgaaatcgcactgaagcaggcgtgggacgcgtttaataattcacgtcgttatagcgatttgcgtttgcataaagtacgtcgccatgacgaagcgcagctgactaaagccgcgcaactgatggctgatattgctggagaaccgtttaacgagcgtgaggagcagccgctggtctctcatattcgcgaactctttggccgctggaagagcgaactgaccgtttttaaaactcgtgcagagagtggacaaaaccctggccgtaaggagatagaagaaggcctggtattgctgaacgggatccttaacgagaaagaggaatacgcggtcattgaaaaaatcaccgcagcggctgacgatcttaaagatttctcggaagactgggacgatttggtcagcttctacaagaaccaatacgccacatggcagcgcttgagtatagcgttgaatggcagtttcaaagctaaccgtaacgcgctggataaagacgaaacggcccaaaaggctttgcaggagttggaagctatctacagcaaggcacgaccttacggagagctgcaccggattattccgctgattgaaaccgttgaaaccatcaaccagcgtctggtggaagaataccgaagccatgcgctgcagcagatagataaccatatcaatgagctgaagcaaagcatgcaggagatgcacgtccctgctgacttgcagcactcgcttttacacccgatgcagcaatcgcgtaagaaagtggagcagaacggcctgatcccacagattatggaagaacaggctgaggttcgggcgctacaattcaaagcaaacgaacgactgaacggctgggttgaagaacagcgtaagaaagtgcctgaaccaaaaactgtccctcagccagggattatcgatccagtagctaagcctgaacccaagctgaaaaagaccatctacgtgaacacgcgtaaaacgatggaacgagctgcgggtgtgacaacgctggataacgccgaacaggtagacaaagcgctggaacaactccgtaaaacgctaatggatgctattaacgcaggcgaacgcgttcagcttcagtaa

SEQ ID NO: 236253 - DNA, 603 bp, Klebsiella pneumoniae
atgaatgacccgatccttgaatatcgattaaagcggttagaagaacgtatcggcgacgaccgttttttgaaaaaccaaggttccggcaatgagattggcttctggatttttgactatccggcaaagcaagagcttcaggtccgcgaataccttcactttttattcaaaaaactggataaaaagtacacctatagaacgctaaatatcttccaggtcatcatcgatatgctggaagaacgtaagctctttgaccgtatctgccagcgagagcctgaacttggcctggaaacactgaaaaagcatctggcagccccactgagccagaaaaaaatcgcggaatatattgcgcgcactgtcgatcttccggcgcagcaatttgttattctgacaggcctcggtaacgcctggccgttggttcgtggtcatgagctaatgagcgcgcttcaggacgtgatggggtttacaccactgctgatgttctatccaggcacctacagcggatatgatctttcaccactcgatggcattcactcccgtaactattaccgcgccttcagactggtacccgaaaccggaccggcggcgactttgactcctcgttaa

SEQ ID NO: 236254 - DNA, 618 bp, Klebsiella pneumoniae
atgacaaacaccatgaaaaaaaatgacaaacgctggattggcgatctgctgggcggttcgttgatggtccgggagagccgaaccattgctgaactgttgctttctgaaccagatgaaacggcttggcagcagcaaataatcaatgaaaacattcttcaggcgtcctctaccagtaccgcaaatcgttatgcccgaaccttaaggctgcgattgatgaccctggatcgggagtgctggaaactgattgctgatggtagtgaaagcgaacgtctacaaatgctattggttgcattgatgatccagtctccaattgttgcggagtttattgctgaagttgtaaatccggctcgtcaacagtttaaagaaaaacttggtatgaactgctggagtgaatttgtggatgagaatctgcgattgcacccggagctggctgctttctctgattcatctatccaaaagatgggcaacaatctgattaaggctctggcagaagctggttacctggatagcccacgccgccgcaatttacaaaacgttttccttctaccagatgttgcaacggccttgcatcgtttaaacaaagccgaactgctccctattctggagggtaacgcatga

SEQ ID NO: 236255 - DNA, 3516 bp, Klebsiella pneumoniae
atggacagcaatactcaaggattcacttcatactggcgtaataccttagctgataccgagtctggaaaaggggcatttgagcgcaaagaagaagattcattcacgcaatggatgaacgttgaacagggaaggttgggtgaagatatcgtgcaatcgttcttcgagggcgaagacgagcaggttaagaccgttgaggtactactacggccacaagtttggatccgcctgttaaagcatggcaaggaacgtacggcaggcgcaccaggtataattacgcctctggtgacttccgcactgttgaaccgtgaaggctttttgttccccaaatctcctgccaccattccccgtgacctgctcgaacctctccctaagggtaccttttctattggtgaaatgccggaatatgacaagtacaaaactacgcatgattcaatcacctttggtcccggtaatgaggatgagctgcgtgatgagactgatgaacaacgagtggaacgatatgctcgttatcagcagttgtggcaaaagtaccttaaagacactgatgaacttttaaaaaatgttgctggcagatggctcgcatcacctgagcaatatgaactagctggatatggctacattattaaagccaaccagcctggaggggccagcctccatatcctgcctatgtacgatcatctgctgtcgtgcaaaaaagaggtgccattgctggcgcgctttgcctcgaaagataagtttcctgttgagcagctccttgccagtaatgccatgttcagtgagcgtctggggcattccggtgataaatttccgctggctgtggcgcagcgcgatgcccttagccattatctcactcaacagccgggcgatattcttgccgtgaacggtcctccgggaacaggaaaaactactctagtactctccatcattgctacggagtgggtgagagcggctgtaaacaaaactgaaccgccagtggtgattgcgacatcaaccaacaatcaggccgttaccaatattattgaggccttcggaaaagattttgctaccggcactgggcctatggccgggcgttggttacctgatgtaaaaagctttggtgcttacttcccttcttcaagccgaaaagccgaggcggtaaaaaaataccagacggaagatttttttaaccgtgttgaatcccttgaatatgttgaagatgcccggtgcttcttccttgaaaaggcaagggcagcttttccgagtaaggaatgtcattcacctgaacaggttgtggatctcttgcatcagcgtttggttgaaatctctgcagagcttgagcaaatcgagcctgcgtgggatgacctcaacgcaattcgtcaggagcggcatgccatcagtgacgatctcgaacagtatattcaggataagagaacgttactgctcaatagcacaaatgaaatctcgctattaacgcaaggcaaaaaacagtgggagcaatatcgagccggtgagtcgatcatgtacgctctcttctcctggcttcctgccgtgcgtactaagcgtcactatcaaatgaagctgtttttggaggctaggtttggcgaaagaatgacagcattccagggatctcagcctgatggaattgatgcctttatcgatggattgattgaacaagctcataaagagcaggctgggtatcaacagcaaattgatcttgctgaggacatttcccgacgtgaaagcgaagcagctatacgctggcacgatattactcactcactgggaaatccgggcgaaacagagttgagtctgcatgaagccgatgagcttgcagatacacagctccgtttcccggcgtttctgctggcgacgcattactgggaaggccggtggctgatggatatggctgctatcgataaccttcaaaaagaaaaaggtcttaaaggggcgaaggccattaaagcgcgctggctgcgtagaatgaaactaaccccttgtgtcgtgatgacctgctttatgcttcctcaccatatgctcatcagggagcatgttggcggcaagaagtttgatgatggctatttatataactttgccgatttgctgattgtcgatgaagcggggcaggtgttgcctgaggttgcggcagcttcttttgcactggcgaagaaagccctggtgattggtgacacagaacagattgcgcctatctggaatagcttgcccggtattgatatcggcaatatggttgaggagaacattcttccgggaggtacgcaggaagaacttactgaagcttatgccctggtgtgtgactctggaaaaagtgcttcatctggcagcgttatgaaggttgcgcagtttaattcccgctaccagtacgatccggatctggcgagagggatgtacctttatgaacaccgtcgttgcttcgataacatcattggctactgtaacaccctctgctatcacggtaagttgcagcccaaacgaggggaagaaaaagagacaatatttccagcaatgggatatttgcatattgatggtaaaggtatgcaggccaatgggggaagccgttataacgcctttgaagctgagacgatagctgcgtggcttgcggcgcacaaagaggaaatcgagcaccattatggcgaacctctacataaagtagtgggggttgttaccccattttcggcacaagtcagtaccattaaatcgtcattacgtcagctggatattaattgtagtggcgatgaaaattcgctgacagtcggtactgtccattcattgcagggggcggaaagggcgattgtgcttttctctcctgtatattcgaagcatgaagatggcagttttattgacagcgacagtagcatgctgaacgtcgccgtttcacgagctaaagacagcttcctggtctttggtgatatggatctgtttgagatccaacccggatcgtcacctcggggattgctggcgaaatacctgtttgcttccactgataatgcattgcagtttgagtttcaggagcgtcaggatttaagtacctcacaaacgcagatttcaaccctacacggggtggagcaacatgatgcgtttctgaatcaaacttttgatgcaactaatcagagtattactatcgtttccccgtggctcacctggcaaaagctggaacagacaggttttctggcgtcaatgttacaggcgcgcgcccgtggtattgatatcactgtagtaacggataaaacgtttaatacagagcatgcagattttgaaaagcgcaaagagaaacatcagcggctaaatgaagcagtggaaaggttgaatgaaatgggcatcacaacgaagctggttaaccgtgttcacagtaagattgtgattggtgatgagggactgctctgcgtcggttcctttaactggtttagcgctacgcgcgatgagaagtatcaacgatacgatacgtcgatggtataccgtggcgaaagtttaaaaagcgaaattaaaacgatatattccagcctggaacaacgtcagttgtaa

SEQ ID NO: 236256 - DNA, 123 bp, Klebsiella pneumoniae
atggataattcccacgttaaaaccagtttcaacaaaagtatatcctttatcagtttattccaaggtattagcagcctcagtgacatatttttctttatcaagctaatgcgtaaaattttttag

SEQ ID NO: 236257 - DNA, 525 bp, Klebsiella pneumoniae
gtggttttcctcgatgctgacgatgatatagcagacgggttcattgaaaaacgatcgcaagcagctactgtgtctcaagccgacgtcgtgatctttaatggctggtattctggcgctaacaaccatcaaagagccgttcatacaaagcaaccctatgaagcgacgttgtcaaggcatgagtggataaggcactgtgtaacacgccgcgaatggccacattacctgtggctgcagatggtcagatcatcctatatcagacagcactcactatgcttccagcccggcagaagccataaagacattatctggacggttcatcttgcggcgaacaatggtcgattctgtacattggatattaaggactatatctatatcaacaataaggcctctatcacgcatcggccggattactacgatgttcgtgctataagctatgttgaagtgatcacggaaatcatccaggtagcggaacaagaagaaaacaaaaaaaataaaggtatttttgtaccggcatgcgctagttga

SEQ ID NO: 236258 - DNA, 1260 bp, Klebsiella pneumoniae
atgacggattcaattccatcaggttacaagccgctgacatgtgacacgctgcctggttatctctcgtccagactgaccccttcatgcgaaccgggaggtttacctgatgagtggaaagtttcagaagtgggggacggaaacctgaacatggtgtttatcgttgaggggacacataaaatcatcattgtaaaacaagctctgccctggcttcgcgcagggggcgaaggatggcctttatctctgagccgtgcaggctttgagtacaacgtcttatgtcaggaagccaagtacgcgggtcatacactgattccccaagtctatttttacgacccggaaatggcactgtttgccatggagtatctgacgcctcacgtaattctgcgtaaggaactgattaacggaaaaaaattccctaagctagctgaagatattggcacgtttttagcccagactctcttcaatacgtctgacattggcatgccagcagatcagaaaaaagcgcttaccgccgagttcgcgttgaattatgagctgtgcaaaattacggaagatttgatcttcactgagccctattaccacgctgaacggaataactggacttctcctgagctggacgatgccgtccataaggcctgggctgatgtagagatgatccaggttgccatgcgttataagtacaaatttatgacagaggcgcaggcattgttacatggtgaccttcattcaggctcaatcatggtgaccgacacggataccaaagtgattgatcctgaattcggtttcatggggccaatggcgtttgatatcggcaactatataggcaatcttctgttagcgttcttctcacgtccagggtgggatgcgaatgagcaacgtcgcgctgactatcaggaatggctgcttcagcagattgtcgaaacctggttcgttttcacccgggagttccgtctgttgtgggacaacaaaacacagggcgacgcgtggccgacagaaatgtatcaacagaacagggccgctcttgaggacgcacaggctcaattttttgccacgctgcttgaagattccttggtgaatgccggcatggaaatgaatcgccggattatcggttttgctggcgttgccgagctgaaactgattgaaaatacagagcttcgcgcagaatgtgaacgacgtgcgttgaccatggcgcgcgatcttatcgtcaatgcccgccagtttaaaaatatggattccgtcatccagtctgcgaaggttaagtaa

SEQ ID NO: 236259 - DNA, 876 bp, Klebsiella pneumoniae
atgagtacattaccaaaggtcgcggtgctgggactcggcgccatgggacacgcttttgccagtaacctgctgaaaaacggctttaccgttgccggctggaaccgttcgccagcccgcggcgaagatttacaggcgcatgggttatctctgcacgccacgccgcagcaggcggtggccgatgccgaggtgatcatcagtatgctcgccgacggcgaggccaccctcgaggtactggcgcaaatcgcgcccgcctgtcagccgcaggcgatctattgccagatgggcaccattggcctgccggagacccggcaggccatcgcgttgttgcgggaacttcagccagcgatgacctatatcgatgccccggtgtcggggaccaaagcccccgcggagaaggcacagatcctggtgctcgccagcggcgatagggaaaagggcgccgctgccgaaccggtgtttgcggctatctcccgcgggacgcagtggtttggcgaggcgggcaacagccagaaaatgaagctggtcctcaatgcctggctgatttcgatgatgcagggcatcgcggagagcgcccagctggcgaagacgctgggcttcacccccgaccagctgtggagcgccctggaaggcggcccgctggcggcgccctatgtcaaagtgaaactagacgccatcgccagcgagcagtttaccccgcagatgcagctggcgcatgccctgaaagatgcccggctggcgctttccctggccgagccgcacaccatgccggggctggaaaacatcgccgaactgtggcagcaggcggcggacgcgggatatgccggagaggatttgtctgcggtatatcagtggctgtcgccgtcgtcaaaagcgtag

SEQ ID NO: 236260 - DNA, 1263 bp, Klebsiella pneumoniae; identical to SEQ ID NO: 153273

SEQ ID NO: 236261 - DNA, 618 bp, Klebsiella pneumoniae
atgaatcagtctgttgccaaccttccgcgattcatcaaagaccgggtggaaaccacgtatcgcatgagtaagcatgtggcgctggggctgcataaccgttaccgggttgacgtatttacgggcatcaagctgtttaagtcgaatctgacgaacagttatcagaataaatatgacaaggcgatatttcctttatataaatcccatgagaacgggcagggaagggagcttgtcactgataaacgccagaatattttcagttctaaaatgctgtggtttaaagccgccgggttactgattctggcggtaattgccattttttatctgttctggtttttcacgtcaaacggtagttcagagcctgaacagcagacaaaagttttacccgccggaaataacactgtggtttcagttcctgctgcgccagttaagcccgttgtctcggacaaatggcggcttgccggacggcttaaacgcgatggtcaggcgtgggttgtcgtggctgacacgtccgggaggctgcgtatagagccggcttctcagttcagctttgacggcatgatgatgacgggtgaaatcgacggagaaacggtgacggtttattcaggggcgatacgatga

SEQ ID NO: 236262 - DNA, 828 bp, Klebsiella pneumoniae
atgaatgagccaattaatgagcagttatacaataaagttgtaaatttcgttaatagaatggaagggagtgtgcgctttgactatatttctaagtccctgcgcattcctcctgacactcttgatgaaattgtggacaggatgattgctgctggagtcgttgttaatacaggaacggtaggtgaatacttaccagtaaaacacgccactcccaaaaactccgataaagaagctccacgctgtatatctcaaacaaataacaatggtagtaaactgaagtatcttgttgagagaacagtgttggttatagccgtagtattttttattataacctgtttttatgcttacagagcgccggcatcttttgtttttctaattccagccataatctttgcatttgtttttacaaaccgaaatcatggaggagaagttttcctaggattgagttctatctctgcatgttttatttttttgtttctcactaatgcgcagactccaatatttggtgaagcatatgacttaagaaagcagcgggatgaaattaaaaatgaattcactaggaaagcaaaggaagaagaccagcaaaagctacatgatatctttaatgccagagagcaaataaaaagtagtctaaaagacccttcttcagctaaattttctggtgaattcatcggaaaaaatggcgctatctgcggctatgtcaacgctaaaaacagttttggtggttacaccggtgagactcgctacatattttctgagcatttttctgcaatagatgaaggtaacgattcctttaataaggagtggggtagagagtgttattttaattaa

SEQ ID NO: 236263 - DNA, 429 bp, Klebsiella pneumoniae
atgtttaatcgtaatgaactgaccatctctatgttttatgcatccactactgatgctgatggcaaccgtatcgccactattaccctacaggtgaatgatacagaaggttcgccagtacaaagcagccagttattgtgtgtcactgataaggcaggaaagaaaacgtattcagtcggtgagcaaagcacgaagaatggctctgaccctctgttggtggcgattgagaattactggcgacagaacaccccagcggtcactggtagtctgatgtcggatgtcactgacttcattaccggcaatgtaaatcagtcttcaacgtgggttggtttcaatggcctgaagatcttcgatggtgttcagctggatacccgcctccctgaaagcgtgctacaggctgatggtagctccgctacagcaacagggtcctga

SEQ ID NO: 236264 - DNA, 750 bp, Klebsiella pneumoniae
atgaaaacgccactcacgtatggtgcccaccgaattcttcacgatttgttttcaaaaggcgcgatgttcaaaggtgcgttaagccgtgaaaaattacccgaactggaagagcgtggctttgtcgctactaacgccaataatcttgtatatctgacccccaccggccagcaatatgcaattgaatcctttattggtgagcattccaaagtttcgcaaggtctttgcggcaataccatcgagcaggaaacgctttcatcagtattagcgcattacctgcccaacacctctctggataaagccagagaccacgctgtgatgctggcctctgcggtcaaagcttcttttgcagaattgaagcactccaccggtggtttcgtaatttcacgcgatggcgccgctcaggttattggcgaaaaattttctgaaacaataatccctgcatcggcccttaaaccgagcacagatggaaaggaaaagcgggggtcaacctttacgataaatattgaggtggatgccagcaaagccattcaagcgctcgatgagttcagccatgcattcgataaacgcatagcctctgcgttagaaaaaggacttatgccgggtggaaagatacgggaagcgattagccagaaagctgatgtgagcggacaccagtcattaagccatcgcgtatccgatgtggagtccgcactggcaagcctgagtagtctaatcatggtgttgcagactaaacatgccagcccggtctaa

SEQ ID NO: 236265 - DNA, 603 bp, Klebsiella pneumoniae
atgcatcatttaaatgatttccccaaaagagatagaaaccacaggattgaaagacttgcgatatccgcttttgaaaattttcttagagattcaaatgatttcttcattcaaagtcaggatataaatgattacggcgtagactatcaactcgaaatcacaacaaatggtcaagcaactaatattagattgtttgttcaactaaaaggtactgagcaagaattgaataatgatggatcggtcagtatatctgttaatagagccaacctgaattatttattaatgcacccttattctttttatgtgtgtttccatgcaccaagtaatagtctaaaaataacattcgctgaaagcgtaattcgaagctatgaacagtctgaaaaacaatggatagagcaagaaacactcacagtaagattcattgagaatatttctgactctcgtttgcatgaaattgcagagttggctagatttaatgccatgaatgaccgtaatgctagaatcgagttgataacaaatcatatttcaaatgttagcaatgttattaataaagccataccgaagatacatataccagaggataaaaaattagcttggctttgttga

SEQ ID NO: 236266 - DNA, 1479 bp, Klebsiella pneumoniae
atgttgctgtcctcgacgcgtaaggactggctgggtaacgtccgtggtgacgtgctggctggtatcgttgtcgcgcttgcactcattccagaagcgatcgccttttccattattgccggtgttgaccctcaggtagggctttactccgccttctgtatcccgctggttatggccttctttggtggtcgccccgcgatgatatcttcctcaacgggggcaatggcactcctgatggtgaccctggtgaaagatcatggactgcagtacttactggctgcctccgtactgaccggcatattccagctgatagctggatatcttaagctcggcagcctcatgcgcttcgtctcacgctccgtggtcaccggattcgttaatgcactcgcgatcctgattttcatggcgcagttacctgagctcaccaatgtgacctggcatgtttatgccatgactgcaggggggctcgccattatttacctcttcccgtatctgaataaaacaatcccttccccccttgtctgtatcgtggtcctgacggctattgccatgtggctgcatctggatgtgcgtactgtcggggatatggggaaactgcctgacagcctcccggtcttcctggtgccggacatcccgctgaatcttgatacgctcctgattattctcccgtactccgcagggctcgctgttgtaggactcctggaatcaatgatgacggccacgattgtggacaatatgacggatactcccagtgataaaaacagggagtgcaaggcacagggcatcgccaatatctgcacctcctttatcggggggatggcgggctgtgcaatgattggtcagtccgttatcaacgtcaagtccggcggccggggccgtctgtccaccctcactgccggtgtggtcctgctgtgtatggtggtcttcctcagggacctggtctcgcaaatccctatggccgcgctggtcgccgtgatgatcatggtttcaattggtaccttttcatggcgttcagttgtagatcttaaaagccatcctgtttcaaccagcgtggtgatgctggcaacggtggtggtggtggtggccactcataatctggcattcggagtactcaccggtgtgctaatcgcttccctgaattttgccactaaggtggcgcgttttctggctatctcttcagaactcagggaagaaacccggatctataaggtcaccgggcaggtattctttgcttctgccgaccgctttatggcgtattttgattttcgcgaggccgtagagaaagtggtcattgatgtgacgcatgctcatttctgggacattacgtcagtcagcgctctggataaggtggttattaaattccgcagagaaggaacagacgttgagatccgagggatgaacgaagcaacccgtacaatcgttgatcgctttggtgttcacgataaacccgaagaagtcgaaaaactgatgggaggtcattaa

SEQ ID NO: 236267 - DNA, 1200 bp, Klebsiella pneumoniae; identical to SEQ ID NO: 157211

SEQ ID NO: 236268 - DNA, 417 bp, Klebsiella pneumoniae; identical to SEQ ID NO: 157212

SEQ ID NO: 236269 - DNA, 1539 bp, Klebsiella pneumoniae
atgaattttatcagcatattgttcgcgacgcttgatgaaagcagaaaacataaaataaacacccgacagcctgaacactttgttgatttgaaccttgatcaagttgtgacggcgattgtcaaaggtcgggaggagtatgatatctctccattcttttatactacactggaataccctgacgatatttactaccgtcagggagttattcaggatgtggctaaagacgacctctacaatgccctggtggaatattcagcaacaatgcagaaaataagggagattggttcgcgtaaggagaaccgctactatcattaccagcagcgtcgatgggaactggagtgtgttttgctgtactgccgtgccgtgaccgtgttgcatgagcgactggaaaccctttcattcacgtcctgcgggatgacgaacttcagaagttatctgtctgaatatatcaacagtaacggatttactgatttatctaccgttgctcagaccatcagaaagcagcttgaaaatatccgctacagcctgaggatcaaaggggacaccatcagcgtgggacattacgcggatgagataaattacagtaatgaagtcctgcgcgttttctcccggtttaagcagcatgatgtccaggttgacgtcgacttcaggagtcatgatggcatcatgaataaccttgaagccagagttctggactgtgtagcgaaacttttccctgctgttttcgcagggcttgatacattcattgaagctcactctgattatcaggaacatacgctgaaggtctttgagcgagagattcagttttatcttgccagcatccattatatccgccagtttcaggcggcaggattaacattttgcattccagagattaatcgcgaaaaaaaagagattacggtaacgtcggcttttgacctggcgcttgcggacagtctgattagcaagcagggcacggttatcagtaatgatttttatctccacgggagagaacgaattttggtgatttccgggcctaatcagggtgggaaaaccacatttgcaagaatggttggccagttacactattttgccctgctgggactatacgttcccgctcaacaggccactctgtatctggttgataacatttttactcactttgagaaaagtgaaaacattcataatttgcgaggaaaactgtatgacgatctggtgagaattaaagccatactggataaatccactgcccgcagtctcattattatgaatgagatattcacctccacgacctcacacgatgcgatttttctgggtacccgggtcatagaaaaggtcatttcgctggatgccatttgtatctgcgtgacgttcatagatgaactgacagcactgaatacgtcagtcgtcagcatgatgagtacggtggaagtggggaatgaggcttcccggacctataaaattatcaggaaacctgctgatggtgtggcatggtcggtcaccctggttcagaaatatggactgacctacgaaaaaataaaggcgaggttaaacggatga

SEQ ID NO: 236270 - DNA, 1521 bp, Klebsiella pneumoniae; identical to SEQ ID NO: 157214

SEQ ID NO: 236271 - DNA, 2310 bp, Klebsiella pneumoniae; identical to SEQ ID NO: 157215

SEQ ID NO: 236272 - DNA, 306 bp, Klebsiella pneumoniae; identical to SEQ ID NO: 184613

SEQ ID NO: 236273 - DNA, 231 bp, Klebsiella pneumoniae; identical to SEQ ID NO: 157216

SEQ ID NO: 236274 - DNA, 138 bp, Klebsiella pneumoniae; identical to SEQ ID NO: 157217

SEQ ID NO: 236275 - DNA, 1287 bp, Klebsiella pneumoniae; identical to SEQ ID NO: 184616

SEQ ID NO: 236276 - DNA, 429 bp, Klebsiella pneumoniae; identical to SEQ ID NO: 184617

SEQ ID NO: 236277 - DNA, 963 bp, Klebsiella pneumoniae; identical to SEQ ID NO: 157218

SEQ ID NO: 236278 - DNA, 255 bp, Klebsiella pneumoniae; identical to SEQ ID NO: 157219

SEQ ID NO: 236279 - DNA, 1374 bp, Klebsiella pneumoniae; identical to SEQ ID NO: 157220

SEQ ID NO: 236280 - DNA, 390 bp, Klebsiella pneumoniae; identical to SEQ ID NO: 157221

SEQ ID NO: 236281 - DNA, 411 bp, Klebsiella pneumoniae; identical to SEQ ID NO: 157222

SEQ ID NO: 236282 - DNA, 801 bp, Klebsiella pneumoniae
atgaacgcactctctgttttctcgtttcaggaaaaccaccccgtgcgggtggttctggttaatggcgaaccgtggtttgtagcggttgatgtttgtaaggcattaggattaacgaacccgacgaagtcagtatctgcactcgatgaagacgaaaagcagctttttagcggtgactctaactttaagttagggtcagcaggaaaaggggcgcagtcattgataattttgaatgagtccggcctatacactctgatcctccgctgccgcgatgcggtgaagcaggggacgacggcctggcggttccgcaagtgggtaaccaacgaagtcctgccagccatccggaaaaacggtgaatacagctacgtcgaaaccaccccaaaaagcgccggcgaaccattggactggcggcaaaaggaagaattacgcggcctgataaacgatatagcccaaagttttcagtatcgaaacgcgtggatcagtggtgtttggctcgcgcttcgacgtgcctgcaggaatccatcacctaacccaattacggtcgacgatctgccggctatcactgccgaattacgccgaatattaacggcggcagaaactgccctaggtaatatgcgagtttacgaacgggagctgctgcgcgaggtagttcgtggcgggcgccagagtatgtcgtgtgaagaattgcctatcacagatatcaatacggaaatggagaaggtgctgccagcgcattttgagctggccatcagtaagctggagacgctatccatgaaattaacgcccccggctatctcctcctga

SEQ ID NO: 236283 - DNA, 993 bp, Klebsiella pneumoniae
atgccagaagaaaccatgactgttacctcgacccccatttctccttctggagttgattcagggcctagtcgaccaggaggatcacttgttgcaggtatttctcctggccctgctatcacgttcccatctggtaacggtgttattattaccttgcagaatgaacctctcgatacgaaacagcataccttgagttcaataagcactacagatggtgagataccttacgatgaatgggtatttgttgaaacatcgggaaaaaggattctaactgatgaaggtgatatcacctatgtcttacagttgcttcagaatgtaggtaattcctgggctaataatgggattgatttagtttttggagacaaccaatatctccggtttgacagtaaatcttcattggtttcgtttcttgaaaattcaaatagaatcgttaaatatgattttattcaagaaaaagagggttttagcacttcaggttatgtacctaaaggcagcgatgggaacccagaccgaaactctggagtgaccgtaggttcaggtgtagatttaggaaacaggacttcaagttcaatgatcaatgacggcattgatagaacttttgcagagtctttaaatgcgtattttggtctcaaaggtcaggatgcgcaaaatcaacttaattccaaccctctgaatttaacatactctcaagccactgatttgtctaacttttatattaataagttttcaacaacagtagctagttcttttaataatgctacatcgtcgaagttttcgtcgctaccattaaataccagaacagcaatagttagtgttgcataccagtatgggacaaacctggcaagtgcaacaccaaacttttggagccaggtaactaatggccagtggcaggaagctattaataacttaaataacttcggtgatgcatatccaacaaggcgtcggtctgaagcagcattaattcaaagtgatttggacgctggtaaattaccataa

SEQ ID NO: 236284 - DNA, 384 bp, Klebsiella pneumoniae
atgacagatatcgcccggctgattaacagcattaagcgccgcacgtcctcagcaagagagcttggctacgatgtcctgttcgtggcactcgatgatttggatgtcctggctgattcgctggagacggcgctgcgcgcaaacgccggccaggtcacttacatcgagcagctgcaggacataaaacaccagctggaattgaagttagccaagccggtagtgccggtagtgccggatttcaaaaaactggctcgcgaactggttgataacctcgtcgattgcggcggactgaatgaaggggtgaaagagaagtatctggagtgggcggggaaaacctgccgcaccaccatgctcgcagccgcccggcaggaggtggaccgtggctaa

SEQ ID NO: 236285 - DNA, 231 bp, Klebsiella pneumoniae
atgatgaacgtgaaacagatccgcgagaatatgaccgaagcggccctgagcgttgagagtgtaatgcggggacacccccgcatcaccctgcaggaattaagtgaagcctgcaactttagcctgccagcggttgagtttattatcgagcagatgctttgtatgggggtagcgaagcggggctcttttgggcagtactcactgaccccggaatataaaaacggtaatttctga

SEQ ID NO: 236286 - DNA, 336 bp, Klebsiella pneumoniae; identical to SEQ ID NO: 184628

SEQ ID NO: 236287 - DNA, 1155 bp, Klebsiella pneumoniae
atgtctatcacaaagagaattaataaaatgaattcatttaaatggattttactggctttcccattggctctattgtccgggtgtacaattgtacctggatcttctatatctacaatatcaaaagataaacaagacgtcccagatagtgacttcaatattaatgacatggttgatgtgaccacaataacaccaagccttgttaaccaaatgagtgctgacataatcaaaactaattctaatccaagcacatcttttggtaataaaagctacgcatataaagtaggggccggtgatattttacgtataactgtttacaaccacccagagcttaccaatcctcaaggacaatacagaagcgctaaagaagctggggttcttgttaaaaatgatgggacaattatattcccatacgttggtgagttaaaagtttctgggatgtcggtggaaaaaataaggtcgacactttcagaaagattagttaaatatatagaagatccgcaggttgatgtaagcgttgctgaatttgcatcacaaaaagtatatgtgtcaggatccgtaaacataccaggaaaacagccggtaaccgatgttccgcttactgtcatggatgctattggcgcggctggagggattacatctgatgctgactgggagcatgcggtaataacccatgctggtaaaaatgaaattgtgtcgttaaggtcacttttgcaaatgggtgacctctctcagaacaaaactctttatcctggagattcactttacgttccaaggaatgatgaacttaaaattacagttatgggagaggtaacaactcaaaccacattgaacactggactttacggaatgaccttagctgaagccattgcaaattctgaaggaatttctcaatcacacgcagatgcttccggtatatttgtcattagacctacaggaactaatgaagggaagatagcaaaaatatatcaacttaatatgtctgatgcggcatcaatggttatggctacacaatttcatcttaagccaaatgatgtggtttatgtgacaaccgcccctatcacaaggtggaatagtgttataaaacaattacttccatcaataagtttaattaataaaacaataacgacaacaaggatgattaaaaattggccgtga

SEQ ID NO: 236288 - DNA, 1485 bp, Klebsiella pneumoniae
atggtatctcgtagaagtgttctgaagatgacaataccagctgccgcagccatcccggtagcagtaatggctgcgtcagataagcctggaaatgatagggtttttgcgagcatttcagcgttgtcgtcgttttcaggcaatgacggcgatatagggtttttgttgtcctaccatgaaggaaaaatgtcaggtggtggtgttcttgtccatactatatcggatgccaagcctgatatgattctttcgttcccatctaaaaacggtgtctggaaaaggattctcgagaatagtggatatgttgattgttcccactcaggtatgcttgcagaaaaaggatttgacaattcaccttatcataacaggttaataaaggttgctgatgatgcaggtctgaccattaaatatggatcaggttcttatgaacacaacaccaatgtattgaaagagcaatcattttcctgcccatcatttgtaggttgtggtgggagaaggggtgacaaaggcactattttaaaattccttaatggttcaactttcaaaataaagggtggctctggttatgtatgtaattccaaaatcgaagggattacatttgcaggggatggggaaactgatggagtccttacaatagctgatcagtgtggtatttctgttgatcgttgttattttgataaatgcaaaactggcgtgttaatgcttaatgagagtaagggtggttttactgagtttaatgtattaactgcttgttatttcacatcctcatgtgtaactggttttgcatacagaagattgaatgggaacgagtcattccatggcacaggaatgaaagagtgtgcatttcaacagcaaaaaaaagataatgatgcccctcacatacacattggtgagaagtgcatggtatataatgcgccaatgactattcatgtgtttagagattatactacatctccaattatcagacacgacgggttcccaagatcaaatgtgtatggtgtaataaccgttgagaaaaagcctaaaaatatagtaagccttgtagatggtaatccgttatacattttaggcagcatatcatgtttgagcgaaaatctgtcaacaactaattcaattctttgcagcagatttcaagctaattctgatggctccgtgaattttatacgaaacccagcgtcattatctggcgggttcgatagcgaaaaagaggccgtgattcatcttaatgcgggtgaaagtgccttcatggatgttactgttatttctaatggagttgtcagtagggggctgatttttatagctgtagatactaatggtaatggcaaaataactgacacaggcatgtctccaagtgagagtaaattaaagcacgataattattttgtttttgacaggtcaacgctgtacgttaataacaatggcgatccatctgctaagtggattgctgatatttcatttgtggctagcagatatcaatttacattaaagtga

SEQ ID NO: 236289 - DNA, 1182 bp, Klebsiella pneumoniae
atgaaaatcagtaaagtaaaactcattgcttttatttcaactatgctcgttagcgtagatgttctgtcggtggcggggttacgcgttacactgctgccattatttttatatggtggttatatttttattaaaaataactacatagataaatgggcgtttttcgccttgacattttccgtcctttgcctcccatcactgtttttttcagcagagttttataaatcagtagggtatcttgtatggatattttttaactatatagctctatgcgtagtttataagagcttgattgttagatccctagataatacgttgcttggcgtcagagatgcatataggtttcagatttttttaggctgcttgctttatttctctggattacagccacgcgccgctgttctttattatgaaccttcatactttgctttatcattgacgccatacgtggttatggttgttagtagctatataaaatcaaaggggtacgttggtgatgtggtaaaaagaacctcttttatagatgtttttttacttctcgcagcgatttatacgactaaaagtgcaaacctaatgcttgtatgtgcactttcagtgttaataatttcttttcttggcaaaggtaaattaaaaaagatatgcatacttgcggttgtgggtacgatatcaatcttcgggttgtacttttactcacaaaacagcaatgacttaattgccgtaacaatcaataatctgttctcagcatcagatcctgttaaagcccttcttgatagaacgggaaataggtggccaagatttaaccttgcatatgatatatcattgtcgaatttttggggcgttgggataggtgcatatgagaaatatacattatcccacacgtttgctggctacacagggctccctttctacctcagtcctatagggtatcctcctataaatatatacttagagttagcatccacttgtggttggcttgctctggctgtatggttgatatggcactttaagatgattaaggcagcgaataaaaggccggtaggcggaccggtgattgtctgctctcttattgttgccatgcttgctctcttcatagagtcaagctttatgaggccatactactggatgttaatgggtatggttatgggtcagattgcgctaaacaagcgcgccagacaaaacagttaa

SEQ ID NO: 236290 - DNA, 210 bp, Klebsiella pneumoniae
atgtcattagtatgcactagtgtttctggcgttgcagagggccattttgtagtgggccgcacctacaaaccggacagcaatggccgccttacgacccaagccacagatgataccggatgccaggcattgtggaccgtggagaacgacaatatttacgctttagttggagatttagattctgaagtaatagtcacttttgaaccagaataa

SEQ ID NO: 236291 - DNA, 498 bp, Klebsiella pneumoniae
gtgcagcgcatcgtggcccgatttgccctgctggcggtggccggagagatggcgacgctgcagggtatcacgggctggcaggaaggcacggcatatgaggcggtgcagatctgcctgcacgcctggctgaacgagcgcggccatattgccaaccaggaggatgaaggcgtgctggcgcagatcaaacggtttatcaccgcgcaccagtacagccgctttgcctcgtgggatggcccggaccgcccgctgaatatggtgggctttcgccgggtggaaaaagatcctctgacgggtgaagagcacacactgttcttcatcctgccggagggctggcgggaaatgtgccggggattcagtcccgccagagcagccagattatgtctggaagcggaatgccttctgcccggcagcgacgggaaataccagtcgcaggttcgcctgccggagatcggcaaaaccagggtctatcggctcacctcccgcatcctcagtatctga

SEQ ID NO: 236292 - DNA, 1557 bp, Klebsiella pneumoniae; identical to SEQ ID NO: 233210

SEQ ID NO: 236293 - DNA, 621 bp, Klebsiella pneumoniae; identical to SEQ ID NO: 184789

SEQ ID NO: 236294 - DNA, 954 bp, Klebsiella pneumoniae; identical to SEQ ID NO: 201444

SEQ ID NO: 236295 - DNA, 279 bp, Klebsiella pneumoniae; identical to SEQ ID NO: 184790

SEQ ID NO: 236296 - DNA, 279 bp, Klebsiella pneumoniae
atgagcggtaagcgttatcccgaagagtttaaaattgaagcagtcaaacaggttgttgatcgcggttattctgttgccagcgttgcaacacgtctcgatatcgccacccacagcctttacgcctggataaagaagtacggtccggactcatccactaataaagaacagtcagatgctcaggccgagatccgccggctccagaaggagctgaagcgggttaccgacgaacgggacatattaaaaaaagccgcggcgtacttcgcaaagctgtccgactga

SEQ ID NO: 236297 - DNA, 591 bp, Klebsiella pneumoniae
gtgctggatgttcatcccagtggcttttacgcctggcttcagcagccgcattctaagcgccaccaggtagatctgagactgacgggacagattaaacagttctggctggagtccggttgcgtttatggttatcgcaagatccatgtggacttgcgggatagcgggcaacagtgcggagtgaacagagtctggcgactgatgaagcgtgtcgggataaaggcccaggtcgggtaccggagcccgcgggcacgcaaaggcgaggccagtatcgtgtcgcccaacaagctccagcgacagttcaatccggatgctccggatgagcgttgggtaacggacataacctacatcaggactcacgagggctggctgtatctggccgtggttgttgacctgttctcacgtaaaattatcggctggtcaatgcaattccggatgacaaaggacattgttctgaacgcactgctgatggctgtatggcggcgtaatccgcaaacaaaggtgctggtccactcggacagtaagaatgtctgtgtcagttctcatcatcatgcttgctgttttgttcgcgcggtgagatcactgatgcagtga

SEQ ID NO: 236298 - DNA, 846 bp, Klebsiella pneumoniae
ttgcgtgcatttgttactctctcgcaactgaagcggtaccactcggcggctgaaaaactatgtgtcactcaaccggcattgactaagcagatacagacactagagtctttatcaggaataaccctatttcagcgaggccgtcatggggccagattgaccgttgcaggagaactgttactacaacgggcttctgaagtactggcatcctatgataatttccggactgatgtgtccagcattcagcaaggactagtgggtaaactgacggtaggcttcggtatttcatctttccgcgtggcccctgaaaaggttgctattttccgtgctctgtatccagacgtgcaagtgtccctgaatgatatgtcctcggcagtacagttccagaaactcgcagaagggcaacttcagacggggtttgttcggcttcctgcacctgaacgactggagagtaaaattctggcagaagaaaagctagttcttgccgtagcccacgagcatgatactgagttatctagtgcggcagagctgctaggttcgaggaagctcctgcaattatccagggacagaggggagggtctgtcggaacagatattgcgttttctttcacttcgtcaactcactccgcagacagtctttccagcagatgacattcagactcttctggctcttgttgccaccaaaaatggtgtggccttattgcctgcgggagttttccatattcttccttgtggcgtcaggcttatacctcttgagggagaacatacaacctggcagacaggaattgcctggaacccgcaaataaaagaccctgtaagagataattttataaatatagtgacaccataa

SEQ ID NO: 236299 - DNA, 1515 bp, Klebsiella pneumoniae
atgagtctagaaataaaaaaacaaagtaacccgttttctactggcggtgggggagttaattttgaaacaagagttcaagcagctttcgcactatccttattgactaaatcttgtgttccttgtttgagtaactacatgagggctaaagagttaaaattccagaacaaatatgatggtgtaaatactgatgattttgtattgactgccacagacaactcaaataatgaaagtaagatctttgctcagattaaacatgaaataactattagtggctcatcaaactcagtatttgcagaagttatacatagtgcttgggcggactttaaaaatgtgggctttaagtcagaaagagattctatcgcgttaataacaggtaatttaccaaaaactgacataaataatactttgccgttacttgaatgggctaagttttcatcgaactcagaagattttataaagaaatctcaaacccaaggatttaccagtgaagcaaagctcgaaagattagggatatttagagatcagcttactcatgcgaataacggggtagctatctcagaagaagaattgtggtctttcttaaaatcgtttcagattttaccttttgacttagatgcagaacattcaatcgtagcaaacttactttgctcattgattcagtgttactcagacgtattaccttctctagtcttagctagacttgtttcctgcgttcaaagtttcaaccagaatgcgggggttttaactcaaaataatataccagaagacgttaaaggattatttaataaatcaagccacttatatttcgaggatgacttgataaagctttatgaacgcagtcagcatatttttgaaggtatttctacaactataaatggactccatgttgataggacagaacaactagcagcactatctaactgctatagcgatagtgagtttgtatttgttaccggtgcaagaggggctggaaagtcaggcgttgttaaagattttatcacaacaaaaaatttagatattccagtcttctacttaagagctgaagatttagataaaagtaacttaaatgaagttttcacttccatgggaattacatcttctttgggagaaattgaaagtcatttctcattgcttcacgaaaaagtactcgtaatagagtccctagaaaaagttttagagctaaattatccaaatacttttgttgagttattgcaatacattagaaaacagtctggttggactatcattgcaactggccgggactatgcttatcaacaattgttatttaatttcctacagccttgctctataaattttagcagcatgaatattgaagggcttgaagatagtcaagtcgagcaagtttgcgagcatattccagagctaaaatctttagtatctaataactcattagtagaactactaagaataccattttttattgagattgctgtaagagctataaaaaatggcgctcaatttgggattggagatactgaagaagggctttgttga

SEQ ID NO: 236300 - DNA, 261 bp, Klebsiella pneumoniae
atgaaaacccgcgcacgctatatcaacatcattaacagtcatctggcggccagcgatgccggacactggcactacgcgatgtatgtcatgccggatgacaaaaccaaaacatcgttaatccggctgtttgactccatcaaaacggtaatgaggaacaacgttccggtgccgttcgacacgaggaaccgcgaaatgtttcttttccgcaccattgatgaactggagcaagcaaccgccagcggtcgaagcaaaacctgttaa

SEQ ID NO: 236301 - DNA, 894 bp, Klebsiella pneumoniae; identical to SEQ ID NO: 216887

SEQ ID NO: 236302 - DNA, 900 bp, Klebsiella pneumoniae
atggcttacttacgaaagaatcccaaagatgccttttgtaatattccccatccgaaaggaaatggacatatccattgtggttctcttgcctggaacaagctgaatgagcttgtagacctcactatcgaattggatcacggtcttgggcgacgagtaggccgcaaactcgcaaaggaagccgtaataaatgcttttgttaaaagagtattacaggaggcacgtggagttgatcaggaaaccgcaatgctgcttcttaaagacgctttaacgattttgagagaaaagcttgtagttatcgaacattacctaccgtgtgtgcttttccctggggatacacctactgaattcagcgttggtcctgtcacattcgtccgtcgctccaagttcttcgatgataaaaaatcagtactaaaacatagtattcatgttaacacgaaggcgcatattcagtgcgtaaaggaagcgattgctcaaggtttcccacaagaacgcacgcacactaaagataaatcaagacaactagtgcgtaaattacagtcccgagcagtcaaagcctacaaagactatccatggattgcttgtgtgaaagtgagtgattgtgatgaagcaatctctaaagaacgagcgatccaagctacagagatggcgcttcacatcatccgtatcctcttgggagctaaaccgacaagggaaattaggctagcatggtcacgcagcggagctctgcgctcggcacatttgcacgctgatgtacatggtgtgattcacgcaagtctctgcgctgattctttagaaccggttggtgtaataaactggcatgaagcattgataagggcaaatttagaattagacatcctcggttctgctttgatacccatagtcaatccagggctttgttga

SEQ ID NO: 236303 - DNA, 306 bp, Klebsiella pneumoniae; identical to SEQ ID NO: 147864

SEQ ID NO: 236304 - DNA, 291 bp, Klebsiella pneumoniae; identical to SEQ ID NO: 16838

SEQ ID NO: 236305 - DNA, 735 bp, Klebsiella pneumoniae; identical to SEQ ID NO: 4868

SEQ ID NO: 236306 - DNA, 675 bp, Klebsiella pneumoniae
atgatcattccatatatgtcggaaattaataaagctatggatagagttaatggcaatgaagcaagggttttaaatgggatacaatatcttagagatagattggaagagggtaatataacaaagggaagtttatattattcaataggtaatggatttacggcacttgacagggacaaagaagctattcaagagtataaaactgctcttgagcatataatcgaagcagataaattagctgcgcaatgctacaaaaatatgggtagtagttactcaaggctagggaatgaaaatgaagcatatgaatgctataagaaggctcttgagttagaaccaaacttaagtgaagctaatttggctttgggagtaattcataatcgtaggggtaattatgaattgtcattagaatatttagatagagtgcttttcccgggaaattatcaacataaaataatttatgttgataaatggagaataaacactcttttcaatataggggattatcgttcggcatatagagagataaataatctattaactcggaatgataataaagaggacttatggaaatggtgcttaatgctagttgcatcgttctgtcgaacttcgactgcgtctgctaagcttagcttgcctttttgggctcgttttttagggaaggtgcgaacaagttcctga

SEQ ID NO: 236307 - DNA, 1137 bp, Klebsiella pneumoniae
atgttactccccgccagaacaccttcccgatacgccagcgccttggccgcgctttctgtctttatggcggccttgctgctgccgttatgttttaccggcggcgtcatgaccacccccgcgatacagcagtcgctgggcggctctcccgcagcgctgtcgtggctgaccaatggctttatgctgactttcggcagctttttgctggccgcaggggtgacggcggatgccatcgacagaaaacgtatttttatcgccggcgccgcactgttgtgcctgagcagcctgctgttttgtctgacgcacaatctcttcctgtcaggcgtgttgagggcgctgcagggcctggccgcggcgatgattttagccagcggcagtgcggcgctggcccagctgtatgatggcgcccagcggacgcgggcattcagcatcctcggcacagtgttcggcattggcctggcgttcggtccgctgctgatcggcttcatgatcgacgcggtgggctggcgcggcgtatacgccctgtttgcgctgctctcggcaggggttctgcttataggcctggtatctctgcctgcgacagaaaaaagcgagccgcggacacccgacaacctgggcttaaccctgtttacgctggccctgatgctgtttactgcatcgcttatggtcattccggcccgcggttttttatccctgaccacgctggccttgctcatcgcgtcgggggggctgttcgtggcgtttgtcgtacgctgccggagggtgaacaacccggtgctggaactctccctgctgcgtcatccgcgttttgtcggcgtactgttgttgcctgtcgccacctgctgttgctacgtggtcctgctgattattgttccactgcattttatgggcggagaggggatgagtgagtcgcagagcgcactgtatctgatggcgctgaccacgccgatgctggttttcccatccgttgcggccctgctcacccgctggttttcaccggggcaggtgtccacggcgggactgatgatggcctccgtcgggttgttgttgctgggcgatgcttttcacagtaaccacctcccgcaactggtgctggcgctgatcctctgtggcgcggggcggcgcttccctggggactga

SEQ ID NO: 236308 - DNA, 876 bp, Klebsiella pneumoniae
atggcggatgtcgaacggctggtcagccgctatcacgacccccggcccgagtctctgcgccgggtggtgatggcgcccactaccgtcctgcactccgcgccgggcgcccagctgcgggagatggcgaagctggcccgccagctggggatccggttgcacagccatttatcggaaaccgtcgattatctcgacgccgcgcggcagaaattcgccatgacgccggtgcagttctgcgcggaacacgactggctggggaatgacgtgtggtttgcccatctggtgaagctgctgccggaggagattgccctgctgggccgtaccggaaccggcatcgcccactgcccgcaaagcaacggccggctgggcagcggcatcgccgatctgctggcgttagagcaggccggggtcccggtctcgctgggggtggacggcgccgcctcgaatgaagcggcggatatgcaaagcgaagcccatgccgcatggctgctgcagcgcgcgcgcaaggggatgctggcgcagccgcgctacgccgggggcacctttgagggtggggccgatgcggccacggtggaggatgtagtgcgctggggcagcgccggcggggcgcagatcctcggcttagcgcagagcggcaccctgcaggtcgggatgcaggcggacctcgccatttaccggctggacgatccgcgctacttcggcctgcacgatatggccattgggccggtggcctgcggtgggcgcgccgcgctgaaggcgctgctgctcaatggccgccccatcgtggaagacgacgccattcccggtctcgaccttgactcgatgcgtcacgacgcgctggcggccgtccgtaccctccaacagcgcgccgctgtttaa

SEQ ID NO: 236309 - DNA, 543 bp, Klebsiella pneumoniae
atgtcattaatgattaaaaatgcccatgccatcctcagcggtctgcccggagaggcggcgcggctggccgggccggatattcgcatccgcgacggcaagattgccgccatcggcagcctgacgccgctgccggaagagcgacagatcgatgcccgcgactgcgtgatctatccggcgtgggtgaacacgcaccaccatctttttcagtcgctgctgaagggcgagccgcaggggctgaaccagagcctgacggcctggctgagcgccacgccgtaccgctttcgcgcggctttcgatgaacatacctttcgtctggcggtgcgcattggcctggtggagcttctgcgctcgggctgcgccagcgtggcggatcacaactacctgtactggccggatatgcctttcgatacctcggagattgtcttcagcgaaggggaagcgctggggatgcgcatcgtcctgtgccggggtggggctacccagggccgggcggtggaacaggatctgccggtggcgctgcgtccggaaaccttcgacggctaa

SEQ ID NO: 236310 - DNA, 216 bp, Klebsiella pneumoniae
atgctgctacctgacgacagcttcctgcgtccggacctgatcgtctccgacgtcgtctacaacccgcgcaaaacccacctgctggaagtggccgagaaaaaaggctgccgcacgctgaacggcctggggatgatgctgtggcaaggcgcgcgcgcgttcgaaatctggacgggcaaacagatgccggttgattacatcaagagcattctgttctaa

SEQ ID NO: 236311 - DNA, 393 bp, Klebsiella pneumoniae
atgagtatcaagcgttatggcgtagaaggtggtaccggtaccggcgggcagcacctgccgttcgcgcgggcggtggaagcgggaggctggctgtacgtttccggccagacgccgatgaaaaatggcgaagtcgtggaaggcgggattgtcgaccagtcgcgtctggcgattcagaactgcgtagatatcatgaccgaagcgggctacaccctggccgacgtggtgcatgttaaagtgatcctcaccgatgcgcgctattttcagtcgttcaataaggtatttcgcgagttctttggcgacaacccgcctgcccgcatctgctgcgtagcggacctggtggtggattgtaaagtcgaagtggatgtgacctgttttaacgcttctcgcgcataa

SEQ ID NO: 236312 - DNA, 1059 bp, Klebsiella pneumoniae
atggcaggtgaaactcaaaatatttcagcaatggcggaaaagatatcttccgatttatttaagtggttcaagtgggagcttgttggggtaaccaatgaaaactttcagtgtctgaagtcgacgcaacacaaaacaaagtctggaacacacccgactgatgttgttttttcctataaggatccatacttaaatcggacaatttttttaaatacagatttaaaaagttatgtaaaagggtcgataacagcaacctcaatgcgaaacgcattggtctcattggctaactcaattgattgtgcagaaggtagcaaggaatggaaggatagatactcttatcaaagtggttcttctgaggttagaggaatgctctttgtatataatcatgatggtgagtttgaccgatcattctatgatgtgttttatcagtcgtataattcagaaaccgataaaacaaaacgcggtattaatcttgataatatacctctcaaacaaggtcagaagattcatattattgagccgagaactataaattatttgcagtcaataattacggacttgtctcaacttagtcacaatcgagaatttcctttaggtaaaaactatcagttcttttacccagatctatcacttcataaagttagcgggtcacctgaagaacacccggcaacagtagagttgttaacagggccttttttgataatcaagcacaacgatgttaaacattgtgatgaagaaactttagagtggaaaacgacctataggcacggttatgttatttattacaacggcgaggggaataatgaattagagtttgtttatattcttgatacgttatcaaaataccaactcttggatggaaacgaaaagataagaattagaattgtgcatccaagcatttataaagatgttcgcagtatttttatgcgtgccaaggaaacatactgtagagaatggggcttcgatgaacataaaaaaaccatcattgatgccattgattttcaccaagttgaatttacaaaacctcacttcagttctgttgagattggttgggagcgataa

SEQ ID NO: 236313 - DNA, 1119 bp, Klebsiella pneumoniae
atgaaaatcgggttgtatagcgttaatgacaaggctatgtttgatgctctcaatcaaacaaaggtgactcatgaagacatgaaaagcctttttttcaaaagaggtatcattatttctaaggatacaaagcggaagactctagctttggatttttcaaagaacttccacggctattatgactttgaatatttatcagaaattcttgggtctgtggggagaagagagaaggtatcaattaatattgtcaacagtgcaattagtttaagtgatatggaagttacaataaaatctatatgtgaagaactacaaaaagagggggatgtaacaaatatcaattacaccgagaaaggatttgaagtgtcagtaaaatatgtgaagctggattttaaaatgagcgagtttcgccaatcttcatctcgcgaggctaaaatacaagtagagttgaatgatgagggggagtatattacgcgcttccctcagaatgctaaggcacatgagtttaatgaacttttgattaaaaaaataaaagaaactaataatgatgagcctgtaagtcttgaagagatatcgcttgaaacggtcaaggattcaaatgaacgtagtcgattctttaaagaactgatcgttagcatgccaaattataaatgtatcgatgtgtcagatgtttatgttacccatccagtattagaggttaaaaaacaatctgaagatgatgatgatgactcagatgaagatgatgatgctgtaatagacactgggtatcatatttcaaaggcatcactgaaaggacggggtgtccttgaatcaccagaactggaagagttattgagtaatgggttttacattacaaagataatatggagttcggtagttgaaggttttaaagactccgataagtatgaattcgaagcccagtttgtggatccggataaatgtaagttgttttcttatctcgttcgtggatgttataaatataaaaaagtaaatgtgtttactaatcggcaaaatgtagataaggaaaaagaaaatgtgctattattattaatagaaaaaacggctcgagaaatctctaatagaataatatctttaaatactctcgaggtagtcactgaaaaataa

SEQ ID NO: 236314 - DNA, 672 bp, Klebsiella pneumoniae
atgaaaacaaaatggtttactgccaacttccctgccggtcttgataggttatatcaggccatcataaacacgccttttgacagtgacaaaggttggggatttagcattctttcatatgaagataagtatatatcctcaaaatatattgaaagggttgaggtaagtgaagtaatcatagacccctatggtaatgaaactgaatttaatcatttcaaatatgtgcagtttaacttttggttttttaaagctcaaggcggtaacttcattttaataattgattctccgcctagaagtatcaagggttttatatgcaatgtgattaaggcaactgaatcggattttaatgtttcttaccttgtgattcgaattgatgagtttataaaatttatcacacctcacttcgaaaaggttcaagtacataaggccaaattaaaggatttgacttttagtaaaaatacatctggcattttagagcttgagtcttcaaatgacgcgattgatgagatgaggaatatttttaaaaatgcaaaattcacgattgataaagttaaattgagtgttaaatctaacaccggccatgaaacattggaagtaaattctaatggttctcttagcttctcagaggaactttttgataagatattctctgcagttgagcgttttactttctaa

SEQ ID NO: 236315 - DNA, 183 bp, Klebsiella pneumoniae
atggttggcgaacatttcagccgaactcagcaaaagtgggcttgtgtgcaattcatcgcagaggtgtctcttattgcaaattgcaaaccgtcagaccttaagctcgcactcactcttattgctgatttagcgaacagtgaaagtgctgaggatgacccgaatattttctataaagccgaatag

SEQ ID NO: 236316 - DNA, 876 bp, Klebsiella pneumoniae
atgttgggggctattttgacagtttcatctgaacatgtgcgggtagtgcttgaaagaatccttacttcttatggagttaaaacccgtcaggcgtatgcggatttactcggcatgccaatcggaacaatcaacaactggttaaaacgtgggaatattcctggtgattacttggttcgctgcgtgctggatacaggagttgatttgcgctggttgaaagatggtgaacttacaaatgtaagcttcagcaacggtgggaattatgtcctcaaggggcaggagcttatcgagagaatgcaggaatctggtggaaagattgttctccgacggattatggatgcatatggtttcaccctacaaaagcaactcggtgatttacttgatatcccatcaggcaccatgagcgcttgggttcgtcgtgaacatttcccgggtgatatcgtaattgtctgcgcgcttgataccggtgtttcattatattggttggcaactggcaacggcagtatgtatgagcagaaagtagaaggtgcggcggcattgcccgttgggttaaaaaaaattgctaaatacagtattcataccggtcagatggtagagactggcttgtggttctgtgatgaatccctgattgaccctagtgttaccaatcctgtactgactgaaaaaaatggtcataggtggctcgtggatcttgatgccaaaaatattgctaacggtaggtggctcatcagtattgatggtgcaatggacgtttttgatgtaattcgcttacccggtaacaaagcaaggctatctaataactcagctgaatttgaatgcagtctgtccgacatcacaccatctggagtggttatttgtactattgagaagcatatttaa

SEQ ID NO: 236317 - DNA, 576 bp, Klebsiella pneumoniae
atgatggcttctccaagtgcccataaagctattagaatcatggcattaaaccttgcctccattgctataaagacccgatttaataacgatgtgaaactatctcatcttacgggggacattaactttgataatatcctagcaagccattgtgatgaagtgcatgcccgatggagaaacaccacattgcgtgggtgcatcactttaaattggcatcggcaaatgcataagggcagggagcaaattgatgtcagcatacattgtaatggtcaactatgcgggctgatgctttgtaggtattcgaggcgaaggattaacgtaaatctacgattccttgagggatgcccccatcctcacttaaaccctcttatcgggtatattatgcctattggcttaattatcgctgaaaactttgcaattgcttacgaagccgaacaagtcagtatcagtaacccagaaaaactactaattcctcgctatcgcgaccatggatatgggctgactcaacaagataaggatcgggaacgacgtaaatgccctattcgtggaaaactcttgataaagaaaatccaaggctaa

SEQ ID NO: 236318 - DNA, 801 bp, Klebsiella pneumoniae
ttgaaaataaatgcacaatctatccacgattatctccgaggaactctcgagaatgcccaagatcacgtcacttcccctcctaaattgatgtacttggttgaacatatggatgaaatattccaaaaggagattctagccaacggaattgagatgcatccaactgctggttttcttgctttaaactcctatatgatgttgttagcatcggtacgacaatcattatcaggacatacagttcctgttttccctatattacgcacagcgcttgaatctgcttgttatgcttacctcatagctgtggataatagtaaggctctgatttggttggataggcataagtctcaatccgccttgaacgaatgtcgtaaaacttttactgttaataaggcagcaaataaattacaagaacgttacgctgagatggctgaatatgtgaaggcacactatgatgccagtatcgatttcggtgcccacccaaacatgaaatctatatttaaccatttaacaaaaattgattcgccagataataagttcggtgcatggaaacttacaggtgtttatggctccaatagcaggtatataaattacaccttattagcttgcattgaagttggtcaagcaattgcatttcttattgcagcatcttctgacaaccatcccttactcaatgaacgtttagcggtctttcaagattggatagatgaaaaaaacaaaatggctgatgaaattaatggtgaacccattgactatactggccctatgtactgttcagttgtaccgccaaccacaaaagataaataa

SEQ ID NO: 236319 - DNA, 360 bp, Klebsiella pneumoniae
atgagaatgactagccgcaaaaaagagatactcagctactttgaaccggataacctcgaatgggtgacgggtgagattggtgcgccgccgttcgatgtgtcgggcgtggcctacctgcttcatggcatggtgtcgttcgataagcgacaccagatcgaatcaacccggcgcacgctcgaaagcatggttgccggtgggctgcttaagcgaatgacagtgtatgaatcgcgtcaggtacggcgcggtggtgaaaccaacgcaacggtcgtgcgctactgtttatccggtcagtgcgctgttatgcgtgatacctgcggcgctgataattcgatatcaggcgagtgcgtgcgggttggttga

SEQ ID NO: 236320 - DNA, 192 bp, Klebsiella pneumoniae
atgctagaccgtatcacgctggaattaacgatgctggagatagccaggcagagtggcgaggggcttgatagccatacccgctacacgattcgcaacgggctggcgcaggcactacaggccaaagagcgccaccgccgcaggatgagcgcaccggcctaccagtggaagaagcccgccacgccgcgcagataa

SEQ ID NO: 236321 - DNA, 327 bp, Klebsiella pneumoniae
atggaacagcttcaaagattggctgacattatcgctgagacctacattcgcgatctgcgccgggaaaccggtgataacgtcattacctggaatggcattagcggcaatgtagaaaagcatctgctttcctccggactgatggataacactatttcagcggccagaagtacgtgcgggccagcgttcgaacgcgaggcttatcagatgctgctgaactttatttcattcgatggccctgagtatcgactgaccgagcacggagtgcaggttattaactttatgaacatgctggctttgaaaaagaagtctgttatgaccattcactga

SEQ ID NO: 236322 - DNA, 171 bp, Klebsiella pneumoniae
atgacaacgccaacagttaagcccgttctccttagtattgagcagatagaaaaactccgcgcacttcaagaaaaagagcgtagtaaatcccctcttggaattgctccaactatccacgttattgcgcgtcagttaatggatagcgccttacgcacacagatggaggcatga

SEQ ID NO: 236323 - DNA, 1410 bp, Klebsiella pneumoniae
atgaaatttgacatagatattaaaaattttggaaagataaaaaatgcaaaggttaatataagaccttttactattattgctggtccaaattcatcaggtaaaagttttgtaaccaaggcattatatagcttctttaatactattaataatgatcatgttacttcatcagcatttactagtttaacttttatcaaatcactagttactgctatctcttataatttatcaagaccaagtcaaaatgaatcacagttgatttttgagttgcaatataccgtttctgaaatggaaaaagttattgacagtgaattccgcactaatactttaaccaagcaaatatcaggaatgcctttattggatgccgcatccaaaagggctcaactttattttaatgaacttgaaagcgccattaaaccaaaagcaaaatataaaaaggttgccggtgaacttgattctatcaaagtacatttaaaaacgataagaagtttagtcgaacgccctaatttatatctggcagatgaaatcgaaaaaggttttattaatgaactaaaagaaaacttcaaagttgcgaaactggcggacttaaaaaacttcaatgcaaatcccgaacaagatatctgctttgattttgataccttaggcgccattcatattaacaatgaaagagtcagctttaagattgccagtaatagcatagacgaattccaacaattatataatgttgtttatttggagtctccaatatattggaagttaaaagactcattagactcgcttagaactagacagagatatttccagtttttagctcgccaaaaaaatgaagggttatccagcgtgcccaagcatttttatgacctgttagatttgctgactagtaaagcaaaggatgaaaaatctttatgtgattcaccattcagcaaaaacattaaaaaagctattggtggtgacttgaccatttctcaagctggtgaaatcctttttaaagaaaaaaatagcccacgtgcggtgaaccttcattcgacggcattaggcattactaatttaggtttgatctcattgttacttgaaaggggagttatatctaaaggtagttatttatttattgatgagcctgaagtgaatcttcacccatcatggcaaaaagtgatggtagagactctttttgatttaagtaaaaatggtattaatgtcgttatagcaagtcatagcattgatatgatgaaatgtattgaaaatattatggacgataatgacgatctaatcgactgtgatcactttggaattaatcagttaacgactgagggtgattctgtcaattcctcaagtaatgcacttaaaagaatcgctgcaataaaaagggatttgaataaatctttcttcgaaatgtttttagatggagaaatctaa

SEQ ID NO: 236324 - DNA, 573 bp, Klebsiella pneumoniae
atgcagccattgattaatattgatgattatttcgagttaatggatcatgagtttaatgatgttgcaatacgcccaacaaaagatgggtacagaatagatagaaacgggataaaaaatcgctgcaattatgcaaatttaaaatctgtcgattatttacacgagagcaacaatcagctcaccctaatagagtttagtgaccttgctaagcagcacttagcaattctggataagatagctgcatttaaagcctgtaacttagataaacgtgaaataactcgaaatgtaaaaaggcttcatcgagaaattggcagcgaaattaaaaacaaatacatggacactctctgtatcttaagaaaaattcctaatgtttttcataatgtccctgcatggatgatcgccgattctggccgtctaataattgttgttgcaccgacacaagatgatattgaagaaagtaaaaaagaagatattattagagtgtttgaaaaattaaaagatgatttaacatgctctatacctgatgatatttttcgaagtgtaaaagtagtccaggtagattctttttttgggtag

SEQ ID NO: 236325 - DNA, 381 bp, Klebsiella pneumoniae
atgaaaaaattcgctgagtgccaggggagaccatcgctgctcattccgggcgatcatttagaatactgcgacaggtttaagtatccggtgattattgtatggaaacgtgtcaaatatgccgatgtaacctggctgaacgagccgttcctggtatcacatagagaactgtttcaccgcgatgactttcggcaggacttagaggaaagagcagaagttatctacctgcgatatgccacacctaagacagccagagccattacttactcgtttattaccctgtacgaacttgagcagcattcagctttagaggccgcagaggcattatttgatatgacgattgcaatcattcgtgaatatgaatctgcaggagcgaaacaatga

SEQ ID NO: 236326 - DNA, 627 bp, Klebsiella pneumoniae
atgagcaacgtactgacctttaaatcggtaaatcacgactttttccacgccgaagccacaccacgcggcgtcaatatcatgacccgaaatgatgccggcatgaatgagcatgtttgccttgttccctattcagacgcggtaactcaccttgatagcgggaggtatgacgaaatccccgatgaaggatttaccctgcattttgcagtggctgacggtggggcgcgtggctggttcgacttcaccgcgcagcaccacgtcactatgtggcgatggctgattgctgcgacgttcgtttctgagatgaagcgcgagaacggcaccaccacggttactgaacctgacggcacatcatcgcaggtggcgatttactccaatggcaagatagccattccggtttatcccatcgcagaacgcctggctatggcgaacaacattgagggagcgcttatcgagcgttacggcactgaacagggtacggagaacgccattatgttttatcagtccatgctggatgtggacgccggggagctcacgaccgtcgggcgcgagatactggcagagctacatgatggttttattgatgacatagaacaaaacggccttcccgaagcgccggtggcgcactaa

SEQ ID NO: 236327 - DNA, 198 bp, Klebsiella pneumoniae
atgagccatgaaatcacccttgagcaagctgctgagcgtgctcaccagactgaaatcatttgccgccttgttgaggatcaccctcatcggctcgttgatagcgaaatctcagccatagcaaccctcttaaggcgtctctctggtgatgttacggcctggttgattgaagaactggcagaacgggagggaaaggtatga

SEQ ID NO: 236328 - DNA, 264 bp, Klebsiella pneumoniae
atgaatatcaattctatttatcgtcaccctgctgagattgaggtggaggtgatgctggggcgtgaacaggcatacccggatgatttcacactggcagatcgcacagcagaacgtatgacccgcgcccgcaatgggctggctcacgttatgactgatttatccccgcacatcgacgatgaacaagccgtcatcgtgcattgctggctgagtaaagtgctgtcgattgtcgatatagccaaacttgatgcggaggccagcctatga

SEQ ID NO: 236329 - DNA, 315 bp, Klebsiella pneumoniae
atgaacctgtataacgatttaatgtccggcagctttgatggttgcacatctgatgacctgaaaggaattgagagccgcgccaatgatgccgtgagtgatttaatgctgggcgtcagtgccattggtagcctcatgttctgggcggctgatagcgatgactacccggaggaaagcgctaaagctgatatgtacagcttaggcgcaatgctgggacgtatcggagaagttgcgcgggcgctgaatgataacgctacaaacgccgcattcttgctctcaatcagtgaaaaagaagccaaagggagggcgggcaaatga

SEQ ID NO: 236330 - DNA, 180 bp, Klebsiella pneumoniae
atgcgtaactatttacgtattactggctatgccatcaataagcgcggcctgaccgttggtattggctacgaaatcacatcctcagacaccagaacagcaaaggctcatgcattgcttcaggcgcagcgtgagggtctcagccatgtacgcattctccgcgttcaggaggtggcagcatga

SEQ ID NO: 236331 - DNA, 651 bp, Klebsiella pneumoniae
atgaaagatatccttagaaaatcacctatcgaaaggctttgtatgtctgtctcaataaccccgcaagagatggcgctggctcttgcgggattgaaccctttaacccgaataagtgacgttcccgaagagcattttgattacgttgatcacaccagaagggcaatagctagagcactaaaggtacacagggataaaaaaatttctactgacgaggcctgtaacgctctggatattctcttggctgctttcccatttattgaagaaagtacgcccgagataattacgcaaaaagttacagaggctatcgacgatttgcgtggaacaaaaggctgggaggaaaaagcccgcaatttgggtggcttgcatcttgtgaactacatcaaagacacgaatcgcagcgggcgaggccagcaccgcaaacaggatgaggaagacggaacaatgaagatgatgggcgtgatcattcagttgctggtaaaaaaatctggagcatcctcctatattaactcaggcaagcctaatgtgacggccatctataaggatgtgcttgatttattagagtgtgaaggtatttcaaaaaaagggataagcagagctgcttttgcggcaaaagcaaagcaggctttgttagcaatccataacctcgattaa

SEQ ID NO: 236332 - DNA, 330 bp, Klebsiella pneumoniae
atgactgatatcactgaactggcgcagctgcgcgctgagcttttaagtcctgcaattggcagtaatgctcatctgcgaaaaattgcgttatcgcttgtagaggcgctggagaaggcgcaggcgcaatcatcgaaatggcttgaggcctaccacaaagcggtgtcgattggtgctcgatatgaagagcgcatcgcagagctggagtcccgcaccgtgaagatgccagagccattcaaactggctaaatcatcaagcggattaacgtactactacgccgatgaggtcaatgaagcgcttagcgccgctggcattaagtgggagggtgagtga

SEQ ID NO: 236333 - DNA, 771 bp, Klebsiella pneumoniae
atgagcaaagggactgttatttgcctctgtgatttaaccgggaaaatggctgagccatgggttgaggctggctatcgcgccgtcttggtggatccgcagcatccagagacttgcattgatgggggatatgaaaatatttcggcaaccattctggaagcgatgccacggctttctcaaattattcgtactgagaacattgtcatggttattggttttccgccatgcacagacgtggctgtttccggttcccggtggttcgaggctaaacgagccaaagacccgcattttcaggccaaagctgcgctggtcgctgagcaatgccgaatgattggaatggtgactggttgtccgtgggcgtttgaaaacccggtcagcgtattcagcagtattttcggctcatccgattacacgttccatccctaccagttcactgggctgtgcgcggatgacaactacacgaagcagacctgcctctggacgggtaacggcttcaaggcgccggcagagaatatgcacccgatggttgaagcggctatcgacgccgtgaagctggcgtgcggcaggatggtgccgaagaagaaggcaatcgaggtcatctcaggaacatctttcgccggattggtgactgactggtatccggacaaccgcattcacgaatgccctccaggcgacgatcgcgccaacatccgaagcgcaactccacttggctttgcaaaagcagtatttctctcaaacgctcctcacctcaataaaaaccaggaggtcgcatga

SEQ ID NO: 236334 - DNA, 267 bp, Klebsiella pneumoniae
atgttacagaacccaccacctgatcgaatctgtgggtatggttgcagcctcgacattctggatcatacccaactcggtggcccttcccggatcaatgatggttgcagaagtgatcaaattagcccagtcaatttgctcatctggggctacagcgagagcctcgatattcatcacctgcacaaatctttgcaagtcgtcatccagacatgccgcccattccctaagcctgaggtgatctgcttgtggggcggcaaatccccaatgtaa

SEQ ID NO: 236335 - DNA, 828 bp, Klebsiella pneumoniae
atgggaattgcaacaccgctttacggtgcaaattttactgacccgcgcatgccaattttttatccctatccgggtctgaatgctggttcgctggcactgctggatgcgtacatgctgccggaagatttcaacctggcggctaccggaacggatattaccaccacgccgaatcttgctgctatcccggcagctacgttgactggcgtggcacaggccgatctggttttcaaatactccaacacgctcaccagtgctgaggtgaaatttgaacgtacgccaaaactgggtattcacggcatcgtgtcgcaggtgaatcaggtggccgggcatctggcccgcttccgttgtcccggcattctgccgtacattgtggcgcatcagaacgaccaccagttcgccgtgttcgtgcatcaccgtatcacgcgcgataagccgtcatcaacgagccagaaccctgtagaagtgttgatgtcgcataactcagctccgtctaataacaaactgctgattgcgaatctcgacggcggtctgacgggatctgctgtactgaaatcgaccgcatcagcgaaagctggcacggacatggtcgcggacacggcctattacgatcatatcgtgtggggatcgccgtctggtttcggcagcctgttgaacaatctatgtcgttcgtacgtactgtaccgcctgcatattgtcgatctgacagcggcaggcatgacgttggctgaagtgacggcagctgaacaggcagttttcagccgccgctttagcgctggtggaaaatattacggcgacacaatcccaacaaatccgtctacctttccgtag

SEQ ID NO: 236336 - DNA, 861 bp, Klebsiella pneumoniae
atgttagtgtcgatgaaggacatgcttcagcatgccctgcgggacggctacgccgtcggtcagttcaacattaataatctggaatgggtcggcgccgtattaagcaccgcccagcagtgccgctcaccggttattttgggggtgtccggcggcacggttaagcatatgctcgggttaaaatgtattcatgacatcgtggttaacgccatggagtatttgcatattgatgttccggtggcgctgcatctggatcatggcacctcccgggaggcctgcgaagcggcgatcgccgccggcttcagttccattatgttcgatggctcgcatctgccgttcagggaaaacctggccattacccgccacctggtgacgctggcccacagcaaaggtatctctgtggaggccgaactggggaccatcgccggcagtgaagacggcattgtcaattccgaagtcatctacgccgatccgcaggagtgctacaccctggtgacagaaacccaggtggattgcctcgccgccgcgctgggctccacccatggtctgtataaaggtaaagcccgactgggatttaccgagatgaaagccattgccgagcaggtgaaggttccgctggtgctgcatggcggcaccggtattgccgatgaggatatgcgccgggcgattgcctgcggcaccgccaagattaacgttaataccgaaaatatgtacgcctggtgccaacaggtgaaagcaattttcgccgccgacaccgggcacgatgtgaacgatccgcggaaagtcatcgcccagggactgcagccggtacgcgagatgattgcccgccgcatggcgctctttggctcagagcagcgctattga

SEQ ID NO: 236337 - DNA, 288 bp, Klebsiella pneumoniae
atgttagttatcagaacggtttgtggtaacggtattggcagctcattgatggctgcgaataatgtgaaaaagatttgtgacgaattaggtatcaaagcggacgtcgcctcggtcgattttgctaacgccgtcggggaaaaagccgacctttacgtcacgatcaaagaactggcaaatcaatttccggcccactgtcatgtcgccatcattcgtagctacgtccataaagcgaagatcgccgaggatattaccgatgcgctgatgaaaattgctgcgactcactcttaa

SEQ ID NO: 236338 - DNA, 774 bp, Klebsiella pneumoniae
ttgcttaacgtgagttttcgttccactgagcgtcagaccccgactcctgcaatcgtcaagggattgaaacctatagaagacattgctgatgaactgcgcggggccgactatctggtatggcgcaatgggaggggagcagtccggttgctcggtcgtgagaacaatctgatgttgctcgaatatgccggggagcgaatgctctctcacatcgttgccgagcacggcgactaccaggcgaccgaaattgcagcggaactaatggcgaagctgtatgccgcatctgaggaacccctgccttctgcccttctcccgatccgggatcgctttgcagctttgtttcagcgggcgcgcgatgatcaaaacgcaggttgtcaaactgactacgtccacgcggcgattatagccgatcaaatgatgagcaatgcctcggaactgcgtgggctacatggcgatctgcatcatgaaaacatcatgttctccagtcgcggctggctggtgatagatcccgtcggtctggtcggtgaagtgggctttggcgccgccaatatgttctacgatccggctgacagagacgacctttgtctcgatcctagacgcattgcacagatggcggacgcattctctcgtgcgctggacgtcgatccgcgtcgcctgctcgaccaggcgtacgcttatgggtgcctttccgcagcttggaacgcggatggagaagaggagcaacgcgatctagctatcgcggccgcgatcaagcaggtgcgacagacgtcatactag

SEQ ID NO: 236339 - DNA, 540 bp, Klebsiella pneumoniae; identical to SEQ ID NO: 19206

SEQ ID NO: 236340 - DNA, 396 bp, Klebsiella pneumoniae
atgggggtaaagaaaatcgttatgctggctattttagtcagctttgtggcgggatgtgcgccattacatccttcaaattgccataaaactacagccctgggtagttgcagttcaggacgttgggatgatcaggatgaatggggggagcaagcacggggaatcagggatgcaattaatgctaaacttgatgatccgcaaaaatggaaaaggaaaaaatgcaggttgcatatggaattctcccgggatggcacggcgttaaaaatatcaaccagtaatggcgataaagcctattgcgaagcgataaagtcagcagcccataaagctaaattcccggccttcaacaatccggaagtttatagagattttcaaaaatccggctttgacatgcgcggttag

SEQ ID NO: 236341 - DNA, 2712 bp, Klebsiella pneumoniae
atgaatgccattattccgcacaaaagacgtgacggcaggtcttcctttgaagacctgattgcgtacacgtctgtgcgggatgatgtgcaggaaaatgagctcacagaagacagcgaaatcaagagtgatgtccctcaccgcaaccgtttcagacggcttgttgattatgcaacacgcctgcgtaacgaaaaatttgtctccctgattgatgtgatgaaggacggcagtcagtgggtaaatttctatggcgtaacctgtttccataactgcaattcactggaaacagctgctgaagagatgcagtacaaggcggacaaagctgttttttcccgtaatgatacagaccccgttttccactacattctttcctggcctgcgcatgaaagcccgcgtcctgagcagctttttgactgtgtgcgtcacacactgaaatctcttgaactctcaaaacatcagtacgtggctgccgttcatacggacacggataatctgcatgtgcatgttgccgtgaatcgtgtacatcctgaaactggttatattaactggctttcctggagccaggaaaaactcagccgtgcatgtcgtgaacttgaacttaagcacggattcgcgcctgataatggctgctttgtgcatgcacccggcaaccgtattgtgcgcaaaacagcgctggtacgtgagcgccgtaatgcctggcgacgcgggaaaaagcagacgttcagggaatatattgcgcagatgtcgattgccgggctgcgtgaagagcccgcacaagactggttgtctttgcataaacggctggccagtgatggtctgtatatcacgatgcaggaaggggaactggtggtgaaggatggctgggacagagcgcgggaaggtgttgcactcagttcgttcggaccgtcatggacagctgaaaaactggggcggaaactgggggaatatcagcctgtaccgacagatattttcagtcaggtggggacacccggtcgttatgatccggaagccataaacgttgatatccggccggaaaaagtggcagaaacggagagtctgaaacagtacgcctgccgtcattttgccgaacgcttaccggaaatggcgagaaatggtgagctggaaagttgcctggatgtgcacagaactctggcaaaggctggattatggatggggatccagcacgggcatctggtactgcatgatggatttgataaacaacagacaccagtacgtgcagacagtgtgtggccgttaatgacgctggattatatgcaggatctggatggtggatggcagcctgtaccgaaggatatttttactcaggttatacccggagaacgattccggggacgtaatcttggtactcaggctgtcagtgattacgaatggtatcgtattcggatggggacaggtccacagggagcaataaagcgcgaactgttttccgataaggaaagtctgtgggggtacacgactgttcagtgtgagtcgttgattgaagatatgatcgcgggcgggaatttcagctggcaggcgtgccatgagatgtttgcgcgtaaagggcttatgttgcagaaacagcatcatggtcttgtgattgtggatgcgtttaatcatgagctcacaccagtgaaggccagcagtatccacccggatttgacgttatccagggctgagccgcaggcagggccatttgagattgcaggtgcagatatatttgaacgggtgaagcctgaatgtcgctacaatccggaacttgctgccagcgatgaagtggagctcggcttccggcgcgatcctgtactgcgtcgtgaacgccgtgaagcccgtgcagctgcgcgggaagatttgcgcgcgcgttatcttgcatggaaggagcactggcgtaaacccgacttacgttacggagaacggttacgggaaattcatgctgcctgccgtcggcgcaaggcgtatatccgtgtgcagttccgggatccacaattgcgtaagctgcattaccatattgcagaagtgcagcgtatgcaggcgctgatcaggctgaaggagagtgtgaaggaagagcggttgtcactgattgcggagggtaagtggtatcctttgtcctaccggcagtgggtggagcaacaggcggtacagggagacagagctgcattatcacagttacgtggctgggattatcgtgatcgtcgcaaagacaagcgacgaacaacgaatgccgaccgctgcgtgattctctgtgaaccgggaggaactccactttatgaagacactggcgttctcgaagcccgtctgcagaaagatggcagtgtgcgttttcgtgatcggaggaatggcgagttagtctgtgtggattatggggaccgtgtggtgttctaccatcatcaggacagaaatgaactggtggataagctgaatctgattgctcctgtattgtttgatcgtgagccaagaatgggttttgaaccggaaggctcatatcaacagtttaatgatgtatttgcggaaatggtggcctggcataatgcagctggaataaccggaagtggacactttgtaatcagccgcccggatgtggatttacatcgtcagcgtagtgaacagtactaccacgaatatatcaggcaacagaaaagcatatccggggggcatggcgcatcttatgctccagttcaggataatgagtggacgccaccatcacctggaatgtag

SEQ ID NO: 236342 - DNA, 333 bp, Klebsiella pneumoniae
atgagtgagaagaaaacccgaacgggcagtgagaacaggaagagaattgtaaaattcacggcgagattcacggaggatgaggctgaaatcgtaagagaaaaagcggagtcaagtggacagacggtttcaacatttatacgaagttcttcactggataaggtggttaactgccgtactgacgaccgtatgattgatgagattatgcgtcttggccgccttcagaagcatctgtttgtggagggaaaacgcactggtgataaggagtatgcagaggttcttgttgccattactgaatatgtcaatgctctgcgaagagacttaatgggacgctga

SEQ ID NO: 236343 - DNA, 849 bp, Klebsiella pneumoniae
atgaatcagactttacccactgctgacctgaatactgccggcacgacagatgttattccgtctgtggctatcgaccgcatcatcgcgcagcgtaacgaaggtattgcactgttcatgcaggcgatggaatgcctggcgacagcgcgcaagattctgctcgatgcgtcaggtgatatttttctttacgggtttgaagactgcgtgactgattccgttcgtcgcatggataagccggaagaagcgaaaaggaatatcacccgtcttgccgaccggaaaatctgggaccgcctaatgacagatacgggcatgtacaccttcatgagttcatgccagcgtgatgagtggaacagccagctgatgagcgacacctgtcctgaaatcaccctggacaatgtactggcaacattccgccatcttaatgccagcaagatgcagacgtttgaacaggggctgattgatgtctaccggaaattgtcatgggattacagaaccaataatccctgccgtctgggtaagaaaatcattattgaaaacctgctgtaccgctggagtaacgggcgtgtgacgctggactgcagcggacgggaggcactggatgacctggtacgtccgttttatctgctggaggggcgcaacgttcctgacttcaggaacagcatcggggcgcagtatggtgaatttctcgggaacggtgacaatgtcggtaagctgttagaaggggaatattttacggtgcgtggctaccagaaagggaccatacacattgtctttaagcgttctgaccttgttgaaaaactgaatgatattattgcacggcattatccaggtgcattgccgccacgagtctga

SEQ ID NO: 236344 - DNA, 252 bp, Klebsiella pneumoniae; identical to SEQ ID NO: 79083

SEQ ID NO: 236345 - DNA, 183 bp, Klebsiella pneumoniae
atgacgattgcagaacgtcttatacagaaaggtttcgacgagggttttaaacaaggggctcttgaagtggcgcgggaaatagcctgccggcttcgggatataggctggccgctggaacggattcaggaggtcacgggactttccggtgaagaactgaaaaagctgtttcctgatgagcagtag

SEQ ID NO: 236346 - DNA, 927 bp, Klebsiella pneumoniae
gtgagtaagaagaaaaacaccacaacgcccacgccgcatgatgccgcgttccggtcgttcctggcgaatcccgacgttgccagggattttctggaactgcatcttcctgcggagtaccggcagttgtgcgacctgtccacgctgaagctggaacccgccacctttgttgagccggacctgcatcagtacgccagcgatatcctctggagcgtgaaaaccaccgggggtgaagatggttatgtttatacgctcatcgagcaccagagcacagaaaatctgtacatgccttttcgcatgttacgctacagtgtggcggcgatgcagagacatctggagcagcacaaaacgttgccactggtgattccggtgctgttctatcacggtgagcgcagcccgtacccgtacagcatgaactggctggactgttttgagaatccggcacttgcggctaaaatatacacaaagccgtttccgctggttgatatcactgtcgttgatgacaatgaaatcatgaaccatcgccggatggccgcactgacgctgctgatgaagcatatccgccatcgtgacatgatggagctgctggacaaactcccgcaggtcatggtggaaatttcagacgagcaggtgcgtgttctgattcattacatcgttaacgcaggggactctgtatcaccggaatttatgcgggcgctggctgagcgtctgccgcagcatgaggataaactgatgactatcgcagaacgtcttgagcaaaaaggtcgccaggaaggcaggatggaaggacgcatggaaggacgcatggaaggagcgcttgaaaaagccctggctattgcgtgccagcttcagaaaatggggatgacgccggagcagattaagcaggctaccggactttccgatgacgaactgaagaaaatcactcactga

SEQ ID NO: 236347 - DNA, 390 bp, Klebsiella pneumoniae; identical to SEQ ID NO: 8270

SEQ ID NO: 236348 - DNA, 267 bp, Klebsiella pneumoniae
atgagaccatcaattatcttcgcaaccgccgagtatgtaaagcgtctgcgtgaagagtgcctgcgggagaacaaacccctgcaccgccatacccgcttcagacgccaggaactggcaccggatgagattaacccggacgtcctggcgatgggcggtcatatcgccagacgctgcagtgagcagaagcgggtacgtatccccgccatgaaagtcagcgaatggggccacctgctccgcgcgcttgaaattgaacgggtctgtcactga

SEQ ID NO: 236349 - DNA, 435 bp, Klebsiella pneumoniae
atgacagtcagcagcacgatttccgttttttgccgcgacggggtgttccgtaccgtttactgccacctgcacggtgagccgacctggaacggtcgcatcctgcatacccactatgccaccggtcagcaggccgaagccctggttgaacacggtgatatccgttgcctcggtccccgttgcgacaaacccgccgggcatacgcttcagaacccggtggacggtgtgacggcttattacggacgtgacagtggtttccggatggacagtgaggcgcgtgagtaccgttctttcagggaggccatcgccacggaaagcactgaagaggtgcgcttccattatgtgttcatcgacggctactggaaggtgatgtaccgcacgccggaaggctggaagatgaaagcgctcgcgctggcactgcgtcgctgtccggaatga

SEQ ID NO: 236350 - DNA, 501 bp, Klebsiella pneumoniae
atgtctgttgttgcacctgctgtatacgttggaacctggcacaaatacaactgtggaagcatcgctggccgctggtttgacctgacaacgtttgatgatgaacgcgactttttcgccgcctgccgtgcccttcaccaggatgaaaccgacccggaactgatgtttcaggattatgagggattcccggggaatatggcctctgaatgccatatcaactgggcctgggttgaaggcttccgccaggcgcgggatgaaggctgcgaagaggcttatcgtctctgggtggatgataccggtgagacggattttgacagcttccgcgatgcctggtggggcgaggctgacagtgaggaggcttttgcggttgagttcgtcagtgataccggcctgctggctgacgtgccggagacggtggcgctctattttgactatgaggcgtatgcgcgggatttattcctggactccttcacctttattgacggtcatgtgttccgtcggtga

SEQ ID NO: 236351 - DNA, 597 bp, Klebsiella pneumoniae; identical to SEQ ID NO: 17091

SEQ ID NO: 236352 - DNA, 720 bp, Klebsiella pneumoniae; identical to SEQ ID NO: 8275

SEQ ID NO: 236353 - DNA, 435 bp, Klebsiella pneumoniae
atgaaaactgaactgaccctgaatgccctgcagtccatgaacgcacaggaatatgaagatatccgtgctgcgggaagcgatatgcgccgtaatctcactcacgaggtgatgcgtgaagtggacgcaccggctaactgggtgatgaacggagagtatggcagtgagttcgggggctttttccccgtccaggttcgtttcacgccagcccacgaacgtttccacctggcattatgttcgccgggagacgtctctcagctctggatgctggttctggtgaatggtggtggacagcctttcgccgtcgttcaggtgcaacatatcttcacgcctgtcgcgatcagtcacacgctggcgcttgccgcgacactggatgcgcagggatacagtgttaacgacatcatccatatcctgatggcagaaggaggtcaggcatga

SEQ ID NO: 236354 - DNA, 1959 bp, Klebsiella pneumoniae
atgcctgtaacgaagtgtgaaccagaaaccacccgcaaagcaagccgtaaatctgtaaaaacgcaggaaactgtcctgtctgccctgctggcgcagacggaggaagtgagcgtgccgctggcctcgctgattaaatcaccgctgaatgtgcgcacggtgccgtattctgcggagtccgtcagcgaactggcggagtccattaagggcgtcggactgctgcagaatctggtcgtgcataccctgcctggtgaccgttacgctgtcgccgcaggcggtcgccgactggcagcactcaacatgctggcagagcgcaacatccttccggctgactggcctgtacgcgtgaaggtcattccgcaggagctggcgactgccgcatcgatgaccgagaacggtcagcgtcgggatatgcaccctgccgaacagattgccggattccgcgcaatggcgcaggaaggcaaaacgcctgcacaaatcggtgatttgctgggctattcaccccgccacgttcagcgaatgctgaaactggcagaccttgctccggttatcctcgatgcgctggcagaagaccgcatcaccacagagcactgtcaggcgctggcgctggagaacgacaccgcgcgtcaggtgcaggtgtttgaagccgcctgccagtcgggatggggcggtaaaccggaagtacagaccattcgtcgtctggtgaccgaaagtgaagtggcggtggcggggaacagtaaattccgcttcgtgggggctgatgccttctcgccagacgaactgcgcaccgatttgttcagcgatgacggggacggttatgtcgaccgcgtggcgctcgatgccgccctgctggaaaaactccaggctgtcgcagagttccttcgggaagccgaaggctgggaatggtgcgccggacgcatggagcctgtcggtgagtgccgtgaagatgcccgggcataccgcaacctgccggagccggaagcggtgctgacggaggcggaagacgaacgtctgaacgaactgatggctcgttacgactcgctggaaaaccagtgtgaggaatctgacctgctggcagcagaaatgaagctgattgactgcatggcgaaggtcagggcgtggacgccggagatgcgtgccggaagtggcgtggtggtgtcctggcgttacggtaatgtgtgtatccagcgtggtgtgcagttgcgcagtgaggatgatgtggctgacgacgctgaccgcacggaacaggggctggagagcgcgtcagtggaggaaattagtctgccgttgctgactaaattgacctcagagcgcacgctggcagtccaggcagcactgatgcagcaaccggacaaatccctggcactgctggcatggacgctctgcctgaatgtgtttgacagcaaagcgcatagtagtcccgccagaattcgcctggaatgtgagcattatgcgctgaccagcgatgcaccgtcagggaaggaaggtgccgcattcatggcgctgatggcagaacactctcgttttgctgccctgctgccggaaggatgggaacgggatatgacgacgttcctgtcacttagccaggaggtgctgttatccctgctcagtttctgtaccgcgtgcagtcttaacggtgtccagacccgcgagtgtggtcacacgtcacgcagtccgctggactcgctggaaaccgccatcggctttcacatgcgcgactggtggcagccgacaaaagcaaacttcttcggacacctgaaaaagccgcagattatcgcagccctgaatgaggccggactgtccggtgccgcacgggacgcggagaaaatgaagaaaggcgatgcggctgaacatgcagagttccatatgaaagacaaccgctgggtgcctggctggatgtgtgcaccacgtccacagacggatgccactgaacacaccgctaacctggctgatgccgcctga

SEQ ID NO: 236355 - DNA, 528 bp, Klebsiella pneumoniae; identical to SEQ ID NO: 33882

SEQ ID NO: 236356 - DNA, 522 bp, Klebsiella pneumoniae
gtgccccttcagaggagcgaaagctcctcctgccgtccacttcacaggggtttctccccgcagtggacctttccgatgggggcccgtttaccgcctcacggggcagctgtccgggggcggacgcaaaattttttgccgggttcatggctaaaaattttgtggccggtgcatctcaccctggacagatggaacgggagggggttacgtctgccccccggaaagtccacagcggggaaacaggccgcagggggggcggcaggagggaggactgctgcgccatcaggcgcagtttcctcacacaccgtcaggtgtgcagggagcgcaggtcacggcgcgacaggggcggcgcgaccggaacggtcgctgcaagcccgggttttcacgcatcggaccgtagcggcagcccgaaaccgcgccagcgggttcggcggagactggcgggtgcgccagcagctgcccgtcggagtcgggcctgacgaccggatgccgccaggcagccgggagccgaagtgggcgcaataa

SEQ ID NO: 236357 - DNA, 927 bp, Klebsiella pneumoniae
atgccaaactggtgctcgaatcgtatgtatttttctggtgaaccggcacagatcgctgagattaaacgactggccagcggtgcagttacaccgctttatcgccgcgccacaaatgaaggtattcagctgtttctggccggaagtgccggacttctgcagatcactgaaaatatccgctctgagcagtgccccggagtgacggctgccggacgtggtgctgtatcaccggaaaatatcgcgttcacccgctggctgacacacctgcagaacggtgtactgctggatgagcaaaactgcctgatgctgcatgaactctggctgcagagcggtactggacagcgtcgctgggaagagttaccggatgatgtcagggaaactatcactgtgcatttcaccgcaaaaagaggtgactggtgtgacatctggggtaacgaggatgtatcggtgtggtggaaccgtctgtgtgacaacgtactgccggaaaaaaccatgccgtttgacctgctgacggttttgccgacccgcctggatattgaagtgaatggctttaacggcggtgttctgaacggtgttccttctgcatatcactggtatacagaacggtatggcgtgaagtggccttgtgggtatgacctgaatatcagcagtcagggggaaaacttcattcaggtagatttcgacacgccgtggtgtcagccggaaagcgacgttgttgcagaattaagccgccgtttcggctgcacgctggagcactggtacgccgaacagggctgcaatttctgtggctggcagttgtatgagcgcggagagctcgttgatgtgctgtggggggaactggaatggtcttccccgacagatgatgatgagctgccggaagtcaccggacctgcgtggataatcgacaatgtggcgcattatggcggatga

SEQ ID NO: 236358 - DNA, 1347 bp, Klebsiella pneumoniae; identical to SEQ ID NO: 19197

SEQ ID NO: 236359 - DNA, 603 bp, Klebsiella pneumoniae
atgggaaaaaatcaggaagaaaggaaaactcccgtcattgtggtgaaaaaacgtcgtactttttcgccaccgtccttatccgaaaaaacagatattatcgcacctgtatttactgaacagacggcagaatcagcccccgccggaataaattcatctgccgtcgaaacacatatccccgaagcgccagccaggaagaagaaaaagaaaagacaccgttttccacgtccctcccactggacccgtgagtatactcacgagtgcgtggaaaaaataaaggccctgtttcctcatcttcgtgctgaaggtggtggatttattcccctgaaaattggcataaacaatgatatatcggcatttctggcagaacacccggagacagaactgaccatggacgaatggctctgtgcagtgtcctgcatcacatcccgccgcgtatatctgcagcggacagctgtcgccggcgtcccacgttatggcctggatggtcaccccaaagggcaggtctcagactctgaagcacagagtgccggtcgcagactggcgacattagaacaaaagtggctcaggatgcaggcacagcaggagaatatttctgggcaataa

SEQ ID NO: 236360 - DNA, 276 bp, Klebsiella pneumoniae
atggaactgaagtggaccagtaaggcgctttctgatttggcgcggttatatgattttctggtgctggccagtaaacctgcggccgccagaacggtgcaatccctgacacaggcaccggtcattctgttaactcatccacgtatgggagaacagttgtttcagtttgaacccagggaggtcagacggatttttgctggcgagtacgaaatccgttacgaacttaatggccagactatttatgtattgcgcctgtggcacacacgagaaaacaggtag

SEQ ID NO: 236361 - DNA, 279 bp, Klebsiella pneumoniae
atgaaaaacaataccgcacaggcaacaaaagtcattaccgcgcatgtgccattacctatggctgataaagtcgaccagatggccgccaggctggaacgctcccggggctgggttatcaaacaggcgctttctgcatggcttgcccaggaggaggagcgtaatcgcctgacgctggaagccctggacgatgtgacatccggacaggtcatcgaccatcaggctgtacaggcctgggcggacagcctcagtactgacaatccgttaccggtgccacgctga

SEQ ID NO: 236362 - DNA, 1077 bp, Klebsiella pneumoniae
gtgtataaatacacggcacaatcgctccgccataagcgacagcttgtggcaggtctgaagaatacttcatataacgcagtacactggagtcagttagcacccgaagagcagatccgtttctgggaagactatgaagcgggaagggcgaccactttcctggttgaaccggaaaggaagcgcacgaagcgccgtcgcggtgagcactccaccaaacccaaatgcgaaaatccgtcctggtatcgtcctgagcgctataaagcgctgaaagggcagctcgggcacgcctataaccgtctggtgaaaaaggacccggtgaccggcgagcagagcctgcgcatgcgcatgtcgcggcatcctttttatgtacagaaacggacgttcgtcggtcgcaaatacgctttccggccggaaaaacaacgtctcctcgatgccatctggccggttctggtcagcttcagtgatgccggcacacataccgtggggatgagcgtcactcggctggctgaagaaatcagcccgaaagacagcgagggacatgttattccggaactggaagtgacggtctcccgtctttcccgtctgctggccgaacaggtgcgctttggtgtgctgggtgtgtcagaggaaacaatgtgggaccgtgaacatcgtcagcgtctgccacgttacgtctggataacaccggcaggctggcagatgctgggcgtcgacatggtaaaacttcacgaacagcagcagaaacgactgcgtgaaagtgaaatccgccagcagctcattcgggaaggtgttctgcgtgaggatgaagatatctccgttcatgcggccagaaaacgctggtatctgcagcgcagccaggatgccctgaagaagcgccgagaaaaagccgcagccagcaagcgtgccaaccgcctgaagaaattacctgttgaccagcagatttatgagatggctgagtatctccggaagcgtctgccgccggatgaagcctatttctgttccgatgaccatctgaagcgactggccatcagggagttgcgtcagcttgaactgacgctggctgccccgccaccgcactag

SEQ ID NO: 236363 - DNA, 642 bp, Klebsiella pneumoniae
atgtgcctgtcagaactgcaggccaggctgaacgtgggtcagccgctgtttccgacacatgctttatgtattcgccgttcacaacaacatcgaagcccccctgcggggatcgattttcgcggagcgttccggattttgaatatcagtgaattacatcaacgcaactggtatctggcacagtacatccctgccggcaaaaaccgcgaacatctcttttcctggctttccgaacaacacgtccttccctggacacccctgatactgaaaaaggtccgccgcacggataaagtctgtggttaccgtcgacatatacacgccgtgtttcccggttactttttcctgaaagcagaccccgaaagccacagcttcactcaccttcgccgtcacagtgcctttctggacttcgtgaaaatggccggtgaaatcaaaaccgtcagggaggatatcgttcagtctttgatgaaagtgtacccggatcctgcgctcaatccggcagccagggaggagctggatgctgcctccaccctctggctgacaaaagcgcgttaccagtacctcctccggcttgatgcacagcctctgccggagtcgaggatcgccctgctcctgcacctggtatctgatgacggagcgttgacatga

SEQ ID NO: 236364 - DNA, 663 bp, Klebsiella pneumoniae
atgaccattctatcccaggaaaaccctgtcattctgttactggagaatatgctcgaagcactctccaccgccccggacaacataaacaacgaacggcgtcgccggcgttacctgctgaactggcttgacactgcccgtcagatgcgcgagttcagaggaatggctgaagagttcactaccctgcgaaaactgctggccaccaattcagacataccggtagcaaacaccctgaaatcactgctggaaagtggcaataacgcagcattatacgacctgtaccgcttccgctcggctcttgccacgtgcaggagtctgggatggcagattggcacgtgcgcatggaatgaccagttactgagtgagacactttcccgcgcacagaccgggaaacgtcatatcctgcagctgaacagcaccggggacaccttttccaccacgggcagaatgatcagaccggtggcattttcattaatccatccggccaccatcaacacgtctgaggttgaagagatattccgggatgaaggttttatgctcgcacacgggcgcgaatgcagtctgaacggcagcggcagaaatatgctgtcacgcattcttcatgtgggccattcaggtttagcggaagaggaatggggcatggacaacagtctgcttttacactga

SEQ ID NO: 236365 - DNA, 621 bp, Klebsiella pneumoniae; identical to SEQ ID NO: 8216

SEQ ID NO: 236366 - DNA, 1695 bp, Klebsiella pneumoniae
atgtttaatcttccgggatggttgtttaccgttatagcgctggtcctcaccctgttcgttatcgggctgatatttgcccgcctgtaccgccgggcatcggcagagcaggcctttgtccgcacaggtctgggaggccaaaaagtggtaatgagtggcggtgcaattgttatgcccatttttcacgaaacaattcccgtcaacatgaacaccctgaagctggaagtcagtcgtgcagcggctgaaagtctcataacccgcgaccgcatgcgtgttgatgttgccgttgccttttttcttcgggtaaaaccatcagccgaaggaatatccactgcagcccagacgctgggacaacgcacgctcacacctgaagatctgcgtagtctggtcgaggataaatttgttgatgccctacgggccacggcggccagaatgagcatgcaggatttacaggatgcccgcgagaactttgttcagggtgtgcagaacaccgttgcggaagacttatccaaaaacggtctggagcttgaaagtgtgtcgctgacaagtttcaaccagactgcacgggtacattttaatcctgacaatgcctttgatgctgaaggcctgacccttctgacccaggaaacagaacgtcgtcgtcgcgaacgcaacgaagttgagcaggatgttgaagtggccatcagggaaaaaaaccgggatgcactctcccgacgtctggagattgaacagcaggaagccttcatgactctggagcaacaacaacgggtaaaaacccgtacggcagagcagagtgccagtattgctgctattgaagctgaacgacgtcgtgaagcagaatccgcgcgaattctggctgaacgtaagatagaggaagccgaaatcgaacgacagcagatagtgcgtacccgccaagtcgaagccgaacgggaagtggccatacgggaaattgagcaacagcaggcaaccgaaatcgccagccaggccagagccattgccgtggcggcaaaatcggaagagcagtcacaggcagaagcccgggcaagtaaagcactggctgaggccgtacaggcccagcaggatgtggaaaccacccgccagactgcggaggccgaccgtaccaaacaggttgccctgattgctgctgctcaggaagctgaaacgaaagcggttgaactgacggttcgcgcacaggctgaaaaagaagcagccgaactccaggcagcagcaattattgaactggcggaggccacccgtcagaaaggtctggcagaagcagaagcacagcgcgcactgaacgatgccattaacgtgctttcggatgagcagaccagcctccgcttccgtcttgccctgctggatgcattacctgccgtcatagagaagtccacagaaccaatgaaatccattgacggtattaaaatcattcaggtggatggtctgaatggcggtgttacccgcggtaaaacagcaacaaccgacataagtggcggaaatctcgctgaacaggcagtaaccgccgctctggcttaccgtacacaggctccgctcatcgactccctgctgaaagaggtgggtttatccggtgaaggacttacagccctgacacgtccactggtcatgcctgccccggaaaaggttccggatgtcagcgaaccggtaaccgctccggataactcagaaccacaacaggtttaa

SEQ ID NO: 236367 - DNA, 243 bp, Klebsiella pneumoniae
atgtccgcagaaaaattcagagttgtcatatacaccaatacatgtgaaaagaaagtcagttatattcctgcaacagaagatataaacatcgctataatgccatttcagacggcagacaatggcttaattattgtgtgtcagaactcccgtataatacgacgcaaagagcgtatccccggaagcagctgtgaatggaaagatgtgacattagcaccaaaatccagaaaccgcgttcagttatag

SEQ ID NO: 236368 - DNA, 1071 bp, Klebsiella pneumoniae
atgaaaaagaaatcacttacactccttctgccgtcattactcagcggctgtacggcatttaatgccacgcctgttcctgacaccacgcctccggctctggtgttcgtcgacggacaaattcgcgaaagcgctgccattatcgcccatacgcaaaaacgtctgcttccgccaccggtgacccgccctgtgacgccgccccgcccgacaacaacagcgacgcccacaaacgcagtcagcagccagagtaccgcactgcctccccgtccgctccttcaggccacacagctgcccgcactggttatgaccggtaaacccggtcagtcatccgtcgtttatttacgtgaggcacatcagcgctccgtcagtgactggatacgccagttgctaccacccagctggcagttccggcaacagaacgctgccataccggcactgaacaaacgcctccccgtctggtccgttaatgaccagtggcaccgggcactgaatgcgctgctggccggccagcagctttacggacatatggactggaacaggaaaatactgactgtcacgacctctgcaacaccgccggtcgacgtcacggcaccgcagggttcacagaaagctgctgatacaccgcgtaatccgttcaggggcagcaccgcaacgccggcaggcccgacaccagtgacacctgccgtcagcgtttcccgggctcagaccaccaccgggacatccggaactccagagagcagaacaaccacgccagccccggtggccacgaaaccggtagtgccaccacagcagaaggtcataccgccacggcagtggaaaatggaaaaggggaccaccctgaaagacggactggcccgctggacatcatccgaaaaatgcccgcacggcacatggacactgcgctgggaaacacctgtcaactacagcatcgatgcccctctggttttcaccggcagtttccgccaggcgctggagcagctctttgcactctataccccggctgaaaaaccgctgtatgcccggaccagcactgcacaatgcctgctccgtgtgacagaccgcccgcaggaataa

SEQ ID NO: 236369 - DNA, 438 bp, Klebsiella pneumoniae
atgggatgggttacgggtttcattatggtcattatggccattggtaatttctggttccacagtcacctcagccgtactgtgcaccatcagcagaccgctgaaatcacacagcaggctgcagactttattcgttatatgaatgccatcaacgattacctgtatcagcaccctgaacgacgtgctgccggtggtcagctcacgtcagcacagctcggtctgcccgccacgaaaaacgtcagccacctcatcagtcagcagcgcgtttttgtctgggcaaaagaaaaacccggccttatgggtgccctcctggaacaaagtggtgattcggccctgcttgccagagtggaaaacggtcgcctcctggacacccatgggcggcgtatttccatcacgctccctgctgtgatccccgatcaggtcatcatctggatgaattag

SEQ ID NO: 236370 - DNA, 1620 bp, Klebsiella pneumoniae
atgaacaaaaaacttcttgctattatgattgcagccactctgctgcagggctgtaccagtttccgacaggcagagaacaccagaaaagacgccgttgctgaacaacaacgggcccgggaaatgatcgctgagctgcgaaaccggacaccggttgtaaaggaatccccacgtcagtggatcaatccccgtccggtcacggataaaaaccccggtaatgcggtgcccggctgtccgattatcattaacacccggcagagcatcacccttcagcaggtggcccagcggatctcgcaaaactgtcatattcctgtaaggatcacccctgatgtacaggcgtatctgagcgtgaccacctctggcagtacgcagcaaatccagggcacagtaccaccgccggataccggcggtatggttccactggccgccataggcagttctgacacgacacttccccgcctgcagggaaatacggcgtcacttcctgaactgaaggcttcaggactgacatcactgctgaatgcggtcgcttcccgtctcgggatttcctggcgttatgatggttcacatatcacgttctattatcttgatacccggaccttcccggtgacctatatggacagccaggttgcctataatgccaccgtggtcagcggtaccatgtcatcaaatggctcatcaggtggaacagcatcggatgccatttccggtgatgccagtaatacccagaccaccaccgtggatatgaaatctgcgctgtatcaggatgtgaaaaatgctgtctcatcaatgctgacgccggggattggtcgcatgttcatgtcgacgggctttatcaccgtcacggacaccccacaggtactggaaacggtccggacgttcattgaaaaacgcaatgaagaaatgaagcgccaggtggtgctgaatgtggaaattctgagtatccggaaaacccgtaatgagcaggcaggtatcgactggaacgcagtcttcagcgacagaacgctgggactgagcctcggcagcacattcaccagtgcagccagcgataccgtcactggtggtgtttccattgtgaacgggaaactcaccggttcaaaagccttcctgaaagcactctcttcccagggagatgtcagtgtggtaacccggaattccgccgtgaccaaaaacctgaccccggtaccgatgcagattgccaatcagcagagctacattgagagtgtgacgacggataccaccgccaatgtcggctcatccacctccctgaatgcggccaccatcaccaccggttttaatatgacccttctgccgttcattctcccggactcacagacactgcagctgctctattccatgagtctctccgacaaaccggttattgagaattacgagagtggtggaagcaaagcccagctgccgaatgtggatctgaaaaccatcaaccagacagtggacctgaaatccgggcagacagtcattatcagtggcttccagcagtcagggcgtcgcagtggaaaacagggtgtcggcacaccgggattcttcggtcttggcggtgggatcaacagtgaaaacgacgacaccattctcgtggtgctgatcacgcccaatatcatctga

SEQ ID NO: 236371 - DNA, 1296 bp, Klebsiella pneumoniae
gtgacggatatttcaccgacagagcgacaggtgtttccgctgacggcaggacggaatgtatttcttgccggaatggactggaaaacactgcccgcaagccataaaaacccccggacgtttgcccgcagtctgggggcagtacgctatatttcctgtgagtatctcagtacggaagataccgatcgtcacatcatggttgcagccgtcagccagaatacactccccaaaggcagccgcaggtatttctctctcgccatgcttatcctgcccctgctcgagccaggaggatacgctatcgttgaactgtcacaggcaaacgatacagaactttatggttttgtttctgctgttgacggcatcctggtcagtgacctggtgggaacccgggaggaaatcagggaggcccgggaaatattcctcaccattaacagcgcgcctgaacacggctggacatgttatgaaccgccctcgtttaacgggcctgacggcagaggtcccctgccactggaaaccctgacaggtgcagggaaatatccggcagaagcacgccttcaccccgtatcccgtgggccacagcttattccggtattactcatactcacccttctgggtactgcatggtatggctggcagtactatgaacgcctgaaggcagaaaaagcagcacttgctgaagcggcacaaaaagccgcagaggaacggatcacaccaccgtggctgagtatgccggaaaccggagattttatccggggatgcagtgacgtatggtcacgcctgccggtgtcggtcgccggctggcgatattcactcgccgagtgtgctgccaccgggaacagcggcaatctgcgtgcatcatatacaaacatcgccgggacgacagtgaccgcattcagccagcgggtcagggaaattttcagcatccggccgtttatggttatgccggacgggaatagcggtggttttgccctgccggtcaccttcagtatgcctgaaactcccgttgccgttgaggcattaccggaaaacaccctcctgcaggaacggctgaccacactcgcccggtcgatgcagctgaaaatggactggcaggaagtcagcaacagcttcaccgatgaagacggaaataccatccagcccccctggaaggagtatgacctgcagatactgacgacacttccggcgcaccaggtggcagagcatttcagtgaaccctccgtccgttttatctccgtaacaaggcaactggaagagggtcgtttccgttatcaattcacaggtaaatattatgtccagtaa

SEQ ID NO: 236372 - DNA, 459 bp, Klebsiella pneumoniae
atgtccagtaaaacaaaagctcttctgctttccgtcctgatcctgccgacaacggtcgcggccagcaccatcagcaacatgcaacagaataaccggcaactccaggtggaacagattcaggaagaaactgcactgtatgaagccatgctggcaagagaaaaggtgcgacatgaactcagaaccctggagcagggagaaccagctgagcctgtgcattcacaggaaagcagttcagccgtcacgacagatacccctgcccccattaccggtattccccggctgacagagatatccggagttcagccccagataaccgccaggatacaactgccgggcggacaaactgctgatgtaaaagaagggcaacacattcccggcaccacattccgcgtggaaaagatcaccactgacagtgttgtccttgaacaaaatggtatcagaacaacactacaaccctga

SEQ ID NO: 236373 - DNA, 1509 bp, Klebsiella pneumoniae
atgctggcacctgcagaccagccacctgatgacattctggattacgtggttgttgatacagataaaacaggacaaattcgtgtcagagtggtggaaggaaaaaaacaccttcgtgccgtccaggattatctgacccgcctgtgctcccgctatccgggtaaagtatccccgtttgagttcaccacacttgatgtgatcgcccgactccggcaggagacggtcatttccggggtggaaaacggaattaaccccgtacagcaaaaaatgctcgggtatatcagccatgcggccaccctcagcgcctcagatcttcacatcacgccggggcgtgacagtacggatttcacgtatctggaggcccgtgtccacggagagctggagctgctcgatatcgtcagaaaagatgaggggctggaattactgggggccacctattccggaatgactgacgtcataaagggaacacagtttgatcccggtgtcccccaggatgcccgtctggctgaaagattcctgaaactggccggactgtttggtgcgcgctactcccactatccgtgtgtgggcggactctatgccgtactgcgtctgatcaaggatgacagtcagcatataccgacattcagtatgctggggtatcaccctgagcaggagcgcgctgtccgaaggatgctgcagcgaccggagggcatcgtgatcctctctggccccaccggttccggaaaatccaccacgctgaggacggcttctgccgcctatctggaacagtatggcttcaacgataccggagggatcctgctcccccggcgacgtctgttcacaatagaatcaccaccagaggggcgtatccccggtgcaattcagacggccgttatggataccgctcagggctgggtcgattctgttaagtccgccctgcgccttgatcctgacgctatcctgaacggggagatacgtgaccatgcctccgccatcacggcgataaaagccgccatgaccggtcacctgatgctgaccacccttcatgctaacgacccgataaatattcttgagcgtctggaaatggagggcgttcaggcaaggatgattgcagatccgcagttatttatcggcctgctcagccagcgtctggttcaggtgatatgtccccactgccgcctcccctggcatgaggtggagagctcccggacggatgaagaacgacgcctggtggaaaacttctgccagcccgatgccgtgtatcttcgtaaccataacggctgcccacactgctggcgtggagtgaacggccggaccgtcattgcagaagtgatttccccggatgcgaagtttttccagatttaccgggaaaaaggccggattgaggcaaaaacctactggcaccgggagctcggcggtatgacacgaaatcagcacctgctgggcaaaatcaacagtggtcaggtcgatccgctggctgcgcattacatatcccctgtagacgaggacagctatacgctgctgcactga

SEQ ID NO: 236374 - DNA, 1095 bp, Klebsiella pneumoniae
atgaaaattctggaaagactcaacaatacggaactggaactgtccggccttaaccgctggctgggcaaaaagacgttcaggcggactacgttttacgagtcccttgcaggcatgatccgggacggcacaccggttatgcgggcactggagttcatctgcgatgtggaaacggattttggtaaaaagaaagggcagtccggcctgtattttctggcgacagactgtatcgccagcatacgaagcagtggtcagctctctccggccctgaaggactgggtacccaaagatgaaattgccctgatccgtaacggtgaagagcgcggtgatatcgctgaagccatgtttcaggttgtcaaaacggcaaaaggacgacaggagatgattagcagtctggtgagtgtctgcctctatccgctcatcctgctgacgctctgtgtggtgaatatgtataacgttcatacccgggttattccgatgatcagcgcctttgcaccggaagaacgctggtcagtgcaaatggtcattctggccaaatcctccgagctggttatcggttatggtttgtggctgctggctggactgcttctgctggcaattctcatcaggatgtcattcagtctgtataaaggtccccgacgacggtatcttgatcgcatcccgccgtggtccctgtatcagacattccatggcgtgaattacctttttaatatttcatccatgctgcagataaatattcctttatctcatgcccttaccagaatagaaaaacatgcagaacataaccgatggttaaaatcacgaataagtgctatcagaaaaaatgtcttatccggtcagtcactggcactggccatgaaaaacagtggttatgactttccgtcaaaatcctgtgtgaataatcttcttttaaattcagaaagggaggacagtgttgccagtatggcgctttatgcagaccgctggctggaagaagcaaaaaagagtgtcagaaaaagcggcattattattactgctatatcaggtctgctggtatttctcttcatcatcaatatggtcagtgccatttacggcatcagtgacatgctgaagcagtaa

SEQ ID NO: 236375 - DNA, 537 bp, Klebsiella pneumoniae
atgagcgtcataacctgttcgtattcagaacataatattcgtcaccttcagaacgatgataaaggcatgaccctgctggaagtcctcggtgttctggtcgtcgctgccattgttattggtgccgtgatgggacttatgtccgataccctgtcctcttcagacaaccagaaggaactcaaaaacctgcagacaatcgccaccaaaatgaaagcccagaaattccaggggcagtatacaggtactgactacgtcaaaatcctgaccgaaagtggtggcctgcctgccgatatgatcgccggtggtaataaggcgaaaaatgcctggggtggtgcggtaaccatcaaagtcagttcagataaatactcctacgttattgaatccagcaatgtgccgaagaaaaactgtattgatctggtcaccagcctgcgcagttcatccatgtttacaaaaatcaacggcaatgtgacgaataaagttgacccgtctacagtatgtaacgcagataaaactactatcaaactggaaaccaacagttaa

SEQ ID NO: 236376 - DNA, 486 bp, Klebsiella pneumoniae; identical to SEQ ID NO: 8227

SEQ ID NO: 236377 - DNA, 627 bp, Klebsiella pneumoniae
atgctccagataatcccggcactgctggtcgccataaccgtggtaatacagtgtctggccgttcagatgagtcgctatcgactctcccggatgaatgcccgcccccctcaccatgggctggcgctgatgagcgggatgcttgcagctgccgccattatcctgcgtctttatcagaatgacagcgctgtcggggtgctgtttatgacgataatgaccggatgtatgacactgatgaccctgacggatgctgcatcctgccgtcttccccggcccttcaccatcatgtatctgataagcggcagcgcatttcgtctctggcagggagactggctgacaggcctgtgcagtgcagggttctggttcctgctgttgcttctgttcaggcaatacacctcttaccgcaggaaaacagaaaccataggcctgggcgatgtttttctgattgccggtattgccatctggtccccgccgggagacatcccctggattgtcgcaacggcagcaggcggagccttactttatctgtggtgtaacagacaacgacgcattaccagagaacttccctttgggccgtttctctgcgcgtcacagtacgcatttactttttatcccggtggcctttggtaa

SEQ ID NO: 236378 - DNA, 1362 bp, Klebsiella pneumoniae; identical to SEQ ID NO: 8229

SEQ ID NO: 236379 - DNA, 822 bp, Klebsiella pneumoniae
atgaaaactgacagcacaggtattgccgcccgtatgatgctctccctggacagggagcgaatttgcgaatgcctgctcagtcatcgccagctgcagtccacacccctgcaggttcgttatccgcagggagtcagggatgcccttggtatcatgagcgaacagctttctctttccgtctctgacctgacgcgtatcctggtcgaagacgcgttaagtgaaatgtttcttcctgcagataacatcgtccgccgtcttctcagcaggatggagcacatcatgcaggcacatgatatcagcgcaacaacgatggctgcattactggccccctggaatatccgccctgccgtcttccgggagccggacagactcactgactatctgaccggggagattcttgcagcactggctgactggttttatctcagtccggaatggctgaacggcagggtgcattatccactgtatcgtccgggagactggccagccacacaggagatattctgcaggattatttcagcccgcgagaatatggacattattctctggcatggttttccgtttgccggaacgcattccggagaatattgcggcgttctgctcaggcagaaaaaagaaattaataacaccattatttatccggtactttcgttatatccggccagaatggatatagaaaaagaaggctggtttcagatggcccgaaaaatatctccggatatccctgttcgcgccgtaacactcactccggcacaggcagaatatctgataacaggaaaaatattacccactgcgttattcagggttccgttatccccctggtaa

SEQ ID NO: 236380 - DNA, 1203 bp, Klebsiella pneumoniae
atgatgatgaaaaagcatattacccgtactctcatcgcgtctgccgttttattttcctttaattcgactgcagcaacgtcatattttgaagcccgcaatgatgcgatgggaggaacgggggttgcctcctctcactatggtgtggccccactggcaaacccggcactgctgacaaaatccggtgcaaaagatgacttcagtcttctgcttccgtccgtgggtgcgcagctgtccgatccgggtaatatcgccgacaacgccgacaaaatcagcgatgactggaaagccttcgaccgtgccgtcgacagccactccggggtaccgcagacagcggcccgcctgaaagagagactgcaggacttccggaacacccatgccagcgcacaggccggggtatctgctgtggcggcccttcccggtgataccctcgctgctgcactgatgctgaaaacgctcgggactgtcagcgtcgacggtaaagtcagcgatgccgacctgaactatctggaaagcattgcagacagtggcagccaggatgtggataaaaacagactgacctcacaggcttttgcccgtgccgcactgatcaccgatgtgggcgttgcgctggccactgaactggaaacggccggacaaaaatggtcactgggcttcacaccaaaattccagcgtgtcgacctgtttaactacaatacgctgatcaaaaactatgacagcagcgcattcaaaggtgaccgttaccacaacacccaaaacggtattaacgctgatatcggtgccagcatggacctggatgacaactggacgctgggtctggtcgcacagaacctgatcccacgcagcattgagaccaaagaggtacatggtgtcactgaaaccttcaggatccgtccgcaggtaacaaccggcgtatcatggcacaacgacatgttcaccacggcactggatgtggatctgaccccggccagcggcttcacatcagacagcaaacgtcagtttgccgccgtaggtgctgagtttaatgcctggaaatgggcacagttacgtaccggttaccgccagaatctggccagcaacaacggcagtgcattcactgccgggattgggctctcaccgtttgatgtgattcacattgatgtcgccggcctcgtgggcaccgacaacaactacggtgccattgctcagttacagttcaccttctga

SEQ ID NO: 236381 - DNA, 420 bp, Klebsiella pneumoniae
atgctctgtctgagcggctgtcatcttcccccggataataccgcaccggccaggaagtacggtgcagcttctgaagtcgctgtcacacgacatgcacagtatcagttgtgggagcagggcacgtattctgcagccctgccttcccgccagcccggaggcagcctgcaggctcacagcgggcgggtttcctttgactgggaaggcgatgctctggagctcctgagcgagctggcccgtctgcgcggacaacagttcagttacagcggcgtgcgtcttcccctgcccgtctcactccatgtacgcgatatgaccttcgctgatgcccttcgtctcacagaggcccagactgcctggcgggcagtcctctcacagtcagccgggcgtttacatctttcctatatgccaacggagaaaaaatga

SEQ ID NO: 236382 - DNA, 837 bp, Klebsiella pneumoniae
atgaaaaaacaggtctgtctcctgctgtccgggctcctgctggcaggctgtgccggacagcaccatcgcccccctgccggtatggcaggcaatttaccaccgccggatctccgggcatggctgacgcccactgacaaccaggatgacggcatttcagacacccgtcgccagatgctcactgacgccggacgaacgctgggattccgtggcggaaaagcacagcgctcatgggaactgattcaggcactgaatgcccgggaaagtacactgaatgccctgtatgacttccgtccccttatcagcagggaaggctggctaccccctgttattgatgaagcgcaggatgttgctcacattcagcctgaccagataagaaccgcgtcccgtgtctggaccatcctgcgccccgaacgttttgtcagtaacccgccgggctggcgtgactggcttctgcgggggctttccactaccgccaccccgggaactgagggccgtgttgtaccggaagaccgcgcacagcgcagactctgggaaaacgcactccgccagggctggcaggaaggccgtgacaacgctgacctcaccctggaagccaaccagaaacgcctgacccgggattaccggggaatgatgctttatgccctgctctggcgtcagggcatgatcacacgcccggatgtgactgaacagcggcagaccgtcaccggtaacggcaggaaactcatcaccggagaccacgtccgccgtctgaagacacacgcggaattcaccctgcagaaatcacgctggcgtccggtcgtcagcacggaaggagcccccgatgaaattacccgatga

SEQ ID NO: 236383 - DNA, 1149 bp, Klebsiella pneumoniae; identical to SEQ ID NO: 8234

SEQ ID NO: 236384 - DNA, 291 bp, Klebsiella pneumoniae
atgaaacgcgaaggcttctggcgggatgtcactccgccactgaatatttatggtgtcccgttgccgtttaccatgatttacctgctgctgtttccgtatccgtcaaaaacaacattctgggtgtgcagcggcattttgctgttttttgtgctcctggggtactcaggatggactgtccggacgctctgccggcgtctgtacagcctggtgcagggtaaacaggcgtcaggccgtccctggtggtaccggcatcgcacagaattaccccgtgaatggcgcggaacggaataa

SEQ ID NO: 236385 - DNA, 4062 bp, Klebsiella pneumoniae
atgaagtccagatatcgaacctggcttgctgtcccgcctgaggagacagaagccgtaaaaaatgcagttcccccgttaaatggccgcaaagctgtcgcatgggatccagaaaaaaagctctggtatgcccgggcgggtaccgaactttcactgctggagcgctggttaccccggccacaggaactgtcgatggatgccggcgatccggtcactgaatttgctcaggtcctggaaaacgccgggctggttattcagggattgccacagatggacggagccatacacagagtggccacccgggatgacaaaaaaggggccaaaagtggcgcatacagggcctatcttgatggtcgtcccgccggctggtaccgcgactaccggagcgccgatgacagtcccacaaactgggtattttccggcggagaacaacacgatcctctggccagactgcatctgcgggcattcgctcagcaacagcgcgatgataacgctcgtaaactgcagcaacagtataacaaacaggccggctatgcccgctcctatattaacaggttgccacaggcaacagcacatgaatacctgacgcgcaagggcatccgggccgcgcctggcgtgcggctgaacaataaaaatgagctggttattcccttcagcaacggccggggagaaatacgttcgtaccagcgtattccggtcaccggcgggaaggatgcccgcattctgaaagactccgagaaaaccggcaactggttcaccttcggaaccccggaaaatggccgccccctgttatttgcggaaggttacgctactgccgcctccctgcacgaagcaaccggccttccggttctgatgacagttgatgccagcaatatgattgccgtggcagaaaatgcccgccaaatctggactgacagcccctttgtcttctgtgccgacaacgatcatcaacgggaaattaacaaaggggtttttagtgcaacaaaggccgcagaagtcacgaatggcgaagtcattattccggcctttacggaggcggaaaaagcacagggactgaccgatttcaatgacctggacgccagccggggacgggacaactttcagaatgccatgaatgcacagttaaaacatatcggtatccccacacccaacagtgacactgccgaccatcgtgaggctgtcgtgatcgacaacctgatattcacaccggtaaaagatgagaagccacaaatgtcccctgaaaacagacagagcacagccccggaaacggagctggcgacacaggatacgccttatgacacccactccgacgatacagaaaaccaggcatatgaagatgactatgccgcctatgcatccctgcaatcagtaactgcggagacgttatccccggataaaccactggagaatattgcgtctgccgctgataccggcacagagaatacctctgtgcctaccgctggcgaccaggaagacctcaatacagacgccacaggtacagacaccgctcacaacagcgacacagcagaaacaggaacgcttcctgaacctgccgggatgcagtccgtgcagcaggcaaccactgaaccgaccgcagaagataaaccacacgagaacgttgtttccgctgccgataccagagaagaaaatgcctctgtggctaccgctgataccggtgaagaaaatgcctctgccaccaccgctgacaaccagagcacgcaggcagaagaacatccccggagtgaagacacaccggaaacctccctctccgacgcggccgggacacagcacaccaccacaacgcagtctgaagaacaagtgcaggtttccatggccagcgctgacgactggagcgcatttgcggaagatctcaacgctgacactccgggggcccccactgttcacaacaccgacaacgcggagacaaacacagtttctgaaccggccgggatgcggccagttcagcaggtgaccactgaactgacggcagaagataaagcacaggaaaagagcgttgcgtctgccgctgagaccggcgcagagcactcctctgacatcaccgatgacaacaggaacgcacccgctgaggagctcaatgccgatgccacggttgctgttcacaacaccggcacagcagaaacagcctcaccttctgaacctgcagaaactcagccagtccggcaggccaccgctgaaccgacggctgaagataaactgcaggaagagcgtcttgtgtccgccactgagaccagcacagcgaatgaagcagcccgccctgaaacgccatcgcttttcagccgtctgcgccgttttctgaccggtgtgaaatcacgcacctcagaaccttccgttattcaggagaaaaagcccacggaggctgaaacagcaacagaggaggtcgcaccaccatcaccaccggaaaccagcccggaagacacatcgtcagcggaaccggacacgattatctttgcaccccgccgtcccgacagtccgcagcggcacaacctggacgagatccttaaaaatcttacacacaaagagtttcccgacaggactgcgctctacagcgttgacggtgaacccgccttcctggacagactctactgtctcgaaatggtggatggcgccagcgcggatgacaaaaaggtcctggctgcccttgctgtggccaccaacttctatggcggcgttatcgagctgaccggcagtgatgcctttaagcaaaaagccatgcagctgattgtcgaatacgacatcaaggttcgcatgaaactcccggcccagcgggcagcactggaaaaactccgcaaggaaaaagagatggcgcatgatgccattgtcacccacagacccacgccggaactcaaccgccagtcaccggaagagacaacaatggcccaaccggctccccctgtgtcaccgaaggcagaggctgaacaaacagcaggcagtacggctgaaacaccgcatccggaagcgccggtcacggcaaaagctgaagccccccgggccgacagaccggaacaccccgccgccccgtcgtctgcgccagaaaaagcccctgtcagtgcacagccgcagcaacccgacacaccggtggaagagccgcccggcaagctcagccccggtgaaagtgtgactgccgtcctgacaaactacggagaaaaagagtatgcgcccggaaaagggcgctgcttttttgtggagctcaccaaccgcagtggcaaacgggaatactggggaaacggcctggaagaactggtcaaaaaccatcagaagggtgaccccgtcacactgacactgcaggcgagagaaacattccggctgtccggtgaaacgcgggatcgtatccgtaatatctgggccataaccccggtcagtaacggcattaccgttaataatgaccaacctcatgcgggtcagcataccctggagtttccgatggcaacattcagccaggtgatgttacagatgcaacaacactggccacagataatgcaggaagttcgctcccccaaaaatcctcccaataatctgtacattggtgaagacaggcaacctgcatcagcacctcaggatcaatcaatgcgactccccctcgctggtaatgcccccaatgaactgataccagccatcgcctctgccgataaggacaatcgtcagttgaatcttctgcttgtccacagcgcagatgatcatctgcagggcgtggtccgcctgaacggcaccctttacccggcactggccaccccgtcagctgacaaccgtcagctggttatcaatgccctgacggataacggtctgcagtttgccggttacggtgaagctgttaaccatgatgagaataatcatcagcgtccgtccccacaaataatgcagtttcacctgaagcaacaggactccccgttgtttgccgccatccacaaaccggaagagcaaccggacaagcttttccgctctctgggttttgagcagacctggaaagagtggtctgacagccaaaaggcggaggacaggcaggaaaaaactctgcaacaggcacaatcccacagccccggccgatga

SEQ ID NO: 236386 - DNA, 351 bp, Klebsiella pneumoniae; identical to SEQ ID NO: 8237

SEQ ID NO: 236387 - DNA, 696 bp, Klebsiella pneumoniae; identical to SEQ ID NO: 8238

SEQ ID NO: 236388 - DNA, 975 bp, Klebsiella pneumoniae
atgcacatacatcatcttattggcgcactgcttattgtgtgcggcactgtcacagctgcagataacccgggctggaaaaatgcacgaagcccgcagaccggcggaaagaccgcacaggcaaccgggaacaccccggcaggcggtcccccgccagccgcacaactcccgggaaacctgccgcctcccggcgctgctcttgtacaggaaggcgcatcgctggattctcccctgaatgccagtgaaattcgtgaactccgtgggataatggccgataacgaacgggccatcagtgccccgctcaccagtgtggtgccccgtatcagttccctcacggtgaatctgtctccgggggccagcctgccccttgtccgtaccgctctgcataacgtcagcgtggtgaccttcacggacgtcaacggcagtccgtggccacagtcggatccgccctataacgctgcgcccggtcactttgacgtgcagttcaacggcaatatggtgtccgtcacccccctgcgcgcctgggctgccgggaatgtgacggtctatctcaaaggattgtctgtaccggtcatcctgaatatcaccagtggtgaaacggacaccactaccctgagtcaggaaatcgacagtcgtctggatctgcgcattccccggcagggacctgccagcccggtggtgtccataccgtcagaaaaaattgccctgcatgacgccactctgcaggcctttctggacggtgtgccaccggatgatcccgccatccgccgcctgaaattctccggtaacgtcccggacaccaccatctggcaacacggcgatgatcttctcgtgcgctcacgggccatgctgcgggatgaatttgaacagacgctggcatcggctgatggtacgcggctgtggaaactgccggtgacccccttactcaccttctccgtgaatggtcagtccgttcacgtcaccccggaactggagtaa

SEQ ID NO: 236389 - DNA, 1338 bp, Klebsiella pneumoniae
atgagcgcagaacaagaacaggacacagccgcaaaatccggcaaaaagctgtcagccctgctggttatggggggcgtgattatcatcgggggcggatacctgctgctcacctggctgtcccccgaaaacgctgcatcgctctcgtcagtcaatatcaacagcacaacgtccggcggcggacggaacgtgatggagacacagcactaccgggatttactgcgggctgacaatgaacgtggtgctgcagaagcgttacgtaataacgagacgtttatcgccagtctgccccggggactggataccgataccggaaacgatcagaaaagggataatccccccgatgatcagtcaggcacttccgggcaaaacgcatccccccctcaggaagatcagactgcccgggaaaaacggcgtgaggcattacagaaactgcttgcccgtatcaatacacagcatcaggatgcccggccaccggtagtggcagcagccatgtggagcaccaccggcactcccgggacagccccacatgcgtcaccgcccggtaccgttacatcacaacatccccgtctgcaggagacgagtctggcaaccccggcagcacgtccggggatccagctgataccggcactgacccgcgtaccggcctacattgataccgaagtggactctgacaatgcggtctcccgtgtggtggcctccgtacctgccggcccatgggccggggccgtcctctacagccaggacgccagactcgcaggtcagggaatggatatccactttgaccggatgatgtggaggggcatgtttctgaaggtgaatgcatatgccctgaatgaacgaacaggaatgtcaaccgtggccagcgacgtgaaccaccgctggtttaagcacatcgttctgccgtccgtacttggcggggtgggcaatgtcggaagtctttacaaagacgccaacacacagatccttcagggaaactacggcagtattaccggcagggtgggaatgcctgatggagaggcgctggccggcgtcattgcaggtggcatggccgaacggggcagccagctgctgacccgccaggcagagagcgaaccttaccgtcaggtgacagtatcacggggcgaggtcgtctccattctgtttgttgagccggtcatgagcaacgatatcagtacgccgtcctccggcactgccccttctgagtccccctcctccggccgtccgctcacccaggcggaggcagagcaccaggcctctgacaggatccgggcggcggtcctccgtaaacagaatgaaatgcagcaacgctacggcatacaacaggaaagttatccatga

SEQ ID NO: 236390 - DNA, 714 bp, Klebsiella pneumoniae
atgaaaaacgaacatgaagatcccggcagctttggcgaaacgacggcaccggcatccggcaaatccttcctgaaacgccagtatatgggatacagcctgccggtctgggccggctgtgccctcatcatcctggtcgccatctggtacaagtttctgcggacaccctcagagccccctgcagatgcaggctttgctgtcacaccgcccgctgctgagagctgggcagagcccatgaccatgacggagtccgggagcggaaacaacatgcccgcaccgccggttaccccacaggcagacatgcagcaacttgcccgtgatctgaaagcagagctggacagacgggatgaggaaatccggcgcaccctgaccatgctgaaggacagtatcaccaccctcagtaacgccattcagaaggatgaggcctgggcacaggaaacccgtcagttgcttgaggagacccgtaagcaggtgcataccctgcagatgcagggagcactgccagccccgaccgggaataacagacagcctgcgaaaaccctgccttcacctctgcagggcatgaaaatcatgtcggtggagaaaggcatggcctggatccgctggcagggcagtgcctgggcagtacgggaaggcgacagtctgggaaacatcaccatcactcggattgacccgtccagccgggcagtcatcacctctgccggtacattacgatga

SEQ ID NO: 236391 - DNA, 531 bp, Klebsiella pneumoniae
atgatgagcattgatgccctgacagccatagagaactttgccagcggtattttcagtgcaggcatggagtttctctttacctggggagagctgctggggattatcggccttatcggtcatctgatgcgcgcccgggcagaaggacgtcacagtatgggaccgggaaaatttattgccggtatcttcatctgcggcatgctggtcagtctgccctcaatgatcaatgccggtggtacccagatgggcttcagggcagattctttcgcccccatcgcatacgtgcagccgggctcctttggtgccgctgccggtgccgtcaatgccattctctcactggcaaaactggccggcgtcggttttgtcatgaacggcatatccatctggcgcaaatcactgctggacgggcacaccgccctgagcgccagtgaatccatcagtaaagggaacgtcaagtttgtggccggcgttctgctggttttcaacgaccgggttatcgatgccactctggcaagcctcggtatcgccttctga

SEQ ID NO: 236392 - DNA, 399 bp, Klebsiella pneumoniae
atgtcacgacttcgtgccatggcggcgcgtctgcgcgctgcatctgtttatgttcagttatgcctgatggcctgccgtgaccggctggtacgcctgttactgctgcttcccgtgatgctgctgccccacaccgcaatggcaaataccctcttcgatatgattaaaaccgttggcgatggtgccagaggctccagcagttcgtttgtggctatcggtcaggttattggcctggtgctctttatcggcggactgcttggcctcaaacaaatcggtaaaaaacccggtgcagggctggcctgcctgctgtcaattctggtcggcgtctgccttgccgtcgtaccggaactgatgggcagcggacagaaaacgctcggtctttctccggtttcaatcagttaa

SEQ ID NO: 236393 - DNA, 252 bp, Klebsiella pneumoniae; identical to SEQ ID NO: 8244

SEQ ID NO: 236394 - DNA, 627 bp, Klebsiella pneumoniae
atggctgacacctgccgggatacgatcgtcctgctggaaaaaaacctcacccgggtgatgcgcctgaaaaaacgtccggtaccggaaaacgctgacgaaaaaaagaaacacacccgaaccctgcaggatgcggagcggtccctggcacaggcccgcctgtcggccaggcgactggccctgcgtcatgtggaaaagtcgcaaatcgtcacaacggatgcactcagcgaaaatgaaagtgacctgctgcagccggaaggcccgccctttcatctctgtgccttctgccacgcctggcactgtctgaacggctacgctgccgcacagggagtgatggtctggctccccgatttgcatccggcctcggtggttgccctcaatgcgcgggcactgcaggagattttcagcgataaccgtcagcgggtcaggcagggacgggcagtcctgaatgccctggtacagaaccgtctggccgttgaggagaaattccgcacctggcgtccggcggattttgctgatgccctgcgccgctggccgccggcacagcgtaaaacgttgagggagaaaatggacggggtggcgctcattctgctgccggattcgtttcctgacaaaaagtacgtcatgtga

SEQ ID NO: 236395 - DNA, 3045 bp, Klebsiella pneumoniae
atgaatatcaaccgcattatttttgccattgaagactgtatcagtaccctgtcacggtattccgtttccgcattcttccccgattactgtgatctgcacaccgtcatcggtctggaccagcaggaccgcgaacgccgcccctggctgaaagccccctacattgccaccacaaaacaggggtattacctttccgtctttgaaatcagcggtgccctgaaagaaatggatgaaaacccggaccaaacggcccccgggacactggagtcactgattgcagcactggctgagcgaatgaacacggcctggaaaaattccggccacaaaatcagttttgttttcgaacgcgatccggagcgtggaagggatgaaatcgaagccatgctcttaccccagcgaaaatccatcgcacgcacggggatcctgcttcaggacgtcctggatgaaaaagtcaccacactcaccccctggcttgtccgggagcgctgctggctgaccgtctggagctctgaagaactgctgagccggaccgatcgcaaggaccatcagacccgtgtcaggaaactcgctgaacacgctccgccagcccgttttgcgcaggatccctggcgctggacactttccgccctcaaaatacggcatgacgccttactggacacgctggagcaggccctgacacatgattctgatggcctgctgattcgcctgatggatatccatgaagtgggacgggaaatccgccgccagctggagcgcaacagtacaccggcagtatggcagcctcatctgcctgaagatgcccgtcctgccggctggcgacagggcggggatacctctgtattccacgcaccgtcgctgaatctgcagttattcaccacacagcctgaaacacacggcagcctgattcaggccggtgagctctggcacggtatggtcgccattaccctgccccctcagaatctgcggacattcaaccagctggtcagggatgtgccccgtgcaatcccctggcgtatccggatggatctgatgcccgacggcatgaaggcgctgggggtcaagaaaaccctgctgacctacagcagctttattcctcctctccggcccatgtatgactcggtaatgatgctgaatgacatcaacaagcatgatccggtctgtatcatgaccattgttgccaccacatggggaaacagccgggaagtctgtacccgtaaccaggctctcctgaaatctgcgctggaaggctggggggtatgcggcaccaccacaaccttcggtgatccgagacgtgcctgggtgaacacggttctggcagcctcccacagctccggcccgatccccctttacccgcccctttcacacgccctttccctgtttcccctgaacagggcaggctctgtctggcggggacagggaaatctgatgatgcacaccgaagacggctctgcatgggaggtggcgctggcgtcatcacaacagaacaagcacacggagctgacacccggcgcacccggtctgggcaaatcggtactcatcaacgcactgtcggagatccagatagcctcagcccagaagaatctccctttcattgcctatatcgacaagggattcagtgcacagggactggtacagcttatccgtgacagcctgcctgagcagagaaaggacgaagccgtggggatcattctgagtaatgacccggaccacacccgcaacctgtttgatgtgatgtacggggccagaaaacccgtcacaccggaaaagaacttcatggtctccgtcctctgtgcattgtgtgtggataccggcaccggtcagccctgtaatcccggcgacacccggcaaatcatcagcagcctggtggacctggccttccgggaatatggcgagaataaccccagactttaccgcgcaggtacggaacccctggtggatctcgccctggaagagagcggcatcgctgaacaacatgatgccggatggtggaatgccgccacctggtttgaaatcagggacatgctgcatattgcagggaatatccccgccgcccagcgggcacactaccaggccatgcccctgctggctgaaatgtccgccctgctgggacagccgtccatccgggatgtgttcggcaccgttcagcgtgataactcggaagagcggttgctggactacatccgccgtgccctcgatcagggacacagtgactacccgatgatgtccggctgtacccggtttatgctcagccccgacacccgcgtggtcgccgttgatctgaacaatgtggccggggacaagacacctgccggacgtctgcgcaccggtatcatgtatctgctggccgggcagatcgccggcggggattttgtcctgccgcagtatcaggaggaaatacggaaaaatctcgacccacgctaccatgaggtgattttccgccgcattgaacagcttgatcaggaggtcaagaccaaagtctatgacgaactgcacaatgcaaaagggatcaacttcatctgggaagccctggacacccaggagctggagcagcgtaagttcgggatacgcacggtgctgagcacccagctgctgcagcattatcctccggccgtgctcaaatccgccaacaccctgtggctgctgcgttaccgccctgacgaaattccgttcctgcgggataactttggcgtcccggaagtcaccctgcggcgcttcctgaaaatgccggaaggggccgcaccggacggcagcggtgtcccggtactggctgtgttccgtgtaaaaaacggcacgctggcccggatcctgaaattcaccctcggtccactggagctgtgggcactgaactcctctcctaaagacagcgccctgcgacgtgcgctgacgcaggaggtggggtcactgcgggcacgccagatcctggccgaacactttccccggggttcagccacctcactgatagaacaccgcgcccgtacacatgacagtgaaaacgtcatccatgagctggcagcagaactcatccgtaagcagggatataacctctga

SEQ ID NO: 236396 - DNA, 621 bp, Klebsiella pneumoniae
atgtacagcattcatatcaccccccgctgccggcgtcctgcccggggacaggtcttcctgaaaacactgcgcgtggacggtgacagtttcagcttcaccctgccgtccgcctgcttcacactgcgaccgtcccctaatccccgggtcatttttgccagtgacagacgggctgacggggagatgagtggtattcgcctggccctgcccggagagacaggcacgctgataacaacggccacctggcaggttaacgtgccggagcgaccgccttttgatatacagcatgtcattcactggcttctgcccgcaccactcactgcgctgatgtctgacaacacctggctgtggccggatgtccccggcacaccggcactcacagccggagactggccggtcatggaaagcgacaccccgacactgaaacgcgtgaagcgtcgtaccttcacgctcatcgataaccgtaaccgtcagggatggatcacgcgccgcttccagtgtttcccgctggctccgctgccggaatcactcagtcatcgcgtaccagacatcctgtatcccccgaaaacggagaaaaaagaatgcaaagacaatctgcaaccacactgcttgcactccttgtag

SEQ ID NO: 236397 - DNA, 1206 bp, Klebsiella pneumoniae
atgcaaagacaatctgcaaccacactgcttgcactccttgtaggctgtgcggttatccctgccacccatgcctactctgtgaatgttgtgtccagtcagcccgtcacccgacagatcatgccggagctggccaccatacagggcatcatggaggaaatggtccgtatgcagacggccaccggcacagccatcacccagaactcagaaaaactggccaccgtcattgcccaggacgggcaggccacccgtcagcagatgatattcagtaatgaaacacaccgcctcgaggaggccaggaaaagcttcagcgtgccggactccatctgcagtgaatccgcgtccggtattgcagcagaaagccgccgggcagcagcgtctgcagcggcacgtctgagtcaggggggaggggtcagcagtaaacccatccgggaacgtctctcccgggctgcggactccccggtccgcgaggcgtatgacagtgccggcatccacgccggttactgcacagaagcggagtatgcccgctttggcggaactgatgtctgccctgccgtgggtgatctgccgggcggagacagccaggtgcgatcgctctatcagggcgcaggcacagcagataccccggccgctctcacctgggatcagaaacagattgatgccgcgacggcttatatgaaaaacaccgccagaccgtcagcgggtcgtgccccggggaaaggagaagtgggcacacagaccgggcgcacgtatgtgggcctgcagaatgaatacaacggcatcatcgatgccgcctctcatccgcagctgtcactgattgctgacagtacccctaatgaagccacccgtggggcactgactgaagccctgcagtcaccgtcagctgcggcatattttgaccggaccgcatcatcagaagcccgcacccgtggccacatgagccagcgggagtttgaggcctttgaagccggcagacggtatgccaacaccgactggcagcaggatctgcagggcatggaaggcgataaccttctccgtgagctgctgcgcaccaccgccctgctgaactggcagatgaacgatctgaaagagcagattcgtcagggtaacgttatcgccgggcagcaacttgcgctggccgcacggcagtattacggacagcgccttggcgaactgtcacaggccatgagccaggggagcgtaagatga

SEQ ID NO: 236398 - DNA, 570 bp, Klebsiella pneumoniae
atgaaagacgacaacagcatcgacgaaaaaaaaccggccccccgtctccgccgcatcggtgatatagggataaatctgttcgcaccactggccgaaacccgctggatgctgcgcagctgccgccatatgctggaccagcataaaacgcgcctgaagcgcctcatgcccgaccggcaaccggagagtccggtctgtatgacctgggaggaagcggtcagggccagcggactgacggtcgacgaactggaccggcgtcagcgacgtcgcaggatgttctggcggacaggattctggctgatgatgataccggtacttctgctgtgtggtatggcccttgcggccaccgcactgccggtcatcaccctgatacgtatcctggtctgcctgttactgatgagtaccattgcagcactgtgtgcctcaaaagccctgattgcgtcataccgcctctggcagctgaatgaacgtcgggtcagcgaggacgaacagggcacattccccgattacctgcaggcccggcacggctggaaacaggccacatggctggccattacccaccggcagtactga

SEQ ID NO: 236399 - DNA, 2166 bp, Klebsiella pneumoniae
gtgaaaatcatacccagagcactgagtgcaggtctggcgctggctgccgtacctgcacaggctttcgtcacctatcaggacattgtgagtgccgccaccaatccggatgacctgtcgcgccaggcactggtcaccatttttggtgatgtggtcacaaatcccctgacagccagcagcaacaccatcattggcaacctgttcatggtgtttaacgcaattatcgccacgatggggatagtctggtttctgtttattggtatccgtcatgctgtccgcacgggacaccagggcagtgtctttaacaacggacgggacgtcgtcggcatactcagtgtcgtgagtggatttttgatgattgtgcccaccgcttccggctggagtctggcgcaactggtcatgctgtggggcgcatccatcatgggcatcggttccgccaatatcatggttcagacagcggcagaaaacattgctgaaggctattcaatgaccgtacagccagtacatgtctccacccgcacggcagcacggggaattctggagatggaactgtgcaaacacgccatgaatacgggcctcgatgactttaaccgtaccgcacgttcatcaacgccgcccatgagcgaatcctcacggacagagaatggcagatataccgtcaccgtctcaaatggcagcgccacctgcgggagtgtgagtctctccgtgaaaggaaacggcagtaacaagcagtccgcgctggcccattttttcaatcccttcattgaaacggaatatcagggggttctgacggcacaacgctccgccatggataccatgctccgtgacctggacagcgcggcgcaggaatttgtgtcggcataccggacccggcgcgacacgggtaacggcaacctgccggatattgaaagccgtattcagaaggcagccaaccggtatgaagaaacggtgcagaaggcgttgccggcagataacgcagaaactgagcgcagggagcagctgaaatcctacctgaccacctacggctgggttgccctgggtgcctggtaccagacctttgccaccgccaaccagcgactggaagacctggccaaccgcgctcctactgtgagtggcgtctcgtcactgggcgaagccggggatacggaattcctgaaggaagtcaagggggcttaccaggcacagctacagaactcagcgtatactcctgcactgggaacagccacctctgccagtgaataccacgcatctaaaactcaagaccctcaatcagcaatcttaaaattgattgggtttaacctaacaagaatgactaactggacagccacttatctgagcggtacaggtaccacaactaatcaactaaatccgttgataaaaatgaaaaacattggcgattacaccatggttacgaccgaaaccatctgggcgggttataccaccgtcagggtactttccacggccggcagcaactccgtttttggtcgactggtcaatgccgtcagcggattatctgacgccgcaaaggcttttctggaagcatccgcaccaccactctacttcctgctgtttttgctgttttgtgccggtttttcgttatccatttacctgccgtttatcccgtttatcttctggatgaccggcatcggcaactggatagtcagcgtactgattggatgtgctgctggccccctgtgggccgccacccatctgggaacaagtcaggaccggggaagccgggccgcttacggttacatctacctgatagacagcatgatcagaccgctgctgatggtgttcgggttcttttttgcatcagtcgccatcgtggccggcggcacaatcctgaatgcgctgtatgctgctgcactgatgaatgtccagataaactctgtgacgggcgtgttcagcatggcgggatttttgatgatttatgcccgcgcctgtaccacactggttgcagccgtttttgcgcttcaggcttatctgcctgaccatgtaattaattttctgggcggacgtgacggtgttaatatgctggggaatatggtttcttcagtcaaagatattattgccggaggtaataccaatatgcgcagaacacctggcgttcgtgaagaaaaactgaaaaatattaatagagatgataaagacggaataaaacaataa

SEQ ID NO: 236400 - DNA, 537 bp, Klebsiella pneumoniae
atgatgcttacagaaccatatatagaaacagatattcaagcatatctatatacttatggcagttggctcctattaatactcccatcactctggctatatatgaaaaccagagcgaagaaaaagaaagtccagcaggttgttcagcagataaaagaaagcagtccctttgcgccgaccagcgattatgagcaactgtcattctcgaagagttgttatttcgggatcgacattaaaaacggcaccatgctgtatgtgcgcatttatccgaacaatgtgatggatgtgattggtctggatattcacaactttacccgcacggttgctgaagacggcaagctggaaatccacactacatatgtgagtctgccgatgatcccactggaaatctccggcatctcatcaaggacgctggccaacaccatgcacaccatggctgcacgtggatatgagtacaaggaacgtttcccacagatgatccggtatcgggttaaagagtgggaaaaagttgccggtgttcctgttgcagaagtattttga

SEQ ID NO: 236401 - DNA, 1587 bp, Klebsiella pneumoniae
atgtctgaatcccgcagcaattttccagcacgacatggtactccatggaatactgaagagttacagcgtcttctcgtatccatagcggagggcgtctcgctaaaaaaacttactcaaacacatcaacgatcgtccgggggaatacgtggagcaatcaaacgcctgcttccttctgagtttcttgagttcaacgatataaacacggtgaatgatctcagcaattacttcaacaagattcctcgccaagaacacaatagtatcatcaataatttaatatcattgagcactgcaaaaacaattgctcatgataaagttgaaatacaaaagaatagttttaaacaaaataccccactccccctctgccaacccaatacagattttaaagattatatagccgatgaacatgatgtcattatgctaattcattctgctatcgaaagtttatctaataaacgacatcaatatattcttctaatgcgactcggcacagatgattcacctcattctctggcagatattgccgtcaaattaggaatttcccgtgaaagggtaagacaacttcaggaacgagcccttggcttactagctgctaaatctcgctatgaagggacacctggagcttgccttaaagcccttattaactcaataggtaattcaccatatgatatagcagtatggatttatcgtattgttcatcgggatttcgttacatcctctgagttagccgccaaattcatcatttttgccgcaggcattcctaaagcaagacgagatgaaataaaaagttcgctctcattaatatcacaattacaaaagcagaggttacgtgaacgaagagcagaattagcacacgctcgcgctcaggaaagagcccgaatcaagaaagaaagagttgagttcatattcagtaaatggctagacaatacacattggccaaaatatatcgcacctcctccccccgtagaacagctatgttcacagagagcggttaatgatactgacatatctggattcttttactctcaaaaattaggtcgtacagtccagtacgaatcagggcttgagtttaaaataatgaatctattagaatgttgcgatcaggttcttttctatcaagaacaaccattttctattccatattgttttaaaaacaaatcaaaaaaatactatccagatttactcattgcgacagttgatggtcggtgcctacttatggaagtgaagccaacagaccgaatgaccttgagtctcacgagaataaaaagtaatgcaggtcgcaaatgggcacatactcgaggatggggatggttggtcattagtgataggttctcgttacgtcagctggaagaacatgccatctcaacaaacacatggaaacttatagaggctgaactgaaaacatcaaggattttagcatggcgtgaaatgatggagttacgtacacgatacgagattcatcgtttagatcttattgcatatatcattcagtctggtgctgaagtggataacttttatcgaattaccccgaaaatatctaataatacatctaaccagagacaaccaaatgagagcgactgtcataattga

SEQ ID NO: 236402 - DNA, 153 bp, Klebsiella pneumoniae; identical to SEQ ID NO: 8302

SEQ ID NO: 236403 - DNA, 243 bp, Klebsiella pneumoniae
atgaaggatgaaatacacagtaccagcattaacccggatgttgttgagcagtttctggcccttatgaatacacattgtaaatcctcagaagaggcgctcaccatgctgagtacgctttgttacaacctgatgatgacatgcggtatccattccatggacagccagatgctcaatgggcatgggatatccatgcaacttcaggggattgatattgccgaaaagccaggcaagaatattcactaa

SEQ ID NO: 236404 - DNA, 369 bp, Klebsiella pneumoniae
atgaaagataacaacacaaccgccaccccagaaacctggaaaatgcgttttctggccaacgggacatccggcacatggttttacactgacgacattgcagtcactgacgcgtggcttcgcgcgcacccggatgatgtggaggttatccctctctgccggatacagccccgccagcattcccatgaacaacatattgaagaactccgcgcagccctggcccggatgctccatatgcatcatatgatgctggaaaccacacattaccgggaaaatatcaccgatgcccgttgtatccgtgaaatgcatgaagcgccattacaggcgctcaatattctgtccagatacccgcataaaaaggacgaggtgtga

SEQ ID NO: 236405 - DNA, 216 bp, Klebsiella pneumoniae; identical to SEQ ID NO: 8252

SEQ ID NO: 236406 - DNA, 252 bp, Klebsiella pneumoniae; identical to SEQ ID NO: 8253

SEQ ID NO: 236407 - DNA, 681 bp, Klebsiella pneumoniae
atgaattccagtacgctgatatccgtgatgatacggcaacagatatccggtgacggtatgcaggaacatattgattatcagattgagaaatatcagttcagggccaggaatgagtcaccgcgactgatgcgccagtgggaagatgtcatgcgtgaatgccgtgataccggagcaggagccagggagcggctgcggattgccttacttaatgttgattatgtgaccagttttgaactgccgtttcgtctgctgttaacccggacaccgcagatgattgacagcgtgcggcgggaatggcagctcagccagaaaaaagttgtattcaatgagcggcagcggggatgtgtatacagtctgcagaatgacttatccggcgtgccggatagcttcagttacagtcttgcgacgcgaatacggcgggcggacagctatggcatgacgacgcgttgtttcactgatatagccgggcaggttaaagccccgacagcacggctgaaactggcgctggaaagcgggttaattgtcaccgcgctggatggtctgttctggcttggtattcaacgtattgccgcagatgtgcagcggctgcgtcagtccggaatgacaatcatcacccgggatgttgaggtctcagactcgctgaccggaaccacacgggttgtttccgggtacagcctttga

SEQ ID NO: 236408 - DNA, 468 bp, Klebsiella pneumoniae
atgataaaatatatattttcactcaccattattttttccgcctctctctgtgccgcacagattcaggggcacgtcatccgcgttcttgatggtgatacgctggaaatattacaggacaaaaagcctgtcagggtccgtctggctaatattgatgcaccggaaaagaaacagccctttggacgctggtcagccactcagctgaaggacctggtggccggaaagcccgtaaccgtgcaatacgcgcagacagacaggtatggccgtattctcggccgggtctataccgctgacggcacagaagcaaatcgctggcaggtccgtaacggcgctgcctgggtgtacccggactacaataatgactatactctcccgccgctccagcgtgatgcccgcgccctgaagcggggattatgggcagataaaaatccggtaccaccatggacctggagaaaacagaataagaaataa

SEQ ID NO: 236409 - DNA, 177 bp, Klebsiella pneumoniae; identical to SEQ ID NO: 8256

SEQ ID NO: 236410 - DNA, 1290 bp, Klebsiella pneumoniae
gtgtcttaccaacagacgtctgccgccgaagatccaatggctatatggtatatcgtcggtgccatatgcctgctctttgcgattatcatctggcgctttttacctgaaatcgtcttcgcctcctgcctgatcctgcacacactgtggggcatgattgactgggggccctttcacaactttgccgccccccgttacaacctgctggccatcactgctaacaacgcggcaaccatcactttcggccagtggctggatgttatgtcccggacagtggggatcctctggttgattctgcttcccatgacattcggctttctgtggatgtggtttcaccatccggcccagccccgttttacccgcaggccactgaatatccacacactgccccatattttttcagctctgtcaccggcgatcgcccccgttctggctgatggagacaacaacagactcttccacggacaaaaacgtcccgagcgccgtgtcgcactaacccccgaagtctttgtggagcagaacaaccttatccgcaacatgcagctcgatgttgcgtccacacgccagtgcttcatggcgcaactggggcaaccactgaccagctggaaagacatggccccacatgaaaaagcgctctttgccatctttggcctgcagttcttcctcggtgaccggaaagcagcggtagccctgatgaacaacctcaatctctcctgcaggctcaaaagtaaacgggaccaggggcgtttcagcacgccggtgtattcactggccagaaacgcctttatccgggtcatcaaaacagaaggcgcacaacagtggctcaggcagcaccgttacgttcgcagcggtctggtctggctttacgcacatgatttgcgcctgacgcctccgaactggctgtggctcaagggcgttgaccggacgctcttctatgcccttcaccgggcaaacaccacaaaaggcttcatcgaaggggccggcgtggtggccgttgcccgggcagaaaatgaagccagccgtctcggcctcccctgcccggaaccctgtgtggaagaggccattgaagggcttcgacgggacatgctggggctgggcctgatatgggacgaacctcagccagatcgcgatcgtaaacgtcagatcaggacccgctggtcactcacggatgacgtgataccccgccgccatgataacgacgaagacactgacactggtgaaaccaccgaaaccaccgaaaccaccgaaaccaccgaaaaacagcatcccgccgacaaggaaaaagaacaatga

SEQ ID NO: 236411 - DNA, 1125 bp, Klebsiella pneumoniae
atgaccatccactacactgcaacactgaataataaacacctgtccctgatcgccctgtaccctgacggtaatcgggaggtgattgccatcctgccagtcacagaactgggcgcactgattaaccgtaataacaggctgatgcacctgtccttcagttccccttttcgcgaaataaccgaaacggtgcttgttgataccgttgatgcagaacgtcccggacatcacatcggcagaatgctctcagcgattgatgcctgcctggatgccgaatatgccggaaaaggaaaacatccctcccggaaaaatggcttctggcggacactgatgtgtggctttatcgccggaattgctctgccggcgacagttgcaggttaccactggatgaaggcagagcccccttccacgctggcttaccctacatctcaggaatggagagctgaaccagtaaccgacacagagacaccacgcccacatacggaacatcatgttaacagcatcccggcccgcccggctcccacacagcaggaaccttcttctgcccccgccccgacggcagtgacggaagaacaacacgttcaggccgctgaggcccgccgtaatctggccacagtacttaaacgcaacgcagaccgggggatgttcaccattaacctgtccactggtcatgaacgcacgctgtacgccttccttgaccccgcatgcatcaactgccgtctgctggaacccgcgcttaagcaactggcccgggaattcagcgtggtgatttatccggtctccgtgattggcggggagtccagtacaaagcggactgctccgctgctgtgtgaaccggactcacaaaaacgggcgaccggatggcatcagctgtattccgctgacagtggtatggcccccaccggcgatgcaccggccgcacaggatggacagtgtctgaccgccgcacgtgctgccatcgatgtcaataaccaggctttccgccagttcggttttggcggaaccccctgggtgttatcagataccggctggcacctgccgtccggcatcctgaaagacgccacttccgttcgcctcttcctgaaagcaacagatagcgaggagtatcacaatgagccagcaccacgttaa

SEQ ID NO: 236412 - DNA, 2304 bp, Klebsiella pneumoniae
atgagccagcaccacgttaatcctgacctcatacaccgcacggcctggggaaacccgttgtggaatgcactgcataacctgaacatcactggtctgtgtctggccggcagtatcattacggcgctgatatggccactggcccttcctgtctgcctgctgttcaccctggtcacctccgtgatattcatgctgcaacgctggcgatgccccctgcgtatgcccatgacactcagccttgatgacccctcccaggacagaaaggtcaggagaagcctcttcagcttctggcccaccctgtttcagtatgaagcggatgaaacattccccgcccgggggattttttatgtcggttaccgccgtatcaacgatatcggtcgtgagctctggctgagcatggatgacctcacccggcatgtcatgttttttgccaccaccggtggcggtaaaacagaaaccacctttgcctggctgctcaacccgctctgctggggaagaggctttacctttgttgacggaaaggcacagaacgataccacgaggacaatctggtatctctcccgacgttttggcagggaggatgatatcgaagtcatcaacttcatgaacggcggaaaatcccgcagtgaaatcattcagagcggcgaaaaatcccgcccacagtcaaacacctggaacccgttcgcattcagcaccgaagccttcaccgccgaaaccatgcagtccatgctgccccagaacgttcagggcggtgaatggcagtcacgggcgatagccatgaacaaggccctggtctttggcacaaaattctggtgcgtccgggaaggtaaaaccatgtccctgcagatgttacgggaacatatgacgctggaagggatggcaaaactctattgccgtggccttgatgaccagtggccggaagaagctatcgcaccactgcgaaactacctgcaggatgtcccgggattcgatatgtcactggtgagaacgccgtcagcctggactgaggagccccgtaaacagcatgcttatctctccggtcagttctcggaaacgttcacaacctttgccgaaaccttcggggacgtctttgcggcagatgccggcgacatcgatattcgcgacagtattcacagcgaccgcattctgattgtgatgatccctgcactggacacatcggctcataccacgtcggcactcggtcgtatgttcgtcacccagcagagcatgctcctcgcccgtgacctgggctaccggctggaaggcacagatgcacagaccctggaagtcaaaaaatacaaaggcagcttcccctatatctgtatccttgacgaagtcggtgcctactacacagaccgcattgctgtggaggccacccaggtacgttcactggagttttccctgataatgacggcgcaggatcaggagcgaattgaagggcagacctccgccaccaacaccgccacactgatgcagaacgccggcaccaaattcgccggacgcattgtcagtgacgacaaaacggcaagaacggtgaaaaatgccgccggtgaagaggcacgggccagaatgggcagcctgcagcgccacgatggtgtgatgggtgagtcctgggtggacggtaaccagatcaccatccagatggaaagcaaaatcgacgtgcaggatttgatcagactgaatgctggtgagttctttaccgttttccagggggatgtggtgccgtcagcctctgtgtatattccggacagcgagaaaagttgcgacagtgatccggtggtcatcaaccgctatatttccgttgaagccccccggctggagcgtctccgccgtctcgtccccaggacagtgcagcgcaggctccccacaccggagcatgtcagcagcatcatcggtgtactgacagcaaaaccatcccgtaaacgtcgtaaaaaccgtacagagccttaccgtatcattgatacattccagcgccagttggcaacagcgcagacatcactggatctgcttccgcaatatgatacagatatcgaatcccgggcaaacgaactgtggaaaaaggctgtgcacactatcaataacacaaccagggaagaacgccgggtatgttatatcacactgaatcgtccggaagaggaacactccggtcctgaagatataccttcagtgaaggcgattctgaatactctgctccccctggagatgctgttacctgtaccggatctaactgcatccccgccccataaaaaaaatgtcgctcagacaccatcaggtggaaaacaagagagtcgtaaaaaaagattctga

SEQ ID NO: 236413 - DNA, 129 bp, Klebsiella pneumoniae
atgaattcccagatcccactctattgtaaacaagacatttttatcttttatattcaatggcttattttcctgctaattggtaataccatgaaaaataccatgctcagaaaaggcttaacaatattttga

SEQ ID NO: 236414 - DNA, 558 bp, Klebsiella pneumoniae
atgcgactttttggttacgctcgggtctcaaccagtcagcagtctcttgatcttcaggtcagagcactcaaagacgcaggtgtgaaagcaaaccgtatatttaccgataaggcatccggcagttcaacagatcgggaagggctggatttgctgaggatgaaggtggaggaaggtgatgtcattctggttaagaagctcgaccgtcttggccgcgacactgccgatatgatccaactgataaaggaatttgacgctcagggcgtggcagtccggttcattgatgacgggatcagtaccgacggtgatatggggcaaatggtggtcaccatcctgtcggctgtggcacaggctgaacgccggaggatcctagagcgcacgaatgagggccgacaggaagcaaagctgaaaggaatcaaatttggccgcaggcgtaccgtggacaggaacgtcgtgctgacgcttcatcagaagggcactggtgcaacggaaattgctcatcagctcagtattgcccgctccacggtttataaaattcttgaagacgaaagggcctcgtga

SEQ ID NO: 236415 - DNA, 645 bp, Klebsiella pneumoniae
atgaccagtaaattaaccagagagcgcctgcaggaaatcgctgaagatggattcctgaagcatggcgaaagcaaggtattggctcgtatggcgctggccgtaatggacagcgagccgctggcgtggactgatgaagaagagttacgggacgttgagcgtagtggttgcggatacctgtttactgttaaacatgttacaccgcatgcagacgagcgccgaattattctgctctatcgccatgcgcagccagtgccggaaaaatacaacatcggtgatgccaccatgcgccacatcttcacaccaaccggcatgactaatgtctctgacatgcaggcggtatttgacagagttgaagctgttttggtgggaatggagcagccagcaccggtagtgctggatggttacgtgatggtgcctttgagattaactgctgagaacggcgctaaggaggcgctatccggtgagttttcagaaaccaggtttgtaaactgcccggaatgctttggtgatgatgaatgtgaaacatgtgacggtagcgggagaattgaaataacagtacctgtcacctggacgactatcaaagctatttgggctaaaggcgttgagcatttcacagctacaccaaaggaggtgaaaggtgaataa

SEQ ID NO: 236416 - DNA, 315 bp, Klebsiella pneumoniae
atgttcttctttcgcttcagcaagatctggcagaagtggatatcccaccggaagtactggcccttcctgaatacgttcgccagtctgacgaattcgaaattctctcccgaggtcaatatcgaactgaattgccaccttgtcaggagcatgaatgggatcatacgattgcagagagagaccaaggccagcgtaagccacaataagtgcttcagcagcttccagctcggtgactgtactacgatattcttccagtttttcctgctggtatacgcggtacaaaatggcattggcttttccaatgagccagttagctaa

SEQ ID NO: 236417 - DNA, 2244 bp, Klebsiella pneumoniae
atggaaaataatataattgttttggatgagggtgcgatcaaccttctcgagcgtgcaatcataaatgaggaatggtttaatgatcttaaaatcccctcttcgtatagaagtactttatgttcccttaaatataatggcattagctatatactatctaaaaaggcaagtgtagaaagtaaatatctagtcattaaaactggagaacagtctggtttttggggattggttggcaaggatttaatatattcctttgaaaggtgtttatcatttgcagtgcgtcacttcaataaagatagtattaatggtcgacattggggtatgtataaagatggaaatatcatatctttttacgcaacacccagacatgctgatgattctatcagattatattttgatatatacccaatggacacaaaaaacatttatctttataatgcgacagcaaaattcccacgtgatcctgaggaatcaacagaagatgaattttttcttgatgcaataagcggcgttaatgtagctattgggaaatgcacctaccctaatgctgaaaataaaaacaatgaagtgaactttggcattgaacttaccgagcaaattgatgatgacttttattataattactcctttcaacaatggtatgataacaagctaacaacagaacaaaggaattttgttgataaagattatagtgatcccgtgcgtttaagaggagctgcaggtactggcaaaaccattgcaatggtcatcaaattaatcaaagatagttattcatttgaaaatttgggtaaggtgaagagattcttattcctcacacatagccattcgacaagtgacttagtaaataatatgatttcatctctagataaagagaacaatattagaaacttgaaaaatgtaaaaataaaaatatgttccctttatgatctaactcaagagatactaaactataatcataaaaatatccacccgatatcaactgatggtaaggaaggtcgtgaaaatcaatatgaaatagtcagtgaacttattaatgaatgcgttaaagacctaatgtttcgcacatcaataataaacaagtgttcagcaggacttcaagagaaaattattaataacgaaaaaagacactttacttgtatagagattttaaatgagtttgcttgcatacttgatgctgagaatatttatttgggctctgaaaattcaaaagattatttacatggaaatcgtgaatcatggcaaatggatctaaacaccatagaagatagattattactattaaaccttcataatgtttatagagaaaaattgaaggaattgaatgctttaagcatggatcaaatgattgcagatttaagcaattacttacattctcatatttggaataggatctccgaaacagaaggttatgatgctatttttgtagatgaattacattacttcactaagccggaaagaatggtatttaacgacttatgtagatctaggcatacgaatggacgatatcctatatttatggcttacgacatcaaacaatccatgagcgatgtttttttaaactcaatcagaaatgaatctatcgcaaatgtttttaaatctacgggcgttggtgcttctgaattagtagagttaacaaaagttttccgatattcacctgaaatagctgctttcctgacagacttagatggtgcatttccagcattagatctttcctctgaatggaacaagttaaatttatcatcggaaaatgctaaaggggatgtgccaataatatattctttcgctaacgacatagatctagttgacggtatttttcaagaggcatctcggttagcaagaaaagataaatctaaatcagtggctatactctgccttaatcttaagatattttccaaatatttaaatgttggtagaataaggccataccacgagccattgacatctcgagatgaaatatttaagccgattaagtttaaagggaaatgtttatttagcatgcctgagtacgtcgcaggcatgcaattcgacactgtatatttgatacacattgacaagaacgaacttccagatgaaattacgcatagtggaatctacagaagatttgtttctcaaatatatctgggggcgagtagagccaaggaacgcttaatcctggcaagttctaatgagcggcgtggtatgtcaccaatcctaaagagcgctattaccaatgggacacttgagttacactctcatggaggtaactag

SEQ ID NO: 236418 - DNA, 852 bp, Klebsiella pneumoniae
atgaaatatttcaataatgactacaaaggttataatgggattttacaaggagatgtgttcaggataaataataatagtgattcaccatttcagcttgatgagcagtttgcagttcttatcacagcggactgtgacttagcaaatccaagtaaaaacgttaactaccttacttttttgcccattatatcaagtacatgctatttagaaaatatatggatccctatatatattgagaagataagaactgaagtcgcaagatcacttcacaaattaataaacgagttagaagtgcacaaaaaacatggatgtgatgaattaaaagagtcgactcttagagagtggcttagaaattcgagttacactcaaatattatctgacctatcaattactgatttgactaaggatgttgaaaaaaatatcaaaatagacgaaatttcaagatgtgaagaaacaatagatagcttcataaaaataaaaaaacttaatggctctaattcaaaaaatatagctagagatttaagagaggcaattacgaaacctaaagaggaattttttgtattaccgatgattgactctttatttgatgagtgtggaattttaaaattaagaatgataagacctgttcacagaaataatgtttatactcaagaaattgatgcaagattatcaaatcaatcagattttactagccttgttcgtattggtagattgagtgattatttaagatatagtatatcccagaatttcgcatctcttttctctcgtataggtatgcctgaaaactatgaaagcgacagagaagagtcaataaatctattttttgaaaaaatggaaggtaaatatggaaaataa

SEQ ID NO: 236419 - DNA, 1356 bp, Klebsiella pneumoniae; identical to SEQ ID NO: 227100

SEQ ID NO: 236420 - DNA, 141 bp, Klebsiella pneumoniae; identical to SEQ ID NO: 206359

SEQ ID NO: 236421 - DNA, 426 bp, Klebsiella pneumoniae
atgcaatatgcgaaacctgtcactctgaacgttgaagagtgcgaccgtctgtcttttctgccttacctgtttggcctggattttctgtatgccgaagcgtctgtatacgcgctggcgaaaaaaatgatgccggaatatgaaggcggattctggcacttcatccgcctgccggacggtggcggttacatgatgccggatggcgaccgtttccacatggtgaacggtgcaaactggtttgaccgtaccgtgagcgctgatgccgcaggcatcatccttacctcccttgtgattaaccgccagttgtggctgtaccacgacagcggggatgcagggttgacacacctgtacaggatgcgtgatgcgcagttgtggagccacatcgaatttcaccccgaatgcaacgcgatttacgcggcacttgactga

SEQ ID NO: 236422 - DNA, 423 bp, Klebsiella pneumoniae; identical to SEQ ID NO: 8282

SEQ ID NO: 236423 - DNA, 192 bp, Klebsiella pneumoniae; identical to SEQ ID NO: 8281

SEQ ID NO: 236424 - DNA, 522 bp, Klebsiella pneumoniae; identical to SEQ ID NO: 236356

SEQ ID NO: 236425 - DNA, 528 bp, Klebsiella pneumoniae; identical to SEQ ID NO: 33882

SEQ ID NO: 236426 - DNA, 234 bp, Klebsiella pneumoniae; identical to SEQ ID NO: 8563

SEQ ID NO: 236427 - DNA, 1959 bp, Klebsiella pneumoniae; identical to SEQ ID NO: 236354

SEQ ID NO: 236428 - DNA, 435 bp, Klebsiella pneumoniae; identical to SEQ ID NO: 236353

SEQ ID NO: 236429 - DNA, 720 bp, Klebsiella pneumoniae; identical to SEQ ID NO: 8275

SEQ ID NO: 236430 - DNA, 597 bp, Klebsiella pneumoniae; identical to SEQ ID NO: 17091

SEQ ID NO: 236431 - DNA, 648 bp, Klebsiella pneumoniae
atggtttttcagcgcgaaaatatagaaaaagatttgcttgatgctaattcatcgtacgctatgaaaatgtcagatgtaatgagtggttatattgaaatggctcaaggtgaattatcatatggagcaaaaaaaataaaatcaactaatgatattgactcacttaaagatgaggcggataggttaagattgcagtctggtatgtttaattcagtttttgttgttagtaatgatgctgttgttctggcgacttcgccagaatctcttgatttagttggtacccgcttgaattcaagtgccagcaaattggcgattgaggaaaagaaaccattcatatcttcaccgttcaaatcagttactgggaatttgattattttgttgtcacatcctatttatgataagaatggcaattacatagggcatgtcggtgggtctatatatctaaaaaaacatagtttatttagcgatgttttgagcaggcattttttcaagagcgacactgaaattagcattgttagtgatgatggaactgtgatctttaataacgataacagtgctgttggtcggcccatggttatgtctgatgatttgaaatcaaagttaacggagtctgatagaggtgagggggaatttttttttttcggggaatag

SEQ ID NO: 236432 - DNA, 1086 bp, Klebsiella pneumoniae
gtgcagcgcgataccgttggcgatagcggtcataccgaactcgcgcacgccgtagtggatgtagttcccggcagcgtcttcgttgatcggcttagagccagaccacagggtcaggttggacggcgcgagatctgcggagccgccgaggaattccggcagcagcgggccgaaggcttcgatggcgttctgcgaggctttacggctggcgattttcgccgggttggcctgcagcttcgcgatgaactcgttagctttcgcgtcgaagtcagacggcatctcgcctttcatacggcgggtgaattcggctgcttcctgcgggaaggctttggcgtaagccgcaaacttctcgttccatgcggcttctttcgcctggccggcttctttggcatcccactgggcatagatgtcagacgggatgtcaaacggcgcgtgtttccagcccagcgcttcgcgggtcagggcgatttcggcgtcgcccagcggcgcgccgtgggagtcgtgggtaccggctttgttcggcgaaccgaaaccgatgatggttttgcacatcagcagggacggtttgtcggtgaccgcccgtgcttcttctaccgcgcgtttgatggcgtcagcgtcgtgaccgtccacgccgcgcaccacgtgccagccgtaggcttcaaagcgtttcgcggtgtcgtcggtgaaccagccttcaacgtggccgtcgatggagatgccgttgtcatcatagaacgccaccagtttacccagtttcagggtaccggccagggagcacacttcgtgagaaatgccttccatcatgcagccgtcgcccatgaaggcgtaggtgtagtggtcgacgatatcgtgtcccggacggttgaactgcgccgccagggttttctcggcgatagccatcccgaccgcgttagcgataccctggcccagcggaccggtggtggtttccacgcctgcggtgtagccgacttccgggtgacccggggttttggagtgcagctggcggaagtttttcagctcttcaatcggcagatcgtagccagtgaggtgcagcaggctgtaaatcagcatcgaaccatggccatttga

SEQ ID NO: 236433 - DNA, 387 bp, Klebsiella pneumoniae; identical to SEQ ID NO: 15296

SEQ ID NO: 236434 - DNA, 1008 bp, Klebsiella pneumoniae; identical to SEQ ID NO: 231327

SEQ ID NO: 236435 - DNA, 3828 bp, Klebsiella pneumoniae
atggccgatatcgagaacattggctcctcttcgcctgcaatattactgttgaacgccaagaatcttgatgtggcagtcaatagtattacggaagctatctggaaagatcgtttcggaaaagaaagaaaaacatggcacggaattgaatctgactttgccacccagattgcatcacagcgggatcagtttgccacgcaaataactgctcagaaaaaccagtttgaaggccagatttcagaacagcatgatcaattcacggcacaaatcacggggcaaagagatgaattcaacgacatgctcgcagcctcaggctattcgtggctgaaagattatgttgacgggccagttacatttacaaatcgcagtcaggtcacagtttataatggcgtggcatatcgccttgctgcaagtgcgcctattggatttacgactacaggcactgacgcaacgagctgggaaaatgattctcagtatcttgttgctattggtgacaatgatatccgtcagcaaatccaataccagttaggacaatggcttcctgatgctgtttctctttttaatgtgaccactgattataccgcaataagggtcagagggttttatttcgcctatgatggtggtgcaggtatatggattaaaacaggtaatacagatctatcgaaggcaggaagtcatgtagttgatgaggcgaagatttataacgcaaatggtgtagagtatgcgctggatgtgagttatggcgaaattagcgtcctgagtaatggcgctaagtcgtattcatttgcaaaacttctagaccaaacaaccgacaactttgtatgtcttggtcaagtgataaatggaattgaatcacatttaactcttggaatatctactgctaatgaccgtaaaacatatgatggtggggctcgcctcgatattatagtgccaacaaacgactatagaattggtaaaaaatatgccaagctctatactggtgttgattattatttgaataaatccaggatctttattcaggctggagcttcgtataaatactcggttacaggtaaacgccttaacggtttccaacatggcgtggatgagattacagagaaatgggaggctgtaaacaaaggtatttattggggttcagttagccttcagaacgttaacatttacggtggaaccatttctggagaccatgatattcgctctttacgcgattcatgttctgctggggtagggattctggttttaaacccggaagggttttctacgcatggtaccgtagttcgtgaggattgcttgtgggccgttgttgaaacaacggcagaagttgaggcgaccgagtttaataaaaatggccacgcttttgacaataatgaaatcgattatgaatatattgttcctgcatgggttaacgcgggtataactacccgttttggcaactttaaccgcaccacccactacaacagtaaatttatgggcggtcgccggggtacgtaccgcaatggttgtgactggtcagctctgtacaactgtgaagtaaccaaccgtctggcatggcggaatgcggccaacgtgtccggtgatatacccgaatatatcgccgtgtgtactggtactgttctgaatgtctctggtggttactgggggccggcagcagcaaaagattataacgcgcgttacgggactgtatactcaacagcgcaaaatcattcatttttagctgtttatactgaatggacctacaatttcttgactgtaagcgcatggggattcaatggcaaggcgtcgcgtctttccggccttgagcttaaacttatcagtcagtataaagataactttacagaatactcatcactgcgctttgagggtgggtgtttcccgacaacggatgacggtggtaactcgctttacccggacggcttctaccattacgatacgccgaacggtgtatcacaatttgcgtggggaaccccaatccgagatctgggagcattccgacatggcggattcgatttttactacggtacatataacgtatatgtatttagtggtactgactgggattcaatacgtaaccgcccgtatgcgaaagaaatgtttaacgcaaacggattacaaataaacgcaaaaccagtcatgttgccatggcaaaccccctcagttaagtcacatatttgcatctggtataaagaccattcagggaattttaatccacgtaatatttacgcctggattactgccgcaagccaggacggcccgaacacagatgaagcgctatataagtcctttgcagagcatatgtttgatttcggcaatgggacaaaaatggcgatgatcccgaataaaaggctgacggcatgggatggcctgtacacgtatgcgcgaaattgtggggttatggtagatgtgcccgctgatggtagcacgccgataacgcttattgcggtagaggcttatcagggtggcgttccattgtttccagctggctgcggaaactacatcccggaaacgaacggtaattccgtgttaagtccggtcaccaaccctgtggggctggacagctctctgggcggtggtctgttcttccctggtgatatcatcgggccgtggtcgcatgtgcgacgtacgcagaatggttacatcatctccccgacgctgacccctggatatacactcgatcggaaaatggtgacaggtggctgcacgcttgaagctgctttcaaagttgcattcagcgcgaccgttgaaacggtaaatagtaatgccacaacaataatcagcatacctgccgcttatttgccttacgttgctgtgggtataccgctgtatatcaccggcggctcatcaaccggcgtgaccggtcaagttcggctgattaagcgtctgctgaacagtgacggaacatcgtctaaccgttacctcgtacaaggaaacaccggggcggtgggtgacactctgaccatcgaccaggcgcaaattccgccgtacacgttctataatgaccgcaacttcaatgctgttaccgcaaactcggtgaccgtaaacggggtatcgatcgcaactgcccatcgctcaagcgtatcctctggtattggttacggtggcgcatccggagctaaagcgctggagttctacgtcaatggtggaaccgcctacacgcaaaggattgttgccacgtctacgacggtaatgagcctggaaaccggcgggaacctgtcagtaaacgggaatacctacccgaatgctgacggcacctattcgcttggcaccccatccggtcgctggtcgcaggtctttgcatcgaatagcgttatcgggacgtcagatgagacgcataaaacccgcccccgggcagacaccccggcggaaaccgacgcctattatgaaatcgggcagctacccggcgtctggcagtggctggaaaaatacatggtggaaggagatggcgcccgcctgcactcagggccgaccgtgcaggcggcgattgccgtgatggataagtacggtctggactggcgggaatattccgcattctgctatgacgagtgggacgcacaggatgcgattatcgagacctgggatgacgagtgggaggtgatacccggcaccccggctgaactggacgaggagggtaacgtagttgttgaggcggtaccggaaacgcgcaccctcatcagagcggccgggagcaacgttattcaggaggggcgagaagccggtaacgtctacgcatttcgcaaggaggagttacttttctggatcagcagggcaaccattgcaaaacagcaggatatcgaaaaacgcttggcagcaattgaagccagcatgtcatcttaa

SEQ ID NO: 236436 - DNA, 603 bp, Klebsiella pneumoniae
atgatttttaacgctgagatggtgcgggcgctgctgagcggcaggaagacacagacccggcgaatcatcaagccgcagccagaggcaacattaagcggaagtttatccggtaagtggttaagcagacctcttaacggactgttgttgccgaaaactgaagatatcgcaatccattgtccgttcggtgccgtcggcgatcgcatctgggtgcgggaggcttttcgggtgcatagccgggctacagacgtcgctaccctggtatacaaagccagcgagcgaaattcgtggacggagcaaacccgccgtgtacccgtagctgtctgcaataaaccggcaacgcctgagaaatggactccttcgctgcacatgccgcgctgggccagccgtattctgctggaaatcaccggcgtgcgcgtggagcgcctacgcagcatgagccaggacgatgcacgcgccgagggtgttattgccgcatctggccctatggaagccggtttagcattccgcgagctgtgggactcaatctacggcgaggagagctggaaagccaacccctgggtttgggttatcgagttcaagcgcgttgaaggcggtgcagcatga

SEQ ID NO: 236437 - DNA, 1653 bp, Klebsiella pneumoniae
gtgagtaacgtcaacactttccttaaggaaaatttatcttcagtaagtaagaatgtttttgtggctcctggcatccctgaaaaaaaactgaataatgtcgctaaagcatttaatgttgtggataacttgaatactgtgctagccatttatgacaatacggtatttggtagcgcaaaagatggcatcgtttttaccggtgaaaaactggtcataaaagaagcttttgaaagtccttatgacttgttctacagcaatattgaagcagtagaatatatagaagatgtcacggtaaatgataaaggcaaggagaagcgaacagagtctgtttccctcaaactaaaaaatggcgaggtaaaacgaatcaaaggcttgatggagtgcaactataagaagttgagcgacattcttaagcataccatcagtgactttgatgagttcaaagaagaagatcagctcatcactcttgccgaaatgtcagaagctctcaaagtggcttatgtcaaaatcattgtgaacatggcgttctcagatgatggtcaggttgataaaaaagaatttgccgaaattctcttgttgatgacccgacttgagttaacgactgaatcccggtttacactgcgtagttatgtcggttcagaatccagtctgataccggttgaagaattaattgcgatcattgaccgggaatgtgtcccaagccataacaaatcaataaaagtctctcttgttaaagacctgattagcattttcatgagtgttaatgaaggtgaatataaaaaattcccgtttcttcagcaagtgcaacctttgctgggcgtaactgacgaagaaatagaactcgcagtaatggctattcagcaagattttaagatgttacgggaagatttttccgatgatgcgctgaaacgcagtatgaaagaacttacggcaaaagcaggtgcggtaggcgtgccactcgctgctgtctatctctctggctctgtcatcggtatgtccgcagcgggcatcacttctgggcttgcaacacttggacttggtggcgtgctgggtttttcaagtatggcaacaggtatcggtgttgcggtgttattaggtgtaggtgcctataaagggattcgtcatcttacgggtgccaatgaactggataaaaccaagcgccgggaactcatgcttaatgaagtcatcaagcagacacaatccacattgtccgcgctaattaatgatctaaattatatttctggaaagtttaacgacgccctggatgcgcataatcggcaaggagaaaaaattctaaaactccagaagatgatgaatgcattgaccggtgcagcagatgaattgaataagaaatctaataaaatgcaaaacagtgcactcaaacttaagtgccctgtttatcttgatgaggccaaactcagttcgctgacccgagagcccatcaaaaaacaattccatgatgttgttctttcattctacgaagaatatattgttgaagagcaaaacgatgggaagagtgttgaagtgaaaaaacttaagatcaaagaaaacgcttccactcagcaattagagaaacttgccgcgatctttgaaggcatcggctatttcagagcgggggatgttattaaaggcaaactaactgggctattctcataa

SEQ ID NO: 236438 - DNA, 1491 bp, Klebsiella pneumoniae; identical to SEQ ID NO: 194722

SEQ ID NO: 236439 - DNA, 1047 bp, Klebsiella pneumoniae; identical to SEQ ID NO: 194721

SEQ ID NO: 236440 - DNA, 543 bp, Klebsiella pneumoniae; identical to SEQ ID NO: 208712

SEQ ID NO: 236441 - DNA, 714 bp, Klebsiella pneumoniae; identical to SEQ ID NO: 208713

SEQ ID NO: 236442 - DNA, 1086 bp, Klebsiella pneumoniae
gtgcagcgcgataccgttggcgatagcggtcataccgaactcgcgcacgccgtagtggatgtagttcccggcagcgtcttcgttgatcggcttagagccagaccacagggtcaggttggacggcgcgagatctgcggagccgccgaggaattccggcagcagcgggccgaaggcttcgatggcgttctgcgaggctttacggctggcgattttcgccgggttggcctgcagcttcgcgatgaactcgttagctttcgcgtcgaagtcagacggcatctcgcctttcatacggcgggtgaattcggctgcttcctgcgggaaggctttggcgtaagccgcaaacttctcgttccatgcggcttctttcgcctggccggcttctttggcatcccactgggcatagatgtcagacgggatgtcaaacggcgcgtgtttccagcccagcgcttcgcgggtcagggcgatttcggcgtcgcccagcggcgcgccgtgggagtcgtgggtaccggctttgttcggcgaaccgaaaccgatgatggttttacacatcagcagggacggtttgtcggtgaccgcccgcgcttcttctaccgcgcgtttgatggcgtcagcgtcgtgaccgtccacgccgcgcaccacgtgccagccgtaggcttcaaagcgtttggcggtgtcgtcggtgaaccagccttcaacgtggccgtcgatggagatgccgttgtcatcatagaacgccaccagtttacccagtttcagggtaccggccagggagcacacttcgtgagaaatgccttccatcatacagccgtcgcccatgaaggcgtaggtgtagtggtcgacgatatcgtgtcccggacggttgaactgcgccgccagggttttctcggcgatagccatcccgaccgcgttagcgataccctggcccagcggaccggtggtggtttccacgcctgcggtgtagccgacttccgggtgacccggggttttggagtgcagctggcggaagtttttcagctcttcaatcggcagatcgtagccagtgaggtgcagcaggctgtaaatcagcatcgaaccatggccatttga

SEQ ID NO: 236443 - DNA, 549 bp, Klebsiella pneumoniae
atgtacggcttcgtttccgaactggcgaattgtgttggcccagtcaagcataacgcgtggcaatgcttccgcttcgccaagcttttgaatgagatcgacaagcctgcctttatcggaccccagtttgtcgcggcatgccgactcaagaatcatccggcagcttaccagggtgagtctgggcgaactggttgcctgcagaaggtcatcaacgtacatggagtggatctcctgtggcagatgttctggaacagaatccgtaccctccggataaatcgtatccagcttaaaaaacttcctgaggtctgtcccaacatcgtccattttcacctcatagccgatcctccttggccgagaagaactagcggaagggtcaatcatttcaaggctcagtctgttgagaaaactaacgggtttgagtccaggagcccgaaccattggcgaaaaatcgaaggtaacaggagagaaacagtttccacaggtaaaaatccccctgaaattagaatggtcttcacgccacattatcgtttgagaatgagtattcaactctga

SEQ ID NO: 236444 - DNA, 744 bp, Klebsiella pneumoniae
atgcaaagcctgatgcctccggttgatgcaccaaataatgagttcagcgacggtaacccctcgctggggacgttaggaaccattgtcagggcgcttttcctgaataatgtgcaggatgccatccggtctgtacaacgtgaattattgtcaattcttgccgctgcaaatatcaaccctgatggtgacagtaataaccaggtattgcaggccatcaataaaatcatggtggattcaaatatgtcggtaccttacggcataccgctgccatggccaaccagtacgccaccgacgggatatttaatctgcaacggtgcgtcattcagcgcggcgacctatccgaatctggcagcggtttatactggcggctcattacctgatttacgtggccagacaatcaaagggttaccggcctctggccgtgcgctgctaagtcttgaggctgatggaaataaatctcatacgcataacgcatctgcatcggctactgatttaggaaccaaaaccaccagcaataacggtgaccatagtcactcctggggttctggtatgcagaaacaagggggtagcgatcaggaagtgggtagcaatagtggcgatggtttcgggacaacgtcaacagctggtgcgcatacacatgatgttgttttgggatcgcactctcacacgattactgtcgatgcgtctggtaattcagaaaccacggttaaaaacatggcatttcattatattgtgagggcggcgtaa

SEQ ID NO: 236445 - DNA, 627 bp, Klebsiella pneumoniae
atgtctgacgatattaaagcagtatttgatagcaatctgattgcaacacaggcaggtaccgttcaggtattccattttgatatgaattcccgtgagtttattggtactgaagaagtttatattcatatcggtgtcggccttcctgcattttcatgcatggaagaaccaccggtacagagtgaatatcaggttgctattcgttccgaaaataattcgtcctggtctgttaccgatgattatcgcggtatcaccgtctatgatattcagactctggccagccacgttattaacgaacccggccccatacccgatactgtaacgatttcttcaccatcaaccccttacgacaaatgggacggttctgcctgggtgacagatgcagatgctcagcacacggcagctgtcgctgacgctgataaaacaaagtcggaccgcatggcaatagctaccgctgaaattacggtgttacaggacgctgttaatctgaatctggcaacagaatctgaattaaaaaaattaacagcactgcaaacgtatcgcgtgttacttaatcgtgtggatacctctgcagcacctgatatcaagtggccggcgattgttaatatgtcggaggttgataatggctaa

SEQ ID NO: 236446 - DNA, 1992 bp, Klebsiella pneumoniae
atggctaacttatccgaaactccatcatgggaatcaggcgtacttcagcttgaagaagccgaccgggcgaaagctggtgcgggcggagtattaaacataccggcaagtcaactggcaaatcgcacgcgatatctgaaagaacaacttgaggcttacaacgggctgttaaaatcaggtgagctaccttttaccgataagcccgccgcacaggaatatattgatgcggggaaaatccccgagggaagcattttttccatacgctctgataacccggattactgggttgacgaatataaaaatcagggaggggttccggtagcaacgggtaaacacctgctttcagaagcatcaattaccgccagaattaacactgatgaaaacggcaatatagcattccataaagacgaagatggattaagtctgttagcggttgatgatgccggtgggctttatgtcgtcggagtgaacggaactattcaggatcgactgaacattctgcaaaaaaacacgtcaccggcaattctccgcctgaccgatgccgaaaatgcggcctttgcttcagtggatgaatatgggcatttacgcctgccggggatgcctgaaagcattcaggaaagtcttggcatgctgaaaaaacgtatggaggagtaccgtaagcgccgcatgattctggatgcgcgggattgtggcttcaatacgaaaacaggccaggatgctcatcgtcctctgcaacggggttacaactggttgtcggcgaacggcggcggatttttatatgcgccacccgcttactacaagatgcctatcccggtgatccccaagtctggcgtttcgcttgtcggaggcgggcaggaaggcacaatatttttacctatgggatacctgcctgcgtttcagtatcgggggaaaccaaccgaggcatcgccggaagtttacgtcgaaaatatccagttctgtgattttaccgttgacggtgaaaaccagcagctacacccggagcgcggttatatcccggatatcaagggcatcttcctgcaatattaccgcaatgccgtctttgatcgcctgactgtcagaaataccggggcgaccggtttcggtgtggatatgcctgacagggttttcgtcgcgaatttcctggttgaaaactgcggcaggctggcacaggtcggcgacctcggtgcgtcggggttcggcctgggtaccagcttcctgagcagcgagccgattttcttgtcaaaaatcgtggggcgcgggaataagaattacggcatcttctttgagccacagcgcggcgtcggtactgcgcaggatgcaattgtttccatagcgacattctccggaaactatgcgggcatggcggattgcggtattgaggggctgattgcctctgacgtcaatctgcgcgggaaccagtacggatttatggcggataccggcactaacaacggcggacgcccagggcatcgcgggaagctgaccaactttattatcaaaggcaatgctaaacacggcatgcattttgtatccgctaaagatgaaaatttgattggtcaatactccattattggggcgcatattttcgaaaacggtgaggatggtgtcaacttcaaatatcccaataaccgggcaaactccggggtacgtttttcagtttgcgagtttaatgataacggacgtcatggtgttaactttgagtctggcccggtagttaatgctcgtatcacaaactgcgacttctggaataacgggaaactcatgcctggtaacgcaataaacagcagtgcgagcgtgaagaaaagccgtttctcgatgaataccttttacgacttacagtcggcacccacgcagcaataccccgtatctatcagcggggatatggaggatgtcgatatctccttcaaccacggcgcaggcaatgtgcataattcactcaacctgaccgggaataaaacccgcgtcaccacgctttcaaatccggggattgaataa

SEQ ID NO: 236447 - DNA, 1425 bp, Klebsiella pneumoniae
atggccacgaatcttcagggcaacatgaaatataaagggcgtttaagtcagctcccgtctgctaacgcgcctctgccggaaggcgctaacctgttttcagactttgcgggtgggcgtcatgtaatcaaacatgccagtggtaacgttcttcgctcaactcaactggcggatattctctcattctcgcgagcaagtaccgcgacgcgggtagctgaaagcggcctgctggaatacctccaggcgaatgagcctgctattgattatcaccccctgtccggggagtgtctgggcttgcgggctgagcgtagtacgtggaatcgcctggcatggagccaggactttactaaaactgctacctgggctgcttctggtgttgtgctcacacctggggccgctgttgcaccggacggtaaccttacagcaaccaagatgattgaggccaccgataccgcagcagcagtacgaaaactggcagcaacgacaacagctgaggggactaaaagtaatcccttcgcctttagcatttttgcgaaagcgaataccgctaacgtgctccagctttcagctgtaggcgcattccctgagccgacctttgttaactttgacctgaaaaacggcaggctcggcaaaacttcgacgggctcaaccacgcgggggttgttacaggcatcaatcgaaccgttccgcaacggctggtaccgctgctcgatcgtcatcatcccgtacagtgcaatgaacccgaaatttacgctggcgttaacggacagcgacagcagtgcagacgcgatgccgtcatacctcccggcgacacctaaatcggtgtttatctggggggcgcaggctgagttttcagacgggacgtcatcttacattccaaccagcggcgcagaagtgcagcgggcgagtgatatctgcaccacaccgacagtggcctcgtttgtatcttcgggcgcgggtaccgtcctggtgtcagttgtacagcctcacagcgtcatggctttgaccgatacgtatggctcactctcttgcgccgctgtcattgataattccgctattgggccgcatgtgcgctttgcattccgcaacactaacgttgatggtaattatggtgcggtactcggtgtggttcctgacgagacaggtaccgcacagaatcttgagatcccctccatggctccggtgccagatagcgagcagtcgtgcattttttctttcgacgctacagagctgaaaacaaagctgtttgacgggtataactggtatgagcgcagtttgacagcagcgccgccagccctgaatcgtctgtgcatcggccggggatatctggattccagcaactatctgaaggggtatatcaaaaaaatagtttactggccaaccgccctgactgaatcagaaatggaaagttatctttcacacatttaa

SEQ ID NO: 236448 - DNA, 1266 bp, Klebsiella pneumoniae
atgcttattgaattcaatgttgagaactatctctcaatcaaaaacaaacaaacattttcacttattgctaacaaaagtaatgagttagaagagaatatctttacagttgaaggaaacgttaaccttaatgttctcaagtcagctgttatttacggtgctaacgcagcgggaaaatcgaatgtgcttctcgctgtcagagctatgatggatatcgttactcaatctgcatctaatactcaggctggcgaagaggttcctgtattccctttcaagcttgattcagattcaattaaaaatcctactgaatttgaagttacttttattgcagagggcattcggtatcagtttggtttttctgctacaaatgaaagaattattgatgaatggctctttgcgtacccaaaaggaagacctcaaaagtggtatttcagagcttgggatgaagagaaacaggaatatgagtgggattttggcgcatcactgcttggtgaaaaacaagtttggcagcgctcaactagaaataatgccttgttcttatctacagctgtccaattaaatagtgagcagcttaagcctgtatttacttggtttaaaaaaacactgagactttctggtattaaaggatgggccaatacattctccgccaaacgctgcactgaggatacgaagaaagatatcttgaatttcttgaaagctgcagacattggcattgatgatgttttagttacaaaagaaaaatttaatccagacgatttgccctctgatatgccagatgatatcaaaaaaatcgttatttctaacatgaaggataaagatatctttgatgttactaccgtgcattataacgataaaggggagccggttagtttttctcttgaggaagagtctcatggcactcaaaaacttttttctttagctggtccatggctggacgccctcgataatggatatgtactatttatcgatgagcttcacgatacattgcatccaaagctggttagttttttggtaaatctttttaatagtcctgatactaataaaaaaggtgctcagttaattttctcaacgcatgagacatccattctgaatcaaagcatttttagacgcgatcaagtctggttttgtgagaaaaatgaactcagtgaaaccaatctatatccattgactgattttagcccaagaaagggaagggaaaatctagaagccgcatacctagacggtagatatggagcattgccgttcatcaagaaattgacggggatttga

SEQ ID NO: 236449 - DNA, 720 bp, Klebsiella pneumoniae
atgggaagcgaggatttatttaaaaagaaacgtggtcctaaaactgctaaggatctggcaagacgtaatgcagttaaatcccctctcgctaaaatattaattgtttgtgagggtaagaaaactgaaccaaactattttgaggatttgattaaccattatgaattacttacagctagtgtaattgatgtaactggtgagtgtggctctagtccaatgtgtgttgttcgtcatgcaaaagaaaaacataaagaaatgactgaaaagggggctccttatgatcaaatctttgtagtgattgataaggatgcccacactgactatgtggcagcactcgatgctctcaggagaagtaaaccaagttcaagttggtttactgttaattcagtaccttgttttgagtattggttacttcttcattatacctattcgacaaaggcatttagaaatttaccgggtaacagttcgggaaatcaaattgtcagtgagttaaaaaaatatattaagaactatgagaaaggcgcaaaagggatttttcataaaacccttaatgctctagattcaaaagatttaaatgaagtagtcctgagggctaagagaagtttacaggcagctgaagctagcgatactgataatccaagtacaaaagtttttgagttggttgaaagacttatccagcttaaaaaacaaatagagtcgaatcgtaaacagaaacgatcttaa

SEQ ID NO: 236450 - DNA, 1713 bp, Klebsiella pneumoniae
atgtactttcagggataccgcgtagcccgcattgctgaaatgctgggcgagaaagttgcaaccgttcacagctggaaaaaacgcgataagtggggcgaatatggcccactggatcagatgcagctcaccaccgccgcacgttactgccagctcgtcatgaaggagcagaaggaaggaaaggattttaaagaaattgacctgctggcgcgtcagtccgaacgacaggccaggatcggcaaatttaacaatggcggtaatgaagcagacctgaaccccaacgtggccaaccgcaataaaggcccgcgcaaaccgccggaaaaaaacctgtttaccgacgaacaaatcgaaaagctggaagagattttccgcgccggtatgttcgagtaccagcgccactggtgggacgctggtatcaaacaccgtatccgcaacctcttaaagtcacgccagatcggtgcaacctactatttcgcccgtgaagcgttaatagacgccctgaccacggggcgaaatcaaatctttctgtcagcgagtaaagcgcaggcgcacgtttttaaacagtacatcatcgacttcgcaaaagaggtggacgttgagctgaaaggcgatccgatggtgctgcctaacggcgcgtgtctttacttcctcggtacaaatgcccgtaccgcgcagagctaccacggcaacctgtatcttgatgagtatttctggataccgaaattccaggagctgcgcaaggtggcctccggtatggcgctgcacaaaaaatggcgtcagacctatttctctacaccttcaagcttgacgcacagcgcctacccgttctggtctggtgccctgttcaataaagggcgcccgaaagccgacagggtagaatttgacctttctcacagtagcctagagcacggcgttttgtgccctgacggccagtaccgccagatagtcaccattgaggatgccgtaaacggcgggtgtaaccttttcgacctggaccagctgcgcctggagtacagcccggacgaatacaacaacctgctgatgtgtcagtttgttgacgacctggcgtccgtgttcccgctggcgttgctgcagtcctgcatggttgacagctgggacgtgtgggacgatttcgaaccgcttttactgcgtccgtttgcataccaccctgtctggatcggctatgacccggcaaaaggaacgcagaacggtgacagcgccggttgcgtggtcattgcgcctcccgtcgtccccggcggtaaattccgcatccttgagcgtcaccagtggcgcgggatggactttcgcgcccaggcctcagcgattgaggaaatcaccagacgctacaacgtgacctacatcggcattgattcgaccggcgttggcgatggcgtttacaaaacggttaagcagttcttccctgccgcgcgtgagtttgtctacaacccgaccgttaaaaatgccctagtgcttaaagcctacgacatcatcagcgggcgccgtctggagtttgacgcggggatgctggatatcgcgcagtcctttatgtccattcgacgttcaaccaccgccagcggcaaccggccaacctacgaagcagcccgcacagaggaagccagccacgcggatttagcctgggcaaccatgcacgcactttataacgaaccactggcaggagcttccgccagtaccagcaacatcgtggagattttttaa

SEQ ID NO: 236451 - DNA, 204 bp, Klebsiella pneumoniae
atgaaagtgcgtgcgcatcagtatgacacggtggacgcactctgctggcgccattacgggcgcacgcagggagtcactgaacaggtgctgcaggcgaatccggggctggctgaatatggcccctttttaccgcacgggctgcaggtggagctgccggacattacggcgtcaaccactgcgcagactgtccagttatgggactga

SEQ ID NO: 236452 - DNA, 2421 bp, Klebsiella pneumoniae
atgagcaaaatcagtgaaaccccacgctgggaaaatgaaatccacgcgctgacccgcggtgaaaaagtagaaggcggcagaggtggtgcggccaatatccaggcatcccagctgggaaaccgaacggcattccttaaaaatgagctggacgcattaggaacgctgattaaatcaggcgatatgccgtttgccagcgaggaagccgccgccgccgccatcaatgaggggaaaatccccgatggtgccgtgttctctgtacgatcatccgatccgcgtgtttgggttgctgagtataaaaatgtcggaggcgaaccggttaagacgggacgtctgatttataacagcctggctgttgccgcgaccgtaatggcgggtgttgatgacccagacggtacgaaaacgggcatcgcctcgacgtttagcggccagctgttccgcgttatcaccgatgacagtaacgctccgtccgaggtgatttacattaacgataacggcgaagccaggttcatcatgactctggcaagtgggcaggcactggatacggtgcgggccctggccgagcaggccagtgcagatgcgcttcccctgaaagggacgattcgccgggccgatattggcaatcttttgctggcgctggttgatgaaatcggccttatcccctggcaggttgacggggcgggcggttttggttcaggcgtggcttatatcagcaaggaggggattcgcgccggcgtcctgcaaatcatgagcacaccggacgctattttaaggctggtcggcgagcatgggatttacagcgacctgattaaaaaagacggctccgcgaatttcccccgatacgcgctgggtaatggcgtatatctgaccagcacgccagacgcgattattcgtctgactgaccgtaacggccttttttacgacattattgataaatatggcgtcccggcatggttgaaaaagggcaatggtaatggtggcggtggagaggaaacgacggaagccgcgtatattcgccagcagaatgcggtaaacctgtctgttatggaacaatctggccggcgcattatgacgcggcttaaatttccgtcagacgcatataatcattttattatgcagtgccagtcgctaggtatggggtttatgtgctttcctgccgtctcaaagaccccgaaatacggcaatctgatgctcggcaattccgtgcgcccggcgagtgcgtccaaaaatgaatttgcccccctaggcgacgcagctttccagccgctcaaatccgtggttcagagtgtggatggggcaacgatcctgacagatgcagagcagcaggcgttaggccggtacgctggccccgaaggggaaagccctattgtcggtgctgtaaatggttttcgccgccacttcctcgaaaaaaacgctttcagcgccgataactcacgcctttttgtggcatccgctgtcggcctgtccggtcagtcaattgcgtctctgctggatgatgagaaatattatcagcgttttgttgactgcgtgacaaaagcaaaagccctggcagacagcgaggggaagagctattccgttacgttgctggcatttatgcagggcgagcgcgactaccaggacggcacatcaaaagccgtttacaaggggctgctggggcagttgcgcactaaaatgctggcaactatccgcgccattaccggacaagccgacgatccggtgtggctcatgtatcagactggctatgtttacaccccgaaccctgataattcgccgattaatgcagtgacgctgccgattggtgaggctcagtacgagttttgccaggaaaacaaaaactgcctgatggtggggccaaattatcagctcccggataaacagggtcacctcatgactaacggtagccggtggatgggatgctatttcgccaaagttgcggacagggtacttaaccagcgccgcccgtttcagccgctggctccgcgagatttttatgtcattggcaatgcgatttataacagcttcctggttgaacatccgccgctaaagtggcagcgcccgttccgggtaggttcgaggattgacatagccaataagggctttcgtgttttccacaacatccaggctgacgccgccgggatcggtacggaactgactattgccagcgtggagatcgtcgccgacacaatagtgaaaattgtctgcactacgcctcccgtcgggacggtgcgcgtcctctatggctccaaacagtcagagggccagggaatgctgactgacagcgatgactatgtgcctgacgaggtatacgaatacgacccgcaattcacgcaatggcctgaggaaaatatcgccgaattaatcggtaaaccatacccgatggagaactggtgcatagccttctcccggacatttacgcaggggtaa

SEQ ID NO: 236453 - DNA, 2376 bp, Klebsiella pneumoniae
atggataaagctgagcgtgcatcagccaagtggagcaagcaggtacaagatgatgtggcaaaatccagtgctgcactagcaggtataggggcagcagctattgcagctgggctggctgttggcgcatccggatttcaattactgaaatccacatccaggcaaatagcagaaactgaccgctgggctaaatcattacaattatctacccaggaacttcttgcttggcagtttgcagctgaaaaggctggtgtctccggtgaccaaatggctgatatcttcaaggatattggtgataagattggtgacgcggtattaaataaatcaggtgaagctgttgatgcgctcaacgctcttggattatctgcggaaaaactatcaaaagtcagtccagataaacaattgctcgctatcggtgaatctttggagaaaattagtactaatgccgagaagaccaccattcttgaaagcttgggtaacgacctttcaaaattacttcctttgtttgataacaacaaccaaaaactcaaacagtttattgaccttgctaaagattatggtgttgctcctgatccatcctctattgatgatttagtaaaggttaatcaactttttgaagatatggaggctcaggttgcagggctcaaaattgagattgcagccggattggcaaaagttgatctaactcctttgcagggctcacttgataagcttcatgacgtactgactgaccccttggttcttcaaggtatttctgatcttgtatcggaagtcgctcaacttgctggatggcttgtaaaagcagctgcaggtgcgggccaactagcagccagcacaggaaatcgttttgcggcacttagtggcaagatcgacctaacaaatatagaccaagttaatgaacgtattgaatacctgcaaaaaatccttgaagggaaaaaaggtttttactctcaaagtgagtctatgtttggttggattacaggggtagatgacagcgcgaaagcactaaatgatgaactgctatctcttatagaaacaagagataaattttctaaagctagtaaatcggtgctaccccttcaggtagccactgtgggaacggacaacccattttctttacctcctggtggtacgaacggaaaacctgttaaaacaccaacaagtaaaacagaaaatgcttttaacagtagattgcttgatctacaaaaacaagctgcccttattgaaactactggtaaaaaaacagctgaggttaccgagctcgaaaaaataaattttgatattaccagtggcaatcttaaaaaattgtcagaagctcaaaaagaacagcttcgcactgctgcaaaagccctcgattctaaaaaggaagagcttaggcttaatcaggaaaatgcccgggttgcggaatatgtttccggcttagaaaggcagaataagttagtgcagcaaggatttgataatgaaattgttggccgttattctggtggtcgtgagcgatcacgcatgcaggataataatgatatacagcaggactttgcatatcaacaggatgatcttttaaaccagctccaatctggagatatagaccaaagtctttacgataaaaagaaagaagcattacagaattctcttgatgagaggcttaaaatacaggaggaatattacaagaagcaggatgagttacaaaatgatggtgctgctggttttatatcagggctagcaacgcaaatagaagcatcaatggatttatacaccaacatgcagcaggttggtgcacaggcatttagcagcttaacggatatgattattgactgggcagaaaccggaaagttaaatgttaaagattttgcttcgacatttctgcaatctgttggtagtacacttctttcttacgctgctgcccaagttgcaatggcgggtttgcaggcctttacagcaatgatcggcgtgccgtttgttggacccgaaatagcaggaccggcagcaatagccgcaactgcggctgctggagtactggcgataggtgttggtacagcccttcagggccaggctcatgacggtatcgactctgtgcccgaaactggaacctggctcttgcagaaaggtgagcgcgttacgacagctaaaaccagcgccaaacttgatgccactctggatcgagtagcaaaccagtcaacagggggggcaacctatgcgccgagtatgattttccatgtcaacggcgatccctctgatgctcaaattgccatgatgaagaaagctgcatccgatggcgctcagatggggtatcaaaaagcggtacagtctattgctacagggcagggtgatttacatagagctctgatggggaaaactacctcggggaggaaaattagctga

SEQ ID NO: 236454 - DNA, 378 bp, Klebsiella pneumoniae
atgtcatctttactgatccccgcagactggaaagttaaacgctccaccccgttctttactaaagagaacgtccccgccgccctgctgagccatcacaacaccgcggccggcgtcttcggtcagctgtgcgtcatggagggagcggtcacctattacggttttgccaatgagcaggcgacggagccggagaaaaaagtcgtgattcatgccggacagtttgccaccagtccgccgcagtactggcaccgcgtcgaactcagtgacgacgcccgcttcaatattcacttctgggtgccgaagaaaccgacggtgaaaacgggctgtttcacgcgaagaaagcgtgatccggcgcttaacgcgccctgtcaggcagattga

SEQ ID NO: 236455 - DNA, 198 bp, Klebsiella pneumoniae
gtgagagatagatcgcatgacacggcgatggccgaacacttccgcgccgatccgacctatgcagcggagctgcttgctgaagttcgccgcgacggcaacccgggcgagctggccattctgctgcggcagatagacactttcttagcaggtaatgtgaggttgcatgatgccgagagagggcgcactctacttcgctga

SEQ ID NO: 236456 - DNA, 516 bp, Klebsiella pneumoniae
atgtccaccaaaaaacctcttccgcctcctcccgcaccgcaaaagaaagacgacggacgagatagaatccgggcagctcttgccagaagcgctgctaggacaactgagtctgttgtgggcgaagttttattaattgacggcgagtttgtcaggttgattaatttaggatctggaaaggaaaaacttcgtggtatgtcaggtttttatgcgagggagccttctcgcaaggatattcgccaaagtcttcagttgaaagctttatcttgtttaatggattataatcttgagcccgtggctcaattatcggttgaagaaggtaagcttattcagttattgaagtacagcagtaatgtaaagggcggattaaagacgttaaaaggttgctctcttgtagaaaaacctatttatagcaaacttccatccatgaccagagagcaagttatttcgctatctgatcgtatgtattccagaacccttgaggaaatgcagggggagttattcgacgatgcggaatga

SEQ ID NO: 236457 - DNA, 588 bp, Klebsiella pneumoniae
atgattgactacaatccagctaggaaagaaatagccgcggcaaaaaaatgcctagatacaatgagattgtctcgaaatttagacgaaatggatcaattgtggcggaactgcatcaatcatattgaaaagtctcatacaaaattactgagtgcgacaaaatccattaaagaaaaattctcaagtacgtttgaacagcaatttttgtctaggaaaaatgatccacttttaaagtatataaagcaagctagggattcggataatcacagcattgctgacatttccaagaaagttaattcatgcgtcgctttttcttctaaccctgctgcgaataaaccaacctacattaaaaaaataataataatggaagatggcttggtttgtaccgaatttagtggtgatccacctcaagtagattttatccctgaaaggatagtggtcgttcctgttactaaccgtggctatacatttcacccaccatgccagcatttaggtgaggaagtattaactaatagcccgatagagattgccagaaatggtattttattttacgagaagtggattgatttatcttgtgaaatatttccttag

SEQ ID NO: 236458 - DNA, 198 bp, Klebsiella pneumoniae
atggacaaatgccagggcattttcggcaagatatttggtcatgcattccgggtggcgataacaaaaggcgctcctgacttaaagctaagagattatcaaggtgggcgcgatgctctgttagagcttatggaaaaaacaaggcctgaaacctatcacggaatttactgtaagcgctgtgggaaggttatcaatggctaa

SEQ ID NO: 236459 - DNA, 201 bp, Klebsiella pneumoniae
ttgttgaaatctatcagtggcatcgacatagaagtctggtttcagctgctcaatatcaaattgaacacgatagcctgttttctctgcgatatagtcactgagttcatctgtatctacaggattggggcatgtgacaccatcatgctgaagcaagacaacattatcaccaagaaagctaatcatgtactgaagtatcagtga

SEQ ID NO: 236460 - DNA, 2901 bp, Klebsiella pneumoniae
ttgagtagtcctgtgcgcactcaagttattgaattaatagatgaatggactggtctcattaatatacatgatgagttgccaaaagcgtctgaaaaggttggttttttaagtttatggctccttgaaaaggttaaagattcatatcgtggtgaggggcaaagaaaaaaaatattaaatgctttattaaaagtttcaacggctattaaagatgattttgatgaattgatgaaacaggacgttttcacctcaaagataaagcctagacgattaagttatgttgatgaactgagtagtttggcacttataggcttcaatgttcctatgttgtgtaagttttatcctgacttcgtagttaaactttcaatgcatgagtggctgttggaagaatccgaagagaacgattatggctacgggtcatatcgagtagacgtagaggaatcatttgggctagatacagaacgagattttttccctgcaagcggtgccaaaggccctttcaaatatcttcttcaattcaagccaaggctaggcttggatttcattattagattgtgcaatttgacagcacaaaaatactcagaatcggatttttctaaaactcaagacaataaagaagacactatttacgccttcgaaacagtagctaaacaagtcgatataaccctgaatgatggcacagtagttaaacagtatgcatctccccacctctggaagggatatagaggacagtctacgttgccctacttattacagagtgctcttatggcattggagaactggttagttgagtacgttgaaaattgtggtaagaataatgaaatagattggatttttgattatgttcttcgctctagtaattcagtaatgcctacatctgttttatcttctgtggccacaggcttccctaataaagtaggtaaagcagcctttcctttgcttaaaactgctgatttataccatttagatttgattcgaatgacacaagaaatgggtggaaatgagatgcatttctttggtcttaatagggatgcattgtcgaaaatatacctagaagagagaagagaagcagcacttcgaccatggagaaaagagtcattagaaaccttattaacaaggcttcagttcgtaaatgagttaagggatgatattttaaaaattgttgatgaactgaaaaatgaagctactgcaagtaatgaaaaaagccttcggtatatggtgcacagagtcgatacaaggacttggaaagtagttgaagacaaagaaaatgacagagtattgtttcaaagctcatcagagcttccggaagatttaaagctggatcaacaagaatttaatgaaaagcacgcaatggataacaccgtaactagtttaaacttatggggtaaaaaactattcgatgagcaattactagaagaaaaatacttctcttcatatcaggatgcattaatagctactaagggattgctcagcgccctccaaaaaggtgaagtacacaactttgctgatatggcggttggcacaatcacaactgttgcagcggtttgtgttcgtgatgttcttttagaattgagctatgaagataaaaagtggtgcttagaaatcatcctagaatcaatattcatgcacgcagacaatatgaatgggacagctgcacatgataagactgattattatggctctggagcatgcgcatttgtcttacctaagttatttgatttagatctagattcagaacaaatagaatatctgaagtttgcgttagctacagcattaacgcatgagaacctgaacgttagtgcttgtgctgctaagggagtaagagagtttctttggtctagagacgctgaattagcatcccgttgtataggtggaatagttgagtatgccagattacgaagggaagatagtgaggtacgtaggttttatcatttacaaggtgctgaattgcaagccgcactcgaaaaatggaatgatcttttaacaagttttcgtaacgacttgattgagggaaagtttaagctttcagttaacgatatatctttggaaagccactgttcgtggtttattcatttaccaatgctaatggttccttactgtactaaggatgagatacaaattcagttggtcaataggttaatgagttttgtatttgatacggagtatcaaaaccatcgttcgagtgatgatgaaaaaataaatcatgaaattaaaaagcagattcaagactgtctctctgaacatgttgtttcttcaagaaaaaataacttcatgccctttaaagatctattggtgttagggtgtacaaaagctcccggcttcatttattctttaacactctcctatcatgtcgctgtagaaaaagaaggtgattatgatgctatatgggcactttggtgcctgttagcaccagaagcacacaagatagctttgaatgatgttaatgatcgttatatcggtttacagaatgacctaaatcagctcctgcgtggaatgatgtatgcggattgcccttggcaaggacatgagaatgaagagaaagatatgaagcgaggtgctaaatatttgctcgattttgctaggcaatctgcacataatagccatgtgtttgaagccttgtcttcattgatttataacttctacaacgtattcttcgaagaaggcattctgattttagctgagcattatagtgccaatcgacatattatcgggaagcaagtcaatacagcattttatatagaaatggttgttggaagatttttgcagatagaaaatcgcggaactctcaatagaaaaatgtacgatatatgcctgcttctcttaacaggaattgtagaaactggctctgctagagcttattacttacgtgaagaattgattcgttctcgaaagatttcagcctag

SEQ ID NO: 236461 - DNA, 240 bp, Klebsiella pneumoniae; identical to SEQ ID NO: 217871

SEQ ID NO: 236462 - DNA, 894 bp, Klebsiella pneumoniae
atgaaatatacggcattgatagtgacattcaatcggctcggtaaactgaaaaaaaccgttgaagagaccctcaaacttgaattcactaatattgttattgtcaataacgggtccacggatgggacccaagcctggctttcgtcaattgttgatacacgagtcattgtattaaccctcaccgagaataccggaggggcggggggctttaaaaccggtagtcagtatatctgtgaacagctggcaagtgattgggtatttttctacgatgacgatgcttacccctatccagacacgttgaagtccttttcacagctggaaaagcggggatgtcgggtatttagtggactggtgaaagatccgcaaggaaaaccgtgtccgatgaatatgccgttctcgcgtgtaccaacctcccttggcgacactgtacgctatttacgctaccctgcagagtttatcccggcagctaatcgttctatgttcgtacaaacggtttcatttgtagggatggtcatacatcgtgatctgctcacgaccagtcttgaccacatccatgaacagctctttatctactttgatgatctttactttggctatcagctatcattagctggtgagcaaattatgtatagcccggagttgcttttttatcatgatgtgagtattcagggcaaacttattgcacctgaatggaaggtttactatctatgccgtaatttgatcctgtcgaagaaaatattccagaaaaatgccgtgtatagcaattcagcgatagcgatacgcatcctaaaatatatattaatcctgccatggcaacgtcaaaaatattcctatatgaaatttattcttcgtggaatttcacatggcataaaaggtattagtggtaagtatcattaa

SEQ ID NO: 236463 - DNA, 741 bp, Klebsiella pneumoniae
atgcacccagttattaacttcagtcatgttacaaaagagtatcctctgtaccatcatattggctcaggaatcaaagatttaattttccatccgaaacgcgcttttcagttgctgaaggggcggaaatatttagctatcgaagacgtatcctttacagttggcaaaggtgaggctgttgccctgattggacgtaatggggcaggaaagagtacctcgcttggcctggttgccggcgtgattaagccaactaagggaaccgtcaccactgaaggacgggtggcatcgatgcttgaactcggtggaggatttcatccggaacttaccgggcgtgagaatatttacctgaatgctactctgctgggccttcgacgtaaagaggtccaacaacgtatggaacgtattattgaattttcggaactgggagaattcatcgacgagcccatcagagtatattcaagcggaatgctagctaagttaggtttttcggtcatcagtcaggttgaaccggatattttaattattgatgaagttctggcagtaggtgatatcgcttttcaggctaaatgtattcagaccatcagagattttaagaaaagaggcgtgacgatactgtttgttagccacaatatgagtgacgttgaaaaaatctgcgatagagtcatctggatcgaaaatcatagactcagagaagtggggtctgccgatcaaatcattgaactgtacaagcaagcaatggcttaa

SEQ ID NO: 236464 - DNA, 3075 bp, Klebsiella pneumoniae
atgacaatgattacggattcactggccgtcgtattacaacgtcgtgactgggaaaaccctggcgttacccaacttaatcgccttgcggcacatccccctttcgccagctggcgtaatagcgaagaggctcgcaccgatcgcccttcccaagagtcgcgcagcctgaatggtgaatggcgctttgcctggtttccggcaccagaagcggtaccagaaagctggctggagcgcgatcttcctgacgccgatactgtcatcgtcccctcaaactggcagatgcacggttacgatgcgcctatctacaccaacgtgacctatcccattgcggtcaatccgccgtatgttcccacggagaatccgacgggttgttactcgctcacatttaatgttgatgaaagctggctacaggaaggccagacgcgaattatttttgatggtgttaactcggcgtttcatttgtggtgcaacgggcgctgggtcggttacggacaggacagtcgtttgccgtctgaatttgacctgagcgcatttttacacgccggagaaaaccgcctcgcggtgatggtgctgcgctggagtgacggcagttatctggaagatcaggatatgtggcggatgagcggcattttccgtgacgtctcgttgctgcataaaccgagcacgcaaatcagcgatttccatgtagccactcactttaatgatgatttcagccgcgctgtactggaggcagacgttcagatgtacggcgagctgcgcgatgagctgcgggtgacggtttctttgtggcagggtgaaacgcaggtcgccagcggcaccgcgcctttcggcggtgaaattatcgatgagcgtggtggttatgccgatcacgtcaccctacgtctgaacgtcgaaaacccgaaactgtggagcgccgaaatcccgaatctctatcgtgcggtggttgaactgcacaccgccgacggcacgctgattgaagcagaagcctgcgatgtcggtttccgcgaggtgcggattgaaaatggtctgctgctgctgaacggcaagccgttgctgattcgcggcgttaaccgtcacgagcatcatcctctgcatggtcaggtcatggatgagcagacgatggtgcaggatatcctgctgatgaagcagaacaactttaacgccgtgcgctgttcgcattatccgaaccatccgctgtggtacacgctgtgcgaccactacggcctgtatgtggtggatgaagccaacattgaaacccacggcatggtgccaatgaatcgtctgaccgatgatccgcgctggctacccgcgatgagcgaacgcgtaacgcgaatggtgcagcgcgatcgtaatcacccgagtgtgatcatctggtcgctggggaatgaatcaggccacggcgctaatcacgacgcactctatcgctggatcaaatctgtcgatccttcccgcccggtacagtatgaaggcggcggagccgacaccttcgcaaccgatattatttgcccgatgtacgcgcgcgtggatgaagaccagcccttcccggctgtgccgaaatggtccatcaaaaaatggctttcgttgcctggagagacgcgcccgctgatcctttgcgaatacgcccacgcgatgggtaacagtcttggcggcttcgctaaatactggcaggcgtttcgtcagtacccccgtttacagggcggcttcgtctgggactgggtggatcagtcgctgattaaatatgatgaaaatggcaatccgtggtcggcttacggcggtgattttggcgatacgccgaatgatcgccagttctgcatgaacggtctggtctttgccgaccgcacgccgcatccggcgctgacggaagcaaaacaccagcagcagtttttccagttcagtttatccgggcgaaccatcgaagtgaccagcgaatacctgttccgtcatagcgataacgagctcctgcactggatggtggcgctggatggcaagccgctggcaagcggtgaagtgcctctggatgtcgctccacaaggtaaacagttgattgaactgcctgaactaccgcagccgaagagcgccggacaactctggctaacggttcacgtagtgcaaccgaacgcgaccacatggtcagcagccggacacatcagcgcctggcagcagtggcgtctggcggaaaacctcagcgtgacactcccctccgcgccccacgccatcccgcaactgaccaccagcgaaacggatttttgcatcgagctggataataagcgttggcaatttaaccgccagtcaggctttctttcacagatgtggattggcgataaaaaacaactgctgacgccgctgcgcgatcagttcacccgcgcaccgctggataacgacattggcgtaagtgaagcgacccgcattgaccctaacgcctgggtcgaacgctggaaggcggcgggccattaccaggccgaagcagcgttgttgcagtgcacggcagatacgcttgccgacgcggtgctgattaccacggtccacgcgtggcagcatcaggggaaaaccttatttatcagccggaaaacctaccggattgatggaagtggtcaaatggcgattaccgttgatgttgaagtggcgagcaatacgccacatccggcgcggattggcctgacctgccagctggcgcaggtagcagagcgggtaaactggctcggattagggccgcaagaaaactatcccgaccgccttactgcggcctgttttgaccgctgggatctgccattgtcagacatgtataccccgtacgtcttcccgagcgaaaacggtctgcgctgcgggacgcgcgaattgaattatggcccacaccagtggcgcggcgacttccagttcaacatcagccgctacagtcaacagcaactgatggaaaccagccatcgccatctgctgcacgcggaagaaggcacatggctgaatatcgacggtttccatatggggattggtggcgacgactcctggagcccgtcagtgtcggcggaattccagcttagcgccggtagctaccattaccagttgctctggtgtcaaaaataa

SEQ ID NO: 236465 - DNA, 894 bp, Klebsiella pneumoniae; identical to SEQ ID NO: 98252

SEQ ID NO: 236466 - DNA, 789 bp, Klebsiella pneumoniae
atgattaaattcccgactaaaaagcgcgttgatttgtataaaaatgctgtcagttctgagcaattgcatctggatctggctgcggctcaggagttcatgttcgatgcctgggaaactgatgacttggacgttgtgctgaaactcatcagaaaagctatcaagaaatccccactctgtgctgacgcatattcattctactgcgagatatctcaagaacctcctgagtcaaaaatcgggaatctggaaacggctttgtacgcagccagcattgctcttggcgaggattttcaggagttcgcaggacgtttctggggatttgtcgaaacacgtccatatatgagagcaaaagcagctttggctgatgccttatgggagtccggtaatttctacccagccatggctcattgccgcgaaatgctcaagctcaacccgaacgacaaccaggggattcggcatatattaactggttattatctcgaactggaaatgatggacgagctgacattactactggatgattattcagaagatgtgcgcccgtatcttcagtatgcacgcgccctcctcgcctacagacagtcatccccggatgccgatgatatcgctaaagcagctatcagctctaatagacacatcccaggcttgttatcgaagtgcagattgcagcctaagtctaacagtggatatattacgttaggtggaatggacgaggccattgactatgtaaaccataatataaaaccatggataagaatttctggtgcaatagagtggattaataaattataa

SEQ ID NO: 236467 - DNA, 1140 bp, Klebsiella pneumoniae
atgcgtgtactcacgctgatacgtgaaaactacagtgactttggacccacactggccgcagaaaagctcagagagcgccataatatccggctttcaatcgagaccgtccgcaactggatgacgtctgacggaatctggatcccacatgcccgacgcaagtcacggatatatcaaccccggcatcgacgtgattgcctgggggaactgatccagatcgacggctcccaccatgactggtttgaaggccgtgcaccaaaatgctgcctgctggtctttatcgatgatgccaccggccgtctgatgcatttgcggttcagcgaatcagaaacagcctttgactacatgctggctacccgggaatacattgagcagcatgggaagccggtatcactgtacagtgacaaacacgcaatatttcgcgtcagtggtccggagaaccgtaataccactgttacccagttcggacgtgtgctttatgagttggcaatcgagcttatttgtgccaacagctctgaagctaaaggccgagtggaacgtgcgaatcagactcttcaggatcgactgatcaaagaaatgcgtctggaaggtattaccggcattgaggctgcaaatgcctggcttgccactttcattgcagactttaaccgccgattctcacgtccggccaggttcccgaaagatttgcatcgtccggtgcaggaaagccccgatgaattaagagacatctttgcctggcatgatgttcgtaccgtgtcgaaatcactgaccttccagtacgataaggtcctttatctcatggacccgtcagaagaaaatagccgtcttgccggtgaaaaaattaaagtactagattatcccgatggcaccctcgccttccactatgggcaccggagccttaagtgccaggcatttgataaactggcctgtgtcgaccaggggcagattgttgataacaaacgtctcggtactgtactcagactggctcaggtaaaacaggatgagcgggaaagcgaaggcaaacgggaacgaagcaaaaaatcgcccagccgtaaggctcaggtgcgcgtccaggaacagctccgggctatcaatcccgttctggcagacccgagcttgtttgtggcaagttcaaagcggtag

SEQ ID NO: 236468 - DNA, 789 bp, Klebsiella pneumoniae
atggcccgtcggtcgaagggctggcaggatcgtcggtgcaagcgcaagcctgatgatactgaagcgctggctcgtatccataccgttatcgacgatctgcccacctatggttatcgtcgtgtatgggcactgctgcgcagacaatcagaaactgacgacatggcggtgatcaatgccaaacgcgtataccgcatcatgcgtcagaatgcgctgctgcttgagcgtaaaccggcaataccgccctcgaagcgggcgcatagagggaaagtggccgttggagaaagtaaccagcggtggtgctccgacggcttcgagttcagctgtgataacggtgaaaaactgcgggtcacgttcgcactggactgttgcgatcgcgaggcacttcactgggcggcaagtaccggtggatatgacagtgaaaccgtgcaggacgtcatgctgggtgcagtagagcgtcgcttcggtaacaggctgccgacatcccccgttgagtggctgacagacaacggttcagcctaccgttctcatcagacgcgtcagttcgccagaatggtaggactggagccaaaacatacggcggtacgtagtccagaaagcaacggaatggcggagagcttcgtgaaaacgatgaagcgcgactacatcagcatcatgccaaaacctgacgggttaacagcggcaaagaaccttgcggaggccttcgaacattacaacgaatggcatccgcacagtgcactgggatatcgttcgccacgggaatatctgcggcggcgaaccagtaatgggtaa

SEQ ID NO: 236469 - DNA, 138 bp, Klebsiella pneumoniae
atgaagcaaattaaagagttacagcgcctgctgggcaaaaaaaccatggaaaacgagctgctgaaagaagccgttgaatatggccgacaaaaaaagtggatagcgcacgtgcccttgttgccggaggatggcgaataa

SEQ ID NO: 236470 - DNA, 837 bp, Klebsiella pneumoniae
atggtcagccggaccatgggcgtgtcgcgtgcgcaactgtcactgcggattaaccgttctgccgactggcaggacaggcgctgtaaccggcgtaatgaagaagcagacgcagaaatactgtcggctatcctcaacattatcagcgatatgccgagttatggttatcgacgcgtgtggggcatcctgcgcaagcaacgtcgcacagagggacagccacctgtgaatgccaaacggctttacaggataatgagcgagcataacctgttgttgttgcatcacaaaccagagcgaccgaagcgtgaacataagggcaagatagcggtggcagaaagcgatatgcgctggtgttcagatggcttcgagttcggctgcgacaacggcgaaaaactgcgggtaacgttcgcgctggactgctgcgaccgtgaggccatagactgggcagcaagcacgggaggctatgacagttcgaccgtgcaggatgtgatgctgaggtcggtggaaaagcgcttcggcgacaggctaccggaaacaccagtgcagtggctgacggataacggttcagcgtataccgcgtatgaaacgcggaggttcgcgagagagctgaatctggagccctgcacaacagcggtgagcagcccgcagagtaatggcatggccgaacggttcgtgaaaacgatgaaagaagactatatcgcgttcatgccaaaaccggatgtgagaacagcactgcgaaaccttgcagtagcgttcacgcattacaatgaaaaccacccgcacagcgcgctgggatatcactccccgagggaatatcggcggcagcggacatcgttaacttaa

SEQ ID NO: 236471 - DNA, 1785 bp, Klebsiella pneumoniae
atgaggttcgtttgggatccaagtgacctcaatcctgaacaggcggcagcagtgacagagccatcgagcatttttctgatcgcttgcccgggtagcggaaaaacgcgcaccctgacctacaaaattgcctatgaactctctcgtcgaactgataagcggatggttgttgccattacctacacccaccgtgcagccgatgagatccaagaacgtattgaggatttgggcgttgatacttctggactatggattggtactatccatgccttttgcctggagtggatccttaagccatatggcatttattcgcctgaactagcgcgtggttaccgcgttatcgacccgtacgatcgtgagcgtctgctggagaggctgtgcgctcagtataaaggtatcactcactgggattgtgactactacgttactgaaacgggtcatcaacttggctgtgtcgatacgagaaaacatcctattattcaaaacgttttgaaggaatattttaaagagctttcatcaagccgacagatcgacttcgaacttatcctttggtatgcgtactgcttgatgcgggacagacctcctatcgcagtactgctctctcgcgtgttttcccacatcctcgtggatgagtatcaggataccaaacagattcagtactctattttgacgtcgatacttcgcgctggaaggggggagaccaaaatactcatcgttggtgatccgaatcaagcaatctatggctcactgggtggctacgctatgccattagatgaattccgtgcgcaagccggaatcccgataaaggagtttgcgctcagcctaaactatcgctccagtgagcgaatcatcagctatttttcgaactacagcgtacacgctagcaaaatcaccggtgctggcaaagatgctaaatttcccagccggattacctataatcaaaaggttacacgcagcaatgttcatgatgagattgtaaggctgattcggaagagtctagacaacggctactcacccgaaaacatctgcgtcctcgctccacagtgggttttgcttgcctccacgactcgaaaactagttgcaatgttgcctgatcagcaatttgatggcccaggcctcatacctttcagtaataacttcgataatttctggttcaaggtttccaaggttttactgacggattcttccccagcattacttatcaggcgactgcgttgggcaaacgaagtaataaaagatcttgatagtttcggcgttgatactaagacactgacaccgagaatcttgctgcgggagagtaacgcgctcacggtcaatgagttggacggactccgctacctggaccaggccttcaccgagctgctcaagaggctcaatatttctccggaaattcatcctgcgctcttgactcatcgagaggcttttttcagcagctcagctgcgcgaatagagcgtctgcaaaaggaaggggcgacatacatcaatcaaatatccgtcttcaaaaaagtctttcgtgaaagaagcggcatcactgtctccaccattcatggtgtcaagggtgccgagttcgacgtcgtcatcgcctttggattattggagggcatggtaccgcacttcaatgaagtgaatggacatgttgccgcaagcaagctcctctatgtattgagctctcgtgctcgaaaaaatcttcatttaatctcggagtcagaacgtcagagaggaagatacagtagctattccgcgaccgaattactcgcggcctgcatctttaattatgacgaggagtaa

SEQ ID NO: 236472 - DNA, 846 bp, Klebsiella pneumoniae; identical to SEQ ID NO: 236298

SEQ ID NO: 236473 - DNA, 192 bp, Klebsiella pneumoniae
gtgcagtgttccggctactcttttaccatgtatttcgtcactatcaaggccaccgcagatacgataatgccctggatgtttgccgcaggttactttatggccttcacatgccatatctttatcgaaaaattgatggttggggcatcctccaagaatcctgccaccgcaagcggtcttatcacccctaaataa

SEQ ID NO: 236474 - DNA, 423 bp, Klebsiella pneumoniae; identical to SEQ ID NO: 183975

SEQ ID NO: 236475 - DNA, 2115 bp, Klebsiella pneumoniae
atggctcgtacaacacccatcgcacgctaccgtaacatcggtatcagtgcgcacatcgacgccggtaaaaccactactaccgaacgtattctgttctacaccggtgtaaaccacaaaatcggtgaagttcatgacggcgccgctaccatggactggatggagcaggagcaggaacgtggtatcaccatcacttccgctgcgactactgcattctggtctggtatggccaaacagtatgaaccgcaccgcgtaaacatcatcgacaccccggggcacgttgacttcactatcgaagtagaacgttccatgcgtgttcttgatggtgcggtaatggtttactgcgcagttggtggtgttcagccgcagtctgaaaccgtatggcgtcaggcaaacaaatataaagttccgcgcatcgcgttcgttaacaaaatggaccgcatgggcgctaacttcctgaaagttgttggtcagatcaaaacccgtctgggcgcgaacccggttccgctgcagctggcaattggtgctgaagaaggtttcaccggcgttgttgacctggtgaaaatgaaagccatcaactggaacgatgcagaccagggcgtaaccttcgaatacgaagatatcccggctgacatgcaggacctggctgatgaatggcaccagaacctgatcgaatccgcagctgaagcttctgaagagctgatggaaaaatacctgggtggtgaagaactgactgaagaagagatcaaaaaagctctgcgtcagcgcgttctgaacaacgaaatcatcctggtaacctgtggttctgcgttcaagaacaaaggcgttcaggcgatgctggatgcggtaattgattacctgccatccccggttgacgtacctgcgatcaacggtatcctggacgacggtaaagataccccggctgagcgtcacgcaagcgacgacgagccgttctctgcactggcgttcaaaatcgctaccgacccgttcgtgggtaacctgaccttcttccgcgtgtactccggtgtggttaactctggtgataccgtactgaactccgtgaaagctgcacgtgagcgtttcggtcgtatcgttcagatgcacgctaacaaacgtgaagagatcaaagaagttcgcgcgggcgacatcgctgctgctatcggtctgaaagacgtaactactggtgacaccctgtgtgacccggatgcgccgatcattctggagcgtatggaattccctgagccggtaatctccatcgccgttgagccgaaaaccaaagctgaccaggaaaaaatgggtctggctctgggtcgtctggctaaagaagacccgtctttccgcgtatggactgacgaagagtctaaccagaccattatcgccggtatgggtgagctgcacctcgacatcatcgttgaccgtatgaagcgtgaattcaacgttgaagcgaacgtcggtaaacctcaggttgcttaccgtgaagcgattcgcgcgaaagttaccgatatcgaaggtaaacacgccaagcagtctggtggtcgtggtcagtacggtcacgttgtgatcgacatgtacccgctggagccgggctctaacccgaaaggttacgagttcatcaacgacatcaaaggtggtgtaattcctggcgaatacatcccggccgttgataaaggcatccaggaacagctgaaagctggtccgctggcaggttacccggtagttgatatgggtatccgtctgcacttcggttcttaccatgacgttgactcctctgagctggcgtttaaactggctgcgtctattgcctttaaagaaggctttaagaaagcaaaaccagttctgcttgagccgatcatgaaggttgaagtagaaactccggaagagaacactggtgacgttatcggtgacttgagccgtcgtcgcggtatgctgcgcggtcaggaatccgaagtaaccggcgttaagatccacgctgaagtaccgctgtccgaaatgttcggttatgcaactcagctgcgttctctgaccaaaggtcgtgcatcatacaccatggaattcctgaagtatgatgatgcgccaaacaacgttgctcaggccgttattgaagcccgtggtaaataa

SEQ ID NO: 236476 - DNA, 252 bp, Klebsiella pneumoniae; identical to SEQ ID NO: 223499

SEQ ID NO: 236477 - DNA, 1659 bp, Klebsiella pneumoniae; identical to SEQ ID NO: 215389

SEQ ID NO: 236478 - DNA, 198 bp, Klebsiella pneumoniae
atgacgaagaatatcttcatggcaacagagcacaccatgacttgctgcgtttttcagaagcgtttcatagttgagcagtacttttccttcaatagaaggctcgacttctgcacctttggtaaagcctcggtttggattctgtccaagactattaaggcggctaccagtgcgcagaccagagaggtttacaagcggtaa

SEQ ID NO: 236479 - DNA, 312 bp, Klebsiella pneumoniae
gtgtttatggcgctgaagtggatacaaagtcaggcagattataacaatgtcatgcagcatttgacgttgtcaccaggggagaagaaaggtaataaagaactaaatgaaaaagatgtgattaactttttaggtatcggggaacaaaaattgtttttttacaccaattatggcgaaaagctcaccttactgcataataacctcccggtttttgttgacccggatgagccatttaaacccatacctgacatcctgatgtcagaatatcttgccatgatcgacgaccagcacccgacgggtacaatgactgcctga

SEQ ID NO: 236480 - DNA, 450 bp, Klebsiella pneumoniae
atgtgcaataatattaatctttctcaggaagaaaaatttatcaagttgattgataaatatatcactcagcatcgtgatcatactatcaatgctgttttttaccgaaagctgtatgtgcttttcgtcggatatcatcttaaatattattactcaagtaagcaatactgcaactcgtgttttcatgtggataatattatgcagatgttcacaggtgtagtttcttcactcaaggctaatgtgctaacaaagctcaacaatagtcatacaatgcttcattgcttgaacgggcttgtggattacatttccgcttgtaagcatcccagcttcagttccatgcactttttgagtgttccggtttttcagccatcagccgatactcttccggcgtcaggttattcagggattcatgaggccgctcgttgttatattccatcagccagcgctcggtaa

SEQ ID NO: 236481 - DNA, 1044 bp, Klebsiella pneumoniae
gtgaacattcaagcagtagacattttttgtggcgcgggtggtttaacgtatgggctgagaaccgctggtattaacgtgtctcatggcattgatattgatgagtcatgtcgttatgtcattgaaaaaaataatgaaaatactgagtttgttcataggtcagtgactgaattgtcatctgatgaagtttcctcaatgtttcaaacaggaaatgtgaaactattggccggctgtgcgccatgtcagccattttcgaagtatcggaatcccaatagcaagaaggatgactccaagtggcggttacttcgtgaatttgaaaggttagtgattgatattaatcctgaacttgtaactatggagaacgttccgcaacttagaatccatccagtttttaaaggatttgttaaaacgttgagggctcagggttatcatttatggtatgacgtagtaaattgctcagattatggtctacctcaaaatagacgccgattaatattgattggatcacgattgggcccgatctcttttgatcaagaaaaaaaagatcgtaaaacgacagttaaagaagcaatcggtatgttgccaaaggtcgaggctgggcaaaaattagcaactgatgcgcttcactgttcgccaaaattgcgggaattaaacttaaaaaggattatgcactccctacccggcggcacttgggatgattggcctgaggaaattagagctgaatgccataaaaaagattcagggatgacctataaaagtgtttatgggcgcatgatatgggatgatactagtccaacaataacaacccaatgttatgggtatggaaatgggcgttttgggcatccagaacaaaatagagctatcactttacgtgaggctgctatattgcaatctttcccattggaatataatttcttagatgggaaaacccctttctcgttccaaaaattgggcacgatgattggaaatgcagtccctcctataatcggtcatgctataggagagactttcattaggcatgttgcgcagataaatagccacttgtag

SEQ ID NO: 236482 - DNA, 690 bp, Klebsiella pneumoniae
atgagtcttattgacttaagagatgagtatgaagaaagagcaagtgatataggtgagatcatctcgctagctttggctatttctgaacaatctgagagtttagatcaaaatactcaacagagcttagcatcatgcttagaaacccgggttaatattttaaagtcatctcttcacatgatgctatacaatcaagttgagaatactgcaagaggatgtattgaatctatttatgatcatttacaggatagcgaagtaagctattcatccttaaaagataaatttcagataagcatattgcatcgtatcatttcagataatgaaacaggtaaaagcctatatcaaaaaattggcagtgatatatctaagaagataatctcagcatctatgaatattagaaaagagtttaatggcaatgtatgcaaaccagtgttgcataagataactcaagcttacggcattcaaattgcaacatccccagagtgccgtaatggcgctgatcttgatcttttaaaggacattcgaaatgaattagcacatggtagtacaagcttttctagaaagggtcaacttgaccctttaggagaggttataagtagagctcaaagaatagacatttacttacgtctactaataagctctactgaagaatatattgctacaagtggctatttatctgcgcaacatgcctaa

SEQ ID NO: 236483 - DNA, 1158 bp, Klebsiella pneumoniae
atgactacactaaaagaactcaatgaagagctcaagcagctcaccgatgatggcgataaaacgaggaaaaaagcagaaattgcggctttggtagccaaagccgataatgacataagacttgcacaaaggaatatcggctacaacgtcagggagtggaccgtcgaggtcattgtccagaaatacggcgagaatctcgatattgatgcgaacgagttatttatcccagattatcaacgtgattacaaatgggatgtgaaaactgcctctagattcattgagagtatattactcgactttcctattccttacttatacatcgctgatgtattcaatgaagacccagaactggatggaagagtagaaatcatcgatggttctcaacgaattcgtgcaattcattatttttggaacaatgaatttgaactgaaggatcttaaggaacttaagagcttagaaggcttcaagttttcagatcttttagcgagtcgacaaagacgttttctccgggcttcgctaagattcattgagttaaaaggtgatgttgaagaacaacaccgaagagatctttttgaaagaataaattctggtgtgaaaagactcgaggcaatggaagtaagacatggttctgatgctgcagcttccattttctatagggatgtgatctctccatgttcagttaatccattattctcacagttagcaccgttatcagatcgtaaacgttctaatggcgatcatagggagcttgtattacgtttctttgcttatttaaatgacttagataattataaaggtttcgttgctccatttattgatcaatatatgaacacccaagcaaatcaagtaacacagcaaaatgtaagttcatatactgatgaatttgaaaaaatgcttcaatttgtcaacgctcattttcctatggggttcaaaaagacacctacaagtaaaacaacccccagagctaggtatgaagcgattgcagtaggaacagctttagctttaagaagtaacccgcagctcctggaaccagcccagcctatttctgactggttattcgaggcagaatttgaaggaattgtaacagcagatagtgccaacaacactacgcagctcaagaatagaatattctatgttagagataagttattaggggtctga

SEQ ID NO: 236484 - DNA, 912 bp, Klebsiella pneumoniae
atgaaatgtttcattgcaataccaacatataatggcggacaaatctggcatagtgctgttaacagtattaaaaaaaatgctccggcaaatacgttagtgcatgtaattgattctgggagtaaagatgatactgtatcgatagccaaggaagctaattttgatgttatatcgattgcgagtaatgatttcaatcatggcgcaacaagaaatatggccataaaaaaatatgtaaaagaatatgatatcgttgtgtttctaactcaagatgctattcctgaacctaatttcataaatactataataaatgtgttcagtgatgaaaatattgcttgtgcttacggcaggcaattacctcatgaggacgcgaacccattagcaagacatgcgagaggttttagttatcctgataagtcacatatttgtgatgcctctgacataccccgtatgggaataaaaacagtattcatgtcaaactcattttcagcatacagattatcagtatttgaagagttaaatggttttccatcaaacacgatactttgtgaagatatgtatttcacggcaaaagcagtattagcagggtacaaagtagcatatgtatctgaggcgcgagtaaggcattctcacaattacacgccaaaagaggaatttaagagatattttgatattggtgtgtttcatgagatggagccttggatacgcgaagccacaggtggagctggaggtgaggggaaaaaattcatcatctctgagtttaaatttttaattaataatgcaccgttatggataccgatagcattaatcaataatttcatgaaaatattaggttataagttaggccttagatttaaaatccttccgaagaagtttgtaaaatctctaagtatgcacaaacgatattgggataagtaa

SEQ ID NO: 236485 - DNA, 2511 bp, Klebsiella pneumoniae
atggttgattttggaaagctacgtactcaggcaaagaaagcagtgccaattgaacctggcgaaatatttcgccgactgcctaaacctgaaggtttcaatgatatttataccagccaggagcaggtcttagagaattggtttggtcgaagaaatgaagctgatgttgtgataaagctccatacaggtggagggaaaacgcttgttggtcttctgatggcgcaatctacgcttaatgaaactaaagaacctgtcctttatcttgcaccaacacgacagctggttaagcaaaccttagagaaagctaaggcgcatggaattgcagcagtaccttacgagaaaggtaaaccgcttgctgaagatttcatcaatggcaaagctgttatggtggcaacctacaaagcgcttttcaacgggcaaagtaaattcggggttcgtggaggcgctagacccccggtaaaagtcggcgctgttatccttgatgatgcgcatgttgccttttctgttgtgcgcgagtctttcaccttagcggtagatgcagataataattctgagtgttatgaagaactgaccagcttattcagaaaggcttttcgggatagtgatcggatcggaacattcgacgatatcgtccaaggctcaagtggcggcgttatagaagtgccatattgggcatggcatgagcagattgacacggtaagggagtatctgcgggcagatgcggataattacgctttcgtttggcctcttctcagagacaatctacatttgtgccatgctttgatcagccgtaatgctttcactattactcccgtgcttcctttggtcaacgagttccctacgttttctgactcacctcgtcgaatatacatgtcggctacaattgcggatgacagcgaaattgtccgaaccttcgatgcagatccacgtttcgtgggcaacgcactaacatcgcgctcacttgctggtattagtgagcgaatgatacttattccagatcttatgccattttcattcgagacgattgaagctgtgagcaccttactcgaatggacggctgagaaaaggaatttgggagccgtgatactcgttcagtctaataacgctgcaaagcgttgggagaaggttgcaacgttcgctacaaaatcagaagatgtcgaccatttggtcagacaacttcaggatcgagagactaatggacctgttgtgctagctaaccggtatgatggtatcgatctccctggcgactcttgtcggttactggttatcgaaggattaccggctgggaccactgactatgagctcatgcgtgcagcgacactctatggtggagcatcaatcagccgcatgttggcacaacggattgaacagggaataggccgtggagcccgtggttctggcgatcactgtgtggttattttagctggcgcggatcttgccggatggattgcaaaagatgcaaacttccagttgttgactagcgctacacgagctcagttagatataggctctacagtcagcaaagaggtgaaggacaccaaggagctggcgaggacaattgctaccagctttgatcggaatccggactggatcgagtatcacgcagaaacactagcggagagtttggatcaggaacaagcagatccgaatcgtttcgaaattgctgctgcagagcggaaggcatttaacctgtgggttgatggatatcatgacaaggctattactaaactagacagcagcatcaattctgtgaaatcacttgattcacagactcgcggctggttgcttcaactggcagggcgtatagcgaaccattgggggcaaacagaacgtggtgatgaactgcaacaaaacgcttatggaaataaccgaaacctcttacgtccccgagttgttcctccataccgtccgttggccactccgagcgcccaggcgtccttaattgctcaacaatttcagggctaccgaatccgtcgaggtttaatcaaccgatttgagaatgtggtctcacagttacatcaaaattccacagcaaatcagtttgagcaggcgttggtggaacttgcacaaatgcttgggttgaccgccgaacgattcgatgatggaggaaaggggccagatgtactctggttgcttcctcagaaagtaggatttatcattgaggctaagagcaggaagctaaaaaagaactctctgacgaaagaaaaccacgggcaacttcttgttgctgagcaatggttcaatcaaaattatccagcttatgaggctgttcgtatttcggttcatcctacgaataaagcaaccaagtcagcttcggcaactgatacctacgcattaacgttcgaaaagctcgcagcattgataagtgataccagagcgttgctcataaagttgtgtgagtcacaactggacgatgttgagcttgctgcagagtgtgcccgcgagcttaaaatatcgcctgttcgggctgataagttggtacaaaactatctctcaaggttcgttgaagaataa

SEQ ID NO: 236486 - DNA, 2142 bp, Klebsiella pneumoniae
atgaactacgaaatgatcaagaatatcttggcgaaactcgctgaagagaatgccaagacagtcgatgtgctgctcgccatcaataccatcgtcaacagaagcaattcagagtgggagggccgcgatttggtaatccgagcactcgacaaatttgagttttttgactctgtcgaacagtcactcctgctaaacatggtacgagctgtcggattattcccttatatcactcctcacctcagcagcatggcgatttctgaccgcttagcttacgaagcacacagggtcgagggtgtagaacaaggcatggtatttcatcatctgcaggcccatgttttcagcttgatcatgcaaggccggaacgtagtgctcagtgcttctacaagcgtcggaaaaagtctagtcattgacgctgtactagcacagcgacggttcaaaaaggtggtagtgattgttccgaccattgcgcttatcgacgaaacccgccgtcgactagtcaaacgttttaaggacttcaacctgatcacgcatccgagccaagaatctgtggttgatacaaccaacgtctacctgctcacccaagagcgtgtcatccagcgtcctgaccttgctgatgtggagttctttgtcttagacgagttctacaaaatcgacttggggaactcacctgacgaaagcacgcgcgctgttgacttgagcttagcattccacaagcttgcaaagactggtgctcaattctacatgctcgggcctcacattcagaaaatctctggtttggatgactatgagtaccacttcatcccatccgactacagcactgtcgcagtcgacattcaaaatttcaatctggagatgcgttccgaagagcgaaaggaaaaattgcttgagttggtcacaactctagactctcctactttaatctactgtcaggccccccctagtgcgaacagggtcgccgagtatttaattcaagaagccgggttgaagccagtgccagaaacgcaggaaatagctgcatgggtctccaagcactaccaccctgaatggaacgttgccaaggcattatctctgggtatcgggattcaccatggaggagtgccgcgtgcattgcaacagtacatcgttaagttgttcaatgatggcatcatcaagcgaattatctgtacatctacgatgatcgaaggcgtcaacacatcggcagagaacgtgatcatttacgaccgccgcctaaatacttcaaagttcgactacttcacttacaagaatatttccggtcgggcgggccgtatgaataagtacttcattggtaaagtcttcatgctcgaagcacctccccttgagcagggtctcaccgttgaatatcccatcggccatcaggatgaaaactccccgataggactcatcatgcaactggagaacgaataccttactgatatttcacgtggtaggcttcaagatgcatacgccaacccgatactatcgccgtcaaccctgatagaaaatcgacacgttccgattgagcggcaagtcgaggtcgcagaaatgatcattcgtgacctaccggatggcagcaagcttcttgactggaaaggcatccctgagacgaatcagctcaattacctatgtgaactagtctacagtctggaaggcggtaatctgatggactatgggatatcatctagcttgcaattaatgtggcacatcaatgagctccgaactcagaaaaatctgcctgcttacctaagagacgcggtggagaatcgacgagaggaacacactcccagtgaagcgatcaatctacgcctgaaattcatcagaaatatggtgtgtttccgattgcctcgggacatcatggccgtaagtaacattcaggccgacgtgctggcgaaaatagggatcgagccgggtgattttagcttctttgctgagcagcttgaaaatatgttcctcgacccactactcaccgcgttggatgaatacggaattcccacacagatctcgactcagatcaagaacctcatcttgccatcggaacatctgaacgacctactggcgaaacttcgggctctggctcccagagtagagagcctccaactgacaggttttgagaaaagcttaatgagctgggctgtgtccgaaatgtag

SEQ ID NO: 236487 - DNA, 1629 bp, Klebsiella pneumoniae; identical to SEQ ID NO: 112242

SEQ ID NO: 236488 - DNA, 765 bp, Klebsiella pneumoniae; identical to SEQ ID NO: 112243

SEQ ID NO: 236489 - DNA, 1308 bp, Klebsiella pneumoniae
atgcctaattttttcagggattcgaatggtgctctgaatctagccgcacaaacgttagtgccaaaccaaggctttcgtgcaggtcaacttggtgccctgcatgctgcaatggcgcattactcggtctatgccgacccagcgataatctgccttcctactgggtacggtaagacatctgtaatgatggcactgccgtttctggttcagtcaaaacgagtgctcgttgttgagccatctaatgcgctacgcaagcaggtgtcatcgcactttgcggagctgtctaccctaaagcgtatcggtgctattccggtggatcttgctaacccatcggtgctccgacatgaagggagacctcaatcggaggaagattggcaggtcttagagagccacgatgttgtggtttcgaccccaagtagttcttcacctgcggttgcacctggcgcctcgccagacttgttcgatttaatcgtatttgatgaggcccatcacgctcctgcgagtacatgggctgcatacttagagcactacacgaaagcccggttcgtatttctgaccgcaacgccttttcgccgcgacggccaagtaattccagggaagctggtctaccgctacccagtaatgaaggccgtagatgaaggagcgtttcatcccgttgccttccgagctgcgcctattcaaaacacggttgatgatcatcatattgacttggtcattgcagagactgctgtaaaccaactgcatctggacttagctgcagggcatgatcatcgcctttttgtgagggctgcaacgatcaatgcagcgagagctttggttccaatctatcaagcgcttggagtcaacgttgaagcagttgatagtaagatcacgaagcgtacccaggatcgttgcgagcagcgtttggtcagtggggaactgcaggggatcgtgtgtgtggatatgttcggggaggggtacgactttccgaaactgaaggtggccgcattgcacactccacatcgttcattggtaccgacaattcagttcattgggcgtttcgctagggtggataaggcaactggccaagcgacattgatcgcgccgctcccaagagttctggaggcacctagcgctcttctgaaagagggggtagatcttgcgagtatgatagatgctgcagcacaagcagagatggcaggtgatgctgctgagttagaaatggttgagcggctcaagctgcggcgaatggccgagtcaaactacgatgcagtgtcccctttagggaaggtgcgaataagcaggtcatttcttcccaagctgactcgctga

SEQ ID NO: 236490 - DNA, 591 bp, Klebsiella pneumoniae
atggattggttatggggcgttgaaaaattatcacctgcggtagttgggttccttggtgcctggctagggagtcgctggggggtaactaaattcaaacgtgaaaagcactgggaaaccaagatcaaaacatatgaaacagtgatccattgcttcgagactattggttactggggagacaatgaaggtaatgaggcatttttagaagttcgtgttggagggttagaggagggggtagagcagttccaccatgctatgcgtcagttagcacaagttggagtgactggagcaatttatttatctcctgaatttagaaacactgcttatgaaaaacgcttaaaaattcaacaaatgtatataggtagaatacgtgaaataaatgacgaacttggtcatggagaagattacatatactacaataaggcagaattatatataaaaatcagcaaattagcatatgagtcagtagaggagcttaatctgattgctgaaaaagatattggtgttgaacgtaataaacttctccctcacttgtcagtaaaaatgaatgagattacgaatgctattcgggattttcagaaggatttgcgttaa

SEQ ID NO: 236491 - DNA, 1203 bp, Klebsiella pneumoniae
atgagtaaaataacggatatttttatagaaaaaatgtggggttataaaaacgtccatctggaattaaatgaatcgattaactttttaataggggttaatgggtcaggtaaaactacaataataaacattattagtaatgcactttctgtagatgttgggcagttgctggcgatgccatttagtgaactagcaattttatttacagaaggagaaatgattcgggtcgaaaaaaccagtaaaacaaatgtcaacttctttattaatttcaaggattctatattttcattcaatcttgaggatgatgagtataattttgcgatggatcaaagggttgaggaggcgaagtctataattgctaagttctcgatgatagattttttgccattatcccgaaccgggagaaaagaatatgaacacgatcctttttcagactcaccatccgatccggtaaataataaattagatataataaaaaatgaacttgttaataggttctctcgtcaatcaaaagtatataatagaattgctagcaactttcagagagatatattcaataaattactggaggttcccggagaagatgaacttaaactttttaataactattctaacctagataaagaagaggcttcccttcgggaaatatctaattttatgtctccccaaaaagagggggttaccaataaaagattggaaaactatttccataaattacgcggtgtaatgtctagttttgaaagaaaagagcatgatttttcagtgactgatttagggataatgtttaacgcatggaggaccagttcattaattgcagattatgaaagtcttaaaaggaaaaaggatgatatatttagaagccaaaatgaattctttgaggtattcaaactctttttccctaaggataaagagataatactatctagtcaaaatcaattagtaatgaaagctaaggatggtcatattagcttgaatgaactttcatcaggcgaaaagcagatgataattttacttggtcagatttatctcagtgaacgtaaaccaattctctatattgccgatgaacctgaagtttcgctgcatgtaaaatggcaagataaaatagttgatgctcttttgactatcaatcctaaagctcagtttttattagccacccattctcctgacgttattgggagaagaagagattttgcgttaaaggtatag

SEQ ID NO: 236492 - DNA, 156 bp, Klebsiella pneumoniae
atgacgagttcgcagcccgccggatggacggcggccgagttggcgcaggcggcggcgcgcggacagcttgacctgcattaccagccgctggtcgatctgcgcgaggcactgttgcaaatagtcggtggtgataaacttatcatccccttttgctga

SEQ ID NO: 236493 - DNA, 1413 bp, Klebsiella pneumoniae
atgatttgcccccaaagttatcggtcattgagctacgaggaaaccagccgcgcgagagcaggtttggagggggtgcgattcttcaatgtcggattaaaaaatacgacattcaactcacaaagtgaaacataccgtacgttaacaggaccggcagcggaacgtgcggtaacggctggtgatagccgggcatactctcaagggcacttctttggcagcggctcgagcggcggagaaaaagagaccatcggagctagcagtagctcgcgtatttggagtaatcagcgtctctccatagcagaatttaaccagtgggtcgctcgattagatggtcgacttgctggcaatgctcccttctcagaaacacgcctcgatgttattcggtcggctacgacgttgcagaagctaccagacttagtgattgcagggacctggcccagagcaggattcaaggcaaatccgaggattaggattcgtcgttctgaggatcaacgcccgctctatagccgcctcactgaatgggacctagcagactttgactgcagacctttagaaggccaattactcttcagtattcactcagaggaagcctgtgccaatatgcttttttcgccccaggggcgaatggtgatattgcttgatcagaatgtggttttggagatcgaatcagctagcgaacaatggatgccgttagctgactggttgagtgaacacccgccgatgttctatgcctccgataaatcaacctttgaagggctgaatttaatgcttgcgccgcagttacaggcagtttcactaacaaaggacgatacgaaggtcattgattgggacgagtgcgaaatcaaggtcgagtttgtcatcgacaatgacactgaaaaagcacgggaacagcgtgcagagctacagggaaaaaggactgtacaggaacatctcgaacattacctccttggtctccctaacgtattcgtattgttttacgaccaccgttctggagaggcagccgactatattgccgtgaccgtgggggccaatggcgtcgtggacatcacgttgtaccactgtaaaggagcaggaggcgcccccagcggggggcgagtggatgatgtgtacgaagtcgctggtcagttggtgaagtccgttttctattgcgatgtatctgtacttcttgcgcatatggaggatcgaatgagtcaacgttttaagtcgccgtctaggtttgttgtgggtgatctgcagacactcaaggaaagactttacgctactcgggcaacccaacttggattcactgtagtgggcgtgcaaccaggaataagcaacgctgcaatcgatgcccacctcgcagatctaatgtcattcggaatctcttatgccatgcagggaggcgcaacaagagcctattggttagtgagtgaatag

SEQ ID NO: 236494 - DNA, 360 bp, Klebsiella pneumoniae
atgcagaaagcaacccgtgtaatcaaccataacatcacggaaccctggtggggcctcagacgcaacatcacgccgtgttttggtgcccggctggtacaggagggtaaccacctgcattatcttgctgaccgcgccagcattgccgggacatttaatgacgcagatttacgccatctggaccaggcatttccggtactgatgaagcagatggagcttatgctgaccagcaatgaactcacgccccacattcagcgctgcatcacgatctacgcaaaagggctgatatgtgaggccgatacgctcggttcctgtggttatttgtatatcgtaatttatccggcgtctgcaacaacagcataa

SEQ ID NO: 236495 - DNA, 483 bp, Klebsiella pneumoniae; identical to SEQ ID NO: 187891

SEQ ID NO: 236496 - DNA, 234 bp, Klebsiella pneumoniae; identical to SEQ ID NO: 112245

SEQ ID NO: 236497 - DNA, 480 bp, Klebsiella pneumoniae
atgacagacattattaatattaacgataacaatcagcgacctctgcaggctggcgagaacggttctgcacctgctctggcagccatacccgtgctggacgaacaacgtgtgggattctggccgcagcacttcggcaatatccctcagtggataactcttgaaccgcaggtctttgcgtggatggaccggttctgcgctgactacagcggcggtatctggagtttttattctctcagcaacggcggggccttcatggctccggaaacggacagcgatgccttctggtcgctgtttaacgccatgaatggcaatgccgcagacatgagcgccgaagctgcagggattgcggtctgtcttatcgcttacagtcatcacgcatgccgcacagaatgcgatgccatgacggaacattactggcgtctgcgtgactatgcgctcaatcacccggaatgcaacgccatcatgtgcattaccgactga

SEQ ID NO: 236498 - DNA, 822 bp, Klebsiella pneumoniae
atgcgattagctagccgttttggtcgggtgaaccagattcgccgtgaccgtcccttaacccgcgaagaactgatgcagcatgtccccagcgtcttcggggaagacaagcacgactccagaagcgaaaagtacacctacatacccaccattaccctgctggagaaccttaaacgcgaagggttccagccattctttgcctgtcagtcacgagtgcgcgaccagagccgacgggaacatacaaagcatatgctgcgcctgcgtcgtgccggtcagataaacggtcagcaggtaccggaaatcatcattctgaattcgcacgatggcgcatcaagttttcagttactgccagggatattccgaagcgtctgcaccaattcgctcgtttgcggacagtcgtttggcgagatccgcgtgccacacaggggcgacgttgtcgggaaggtgattgagggggcctatgaggttctcagcgtctttgagcgggtggaagagaaacgtgacgccatgcagtccatgcaactcccgtcacccgcacaacatgcactggctaaagtggcgctcacatatcgttttggggaagagtaccagccagtgactgaatcgcaaattcttgcacctcgccgctggcaggacgagagcgatgacctgtggaccacttaccagcgcatccaggaaaacctgctgaaaggcgggctaagtggccgtaccgcgcaggggaaacgcacccaaacccgcccagttaacggaattgatggcgacgttaagttaaaccgtgcgctctgggtgatggcggagaacatgctgaacctgttggacaggtaa

SEQ ID NO: 236499 - DNA, 213 bp, Klebsiella pneumoniae; identical to SEQ ID NO: 191575

SEQ ID NO: 236500 - DNA, 360 bp, Klebsiella pneumoniae; identical to SEQ ID NO: 187887

SEQ ID NO: 236501 - DNA, 459 bp, Klebsiella pneumoniae
ttgaaaaatgtatcactcagcatcctggtattggctggcagtctgctgccggttatggcatctggcagtcaggggacctggacccggagttggggacagggtgtatcagagtttgttatcaaaggaaaaggtcagtcacaactgtctctgagttgcgaggattatggctcgcaaccggccacggtcatatttactgacgcaagcggacatcaggtcagtatggatgaagataaaagccttcaggtcagtatcgatggtggggcacttattgatatcagcgaatctggcagtcgcgtgggcggtaataacctggcgctggcctgggctcagttacgtaatggcaaacaggtctcagtgacaggagacggtgttaagcctgccacattcacgctggccggtgcggctaaggtactaccggcattcgggacacacggctgcgtgggtaaagatgcactctag

SEQ ID NO: 236502 - DNA, 678 bp, Klebsiella pneumoniae
atgtctgaacagaaacaacgctatgaccgcctggcaagccgtctcgccatactggtcagccgcctctttatgggagaaacgctcagtgtcaggcaacttgctcaggagtttggcgtctctgagcgtaccgtgcagcgcgacctgcgtgaacgcctgcgctatatcgacacggaatattccgggggtaattttcgcctgcgggatgcacggggcccctttcgcactaactgcgacattatccgctttgcccagataacccaggtggcacattactttccggcacttgaccctaaattgttgtcggtcttgctcgacagcggccaagactccccctgcattatctggaatacgccaccccgtcaggctccggcgttgtttggcggttttcaggtcattatccaggccatcatcagcagtcgccgcattcattttctgcaccacggacaccatcagtccgccgttgccccttaccggcttatctgtctggaaggcgagtggtacctgacggcaataactggcgagcggattcaggtatttaccctttcagccatcaccgatgtggttatgaccatcgggggcttcaccagaaacaatcatatccggcgaatttttgaagacccgcgatttattcaggccctgccgcattttcattacatcagcaggctcatccgggaatga

SEQ ID NO: 236503 - DNA, 729 bp, Klebsiella pneumoniae; identical to SEQ ID NO: 187884

SEQ ID NO: 236504 - DNA, 1164 bp, Klebsiella pneumoniae
atggctatttgtaaaagaaataactgtacgctctcaattggtgaattacctgatgagcgtaaattccgcttatgttctgtacattatcagggtaagctttctaatgcagctaaaagagcgcaaaggtggaatctgacgtgtcagtacccgccctgtggtattagcctgtctggtactcgcaatcaacggtattgttgtattgggcatcgtaataaagatagaaggctcatagatgacgatgccattgtcagtctggtaaaacattcttactggatcaacgtggagtccaagctaaagaataatcccctcgggctgggaagtatcaccagccctgatgacattgctgatctcatccggttgtaccagcgcaaagcagactaccagaaagcttacaatactctaaatgggcaaagggttattgattcacaggggcaggttattaaacgcctgataccctggctggagctggagttatgtcacatatatccgaattccaaagggggggccaatacagcggataacatcattattgcccctgcgttgattaacaggatgatgaaggacactattcccgtgagcaaaacccgaggaacgttcagcggcataaaagcggcaggttctcccctgcctgtaaaatcgacgttattaaaggcgctcacgatgcaatatggtcaggatgaaatacaggaagcgctagcctctgtaaaacatgtgacctttgcagatctgagtgtaccacgcaggctgtttggtacggacatttatgcttatccaccattactgaaacttttaaacgatcaggcaatgcgcttgggtctctggcgtttgagggagtccattaattctattgaaagcagtcactggctgtctgcaggtcctgcaaatgagttatttgctgctgctgcttttcatgccatgttaaatggggataaggatgacttaattgaggtattttcaagtctgcacgaagacataattgaacgagctaggaataaagaaaaattaaaccatgattattatcaaaacattctggaacggtatgtatcccgttatttccaaatagacttaaacaatcaggagtcatgtattttattttacaattcatttttcacagtgccgcctttggacaaacatggggttttaatcataccacatcacttctaa

SEQ ID NO: 236505 - DNA, 234 bp, Klebsiella pneumoniae
atgaacactcaacacattaaaatcctgcgtatgtctagtgttgtcaacaagataggcgtagcccgttctaccatctacgactggattaaccccaagtcaccacgatatgacgccacattccctaaacaacgtcgcctaggcatgcaatctgtcggctggcttgagtctgaactggatgagtggttgctgaaacgtcatctggcatcatcaactactattgccgaacaaccataa

SEQ ID NO: 236506 - DNA, 723 bp, Klebsiella pneumoniae
atgacagacgatagtgttctggatggcatttttgattcagtaaagagcgaagctgagcgttttatatcgtgctacagcggtagtgatgatgatgatgtcagtagttacaatgaactccgtgaccggtgcgagagtaaagcaaaagaaaaaattaataaattcaaggaggaaggctgccacatcctggatgatgattttgaatgcatgctttacgatgctaatttttctgcacaatggaatggaaagtttggaacgtatcttgccattgcattcttcttttaccactgggggcagtattgttattcctctgggcaccggcgtgaaggattgctatttatggcaagagcagctggttgtggtggagtctggcagggggctgggctatacgctgaccgtgtagagactgctgaattggcgttaaagaaaaagcaagatcatggaaagaagggaggagaggctactggcttggctttagcacccgcacgggatgagttgaagcggttgcttaaaataaactgcccggcagaaggatggaaaactaaaactgcagcaatcggtgccgttgtagatcaacttgaggtttttgttaaaaaacacaaaataaatttgaaaaccgataatcttgataatgccatattaacatggtgtaagagatatgatgatttacgagacgtattggagagctctttaaaaaagaacatgaaaaataaccgcgtgggttga

SEQ ID NO: 236507 - DNA, 2157 bp, Klebsiella pneumoniae
atgataaacgtcatcaatggttcaacagaaaaacctatgacatcgcaaacattgcgtgaatggcttacatctaaagataacttagatggcactttatacataggttatcctattatcggtactgtagatggtgcatatgaaattgatgctcttttaatatcacctcaactcggagtcttagcttttaatctcattgagggaaataagcttccagagtctattgatgatatacaagatgaatgttttactttactcgagtcaaaattaaaacaatataaagagctcatggagaggcgtagattattagtccctgtaaatgtaattacgatagcgcctgtattaaaatcagactttgatgatatagagggcgattatcctattacaactaatcagcattcattgctgacctatattgacaacttagaatgggatgaaaaacaacattatcctcatctagtttctgtgattcaagcagtatctagagttaaggtggctaaaaaacgagaaaatgtaactaaggatgactctaaaggtgcaatccttatcaaactggatcaatcaataactaatctcgatagccaacaaagcaaagctgtgcttgaaacagtgaatggagtccaacgaattagaggccttgcaggctcagggaaaactattgttctagcaaggaaaatagcatatttatatgccaaaaataaagactggcgtatcgcagtcacgtttaatactcgatcattaaaaaatcaatttaagaaactaattactagtttcgtttacgaacaaacaaatgaactgcctgattgggataaaatacatataattcatgcttggggaagtcctaagattgaaggtatttattataatgcttgcctcgaaaatggtgttacatatgaagactttagcacagcagcatctgtcgctggcagagataaagcatttgcgcatgcctgtggtgagttcttaaaaaaagttagcaaccctcgcccaatgtatgacttgattttgattgatgaagctcaggatttttctattgagttccttaatctttgctataaccttttagacaaaaataaaagactagtatatgcgtatgatgaacttcaaacactcactgaaagctcattgccttccccagaaaaaatttggggtacagatgataatggtaaaccgtacgtcacattgacaaacaatgctaatgaaccagatagagatattattttagataaatgctacagaaatccttcccctatacttactagcgcccatgcacttggctttggtgtttacagagaaatactttctggggtaacgcctgaaatgaaaccaagatattcgcgtcaacttgtacaaatgtttgactatgcacctctatggcaggaaattggttatgaaatacttgatggcgagctgactgaaggtaaagatgttgttatccgcagacgtaaagaagcgagccctgagctcttagaaaaatattgccctcatgacgaaataattcaatttaaatgttttaatgatcctgaagaacagaatcttgccttagttaaggctatagaaaaaaacatcaaagaagatgaactaaaacctgatgatataatggtcatccactcaaaccctctaacaacacgcaccgctgttgctgaggctaggaatatgcttttcaaaagagggatttcttcaactttagcaggtgttagcggttctcctgatgacttttttgaagaaaacgctgtaatgttcacttcaatttatcgggcgaaaggcaatgaagcagcaatggtatatgtaataaatgctcagtattgtgccgaaggcaccggtttaggcactaaaaggaatattttatttacagcaatgacccgtactaaagcttggttaagagttttcggtgtcggtgaaaacatgctgacgattcaaaatgaatttgaacaagtccgtgataacggatatgttttagagttcaaatatccgacagctgaagaaaggaaatatttaagaattgttaatcgcgatatgactgaacaggaaaaaaacaaactattcaaacgtcaaaatcaattggaagaggtcgttcaagaattgttatccggtgaaatacataaagaagacttaccgcatgatgtaattgaaagtctaagaaaagcgttaggattataa

SEQ ID NO: 236508 - DNA, 666 bp, Klebsiella pneumoniae; identical to SEQ ID NO: 180090

SEQ ID NO: 236509 - DNA, 294 bp, Klebsiella pneumoniae
atgtttgcgatcttattgagcaatcaaatatcgttgctttgccgtcagtttattctgaaggtgttccgcgaattcttctggaagcatcttctgtgggtcgcgcttgtattgcttatgatgttggtggttgtgatagccttattattgataacgataatggaattattgttaaaagcaattcacctgaagagctggctgataaacttgcctttttgcttagcaatcctaaagcacgcgttgaaatgggtattaaaggacgtaagcgtattcaggataaattctcgagtgggatga

SEQ ID NO: 236510 - DNA, 237 bp, Klebsiella pneumoniae
atgctgccggtatgggaggccaacgacgattgctgctcactgctggccagcttcgccgcttcgctcccgctgcgccggccttccccaattgccacgctggacatggctcgctacctgctcacacgcagcgagggcaccataggggaactggcgcacttgctgatggcggcggccatcgtcgccgtggagagcggcgaggaagcgatcaaccatcgcacactcagcatggcctgttga

SEQ ID NO: 236511 - DNA, 246 bp, Klebsiella pneumoniae
atgttcgacggaacgggacaactgtacatacgtgctgtccagggaggccatccgctctctggcaccgtcaacgccaaccagcccaataatatagggtacagatgcaccctgggagctataggtggtcacagcatagccataatcgaaatgttggtctttctgctcccggggatcgaggacgactttccgaccgccggcatcgagcgtgatctttccaaccttatcaatttcggtaacaacagctaa

SEQ ID NO: 236512 - DNA, 549 bp, Klebsiella pneumoniae; identical to SEQ ID NO: 227915

SEQ ID NO: 236513 - DNA, 147 bp, Klebsiella pneumoniae; identical to SEQ ID NO: 139223

SEQ ID NO: 236514 - DNA, 261 bp, Klebsiella pneumoniae
atggaaaaacggcagcgccgcgtccttttctcttccttgccttcacggcatatgtctctgcatttctccgcgtgccggttacgcccgccgcagccgaacggcaggagcgtcagcgaccgagtgagcgaggaggcgtcatatctcctgcacaaccattatctgtcttacgcccggcagctgcatgtcatacctgccatatatagcactttcgctgatacccataccaatgccaacatagtaagccagtatacactccgctag

SEQ ID NO: 236515 - DNA, 1683 bp, Klebsiella pneumoniae
atgaacaatattgaagcccccaaaatatccttattcaatactgatgaatccatcaaagaaaccttatctaaagaatattcaaacatccaatcccataagttaaacggaagggtttttttcaaagatgaattcattggttaccggaaaaaccatgatacaaaatacgatatccccggggatcttcacgaatccgacataataataattgacacactcccccctaaagacagaacttacacctcaaaaactgttagattgcggtttgatagtttacctcatgacatagatataatgccagtggatattaaactgataaacgaccattttaattcaaaccaaaagaaaaggattgtaatagttttttgcgaacaattttcggaggaagagtacaaaatttactttccagaaaataaagaaagcgatcacttcatcagccatacattttatatcggcgaaaataatcgaccaatatttagagaaggttcgagatacaagacagctcaatcgcaaccagatccaattctcgattgcataatcaagcatgctgacaagctaacctataaagtagtattcaacaaagacttcatgaatccatcctccagaatatatttattaaatgaaagcgatgaagtcatatctttttcgacttatagcaacaactcctttttaatttttcttccaagcctagccgataaagaaaattttctattcgagctattgagtagggttctccctagcatttctgagtttcatgaattattccccaataacacatctttttcatggcttgatgaaccatcatatttatctgctgaagagttaaatattatccacaaaacaaaggaactagagctaaactatcttaaagaaaaagagtccttatcaacagaacttttatcaatcaaagatagacaagaaaacatttttttgaaaaacctattaaaagaaacagacgatcaattagtatatgctgttgagtggttcctgaagtatattggctttgagaatattgaaagacctgatgagaatatcaaacagggtgatgtttttgaagaagatctgcgtatcaacgatgaaaatgaaacttaccttatagaaataaaaggaatagggggcacctcaactgatgcacaatgttctcagatatcaaaaattgttaacagaaaaaggaaacaaaatactggcagaaaatatataggaatttatatagttaaccatcaaagattcaaagcaccgctgagcaggatactgcctccttttaatgagaaacagattgaagatgctgaaattgcatatagaggtatgacttatacatttgaactatttaacgtatatcatatgattgagcaaaaaatcctaagcaaagagcaagtcaggacggcatttttagaagatggtttattaaatttcagaaagccgctaatccctctaccaagaccacatattttccctaaaccagaggtttactcctttgatattggtgaaaattcaaatttagaaataaaaaaaggagattgtattgttttcgttgatgacaattcgcactggcataaagttgctattgtagagttacaagtagataaaacaagtgttgaacgtgccaataaaggcaaagttggcataaaaacctctggtttctttgaaaaagctaaagattattatttgctacccaaccaaccctga

SEQ ID NO: 236516 - DNA, 336 bp, Klebsiella pneumoniae
gtgaaaacaaatctgattgaaacgcgtcgccgtcacctcgttcgcgccaagcttgattcaatgatgcgaaggactgggagttattttcagctcgtaaaaatggacgatggaacaacgttacccgttgaacttgatgaagatattttaacaaaatcattaatcaaacttttcgaagcgatgatttatgacacccacaaacgcgagcaggcagaaaatttaatttctgaacattattcgaattgcatgggcgttaataaattaacgcccgatggtgtggactttatgaatgcactcattgccacgctggccgaacagtcattaaaagccgagggctaa

SEQ ID NO: 236517 - DNA, 231 bp, Klebsiella pneumoniae
gtgaacgcagagaacctaagtgaagcgtattacatcaataacgagataaaagaactacaacgacagaaaagcattctggagagtggtgcagggcttggagtaacaatccaatctacatatcaggataatgcctttttggatgctatacgcccgcatgctgtggctgaacttgatcgccgtatcgatgaaaagaaagttgtgctggttaatttgggagtttccttctcttaa

SEQ ID NO: 236518 - DNA, 1812 bp, Klebsiella pneumoniae
atgtccagcaatgctcaagtccgccgtcgcgccgtgcaggccgcgcgcggtgaatccccgtttgatctgctactgatcgatgcgcagatcgtcgatatggccacgggcgaaattcgccccgctgacgtcggtatcgtcggcgagatgatcgccagcgtccatccgcgcggcagtcgcgaagacgcccatgaagtgcgttccctggccggtggctacctgtcccccggcctgatggacacccacgtgcatctcgaaagctcgcacctgccgccggagcgctatgcggaaatcgtcctcacccagggcaccaccgcggtgttctgggatccgcatgagctggccaacgtcctcggcgtcgctggcgtgcgctatgcggtggacgccagccgccatctgccgctgcaggtgatggtcgccgcgccgtccagcgttccctccacgccgggtctcgaaatgtccggcgccgattttgccggcgcggagatggagaccatgctcggctggccggaagtgcgcggcgtggcggaggtgatggatatgcacggcgtgctgcacggtagcgagcggatgcaggagattgtccaggccggtctcaacagcggcaaactgattgaaggccacgcccgcggcctgagcggcgctgacctgcaggcctacctcgccgccggcgtcacctccgatcacgaacttacctcggcggacgacgcgctggaaaaactgcgcgccgggctgacgatcgagatccgcggctcgcacccctatctgctgccagatatcgtcgcggcgttaaaaacgctgccgcacctctactcgcaaatcaccgtctgcaccgatgacgtgccgccggatatgctgctggagaaaggcggcatcatcgccctgcttaatctgctgatcgagcacggtttaccggcggtcgatgcgctgcgattcgccaccctcaacgccgctcttcgcctgcagcgccacgatctcgggctgattgccgccgggcggcgcgcggatctggtggtgtttgattccctggagaaactggtggcccgcgaagtctacgtaggcggtaagctgctggcccgcgcgggcaacctgctgacaccgatcgcgcccgccgcgggcgtcacgccgccgcgcgatactttgcagatcgcccccctccgcgccgatgactttattctgcgcgtccagggcattcgtcacggcatcgcccgcctgcgccatatccgcggcgcgcgcttcacccagtggggcgaagtggaagtgcaggttcgtgacgggaaagtccagctacccgccggcttcagtctgatctgggtcaagcaccgccacggccgccatcaggcgacgccgcaaatcgccctgcttgaaggctggggtgagctgcgcggcgccatcgccaccagctactcccacgactcgcataatctggtggtgctcgggcgcgacgctaatgatatggcgctggcggccaaccagcttatcgcctccggcggcgggatggcgctggcgcaacagggcgagatccttgcccatgtggcgatgccgattgccggcatgctgtcggatctcccggccgcggaactggcgcgtcagttccgcgagctgcgcgatctgagcagccaagtcgccgactgggagccgccgtaccgggtcttcaaggccattgaaggcacctgccttgcctgtaacgccgggccgcatttaaccgatttgggtctgaccgacggcggcagccgccagatagtcgacccgttgatagcctgccgggagatcccggagccaaccgatcacaacaataatcctcagggagcctga

SEQ ID NO: 236519 - DNA, 2841 bp, Klebsiella pneumoniae
ttgaaatatcttgcctcttttcatacaaccctgaaggtttcacgttatctgttcagagcgctggcggtattgctgtggctgcttattgcgtttgtctcagtgttttatatcgtcaacgcgctgcacgagcgggaagccgaaatccatcaggagcttaatctcaacgccgatcaggcccagcgctatatccagcgtaccgcggatgtaatgaaagagctgaagtatgtcgccggtaaccgcttgtcggcaggggacgcggtagcgcaagggcaaaacggcgatatggcggtgcccaactttgaacccctgtaccccgattccgactgcagcgcgatgagcgccacctggcgtaattcgctgcagtcgctggcatggtttatgcgctactggcgggataattttactgccgcctacgaccttaaccgcatctttctcatcggcagcgataacctctgcatggccaactttggcctgcgggacgtgccgattgagcgcgatcaggcgctgaaagtcctgcatcagcgcatagagcaatatcgcaacgcgccgcaaaacgagcgcggcaacaacctgttctggataagccagggcgttcgccccggggtgggctatttttacgccctgacgccggtctatatggccaatcgcctgcaggcgatgctgggcgtggagcagaccatccgcatggaaagcttctttacgccgggcagcctgccgatgagcgtgacgatctttgacgataacgggcagccgctgatttcgctggccggtgcggaaggtaaaatccagagcgaagcgaagtggatgcaggagcggatgtggtttggctacagttcgggtttccgcgagctggtgctgaaaaaaagcctctcgccgtcctccctgagcatcgtctattccgtctcggtagatcaggtgctggagcggatccgtatgctgatcatcaatgctatcgttcttaatatcctcagcggcgcgatgctgttcgcgctggcgcggatgtatgagcggcgcatttttatccccgcggagaatgacgcccagcgcctggaagagcacgagcagttcaaccgcaaaattgtggcttctgccccggtagggatctgtattctgcgcactgccgacgggaccaatattctcagtaatgaactggcgcacaactacctgaacatgctgacccacgaggaccgccagcggctgacgcagatcatctgcggccagcaggtcaattttgtcgacgtgctgaccagcaaccataccaacctgcagattagctttgttcattcacgctatcgcaatgaaaacgtcgccatttgcgtgctggtggacgtttccgcccgcgtgaaaatggaggagtcgctgcaggagatggcccaggcggcggagcaggccagccagtcgaaatcgatgttcctggcgaccgttagccatgagctgcgtaccccgctgtatggcatcatcggtaacctcgatctgctgcagaccaaagcgttgccgaaaggcgtcgatcgccttgtgacggcgatgaacaactcctccagcctgctgctgaaaatcatcagcgatattcttgatttctcgaaaatcgagtccgagcagttgaagatcgagccgcgggagttctctccgcgcgaagtcatgaaccatatctccgctaactatctgccgttggtggtgcgcaagcagctgggcctgtactgctttatcgagccggacgttccggaacaaatgtccggcgacccgatgcgcctgcagcaggtgatctcaaatctgctcagcaatgcgataaagttcaccgataccggctgcattgtcctgcacgtccagtgcgcgggggattatctgcagattagcgttcgcgacaccggagaggggatcccggcgaaagaggtattgcgcctcttcgatcctttctttcaggtggggaccggcgtgcagcgcaattttcagggcaccggccttggcctggcgatctgtgaaaaactgatcagcatgatggatggcgatattgctgtggaaaccgagccggggatgggtagccgctttaccatccgtattcctctgtatggcgtgcagaatacctcaccggtgagcagagacggtttcgctggcaagacctgctggctggcgattcataacacttcgctggcgatgttcgtcacctcgctgctcagctaccacggcctgacggtccgccgccatgccggcgaaacgccggacgccgaggatgtcttactcactgacgatgaggcgctgagcggatggcagggaagggccatggtcatcttctgtcgccgtcatatcggtattccgcaggagcggtccgccggcgaatggctgcacagcgtgacgactccccacgaactgctgccgctgctggggcgtattttccatgttgcgctcgccagtgcggaaaatagcccggcgctgatggccccggaggcgcaggccggcaataacgacgacatgatgatcctcgtggtcgacgatcacccgatcaaccgccgcctgctggcggatcagctgggttcgctcggctaccagtgcgtgaccgcgaacgacgggatcgacgcgctcaacgtcctcagcaagcagcacatcgatatcgtgctcagcgacgtcaacatgcctaatatggatggttatcgcctgacgcagcgcattcgtcagcttggcctgacgctgccggtgattggcgtaacggccaatgccctggcggaagagaagcagcgctgtctggaatcggggatggacagttgtctgtccaagccggtcaccctcgacgtactgaagcaaacgctgacggtatatgcggcgcgggtgcgtaaagggcgggaataa

SEQ ID NO: 236520 - DNA, 651 bp, Klebsiella pneumoniae
atgaacactatgaacgtaattattgccgatgaccatccgatcgtactgttcggtattcgtaagtcacttgagcaaattgagtgggtgaacgtcgttggcgagtttgaagactccacggcccttatcaacaatcttccgaagctggacgcccatgtgctgatcaccgatctgtccatgcccggtgacaaatacggcgacgggatcacgctgattaaatacatcaagcgccacttcccggatctgtcgatcattgttctgaccatgaacaacaatccggcgatcctcagcgcggtgctggatctggatatcgaagggatcgtcctcaagcagggggcgccgaccgacctgccaaaagcgctggccgcgctgcagaaagggaagaaattcaccccggaaagcgtctctcgcctgctggaaaaaatcagcgccagcggctatggcgataaacgcctgtcgccgaaagagagcgaagtactgcgcctgttcgccgaaggtttcctggtaaccgagatcgccaaaaagcttaaccgcagcattaaaaccatcagcagccagaagaaatcggcgatgatgaagctgggcgtcgaaaacgacatcgccttgctgaactacctctcttccgtctcgctgagcgcgacggacaaagagtaa

SEQ ID NO: 236521 - DNA, 309 bp, Klebsiella pneumoniae
atgagtataaaaactcactttagcgccgaagaacttgcgcaaatgcggttgccaggacttcccggcacctcaagaaacattcgtgagcgtgcgaaaaaagaaggttggcaggctcaaaagagacaaggtgttggtgggggatgcgcctatcatgttgatagtttacctgatgaagcccaaaccgttctcagggaaaaaatctatcagcaggttctggccacaaaaaccaataccacgcccgctcgcgccagtaaatgcggtgtatgggtccaccacatattgcaatttttactctcacgtaaaatatag

SEQ ID NO: 236522 - DNA, 735 bp, Klebsiella pneumoniae
atggcgtcaaatcatccaggtaaggaaaaccaactcggatgcgaagggtttcactctcgtttgcgcacactcctagataaattcaggagtgttaacgcgtttgcgactgccgcagggatatccccttcagggcttaacaggttgcttgacggcggatatccaacgctcccgatacttgttgcattggcaaaagctggcgacgtttcggttgaatggctgtctacaggcggtgaacaggtgggtgcttctcttcctacaaagatggatagcacttccatgacagtgaccgacgttaaagggaatgaggtagaccttgatgaattcgtttttgttcctcgctacaacatagctgcagcggctggttttggggcttggaatgatgatgaaacgccgatgtttactgtttcatttaggagatattgggttaccaatcacctgaaggccgatccttcaaagctatctgtgattagtgtctatggtgattcaatggaaggcgtcttaaatgacaaagacatcatattgataaatcatgatgatagggaacctagagagggtatctatgtcttgcggattgatggccaactcattgttaaacgtgtccagaggcttcctggctccattctacgtgtcacaagtaccaaccccgcctatgaacctttctcggttgatatgaataacgtattgggggattttgcagttgtaggcaaagtggtttggtatggaagggttgtttaa

SEQ ID NO: 236523 - DNA, 198 bp, Klebsiella pneumoniae; identical to SEQ ID NO: 139562

SEQ ID NO: 236524 - DNA, 519 bp, Klebsiella pneumoniae
atggtcggcgcagccgatgttgcaggagatacatttgcgcatcagacgctcttttccgccttgctctttctgcacccactccggctcggcaatcagaccgcggccaatggcgataagatcggcatcgccgctggcgaggatatcttcggctacctgcggagtgcgaatattgccggcgatgaccgtgggtttatggaatttatcgcgcaccgcgtgggagagatagcgcttccagccatcctccagcgacatctgatcgatttgcagattcaggttgtcgttctgcgccgcagagacgttgatgatatcgaccttctcctggcagagctcaagaatacgcagggaatcttcgagggtattgccgcccttgaggaagtcgtcggcgctgatgcgcaggctgaccggaaaacgcgaccccacgcaggcgcgaaccttatcgacaatcagactcagtatccgagtgcgattttcgacgctgccgccaaattcatcagtgcgcttattaaacagcggcgataa

SEQ ID NO: 236525 - DNA, 621 bp, Klebsiella pneumoniae
atgtttaagaaaacctgtctgacgctggccgtactggcgctagggggctgtcgcatcgtctcgcagcaggagctggcagacctgaaatccccgcccaacccgcatatggcgaatatggataaaacctggcagcagagcatcgtaccgcaggtggtgacgaaagcgcgtccggcggcggaactgatgagcgcgctcaaggcggcaaaagacattgatagcgcctgtaaaaccctcggctaccgtgcgcaggatgaaaacccctgcatcttctacgtcaaggtttcaggtaccgtcagcaaactcgataccgcctcgcgcagcggcaaaatgaccttgaccgacgccagcgtcgggaaggtgacggtgcagattggccctaccctgcgcggcacccagctgcgcgacggctacagcggcgccagctatcaggactttaatgaccaggtgctgttcggcgagtacagcaagaatatcaacagtcaggcggtcaaaatgattcagacagccaacgtcaaaaccggcgacagcgtggaggtgtacggcgtcttctcggcctgggatattccgcaaactctcccggaaattaccccggcgaaaatcattcatgcagggggacaataa

SEQ ID NO: 236526 - DNA, 318 bp, Klebsiella pneumoniae
atgggatttccatcacccgcgacggactacgtcgagcagcgactgtccgtaaactcgatctgcaatgttggtcctaacacattgttgtttgaaaccagtggtggatatgccgtggttgatgtctctctgaaacctaagcagggatgccaggtgatggtctgctatgaaggacataatcagatagcgaagatcatggggaaatctttgataacggaagacggcgaagcgatcgagggcgaggctctggacgatgttactgtcgccggcgttgtgacgtttactatctgcgatgttcgccaggacaacgcggttgtttag

SEQ ID NO: 236527 - DNA, 1701 bp, Klebsiella pneumoniae
atggacgctatctttgacagagtcgtaagggaattttttccaaatacaaccataccttttgggaaaaaatggctgttcaggacggcatttggcaataaggtattttctcgcttaatatataacgagcgactcgttaataaaagtggggtcgagtgggttaatgcagttgttgaactccttgagttgaaatgtgaaagcgaacaccaccaatttaacaacatacctgagcatggggctacggttgttatttcaaatcatccgacggttatcgatggacttagcttaatacatacggtctcccgagtcaggagtgatataaaaataatagccaatcacgttttgccaattatattcccccaggtatcggaacttaccattggaattgagaatatggccggtaagatgagccataaaaaattccgcgagatgaacgatcacctgcgaaaaggaggcgtattgattatatgtcctgcgggtaagctggctaactggtctctttccgggttacaggagcataagtggaaccccggttttttacagcttgctatgagaaataatgcagcattggtaccaattcatattacgggagcaaacagtaagatttattatcttactgcaacattctggcggcaactgtcgaatatgatggttattcgtgaagctctccgccatcatggcaagaccatgaaaatcaatataggacagcaaatagccttatcctcgtttaaagaatacaataaagatctttctgccgcggcaaatgtatgtttgacgcacctccagagtatagcgaagaatggcccggctatgttagatacgattgcgccgcaagaattagaaccaggtaaaaaggagctaattagcgcaatagaggagtgcgaaatattaaggcagtttgaagacggtagaaaactagtgatatatcgctgtaatactaaccgaacctcacctattattgatgagttagggcgcttacgcgaacgctgttatcgcgatattggtgccggaactggtaacgaccgagataacgatgtttttgatgaaagttattatcatatcattttgtgggatccttctgatgtggaaatcctgggagcatatcgtgttatgcccgttggcgagcagctggcccaacatggtgtaacaggcctctatagcaacagcttgtttaaataccatgataatgcctattcctgtttagagaagtgtgtggaaattggccgcggctttattcagaaaccttatcaaaaaagtaaggtgcttgattatttatggcaagggatatttgactttataaaaagatatccggactataaatacttgctgggtgtgctgaccattcctggaacttttcctgaaaaagtacagaaactcatcatcagtttctataatatatacttttcctcgacagctgatttttgtacgccgatagcattgttcactgccgaaaatgtacaggatgatactccattttgtggcgaagattttagagcagactggagcatgcttaatcacctgctgagagaagaaggttatgaacttccctggccttttaaacagagtgctaaatggttctccccgggcggatcgtcgattcttgcattcacaaaagatgattcttttaattcgatagctgggttaaatctgagctctatagataaattgaatgaaagctacgttaagcattatttaaaagattaa

SEQ ID NO: 236528 - DNA, 369 bp, Klebsiella pneumoniae; identical to SEQ ID NO: 225495

SEQ ID NO: 236529 - DNA, 195 bp, Klebsiella pneumoniae
atggctaccgtaacagaaattcgagcaaagctacgtgccggtgaggtagtgattatgccggaaaattctgtattcatgttcatgcgtgaatgcgagcgccatccagaaggtgatgagtgctacaaaattgagccccactcttatgggtactcaaaagttttcgaccctaatcgggcgaaaggagccaaccaatga

SEQ ID NO: 236530 - DNA, 1182 bp, Klebsiella pneumoniae
atgaataatacgactggtcatgcgcacgatgcgacggcctggctgcagctggcgcgtcgcctgcaaaaacaacagcttcatcagcttagccaactgggggaactggccagccagctcagcgcgctggtgcatatgctgcagtgtgagcgcggggcgtcgaatatctatctttgctcgggcggcttgctgtatacagcggagtgtcgggcgggaggggcgctggttgacgagcggctagccctgttttatgccagcctcgaacgggcgcgcgcggtagccggcagcgcgctgtgctggcgtatcgccagagcggttgacgagctggcgcagctcccggcgctacgcgcgcagatcggccgccggcaaattgccgctgaagccgcgacggagcagttcagccgcgtcatccgccatctgctgaacatcgccccgcagctcaatgacagcattgacgatccgccggtggctggtcggatggtcgccctgtacagctttatgcagggaaaagagctggtgggccaggagcgcgcgctgggagcattgggctttacccgcggcgagttcagcgacagcctgcgccagcagctggtggaccgtattgacggtcagcagccctgcttcgacagctttcaggcgctgggcagcccggcgaccgtccagttgttcagaacccagtgccacgccggtctggatattgaacagctgcggcggatcgcctgtacccgccagccggctgccgacggcggggaaacggcgctgcgctggtttggcctgcaaacccaacggcttgagcaactgcgcgaagtggaagagcaactgatcgacgatctgctggatgccaccgacgcgctgttagcagacgacgcgcctggctggcaggccggtgaggaagacgatagcgtgacgccacggctcgataaacagctactgccgctggtgcgccagcaggcctatgagctgcagcagctctccagccagctggcctcgctgaaagacgcgctcgaagagcgcaagctgatcgaaaaagcgaaaagtctgctgatgacgcaccagggaatgcaggaggagcaggcctggcagacgctgcgcaagatggccatggacaaaaatcagcgcatggttgagatagcccgcgcgctgctgatggtgaaggcgatttggccgctaacacctaaggagtag

SEQ ID NO: 236531 - DNA, 231 bp, Klebsiella pneumoniae; identical to SEQ ID NO: 145440

SEQ ID NO: 236532 - DNA, 402 bp, Klebsiella pneumoniae; identical to SEQ ID NO: 214728

SEQ ID NO: 236533 - DNA, 798 bp, Klebsiella pneumoniae
atgagtgactactactacggacaagggaaattatacctggctcgccgaaattcggcgggtcaggctttgtcctggcgttgggttggtgatgtctcggcgctgaatattgaactggagtttgaagagaaaaaatcccgtacttcggttggtggacggttagtgaattctcaacgttatattacagcgctcggcggaaagattacctccacatggcatgacttttcagcagagaatttacaaatacttcttgatacgagaaatttatcccagcctcctgacgtatatgcgcaagaaacattacctgaaggtatcgaggccggagacaggattactcttcggaatcaaaatgtatggggtgtttctatagaaaacatgaacgatggtgatgattatattgttgataatttatggggcggaattacttttttcataacacctgaagatcaacccgtcattgttaattatcagcatgctgccagtacagttttgccgttagcggaaagtatatccgaagagttttcattgcgttatgaaggtattaatttggctgaaaataaccagcctgttttagtcgaagtttacagagtgtcattagatcccgttgcgacgttaacattaataaatactgagacagaactaagtggactagaaacaacagcaaatattttatatgacggtcaaaaatcaaatgatgaattgcttggtcgtctcggtcgcatcgttctgtttaacagactaagtggcattacacataatggggctattcgctacaatggcgtttacaaacatagaggttaa

SEQ ID NO: 236534 - DNA, 2322 bp, Klebsiella pneumoniae
atgggcggtaaaggtagtaagaaagtgaccgtgggataccgttattactgggacgtgcaagccggaattggccgtggcccggtaaatgagattgtggccatcagcgcagatgacaaaacggttttcgccggtacgccaggacaggtgaccagcaacatgacagtggtcatcgataagccggatttgttcggtggcgatgataccggcggcgaaggcggcgttaaagggacgctggatgtcatgatgggggagcctgaccaggtgccgacaccccgtttgcttacgctgctaaccgggttggttcccggtttccgtggcgtcgtgaccaccttttttagcggtctgatcagctgctacagtgccacacctaagccgtggtcttatcgtgttcgccgctctaccaaaggctgggatggcccggtatggtatccggaaaaagccactattctgctggagaacacggaaagccagctggatgatgagagtgagctgaccgcagaacaggtcactaacctgcgggccattcatgccatgaatcccgcgcatattcttgttgagtgtgctcttaaccgtgactggggccgtggcctgacgctcgatgaccttgatactgaaagttatcgtatcgccgctgacaggctttatgatgagaaattcgggctttgttttcgttataaccgccaggacagtcttgatcagttcgttcagcaaattctcgatcatattggtgctgcacaatatggtgatttaagtacggggaaattaacgctcaaattattacgcgacgattataatccggatgacctgccgttatttacttatgataatggcattatcggtgtacaggatgatgacagtaccagcgccgatgccgcgcctaatgaaatagtggtcacctggcgcgacccggtcacaaacagcgaaggtgaagttcgcgcccagaatctgggagctattcagtcagtcggtcttatttcggacagtgtcgaatataaagctatccccactcactctctcgccgtacgtgtcgcgcaacgagaccttgaatcaagttctgccgggctaacgcggttgattattctgtttgatcgtcgtggcggtattttaaccccagctgcgccattccgtatcagtatccctgaccgcaatattgcgaatatggtggtacgtgtcgggaaaatcgaagagatggataccggggggttgaaaataaccgttgttcaggatgtttttggactgccttcaacctcatacagtagcggcgatcagggtagcagctggacgccacccgataaaacggcccgccccgtcacagacagtcagttaaccgaactgccttacgttgttctggccggaaccattggggccgcagaactggcggcactacagacagaggctggttatttaggtgtgatggccacagcccccagcagtacgtctatcaattacctgctgcagacgcgggccgatggcattaactggcaaggcaacagttccggcgactggacaccttcggttgtcctgaccgagccagctggacgttttgaaaccgtatttaaagcactgttaacgacgattccggccgtgaataccggagccataatcaataatgaaattgtccgtattgatgcagtagacctggttgcgggatcaattaccgtcggccgggcatgtgccgatacattaccggccgaacatgccgccggttcacacctgcggtttattcaggatgcgattgaaagtgatggtctggaatatatgcaaggggaaagcgttgatgtaagattgctcacccgcacatcaaaagaaacattggccgaaggctcggcaatcattacgcaactgacaatgcaggggcggcaggccaggccatatcttcccgcgaatatctgtttaaatgacgaaccctatcccctcgtagctgtccccgcagaggaatatattttaacctggtcacaccgggacagacagttgcaggctgaccggttaattgattatctggaaaacagcatcgggccagaggcgggagtgaattatgtaatcgaaatcataaaaggtgacactcaggaaacagcctggacaggaaccacaactgatgaagagtatttactcccttataccactgaagccgggccgggaaataccagtcatattgccactattaaatcggttcgaggtgatattgaatcccttaatacatggcagattcagttaccgcccggcagcattattccagagccagagccagagccagagccagagccagagccagagccagagccagagcctaccccggaagaacctgaaagcgagaacgcatga

SEQ ID NO: 236535 - DNA, 210 bp, Klebsiella pneumoniae
atgttaatcacgatggaagatatccgagccggtggcggctgcgctcccggattacgtgccttttttgcccgttataacctcgatttaaaagccttcattcgtgatggcggcattgaggccgaaaagctgctggccactggtgatgcgctggccatcagcattgttcgcctggcggagaaccgtttaaacggaggtaatgatgggcggtaa

SEQ ID NO: 236536 - DNA, 234 bp, Klebsiella pneumoniae
atgtggtgggctgtagcgaaatttgtcgccgtgatcgttgcgtcttacgtgctgaacgcagcgctggcaccgaaacaaaaaagcacgacaccggaagcggccacggaagatgactggaatatgccgcaaccggatgagggcacgccacagtgtgtcttttttggagattgctggtctgaagactggttcgtgctggcgtatggcaactatcgctatgaagcgatccggaaataa

SEQ ID NO: 236537 - DNA, 831 bp, Klebsiella pneumoniae
atgagctggaatcagtttgaatattctactgccgacggccgcccggtcacgttgtatgagttctcgcgcagtgaaacgcggttttatcgctataccaatgcggatcgggatattaccaccacagacgcgactcaacagtccgttctctggcagtgccaggcaatcagcgacagcggtctgagcgtgggggccggggatagcctcgacgtgaccgtacctgcatcaaacccggttgcgaccctcttcagaaacgttccgccgtccagccctgttcgtatccgtatccatcgctttcatatagatgacgtgcagcaggagttcaggacggagtggatcggcaccattaccgagatgaagcgcgaagcaacagaccgctgccggttactgaccgccagcctggccagcaccttcacccgcagtggcctgcgtctgacgtggggccgggcctgcccgtactcgctgtacgaccataactgcggtatttctcctcaacagttcggtattgccggacttgttatcacttcactggacggagccagtatcaccgtcaacatgccggaggggttgcccggagactggttctcaggcggttacgtggagtggatctccgatggcgtgaccgagcggcgaggactccgggcccagagcgggagcacacttggcctgttcggcggttccgtgggactggaaaccggccagacagtcaccctgtatccgggctgtgaccgcacaatctcgacctgtaacaccaaattcaacaacattctcaactacggtggccagccgcatatgccgggcaagtcaccttatcaaatcatcaaattattctga

SEQ ID NO: 236538 - DNA, 1179 bp, Klebsiella pneumoniae
gtggccgaacgtctcccctttatcatggagccagactggacagacggtatcaccgaaaccctgtcctggaagactgatgtgctgatttcgccgacaggagccgaacagcggaatgcccgtcgtttgtcaccgcgtcgccagtacgagttcactgtgctggcgggtgatgctgatgcgcgtgcactggaaacccagctttttcatgccggtggtgcaatctgggatatgccggttttccctgatgtggccgagctgttatcaccggttgcggccggaagtcagtttatcccgctggccacggccgggcgggatttcattgtgggcgataatctgatgctcaaatccggcttcggcatgatggccagtaccgagattgtgcccgttcagtcggttgaagccgatggcgtgactgtcagtcaacccgtagccgcctggccatctggcacgctgatttacccgctccggcccgccttttttaccgatgtaccggcgatcacccgacataccgacagcgtaatgcgcgtacaaatgcggtgccagctggcagcgcataacccctttaccgccgtatccggttctaccctctatcgcggtcatcctgtactggccgacgacgccgactgggtggatgacctgacagccgaatatcagcgcctgatgctggaactggataatgaatacggcattcctgcccgtatcgatacggcgggacgagcattcatcatgcagcagcatgtatggtcgcgagcaaaccgcgagacacagacccgcctgcgcgaattgctgtactggctgcgcggccgtcaacgtgctgtctgggtatccagtcaggcgcgggacttcatcccccaggcagccagcggcaatgccctggatgttgaggttgccggtttcagtgaatatggggtggtttccgggcgtcgggatctgcgtatccggtgccaggacggctcagacgtttaccgccggattgtgtcggcgatccgccaggaaaaccacgaaacgctttttctcgacggtgagaccccggatatcggagagattgcggccgtttcctttatgacgctctgccgtcagaacacggacgatatcacatgggaacatgccaccgatgccgatggttttgcccagatttcaacaacattcagagggatacgcgatgagctggaatcagtttga

SEQ ID NO: 236539 - DNA, 3717 bp, Klebsiella pneumoniae
atggcaagcggaaatggcaatctggagctgcgcctccgtatacaggccgatttaaaaagcgctcagaacgccctcactcaactcgaaacctccctgaataataccgcccgcagcggcagtcagcttggccagtccggtaatgcggcggcggcaggtctgggaaccgtcggacgttcagcggacagcgccagtcagaaactggccaaaaccggcagtgagataagcgttgtcgagggacaacttaaccgcctgaagaccatcgccggtacggtcaccggtctggcgctaggcggaggggcactcacgggactggcgcatatttcggatgaatataccagcctggcggcacgtatccgtctggtgtcaacgtcgaatgaacaggcgggcactacgttcaaatcggtgattgcactggccaatgaaaccggccagcggatttcctccaccgctgaactttacacccgtatggcgcgatccctgaaaggcagtgccacccagaccgagctgctgcaggtgacaagcgtcatcaacaaagcggcgatagtgtccggggccacggcggaagaatccaccaacgcgatcatccagttaagccagggtctggcttccggcacgctccggggagaggaatttaactctgtttccgagcagatgccccgcatcatggagatgctgcagacgtctctgggtaaaacgcgcggcgagctgcgggcgatggcggaacagggaatgctgaccacagatgtggtcttcaaagccctgaaagacggtgcggcggatattgatcgtgaattctcccagatgccgctcaccattggtcgtgcctccacggaaatggccaatgcctgggtggagttcgtaggcgggacaaacgatgcgctgggtgcctcaaaggccatcgcagcggtcatttcggggctggcgggtaacctgtccaccctgacgacagcagcgattgcgctggccgttgtgatgggcggccgtaaggttgccgccctggtcagcgccacacaggcggcacgcgctgaccgtatcgagacgctgcaactggcggaggctgaatacgcggagtcgaaagcggcgctggcagccgcacaggcgcaggctatcagggcaaaaaccggtatttccgcaccaggcgcacgggcgaaagcggaggatgcggtcactgccgcgctggttcgccagactgtcgcggagaaagcgctgggtgtggccagagcatccacatcagccttcagtcgcctgggctccggactcatggggctgctgggcggcccgatggggctggccatcaccggcgtcacgctggccgtgggtgggctgagtgcggcatatgcgtccgcccaggagtctgaggcggcgctggcacagcagcatcagcagaccatccagacactggaggatcagcgccagaaaaccgatgccctgattgatgctcagggtcgcctcaaagcctccgtcagcaccggtgatgtgctgacccagcaacgcagcaatgcggatgtactgacccaggacagcaagaaattgagcgacctgcagagtcaggccgccatgctcaaacagcagattgaagggctgatgagcagcccggccccctccgggctggggatcatatacctggcgaacaagctggaagaggttaagaaacagattgatgaactgacgcccaaattcgataacctgagcaccgcccaggataccctttccgacgagctggaaaaccgccttgcccgagccctcgatgcgccaaccgccagcggtaaaaccctgcgcgatgtgctgaccgaactgcagaacgccgggcctattcgctggatggatgaggcggctgcgcagatggccaaaagcgagcagagctttgctgagctgagcgctgaagccgataagctccgccccaaactggaaaaagagctggccgatgccaccatgacggctgttcagcaactggagcagctgcgggacaaaaccattgcggccgcactggcggccggtcaggctcctgcggatatcgacaaactgcgggaaagtctggaaaagctaattaacctgcagaaacagaccgaccaggccaaagagaacaaacggcagtctgaagcggctgcacgtgcggcaaagtctgctgcacagaacagtgaaacctatgttaaggggctggaaaaacaggcctgggcggtgggtaaaacaaaagcccaggtatcagcctatgagctggcggaaaaggggctgaccggtgcgctgaaagcacgggcggaagcggcgctggctgttatcgccgccagtgagcagaaagagaaatcagatgcgaacgcgacccggaacgcgcagctgcaggcgcaatacctgaaagccaccggtgatgtacttggcggcggtctggcagacgtccgggccagtattgctgaaatgcgcaaagagtttaccgaatccggcaataccgaagggctggcctggctggataaacttcttccggttcaggaagccagagtgcgggccgacgcactcaaaaagagtattgatgacctggaagcgtatcgcagccagaaagagagcagcgtccaggctcaggttcaggcgggtctcatctctgaactcaacggccgtcgccagctggttgccctgcatcaggaggtcggcgacaaaattgccggttatctgccgcagttgcgccagatggccacgctgcccggtgaaaccggcgaccagatgcgtgagatgctcaccagcctggagaatgagctgttaaccctgaagtccaccacggatgagctgacgacagcatttaaggatggtctgcaggacgggatggagagcacgctaaacggcctggctgatggcacgttaaacctgagtgatgcggtgctgaacctggcgaaatcggtggccagcgcgatggctcaggtcgcctcccgcaatctggcgggtatggcaatggaggggctcggaagcgtcacagacagcctgaaaggattgtttggcatgggggcgaaagcggccactggcgctgctgagtctgccgtcagttctgccaccgataccgccactgatgctgccggtgcggcaacctatgccaccgccatcacgacagcctcaacggccggagcgacagcaatgggaacctccatcactgcgggcagtacggccatgacgaccggtttcacagccgcgtttacatcaggcgtcaccgctctcaccacggcccttagcggtgcctttgccgcgggagccgcgacattatctgcggccatcgcgtcagcgagtgcagccagcagtgccagttcaggagtcggggccgctgccagtgtggccgccgccaccggtggccatatttccggccccggaacggcaacgtctgacagtatcgcggccaggctgtctgacggggagtttgttgtcaaagctgcggcggttaaccgctatggcgtcgattttcttcacgcgatcaacaacggccgtctgggggcgtttgccgatggcggcctggtttccgatccaggattctcgcgacaacagccgatcaatcagtccccggactccagcagtgacggtgagtctgacgggggcagtaacgcgccggtgttacagcagtatctggtactcgatccgaatgacgtcctggacaaagcggtcaagagcgcccccggaaaccgcgtcatgatgacctgggtgaaaagcaattcagccacgctgaaacagatgctgggggtgaaatag

SEQ ID NO: 236540 - DNA, 471 bp, Klebsiella pneumoniae
atggccgatgaactgaacattctgctgccagaccggacgctgaacgtgaatggcgtccaggtcactgtgcatgagtacacgctggcagagcaactgcagcaccgccagcccctccgggatatcagttctggcctttgtgatgccatgaacgctgcccctaatgccgagatttcggttgaggaactgtttgatgtgctgggcgagcgttggccatccgtgatgcaggcggtggcgatttcctgtggccagacggttgaatgggtctccggcctgaccggggaagacagtgagagtctgctgctgacctggtggggggtaaatgccagtttttttacccgcaacgccatcagaccggcgctcgaaaaactggtaaaagcgctgaatcagcaggctgggcggacatcttcgcctgcctcatcgaccacggacaccagttcggagacctccggcattacaccgcccgccagctga

SEQ ID NO: 236541 - DNA, 744 bp, Klebsiella pneumoniae
atgaccccagaaacttattactatggccagggcaaagtttacctcggccgccgcaatgacgccggacaggctgtcaccatgcgctggattggtgatgttgactcgcttgaagtggcactgacgacggagtctttcacccataaagaatcctacagcggccatcgtgcgccggttcgtcgcatcagcaccagtaaggatggttcggtcacgtccacttggtatgaacattcgccggaaaacctggccgttctgctgtatggcgaaaaagtggtggtgcctgccggaaccgtgaccggcgaagtcctgccagccggtattgtcgccggggatcgtgttctgctggcgcatcacaacgtgagcgcggtcatcattaccggtctgacactgggtgaggattacaccgttgacctgaagtttggggcgattgagttcatcaccacgccagcgacaccacccagcgtcaattactcctatgccagcagcattaacacctccatgtttactgccagcccggttgacctgttcctgcgctatgaaggcatcaacctggcagagaacggcgcaccggtagtgctggagctgtacaaagtgcagtacgacccggtgtcggcattgagcctgattaacaccgatacctcactgcccggactggagaccaccgccgccgttctgctggataccgaacgtccggaggatgccgagtttgggcgctacgggcgcgtgatccacgtcgggagtgactga

SEQ ID NO: 236542 - DNA, 192 bp, Klebsiella pneumoniae
atgaagattgaactgaccgggccacacacgcatcagggcaaggtgctgagtaccggaacgattattgaagtggacgatatcaccgggcagtggctgcttgaatacggcccggctaaggcggcgggaacgtcccgcaagagtaaaaccgataccggcagcgccggagatcctttgtcagaggtacaggaataa

SEQ ID NO: 236543 - DNA, 468 bp, Klebsiella pneumoniae
gtggtgaccgattacctgttttgtgaaccgttgctgattaaccgcctgcgcgagcaggtaccggattttgtcgaggtgacgggcgttgcgggtctgtcccagatgaacgatgacaaccccatttgcccgatggcgtatgtgatgtatctcggcgataccgtcaacacctcgacggccggtacgggcggtagcatgcagcggatgcagtatgtgacccaactctgggccgtcgttatctgtgtttattttgccgacgggcgcggtctgggggctgatatcagcagcgaagcaggcccgttaatcaaaaagaccgtcgatgccctggccggatggaagcccgacgttgatattgccagggcgctgaccagaagcagccagactctccccgctcagtatgaggacgggtacgggtattacccactggttttccagttgccggttccggcagcgattggaggataccgatga

SEQ ID NO: 236544 - DNA, 423 bp, Klebsiella pneumoniae
atggggtactgcacgctggatgatttgataaacgatttcggtgagcaggagattatccgcatcactgaccgcagccgccctgcgacggggcagattgacccggcggtggtggagaaggctgtcggggatgcggatgcagaaatcaacatgtatctggaggggcgcggtctgctgccactccccagcgtgccggataccctgcggcgtatcgccagcgatatcacccgctattacctgtaccagaaccccagggacgattcgccggttgtcacccgctataaccagcgcattcgccagctggagaaggtcgcctccgggcggctgtctctgggtctggataatgccgggaaggtactggagccggacgagtcagtggtgttcacgcccggccgcaatatgttccggagggatggtttgtggtga

SEQ ID NO: 236545 - DNA, 396 bp, Klebsiella pneumoniae
atggctggcaaaacaaaacctgaagccctgacggcagaggacaatcaaaaggacagcgcgggcacagtgaccagcgcggatgtaaccactggtgacggtgcagcgactggctccggagatgctaccggggatggtgcatccggcgatggtacagaaaccggcgctgatggtgctgatggtgacagtgcggaaaccgttgatcaagaggctgcagttgaatcctgggtcaccgttcaggtcgtccgttccccggcaggtaaacgcattcgcggcggtatcgagttcaccacgaccccgacaccgttggattttttgacgctcacgcaggagcagcgcgaaaaaatcatgcttgatccttacctgcgcgttaagccgtacaccccggctgaggagtaa

SEQ ID NO: 236546 - DNA, 927 bp, Klebsiella pneumoniae
atggccattatcactcctgagctggtgcggtcgctttttgtcagctttaacaaggcattccaggatggccttaaagttgctgattccgactacaccaaaattgcgacggtgatcaaatccaccaccgccaccaatatttacgcctggctgggccacttcccgcagatgcgtgaatgggtgggcgcccgtatcgtcaaggatatgaaaaccgatggttatggcatcaccaacaaactgtatgaagccaccgtgggtgtgccacgtacagccgttgaagatgacagcgtcggggtttacacccccgtcatgaccgaagcgggccgcgcggccggggtctatccggatgagcatatctttgaactgctgaaagccggtgaaaccaccgtgtgctatgacgggcagaacttctttgatacggagcatccggttgcggcgaacgtggacggcaccggcactatcaccaccgtcagtaacctgctggctccggcctccggcgaccctgccagcccggccccgtggtatctgatgtgtaccacccgtgcgctgaagccactgatttttcaggagcgaattaagcctgatctcaaggcgaagaccagcgatgacaacagcgatcacgtctttatgaatgatgagttcctgtatggcgtgcgtgcccgttcggctgtgggctttggcttctggcagttctgcgtgaagtccaccaaaccgctgacggcggaaaattaccaggaagcctacaccctgctacgcaacatggtggccgatggtggtcgcccgctgaacatcaaaggcgatctgctggttgtcccgcctcaactggcggaagctgcccgcaagattgtgggtgtggccaccatcaacggcggggaagataacccgaactacaaactgtcggacattctcgacagtgcctggttgatttaa

SEQ ID NO: 236547 - DNA, 1140 bp, Klebsiella pneumoniae
atgaaaaaaaatcttgctgtcgcatccctggcctttgagctgaccctgaccggaaacacgatccagttgttcccggctggagagtttcgcgcaacggatggccgcccgactgaatgcgcccactggctcctgaatgaaagcctggcgcagcaggttattgcgcagctgtctgcgcgtaaaaacaaaatcgtcattgactacgaacaccaaagcctgcaggccgagcagaacgggcagcccgccccggctgcgggttggtggactggcagcgatacggtctggacggccgaggggatgtttgcccagaacgtccaatggactaaacgcgcccgccagatgatagccgatgaagaatatcgctatatcagccccgttttcgcctatgacccgaaaaccggtgaggtgctgcaggttcttaatgccgcactcaccaataaccccgcgctggacaacatgaatgaggttgttctggcggccgcctctcgtctcatcgtgcaggcatcaactcaacactccccggagaagacaatgaacgaagagctgttaaagctgctgcgtaagctgctgggcctggccgatgacgccagcgaagcggatgttctgtccgcccttcagcaggcagcgggcaatatgccgaaagaaaaagaaggcgataccagcagcgccagcctgagccgcctgctggaaatgttcgccactcagtccacgctggtgaaaacccatgaggacaagattgcggcattaaccattgcggcctctgccagtgccagtaaaggcgcaccagacccgacgaaatatgtcccgattgccgtggtgactgacctgaccacgcaactggccgcactgaccgcgcgtatcgatggtggcgatcttgattctctggtcaacgacggtctgtcgtccggcaagctgctgccggtgatggaggactgggcgcgtgagctgggtaaaaaagatatcgccgcactgcgtaagtatctggacgcggccgcgccgattgcggcgctgaccacgatgcagtccggaggccaccctccggctggtgaaacccacggcctgacggcgacggaactgcaggttgcctcgctgacgggtttaactccggcggaattcgccgctgctaaaaaggaaatcaagtaa

SEQ ID NO: 236548 - DNA, 609 bp, Klebsiella pneumoniae
atggccaccagtatcaaattaacggtagacagccgcgagctggacaagcaactgcagcagctggccagcaccatcagaaagcccagagccatcatgcaggaggtagcggagacgctccacgcacagagcatgaagatgttcgaggaagaaggtttcccggctaaaagctggccgtcactgaaaccgtccaccatgcgggcccgcagtcgcagcggacactggccgggtaagatcctgcaggtgaccgggcggctggcctcatccgttcagaccggtgccggtgacgattttgcgcaaatcggctctaatctggtgtacgcccccattcagcatcttggcggcaccatcaaacggcaggggcaggtacgactgagaaccgataaaaaaggcaatctcagacggcaggaaaaacacccgaatctcgccgtattcgcgaaacgcagtcataagcaggccgtcgcccgcgcggtcaattacagtatcgtgatccggccgcgtccgttcctgccagtgacggaaaataaccagctgacgccgccagcatttgaagcggtaatgacggttctgagcagtgccctgatgaatatctctaaaacggcgtcagactga

SEQ ID NO: 236549 - DNA, 1236 bp, Klebsiella pneumoniae
atgccggtcacaaaggatgaaatcagtgcgctctttggtatgaaaccagaggcggcgctgcgttatcttgaaaataaggggttgcgtatccgtaccgatcccgatgccatgctgtcagcagaccacgcccattccttcggctttgccaatctgacccgcctagatatcgcgcaggatctggtcaacggcctgcgcgaaggtctggccagcgggcagacaccggagtggttcgtgaagaacctggagccggtgctgcgtaaaaaaggttggtggggtactgaggaaaagattgataccgataccggcgaaatcacccgccgccagatgggtaatcctgcccgcctgaacactatctaccgcaccaacactcaggcggcctatatgtcagcccgtcatgagtcgatgctggccaatgcggtaaatcgtccgtactggcgatatgtggcagtgatggatgccagaacgcgccccagtcatgcccgtttgcataaccgcgttttccattatctcgatccgatatggaaattcatcttcccgccaaacggctttaactgccgctgtcgtgccgaggcattaacggaacaggaagttatcaattatggttacgtcatttcccggactgacagtgaagtggttcagcaggtgatgaccggtgaagacgaaaacggccagccggtgttcacgcctgttaacggtgtgcgcttcagcggccccgatggcgtgcaggtcaccttctttcccgacgtgggctttgacgtgaatccggggcgggaagtctggaaagccaacctggataaatatgatgtggagctgtcccggccttatgttgctgcaggtcttgctggccctgagctgaagcagatgctggacagcgccgcacaaggcagtcgttccggcgagatcctggccgctggcgtgctggatactggcgagatggccacactgggaacatcagggcgtaccgcatggctggccgagcatcagctggctgcgcaggccagcgccggaacccttccagcacaggcgcagtgggctggcgtccagacggtgatagaatcctcaacggtggcggttcgtgctgacacgcaattgttgctgttcagccagctggatgaggggcaatggtggcaggtggtgctggatggcgggctggttgttcagcgcttcatgccggtagatgaaaagacgctggttgcggcgatgcgtgacggcgacgtactgaaggatgcccgctga

SEQ ID NO: 236550 - DNA, 1494 bp, Klebsiella pneumoniae
atggctcagattgtagatgttaatggtcttcctttacgtcgcgaggtgttgcgtgaaccgcagacctcgcatattgcctctctgtctaacctctatgcggaacatcccagccagcgactgaccccgcagcgcctggagcgtatcctcaatgaggccgagctggggaacctgtcggcacaggctgacctgtttaccgatatggaagagcgcgacgcgcacctgttcgcggaaatgcagaaacgcaaacgcgccttgctgaccatcgggcatgaaatcatgccgccgcccaatgccaccccggacgaacgcgccgatgccacgtggctggctgagtatattaccgagcaggacggctgggaggatttgcttatcgatatgctggacgccatcggccagggcttcagtaatattgagatggagtggcagctggtcggccgcgaatggttccctaaagcctttcaccaccgcccggcgtcgtggttcgaactggcccgcgacaatcaggatcaactggtactgcgtactgacgatggcatgggtgcggaactgcaaccgtttggctggatacagcaccgccataagtcccgcagtggttatgtagcccgcgcgggcctgctgcgcacgctgtcctggccgtatatctgccgcaattttgggacgcagagtctggctgaactgctggagatctacggtatcccgctacgtatcggtaaataccctgaaggtatcggtaaaagcgagaaacaggagctgatgcgggctgtcaccgaactgggccgttacgcaggcggtattattccaaaagaaatggagatcacgctccaccaggcatccaacagttcccatgaaccctttatggcgctggcggaatgggcggaaaaatccatgtcaaaggccatactgggggccacactgaccactcaggccgacggcaaaacgtccacgaacgccctggggaacgtgcataacgaagtgcgccatgatctgctgatttccgacggtaagcaggttgccatgacactgcgcagcgacctgttctggccgttactggttctgaaccgtcgccctgatgccgatccccgccggacaccgcgtattaaattcaatgtccccgacgtgcagagcgatgtaaccgcccgcgacgggcgcgacgttgtgccacctgcagcggcagcggtgcatcattatcagaatgcgattatcacggccctcactgcggccctgacccggaaggccacggctgacgatgtgcagaacggcattgatgaggcgttaaaaagccttttaaatggggataaacccgccgacggtcttattgccatccttcagcccgcgctggcggcgttatctgcagatatggatgaacagagcctgctgggtgcgctggcggatgccttccccagaatggacccggttcttctgcagaacaatctgggcgatacgcagaatattgcccgactgattgccatgtatgctcaacaggaggggcaataa

SEQ ID NO: 236551 - DNA, 1785 bp, Klebsiella pneumoniae
atgagccagttaagcggacgcgactttttaaaagagctggcgatgctgcggcacgcgctgcgggccgatatcagcgctcacagttccggtctcgacacctccccggatgctatccgggagcgccgccgtcgtgttctgagcggtgattttgagtttttcgcctatacctatttcccgcaccatatccggggcgaaaagtccctgtttcatgcgcacttctgcacccgttacccccagttgctggcccgtccgggcggcgcggtggaatggtggattgccccgcgtggtgaggcgaagtcctccctgttgaccaaagtcggcccggtctggtgcgccgtgcagggactgcaccagcgtgatgaggtacgcgaagcgctgggctttaccggcgaacgtccgccttttattgactacatcatcctgctgggcgctgaaacaaaactgccgacaaagctgcttgaggtcgtcaaaaccgagctgaccatgaatgccgcgctgatgctggattttccggaagtctgcggccgtagcggccagtggaaaatcggcgagttcaccacgctgaccggggttaaggtggaggcatttggtgccgaacaggcgattcgcgggacgttccacggtgccagccgtcctaagctactgctgggcgatgacctgattaccgatactgaggcaaaatccccgactgagcgtgagaaccgctggaactggatttcaaaggctatcgaatacctgggcccgccggatggttcggtgaaatacctgggcgtcgggacagtgctgaataaggatgaccctatcagccgcgcgaaaaagaccatcggtcatgttgtccatcatttccgcgccattgtgacgctgccgctccatatggatttatgggaacagtgccaggagaagatgctcaacgacgataaacgcgccgaagagcaggcagccgagctgggacttgacctgccgcaggacaacctgccgtcataccggttttacctggcgcataaggcaacgatggatgaaggcgcggtgacctcatggcccgccgttcgcacgctctactggctgatgcgccagcgggcaaagaacggcaaagcgtttgccaccgaaatgcagggtgacccgcgtaccgacgaagatcgcacctttattaatatccagctctttacccagcgctggcgcgactggttgatttttggtgcctgtgatccgtcaatggggaaaggcgagaccagcgacccctccgcaatccttgtgggtggctgggacaaacagcacaaccgtctgcatgtgatggaagccgagataaaacggcgcgtgccgtcaaagctggaggcggatttgatctcgatgcagcgccagttcaactgtctggccatcggctttgagaacaacaacgcctatgagcattcccgctcgacgtttatcaaaaacgcgctgcgtcagggtgtggcactccctctggtcgggctgaccgccagtgtgccgctggaggtgcgtgttgaagggctggagccttacatcaatgacaccctgaacccgtccattttgtttaatccgggtctgacgctgctgttgtcggagctggagacctggccggaaccgcaaaccggtcatcattatgatggcctctcagcgctgcatattctctggatgatagccgtctcacgcgggtctggctcctattcctgggaacccatttcccgccgtcaggatgctttccggggtggggattccttttttgacgatgatgacgagccggacttcagcggccgtggcctttggtga

SEQ ID NO: 236552 - DNA, 219 bp, Klebsiella pneumoniae
atggctaggatgatccggctggcaagcgaccactatgcggccttcagcgccattgacgatctgcacatcgactgtaaccgtcaggtgaaggtattgcttcaggatggccgcgtcatcattgctgagcagggatatggccagactgcgtatgcgcgtctggcgcagctcgtcgatgaaatcaatatcgcaaatagcgagtccgttaagtcagagggttaa

SEQ ID NO: 236553 - DNA, 504 bp, Klebsiella pneumoniae
atggcatacccgccagagacgcgagaccgcgtccgcagagcttatgtttttgacggcctttctcttgaggtggcggccgttcagtgtggtgtgtcttacggaacggcgcagcgctggaagaatgacagcaaagcggcgggtgatgactgggaaacgctccggggggctcgcctgctggctggcggcggcattgaggaactgacgctggccatgtttaccgggctggttgtgcagttcaaaaccacgatggacaaactggcctatgacgatgtggccattgagcccgccgagcgcgtcaagctgctggccagcctgtctgatgcctttaacaaggccgtggccagcagtaagcgggccatgccggaagtgacccgccttgccgtcgcgctggaagttctgcagctgctggcagcattcatcaaagacaaccacccgcagcagttgcaggcatttggcgatctgctggaaggctttggtaaagagatagagaggatttatggctag

SEQ ID NO: 236554 - DNA, 228 bp, Klebsiella pneumoniae
atggcgcggcgcacttcgcgttaccgtcggggacaggccacctctgctgagatggcgttactgtctgaaattaatgagcgtcttgcccgtatggaagggaatctggatgaagttaaatcatctgctatccgccagggggccatcgccggtgcgatttccggcggtgtttctggtggtctggtttacaccaccattctgttgatcaaggcaaagctgggggttggctga

SEQ ID NO: 236555 - DNA, 252 bp, Klebsiella pneumoniae
atgacctttgaagtggcttttaatatcgtcctcgccatcacctcaaccctgtttggcggactcattcgctacctgtttgcggagattaaagagctgcgcactgccgtgcaggccgtccgcaccgaataccagcgccgtgatgatgcccggcgcgacaacgatcagcttctggaactgctgcgcgaggttaagcgcagcgtggaacacatcgaccaaaaactagaccgcaaggcggataaaaggagcagctaa

SEQ ID NO: 236556 - DNA, 609 bp, Klebsiella pneumoniae
atgaaaatactggttcttgagttccttaaaaagcactggctggcctgcatcctgattgccgctgcggccgttgcggggatgaatattggccgcattgccgaagagcaccggaaggacgaaaacctgcaggccgctcagaaggaaaatacccggcttaacaccaaagtgactgaactgaatgagctgcgtcggcgtgaggctgaagagaaagccgcagccctcgcggatgcatggcgcaaacaggccgatattgagcgcgagcgcgaccaactggcccgtgagctgcagcagcaaaaaaatgagctggagaagaaaaaaaatgaactcaaaaaggcgattagcgatgcggttaaaggtgatgtgggctttaccggtattggccctcgcgggctgtgcctctacaacagagccctcggttacccctgtgataaccgtctgcaaaagaccaccggcggagttgctggacgtgtcggggaaacctccggcagcggaggcggactctcccccgcaggcttactgaaacaaagcgccgattatggcgcatggtgccagaggctggagaaacagctgacagagctgaatgcctggtatgaccggggggaacaatga

SEQ ID NO: 236557 - DNA, 264 bp, Klebsiella pneumoniae
atggcgatcagagacctcatcaccaatcccgcatcaggccgtctttccacctcagacaccatcgtgatggccgcatttgtggccaccacggctgttttgctctggtacgcctggactggccagctgacggagtggctgtttctcggctacatcaccgcctgggtgacacagtcgcaggcatcgaaatatcacgccatcaagcgtgatcgtgttgtccgggaaccttctgataaaggagcgcaggatgaaaatactggttcttga

SEQ ID NO: 236558 - DNA, 534 bp, Klebsiella pneumoniae
atgaacaaagacactatttttcagtcgattctgaacgctgaaggcggttataccaaccatcccgccgacaaaggcggcccgactaatttcggcattacgcaggctaccgccctggcgcatggatacaccggcgatatgcgggcgctgacccgcagccaggcgctggccatctatgaatccgattactggtacggcccgcgcttcgatctggtggcggccgtttccccagagatagccgccgagctttgcgataccggcgtgaacatgggcccgtcagttccggccaaatggctgcagcgctggctgacggccctcaacgatggcggcaaactgtaccccgatttgatcgctgacggccagattggcccccgcaccatcaacgctctgaaagcctacttttcaaaacgcgggagcgatgcggagacaattctgctccgggcgctcaactgcactcaggggcaccggtatctggagctggcggaatcccggccgcagaacgaagccttcctgtatggctggctgaagcgggtttaa

SEQ ID NO: 236559 - DNA, 450 bp, Klebsiella pneumoniae
atgaaatacagtgagattaaacccgatttaagccaggttgaagcgctgttaccagaggtcgtgattgagttgatctcactgattggttatgcgaaaacagaaacgctaatcagcgccatcggcggcatcacctggaaagtgggaaccggaacccgccagaaaggcaaccggcgcggtgaagtgctcaaggagctggttggtcaggagaccgcccggatcatcgagcaccactttggcggagaaccgttgtatattccccgctgtgaccgtgccctgcgggagtggcggaaccgcgagtttatccgggagcataacgaactggtggccgccggtgaaagctcccgctttgcccgcatcacgctttgtccgaagtacggcgtaacagaccgctgggcgcaaaagttgctttctgagcgcccggtatcgtatcgccagcttgatctgttatag

SEQ ID NO: 236560 - DNA, 417 bp, Klebsiella pneumoniae
atgaaaacacctaatacaagagcgcttatcggtgtgatcaagaccggccaggcgtatctgcgctgggacgatatcacctatcgcagcgtgctggcccggctctgtgacggtaaaacgtcggcaacaaaatgttctctgggcgagctggagaaagtcagggagtacatgcacgaacagggcttcccgcgtaccagccgccgccacggccgccgcccgaaagtggctatgaccaaaacggcgattttgtccaaaatcgaggcgctgctggcagaggccaaacgcccctgggaatatgccgaagggatggctgcgcatatgtttaaacagcacgttctggagtggcttaccgtcgagcagctggctgcggtcatgaaggcgctgattatcgatgccaaacgccggaaacagagggggtga

SEQ ID NO: 236561 - DNA, 264 bp, Klebsiella pneumoniae
atgactaacgtcaagccaccgaaacagctttataaatggcatggtgcaaagctgaaactggcaaggccagcatcgaacatgctggcctctcttccgacaggaacagcaggacacgtaaagaaaatcgggcgcggactggagtttacttctgatgcatgtgaatgctgtggtgttcaggtgcgcatcacccggatgggggttaaagattttgacctcatcgcgttggtcacaacaaaccagggggatggccatgaaaacacctaa

SEQ ID NO: 236562 - DNA, 246 bp, Klebsiella pneumoniae
atgagaaatctcctgcgaaatatgaccgccagcaattttaaccaacgctttcctgtcggcacccggtttaagtattacccggtgccgggtatcccggactggagttatgtcacgacccgttctgaagcctggcatgtgaagagcggccgtctggttgtccgcattgagggcatgattggtggtttatccgtgaaccgcctggagccagttacttcatcagtgagcaatgggaggaatcatgactaa

SEQ ID NO: 236563 - DNA, 528 bp, Klebsiella pneumoniae
atgaaacaattaaatgcaagccctgactctaaagtatgggcgtggactgaaaatgaaaaacgatatttagttgaatgcggcaccactaaaacattgcatgaactggccagtaaattaaagcgtagtcgtgcatcagtgaagcgaatgcgacaacgcctgaagcttggaacattaaggaatcataataaatgggaacatgatgagattgctttccttagaaacaatgccggtaaaatggtaacagatatgattgcgaaagaactgggacgcaccgtagcttcagtaagaggtaaggctatgggattggggataccgttattatgcattggtgaaaacagtccttttgccattcacagcgatgaggacgtattactttgccgtcaattacgggatgaaggattaagcataaaagttattgccaataaaatggagatatcggtagctactgtcgcgtggtttatttacggctctcgtatgacgcagcaggatcgcatcatgctggagtttgaccgggagaagaaccaatga

SEQ ID NO: 236564 - DNA, 225 bp, Klebsiella pneumoniae
atggccgagttccttagtgtatctggttgtgaaattcaggataaaggcgataagcgtatttaccacctgaataatgatgctgttgttattgagcatcctaaatatccgggcaagacacgattccagttttacacaaaatccggtcagtctatccgcaaaccagctgataagaccgccatgaaacaagccgtagaacgtcataagaaacgctggagattagcataa

SEQ ID NO: 236565 - DNA, 516 bp, Klebsiella pneumoniae
atgggcttttataaaacgactcaaaaggcagcgcttgatgcctgggacaatgaaattaaccaacgtattgcgctgaaagaaaaagcggactcattcgctaaaaaatttggcggtaagccagtcttttctggtagcgctacggactatcactttcacggtctgtcattcgatgctgcgccacttgttggacatagcagtctttggacgctttcccgctcgcagaatggttatacgcgtgaaccccgaggcaagacccacattccccgcgagcgccgcgaggagcatcagcagctgctggacgtgtgggatgacggtcgccccacggaacggatctcacgagagccctactggaaagcgctgggggtcgaatgggggatgttgatcctttgtggtatcacccatttccgtgtcggcgacgtcatctatttcaaaactgacgtcacaccctccccggattccggcgcaactgaaattgtcgagtcggaatataaagcggcagagaaaaccatttcgtaa

SEQ ID NO: 236566 - DNA, 168 bp, Klebsiella pneumoniae
atgaaaacatatcttgaaaccattattaatcgtctgattaagactccttatctgcgtggaatagcctggatgttttgcattttgttttgcataaccttctggggcgtctgtattcagcttggtattaaagcatggggtcttgtatcaaaaatgtttatgggggtttaa

SEQ ID NO: 236567 - DNA, 639 bp, Klebsiella pneumoniae
atgaataaccagcaaaaacaatttactgagaaaaccacccctgaagggtactggattgatgccaaagatgcgtttattcccgttaagctgctgaaacctattgaccttgcacgggatactctggttggcgagatcgtaacgaaagcgattgagctgaataagctgatgaaggaatttaaagagaattcctttggtgatatttcggcgttcgttgacctgtcggctaacgaatacggcgttaagctgggcggcaaaaaaggcaatgtcacgctctacagctttgatggccgttatcttattcaacgggctatggcagaccgcatcgcttttgatgagcgcctgcaggcggctaaagaactcattgatcagtgccttgctgactggacggagggtgcacggccagagctgcaaatcctcatcaatcgcgcattctccacggataaatcaggtgcggtgtccacaggtgctgttctggctctccgtcgatatgagattgacgatcagcgctggcacagagcgatggaagctattggcgaatccttacaggttattgctacaagctcttatattcgtatttacgaacgtattggtgacactgaccagtacaccccaattgctctgaatatggcgacggtgtga

SEQ ID NO: 236568 - DNA, 192 bp, Klebsiella pneumoniae
gtggctgaaattgttattacgattaatgaaagcgacgagaacctgaatatatccgcgattatatctgctgagaaacaggattcccgtttagttaaagatgtttcaaacattattgcaccgttaatgctggcaacggccagcgctgaaatcgctaagtttttccaacatttaaatgaggcaaaccatgaataa

SEQ ID NO: 236569 - DNA, 234 bp, Klebsiella pneumoniae
atgtgccgtttaccgattaacgatccaaaaatgatggccccgattaaccgcctgatgcgtggtggcctgcaggttctggacattaacatccgcttccgtcgccctatcgtggaggttgaccgcccctttgaggcatggcgcgggaaggaggtcgaaataactgagcgcaaggatggcaaaagctctcaggtcaaaatgcttatctggcgtgggatgcatgttatctggaggtaa

SEQ ID NO: 236570 - DNA, 267 bp, Klebsiella pneumoniae
atgaaaaacgaatcgacttatacagacgaagacatcatgaaattagaagatgatgttcttggccttaaaataaccgttcatgtattaatccaattactggcaaagagtaataatgaaaatttagactttctcattaagaacttaggttttcaggctaatcattttgaaaatgaccatccggattttccgggtacaattgaaacccttgattcctatttcagagaagcagtaaaaatttacaaagattcctctaaaattaatgaataa

SEQ ID NO: 236571 - DNA, 894 bp, Klebsiella pneumoniae
atgacaattaaagctgaactgacagaactgatggcccgcaagggatacagccagactcaggtcgccaaagccatcggtaaaagctcgaccctcattagcctgtatatccagggtaaatatactggcgatgtaaaaaatattgatgaactggtatccggttttattacccgtgagcgcgagaaagagaaagcggcccgcatcaacgttgcattcgttaataccgtcacggcaagccgggcgctggatgttattaacctggcccatgtggactgcgatattaatgtgatttatggcgatgccggactgggtaaaacaatggtgttacgccagtatgcccgcgaacatcgcgatgcactgctgattgaggccgaccctggctacactgccagaaccgtactggaagaactctgtaccctgctgggattgtcccgcagcggtaacatgcatcagctcagcgaagcctgcattgatgcactgcgcgactctggtcgcctgctgatggttgacgaggcggagaacctgccgtaccgggcgctggagacgctgcgccgtatccatgataaggcggggatcggtatcgtactggcgggtatgccgcgcctgattatcaacctgaaaggtaagcgcggggagtataagcaactttatagccgcgttggcttcgcgctgaatattggtgacgcgctgccccgtgaagatatcgagaccatagcggccaatatgttagataccgtcagcgatgaggcggtaaacgatgccttgtttggtgccagtaagggcaacgcccgccgcctgtttaagctggttcgaggtgtcagtcgctacagttcactgaatcaggtgccggtgacagccggggcagtacggaaatttgcagaaatgcttattcattaa

SEQ ID NO: 236572 - DNA, 1761 bp, Klebsiella pneumoniae
atgcgccagtgcccggcactgctggatcgtgaagtcagtgcgctgaccgagaaacaaaagctcatcgctgatgcccgtgcagcgctggcaatggaggttgaaaaactccgtgatgccggtatgtcccgcacggctgcggttaactatgtctcgaatgcatcacgcaacggtacgttgcctgagcacctgatgaaggctgtcgagctggccaacgcacgcaaaggaagccgcactggtgttggcacccgcagcctacaggaatggctcagtgtctatgagtccactaaatccggtggtgaacgtctggccatgctggcaccaggtcatctaaaagctaagaagccggagcagatctcctggctgccagatttcctggcgcactggcgtagccttaatggcccgtcgatgcgcgaagcctatcgcgggttctgtaaacaatggcaggtagtttatgccggtcagcctgaaaagcttgacgcctgcccgtcatatgacgccgttcgtcgggcaatggtcaaactgccacgtcgtgagaaggcacttggccgcgtcagcgggtcggcaaaactggcctatgagacttatcagaagcgagactggtcgacgatgcctgtcaatggttgctgggtttcggatggtaaatcactggatctcgtcgcgcggcaccctgttcatggccagccatttacgccggagttaacccttgttctggatggacgtacccgctactgcgtgggctggagtctacgactgtcggaaagtatggatgcggtactggatgcttaccgttacggcatgcagcaccacggcaaaccgttattcgtctactccgataatggtggcggtgaggctaacaaaacgtttgatgacaaactgaccggtatattccctcgcatgggaattacccatatgaccagtattcctggccgtccgcagtctcgtggtcttattgagcgactcaacgccgtcatccctcaccggctgggacagcgttttgaaacgtttaatggtcgtggtgctgatcgcgaaaacgtgcgtatgacgaatcgagccattcagtccgctatacgtgcggaagctgcaggtcgtgaactgacagctaggcagaaaaaagatctgagcaagcttcctacatggcaacggttgctggacgtgattgctgaagaggtggacgcctataacaacgagcatgagcacagcgaactgcccagacgtaatggccgtcacatgacgccagcagcataccgaaaaatggtactggagcaggaaggtgatgaaattgagtatctgaccgatgttgaactgcgtgaggtgcttatggccgaaacggtgcgtgtcgctcagcagggctggattagcctcatgaataacgactacttctcgcaagaccttattaatgtcgataaagaagaagtgcgcgttgcctatgatattcacgacgccagcgaagtcattatccgccgcatggatggaacatatgtatgtcatgcagtctggaacggcaataaacgtgatgcgatcccggtcagcaaaatgcaggacgcgatgaaacaacgtaccaaacgtcgacttggattgcttgacaaaaaacgtgaggaagtggaagccgaagcgcgtggcctgctgcctggtagtgtggtcaacgaattacccgactttggcagttttataccgaaaatcgttgatgagcctgaaccagaatatttcttccttgcgacagaccgcgaagaacatctgaaaaaagccggaaaccataagtag

SEQ ID NO: 236573 - DNA, 387 bp, Klebsiella pneumoniae; identical to SEQ ID NO: 127101

SEQ ID NO: 236574 - DNA, 198 bp, Klebsiella pneumoniae
atggcaggtaattacgcagtcattgaaagtggaatagttaaaaacatcataattgcggaaagcggttatgaatatgatggtgctgaacttatcgaatatcctgaaagtgtattttgccagcccggaatgttttataacaaagatgatggtttattctatgacgacaaagagttctcaaaaataaataacatcatctaa

SEQ ID NO: 236575 - DNA, 180 bp, Klebsiella pneumoniae
atggatatcaacatgaataagactagcagaaatccgcaagtaaacatcaggatgcctgatgacctaaaaaagtcgctgaaggagattgcagaagagaaagacaggtcgctgaactatgtaattgttcaagcgttaaaagattttgccgctaaatgcagtgaagccccggcagtgcgctaa

SEQ ID NO: 236576 - DNA, 726 bp, Klebsiella pneumoniae
atgaaacttattaagtattggaaagttcagcttctgcagttgtctcagccttccagcattatcaacgcccgcaatctggtcgaaaacctattgtttgaggggtactcgaaagataaaccgaaaattaacctcgcttccggagtaaatattgagttgtttacagcgcctgactcactggaatcccgtatcttccgtgatcacctcattgacagcgtgcgcttcatccctgtgtatgaagatgatggcgacaatgtagatgacggaactcaggaagagcagactaagccaccctcacgcgaggccatgattgaatatatcaagcaggccattggggaaggctatcagcctaaaatctgccatgagctcattagcaatcctgatctgctttggcagttgcatgacgaggctgtcgattatgaatatcgcgcttgttggcgctggtaccaaaacggtcatggttttcatgagacttttagcgtccctgagaaaatccacgatcacgcctgcgtaaactgttttgccgataaaggccaatgccttggcgagtgccacgtatccgacgttaataaggcccgcagttcctccttcgaagacgtagtgaagccggtaatcaaatggcttaacgaaaacgccaaccctcatacatcagtgatcatcgacgcgaccagtgctcaactgcttactggtgaaatcggcattcacacggaagagttcattaaggactga

SEQ ID NO: 236577 - DNA, 477 bp, Klebsiella pneumoniae
atgttgattaacaataaagttaaaaaagaaataaaggcaaaaagaaagaaggcgtccaaaatattttggacgtgcaattacatcgaaaagaaatatctagaacctattgtactagccctactttggttatctgggataccattgctggcatatcttaagctatccccgcaatgttcacctttgacagcattgctgatatacggatttgggatttttacagtactttctgtatggttctatttggatcttcctaaaagctggattgatttacttgaccgtcaaattttgaagtaccgatcagatacatcattcattgatgtactcaaaaatgtgcacactgaagactttattgaccatggcaagataatagtaccaattctcgacattaaatattgggctgttagccaagaatgccaactgaatagactgcttaggaaagaaaatagcgtcaaaatcaaaaaaataggcagttgttaa

SEQ ID NO: 236578 - DNA, 276 bp, Klebsiella pneumoniae
atgaagaaagcgaaaatgctggcatcaattaccgcagataccagcaggattgaaagtaagatttcggcgttacttgaagtgcttcccgagaatgtcccggacaagcttatcgacatggttacgtgcctgattggcgatatcagatttgtgaatgaccctcccgcagttggcacaggtggttccttcgatatcctctacactcttgatttcgactccgctgcgtacagtgaggttatggccgcagccggggcacttaaagttaaccttgctcattag

SEQ ID NO: 236579 - DNA, 318 bp, Klebsiella pneumoniae
atggctgagttacgcgcaggcggcatggcgttaataattgatagcgccactccagaagagattggccgttgcgtcagtctcgtcaagctaattcccgtgcgtgggtcattcacctcaccacaggggcgcccctctaataatgccggagaaattccagcctggtttgtcactggcgatgtaaaggcgaaactgggggatgattcccccatatgggctggaaagggttgggcactttatccgcctcagtacctgatgcccatcgacggcgacgacttcagcaatgaagaccagcgccagaaggaacgggagcatgcctaa

SEQ ID NO: 236580 - DNA, 210 bp, Klebsiella pneumoniae
atggattacgaagaagttgcacaactacgctatcaggagatgtgccgcattgtcggggatgtcgtatttgcgatggtcgccgaaggtcatgaaaccaggcgagtagccatagccgacgtaataagaaccgagatttcaaaggggctgaataaatggaattcagaacagattcaaatgatggaactggctgtaaatctgttggaagaatag

SEQ ID NO: 236581 - DNA, 372 bp, Klebsiella pneumoniae
gtggtcaatctaagcgagtggaaaacagaataccggaacagcgcctatgtgaaagtcgccaaatacattgacagccatgacttaggctccgggttcggcagcttctggttgaccacttctgtgtccatacattcaaagaaggcgatcagtattgccccgaccattgtcgaagaacagcaaaagcggttacgaccttatcattggttgtctaatgagcagtggtacacggtcaaagcaaggtattatattgcgagttccgatgaggaagtggcggctatgagcgaggtttttggcaaagactatcggttagaaagcgtctccggcatcagattgatgatttaccctgatgcccgaatcattacctctgaatag

SEQ ID NO: 236582 - DNA, 135 bp, Klebsiella pneumoniae
atgctgagcagatttgtgcccctctatgtccctggggcatacctctggttatccgtttgcaaaaaaaaatatttaaaccttgtttatgagcatttaaatcagaaaagtaacttaactggcctgtacgatagatag

SEQ ID NO: 236583 - DNA, 294 bp, Klebsiella pneumoniae
atgagtatgcaaaacaaaaaaagtgattcttactttagtcgaaacaaaaaatggttgaacccgctggttattctcgctttttgcctgttaagctcacaggtctggaagattataggcgaaagcaatgtactccctcgttacattataaaaattgtcgcaaccattgcgcttttcatctgcgcatttcatacaaggatgataccaactgtgtctgccagaatcattgttactacgttctattttggtgtatttggtgtgtttggcttgctaattttaaattattttagagggtag

SEQ ID NO: 236584 - DNA, 252 bp, Klebsiella pneumoniae; identical to SEQ ID NO: 230289

SEQ ID NO: 236585 - DNA, 597 bp, Klebsiella pneumoniae
atggcgcaaacactgcaatttgagaagagttatcaaaacgtactgattcctgcagagccgggaaccagcgaatacctgcaacttatcccagtagggcaactgctttgcggtgagttccgcaagccccggaattacgcattccacaagaagttcttcaaacttctgactctcgggtatcactactggacgccttccggtggcctcattgagcccgctgagcgcgccctcatatccgggtttatcgacttcctttcatctgacttcgatcagcgcgctgcgctccagaacgccgcggagatgtatctctcctctgtcggtatttctcgttcccgcgatatggcgcttctgaaacacttcgaatccttccgcgagtgggcaaccattcaggctggcttttacgacgaataccagatgcctgacggcagccgtcgtcgtgtcgcaaagtcgatctccttcgccagcatggacgacagccagtttaacggcgtctacaaatcagtgctgaatgtgctctggaactacattctgcgtcgcaagttccactcgccagctgaggctgaaaacgccgccagtcagctgctgagctttgcggggtga

SEQ ID NO: 236586 - DNA, 2418 bp, Klebsiella pneumoniae
atgagagctgccaccgctacgaagccaaaaaaaattgatgcctaccgtaaggagccatcagtaaataaaaagtatttgccctattcttatcacctcaatgattacgtgatttcgatggaaaacggcgatctgatggcttttttcaagctggatggccgcacacatgactgcgcatcagatcgggaactggtcacctggcataaagaccttaatacgctggtcaagagcttcggaacagaccatgtagagctgtggacgcatgaatatcaccatgaggctaaagagtacccggatggtgagtatgaccattttttccctgcttatgttgatcaatataaccgtaagctgcacggtgattccaagcagctgattaatgacctttatctgaccgttatttacaaacaggtaggggataaaacacagaagtttctggcgaaatttgaaaagccgactcgtgacgaaattcagcaaatgcagaatgaggcgcttgaaggtctggaagatatttctgaacaaatcctggaagcaatgaagccgtatggcattcagcagttgggtatctattatcgtgacaaacgcggtgttgaaattcctgcgcctgataaaaaagaacgtgaagaacttgctgaagtcgatgaatcagacatttttgacgaagccattgttatcgaacgcaacgagcctgaaccttcgcaggctcacgcttattcaaaagcgctggagttcctttatttcctcgcaaatatggaatgggccatcgtgcctgtttgccgtgatcgtatccgtgagtacatcatggacaaccgccctgttagctccctgtggggggatgttgtccagatcagaacggtagatcacaacttctataccaccggcattgaatttcgtgaatacgaagaagatacagagccaggccagcttaacatgcttaaagaagccgattttgaataccttctgacgcagagtttttcttgcctctctgaatcttcagctaaaacgtttctgacgcatcaggaaaaatctttgcaggaaacgcgcgaccgtgcgcaaagccagctggcacagcttggtactgcgctcgatatgctgacgtccagagagttcgtgatgggctaccatcatggaaccgtgcatgtctgggataatgaccaaaacgcggtacagcgcaaagcgcgtcgtgtgaaggttatgctaaccggctgtggcgtggttggcgggactatcagcctggcctctgaggctgcatattatgcgagactgcctggcaaccagaaatgggcgccgcgcccggttccgataaactcatggaacttcctgcacttcagcccgttccacaattttatgcgtggcaagcctgacaataacccgtgggggccagcgctgaccatgttccgcacgatcagcggtacgccactctattttaatttccatgtgaccccgcttgaagaactttcctacggtaaacgcccgctgggccatgcgttaataacgggtatgtcgggggaaggtaaaaccacgctgcttaacttcctgctggcgcagtcaatgaagtacaacccgcggctttttgtttatgaccgtgaccgcggtatggagccgttcattcgaagcgttggtggctactataaagttctgcaacagggtatgccgtccgggtttgccccgcttcagattgaaccgaccaaacgcaatattgccctcattaaaaacctgttccgcatttgtgtggaaaccaccaataacgggcctatcagcgcaacgatggctaccgaactggctgaaggcgttgatgcggttatgggggaaggctcacttattccacgcgaggcgcgcaccgttactatcctggacgggtacgtgaatgaagttgtggaaaatggcgtatcactgaaagggctgctgcgcgaatggacgcgcgaaggccagtatggctggctgtttgacaatgataaagacagcctggatctcagcgcgaatgatatttttggcttcgatttatccgagtttatcgcagccaaagaggaagtatccagcccggcccgtactccgctcatgatgtaccttctgtaccgggtacgtgactccatcgacggcaaacgccgcgtcattcagtgctttgacgagttccacgcctaccttgacgatccggttatcgagcgtgaagttaagcgtggtatcaaaactgaccgtaagaaagacgctatctatgtgtttgccacgcaggagccgaacgatgcgctgtccagccgtattggccgcacgatcatgtcgcagaccgtcacaaaaatctgcctgcgcgatccggaagctatccgagaggattatgccttccttactgatgctgaatacgacgcgctgatgtcgattaccgaacactccagacagttcctggttaaacaaggggtcggttccgtctga

SEQ ID NO: 236587 - DNA, 345 bp, Klebsiella pneumoniae; identical to SEQ ID NO: 97180

SEQ ID NO: 236588 - DNA, 1269 bp, Klebsiella pneumoniae
ttgaataagaaaatattacttaactccatatggatggtgtctgaaaaaattgtctcaatttttggccttttttttgttacatcatttgtcgctaagtatgttgggccatatatttatggggaaatagcttacgtatcatcattgtttcaaattactttagtgatagctcaactcggcagtgatgttattatttttaagcgcttaagcaagaataagatatctggtatacggctactaaagactacagttcctattagaatttttatttatagtcttgtttctatcccgattgtcatcttaaattttgatatcaatagccatactataaattatttcattatagcatcattctttgcttgtttgttttcatccttagatgtttatagtatttactataatgttcgtttggagtcaaaaaaaaatgcaatgataaatgttgtcgggttagttataagtctaataattcgatgggttattgcctattttaaattacctgctgaaacattatcaattcctattgtagtgactactctgatacctttcattttacgtagcataatgtttaatcgtatggaaaacgatggtgtcaatatcaacagaagaaaagtctttaaatattctcgatacctcttgttaacagggatgacatttgtcatctcagctgtatctgttgctatatatacacgtctatctatctggtttcttgattatttttatgggaaatcttatgtaggtattttttccatagcagtctcattagctagttcatggtcgtttgttttactcgcgattattacttccagttttccacagattttttcggaaaataaagatttagaagcaataagaaaagcaggtaacttggggcgagtgattttagttatatccatttttataataatttttatttatttaatcggtgggtatttgcttcaacttttgtatggagaaaaatactctagttcttttgaacccttgataatattgtctatatcaacaatggtttcatctttaggcgttatttcttctcgttttattgccaaatattctggttattcatatttagctaaaaaaactatcgttgttttatttttaagtgcatgttttaattattattctgttaagtattatgggatgcagggagctgcttgggcgacgttagctactgagctgttctctctcacagttctaaattatttctttaagcatggaattgtgtttaaagtgcataaaaatatcctgtttaggacttcatcaaaggttagttaa

SEQ ID NO: 236589 - DNA, 1395 bp, Klebsiella pneumoniae
atgaaaatactcaagcgaagaactcactcaaaaaccaatgcatctttgatctccatcgtacaacgtttttttgatgtatcagtaatcatttttggtttatgttttgtatattatgttgctggcattgatatatcaagtaatctatttttgaacgcgttgattgttctttttgtattccagatgattggcggggttacggatttttataggtcctggcgtggcgtaagattaatttctgaacttaagcttgttttgcagaactggagtttgagcttaattattgctgttggttttatttctctttcaacacaccttataattaattttgatatttatatgtgttggtatgttgttgtctcatttgggattgtgctttgtcgaattttaatcaggtactgcttcggaaaactgaggcgttttggttataatacccgccgtgtcgcaatagctggttctatggaagctggtatcgagctgttgaaaagctttaatgatgagccatggcttggttttaaagttgaagggatctataatgacaatgttattcacactgcgggtataagatatgtaggggattttgaacaactaactgctgatgcaaaaaacggtaaactcgaccgtatttacatagcaatgaatatgagtgatgaaaagaaaataaagttattggttaggcaattaacgaatactacttgctctgttatgttgattccagatatatttacgtttaatattcttcagtcacgtactgaggaagtcaatggggttcctgtcgtccccttatttgatacacctttaaacggcattaatatggtttttaaaagattagaagatatcattttgtcaattcttatattaaccttaatatccccagttctcatcattatttcgtttgctgtgaaactaacctcttcagggcctgttatctttaggcaaactagatatggtatggatggcaagcctattaaggtttggaaatttcgttcaatgaaggtcatggaagatggtggtgtcgttactcaggctaaacaaaatgatatccgtgtcacaagagttgggcggtttttgagacgtacctccttggacgagttaccccagttttttaatgtgctttcgggtgaaatgtctattgtaggcccgaggccacatgctgttgctcataacgaacaatatagagaactcattgaaggatatatgctacgccataaagtaaaacctgggatcactggttgggcccagataaatggttggcggggggaaactgatactcttgaaaaaatgcaaaagagagtagagtatgaccttgattatattagagaatggagtatttggtttgatttatatattataatcttgaccgtgtttaaagggtttgtcagtaaaacagcgtattaa

SEQ ID NO: 236590 - DNA, 1092 bp, Klebsiella pneumoniae
atgagcaccggcagcggatccgtttacccgccagcgttgaggatgagcaccggcagcggccccgcttacccgccagcgttgaggatgagcaccggcagcggcccactttccccgccagcgttgaggatagccaccgacagcggccacgcttacccgccagcgttgaggatagccaccgtcagcggccccgtatgcccgccagcgttgaggatgatcaccggcaacggccacgtttacccgccagcgttgaggatagccaccgtcagcggccccgcttacccgccagcgttgaggatagctaccgtcagcggccacgcttacccgccagcgttgaggatgagcaccggcaacggccacgtttacccgccagcgttgaggatagccaccgtcagcggccccgcttacccgccagcgttgaggatagctaccgtcagcggccacgcttacccgccagcgttgaggatgagcaccggcagcggccccgtttacccgccagcgttgaggatgagcaccgacagcagccccgtttgcccgccagcgttgaggatgagcacctgcagcggccccgcttacccgccagcgttgaggataagcaccgtcagcgcccccgtttgcccgccagcgttgaggataagcaccttcagcgcccccgtttacccgccagcgttgaggataagcaccgtcagcggtcacgtttacccgccagcgttgaggatgagcgccgtcagtggatccgtttacccgccagcgttgaggataagcactggcagcggccctgtttacccgccagcgttgaggatgagcaccggcagcggccctttttgcccgccagcgttgaagatgagcaccggtagcggatccgtttacccgccagcgttgaggataagcactggcagcggccctgtttacccgccagcgttgaggatgagcaccggcagcggccctttttgcccgccagcgttgaggatgagcaccggtagcggatccgtttacccgccagctttgacactaccagcgactacagtcgacattaaaatcgccgtgacctgctgcagcgtgatatacgcccggctggcatcaaaagaatcttaa

SEQ ID NO: 236591 - DNA, 1038 bp, Klebsiella pneumoniae
atgaagtatgtgaatctgggttgtagcgggttgaaagtctcccgtctttgtctcggttgtatgagttatggcgaacctgaacgtttgcctcaaccctggtccctggatgaaaaggcgtcacgaccgctcattcgtcaggcgcttgaagccggcattaatttttttgataccgcgaatatctactcgggcggaagttctgaagagattactggaaaagcgctgagagaaatggccagacgcgacgagatcgttgtagcgacaaagaccttctttccgtggcgcaactcacccaataccgggtttctttcccgcaaggccatttttcagtctattgacgatagcctgatgcgcttaggcatggattatgtggatctctttcagattcatcgctttgactactccacgcctgttgaagagaccatggaggctctgcatgacgtcgttaaagcaggaaaagcgcgttatatcggcgcatcttctatggaagcctggcgctttgcaaaaatgcagcataccgctgagcgtaacggttggacccgatttatcacgatgcaaccgcaatacaacctgctttaccgggaagaagagcgcgagatgctgcccctgtgtgaagaccagggcgttggggtgatcccctggagtccgatggcacgcggcaggctcacgcgcgactggagtgtcacgtcccgacgaacgcaaaacgatgcctttgcgttaaaaatgtatgagaacgcagcccttctggataagcccgtgattgatgttgttgccagcattgccgaaaagcacgcggtgccaagagctcatgttgcaattgcctggctgttatcaaaatccgtcatcacagcaccgatcattggcgcaacgaaaccagaacatctttccacggctatcagcgcgctggacttttcacttagcgatgccgaaatcacggaactggaagctcgctatctgccgcaccccgttgacgggatcattcccccgcttccggatacgccgccttccctcacgccgccttcagcgatccagaactattaa

SEQ ID NO: 236592 - DNA, 945 bp, Klebsiella pneumoniae
atgaatggactaaatcataacgcgcttacatgcagtgccgtccccataccgccctgggagcgttctcttcagaccgtggaggcccagccgtacttcaacgtttcacaggcgtcgctcgtgctcgaagggatcgtgttcgatcggaacaataacctgctgtttgttgatgtggcgacggggcgcgtgtttaagctcaccccggagcggcagctttccattgtccttaaggagaattcattcggtgcttccggcctggcggtacacaaagatggacggatctttattgcgtcggtgggcgatatgcagcgaggttctgtccgggctatcgaacccaacggcacccgtgagcagatgattgttgcccctgatactggatttcttgtcaacgatctggtctttgataatcagggcggattttatttcactgacagccggggaaattcagccgatccacagggtggggtgttctacgttagtcccaatgtcgggtcaattcatgccatcctgcctggactcgcggtcgggaacggcatagcgattgaccccgccggctctcagatatgggccacagaacacgctaaaaacaggcttcatcgcgtaagactgtcagacgccaccacggtcgccccgtttggttcagttgttacctatcagttcaccgggccggcgccagacggggcccgtgtcgacagcgaaggcaatgtatatgtggccatctcaggccagggccgcgtcatggtcttcaaccgcaacggactgcctattgggcaaattgtgctgcctgaccgcgacaaaggccgtaaccttaaatcgacaagcctggcgatccgccccgggcatcgcgagttgtttattgtcgctaacagcgggaccgaacctggtggagcgatgatttttcgatcgggcgcattcgcgccggcaccgtttcccttttcacatcagtga

SEQ ID NO: 236593 - DNA, 357 bp, Klebsiella pneumoniae
atgcataattctatgcgttttgatgcaataaaaatcgccgcgctacataacctgccacgcttccagcccgatgccctggccaaaaacatggtgctgcttgaattcgcgcagtcgtgggcccgtcgcaaaaacaccactccggttcagttcgcgctggcctgggtaatggcccagcggccctggattgtcccaatcccgggtacgacgcaatatccgcacctgatagaaaacagcggcgcaccgcaagtccggttgacggacagcgagctacgcgaaatcgatgcggcgcttgccaaaatcccattgcagggcggtcgcgccgatccgtttaccgaaagtcagtttgataaaagttaa

SEQ ID NO: 236594 - DNA, 831 bp, Klebsiella pneumoniae
atgacagcaggtccttttgagaaacgtggaaatgtcactctggcgagcggcgagtatctgtaccgtgatgcggctattaacgatgcgtgtcgcttgttgctggattttggtcgcacctggccgggtgggaataaaacatctggctacgccagcaacgatgttgtgaaaaacttttgctatacgcatgatgtggctaccgtcggcaacgcaatggattacgacggcggcggcattaagtcaactggtcattatctgggtcgtgtcctgctccccgatagcgctattttgcccgcgtcatgcacaaagcagttaatcaccctgacgttcaaaatccctgttacgggatatgacccccagaatagcgcccgacaatgtgcgttactttcagtgggtagtggcgcggcgaatgcaacaaccctttctgcaattctggcgaacagtaatgcttctggcgcaatgaacaacatgcagttccaggcgtggggggcatcgtgggatggttccggtggtgtggataccgctgtgaaagcagcacttggaacagttactcaggtggccatgtacgcctacaaagttagttcgacgcaggttaagagccagctttttgttaatggctccccggtcgttgaaaaagcgatagctaactcagcagcatatccgtctgcgtttacaaaaaaacaacttttcagcgggtcattcggcactgcgattacaggcggtacggtggcgacaatctaccgcgctggtgtttacgatatgacagactccgatgttaatcctgcggatatcgttgctctggattattctcgtaatcactcccgcttcaactaa

SEQ ID NO: 236595 - DNA, 510 bp, Klebsiella pneumoniae
gtggtttatccatataccacccgagaaatcggcgatattccgctggcgacccgctatgaccagcatcgagaagcgataaacattctgtggatcgggcgcaacaacgcatcctccatcatgcagatcctcgccgacatgaaggccatcaccgataaactgctgcgacagaatagacgttttgtcgtgttgccggaattcccgatggccagcgaagtgataggcacaaccgggcaggcccaagtgatgtaccttaactcggagttaaagcggctctatcccggaaactactgtgaaattaacggcgttgacctgttgcagaatttcaagaaccactacaaccccgcttatgcacaggatgtgactgacattgccaatggcgtcaccccaacctcattacggcaggacacactgcatcccagccagacacttcaggctaacgcgctgtacattggcactgaggtaaacgcaattttcattaatcaattcatggtcagcaagggctggctgtaa

SEQ ID NO: 236596 - DNA, 384 bp, Klebsiella pneumoniae
atgtcggtgatgaccgaaaataccctggctgggtctggcggcctgttgcgttgcggcaacaacgccctgatggattggattatgagcccgtcatcaggtcaggccattattgggtggggacagtacgaatgcattttgcattctggccgttctgtctcaatgagccattacctcacagctgccccaagcccgaccaagggctcttgcaagtctaatctggttcaggactcttgcgcggcgggtttcgacgtgtcgtgcagcacgtttctacccaagagccctgaccggattgcaggcataaaaaagcccaaggcgttaacctcgggcttgaattttttgtgtgtcgacaatcgaagctatggcgacgatatcagatttacatga

SEQ ID NO: 236597 - DNA, 468 bp, Klebsiella pneumoniae
atgcgcatacgcttcacctgccgccgttatcctgggaataatatctttgccaaaatcatgggtggagtgttcatcccgatcgtcgtcttccagcagctggtagagatattccgcatcaaacacataaatgcccatactggcaagcgagcgggtttcatcgccaggaatggtgggcggattagccggtttttcaacaaattcaatgattttgtcattctcatccacggccatgacgccaaaagcgcttgcctcttcaaccgggaccggcaggcaggccacggtacagcgcgcccctttttcaacgtgatcgagcagcatccgcgaataatcttgtttatagatatggtccccggccagaataacgacatattccgcatcatagcggcggataatatccagattctgggtcacggcatccgccgtcccccgataccagttctcaccatgcacccgctgctgcgccggtaa

SEQ ID NO: 236598 - DNA, 2193 bp, Klebsiella pneumoniae; identical to SEQ ID NO: 206895

SEQ ID NO: 236599 - DNA, 204 bp, Klebsiella pneumoniae
atgaaacgtctcggcctggctgatagtgaattcgcccaacgtctgcagcagattgaaatcgagcgccggcagctggagatcgacaagctccgcaaagaactggccgctgacccggaggatgacgaaccaacgccagttgcaatcaatatcaacgtagtcgatgcacgagtgagggaagaggatggcgatagcaccgacgcttaa

SEQ ID NO: 236600 - DNA, 255 bp, Klebsiella pneumoniae
atgccctacagctgttttggcaatgctgccggcgttgaccctgctcatctgcaacgcgccatcctgataaccacggttagcgtgtccgcgtaccttgcgggctatctgctcatgcgtatcacccagcagaaatccctgccgcaccgtattgctgatacgcgccatgcgatcggcttcaaggttatcagcccactcactgagcaggcgcccctgaaatggctgcgccatcgccgcggcatacactgcatccggtga

SEQ ID NO: 236601 - DNA, 852 bp, Klebsiella pneumoniae
atgataaacatacaagagttacttgccgcaagcaaagctaaggaaaacaatcagcttgttaaaggggtttggttccttattcaatggtcacctgatgactatagccaagagcgttttaatattggtgttgctttttcatcagaaagaggcgagaaacaagttaagttcaccaaatccttcaaggaattatctaattggtatggtggtaacttaacaaagcaaggtgatatggttataaaaatagctacccatacttttattgggaaaagccttgataaattttccagtgggtttttcgagagtggaattcattatgtccctatgggtatggctcaaggtgagtcgatagaaaaaataatgaatgtgctatttaaagatgtagttcccatggctcaagaaaagcaaaatatcgctagggctagttatacaacaacacgaaatattataactgttgttagagaagccatatcaaaaaatagcgtgcttaaagacattatgcctgagaatccaatggtggaaacgctttcaggaatttcggttaaggttcctattcaatttagaagtaatgcaggaactatagtgtcggctgattacgctacgagcgatacagtagaaaatgagttgcttaggtcttttagagatattgatcttatcttaaatggcaatgattttgataatgtaaatagctttctcttgttgccagcatctgccaaaggggaggctaaaaaaattagcaatctaattagtgattatacatcttctttaaaatctaagggcgttgaaactattagtgctcatcagccatcatccctagtgaataaaattgatggttggtataaagaggttgcataa

SEQ ID NO: 236602 - DNA, 840 bp, Klebsiella pneumoniae
atgcacatagaatttaagccgtcatctgactttaataacgttaaaattaatagagctcctgacggcgctatggcagaaacttttagctgcaatattaactggggcgagaatcttgacagcagaagctatgtgaaatgctttagcgatcgcaagattatggcaatttccaacgaaataactggttatattttggcgaaggaggcagggctgcctgtacctgaaaaatgtgctttaatagcattgccacaagaaataaaagatgaatttaaatccaggtctggcgaagagtgctttgaatacggatttgctatgatgatggccgacgggagcacgcctaacgctattataaaaatgcacagccctgatggggattttgcaaattccatctttatggatgctttaaataaatggcctcaaacagctaggcttatagcgtttgatgaatgggttgccaatgaagataggaatttaggtaactttattattacgccaaataataatattgtggtcatagatcatagtaatctcccatgcgaaatgctatgggagtgtgatgacttaataaatgaaaaggcatacaccaataaattggtgttgatttatgaattatgtaaggtaaaggggcgttcatactccattcctgatgatgcctttattaataaagaagctagccaccatgctttaatattaacttcttcaattgcagagcttgaagcatggtgggattatcttttagatcagccaagaaaagctaagttgaaagattttttgaacgtgcgtgccaacaaagcaagaacattgccttataaccagcagtctgggctaaggatgacagcatga

SEQ ID NO: 236603 - DNA, 621 bp, Klebsiella pneumoniae
atgataaagaaaaaaggatttaccttactggaggtctctatcgttttaggtattggcactcttattgcttttatgaagtttcaggatatgaaaaaagatcaggaaacggttatggcggaaaatgtcggaacacaaataaaacagcttggtgaggcggttaaccgttatatcagtattcgatacgataaggtttcaacgttgtcatccaccaacaatcaaagcagcgatccgggaccaagaacttgtacggctaatagctgtgaaattacttaccagacgttaattaatgaaggtcttttacctgtcggctataccggaaccaacgcacaaaagtccacgtataagattttgttgaagcgttcaggaacagcgcctgattacgtgattaatggtctgataacaacgagtagtccgtggaaggaaggtaagaatgtccgttatgacctgctgggtaaagctgttcaggctgcgggtgttgatggggggatgagcagagcgacaaagatcgcttctggatatggtggtcagtggagtgagaattctgggaactacagcaatattactgacggtggattgttggcctaccgcgtgggctacaactcggctttgttgaataaataa

SEQ ID NO: 236604 - DNA, 1302 bp, Klebsiella pneumoniae
atgacagctgaaatagtagttattaataacacagggatcgccctagcagctgattcagctgttacgactgaacacaataggcttataaaaattaataacagcgctgaaaagctgtttgaactatcaaagcatcaccctgttgggattatggtttataataacgctgctctagggggagccccctgggaactgattataaaatcatatagaaagcagcttggcaccgaaaaatttggtaccgttaatgattatgttcatgatttcctacattacatcaataaaaacgaggacttaataactcccagtatgcgccaatcgtgcgtaataaatttagttatagataatataaaagggttgatgcaacacattaacagtaacaacattgttaactatttaactttaaaccctggaactaacataaataacaatatatttcaaagcatagtaaaacaacaaattgataatgaaatcaacgcattgcgaaacaaccctttctttgaaggttttgatgagcgcgacttaggcgaaatcatcacatatatctcagatgtaataaaaccattaatcccgtcggttatagtgcttgataactttgagagtttagaggaagatttaattgacaaaataatattatattcctcttatttaatatgtaaggtgcacactagtcggacatactcaggtatagtcatcaccggttacggtgataatgaattttacccatctataaatacactccatgtattcggcatatacaaagacagaattatgtttagatacgttgaagataaaacacacaataatatttcgaataacggatatgtaataccattcgcccaagaagatgaagtgctaacatttattgatggttgcaaccctaacattaatgttttcaccaacacactcagcgaagaaatattcgacagactcaataattttattgaaagtaatatatacccgagtttaaacaatcaactactagaaggtcaatttaaaaccgaagtttctcaactcaaaaatttaattatgagtgattacgataataagttgaacagttacattgaaaacaatcataccaagaagatgacatcgatgcttcagtctcttggcaaggcagacttagcatatatggcggaatctttggttaacctaacggctttcaaacgaaaagtatctcatgaatatgagactgttggcggtccagtcgatgttgctgtattatcaaaagtagatggctttgtttgggttaaaagaaagcactatttcccgaaagagttaaattctaactttttcaaacgctaa

SEQ ID NO: 236605 - DNA, 384 bp, Klebsiella pneumoniae
atgggcattcgtgacgagctgcaaaccgaagtcgccgcggcattcgataccgacctgcaggatgccgttaaggatttcactgggtcatacaccgttcggggtgcctgggacccggtgacggaaaccggcactgaaacgcaggtgacttactcggggcgtggagtactggcgcgctataagctgcgccgtatcgatggcgttaacattctgcatggtgatgtgaagctaaccgcactggttaacgaggtgactgataagccggccgtcgggcatatcatcaccgcaccggatccggttacgggtgagcttcagcgctacgaggtcatcaccgcttctgccgactctgctggcgctgcgtactccattcaactgcggagggcgtga

SEQ ID NO: 236606 - DNA, 309 bp, Klebsiella pneumoniae
atgtcccgcgttttcaataaaaagaaagccctgaaagtcgctaaagttgcgctgccggttgctgctgtggcggcgttcttcccggatgctgcgatggccaccaccacggcaaccgacctgatgaagtccggggatgcgaccgttaaaggcacgtttggtaagcagtccagcgtcgtcaaatgggtggttctggcagaagttgtcgccggcggcatcatgtacatgatgaccaaaaacgtgaagttcctgtttggcttcgcgattatttccacctttatcaccatcggtatgtcggtcgccggttactga

SEQ ID NO: 236607 - DNA, 1176 bp, Klebsiella pneumoniae
ttgaataattcagccataccgtcacgtctgacggttgtattttctgcgagcggcgacaaaaacacgatcccggtcaattccacctctgaaacgctggctgacggcctggcggcgatggattccggtttcccgccgctgacccgtattgcactttctgccggcggtaagccgccaagaggtcaggactttaacggcattttcaatgacgtttacacgcgccttcaatggtcagctgccgggatggggtatccatttagtaacgaattcagcgctgcaatttccggatacccgaagggggctattgttcctgcttctgattactcaggtagatggttgaacctgaacaacggaaatacagtgaatccagaatcaccttcaggatctcctactgggtgggttcctcaaagttcatatggaattactgccatttctggtatttcaggatccagtatcatcttgtcttcactacaggccgcaaaagaacgaattatcctgagcgggacattaactgcaaatatcaatctggtatttcctacgtggattaaagggtgggttgtgcacaataactgcacaggtccatattcagtaacctgcaagacggcgtcaggtaatggggtcgtggtcatccctggtctcgtgtcacgtattttctgtgatggggcaaatatcaccgatgaaacaatgtccacccaaaccgatttggtagggagtgtagcggcgtttgccgtaaacaccgccccagatggatggttggcagctaatgggcaggcagtcagcaggaacatatatgcgcgcctattctcccgaatcggtactacttggggggctggagatggaagcactacattcaatcttcctgatgccaggggtgagtttattcgtggctgggacaatggtcgtggagctgactctggccggacattcggtagtgcgcaaaaagggacaatcgtcggcggaaaggatgacaatgatgatggcgcggatatcggtttccttgcaaacggggcatatgtagattacggcagcgatccggttcagttttcatcctaccctgggataaaaccttattatctaaaagctactgaaaaaacagcaataccatccacgtcccaatctgcatttttcagtgtaactcgtcctcgaaatatcgctttgttgtactgcatcaaatactaa

SEQ ID NO: 236608 - DNA, 819 bp, Klebsiella pneumoniae
atggctgctaaaggtcctttcgaaatccgcaaaaatcgggaacttccgtcaggggatatcctgtatcgggacccggggattttcgagtctactattggcttactcgacttcggtgacacttgggctggcggcgggaagaccgccgggtatcaggagaatgaccagattaaaaacctgtgctacgtagacgactacgcctatccgaacctgcccatgctctatgatggcggcggtattcgtgttgaccagcataacgggagcaaaatcacgttgccagagtcgtttattatcccggccagctgcaaaaagcaattagtgcgcctgtggtttaaactccctacgtcagatatcggagacaccaccgtactctataataaccaactgttgatgatagggggcgcgtattcattaagccaggccctgacatacatctcggcaaacaacacgtcggcgggtacgctcaacaacatccaagttggcgctttcggtgttggtgttgacccaggcgcctctattaacagcctcgttagatctggccaggttgttcagctggcgtggctggcaactaagattgactcaacctatgtcacgttccgcacatatgcaaatggcgcttacgtggcagattcggcacctgcggcattcggtactcgtccggcgtcaattacagtatgtcagttgaataataaaacggcatctgagaaatcggtgcgtaacaccacctaccgcgtagctatcgacgacctgactgatagcgacctcgaccctgctgatattgttgcggcagattacgcagataacgtctcccgctttagctaa

SEQ ID NO: 236609 - DNA, 1092 bp, Klebsiella pneumoniae; identical to SEQ ID NO: 232404

SEQ ID NO: 236610 - DNA, 693 bp, Klebsiella pneumoniae
atgacaatatctgaacctgtcaggtctcttgatgcacatgaactgatgcctggcgatatttacccacatcctgcagcggggggaattgattccctgtcacatcgcgaggtctgttctctcttcagtgaccacatcatgtatatctgcagcgcgttagttattcttctgcttgttttcatcgcaggtgtctttttccgaaaattaatgacgtcttccacgggacgtaagcgagacacggcgtcagttattcccaatacaaagccagaagcacagagcaaaacggaatacttccatctttccatatgtgtggaaggcccggccagcacggatgactccgccttgtcctctcttgcctcccgtgttgtccgcgaagctgaaaatctgtatatccccggcgtcaatcgccgcgacagcgctgacgacgtgtttgcctggtccgtgcagactcagtttccttctgacaggctcttcggcacacggattttcccgtcgaccggctggtttgaacgtccggatatgattaaacctccggtgaaatgctactgcgtctgcctgcagtacacggctgaaacattgccatccacactgcatgccctggtcgatgaggccggacggcaggtggcgaagtcatacattaaaggcggacattgccctggctcagagggctatagcttctgcataacctctgaatag

SEQ ID NO: 236611 - DNA, 306 bp, Klebsiella pneumoniae; identical to SEQ ID NO: 214954

SEQ ID NO: 236612 - DNA, 330 bp, Klebsiella pneumoniae
atgaatgcgttgctcatggcaatgtgtttttattacgatcccctgtcaaataaagttctgcgctcactcagagagattgccctggagtgcggacttgcaactaaatctctttctggcgaagtgtccattacacgagcaatcagggcactggaatcgctggagaaagattttgaatttgttgcctgctcatcggatcgctatttaactgctgagatttttttcacccctaagctgttcgaatttcttggcgtatttccactctctctgagcgaagccagactgaagtgtctggccgccaaaaacagctgcagggagagtgcagatgagtaa

SEQ ID NO: 236613 - DNA, 432 bp, Klebsiella pneumoniae
atggctaagtctctcattactactgttctgtcagcactgcgctgggctcactggctggttaagtgtgcggtggtctatccgctggccatgatgatgttactggttgttctggtgttccggacgggaccgtacacgttcggccagacgctggtgaaaaccgtagagtctgtgcagcaggagggatatgtcattcaggactgcacggggccgaaagaacttaatggtgatgcggtgaacgctccactgcctccggttttacaggaagactgcaccaccgtcagtacggatgcggcagggtatgcagcatatatcgaccagagctatacgcataatattctctggctctggctctggctgctgatggcggtggtgtttaccgggatggctgtggttttccgtaggactcctgtccgcaggggatttctcgggtga

SEQ ID NO: 236614 - DNA, 456 bp, Klebsiella pneumoniae
gtgaacatccctcaatgcggcatcaagctgcacagcggcaacttcaacgcaataggcaagattcttcaggagcagctctctgacgggaaatgtctgcgcctgcaggtcaaagagtggcgtgaaaaacgcagcctgagccagaacgcactcagtcacatgtggtacgcggaaatcagcgaatacctgattaactcaggacgtaccgacgcaactcccgagtgggttaagcggaacctaaaaaagacctacctcggctgcgaagaggtgacatacaccgacttcatcaccggtgagaaaaccacaacctgggaaccccggcatacctccgagcttgataccggcgaaatgcacatcttcctgaccaaagtagaggcctggtgcgctcagtttggtctggctctcaccattccacacggttgcgaatatcagcaactgcagcaaaagcaggaggcctga

SEQ ID NO: 236615 - DNA, 1947 bp, Klebsiella pneumoniae
atggacgctgtacagaaagccaaatccggccacccgggggccccgatgggtatggctgacattgccgaagtgctgtggcgtgatttcctgaaccataacccgaacaatccggcctgggctgaccgtgaccgttttgtgttgtcaaatggccatggttcgatgctgatttacagcctgctgcacctcactggctacgatctgccgattgaagagctgaaaaacttccgccagctgcactccaaaaccccgggtcacccggaagtcggctacaccgcaggcgtggaaaccaccaccggtccgctgggccagggtatcgctaacgcggtcgggatggctatcgccgagaaaaccctggcggcgcagttcaaccgtccgggacacgatatcgtcgaccactacacctacgccttcatgggcgacggctgcatgatggaaggcatttctcacgaagtgtgctccctggccggtaccctgaaactgggtaaactggtggcgttctatgatgacaacggcatctccatcgacggccacgttgaaggctggttcaccgacgacaccgccaaacgctttgaagcctacggctggcacgtggtgcgcggcgtggacggtcacgacgctgacgccatcaaacgcgcggtagaagaagcgcgggcggtcaccgacaaaccgtccctgctgatgtgcaaaaccatcatcggtttcggttcgccgaacaaagccggtacccacgactcccacggcgcgccgctgggcgacgccgaaatcgccctgacccgcgaagcgctgggctggaaacacgcgccgtttgacatcccgtctgacatctatgcccagtgggatgccaaagaagccggccaggcgaaagaagccgcatggaacgagaagtttgctgcctacgccaaagccttcccgcaggaagcagccgaattcacccgccgtatgaaaggcgagatgccgtctgacttcgacgcgaaagctaacgagttcatcgcgaagctgcaggccaacccggcgaaaatcgccagccgtaaagcctcgcagaacgccatcgaagctttcggcccgctgctgccggaattcctcggcggctccgcagatctcgcgccgtccaacctgaccctgtggtccggttctaagccgatcaacgaagacgctgccgggaactacatccactacggcgtgcgcgagttcggtatgaccgctatcgccaacggtatcgcgctgcacggcggcttcctgccgtacacctccaccttcctgatgttcgtggaatacgcgcgtaacgcggtacgtatggccgcgctgatgaaacagcgtcaggtgatggtctacacccacgactcgatcggtctgggcgaagacggcccgactcaccagccggtagagcaggtggcttccctgcgcgtgaccccgaacatgtccacctggcgtccgtgtgaccaggtggaatccgcgattgcgtggaaatatggcgtggagcgtcaggacggcccgaccgcgctgatcctctcccgtcagaacctggcgcagcaggagcgtaccgcagagcagctggcgaacgtggcccgcggcggttatgtgctgaaagattgcgccggccagccggagctgatcttcatcgccaccggttcagaagtggagctggcggttgccgcatgggacaaactgactgccgaaggcgtgaaggcgcgcgtggtttccatgccgtccaccgacgcgttcgacaagcaggatgcggcttatcgcgaatccgtactgccgaaagccgtgaccgcgcgcgttgccgtggaagcgggtatcgctgactactggttcaaatacgttggcctgaacggcgctatcgttggcatgaccaccttcggtgagtctgcgccggctgagcagctgttcgaggagttcggcttcaccgttgataacgtggtcgctaaagcgaaagcgctgctgtaa

SEQ ID NO: 236616 - DNA, 1413 bp, Klebsiella pneumoniae
atgcaaaatatagatagacaggctgctcaggatgagaaaagtttagaatttttgaataaacaacttcccaaagtaagaagtgaccttgacatcgccgaggataagttaaacgattatcggcggacaaaagactcggttgatctaactttggaagcaaaatctgtattagaccaaatcgttaatgtcgaaaatcaacttaatgagttgacttttcgtgagtcagaaatttctcaactatacacccgtgagcatccaacatataaagcattaatggaaaaacggaagacgttacaggacgagaaaaataaacttaataaaaaagtatctgatatgcccggtacgcaacaggaggtgttacgattaagccgagatgtcgagtcaggacgggcagtttatatgcagttactaaataggcagcaagagctaagtatcgccaaatctagtgccatagggaatgttcgcattattgatgatgcgattacacatcccaagcctgtaaaacctaaaaaaacaataatagttattgttggttttattttaggtgtaatggcctcaattagcatagtgcttcttagaatgcttctacgtcgtggtattgaatctcctgaacagctagaggaagtgggtattaatgtgtatgcaagtattcccgtatctgatactctgtcaaattataatcagaagaaaggtatacgaataagagcggataaactagaacataagtcatttcttgcaattgctaaccctgcagatatagcaatagagacaattagaggcctacgaactagtttacattttgcaatgatggaagctcgaaataatattttaatgatttcgggtgctagccctaatgcgggtaaaacattcgtaagtactaacttagcagctgtgatagcacaaaccggtaaaaaagttcttttcattgatacggatatgcgaaaagggtatgttcataagttatttaattctacgaatgagaatggcttgtcggatatattatcgggaggtattaatattaccgatgcaatcaagagaatgtctggtggtggatttgattatataactcgaggaacagtaccccctaatcctgctgaattattaatgcatccaagatttggtgaactccttaaatggggaggcgagaattacgatttggtcataattgacactcctccaattttagcagtcacggatgcagctataataggtaattactccggcactactttgttggttgctcgttttgaaaaaaatacaactaaagagattgagataagtataagacgattcgaacaaagtggtgtgaaggtaaaagggtgtattttgaatggagttgtaaaaaaatccagtagctattatggctacggttataaccactatggttatagctatgaaagctcctccgataaataa

SEQ ID NO: 236617 - DNA, 357 bp, Klebsiella pneumoniae
atgaaaaaagtcatcgctttggcgcttggagcgctgttactttctggttgtacagtacgtgttgcagatttgactgtggcgagtactaaaaattacaatctcaatgggggtaagttctataaagggaaacgtgtaacagcagaagatagctatccggttatcatcttccctcttggcatcccgaacgttaaaacagccgctgatcgagcgattgaaaaagatcgctgtgcagttggtctgtctgacgtagttgtcactcaacttaaccactccttcctgttcggtaaaattggtctgcgtgttgagggtaatcttgtgattgaccgcagcctgccgggttgtgagaacgcaagctga

SEQ ID NO: 236618 - DNA, 561 bp, Klebsiella pneumoniae; identical to SEQ ID NO: 92412

SEQ ID NO: 236619 - DNA, 402 bp, Klebsiella pneumoniae
atggccagagtgtctattagtgaggctgcccgactgacgggtaagagtagaacaacactgcacaggttaattaaaacaggtgacctgtccacctgtagtggtgagcgcaatgcaaaaatggtagatacttcagagcttttacgtgtctttggtccctttgagcaaccgaagggtgaacaccattctggacaggtctccgaacagcgtgatacagcctctgctgaccagagtgaacaggtgattcgtcatctgaaacaggagattgaacacctgaatatcttacttttgtccaaggattcgcacattgacagcctgaaacaggccatgctccttcttgaaaatcaccaggcaaaattaactgaatccccggcgccatggtggaaattctggaaaaaatcctga

SEQ ID NO: 236620 - DNA, 276 bp, Klebsiella pneumoniae; identical to SEQ ID NO: 149542

SEQ ID NO: 236621 - DNA, 483 bp, Klebsiella pneumoniae
atgacaatactcaaccgcctctacgccagcagcgggccggaggtgatcattgagacgctgcagatcaccattggttctgacgtccattatctgtgccagggctacgagggtattacggcaacgacggagaacggcgataccgtaacgtttaccgcctgtgcgatagacattgctctgccggcgcgcaatgcggacggcacgcaggacctcaaatttgccctgtgcaatatcgatggtgttgtgtccacggcgatccgctatgcgctggctaaccgtctgtctgcattgctgacgtaccggcgttatatctccacggatttagcggcccctgcggaagtgccgtatacgctgaaaatcaagtctggttactggacggcgacagaggcgcagattaccgcgggttatatgaatatccttgatacagcctggccacgttaccgctacacgctacctgtattccccggactgcgttatatcagctaa

SEQ ID NO: 236622 - DNA, 348 bp, Klebsiella pneumoniae
atgacgtcatggtatacgcctgataatgctgaggaagaagtaaaaacacttactaacagggatttcattcgtcacttaatggtgagaaaaataaagttatcatgtcctgaatgtggtaatgaaaatttcttcacagtaaccgacatagaagaaaacaagaatatccaattagtgcattcactcatgcctataaattccagtcatgaagaaccccttggaactccggtcataatttcaacttgcgacaactgtgggtattgcaaattttataatgcctatgccgtgctaaatacaaagtatgaatttagtggaaatcaatctttcccaaaagatgaatcaaatgaataa

SEQ ID NO: 236623 - DNA, 489 bp, Klebsiella pneumoniae
atgaatttagtggaaatcaatctttcccaaaagatgaatcaaatgaataagtataatatttcagacattgatattgccagacttgccaagcaagaagggtacactgatggcatggccactcagccatctagaaatactattaccggaggtggtggcaatgatgggggcgacatactatctaggataataaatcttgaaatcaaggcggaattaattgagcagtttttgcgaaacacaaactccacgctttcgagtatgaactcaaatattgatagtcactttagttctttagaccttcgtttaaatgaagctaccaaaagacttgattcatcagaaaaattactttccgaaaaaatagagaatacatcaaaactaacagaagcaaatgtcaggtcattcattactgaagcaaagctatccgtaatattagttatacccaccatcattggtgcggttttttcattgtataaaatatttacaaataaataa

SEQ ID NO: 236624 - DNA, 192 bp, Klebsiella pneumoniae; identical to SEQ ID NO: 38528

SEQ ID NO: 236625 - DNA, 402 bp, Klebsiella pneumoniae; identical to SEQ ID NO: 236619

SEQ ID NO: 236626 - DNA, 234 bp, Klebsiella pneumoniae
atggataacctgccgtcggaaactcgcaattacgtccctaaagtcatggccggaatgcgccccggcgccgggatggccgtagaccgagcgatgccagggcagtccggtgcgacttatcaattttatggcaccaaaatcaccactcaggcccagaacgtggaacagcttaccagtgacatcaaaaagcacggcgacaaccgcgtcatgctaatggctggctactcaggacaataa

SEQ ID NO: 236627 - DNA, 843 bp, Klebsiella pneumoniae
atgtcgttttctctgaatgtctcgacagtgctatccgccattcagggaggaagcctgttatccgtccttaacagcgccctgtcgccaacctaccggatcacctataacaccgttgacaagtcgcttttgacggctgcagccgggcaggaggttttcgctccttccggctgggttagcgttgatcgctacggtgatgctaacgtgacgaaggggccggttgaaaatgggcagtatacttcgtacaacaaggtccggcagccatcggaattaagggtgatcctggcacttgagggatggactgcatatacaggtgcgcttccaaacctgacaaacttatctcttcttagccgaagtaatttcattcagaaactggatgagatgaaaaacacggccagcacctacaacatcgagacgccggacacggtgtattacagctacgatcttacccacttcgattactttgtgggctcgtatcgcgggcagacgttgttgatggcgaactgcaccttcgaagagataatggatagcggtgaagtaattatcgctaacggggtttccggtaaggctccgacagataacgacaaaacaaacaataagggcgctgcaaaaacagaggtaatcactgcttcaactaaagaagtaacgcttactgacgcaaaaaatgcatggacaagcgggaatacatcgctatcaagcgcccttgatcttaccgggagtgccatagtttcaggtgtcaattcggctgccaaatcggtatctcaagtatgggataactcatcaacagcggtcgcaaaacagatcaaaagcacggtggctgattttcttaaaaataaggtgatgtga

SEQ ID NO: 236628 - DNA, 300 bp, Klebsiella pneumoniae; identical to SEQ ID NO: 189857

SEQ ID NO: 236629 - DNA, 867 bp, Klebsiella pneumoniae; identical to SEQ ID NO: 189858

SEQ ID NO: 236630 - DNA, 1083 bp, Klebsiella pneumoniae
atgcaggaacaggtaaagacgaaggatgagcggaccaacgatctgcttaaaagccgtcttgaactgctggagaaagccaaagcaaccgggcaactaaaacccggtgaatatgaaaaaacacgggcagatatttatcaaaacaccgatatgcaactgccctcgacggttcgtgatgttgtgggtaataccacgccgacaggcggtcagctatcaggcacttttggcggaatgcaacagcagtatagccaactcgatcaggcacaaaaagatttggatgcctggcttgcccggaaggaagaggcttacaaaaaggctggtgcaatcaccgctgagggtgaagcgaggatgcaaaaaactcgcgccgatgctgcaaacgctgctgcggttatagaggcccaaaaaaacgccatcattaccagcactacgcaaagcatgatggacagtggattgagtattctggctgatggttttggtcagcaatccggcatctataaagcagcgttcgcagccagtaaagcctatgcgatcgcacagtctatggtggcaatcaatgcgggtatcgcccaggccgcaagtctgcctttcccgtcaaatttgatggctatggcaacggttgctatggagaccgccaatatcgtctctaacataaaagcggttgctgatactggcttcgcctccggcggttacacaggccccggtggtaagtatcagccagcgggtattgttcacaaaggagagtacgtcttcgaccaggcatcaacgaaccggatcggcgtgtctcagcttgaggcacttcgaaatggccaaccgcttgatgcaactctggggcgtacagggtttggtactggtgttcagaacgttaacagcgataacagcagcaagaccactatccatgctcccattgagcaacatttccatacgccgcccggtgtgacacctgatcagatggctctctccatggctcaaacgcagaagcgggcgacaacggaagccctggatcaggttgctgcgcaattgttgagaggggacgggaaagttggtaaggcaatgcgcagtaaatattcaggcagagggttagagtga

SEQ ID NO: 236631 - DNA, 348 bp, Klebsiella pneumoniae; identical to SEQ ID NO: 231168

SEQ ID NO: 236632 - DNA, 831 bp, Klebsiella pneumoniae
atgacagcaggtccttttgagaaacgtggaaatgtcactctggcgagtggtgaatatctataccgtgatgcggctattaacgatgcatgtcgcttgttgctagattttggtcgcacctggcctggtggaaataaaacatcaggatacagccagaatgacgttgtaaaaaatatttgctataccgatgattcggcaacagtcggcaacgcaatgagttatgacggtggcggcattaagtcaactggacattatctgggtcgcattctgcttcccgatagcgctattttgccatcgtcatgcacaaagcagttaatcaccctgacgttcaaaatccctgtgacgggatatgacccccagaatagcgccagacagtgcgcgttactttcagtgggtagtggcccgactgacgcgacaacgctatcaggaatactggctaacagtaatgcctctggcgcactgaacaacatgcagttccaggcatggggtacatcatgggatggttccggtggtgtggataccgctgtgaaagcagcgcttggtacggtaacgcaggtagcgatgtacgcctacaaagtcagttcgacgcaggttaagagccagctttttgttaatggttccccggtcgttgaaaaagcgatttccaccgcagcaacatatccgtcttcgtttacaaaaaaacaacttttcagtgggtcattcggcactgcggtcacaggcggtacggtggcgacaatctaccgtgctggcatttacgacatgacaaactccgatgttaatcctgcggatatcgttgctctggattattctcgaaatcattcgcgctttagctaa

SEQ ID NO: 236633 - DNA, 135 bp, Klebsiella pneumoniae
atgtgggtaatgatgaaacttaaacgtactgggcaggtgatgtatttccagtgttacgacagcagggaaacggctgaaatggcgattaaggttatgaatgccgtcgccagcagctgggaattctatatcagataa

SEQ ID NO: 236634 - DNA, 495 bp, Klebsiella pneumoniae; identical to SEQ ID NO: 221711

SEQ ID NO: 236635 - DNA, 726 bp, Klebsiella pneumoniae
atgagagcacaacacacatttccaggcgcgacagacagctggcttcagcgcctgctgacctggacaccgggacaaacggatatgattaaaacggtcgcactggtactgatggtgactgaccacaccggcttactgctggccggaaacaatgaagtgatgcgcctgctgggacggggctgttttccgctgttcggtctggcatggggaatgaatctggcccggcacgcggaaatacgccagtcgcagctcaacagcctgtgggtctgggcgctggtcgcccaggtgtcgtttatgctcatcgggtacccgtggtattccgggaatattctgtttgcctttgccgtcacgggccaggtcctgcggtgggtcagccagccgtcctggtattacaccctcccggcggctggactgctggtcgcctggatacccctgtcaaccgccagctacggcatggccggagtgggcatgctcaccgccagctggctgctttgtcgcgcacagcatgcacaggaacggctgggatacggggtgctgtgggccctcatggtgttgctgatgaatatgcatgacgtgagtgaatcagtggccgggctggcgattgcgctgctgacgctgatggtgtgctcatctgccggagaacgtgtgaaacgcttctggccgcggcagttcttcgtgatgttctatgcggtgcacctggcggtactcggtattgtcgtctcgatgtaa

SEQ ID NO: 236636 - DNA, 357 bp, Klebsiella pneumoniae; identical to SEQ ID NO: 16840

SEQ ID NO: 236637 - DNA, 657 bp, Klebsiella pneumoniae
atgacagcacacacaatcggtttcagagccgctgaccgctggctgcaggcattactgacctggacaccgggtcagacggatatgattaaaacggtggccctggtcctgatggtcaccgaccataccgggttactgctggccggacacaataacgagatgcggcttctgggacggggctgttttccactgttcggtctggcatggggaatgaatctggcccggcacgcggaaatacgccagtcgcagctcaacagcctgtggggctgggcgctggttgcccaggtgtcgtttatgctcatcgggtacccgtggtataccgggaatattctgtttgcctttgccgtcaccggccaggtcctgcggtgggtcagccagccgtcctggtcttacaccctcccggcggctggactgctggtcgcctggatacccctgtcgaccgccagctacggcatggccggagtgggtatgctcaccgccagctggctgctttgccgcgcacagcatgcaccggaacggctgggatacggggtgctgtgggccctcatggtgttgctgatgaatatgcataacgtgagtgaatcggcggccgggctggcgattgcgctgctgacgctgatcgtggggtcggttccgtctgagggcgaaatgacaccctaa

SEQ ID NO: 236638 - DNA, 606 bp, Klebsiella pneumoniae
atggtcagatacgcagatgacatagtcatcgggttcgacaagcgaatcgacgctcaatgctttcgtatagccatgcagcgcagactgaaggagttcggactcacggtacatccgaagaaaacccgactgatggagttcggccgcttcgcagccgaaaaccgcgccagcaggggaaaaggtaaaccagaaacgttcaacttcctcgggttcacgcatatcagtgggaaagaccgtagtggcaggttcatgctgatacgaaagacacgccgggacaggatgacggcgacactgaaagcgatcaaggacggactacgaaagcgctggcattactcaatccccgaacagggaaaatggctcaggagagtggttcagggatacctgaactaccactcagtcccgggcaactatcccatgatgcggaagttcaggatatacgtaacagacctctggcgacgggcgctgaggcgcaggagccagcaggatgatacgacatggacgaaagcaaacagactggcagccgtatggctgccgaaggttcgggttctgcatccatggcctgtggagcggttcaccgccagacacccaaggcaggagcccggtgcgtga

SEQ ID NO: 236639 - DNA, 330 bp, Klebsiella pneumoniae
atgcatttaagtagtaaattaagaaagattgagaatgaaaaccaacttagtttcagattcttctttgaggatgagggaattaaagaaaaggtatatatacctgtggaatcaaactcaatcgttgaagatcatggtaacaaagtaccgaaccatgattatcaagagctagatgatttcatttggacagatgaacatatatgtacgttcttctataaaataatggagtcatcttttgtaaccgttcagtaccatatagaccaatcgatggtctataaaattgatgccaatgggtttcgatatctaacaccgaaattaaaaccgtatacatga

SEQ ID NO: 236640 - DNA, 639 bp, Klebsiella pneumoniae
atgcgtaaacctgcacgtcgtaaatgcgcccactgccgcgaatggttccatcctgcccgggaggggcaggtggtatgcagttttgaatgcgccagcgcgatcggcaaaaaacagacagcaaaagcccgggaggcggcgaaggccagggcggtgaagcgccagcgcgaatccgaaaaggaaggtcgccagcgtcgccgggccaagcgagagtcattcaagacaaaggcccaatgggataaagaggctcagtcagcctttaaccggtatattcgcattcgtgatgaaggtaagccctgcgtgagctgcggaaacccgcttattggtaagagcaactacctgaccggcagcgcaattgacgccagtcattaccgttcccgtggtgcggcgtcgcacctgaaattcaacgtgttcaatgtccactccgcctgcacccgctgcaaccggcagttgagcggcaacgctgttgaatatcgcattcacctgattgaacgcattggcctggatcgcgtaaagcgccttgagtctgataacgagccgcgccggttcgatattccctacctgcagcgaatcaaatccatattcacccgcagagcccgcgcgttggagaagcgccgcgcccgccatcaggaggccgcatga

SEQ ID NO: 236641 - DNA, 402 bp, Klebsiella pneumoniae; identical to SEQ ID NO: 236619

SEQ ID NO: 236642 - DNA, 177 bp, Klebsiella pneumoniae
atgtcgaataccctgaaggaaatcaggagaaaactctcctgccagtccattgtatgtcagcctggctcccagatagatgagccagtagactggagggataaacaaaaacccatactttctaaaaaacagcatcatatccatcccctgatcatttgttcacattgttcagtgcgttaa

SEQ ID NO: 236643 - DNA, 519 bp, Klebsiella pneumoniae
gtgaaaaaaattaaccgtacactccgcagatgttgtctgtcggggcttattagtctgactttgtttgcacctgttccggccgtgtatgccgccagcatcgagacgggatattcaccggaaggaacggctctgcagctggtcctgaagactattgattctgcacagcaggaaatccggctgatggggtattcctttacctcacctgaagtcgccggtgcgcttgtcagggcaaagcggcgtggtgtcgatgtgaaggtggttctggactggaaagccaataccggcaagcaaaaccaggcgagcctggcggccatgaatcttctggtcaatgccggcatcccggtgcgcacagtgtcgcagtacaaaatcatgcacgataaagtcatcattgccgatggccgcaatattgaagtcgggtcttttaactacacccgcgccgctgaacgcgtcaattcagagaacgtgcttgtcgtatgggatgttccagtcgtagctcaacgctatctgcagcactggtga

SEQ ID NO: 236644 - DNA, 402 bp, Klebsiella pneumoniae; identical to SEQ ID NO: 236619

SEQ ID NO: 236645 - DNA, 534 bp, Klebsiella pneumoniae
atgaccatacgccgaaattatacgaaactcggtgatttcactccaccaaaaaccgaagccggcaccgacagggtcgtgcatctgatcaaaccagccattgacgctttgaggaaccaggcggaaatgaccagactgggaaagcagtatcagattgaggtacaactacgggagtatggccgaacggctattcatgactgtacatttgtgttcaatcctcagctggtcagaaaaagcagtaacgttggttatcattacaaggttgattcaattggtgactcatgggaggcggcgctgaaacgagctggtttaaggcatcgcaaagcatatcagtccagacacacttatgcctgctggtcactgtcagccggggccaaccccagcttcattgcgagccagatggggcacacaagcgcccaaatggttttcaatgtctacggcgcctggatggccgacagtaacagcgatcagattgctttgttgaaccagaaattatcggactttgccccacccatgccccaatgcatagttatttga

SEQ ID NO: 236646 - DNA, 300 bp, Klebsiella pneumoniae
atggaaaccgatgcgcagggactggcgtttgagtcctggttccgtgatgcgttatctgacggggctgcatggttcatgatgaagctgcagacgccggcaggcattaagttttacaaatgccgcttcacagatatttatcagggaccggtgctggtggccccgatttactggaagtacacggcgacgcttgaattatgggaacgcccccttgctcctgccccatggggtaattacccggaatggatcgtcggcagctcactgctggatattgcgctgaataaggagtggcccaaggcttga

SEQ ID NO: 236647 - DNA, 195 bp, Klebsiella pneumoniae
atgatagttattctggtagcgggtcatcatgcgggcagagacctgctggcgcatgtaactcatttgtctgtcaaccacaagcaaggcgtcctgctggacctgaacgcgggactggaaagcggcaatctggacactcgcctggttgaggttttccatgatcatatccattgtcgactggggataattaccggttga

SEQ ID NO: 236648 - DNA, 159 bp, Klebsiella pneumoniae
atgggtgtcaattcatgtattcttggtgatgatattgccattggtaataacgtgaaggtgggggccggtgttattttaatgaaagacgtaccagatgatagtatcattattggccataaaccgataattaaaaatgcaaatggtgatattatatcataa

SEQ ID NO: 236649 - DNA, 240 bp, Klebsiella pneumoniae
gtgttctcttacaccattgacggacagggtgatgacgcgtttccggagtctctgccggcgcctcctgacgtgatgcagacctttttccccaatatcccggtggctacaccgaccacgtttctggtgaacgtaaacacgctggctgcgtacccgatcctgcagggcgccacggatgcgcagggctttatggccagagtggatacggtatttcagatgatggagaacccgaataatggataa

SEQ ID NO: 236650 - DNA, 240 bp, Klebsiella pneumoniae
atgttgctccaggcggtggccgatggccgacgcaggccgacgcaggccgacgcaggccgacgcaggccgacaatattagtcaataaacgtttgttcaatggaagtaggcagggtacactctttaaccactataagatgggcttacctgcccgccgtacccgtttagcggagcttttgtcgtacagaatgattgttgatatcagtattatgtcgatgtgcatggccgtactgctgaattaa

SEQ ID NO: 236651 - DNA, 423 bp, Klebsiella pneumoniae
atgaatgatagatattataagttggaaataaatacagaaatggttgttgaaagtttatttaagttttacaaagaatactatctaagtcgatatgaaaaaatagaagatgtagattgggatgaacaaagtatcatgaaacaccatgaatattatgtagaaaataaaggtgaagtatattatttatttatggtggatatgtataaagagtatcaaaaagaaaagtatgaaatttcagagtctgaatttttatatcccaatggagcaggattcaaaaaaagaacaagttataactgtagtggtttttttgaatctgatgagaatattttgattgatgttaagaatgtaaaagatgatgaacttcttacagggttaaaagttaagtatgaagagtttatttcaaatctaaaaggagttggtaaatga

SEQ ID NO: 236652 - DNA, 204 bp, Klebsiella pneumoniae
atgaaaaaatacattaatattttatcggcaaacgtaaactacttattagcaacattattcgtatttatggttattcttacttttaatatttatgattacgggcatgtgaatgtgtctgttttaatgaaagaatgtggtttgtgtattgtgaattttgcattgttgtatgtgatattcgaattaccacgaaaagctttaaaataa

SEQ ID NO: 236653 - DNA, 261 bp, Klebsiella pneumoniae; identical to SEQ ID NO: 233400

SEQ ID NO: 236654 - DNA, 276 bp, Klebsiella pneumoniae; identical to SEQ ID NO: 233399

SEQ ID NO: 236655 - DNA, 204 bp, Klebsiella pneumoniae; identical to SEQ ID NO: 236652

SEQ ID NO: 236656 - DNA, 528 bp, Klebsiella pneumoniae
atgaaaaacactttaaatacaaaaatacagagtataagaaacagaggtatagtatcaagcagaaacagaatgctattttctaatgacgttgaaactgttaagtcttacattcactttgctggaacttctgaaataaacactacagatgaaaatggtaaaacagctttgttcggggcaagttttgaaatagctgaacttttaataaaagctggtatagacgtaaaccataaggataacttcggtaatacagcattgttctttagtgattttaacagcacatggttgttattgaataaaggcgctgatattaacgcagtaaacaacaataacatgaatgcgctatacactgctgatacgtctaaggcaaggatgttaatcaaatcaggtataaacataaacaataaatctaaacttggtcataccgctttatattacgctcacttattaaatgacagaaacatgatgagtgttttaatggatgccggaatagaaataagtcataaagaacaaaaaagatacgcagcataa

SEQ ID NO: 236657 - DNA, 210 bp, Klebsiella pneumoniae; identical to SEQ ID NO: 233381

SEQ ID NO: 236658 - DNA, 258 bp, Klebsiella pneumoniae; identical to SEQ ID NO: 233382

SEQ ID NO: 236659 - DNA, 423 bp, Klebsiella pneumoniae; identical to SEQ ID NO: 236651

SEQ ID NO: 236660 - DNA, 294 bp, Klebsiella pneumoniae; identical to SEQ ID NO: 233380

SEQ ID NO: 236661 - DNA, 123 bp, Klebsiella pneumoniae; identical to SEQ ID NO: 233379

SEQ ID NO: 236662 - DNA, 204 bp, Klebsiella pneumoniae; identical to SEQ ID NO: 233378

SEQ ID NO: 236663 - DNA, 558 bp, Klebsiella pneumoniae; identical to SEQ ID NO: 233377

SEQ ID NO: 236664 - DNA, 540 bp, Klebsiella pneumoniae; identical to SEQ ID NO: 233376

SEQ ID NO: 236665 - DNA, 447 bp, Klebsiella pneumoniae; identical to SEQ ID NO: 233375

SEQ ID NO: 236666 - DNA, 489 bp, Klebsiella pneumoniae; identical to SEQ ID NO: 233374

SEQ ID NO: 236667 - DNA, 483 bp, Klebsiella pneumoniae; identical to SEQ ID NO: 233373

SEQ ID NO: 236668 - DNA, 555 bp, Klebsiella pneumoniae; identical to SEQ ID NO: 233372

SEQ ID NO: 236669 - DNA, 2217 bp, Klebsiella pneumoniae; identical to SEQ ID NO: 233371

SEQ ID NO: 236670 - DNA, 567 bp, Klebsiella pneumoniae; identical to SEQ ID NO: 233370

SEQ ID NO: 236671 - DNA, 294 bp, Klebsiella pneumoniae; identical to SEQ ID NO: 233369

SEQ ID NO: 236672 - DNA, 606 bp, Klebsiella pneumoniae; identical to SEQ ID NO: 233368

SEQ ID NO: 236673 - DNA, 543 bp, Klebsiella pneumoniae
gtgaaagaaagtaatcagcgatggtgctctgacgggtttgagttccgctgtgataacggagaaaaactgcgggtcacgttcgcgctggactgctgtgaccgtgaggcactgcactgggcggtcacaacgggtggcttcgacagtgaaacagtacaggacgtcatgctgggagcagtggaacgccgctttggcagcgagcttccggcgtctccagtggagtggctgacggataatggttcatgctaccgggcgaatgaaacacgtcagttcgccaggatgttgggacttgaaccgaagaacacggcagtgcggagtccggagagtaacggaatagcagagagcttcgtgaaaacgataaagcgtgactacataagtatcatgcccaaaccagacgggttaacggcagcaaagaaccttgcagaggcgttcgagcattataacgaatggcatccgcatagtgcgctgggttatcgctcgccacgggaatatctgcggcagcgggccagtaatgggttaagtgataacaggtgtctggaaatatag

SEQ ID NO: 236674 - DNA, 348 bp, Klebsiella pneumoniae; identical to SEQ ID NO: 25782

SEQ ID NO: 236675 - DNA, 498 bp, Klebsiella pneumoniae
atgcctaagaatgaggttgttaaatatacaagagcagcagatgccgcttttctctatatggacattataaaacaggaagaagcttttacagacgttctatcagagctgtttgaagatctctacctcacaggcaagaacggcgatggattaggccagttccttactcctatggacattagcagcctcacagcgtcattacaggcatcatcagacccttctggaacgttctatgaagaatgttgtggtgcaggatctatgacactggcaaggctcagagaacgctgtaggagagaaggacactatcttgaacaggctgttcaaatgaacgacatagatccactaatggttaagatggctattgttcagattatggctccagtagcttttaaagacgtagatataaaatcagtcaaaatatttaatggcaatgcgttattaaacaacttaaaacaatcctttagttatacctcttatcataataaaaaacaaaaagtataa

SEQ ID NO: 236676 - DNA, 426 bp, Klebsiella pneumoniae
gtggcgattgacatccagtggttactcgaacgtggtcgcaaacacggcccggccggccacctgcgccagcatcttgagtacctctttcgctcctgcagcggcaatctggccgctcagtccgacctgttccgtctcacctacgcctctgaaaccctgaaagaccagggctgggacaattatgtgctggacgcacacgagtggaaatccggcgtcgtgccgacaccgtcacagcataacgggttctatgtcgaaaaaacggcgctgaatgccgcttttgcccaggacggtcgccatctgcactccgtcacgtttcgggtggtcggtgacgccgaccggtttatgcatgtgttggccgagtacggtctgtgtacgcgccggcagggcagcacgtcagcctgccacaccatcgcgcttgaaccggcgtaa

SEQ ID NO: 236677 - DNA, 261 bp, Klebsiella pneumoniae
atgaccatcagcacttttcaggaatggattacagcccatgttaatcaatcgggcaacattcaaaagcttgttggttttaaaaagcactgtctggcctttgttgtttctgtggttgattttagcgccacagctaacaagatacctgattacatcaatattactattgtgaaatataggtgtttcaccttctttatttataaagttaacatcagcaccaagttctacaagagccttagctacatcaacattacgcgccactga

SEQ ID NO: 236678 - DNA, 126 bp, Klebsiella pneumoniae
atgaaaatccaaactataatggagatcttggtttcaaaattttcgaaactgttgatgattttcgagcaaaagatgagtctgaacttacgctgtctaatcttagcttctttgacgatgctgtattga

SEQ ID NO: 236679 - DNA, 297 bp, Klebsiella pneumoniae
gtgcgctggggcagcgccggcggggcgcagatcctcggcttagcgcagagcggcaccctgcaggttgggatgcaggcggacctcgccatttaccggctggacgatccgcgctacttcggcctgcacgatatggccattgggccggtggcctgcggtgggcgcgccgcgctgaaggcgctgctgctcaatggccgccccatcgtggaagacgacgccattcccggtctcgaccttgacgcgatgcgtcacgacgcgctggcggccgtccgtaccctccaacagcgcgccgctgtttaa

SEQ ID NO: 236680 - DNA, 237 bp, Klebsiella pneumoniae
atgttcgttttatattcaaaatccaccaaagaaatattcacatattttgttaaattctgctggattcttatcactgaccatacacgctgtttcgaaaggttttacaatatcctcaacaagaaaatacagaagatccagatctcgcagattttgcagtttatcatgcagtaccggatttctgcgcttcagatatcgggacgtgtatattgctctggatgtttcagctccaacggataa

SEQ ID NO: 236681 - DNA, 1230 bp, Klebsiella pneumoniae
atggttgcgggcagtcgtaaaacaaaggcgccgggtattcttacgctggcaaaagtccctggcgttgatgctgaggggaatacgctgtccagtaacaaggatgcggcatactatcagattcgcccggaaggtggctggttacctgcatcaagtgttcagaaggtttcgcagtacgcgttaggtgagctcgggtttgtgacgctgaataaggcttcggaaagttttgacctgattgatgggataaaacaaccgaacaacgtggtgaaggggattctggaacagttgtataaagcggcacaggatgaaacgcgcaccactcacgcgctgaacaagtataactataaacggctgctggaattgatagacagtaaccaggacgggtattaccaggagcaggagtatcttcaggcggtacataatatctcttaccgcgaccgcctgtaccgtgtaattgcaaagcacgccagtgaatggtactacggcaaggatgccccgctctggaagacatacctcgatacgttaaccagggatgcgccattgtggaagacgtatctggaaacgtttcttgataagatgacgtggatgaagacggtatccgaaaagggcgttgcgctggggtcggagccgtggcatatgcatccggtggtgtttttggaggcgatccgtattaaagaaagatgtagagagctattttctaaaatttccagtgtaatacttcaacatgaagggggatatgttaacgatcctaatgatcgcggtggtgagactaatatggggatcactattgcgacctggagagcatatgcacctagtgatctcggaattgaagcaactaccaatactctcagaaatatgacaaaggaacaggcagagattatttattataatcattattgggagccaaaaggtttttgtaagcttgagactataaaaatagccttaatgttatatgactggacaattacatcaggtcgcgctgttacacaggtacgaaaaatgcttcataatgagtacaatataaacttagttgtgagtaacacaatggatgatgatatgattcattgtattaatgcaattgaagatcaggagcaattactgtcacgcatcgcagaggttagaaaagaatattatcgttctttaactataactaacggtgaacctaatactcaggttcgattcctcactggctggataaatagagtcaatgattgtttaagggttaatatatga

SEQ ID NO: 236682 - DNA, 630 bp, Klebsiella pneumoniae
atggcttttgagttaacatacagacccctcgaaaatggaaagaatcaaatttatttccgcagaggcattataaacaatacattactagttcctgaaaaagagataggatgctatttagttatacagtcctcattcccattatatgaaaccgttaatataccagctcagagcttaaatatttcatggcaggttaatcaagattacgcatcatcaaattacactggacaggcccctctcgcttgttatcctatttatttgattactgttggagatgataaaaatgaaaggctagtatacattggtaagacttcatcgcagagcgcacgattttcatcaggccacagagcaattacaaagctacaccatccaaaatatgatggaatgacgaagcgagtatatttgtgctgtattgtttttttaaaaggtagtaatgaaatacaaatagaatggattagatcttttgagtttgctgaaaagctactaaaacaatttgaagcgaacttaattttctggagccaacctgagttgaatacacaacatatgaagaaagaacctctatttgaatatggacaagttcatgttcaaaatataacgggtgaaacttgtttctggcatgataaattcatttaa

SEQ ID NO: 236683 - DNA, 429 bp, Klebsiella pneumoniae
atgaaaattgatcagcaatatctaaaaaacttactgattgcttttgaagataccgaaggtcctgacactttgttagaagagttagagtctgccggttataatagagatgatcccaattttgtctttcatatgcgactgctttatgataatggactaattgtccggacagatggtgaacaaggatttgggcatcaatatcgatcctacattggccgtggtcatagttatatgtggattcctgtaccattaaggttaactgcacgtggacatgactttattgccgacctaaggcagaaagaagtatggcaaactatcaagactaattttaaagacgaagggattagcacgttaattgagctgtctaaatcgcttgcgataggatttgctaagaaaaaagtcaaagatgttacaggactagatatcgagtaa

SEQ ID NO: 236684 - DNA, 642 bp, Klebsiella pneumoniae
atgtcgagtgtatctaaagctttcatgtttgctgccggcgctcatggcggtgttggtcagaaacggaaatatacaggtgaggattacatccaccatccagactcagtccgatcaatagttgcctggtatggcggtactgttgagatgcagattgcagcattactgcatgacgtagtggaagatacccatgtaaccattgagatggttcgggaacacttcggtgagcgtgtcgctgaaatggtgctggccctcaccaatatagccaaaccagaagacggaaatcgggtgcaacgtttcgttattaacgttctggagctgtcacaaagccttgatatgcagacacgcatgataaagctggctgatctgctggataacacgtcgtctatcgtcgaccgcgatcctgagttttcggctatctatctcgctgaaaaagagttaatgctcaaggtcctatttgagaataaggaaattggcgccgacgagcgtgtcgttgaccttctggagaaaaaaggtatcgagcatgcattactgattaaagctcgtgatgtggtagtggaaggtatagccagtcttcagccagtacacatgaaacgttttgaaaagcacaaggcgctgatttggggcgcatgggagagcgcatga

SEQ ID NO: 236685 - DNA, 537 bp, Klebsiella pneumoniae
atgaaagtagaacgaatggacgttatggctttcactattaccgacgtcgatcgcctcgacccaatcagggtgatgattgaaaactacgagcccggaaagggccgtatcacaatcacctgcttcggcaaggcatggacagctgcctggttcgccatgggtggtgattctgttcaggcctttattaagcgcgttagcaatgactatctgattggttgcttagatcctcaacttgaaagctcggttgacgacgataacgaagcaaatctagcgttcgttaaggcacatatcattaagcttcgtcgcgaacgggaacttgatgctgagaaagctcgcgaaatgtggaatgaagccgaaaatgctgatgacgttaaggcatgttgctgcgactacggcattggtaatgagcttttggagctttttggcgacgacccatgttacgcacgatggccttctgtgcctaacccgaattatcaatacctcgatcgcatcctgaatgccgttcgtacagggttgatggaaatggggtgcgtagcatga

SEQ ID NO: 236686 - DNA, 369 bp, Klebsiella pneumoniae
atgaatatcaacgaacttgcgctgcgtatgcgcgcggcagcaaagaatgccgcagataatttccacccaaatatgcttgtccagactcgtgacatcatcactctggtagaggcgctggagaaggcgaagaccaaatcagatgtatacgacatgcttagggatgactacggtttgcgagaaaaaggtgtcggacttgtagaattcgttgactggcaggctaatcgcatcgccgagctggggggcggcaccgtgaagcttccgctaccatcgtgtacttacgctgaccacagctatccggcatactcaaagcgccaggttatctctcttctggagtcactgggcatcacagtcgttgagggggatgtatga

SEQ ID NO: 236687 - DNA, 258 bp, Klebsiella pneumoniae
atgaccaaatcaaccataaccagaaatgagcttaacgaagtgattaccacatacggaaagagccacctcgcacatcgaatggccactgtattgttggccgcaatggacaacgtgcctggtaagatcatcgaagtcaatgtcggcggcaatacttgggtgcaatgctctgagaaagccttcgagaatgcaaaatccaaaggggagctcacacgagtactttatgagtatccatcggcagctgttttcttgaaaggttaa

SEQ ID NO: 236688 - DNA, 1053 bp, Klebsiella pneumoniae
atggcaacgttgcccaaaaacgtgatgcaacacaggaaggtattgaaagaaaccggtttggcgtttgccaaatcgataccgcttgttggacctcatattgaggcagctgaaaaaatgttcacgttgttctcagagataaatgctacgacttgtcgtgatcgattcaaccgttacattatgggcattggtgaaatttgcgacgacgagatcgatatctcaagagaacacttttcggcgttagtcaaaaagctcgttcttgatgatgaagacaagaaaacagaatactacatccgattgacggtaagcctagcccgcagtagccttaacgacgatgagcggctacttttcattcatgtattaagtgaactaacctgctctgatatcgattatgcacgcaagctctatattgcgacgaatgctaccatcaagggttttaaaacatcagcatcagctcaagccagcatcacatcacaaaaaaaagcactgtccctgcgctccctcaataagctcatttcttcaggactggtttacgaggatagaacaggtgaaatcaaggccaatccgggctacaaactaacaagcgatttagagcgtcttttggggttcattttccataatgacgatctacaacctacggccttgtccattgaatcgaaagaagaatatgacgtcattattattgacagcgacaagatttaccgaggctcatacccaaacattctctatcgtcaacttcgggctgctggagttaaagtttgcatagagaaaagtgaagactgtattgccgacaagctagcaaagttcttcatttcagtacaacaaggtagcgggttgaacggtcttggcgagtggataaattacggcgagatttgcgtcctcaagcacctagataaaagcactaatcgcttttatgaaagtgagttcagagagacagtcgaccgcgaacatttttcacctagagacgacgattcgtcattcgatgcaagtaagttaaataccgctctaaataaggtggctgcgtttgttctgggacgactatctctttctatctaa

SEQ ID NO: 236689 - DNA, 516 bp, Klebsiella pneumoniae
atgtctattaagaaaagtgttatcgctgttgcagtttttgcaagcctttctggtgtcagcatgatggctaatgcagcaccgtctgctgatgtgacgctggaaggtattatcaccaactctacctgtgatgtttccgttaacaatggcctggcgaccctgaatgtgggggtctacaaagcaagttcttttacccctaacactcagcagggctctgttgcgctgccggttgaattaaccaactgcgctgatgagactggcgcgctgattattcaggggcagagcgcaagctccgacccgagcaagcagctgtttaccgccgcgacgggtgataccgttggctttatgattaaggatgctaacgatgtgcaggtggctgagtcacagaatgtggctttggatgtgacctctgctgacacgaatagttattctttcaatgtaggtatgggtaccactgacgctacgccggcagcgggtagttatagcgtaccggtgactgtggcttatattgtcaattaa

SEQ ID NO: 236690 - DNA, 1467 bp, Klebsiella pneumoniae
atgagtattcgtcattgtgtcgctgtcgatttaggcgcctccagcgggcgggtgatgctcgccagctatcagcccgggccgcgcgccctgacgctgcgcgaaattcatcgcttcaccaatagtctgcagaaagtagacggcttcgactgctgggatgtagatagcctggaaggcgagatccgccgcgggctggagaaagtgtgtgagcagggcattctgatagacagtatcggcatcgatacctggggggtagattatgtcctgctggataagcagggtcagcgcgtcgggctgccgatttcctaccgtgacgaccgcacccagggcctgctgcgtcacgctgaagcgcagctgggccgggcggaaatctatcgccgcagcggcattcagtttttgccgtttaacacgctttatcagctgcgcgcgctggtggagcagcagccggagctggtcagtcaggctgcccatgccctgctgatccccgactatttcagcttccgcctgaccggcaatctgaactgggaatataccaacgccaccaccacccagctggtcaatattaacagcgatagctgggatgagacgctgctgaactggaccggcgcgccgttggcgtggttcggaaagccgacccaccccggcaatgtgataggccactggatctgcccgcagggtaaccgaattccggtagtcgctgtcgccagccacgacaccgccagcgcggtgatcgcctccccgctggccgaccgccatgccgcctatctctcctccggcacctggtcgctgatggggtttgaaagcctgacgccatacacctgcgacgcggcgctgcaggccaatatcaccaacgaaggcggagccgaaggccgctatcgggtgctgaaaaatatcatgggcctgtggctgctgcagcgggtgctaaaagagcaaaacgtcagcgacctgcaggggctgatcgcccgcaccgccgcgctaccggcgtgccgcttcataattgactgcaacgatgaccgctttatcaacccggccagtatgagcgccgagatccaggccgcctgtcgcgacgccgggcagccggttcctgaaagcgatgccgaactggcgcgctgcattttcgacagcctggcgctgctctacgcccgggtgcttaacgagctggcggcgctgcgcggccaccccttcagccagctgcatatcgtcggcggcggctgtcagaacacgctgctcaaccagctgtgcgctgacgcctgcgggatcgccgtcgtggccggcccgatagaggcctccaccctcggcaatatcggcatccagttaatgaccctcgacgagctggccaatgtcgatgagtttcgtcaggtagtgcgcggcaacgcggcgctcaccacttttacccccaatcctgatagtgaaattgcccgtttcgtggcgcagtttcagccacaacagaccaaggagctttgcgcatga

SEQ ID NO: 236691 - DNA, 1533 bp, Klebsiella pneumoniae
atgtacaaagtccgtgttttacaagaaatcgatgaccggctagatgctgaatactataacccggcagcgttgagcacgttgaagaagatggaaaccaaaggtacggttactacttttgggaacctagttgatgaaggctatcgagttgtttaccacggtacagattctattaacggattaaaagattccgatctaattccgtttttatctccaactcaaattgatgccaatggatcaatcagtttcgaagatgcagataagcttcctctctactacaaagaacgatatccgaaaggtttgggcaaggctggcgagattttagtcgaagttaaaggcaatgtatcaaaagtgggtattgtcccttcggcgttcccaaaaaatttgatgataagtgggtctttgtataaagcgaccctggaccctaaaagagtagattcacactacgtactcgcattcttaaaatcgcaacacggacagatcctaaagaaccgtctaaccagcaatactattattaactacattgcaaaagatgcattgtattcaattcccgttattgagtttaaagaaaaagctcaaaaatacatcggggataaagttcgccaagccgagcaactgggcgcttgggcgaagcggcttgagcaagtatcatcatttatgtttgcgaatgctctagctgagctaggctacaaacaaaaaaaatccacaaaaatcgttagaacaaaactagaagatcgcctcgatccggcattttatgatgaaaaattcagtttttttgatgaatcttggttcaagattaattctgaacccttaaagcaatttatcgaaagcggatcttatggcgttttaccttcaagcaactcttacgggaaaggtaacgttagatttattcgtgccactgatctgaaaaatgcaaacatagatcctacatgctttacttacgtacccgaagaagaggttgccgataaggcaaaagtttctaaaggcgatattctaatggagattaaaggcgcgatctccacttgcgaactcgcagaatcccacctggctggcacctatattaatggtagtatattcaggttcacgcccaagggcattaataatgcctatttggcttatttcctttcctcgacaatcaaagaattatattgcgagcgagtttcggtcaataacatcatcagctatttggatctcgcgagcctccatgaacttcctgttattaggctcaagaatgatattgaagaattcttagcaaaaaacttaattaatattaatctggccaaaaaaattgcttttgcacttacgcgaagtgccaaaaccctagttgagtcattaatcgaaggccaactgaccgagcaacaattaatccaggcccaacaagccctggaagatggcgacaacagcttagatcaggcgattataagtaaactaagtgctgaggggtatgccattgaaggcgccacaccgctatttagcgatgtggatgagttatacagtttgctggaagatgcggcacaagctgaggctgaagagtaa

SEQ ID NO: 236692 - DNA, 693 bp, Klebsiella pneumoniae
atgataaaggacagtttggaaatagaatcctgcagatttgttttagaaccatcttacaaaaatgatggttctgttcattcttgggaaattctcacgaaaagttttaaaaaaaagcaagctaatgattatgatgctaataaagatcttttttgtttcagttcgctaagtgacaaagaaaaaattgatgtgtttaacaagcagatattgacaattgaaaaaattgacgcattgaatttaaagttcaagacagtttcattgaatgttgatagcctcattagcgattatattttgaacgataattatattagtgattacttaaaaaaccaaaaaaacattgcttttgagattaacgaatattttcatgaactcaatactaaatgttgtatggttgacttaaagtgtctttcaaaattgtgtcctgtatggctggatgattttgggaggggcttaacgagtttaacaattattgatatgtttaattttgaatgtataaaaattgataaagattatttctgggagatacagaatgaaagcaacttctttaaaataataaataaagtaaaatcgcactgcaatttcgtgattgttgagggagtcgagacaatagaacaaaaaaataaagtacattctgttgttgattgcgcttgccagggaaggttgtggatgagtgattactactatgttgagatttaa

SEQ ID NO: 236693 - DNA, 1461 bp, Klebsiella pneumoniae
atgagtttttctgataaaatcaaccggctgaaggcgctggttgcgaaactgcagcgcatgcagttcggtaaaagctcagaaaaacttcgcgctaaaaccgaacggcagatacaggaagcacaggagcgaatcagcgcacttcaggaagaaatggcggaaacgctgggtgagcaatatgacccggtactgccatccgccctgcgccagtcttcagcccgtaaaccgttaccggcctcacttccccgtgaaacccgggtcatccggccggaagaggaatgctgcccggcctgtggtggtgacctcagtcctctggggtgtgatgtgtcagagcaactggagcttatcagcagcgcctttaaggttatcgaaacacaacgtccgaaactggcctgttgtcggtgcgaccatatcgtgcaggcaacagtaccttcaaaacccattgcacgcagttatgccggagcggggcttctggcccatgttgttaccgggaaatatgcagaccatctgccgttataccgccagtcagaaatataccgtcgccagggcgtggagctgagccgcgccacgctggggcgctggacaggtgccgttgctgaactgctggagccgctgtatgacgtcctgcgccagtatgtgctgatgcccggtaaagtccatgctgatgatatccccgtcccggtccaggagccgggcagcggtaaaacccggaccgcccggctgtgggtctacgtccgtgatgaccgtaacgccggttcggaaatgcccccggcggtctggttcgcgtactcaccggaccggaaaggtatccatccacaaaatcatctggccggttacagcggtgtgcttcaggccgatgcttacggtggttaccgggtgttatacgaatccggcagaataacggaagccgcgtgtatggctcatgcccggagaaaaatccacgatgtgcatgcaagagtgcccaccgacatcaccacggaagccctgcagcgtatcggtgaactgtatgccatagaggcagaagtccggggatgtacagcagaacagcgtctggcggcaagaaaagccagagctgcgccactgatgcagtcactgtatgactggatacagactcagatgaaaacactgtcgcgtcactcggatacggcaaaagcgttcgcatacctgctgaaacagtgggatggcctgaacgtgtactgcagtaatggctgggtggaaatcgacaacaacatcgcagagaacgccttacggggagtggccgtaggccggaaaaactggctgttcgcgggttccgacagcggtggcgaacatgcggcggtgttgtactcgctgatcggcacatgccgtctgaacaatgtggaaccagaaaaatggctgcgttacgtcattgagcatatccaggattggccggcaaaccgggtacgcgatctgttgccctggaaagttgatctgacctctcagtaa

SEQ ID NO: 236694 - DNA, 1572 bp, Klebsiella pneumoniae
atggacacctcacttgctcatgagaatgcccgcctgcgggcactgttgcagacgcaacaggacaccatccgccagatggcgaaatacaaccgcctgctctcacagcgggtggcggcttatgcttccgaaatcaaccggctgaaggcgctggttgcgaaactgcagcgcatgcagttcggtaaaagctcagaaaaacttcgcgctaaaaccgaacggcagatacaggaagcacaggagcgaatcagcgcacttcaggaagaaatggcggaaacgctgggtgagcaatatgacccggtactgccatccgccctgcgccagtcttcagcccgtaaaccgttaccggcctcacttccccgtgaaacccgggtcatccggccggaagaggaatgctgcccggcctgtggtggtgacctcagtcctctggggtgtgatgtgtcagagcaactggagcttatcagcagcgcctttaaggttatcgaaacacaacgtccgaaactggcctgttgtcggtgcgaccatatcgtgcaggcaacagtaccttcaaaacccattgcacgcagttatgccggagcggggcttctggcccatgttgttaccgggaaatatgcagaccatctgccgttataccgccagtcagaaatataccgtcgccagggcgtggagctgagccgcgccacgctggggcgctggacaggtgccgttgctgaactgctggagccgctgtatgacgtcctgcgccagtatgtgctgatgcccggtaaagtccatgctgatgatatccccgtcccggtccaggagccgggcagcggtaaaacccggaccgcccggctgtgggtctacgtccgtgatgaccgtaacgccggttcggaaatgcccccggcggtctggttcgcgtactcaccggaccggaaaggtatccatccacaaaatcatctggccggttacagcggtgtgcttcaggccgatgcttacggtggttaccgggtgttatacgaatccggcagaataacggaagccgcgtgtatggctcatgcccggagaaaaatccacgatgtgcatgcaagagtgcccaccgacatcaccacggaagccctgcagcgtatcggtgaactgtatgccatagaggcagaagtccggggatgtacagcagaacagcgtctggcggcaagaaaagccagagctgcgccactgatgcagtcactgtatgactggatacagactcagatgaaaacactgtcgcgtcactcggatacggcaaaagcgttcgcatacctgctgaaacagtgggatggcctgaacgtgtactgcagtaatggctgggtggaaatcgacaacaacatcgcagagaacgccttacggggagtggccgtaggccggaaaaactggctgttcgcgggttccgacagcggtggcgaacatgcggcggtgttgtactcgctgatcggcacatgccgtctgaacaatgtggaaccagaaaaatggctgcgttacgtcattgagcatatccaggattggccggcaaaccgggtacgcgatctgttgccctggaaagttgatctgacctctcagtaa

SEQ ID NO: 236695 - DNA, 1674 bp, Klebsiella pneumoniae
atggtctgtggtttttatgggttgaatatcgatctgtttaatttccgtcagcggtttggtagcccctcccagggctcctcactaatgtctctaagcaaaactgcaaagcatgccggcttaaaaagccgggcgttagctcttgaccttgatgaaataaagcagcttaaactcccctgcatcatccactgggggatgaaccactacgttgttcttacaaaggtaaggaaaaacggatttgttattcacgatccggcgttgggtaaaagaatcattggcatcaatgagatgtcaaacaattttaccggtgtagcgcttgaactttggcccgatcataacttccagcaagaagaagcaaaatcccgattacgattgctggatttaatgcataaaattgttggtttaaaatcagcactgattaagatctttgcttactctgtagtggtagaagctatcggactcctgttaccgattggtacacagctagtcactgaccatgtgattatggctcacgaccaaagcttactgtctgttatctgtatcgggttgatattttttaccctattccgcacgtttattagcatgctacgtgcatggacgtcgttaacgttaaataccctgacaaatattcagtggaaaacgacgttattcgatcatctgacaagtttgccattatccttttttgagaaaaggcatttaggtgatattcagtctcgcttctcgtctttggatacgattcgctcaatatttaccaatagtatcgttaccggcatcatcgactcgataatgacaatcggtttattggtgatgctgaccttatatggtggttggttagtctgggtcgtcatcggctttaccatttgctatgcgattatgcgctttgctacctatagcttttatcgtcgcgtaacggaagaacaggtcgtcaaaggcgcacgtgctaactcccactttatggagtcactttatggcatttctacgatcaaagcactgaatttaaaagaacgtcgctcacagcattggctgaatcttaacgttgacgccagcaatgcaggtataaagcaaactcgattcgatatgatgtttggtggcattaatacctttatcacctcaatcgatcaggtagtggtactgtggttgggtgccattatggtaattgataatgagatgacgctcggtatgtttatggcatttaacgcctatcggggtcagttttctcaacgtgcatcgaatctcattgatttggtgatgcaacttcgtatgctctcactgcacaacgaacgtctatcagaaatagcatttagtgaaccagaaaaagaacttccatcgcggcgtgtttttacggaaaacactggcgtaaaacttgaagtgagaaatcttagttatcaatacgatcctttttcacaacccatctttacaaatttgaacataaccgttgctcctggagaatcagttgcgttaattggcccatctggcgtagggaaaaccacactattaaaagttatgtgcggactgctctcgccggattccggcgaaatactggcggataatctggagattaaaaagattggtttgaataactatcgtcttggtatcgcctgcgtactccaggaagaccgtctcttttccggctcccttattgatacttcgatgatagcgccgatcttgattttgtga

SEQ ID NO: 236696 - DNA, 213 bp, Klebsiella pneumoniae
atgcttgcggcagagttcacgggcgggtaccccagcttcggcttcgcggagaatactgatgatctgttcgtcggaaaaacgcttcttcgtggggatgtcctcatgtggcttatgaagacattactaacatcggggtgtactaatcaacggggagcaagtcatgtggtcgaaacatatatgctcaactacttccttaacacaatgctgaattga

SEQ ID NO: 236697 - DNA, 870 bp, Klebsiella pneumoniae
atggatttatctcagctgaaaatgtttaaaaccgtcgccgagcagggtagcattgccagagcatctgagatactgcactgcgttccctcaaatatcacaaacagaatcaagctcctggaaacggaactgggtgtttctcttttcatccgcaaggggcgcggcctggtcatcacaccttcgggagaaatactgcttgagtacgccagcaaaatactgacttactgccaggaagcccgccgggcacttgagccctcatcagaacctgccgggatcctgcgggtcggagcgattgaatctgccgcaacaggacggctaccgatggttctctcaaaattccaccagaactatcctgcagtccaggtgcagttcagtacagggacatggcaacagttagtcagtgatgtcgccgggcataaactcgattgcgctgttatcgcgacaaaggatgaccatccggatatcacttatgtgaatgctcaccaggaatcactggtattcattgcctctccgtttacgggagagatctctgcccctcaggacctcaaaggaaaacggatttatatgtggccgcacgggtgtccttaccgacaggcccttgagcgatgggtcaatcagcatcaggtcacggtcgatatcaccagcattgcaagctacggaacgattcttggatgtgtcagctccggagccggtgtctcgctggtccctgctggcttttttgagcagttcaaaagaacaggtaatatcagggggtatacttttagcgagttatttcccgtacaaaattactttataaaaaacagcagaatagaccgccatcactcacgtaatgcgtttgaaacgttattgcgtgctgaattaaacgatgtgtga

SEQ ID NO: 236698 - DNA, 729 bp, Klebsiella pneumoniae
atgggtgtttctttaggtatacttgcaggcatggggccccggtctacagccccgtttattgatatgctggtaacagactgccaggttgtgtgtggggcaaaatatgatatggattttcctgagatgcatatcatctccctgccaacccctttctggcctggtaagaaaattaattgcagcgaaatgatagccgccctgcagcatggtatagctgaactcgtcaaagcagacgtaagtctgatagccgtaccctgtaaccttgcacactgctactttgatgaaatgaatgaggttagtgctggtatcccacttctccatatcgctgacagtgcgcttgaagccctgccagcagaagcaggtaaagtcgcaatacatgccaccgggccaacgcatgaagccagtttttatcagcaacggatacgagatgcaggcagagaggtaattgattcgcaggagcttcgttccacaaccacatcgttaattgggttagtaaaagcaaaaggctccagggacccggatgttcaggccagatggcatcatttaatgtcgatggtcgaaagcactcaggccgatgctgttcttattgcatgtacagatcttagcccactgatatcgaggaattcttttaactttgccatcgtggataccgcgacaagcctctcccgagcgacaataaggcactacagacgactgattgaggaaaaaaatgattctggtgcggcacgttaa

SEQ ID NO: 236699 - DNA, 1881 bp, Klebsiella pneumoniae
atgagatcaaagttattaagtatatatgtcaagaacataggatgtatcgggcctgagggtgttcaggttaagctagatgatatcctttgcctcgttggccccaataattccggtaaaacaacgatactcagggcttacgaactcgcatttaacccaaattctttcaatatcagtaatgaccgatgtaattgggctactgcggaacaaccgtctgaggttatccttgatgttcatattccagaaggaatgggaaatgtagatgaaaaatggaagattgttgatggtgaaatgaggatagtcagaagttcatgggtctgggatgaaacaggaaaagttataagaaaaacatgggatcctcaattaggcaattgggcacctgatggtaaggcgggtggtgccgataatgttttcaaatctcggcttccaagaccaatgcgtataaaatcattagatgatgccataacgacagaagaagtattgcttacccttgccttaagccctttagtaaaggaacttaagacgctggaaagtgataataactctcagatatccaaagataaagctgctctggcagctactgttaatgcactggcagtgcctcatcaggaaagactttccagcatttctcagcaaatacaatctggatttcaaagtatctttccagggcttggagtacaacttcatgtagaaatgattccacctgagctaaaaattgagaatttgctcaaacagggctccggattattggttgaagaagctgctggtcaatcccgaataggacaacaaggtacaggagcaaggagagcattattctgggcaatgttgcaagttcataatgagatcagtcgacaaactgaaaaacgagatgcacttcttaagtctttaaatgaacaattaaagaaagagtgtaaaaaggatgcagaaagcgaggccgtaaaattacttaaccatcaaattgacgctataaaaaatggaggtgtgattcccgaggatgccgaagatccagcattgccgggctacgtccttctgatggatgagccagaaaatgctttgcatccaatggcggcaagagctgcacaatcacatctttatgctctgggaaaacatcctgactggcaagtattattgactacgcactcgccttactttattaacccacttgaagaccatacgacaattgcgcgtatgcagcgttcatctgatggaaaatcactatctccaaaattatatgtcgctgatgaagcaaacttttctgcagaagaaaaagataatttacaggcattgcaattaactgatatgggttttgcggagatattctttggtagttatccaattgttgtggagggtgatactgaacatgctgcatttatttctgcaatagtaaaaactcagcatgaaatggccggaaagataagcattatccgggcgcggggtaaagccgttcttgtacctctaataaaaatgctacgccatttcaaaagcaactttgggattgtgcatgatattgattggccatatcgcaaggatggttccgggaatggaatgtggaccatcaatgagacaattcgtaacgaaataataaaatgcagacaaaatggccatattgtttatcaccgctggagcatccctgactttgaacgttttctgggaggagcggcacttggcaaagataaaccatattctgcttttcatcgcatatcatctgatgacgaactcaaggttaaagtacaaaatcttatatcaagcttgttcaacggagatgattatgacccgataggtcatgatccaaacagcgagtttatttctcaggttctagcggatttaactgtttgggccgtaaaaaacaatcaacaacataatatacatataataggcgtctaa

SEQ ID NO: 236700 - DNA, 783 bp, Klebsiella pneumoniae
atgacgcacgctgactgtggcatccatcggcgtggcggcggtccggtagttgtaatcccgcgtggcaacggtgccggtggcgatgttgtgccaggtccgcacatcccagaccgattctgccgcgccgtcaaacaggcccgatggttcgctgtagggcagacgcacatcaaaccggtagttcagctggctgtcggcaaaaatgtacgtatccagaccgcgcacgtcatccatctctgtgcgccagtaaatccccacctcagacagaatgcgccggatgaactcaaggtccgtttcccgccactgggtgataatttcccgcggcgggtaggtgcgctccaggcggaattcaaaatcagcgccctccagcccgtgcttgcgcagcacctgctccaccacctccggcacggactgattctgaaatacggtgcactgccgggtgtatcccagcagcgccaggcgggaactgagcgtaagccggtagtgagactggtcctgagaagtggacagccattccaggcgggtcaccatgccgtgaacacttttaccgctccgcatccggaaagaggcatatttcatcagcacctgttccggggggatgttcgcctgaagcgtggtgaactcgatgtcccaccggaagggctcgctcagtgcttccctgccgtaaaagcgcagaacatccggcttcactgtactgccattaatatccagaaagtaacggatctgcccgtcaaaaagcgccagccagttatccatcacgtcactcctttagcggtacaagactga

SEQ ID NO: 236701 - DNA, 1083 bp, Klebsiella pneumoniae
atggcgcgagaatcacagccagcacgtaccgggctgacgctggcccttaacaaggatatctggcgggccaatttttatcgtttctgccagctactggaacaggaaaatccggacgttcctaaactgggcaccaccagccatccgggcgacgatccggtacgattcagaccctggcctggtatgggtttcccggtcagtaccctgaaagcagtggagactgacgaagaccatccgacattacccccaacggttcgcacgacatttctaggggtgtatggcgtggactcgcctctgccgacgtcctggctggacgatattgcgcagcgccgcgaaggacacgaggcggttacctcattcctggacattttcagccaccggatcaccactcagtattaccggatctggcgaaaatacgcgtatccggcgaccttcgaggccggtggccgtgatgccacatcacagtgtctgctgggactggtgggactcggtataccaggcacagcggaacgggtggcaacgccggtttcccgttttctggccctgctgggcaccatgcgattacccacccgtaatgccgaaggtatccgggccctggtgagcctgttggcaccgaatacccgggcaattatcaccgaacccgatccggttaaggtccatattgataaccgcagtgggctgggtaccggaaaccgcatccgcctttcgcagcgggccacgctgggtaaaacggccagggaagcatgcagtcgggtactggtgacgctggaaacggaagatccgggcgaagcggaaggctggttacccggtgctgtcctccataccgatttgctggtcctgctgcgcgtctatcttggctaccgcagtgacgcccgactgcgcctcacggtacccgtgcggttattgcctgagcctcgccttggcaaaggcaggcgtatccagctgggccggaccggtttgctgggtctgaaagcgggcaagctcagcaatagccgggagagtctgaccgtcagcctgggctgttatgaagggctacaatgctcggttttacctctcgctgaagacgggcattaccgcttcgaataa

SEQ ID NO: 236702 - DNA, 1254 bp, Klebsiella pneumoniae
atgcgttatcgctttattgccctggctttatgccttctttctggcagcaaggttgccatatctgcgggatttgattgttcccttgcaaatttatcaccgacagaaaaaacgatatgtagcaatgagtatttatcagggcttgacagtgctcttaacaattttttcaaacaggcctatgacagttctttaagccatggacgtctggctgagcgtcaaaaagaatggctaaaagaaagaaacagttgccagggtgatgttacctgtattaccaatagctatttaattcgcaatcgaagtttaactgcaagcaacaagctccaaaatgtcaatgatattttcaaccgcgaaggtgacaaactggatgaaatgctggatggtccaattaagaccaggtccggatttacaataaccgactcaccatggcttgtaaaaaaaatcttttcatctgatagttttgaaagcggaattaatcttgaaggtatgcatgtatcgtcagtactgacatatcaggaaattaaagatgatttgtacatttatatttctgttagcggacggtatcaaggtaaaaaaattacacttctcgtagagcttgtggacgatcaaaaccctcgcatcattcaacaatatgatggttatttaaatataatatcccgcaccagagatgctcaaggaaacgcgttagcctactttgctgttgggaatgatttacataaagaatatcattatttgtttatatctccggatggggggggaagcatttcagacatttcctccgagcaagcagatgcactgacaaaaaaaacaacaccatggactggttattgtggcagttcagagtgcaatgcttcattgatatcgcctgatagcaaatggcgactggcttcaagtgatggtaacgttaaagacccagatgaaggtatgtatgtatttccagtcaaccgtccggaccaggggttgaatgtttttgcggacaaggctgataattcaatcactgacgatgcttttggatatacccggcaatatgtatggggagatgatagcaatacattttactttgacaatagtggagcattaggttgtatctggaaaaccgatattgataaaaaaacaacaaaacggatcatccccgtagaaggtattctggacccattttatataaaatatgatggagaagacctgatcctttccgtttattcatattcttatcaagatgatttcaaatcagaaatatacattgcaaaagaacctaattaa

SEQ ID NO: 236703 - DNA, 933 bp, Klebsiella pneumoniae
atgttaatcttcgtttcgcataacgtttcacatgcgaaacgttatgcttttaaaaaccatgtggcatctatgattttaaaatataccagtcgatttacacactgtttaatatgtgtttgcaaattgttgtttttaacaaccactttttcatccagtgcttcggaaaatatacctaaagtatcatcaacggtagatggcttgcatattgtcgccattaataaattgccagcagcgcctcagaaaacaccttctgatgagcctgtattaaattgcgatagagatccacccaggactatcgagggaaaagccgtttcatctctgggatggagagtgattaatgaaatctctaacggtgatttgactatcgttggttttttcagcaaaggtgtggatggtacaagcggatcctgctttgtcaaagatggaaatgtggcaatttatagcaagggttctctccaggctttaatttatggtgataaaatcaccgatggctcaaattcgcctttgggtgcagtttccaaaaccaatttaaataacacatttcgtctgagagaattttttccgggtatgaccgcagttgctgatttgttttatgacggtaatgtcgctcgtgttcagccaattgcaccgatagaaccattttgtaatgggatagcacctgtaccaaatatttacggaaaagatattaaaagcgccagaaaattgctcaaaaattatggatggaagcctgaaaataccgaagcggatcagagcgactccattgccaaagagttaaattccgaaggaataaacgaagtgtattcttgttctggaactggatttggattctgtaacttcgattatcaacgtgaaggtgggatctctttgaatgtcataacaatgggggatgattttacagtaaccgattacggtgcccactgtccggaacaatga

SEQ ID NO: 236704 - DNA, 1185 bp, Klebsiella pneumoniae
atgaagggtgtaattaaattaagtttactggccttatcaatctcattcagttttgttggttatgctgaaagtaaatctgtagaggttttaagtgctgtcgttaaagatcaaaaaataccaggagcgcaggttgttattcagcgaaacggcgaacaatccatttcgtctttgagtgatgactctggaaatgcccagattgggaataatgcatccgatacaaatgacagtctgataattatcaaaaaaagtggatattcaacactggtggcgaaatgcccatgtagcgggatgagttacgcattaagcccgacaatgaaggggcttgatagtatgcgcgtggttttgggctggggaagttcaccaactgaccttgactcacatatggtgtatccgggaaatcatattttcttcaaccataagttgggcgacaatggaaatctggacgttgatgatacagacagttttggtcctgagactataacattaaccagacgtgagaatgggaaaccctatatctatgctgttcacgattttagcgataaacatgaaccagaaaccaataatctatccagaagcgacgcaaaagtatttgtttatattggcgactcgttagttcggacatactatgttccgaaagaccagtcaggtaatttatggactgtttttaaaattaatgaaaatggtgccatcgaagatataaacagtataaaaggtgtttctgtctatggcggtgatatagataatgttttatcgccactattgaagagcaacgcaacgttacctcatcaaaactgggatgcagaacaaattaatatctcaaacatgttaaatcttaagggagaggaatcataccgtagagagcaatatgaggaggcgatttcgctctttaccaattcaatcaataattattcagaaaatggtaaggcatatggaaatctcgggttagtttatcagaaggttggccgtactgctgaagctatctgggcaaaccgcaaggccattgtgcttgcctcaggtaaaaatgcatcaacaatccgggctggtgcgaattataatatagggaaaatatacgaaggcgaaggccagtataatgaagctcttaattattataaggcggcaaaaaatgaaaagcagaaccctgtttacgacaatgcgatattaagagtaagcagcaaaataaattaa

SEQ ID NO: 236705 - DNA, 777 bp, Klebsiella pneumoniae
atgaagaaaatcttgctattaataatgtctatgctgtcatatcattcttatgctgcttgcgatgagtcttggaaaaaagctgactacgaacaaaacatacactcatataaagtgattaacaaaacttttttccattcaacgccagatgacaactcaaaaaataataagctttttctaattagtaacgacacatttgtcggctttttgaaatccggaggatatgagttcgggagatatacaaggaaagatggcagcattgtcatgggatggcttaaagatgatgatctttctgaaaccgaaaaaacaaacacaccagaatttaatggcactgacttcagcatttactccccaaatggaaatatagaattaagctcttcgttcgaagagttttataaagcatggggtaaatgtgggaaaaacgagcaacttgaaacgggggcctggagcaactatatatcgaaaggtgatgaaacgtacaagtattttgataactactggaaaggattcattattcgctcttcaaatataaactacaagcattttggtgatgattttgatttatatcgaatcactaccataactgtaataaacaataagtacatcaccggtcgtggtatatatattggcatgaataaaaatgaaataataaatgcttatggagaacccacatcaagaagcaaagacaagataagctatcatttcaaaaataacaccctgactttcatgctagataatgatgtaattaaaaatatcattttggaagagagcatcctgtaa

SEQ ID NO: 236706 - DNA, 1320 bp, Klebsiella pneumoniae
atgaggattgtaaagagaatgcttttcctttttttcatttatacagcgacattaagttcttgctttgctagcgtaagtttcaatttatatgactccggagcgctcatgaataataatgttcttgataacaatcaaaaagaattatttggagtcgctcctgggggaggaaataaaacattctcatcttacaaatattataattctataaatcaaatgtccccagacgttatacgccttgaagcgattacatctgaccataggaaaatttatgatccagataaaaaggtatggaacttcagtattctagatcaagaaattgataagatgaatgaaggaaagaaaacaataattgctaatgttttttacacccctaaatttttgtctacttgcccagatagtaaattttatgcattttgtattccaaatgatatgaatgcttggagtttttatgtctcaagtatagctcagcatgtgtatcaaaaatatggtattaagtattgggagattggtaatgaaccatcaggtaaattcttcttcacaagttcaatgaatgaattttataactattatattctcacagcaaaagctattaaaaaggtcaatggtaacatccttgttggtgggtttgcagataatgcatattatctaaagttgtattctgattttttttctaaaattagaggtagtaaagctccacttcttgacttcgtcacttttcattggtatggtgattggggtaaggataacaccagtaaatacaaccctaaatatgtatttacgatatctaataatctcaagttagctatgaataaaaatggctttaccgatataccaattttcctaactgaatggaatttggttgggaatagacctgctccaggtggaaaagatcaagttaattcttattttatagcttcgctgtattggcttaaaaaatcacaagttgataagtctcttttcttcagggttgaaccttacaataacacaaatgcatctcttttagattataatggaaacaaaaatactgtaggcgattttttttctatattaaataattctagtttttcaaacatctccatgaaaaataatgtttatttattttctagtgattctcgccaggaaatcattttatcaaattatgatttagatgatgttgagcctaaaaatattactattcattttggaaacaaaatgctgaacagttgcaataaaaccaactatacattagttacgtatagtaatggaaagataataaaaaatgcaagaaatataacttgcacctgtctcttatacacatctccgagcccacgagactcctga

SEQ ID NO: 236707 - DNA, 1422 bp, Klebsiella pneumoniae
atgattctccctatagttatggctggtggtacaggtagccgtttatggccgatgtcacgtgaactctatcctaaacaattcttgcgcctttacggtgagaattccatgcttcaggaaacaattcatcgtcttgaagggcttaacgtccatgagccattagtcatttgtaacgaacagcatcgatttattgtagctgagcagttgctacagataaatcaattatctcaaaacattatactggagccagttggccgtaacactgctcccgcaatcgcacttgctgctttaaaggcaattttaactggagaagatccattattgcttatccttgcggctgatcatgtaattggagataaaaatgcatttcatgctgctgttgagaatgcaatcccattcgcagatgatggaaaattagttacgtttggtattgttgctacaagtccagaaactggctatggttatatccaacgcggtgaaaagatatatcaagaagaattttccgcttttaaagttcagcggtttgtagaaaaacctaactatataactgctgaaaaatacctagagagcaatgagtattattggaacagtggcatgtttctttttcgagcaaaacgcttcttagaagaactatcaaaatttcgtccagatattcttacggcttgccaacaagcaatggctcatcttcgttccgatttgacccaagactttgttcgtgttgataaagatgcgtttttagcctgcccggatgagtcaatcgattatgcagttatggaaaagactgaagatgccgtcgtagtacctctttctgcaggttggaatgatgttggctcttggtctgcattgtgggaggttaatagaaaggataataacggaaatgtgataaatggggatgtttttgttgataatgcagaaaattgttatatcaatacagatgagaaactaattgcagcaataggaataaaaaacttagttattgtaaatactaaggatgcggtacttgtcattgaaaaatcacaagttcaagatgtaaaaaaaatagttgaacacttgaagaatagtcaaagacgtgagtatcgttaccatcaggagtcatatagcccttgggggcgtaatgataaggttgtgagggccccgcgttaccatatcaatcatatcactgtaaagcctggcggaaaattctccttgcagatgcatcatcatagagcggaacactgggttgtactatctggcacagcacaggtgacacttaatgataaaacctatttacttacagagaatcaatcaacttttattcctatagggtccgtacatatgttggaaaaccctggcaagatacctcttgaattattagagattcaggctggttcctatttaggagaagatgatattattaggtttaaagatcattacagcattaattaa

SEQ ID NO: 236708 - DNA, 390 bp, Klebsiella pneumoniae
atgaagaatctgtctgtaacggtagaaaaagccctgggtatgtttgtgcatgaagacggggcgaagctggtcgccaatcagggggatattgatattcaggcgcagcacaacacgatggcgcttctggcaaagcagcaggtgacgataaccagctgcgaggacgggattaccatcagcacgccggagacactgacgctgaatggcggcggatcgtatctgaagctgagtaaaaacgggattgagcatggtactgagggaatgatggtgatgaaagtggcgaactatctgatccccggtaccggggtgtcactgaaaggtgtcacggagaccttcaggaaaaccacactggaactggtcccaccccggcggcgcggaaggatttcaaggtaa

SEQ ID NO: 236709 - DNA, 2214 bp, Klebsiella pneumoniae
atgaaaatcagttacccgctgagggacaccaacggtaaagaattttgcgcactggacgatgtcatgcggcttatcgacggggaagcgcacgggacatggctgctgggcgcgaatggcctgtggcacggcgggatccatatcagcgatgtctctaatcctttctcggcgctaaaaccagacgccgttaatactgaagaaccggtacctctccagtttatggcagacggtacggtagtggcgtaccggataaacaatgaatacctgacagcgccatactgcggacaacaactgcgctacagcagcagctttgtgctggtgaaatcacagtgcaagcctgacccgcaaaaggaaaagagctggctggagttttacagcctgtatatgcatctggctccggtcgctgattacccgaaatctccctgctataaagtcagggacggtcacagtggcatacggttacgccagtataaaaacgggcaagacgggttaccggagggggcgccggacaagggtgaggccgggacatatcccgctccggcgaaaacggaaaaaagcctgaaggcaggcgaccgttttgtctcttcccggacggggcgtttttatgtcacgaagaacggaaacgcgaccctgacaacctttggtctggtccgtttgctgaaagatagcgttccgggcaaagaacagtactgggtcacgctggatccggtgctggtggagccggatggtgaaattcaggggctgatgccggaatggatgcagaaggcaaaacaaaaaggtgcttttgacgccgtggaactgacggaaggaacggaggaatggaaggtcagcgccggaacgcccgtcgggtttatgggctgtatggagtcgccgggtgaggggaatcagcttgtggatagggagtggtttgtccatctggaagtgttgagtacggacagcagaatgcccggatttttagccaatccggcgtgtgtaaagggtgaaaaaaagtcagtgctggcacccaagggaaaatccctgtttacccgacaggatgccgctggacagccggtatttaccccgacatcggcgaagctgggcgcgcagtgccagctctcccgggaatcggcaacgcccgtcgcggatgagtcacaaaaatggtggtataaggtcagcggcagtggctggttaccacaaaatgatgttgaggaagttaaccagtacgatttagagaaacttgggtttcaggcgctggaggaaagctgcgggggcgatgtgatgaacagcccgtatgagagctggatcccccaggcgtttggggcgataagccgaactgctgaacagggcgcggggtatcagtacggtctggtaccacagttttatcgtgacctgatggcggagatggacagcaaccgcgacgggaaagtgacggcagaagaaatcaggcaggcgctggcagtacgggatccgctggtgaaaaatgtggtcaaccgggtgatagtcaaacatcacagcgaatggtatgggggccgctcgacagggcgctgggaagggttttataaggatctggactcgctggaggtgaaatactgcgagaaatggcaagcggatctggaatggatgagcaaggtgccgccgtttgataaggatgaggcggtgtggcatttccatccggtaatttttttgtcgactttgcagtcggtatcacacggtccgttgtggatgtctgttgctatcaatgaatataaaaaatttaaagacttgatagagactgatccagaactcgataatcaaataaaacaatatcaccaaacgactaatgttgctggtagtgatcattcagtttcatggtgttcatcatttgtaaactggatcatgattcaggccggttatgctgaattagttatacacagtgcgttagcatattcatggaatgccggtgcttggaaaaatggagaagaagtagatgaacctttctatggagctatagctgtgatgaattatagtcatgttgggtttgtttatggcaaaaattctcaaggaagtatattaatccttggagggaatcagggagggggtagaataggaacggcaaattgtatctcaataagggctaacgcattgtccagtataaggtatataatgaaaccaaaagggtacgttgtgccaaaagaagtctttgatttgcatgtttatgatatcgatggagttaccccaacgtatgaagattcacattaa

SEQ ID NO: 236710 - DNA, 549 bp, Klebsiella pneumoniae
atgaagattcacattaatacatttgtttttcttttattgttgttttttatgagttgcgccaatgcaagagataactcaatgcttgagtatttcaatcgttttgtcgtaactttctcctctggtagcgttagtaaggatgactatatatctcttgttgattataagattatccctgatatgcattccaattatgatgtatctcctcctgaacaataccaagggttaaataaaagaaaagatattttcttaaacgatataaatattttatttaatggaggtgactcaaggtttttcttcttgagttttgtgaaagataaaatactttccgcttcaggagaagatcaaaataatcctatggtatacatcaaaaaaaatacaacctattcttttaaaatcatgaaaaaccaagaaactaacattgttatttttgaaaatatattggcgatgattcctgggtctgaaaattcatcagagtttagttgtttttatgattttaagaaagtgtttgatgattcaataaaattaacagatgttaattgtgctggttga

SEQ ID NO: 236711 - DNA, 810 bp, Klebsiella pneumoniae
atgataacagacgttttttttgcacgttatggagaggttgatcctaatagtattactgttaatgtaggggataaagtgagtcaaggtagtataatagctaaaacaggtttaatgatttcttcagaaacaaacaggcatcccagcattatagcggggcagactgtttatatgctacattttgaatactatcctggaaatgagtctgaatcgcctccaaacaatacattagatctcccttacagaagacgaaatgacttacgtgatccgttggaaatattgcgcgaaggttacgagaacactttcagtgaaaatgtcaaaaatggaaaccggattgatataaaccagttacaggtttcagatgaaggaaaagcgtttatcaaaggatgggagtcatttaagtcaaaaccttataatgattcagagggctattgcaccattggttatggtcacttaattgcaaggcgcaagtgtgaggatatcgttctgtcagacgaattcaaagacggcatcacgcgtgcccgcgctgatgaactttttgaagaaagactgcccacatatgtaaatgaacttaagagttcagtaacggtgaatctctatcagtacgagtttgatgcgttggtaagccttttgttcaatctcggttcattacgcaaagcacctttactcaaatcgaaacttaatagcggagattatgctggtgcagcggacgaattcctcgatattaccaatgacggtaccactggcctggtgacacgccgtaggaaagagtgggatttattcaataataatatttatgattcttctcattga

SEQ ID NO: 236712 - DNA, 399 bp, Klebsiella pneumoniae
atggatccattaattcctcatatgcgtaatgtgtttttatttgcatttttgctttgtttatcaaattttacacaggcatccgagcaaacaagcccagaaagcatcgtgtacaatttttataagtcatatttgaaagaagaatcatcggacaacagtcgatttgtcagccaatatgtttctgatgagttaatgaaaagcattaacgactcaatgatgtgtaattatgattctgatgattcagtgtcggcagaagaactcgaagaaaatgttcacaaaagcgcgaatgcaagcagtttaaagggcgttatatttgtaactgtcatggtgcatgggttgatactgatgttgattattttacaaaatcacaagatgtttatccttcatggaaagcaagcataa

SEQ ID NO: 236713 - DNA, 390 bp, Klebsiella pneumoniae
atgaaaaatgtttctgtaacggttgaaaaagccctgggtatgtttgtgcataaaggcggggcgaagctggtcgccaatcagggagacatcgagattcaggctcaacacaacacgatggccctgttttctgaaaaacagctgacggtgaccagcagtgaagatgaaattattatcagcaccccggaaacgctgacgcttaatggtggagggtcttacctgaggctgagtaagaacggcattgaacatggctcatcaggtgagttcattatgaagacgtctgactatctggtaccaggatcgggcgcaaatctccccaacgaaacacccaatttcagcctgacggatatcactcaggaaagcaaaatcagcagcaaatctttcaatgactaa

SEQ ID NO: 236714 - DNA, 1035 bp, Klebsiella pneumoniae
atgaaaatacatctgactccggaacagtgtaccgccctgaaactactgcataagagcagcagggatagccgtgtatgcgaccgaataagatgtgttctccttgctgcggatggctggaatgcctctatgattgccaaatctcaactcattgatgaaaccactgtccggcgtcacctcaacgactggcttaacgaggaaaagctgaagcccgaaaatggcggcactcagagccacctcagtgagacgcagactgcagagcttattgcgtatttaacggataaccttctgcccacgacggcggccatcatcaacgttatcgaagaatggtggggcatccgttataccgtgccgggcctgaataagtggctgcataaacatggcttcagttatcgaaagccggttggcgtccctcataagttcagcgctgaagctcagcaggcgttcgtggccgcttatgaacagctcaaacgggatgcaggcgatgatgaacccgtcctgtttatcgacggtgttcaccccacacaggggacgaagctggcgtatggctggatgcccgtcggcaaaggagcaaagcaggtggaaaccagcggcagccgtacccggctgaacctgatgggagctatcaacctgacagcgctggataaaacggttatcagggaatacgacaaaatcaacagccacaatatcgcccggttcttcatcgccatccgcgaaacatacccgatacagcaaaaactccacatcattcttgacggcgcgggctaccatcgcagcgaacaggtgaaagagtgggcttatctgatgaatatcgacctgcactacctgcctccttacagcccgaacctgaatcccatagagcggctgtggaaagtgatgaatgaacaggtgagaaataaccgttacttcacctcagcaaaggtgttccgggaagaaatacaccgcttcttcagcgaaatattaccgggacttgccggggtactggcgcgtcgtattaatgacaacttccagacgctgaaaaatgcaacttcaggttaa

SEQ ID NO: 236715 - DNA, 261 bp, Klebsiella pneumoniae
gtgccgaatacgctggccggcaatggcgaagaggagaacgtcagactgcgttttaccgacatcaaagattttgaaccggagcaggttgcccggcaaattccgcaactccgtgccatgctggcgatgcgtaatttattacgcgatctcaaatccaatctgcttgataacgccactttcagaaaagagctcgaggcaatcctgaaagatccggcgctgtcccaggaattacgcgacgaaatgagtgcgcttgccccgaaataa

SEQ ID NO: 236716 - DNA, 1398 bp, Klebsiella pneumoniae
atgggaggcctgcagctcgtcgccggggtcggtcatttcggtcaccaggctccgcacccaagtgttcagctccagctccagcagccgccggtccttggtggtgccgatattctcgcgctggatcatcttcaggtagtgcgcgatgcgcgacagcaggaagatataaggcagacgcgcgttgatacggctgttggcggtggcgtcggcggtatcgtacagcgccggtttctgcgcggagttggccgagaagaagcaggcgtaatcgcgatttttgtagtacgacagcgggataaagcccaggctggcgaactcaaactcccgcgtctccgggatcatcacctcggaaggaattttcacctggttgccggtgcccagatcgtacagatggatgggcagatctttcaccgcgccgccggcctgcggaccgcgaatttgcacgcaccagccgttattgacaaagctcttcaccatattggaagcgaaggagaacgccgcgctggtccagagatacttttcgtggtccggacctttcacctgctcgacatagttgaagctgcgcaccggcacggtgtccggaccgtacggcagacgacccagcacgcgcggcatcaccaggccgatgtagcgggcatcgtcagtttcgcgaaacgccttccagcggatatattccgcacgatcgaagtagttgccgatatccttaatggcagccacctcttccatggtctctttcaggaagaaggccgggccgactgcgccgataaacggcatatgggcggccgcagagacgcgggagatattgcgcagcagcgccacatcctgcgggctggcgtcgaactcataggccgagatcaccgagccgatcggctcgccgccgggagtgtcatactccgcggtataggtgtgccagtagaggccgctctggataagctccggcgcgtcctcaaagtcctggcgcagatcgtctttggcgacgtcgaggatctccgttttgacgttctgccgatagtcggtgttgtccaccagctgtttgaggccgcgccacagggattcgacctgctgaaactcctgatggtgcatcaccgcgtccagctgacggcttatctggaaatccagctcggcgatatggtggtcgatcagcgttttgtcgagcttttccacccgctggccggactgacggatgcgttccataaacacctgcatcgccgcggtgagacgttccgccgccggcgcctcggagagcgcggcatcgtccagaaagtcgttgatatccccgaggcgagacgccggggtgagattaattttttcaaacagcgaggcgtaaacgccctcgcccgccctgttttcctgcagcgtggtttgcccctgaacaggggcgttttctgtggtaacagacattag

SEQ ID NO: 236717 - DNA, 390 bp, Klebsiella pneumoniae
atgaaaaatgtttctgtaacggttgaaaaagccctgggtatgtttgtgcatgaagacggggcgaagctggtcgccaatcagggggatattgatattcaggcgcagcacaacacgatggcgcttctggcaaagcagcaggtgacgataaccagctgcgaggacgggattaccatcagcacgccggagacactgacgctgaatggcggcggatcgtatctgaagctgagtaaaaacgggattgaacatggttctgaggggatgatggtgatgaaggtagcgagctatctggtgccaggaagtggcagcagtctgccactggagacaccggactttaaaacgacggacgtgaaggtcataacaaaaaattccgccaaatggacaagtgaataa

SEQ ID NO: 236718 - DNA, 642 bp, Klebsiella pneumoniae; identical to SEQ ID NO: 102318

SEQ ID NO: 236719 - DNA, 603 bp, Klebsiella pneumoniae
atgaaccatccaactttatggggtcagtccactgcgcttaccgggcctacgaggtgtgagcctgtgagaggccccggtaggccgggtaaggtgccagccgccacccggcaaaataacggcgcaaccggaaatgtccctgcccgcgctgcgcttagcagggctacagcttctatgttacttccgggcagattgcgctcccggttgatcttctgcgctatgtcactcatggcgctgggagcgcacagggggcggccagtcgccgccgccccctgtacccccgggctccggccagcaacatcgccgctgcgcggtcccttcgacttatccctgcaggcttcgggtcgggccgaggcagcgtccctgcaaaacacggccctcagcccgcatccatgcgggctgccccggccttccgggaacgtctcagcgatgttgaggccgccagcaccggcagtttcagcagcccctgcgccagcggtgatttggggctgtaggccgggtaaggcgcagccgccacccggcataaatgtagctccgtgcctgatgccatcgcccggcggcgccgttgcttgccgggcctggagacagtcggagccggacgagtag

SEQ ID NO: 236720 - DNA, 396 bp, Klebsiella pneumoniae; identical to SEQ ID NO: 100678

SEQ ID NO: 236721 - DNA, 1368 bp, Klebsiella pneumoniae
atgagcactcaatttaaagatctttttagtaaagcccgaatcgatgtcagcagtcgtatgaaaacgggtagcctaagaaagtcaaatgtatatgcggattcgcagcagaaagtaatttctgaaagtgtgaagaaagggatgcgcaatgatagtacagatgattatttgaaagcaagccttgaaggttatgcggaagatggtatgccaaccatcttccgagatgtaaaagctgaattaaggaaagttttttataaaaaacctgaagtcaatgaagctatcggctgccatccggactttgacgatctcagattaaacgatgagcttcgtaacggctatgccgtaacgatgttttttgatatagccggatcgacaaaacttggaaaaacgtatccacctgatatggttttcaatataaagaacacaattataagatatgttattgaaataattcaggcttttgatggccacgttcatcgtattatgggcgatgctgtgatggcatttttccgcagtgaagtgaagtctatagaaggaaaaaaaatagacagcgcgattgatgctattaacgctgctgtatacatacttgaatttatggaacaggttatccggccagagttgggagatcagggttcggaagaacgtataggcgtcagactgggaatcgactacgctaaagatgatgatatcgtgtggggaaactatggtgtttcaggtgcatttgaagtaacggcgacttcatatcatgttgatgttgcggccaaacttcagcaagcggcagaaactgatacgatcatgattggcgaaaatctcaagtcgctgcttggcttagggatggagtacctgtccaccaaatggaaatgggtgaagaatgaagatggtacagaatttaagcgctattatcggtatgtaaagcctaactatagagtcagaggatcacagataaactattcgcaatatgtttttgacagtgcatcatattttaagtttttgccgtatggtatagaaagtaaaagaacgtcagtggtactgaccgcaacagcaaataacgttgaaaaaatattttattgcccttgttctgaaagcctcgataaaggaatgtcgttaaacttccatgtgacattcactgctcctgcagggcagccgtatacggtcaaagctgttaagaggaacactggccctgacgctgaaagaaattcagcgttaaaggaagagaaaaaggacagaactatgactttttacgcaggccagtggcatgccgacatttctgaaaatgctagttatcacggtttgcatcatatggaaattaaaatttatgatagctatgacacagaaatcgataggacaatatttagcatttttattagctga

SEQ ID NO: 236722 - DNA, 534 bp, Klebsiella pneumoniae
atgcctttagatgaaaaagataagtttgataatgatctgatccagaagatgattacccgcacagacgggtttcataattatgccaatactaaatccactataatcattacctttattacagccatactggcagcaataggcactaatgctggaagtgcattatcttacttagattcaaaaggctgtcatgaattgacagttattttcaaggtcttattactagtttccttggccttacttttatctggatacttttttattggtcaaaccgttattccctatattaagacgagctcgaagagaaatttttactcgtttattgatacagtaaagcagtttacttcggagaaggagtttgaacaagaaataaaacaaactccaatcaatgaaataaccagcaccatgatttctctacaatacaacctttctcaaggtctggttgaaaaataccgccttcaacgtctttctatatttttaattcttttcgccgcaataccattaatgattaacacattgattatcttattcgtataa

SEQ ID NO: 236723 - DNA, 1620 bp, Klebsiella pneumoniae
atgaataagcttgtgctcgcaattgtctcgacgatgttatcgattatctcgttttcttctcttgctgcagaaccccgtcaggaacccaccggcgcagagcgagcccgtacggtttatatcttccatcaacccattgtgatgctgcaggcgaaatttggtctcaccacgccggaagagcgggttttacgtattcgaaataccttacgtggcttcacaaaggcggatgtcagtgaaccgctaaaaatcattcctgtgacgcgctataaccagcagggccgtcttatcgtgatgaatggcaaaccgattatgttgctgactcaggccgatctggacgagggggacgatctcactctggatcaggccgcacagcgcgtgctggcccgcatggaaacgcagcgcacagcgcttcgcgatcagtatgacactggctggctggtgctttccggtattaaaacgctggcgggattgctggttttagcgggctttttctacggtgcatggcgcgcgtaccgctgggttagccgctatttccgtcgccgcgtggtggaaaaccgaagcaaaatcccgcaaagctggcgtcgatatatcggcgttgtggaggctcgattattcgctctgctgatgattattttcgctatttttgccttttacgcatggctgagctggacttttggcatgttcccctggactcgcgtctgggcaacgtcgttgggtgactggtcgctgcgcgtcattcgtcagattgccttatccatcgtttcatcgttacccggcttgctgattgtgttgattattttcctgatcaccgccttcattcttaagctgcttaagatggtacttaatcaggttgaagcggggcgcatgcagtttccgggcctgcaccccgaaacagttggcgcgacccgcaaattgatttcagtgatggtgtggttatttgcgttgtctgccgcctacccgtttttaccgggggcaaattcactggcgtttaagggcatcagcgtcttctttggcctgatgttaacgctggggtcggcgggggtgatgaaccatgccatgagtggcctggtgcttatctattcccgcgcgctgcgcaaaggggatgtcattcgcgtggcggataatgaaggcaaagtcagcgaaataggcatgctcgccaccaaaattatcacccgcgaaaactacgtggtcaccgtgcctaacgcggtggtggtcagcggcaagatcaccaatctcagcgcgcaaaataacgatggcagcatcaatttaaccgtcagcgttactatcggctacgacaccccctggcggcaggttcacgccatgcttgagctggcagccaaacgggcaacatgtgttgacctgacgcgcccgccggtggtgcgtcagctggagctgatggactggtatatcgcctatgaacttcaggtccggctattaccggagcaatcactggccgtcgcgcgcaacgaactgcacagcaatattcaggatgttttcaatgagtttaacgttcagataatgtcgccgaactttgttatgcagcctgaaggcagcgtaatggttgcaaaagagaactggtatgccgcccccgccgctccgtcagacgggaaaaattcgctttaa

SEQ ID NO: 236724 - DNA, 1479 bp, Klebsiella pneumoniae
atgaaagttaaagtcattaccaccgcggttttgctggcgctcatgttaacccagcccgcatcatccgccgacgcgcctctgtcacccctgatgaaacaactgaataacggtaactggcttcctcaggaggaggcgcagtcgctgagcgacgaactttactatcaggatgcaatccaggcctatattcagacattgccattgctcaataccattggcctgcgcgacggttcggaagcggcattcggcaaaggatataacgtcctgcctatctggaaagagcgcatggacagtcgcgcagtggtgccaacgccgaacggcgacgttatctattcgatgagctatctggatctgaaagagaccggcccgttggtcatcaaagcgccgccgaacgtgatcggcatgtttaccgactttttccagaaaacgatcactgacgtgggcgctattggcccggatcgcgcccgcggcgggctgtatctgctgttaccgccggattacgaagggccggtgcctcaggggtactacgcgtttaaatcctctacctacaatgtgttcctgttcttcagaactattatgggcaaaggcgacggtaagccagacccggttccggcagtgaaaaacgcggaaaccacccgcgtgtatccgctgtgggatgtcgaaaaagaagtcaaaccgatgcagttcccggacgccagcggcaagcgcgtgaatatgatgtacccgaccgacgccagctactggcagaagctgaaagccttcgtggactatgagccgttgacggccatcccggaggaaacgcgcagcgcgttactgagcattgggatggtgaaaggcaaaccgtttaacccgaccgcgaagcagcaggagatgctgaaaaaggccgtcgagaccgcgccacggatgatccttgcgcgtcgccaggtgggccgtgacgatcagcgccagctgtactacaaagaccgccagtgggaaacctcctgggctggcgcgaccgctgagtggatgcagtatggcacgctcgatgccaaccagcgcgcggcattcttccagattgcttactccagcgcggcggcgatggtgatgcataccaccggcgccggttctaaatatccgttcgccaccaaagacaataccggtaaattcctcgacggcggcaatacctacaagctgcacctgccgccgaacccgccggcggcgctgttctgggcggtcaccgcctataacattaccgacgggaccatgccggaaaccgaccaactgctaccctcgaccaacggctattacaacattcccaaaaaccaggacggatctatcgacctgtggtttgggccgaataaaccggatggcgtagccgacagcgcgtttattaaaaccgtttccggccgcaacttcctcgtggcattacgactttacggtaccgaagatggtttctatgaccagacctgggtgccggacgatctggttcagaccaataaataa

SEQ ID NO: 236725 - DNA, 1464 bp, Klebsiella pneumoniae
atgaaaatgaaacacctggcgatgttgactgctctgacgttaagcgccggcgcctttgcccagagcgcgccgctgacgatcccgcatcccactaaatttgctgagctgacgcaaccgtcgccggacgtcatcatgccggagagctatgtgaaggccattgcgcagcaggcctacatctggggctggccgatggttaaccagttcaaccgccgtgaaactattaccaaagcgccatacccggcgctgaacggagggatggtaccggtcgcgccgatgggccagctgagcatgctcaccgactacatcaaaccggaagagaccttcgtcacctgcccgaaccaggacgtggcctacggccttggcttctttgagctggacaaagagccgatcgttattcaggtgccggattttggcgatcgattctgggtctatgccatctatgatgcccgtaccgatcaaattggcaatgtgggtaagccctatggaaccaaacccggtttctatttgctcgttggccctaactggaaaggcgaaacgccaaaaggctttaacggcgtgattcaatcttcaaccgaaatggcgaacgtcatacctcgtatccagatggatgataccccggaagatcgcaaggccattcaggcgcctatcaaagaagtgatgacttacccgttaagtcaatttgatggcaagatgaaatcctatgaatattccaaaatcccggcaatcggcgataagccagatccaagcgccggtgagacacgctgggtcgttccggaaaaattctttgaccagttcgctaacgtgctggaaaaagtgccgccgctgccgggggaagaggcgatgtatgcccagttccgtcatctggtagaagcgggcaagaaaaacccggaaatccgtaaatggatggacgaaaccgccgtcgcgacggacaaaaccgtcatcgcggatttctttaaatggaagaacaacggcgtgcccgccggcaacggctggaaccgttccaaaaataacgccgagtttggtgtggattactacaaccgtaccggcacgtcgaaatccaatatgttcgacaacaagcctgacgaaacgcagtatttctataccgacaatgatgccgccggtaaccagctttcaggcgaccatgattacacggtaaccttcccgaaaggcgagctgccgccggtgaaaggtttctggtcactcacgctgtataacagcaaacatctgtttagcccaaatgagctgaaccgttattctcttgggaccaaaaataaaaatctgaaatataacgaagacggttctctaaccctctacgtgagcaaaaagcgccctgcagaagataaggtgaataactggctgccggcaccggacggtaagttatcactgtatattcgcgcttattggggtgagcagtcgattctggacgggacctggcagccgccgaaaattgaaaccgtgaaataa

SEQ ID NO: 236726 - DNA, 168 bp, Klebsiella pneumoniae
atggcattcaggcgggggacaggcacccacctgtttatcctgtttctgatcgctaattatattcacgctatggatacaggaggcgctaacctggtcggtgcgaacggctttaaatcgcatcctgatgaagttgaagataaaccctgcttaaacatgacgcagaaataa

SEQ ID NO: 236727 - DNA, 1002 bp, Klebsiella pneumoniae
atgaagcgtacgttaatcgctctgactttattcgccctctgcggcaacgcagtggcagatccactctcagcatggaacgatacggcagccaagcgcgccattgaagaatgggtgcaaggtgccaccaacccagaccgctcaacgtttattccggccgaaaaacgctacgtcgtatttgataatgatggcaccctgtggccagaagcgccgctgacgtttcagatccggttcgtgctggatgagatcaaacgtctggccccgcaacaccaggagtggtctagcgacgcgttggtgcaggccgtgctgaaagacgatatcaaaactgtcgccgcttccggcgaaaaagggcttattcatcttttatcgctgacgcacagcggcatgacgactgatgactttaatcagcgcgttgctaactgggtttcatcgcataaggacccgcgttttggctgccagtacgatcggatgggatatcagccgatgcgtcagcttctggaatatctgcggggtaacggtttcaaaacctggattgtctccggcggcggtatcgattttatgcgcgtactgtcgcaaaagatgtacggtattccacctgaacaagtgatcgggtcgttttcccttggcgaattcgcgttatctgatgaagggacaaaaattaccaagacaatgtcgggggccttcaatgacgatgcagccaataaacccgtggcgatccaccttttcatgggccagcgccctgtcgcggcatttggcaatagcgacggtgatctcgccatgctgcagtacaccgccgccaatcctgacgtcaaaccctttggccttctggtgcatcatacggatcccgtgcgtgaatatgcctatgatagtcatcctccagccagcggaaagctgattgatggattaacgcaggcaaaagcgcatggctggaccgtcgttgatatgaagcaagactggaaaacagtgtttgatccggcacagtgtgtgacccagccgggatcgtag

SEQ ID NO: 236728 - DNA, 1014 bp, Klebsiella pneumoniae
atgaaacttatctggttaattctgttggcggcgcttccctgtcaggcagccatgacggtcacgcgcgagctggtcgctcccgaacacgttgtcccaggccaaccggtgcgcgtggcggtgacgttctggacggactcatggtttaatccgccgccgcagtggcccggtttcccggttgaaaatggcgatatctcgagcaaagccgaacccaatcagctgctgacccgtcacgccgagggaaccagctggagcggcgtgcgcatggaacgccagctcactgcctgggatgcaggtaagctgcgtttaccggcttttgaaatgacgttagccgcctccggacaggcgcccgtgacggtcaaactaccggcgctggaaacgcaggttaactggccgcaaggaattgaacagccagaccgtttcctgcccgcttcaggtctctcgctcagccagaaggtcaatatttaccgtagtggtaaagataaaacgctgcgtgccggcgacgttattgaacgcgtcgtcaccgtccgagccacggaggtgatgcccgcccaaatcccaccgctgctctatgccatcagcggcacccatacccagcgtctgccgcctgaaaatcgtctgctgacttcgggtcggggggatcttgaaggcgcggaacgcgtggaaacgctccgctatttgcctgttgttgcgggggaagtcacgctgccgccgatcaaattgcggtggtgggatacaacccatcagcagtggcaaaccgctgaactccccggcagcacctaccgaattgccgcttcgcgctcggccggtgcggaatcctcgttaaagggcgatcgtggcacgttgactcggcagaatgcgttaatgctcgcaggcggcctcgcgttactcatgctgatgtttattttccgccgcactttgctgcgtagcgcgcgttacttatctcaccgttggcgccgattctggcagccactttcgctaccgggacagaccccggataacaggagttcacgatga

SEQ ID NO: 236729 - DNA, 1515 bp, Klebsiella pneumoniae
atgagtgattttcactttttatacccctggcgtttgctgctgctgatcccggccatcgcgctgtggtggttaccctccgccgggcatagcgcctggtcgcgcatcatggacaagccgctggcgaaagcgctgatcgtcggacggcagcgcaagctcacccgcgtactgccatggctggcgatgcttggcctcatcgcgctggctggcccaagctggcagcgtcagcttcccgccgcgctgacgacggaaagtaacgtgatggtgattttgcaacaggataccgccatgtttgccagcgatctgcctcccagccgccatcagaggatgcagaccaaaatcctgtccctcatggagcgcatgccgggtacccgatttggcctggtggtgtataactccggtgcctggctaaccaccccgctcactgtcgatacggcgttttattcgctatttctgcatgcgcaaacccccgcgttattaccgtctggcgagggttccggacttcagcatgccatctcactggccatgcataatatgcccaccgccccgcgcagcattattctggtggcggatacccttagtgcggatgacgccagatggctaggcacacaaaagacaccgctgcagatctgggtgccgggaaccgctcaggggggcgcgctgcctgaaaaatatgccgccagtgaaaccgatacgcgactgaatgttaaacgcttcgagcaggtgcgagacgaggggatccccgtcacgctggtgaccaccgatgatgacgatctgcccgtgatacagagccatattcaacaaagtgtcaccgcgcagaacaatgcccggagtgatttacactggcgtaacgatggctggatgctggcgatacctatgctcgtcatgctgtttatctggcgacgccagctcttttgctggattttaatcgcgccgctgctgctctggcagccatccggccatgccgcctggctggatgcctggataagtcccgatgtgcagggtcagcgtgcctttgccgagggggattatgcccgcgcggcccagcattatagcgacccgctccggcaaggtattgcatggtatcgggcgggcaattaccccgccgctaccgccgcgttccgccaggcgcaacaaaccccggaaaccctgctctggacaggcaatagttatgcccagcaaaaacagtggcagcaggcgctaaacagctatgaccgggcattaagtctgcgcccggactggaagctggcccaggggaaccgcgccaaaatcgccgcgatcatcatgcaactgcggcaaaaagaacgcgagaaaaagtcggcgcaaggtgaagaagccgattacaaacctgatgaaattaagcatgatttgaaacccgacgatggcgttgaacaaaaggacattcagcccattgctggagggaatccgcaggtgaatcagtggtacgaaaatctgaccgtttcgccttcggggctgctggaaagtctctaccgcactcagtcaggagaaggccaatga

SEQ ID NO: 236730 - DNA, 978 bp, Klebsiella pneumoniae
atgtctgacttcttctcacgtctggcgttcgcctggccgtgggcctggctgctactgatcctgccgctggcaagtcgctttgtgatggccaaagagcgctcgttgaaagagtatgtccgggttccttttttgcctgggctgattaatgaactccagcttaacaaccaacccgcacatggcgggaagctatccacctggctgttctggctggtatggtcgctgttggtctgcgccctcgcccgcccggaattgcttgccccgccgcagcatactgaaaaaccgatgcgcgatattatgctgattcttgatgtttccggctctatggagaaaaacgacgtcacgggcggtatcacccgtctgcaggcggtacagagctccgttaaaaaattcgtagcggctcgtaaatccgatcgtatcgggctggtgatttttgccaacagcgcctggcccttcgcgcccgtcagtgaggataaacaggcgctggaaacccgtatcaatcagcttgcgcctggcatggcgggacaacagacggcgataggcgacgcgctgggcgtcacggtgaaactgctggattccagcggcgatactgacgccagtaaattagccatccttttgaccgatggtaacgacaccgcgtcacaactgacccctcgcctcgccgctcagctggcggcccgtcatcacatacaggttcacaccatcgcctttggcgacgtgaacagcgacggcgatgacaaagtggatgccgctcttttacaggatatagctcgcaccaccggcgggcgcgcctggacggcagagaatagcggggcttcgctggatgcggtctggcaagaaattgacgcgattacgccagtgcaggtaaaaagcatcggctggtcgtggcgtataccgctttttgcctggccgcttgccgccgcactgcttctgttgctgacctttaatctgtatcgcgcgttcagggagagagcggcatga

SEQ ID NO: 236731 - DNA, 441 bp, Klebsiella pneumoniae
atgctggagaaaggatttacggtacccgaactggcggaaccggttcttcccgattcaccgtcatggtttcccctaccgccgggatggtttgtactgggcggtatcctgctcgccctgttgctcatttatctcatcatccgcatcgccagatggcggcgaaacctgtggcgtcgccaggcgctggcggctctcgctcaaccgcaaacggtagacagctggctgctgctgatgaaacgtattttgctggtgcatcagccgcgggagcaagtgagcggcgcgctggatcctgcccaatggttgcaaaacgtcccgctggatgacgcgttacgccagcacctgtgcgaacgctactgtcagccagagaaccagctcagtgacgacgataccgaacggctgcgtatgcagcttcgctcctggcttgaaggattaccccatgtctga

SEQ ID NO: 236732 - DNA, 906 bp, Klebsiella pneumoniae
atgagtagcgccgttcgcattgaccgggaaacgctgctgaagctcgccgcagaggcgcgagccatcgccaatccgccagggcagatcccgcctggcgcgcttggaggtgaacgtacatcacgccagcagggccgcgggctgaactttgacagcctgcgtcgttatcagcccggcgacgacgtccggctgattgactggcaggctactgcccgcatgcgtacgccgtggatccgactttataacgaagaaaaagagcgccccgtctttctgctggttgatcaacgacgggatatgtttttttccacgcgcgttcagacaaaatccgtcgcggcagcgaaaactgccggattgctggcgtggcgcagctggcacgacggcgatcgtttaggcggcattgtctttggcgatcgggacttttctctgcgtaaatgccgcgcgccaaacggtacgcttcccgcatttctcgacgatattgtgcagtacaaccacgccgtggcggataattatccgcgggaaacgcctgacccactttcgctggccaccattctgcgccactctctgccgttaattccaaccggctgctgggtcgcgttaatcagcgactttcacgatctggataacgagtgcgatgcgctgctggcagccctgcgccgtcgaggggaagtgagtgcattcgtgatcctcgacgatctgcatttgcgcctgcctgcacacgggcggctggccgcccggtatgaagggcaagaggcggccttttcgctctcgcctgcgctacaggacggcatcaaacaaagcatcacggcgcgactctcagcccaggcgtctcgtctcacgcgacttggcgtgcaggtgaagcagattgtcgtcgccggggatctagtcagacagcttcaaaaagaggtatag

SEQ ID NO: 236733 - DNA, 1005 bp, Klebsiella pneumoniae
atgataaatcgagagaagttattgcagcttgagcaacgcatgaacgaacaggttctcggtcaggaagaactggtgcgcatgttgatagtcgccctgttgtgcgacggacacgtgttgcttgaaggattaccgggcctggcgaaaacgcgcgcggtacgcgaacttgcccgccacgttgagggggattaccgtcgtattcagttcacgcctgatcttctgccctcagatatcaccggcagcgaaatttatcagcaaaacgccacccgtgaagaggatcagttccgcttccgtcccggcccggtgttcggcaatatcatcctcgccgatgaaatcaaccgcgcctcggcccgcgtgcagtccgcgctgctcgaagccatggaagaacgtcacgtcaccgtggcgggcaaaagctggcctttacccggtgtttttatggttctggccacgcaaaacccagtggatcaggaaggtacctggcctctgccggaagcccagctggaccgttttttgatgaaggtactggtgcactatccgtcaaaagacaatgaacagaaagtgatgcaactggtgcgcgccgagcagcagaaaaagtatcaacaactgacgagtaccgcatcagcacagccagaacagaccgatacgctcatgctgagtcagcaggaaatcgctgaatgctggcaggcgatttccgctattcacgtctccccgaccgtcgaaaattatatcgtcaacctggtagacttaagtcgtcatccacagtcggtgagcgatacgctggccggttatctgacgtttggcatcagtcctcgcggcacgctggccctggagcgctgcgggcgagcgcaggcctggctggaaggccgggacgcggtgctgcccgaagacattaaaaagatcgccccagcggtattacgtcatcgtctgatgctcagctaccaggccagcgcggataactgcacaccggacgatgccgtgcggatgctgcttgatgccgtggtggcataa

SEQ ID NO: 236734 - DNA, 1296 bp, Klebsiella pneumoniae
atgaagtacagcaccacactacccgttaaggcgcttccgtcggcggaaaaatatgacggcaaagggccagaatacaagcgccgctttcatgtcatggctaaaccaaccggctcaacctgcaacctcgattgttcctactgtttttacctgcacaaagaagagcttctgcatcaggacagacataccggaatgagtgacgaggtgctggagaatttcattcgccagtatattgacggtcaggacggtgaccaggtggtattttcctggcaaggcggcgaacccacgctgatggggttagcgtttttccagaaggttgtgaaatttcagaagcagtaccagaagcccggacagcgtgtcgagaatgatttacaaaccaatggcgtgttgttaaacgataaatgggctgaatttctaaaagaacatcaatttctggtgggactctcgattgatggcccacgagaactgcatgaccgctatcgcgtgacccgtagcggcaaaccgacatttgacaaagtgatggcgggcgttgaggccctgaagcgtcacggcgtcccatttaacgcgctggtaacggtaaaccggaccaacgcccgctttccgctggaagtgtaccgcttcgtcacccgcgaactgggtgcgacctatgtacagtttaatccctgtgtcgaacctgttgatttcaaacaaaccgcgccgcaattctggcaggatgacgccatcccgctcaccggtagccgccgcgcgcgtcctggcgacctcgactccattgttaccgactggtcggttgacccggaagactggggcacgtttctgattgccgtttttgaagagtgggtgaataacgacctgggccgcgtgcaggtcaatctgtttgaaacggcggtcgcccagacaatgggtatgccggcgcaaatttgcacccactcagaattctgcggaaaagggctggcgattgagaaaaacggcgatatttattcctgtgatcactatgtctacccggaatatcagatcggcaacattgagcatgctcagctttcgcatctggctttctccgaacggcagaaagcgtttggcatgggcaagcgcgacacgctgcccaactactgtaaagcctgcccttatctgaagctgtgctggggcgaatgcccgaaaaaccgcctggtgcgcgcaccggacggcgagttgggactgaattatctttgcccgggcattaaggcctttttcaactatgccgagccgatcctggtgggcatcgccactttaattaaacgtgattttgcagggctacgccgatga

SEQ ID NO: 236735 - DNA, 1590 bp, Klebsiella pneumoniae
atgcaaaaaagtgtcccctttagaaggaccgtgattgccagcatgctgacgttagcggctggcgtggtttccactgtccatgcagcacccgcaacgaccgccgcagagaatgccccgaaacaagatcccgctaaaccaaatattgtggtaatttttggcgatgatatcggctactggaacctgagtacctataaccagggcatgatgggatataaaaccccaaatatcgacagtattgctgccgaaggcgccaagttcacctcttattacgctgagcaaagctctaccgcaggacgctcatcgtttattaccggccagatgcctttccgcaccgggatgagtaaagtcggaatgccgggcgcacctcagggtctgcaaaaagaagatccaaccattgcgaacatccttaagcagctgggctacgctaccggtcagtttggtaaaaaccacctgggcgatcgcgatgaattcctgccgaccgctcacggctttgatgaattcctgggtaacctttaccacctgaatgccgaagaagagccagaaaactcagactatccgaaagatcctgccttccgtaaggaatttggtccgcgcggcgtaattaagagtaccgcagacggcaaaattgaagatacgggtccattaacggtgaagcgtatgggcaccgtggatgaagagaccctggctgcgaataatgacttcatggagcgccaggttaaggccaacaaaccgttctttacctggttcaataccaccaggatgcacaataaaacccacctgaaagatgccagcattggtgcaacgggccttgggacctatgccgatggcatggtggaacacgataaaatgattggcgaagtgctgaagaaaattaaagatctcggcattgaagacaatacgatcgtcatttataccactgacaacggccccatgaccgcgacctggccagatgccggtatcacaccgttccgtggcgagaagaatacgggctgggaaggcggtttccgcgtccctgcgatgatcaaatggccaggtcatattaaaccaggcacgctaattaatgatatttttgccagctacgactggttccctaccctcattgccgcagcgggtaaccctaatatcaaacaagagcttttaaaaggttataaaacgccatctattacttataaagttcatctcgacggctataaccagctcgacttcctgcagggcaaaggcgaggatcagcgtaaagaattcttctactggagcgatgacggcgatctgctggctatgcgctacggacgctggaaagcgcatttcatgattcaggagcataccggtcttgatttgtggcgttatccgttcaccaaactgcgtgcgccaatgatctttgatctcgaagttgacccgctggagaaaggcagcgacggtatgggatacaactcctggttctacgatcgtatgttcctgatgggcggcgcgcagaagtacgccaaagaaatgttggccacctttaaggagttcccgccacgtcagaagccaggttcattcacgatctctgatgcttcggcaatgctggaacaaggctctaatatcaataaatga

SEQ ID NO: 236736 - DNA, 153 bp, Klebsiella pneumoniae
atgaacaacgccatatctggtccgtcgggaagtttttggacacgtggtgcatggtcggcatcagagtaccgtgagtggaaacagcgcgagtcatattcaaacgtgttggagccggtggaggacaagatggagcctatgaatttcatggggtag

SEQ ID NO: 236737 - DNA, 1434 bp, Klebsiella pneumoniae
atggcgctgccgattatcgttgccgtgctgttactcttcgtcccggtcccggacggcctgccgccgtacgcctggcactacttcgctatcttcgttggggtgatcgtcgggttgatttttgaaccactgcctggcgccgttatcggcatcaccggcgtggtggtcatcgccctgtgcagtcagtggctgctgttcagtccggaacagatggccgcacctggcttcaaaatggccggcgcctcctttaagtgggcggtgagcggcttcggcaactccaccgtgtggcttatcttcggcgcctttatgttcgccgccggctacgataaaacccagttcggccgccgcctggcgctgattctggtgaaatatctcggccgtcgcagcctgacgctgggctacgccatcaccttcgcggatctgctgctggcgccgtttacgccgtcgaataccgcgcgcagcgggggcaccatctacccgattatcgccaacctgccgccgctgtacggttcaaaaccgaacgatccgagcgcgcgtaaaatcggttcctatctgatgtgggtagcgataactgccgcctgtatcaccagctcgatgttcctgtcggcactggcgccgaacctgctggcgctggcgctggtaaaaagcatcgtcggtatcaacatctcctggggcacctggttcatcgccttcctgccgcttggcgtactgctgatcctgaccatgccgctgctggcctactggttctacccgccggaagtgaaagtcaataacgaagtgccgctgtgggccgctcgtgaattggaaaaactgggcaaactgtcgcgcaatgagatcctgctgctggtgttcgtctgcttcgcgctgatgatgtggatcttcgccgccgactggattgaaccggctctggccgccctgctggttatcgtgctgatgctgtggaccggcgtgctctcctggagcgatatcaccaacaacaaagcggcgtggaacacctttgtctggttcgccaccctggtggcgctggccgacggcctctcctctaccggctttatcgcctggctgggtaaagagggcggcgcgctgatgagcggtatctccccggggatggcgaccatcgtcctgctgctggcgttctacctgctgcactatctgtttgccagcaccaccgcgcacactaccgcgctgctgccggccatgctgaccatcgccgccaccattccggggatgaatatggaagtgttcgttctgctgatggtgacctcgctgggcgtgatggggatcatcaccccgtacggtaccggcccaagcccgatctactacggcagcggctatctgccgaccaaagattactggcgcctcggcaccatctttggcgccatcttcctggccgccctgctgctgattggctatccgtggatgtccatgatgttctga

SEQ ID NO: 236738 - DNA, 141 bp, Klebsiella pneumoniae
atgaacgttgaccaatcacttgatattatctacgaaaaatatctcaacaatgaaatatctgaagacgaactgttaaaacacgttaaatcaatcgaaacaattgaacggatgttcaataaggtcaaaaatgccaacgtatag

SEQ ID NO: 236739 - DNA, 249 bp, Klebsiella pneumoniae
atgattcataatgatggtatagccgataaatacaatgaaacactagataaaaaaacgaagaaaacagataaagagaaacggttattaaaatccatacgaagagcgcagggaattgaagttaatgactatgatactgttataatgcgcaatgattttcttccgtatgtcattagtgaatttgaacgttatatcaaagcaatagaagaaatcgttatcgattacgaaaataatactgcaacactgccataa

SEQ ID NO: 236740 - DNA, 240 bp, Klebsiella pneumoniae
gtggctcgaaaaaaatatgtctcgatggctgatatggaacgtcgttatggttatacattcaacgcgattaaagcatggcgtgctgaaggtctaccgtactctgaaagtcctaacggagttcctgaagaagagggcactcagcggattatcaaaaataaaattgaaccgctgcgtaacacatcagttaaaaggagatggaccttgaaaaactccgcgaacaaaaagctaaagctgacttag

SEQ ID NO: 236741 - DNA, 651 bp, Klebsiella pneumoniae
atggatgatttgaagagctttataatgcctgatagcaatagatttcaagccgatccattaggatacagcactttagccgcacaacgctttggtatcattggctctatccttgctaatactgatattgatataactaaaccctcgactaccgaagaattaaaaaaccctatcttatggatgtctcaagcagaagcattaagtcaagcagcccttttagttcttaaagcgaatcctagtttcgacagtatgcctgaaccaattcgtggtatttgtgatgggcaatttcgagcgactggattaatgctaattggctatgctctcgaaatagcgttaaaatcgatgattatcattgaaaaaggaattaatgcatacatcattgaggaaagaaattatcagcatcatagactgcatgatctagcaaactttattcctgatcttactacaaaagacagagtcatccttaaactcttaactcactttgtctgctgggctggtcgttatccagatcccggcacaagaaaagaagatcaagctgaagagattttagtattatccgaaaaacataagatttgcttgcctgatgtaatggggcttgctaaaaagataatgtcttacgcccaagttgttattaactcagttgataatgactaa

SEQ ID NO: 236742 - DNA, 762 bp, Klebsiella pneumoniae
ttgtcattcccggaaaaaagccgtccccagcggctggtaaacaccccggcctgggacggccgggcctcttacctctcctttttctcgatgaatctgcgggcgctaaacaccgttttgcgcggggagcagatcaaatttcacgtcacgccaaaagagcgacagacgggccgttttctctatctcgtcaagccgcaaattgccatcgtcatactcaccctgacggggctgctatggggcggcatccaggtggcgcgcgggcaggttgacgatccatcgaacagcgccgccgtgtcgctcaaagcggcgatggggatgtgggtgctgtggaactcgccctataccgatcgtctgctggacgccattgaaaacgcgaacgaagcgggtaaaggctattacgaggggctgtatgagaacggcgacgggccaatcaatgaatttaccgccaacaataacggcatcatgctggaagcgctgttgtttaaaaaagagggcaaactgctgcagttttccagcgacaatccgaaaaaccgcaatttcgccccgtcgctgtgggacaagaagctggtggatctctttgaaccgaataacggcccgcgcaatcgcccgttcctgagcaacaccccggccgtcaaaacatggtgcgagcagactgggaccacgcagcgcacccaacccgcctgccaggcctgccagtgcgccgcctgcaaggctgacgagcccgttaaacttccgccggtgaccgcgcaatgcttaaaaccctag

SEQ ID NO: 236743 - DNA, 189 bp, Klebsiella pneumoniae
atgccggaatgctcgatttcaatagaggtaaaaagccactggtggctgccgttctacctcaagactatggctttattctgcctgatgttccagctcgaacctgattacgaaaagacagccgcactcatcacaaagcatggcatcagctcgaaagtgaaggcggacccagtgcgaaagaatacggagtaa

SEQ ID NO: 236744 - DNA, 549 bp, Klebsiella pneumoniae
atgaacgcagattatatttcttatgaatcactagttgccgctagggatgcagccaaatgggcgtattggtctatgatcggaacttgggttgctggactggcaacctttcttgcggttttagtatctctgtaccttgcaaatagaagatcacggccagtacttagtatctcgatagaatggtgttttattaatcatggttaccagacaatttcaggagtagccatcactgtagcgaatgtggccgaaactaatttcatcatcacttcagtttcatgggagatgggaaataataagaaattggcgcaggtttttgatcatccactatcagcgaaaatgcccgcgaagttagccgctggtgaatcagccatgtttttcatagaaaatgatacatctaacaggtggcttaatgttttattgtcaaacatccagcaaactaatggaaagatacacaaactcactgcctgcattgggcttgcgtctggaatcaaaaggcgtcagcgagcaaaaattatcattgccgcactagaagagattcaaaggaaaaagtga

SEQ ID NO: 236745 - DNA, 273 bp, Klebsiella pneumoniae
atgttaaagctcctgtataaggggcagttgtatgatgtcatgcaacgaagcaaccaaactatggaaagtccgggtaatggttttggagtgaatgtgacgtttcgcaacgatatagacggctactttttcctgttgcttagtatgtggccagtgctaatggttttattcctggggttgtcccctgcattttacggtgtgttaatgcctaaaacggcaatcgcttgtctggtgatcgcagccgctgtgagtatcgttgggtggttctatggatag

SEQ ID NO: 236746 - DNA, 990 bp, Klebsiella pneumoniae
atgactaacaaaattgataacgatgcagataaagagccctcaggaaaagcaaaaggcggtaaggcaaaagctgcaaaaatgactccagaagaacgaaaagaagctgccaaaaaaatggcggcggctaaaaaagaattagcctcgctaccaatagctgaatatggttcatctgatgcccccctacgcattggtgatgctgagatacaatgttatgtacttagcgatggctctcgtgttctttctcaaaggggagtattttcaggcttgggtatgtctgcaggtgctgctgaccgactacttaattttgtaggcggagacaggataaaaccatttataaacaatgagatactgccgattatcgaaaaccccataaagtttagacacaaaaccggtggaggagtcgcttttggttatcctgcgaccattttggcggacatatgcgatgcaatactcgcagccaggaaggaagggaagcttcaaaaacaacaggagcatttagctgagcgtgccgaactactcgtccgtggctttgccagagttggtatagtagccttaatcgatgaagctacgggatatcagaaagcacgtgagcgagatgctctcgcaaaaatacttgaagcttttgttgctaaagaattacaaccatgggtacacaccttccaacctgattactatgaacagttgtgtcgcctcagaggtgtcccttatccgcctcaaaagaaaaactttccatcttatttcggtacattaaccaataaaatagtttatgaccgccttgcgccaggattacgagatgaacttaaaagtgaagcagccaagagtaaaaggaagggacgtcttcaccaacatctaacccaagaaattggccatcctaagcttagagagcatctatcttccgtcgttacaattatgaaattgagcaaggattacgaacattttgaggacaacttagaaatggttcaccctgagctacccaaaactgatacctaa

SEQ ID NO: 236747 - DNA, 279 bp, Klebsiella pneumoniae
atggctaataatttgtttgttacctatgatcttattaaaaccaaagattatcccgccgtgcatgaagctatcaaagcattaggtagttgggctaaagttacagagtctaactggtatgtaaattcgatttattctgcacaagacgctgctaaaaaagttagagccgctatggatagtgacgataaattaatagttgttgatgccacaaataactccgccagttggtataacctgccgaaagctgtagacgatcatattcacgatcaatggaataaatga

SEQ ID NO: 236748 - DNA, 1800 bp, Klebsiella pneumoniae
atggcaactaaggtagaagccgcaacactggttaacaggattgtttataaatctgatttaaatagtttgaaaaaagtcagaaacgatatgaagaagcttcagcaggagttttctaaatcaaacaaccaggtagcaaaggtcaaacagcaggcagataaacaaattcatcaacagcaattaaaacaacagcgtgaaattgataaacaacagaaacaagcagcagatgctaaagctaaacagatagaagcccgtaagctggcagcagcccatgcacgagctttgaagttacaacagcagcaggcaaagaaggtggcaactcagcaggaaaatgctgacctggcaagaaaacgcgccgcattccagcttggacgcctccagaatatgagcggagccgatcgctacgttgcgatcaaacaggctaacgccctcgtggatgcatatgccaggggcaataccagcctcaaagcgatgaatcaagccctgagtcaacatcttgttacccaacgtagtattgccagaaataattcaaaacaagctaaacaatcaggcaaaaaatcaaaggttggtcggtctggcagttctggttggctatctcaaaacgttaacgcaattgtcccacagcaattattatcaggggcagcaggtgtatatctgggacaacaaatgtacgctatatcatcacaggcaatttctgattcactcgccagaaatcagggacggaaaatgattagttctatggggctaaatcccctggaagctgatgcagccatccaggaaactcttaaacgaactggttttaatatgagctatgagaaaatctctgacatctctaaagacgtacaggataaaattggtcagttaagtcttggagagtggaaaactgataagaaaacagggcaatcaacatattcaggcggtggtgaaatgtcggactggctgcaaataatggttaatcgtggggggtatacccaacagggagcattaaacactctccaaaatgtgaaaggtccagtggaactagcaaccctcttaaaatcattgcagaaaaacgcgaaattaaccgactctgaattcaccgcgctggctgagaccataaatgatttttcctatctggcaaaatctgtagattcaaatggtcagaatgtcatcgacacaatgaatatgatggttaacagtggattagcactgaacagtgctcaacagaaaaccattgatggattaaatcaaatggggattgtctggggagctattaaagattcaggggctgatcattttacactgggatttgctgaggcgatgaaacaagccaatttaaattctgacaatctggcaaaatcattctctgggttaaatcctcttatggagaatttaggccaatctgctggcgaactctcaagagtatttctggattttgcaaacaaaattggtttaaacgttgggaagggtcaaacgttgccggatgctgtttataataccgtggttgatagcagtgcgaatagtgccgctgactggatacaaaatatgatcggatttgatcctcgtagtgtagggcggttttttggttctgattcctcgtatgcaaatcaggtacaaagtggaacgttaatgaatcagatgatgcctactacgccatctatgcaatatcaacccgtcattccggatttaaaagctgattttaatcttaccgtaaatccatctcctgaatttggaatgatggtcgaggctgtagcagataagcgcattgagtgggcatttgatgatcagaacttccagattaaccaaagcatccttggtcagtga

SEQ ID NO: 236749 - DNA, 273 bp, Klebsiella pneumoniae
atgtcgctctggcttacccacccgctgttcctcccttcactgattgtcggcgtcaccattgtgctctgggcgacgtcgctgctgccggagtttatcaccgcgctgctgtttttcgctgcggcgatgatggcgaaaatcgccccgccggaggtgatctttggcggctttgcctcctcggccttctggctggtgttcagcggttttgtgctcggcatcgcgatccgtaaaccgggctggcggaccgggcggcgcaggcgttgtcggcgcggctaa

SEQ ID NO: 236750 - DNA, 1047 bp, Klebsiella pneumoniae
atggcgcagctccggcctcagttgccgtacatgaatttttaccgcttctgccagttgctggaggagatccagccgaaggcgccgatcatcggcagcggctggctattaggtgatgaacccatacgctttcgccctcatccggggatgggtttcccggccggcgaaatccgtggaatggacgatcccgaaccgtcccggctgccgacggtgcgcgttgcttttatgggactctacggcgtggaatccccgctgccgacccactatagcgatgacattgcgcaacggcgggaaggcgtcgaggcgaccgaggattttctcgatatctttaaccatcggctgatcgcccagtattaccgtatctggcgcaaatattcctacccggcaacctttcgggcgggtggcacggacaacacctcgcagtatctgctgggcctggcggggctgggtataccgggatgtgccgccgttgccgcagcgccgctgtcgcgatttctggcgttgctgccggtaatgatgctgccggggagatccggggaaggcatggaggcgctggtggcgctactggctccggggacccgggcgacggtgtaccaccacgatccctgccggatccccttgtcgcagccgttagcgatgagcgtccgccagccggttagcctgcaacatcggccagtgatgggaactcacgctacggatgtgaacggtcaggtgttgctgcagctggcgacggaaaagcctgatgaggtccgcggctggctgcccggcggcgaactgttcagcgacctgatggcgctcctgcacgtctggctcggatctcatctcgacgtgcggctgcagctttgcgtcgcccgccatttactgccgaatgcgcaactttgctgccagcaggcgcatgccgtccagctcgggagaacggctgtgctgcaaccgctggatgcgcagaagcaggctgacgacaggatcacgatttatctggggcgctatcagcgcgtccgggaaaacctccaccgcagggagagcgatgaagatggcgattaccgcagttaa

SEQ ID NO: 236751 - DNA, 537 bp, Klebsiella pneumoniae
atggcgattaccgcagttaaaccctccgccacgttactggcattcctcatggtcaccctcttaaccggctgcggcctgacgcagaccgtaaaagacggcgccgtttccgtgacccagtctattttttacccccaggtgaaaacgcttcatctggatcttcgcgcccgggaaggcgtgaataacaacgccaaaggcgcctccctggcgacggtggtgcgtatttaccagctgaaggaccggcaggcgtttgacaatactgactacccgtcgctgtttgccggcgatggccaggcgctgcaggcggaccgggtggcggaaaaagatattcgcctgcgtccgggcgaatcggtgaccgttgatatgcccatggaaaacagcgcgcagtttgtggcggtggcggccatgtttatcgatccagacctgacgctaaatagctggcggctggtactcacccgggacgatctcgacccggcgagaccgcgcattatcgaagccagccaaaatcaactgacgctgcacccgcttaaggagaagtga

SEQ ID NO: 236752 - DNA, 219 bp, Klebsiella pneumoniae
atgacgccagaagaaaagaaaaatgcgctcagaagcatcgcgcgcagggctaacgatgaggttaaggcaaaacggcggtcatctcccgctttaagttgcgatgagatatcacgaccgatcctcaatggatgcatgccgctgataaggcagcttgggttaacgccaagccatctctatgtggaaatcggcattttgaacggaaagataaaggagcgctga

SEQ ID NO: 236753 - DNA, 1437 bp, Klebsiella pneumoniae
atggcaatttctaaagaaatgagaaaactcattaacaaatggaagaccggaaactcttggcccaaacgtttagaatggctcgagattcaggggatcaggggatggactggccagagggtagatttgcaatttccaatagttgctcttgttggtgagaatggctctggcaaaagcacagtattacaatgtgcagcctctgtttataaagacataaaaaaaagatatgcttcatattatttccctgacacccctttcgagaaaatcgaaaatgcatacataagattttcatataaagaaggaacaaattcttatgttaaatcaattagaaagcaaacaacaagatggaggggtaacccagaaagacctgatcgcagggtggaatacgtagatttaagccgccttcagccagttaatgcacgtttaggttattctaaactcttaaaaagcggagttacagaaggggctcatgatgcgtttgaccagcaaaaattggacagactaaataatataatgggtaaatcctatatatcagcaggcctttcacttacaaactctgactctaaaagaccgatcactgtagtatcaaatggagaagctaggtattcagggtttcaccaaggagcaggtgagattactgccgcagaattgttagcggcagattaccctaaatatggaattattttaattgacgaaatagagacatctcttcacccgagggctcaacgacgcctcatgcgtgacttggcgcatttggctagggagcgtgagttacaaattttaataaccacccactctccatatatcctttcagaattaccacctgaggctaggatatatttaatgaatggagttgaaggccgaactgtagtaactggagttagccctgactttgcaatgacaaaaatggatgaagaaaatcatcctgaatgtgatgtgtatgtagaagatgtcgtcgctgcaacattagtttcagaaatcattgcttcatcaagcgaaagggagttactttcccgggtgaaaataataccttttggcagtgcttctgttggaatggctcttggtcaaatggctgcaaataaaaggttcccgcgttcttctgtcgtttttttagatggggatcaatcaccagcactaggttgtaaaattcttccaggagatgatgctccagagatagttgtttttgaagcgcttcagaatattggttggcctggtatatcagataaaatcagtagaaagccagctgagtctattgatgcccttaataatgcaatgacaaattctgatcatcatgattggattgattatgcttcaaatacacttaatattggtggagagattctttggcatgcattatgtacttcatgggctttaaactgtctcaatgaacagcagagagacattgtagtgcaggcaatcattgacgcaattgaagaatag

SEQ ID NO: 236754 - DNA, 462 bp, Klebsiella pneumoniae
atgagcaggttaaccgccattatcagcgccgttgtgatctgcctgatagtcagcctcggctggctggccagtcattaccacgacaacgccaccgagttcaaaaggcagcgtgacgagaaggttaaagagctaaaccttgcgaacgagaccatcaccgacatgacaactcggcagcgagatgttgctgcactgaatgccaaatacaccggagaactggctaatgccaaagctactatcgatcagcttgagcgtgatgttgctgatggccgtaagcggctgcggctcaacgccacctgcgcaaagagtgacatcaccacccccggcagcgtggtcgatgctaccagcccccgacttaatgagtccgctgaacgggattatttcaccctcagagagcggatcagcaccatcgccggacaggtgaactacctgcagcagtacatcagggagcagtgtctgagatga

SEQ ID NO: 236755 - DNA, 798 bp, Klebsiella pneumoniae
atgtcagtaagtcaatttatctcaaaatctacagtcagaattgagtgtgatctagttgatggaggtatttcggttggtacagggttttggtttggttttgcaactactgaagaatccataatcccattaatcgtaactaataaacatgtgattgagaattccacctccattcgtattagatttaacgtatcatcatcagctgaccctcaattgaaattttatgatggaacgataaaccgacctagtgattttatacaacaccctgatcgagatgtggatatttgcgcgtttcctgttgagggttttttaagagacctaaggtcgagagggatagaagtcgacaactttttcattactgacgatgattttctaaatcaacagtatgtgacccctgttgaagatgtctttatgaccggatatccgaatggcctgtgggatatggtcaataacaggccaattaccagaaaaggtattacggcatcttctttgatggaagattggcagggaaaacccgagtttatgattgatatggcttgttatggaggttccagcggctcacctgtattcataatgaatgagggggggtatacaacagccaatgagtgggtgattggcgaccgttttatttttttaggtcttttatatgcagggccaactatcaatacaactggaaaaattagtgttgaaaatgttcctacaggaacaactgcagtggttaccacaaaattgatgatgaatttaggcgtagtaatcaaggcagaacaactcaatggtttaaggccattactgaacatttag

SEQ ID NO: 236756 - DNA, 2727 bp, Klebsiella pneumoniae
atggcagaagtaccgttaccaactcccacagataacgctgttccgagcacggatatccgggatgcagtttatgctggctccatgctggataaggttgtcaccagtacagagctgacatacaccgatcgccttggcggtgagcactacaccgtagacggaatgaaggcggaaggggataaagttgtcgaagagaccaggcaaaacctgattcctcttagtaaacagtatgttgatttagcatcggcgcaggctgatattgctaatatacctgttaattcgttcacatatgtgcgggatcagtctggtgatgctctggcgttagagtaccaaaacgtagaggggactttaacggctactggtcgtaaaatgccatcacagcaatctgtagatgatgtttatgctttcatagctgataacgatatgttgtctcatggtagaaatatttataactatcgcacggcgcttgatggaaagtatcttaatgagtctggaatagtaacagacaatcctgcttatattctttctgattacatgccggtagccgcaaattcaagttacgctacaaattacaatttgcgttttgttcattgttttgatgccaataaaaatttattaagctaccaggagtttcaaaacgcaattaccacaccgattaattgcgcttatatccgtatatctatggctatagcttcaaagcaactgttacaaattgaagccgggacattgaaaacgccatttaaagactacagagagaacatcgttacaaatcttgacgatggtactcctgtttctgccaggaatgttatgggtgtgacccccgggaaaaacctattcaacaaggcaacagcaacgcaaggatacgccattaatgaaaacggagagctaatcgttgcctcaacttactttgtatcggactacattaaagttgcatcaggtacaacgctgcgaccgtcacagcccggcagatatattaacttttatgatgccaataaaacatggctgtcgtctctccagaatcaaaatggggcgttcgtagtgccttcctctgcggcatatcttcgcatttcagtgctgcttgcgagaattgattactttcagattgaggtaggaagtaagatgacggcctacgagccttactcactcacggcagcaacttcgcttgacggtgatgggttaaagtatccggttaatgagccagatatctatagtattggcctgttcaatgctggaaagaatatttataacccctatacactgacagctggttatatcgatgagaatggttttgttgttccaggtggaacgacatataaattttctgactatcttccagttaaagcatcaacggggtatgtaggaaataaaagcatgcgcttcataaacatttatgatgcggataaagcatttatttccacttttaccagtacaaatacattcacaaccccatcgaatgccgcatatgtacgagtcacgcttgctttagcaaatattactggatttcagcttgaagaaggttcatctgtatccagttatgaagcttttagctacacgatgaaaagcacgctgccgcatggtgaacccgttaatattgatacttctgtggatgtggccactccagattatttcggactggagagattgcgggaaactcatcaacgcctaaataaattacgcttcggagtgacaggcctcagtgctcgtctcactatagcgtctggcattgatagctatagccgagacacttcaatctacttacttagatcagcgcgtcagctctggtcaatttaccagagtggagcagccaacgtttccagcggccctataggatggggttacttgtcatttggaggtgcagacacctcgctgaaaaatggtagcatcatcaacccaaatgcagttacagcttctggttttttgggcacctattatggtggcgattccccagatatatcggtgatggaaagctcaaccgtgggagcgaccctctcatgggctgaggatttcaggctggcgcgatctcatacgctttttgcggaaggaggaagcggggtgatcagttattttgcgagcggaatgtcagcgcctactcagatcgatctctcgttactgcctgctggaatccaatttgtaccgcttaatgacataccgacgacaagcaatggtacttttaccattaccgtagtgtctggaaatgtgaagctatatggaatgaatattattgatccagtcagtagtggtattgtatggcacaaactgggggcctctggttcgtcaactgcaaactggattgcacgtgacgcaacgcgctggaagcagtcttttgctgcactgggtgctgacctgttcacaatcatgacaggtacgaatgaccagggagcagcaatgtctatggctactttccggacaaatctgctgcagctgattgatcgggcacgttctgcacgccccactattgatattcttctcatatgcccagccgagaatcagaggacgacaaatgtttatccaatgaaagaatatgctcgtattatgtatgaaatagctcgagatgacagggatgtagctttccttaatcttcaggaatcctttggtgtgatgcctgctgattatgcggcaggaagcttacgcccctggatgaacatagatggcatccatcctgacgctgactcaggcggctatgcaattgtagccgcattgatgagggctatggggctaccagccgtttaa

SEQ ID NO: 236757 - DNA, 1002 bp, Klebsiella pneumoniae
atgataaataatattcagatacttagagcgattgctgtattaatggtgatagggtgtcattcatcaggacttgtgtataaatatggttttgatttcaatgggttcataaaggttggaagatggggggctttcggtgtagatatattttttgttatctctggttatatcatggcaatgatagattcaacgaaacataaaactccacttgaattcattaaggacagagcggcccgaataatacctacgtactggatatgtacactgcttttaattggaatgcaaacctttctcccttggttattcaacggctcaatacaaccacttgaacaaaatatagcgtcattgttatttataagtaatttttttggttatacctacccaactatttatgttggatggagtttggagtttgaggccttcttctatgtggtttttgcattgtgcctctttattaaaaactcattatttaaaactattttgctcatggttgtgatatttctttcgtccttgctcggaataattaaacccattgccattgagttttgttatggagttttgatttatcacatcatatcaagatatagactcggtagcaaacttagttctaaatattttattctggcgatactggcatcattatatataatgtccatatcgttagtcgtccctgttgatatcatacctacctggagaagacctctgattgtaggagttgtttctttttttcttgttttgtcatctgttgtatgtcgtgatttcaagaagggaatcttaacatatataggcgatgcatcttattcaatgtatctaatacaggtattttctttgccattgattataaaaatatcttcaaagtttctacctaatgtagacgggttgttgatattttttctgtgcgctctttttacggttgcgtgcggtattgttttttatgaggttgtggaaaaaaatattatcaacatcataagaaagaagaagcttagcttctttaaattaatataa

SEQ ID NO: 236758 - DNA, 291 bp, Klebsiella pneumoniae
atgcgccatcaacagcctatctacgaagctaccggcataagtcagtatgcgatgttcgtcaatactcagcgaggagtcgccgtagttgagcgctcctcagtgcctttagctacagccgttttgctcatctcatattgtggggtgcagcaatttgccagatttttgggaggatctctcattactgaagatggtgatgcgatagagggtgatgcactctctgatgtcgagctgataggtgtggtaacgcacatcatcagtaagcctggctttgatgattgcccggtgatgtga

SEQ ID NO: 236759 - DNA, 393 bp, Klebsiella pneumoniae
atgaaaaagtcgatagttcctgaagagtttcaacattactttaatgactggcacttctcccccatcatcgaatcagatggcacagtgtacctttcaggcgttaccgccgcgcgtaaagacaaaccgattagtcagcatcctgaagaacaatttcatgatgctttttataagctgggggtttatttagaagctgccggattaacttatgaaaacatacttgaaatgacgacttttcatattgacctaaaaaaacatatagaccttttttctaaggtaaaagataggtatataaaagcgccatatccggcatggaccgccatcggtgtatcagagttcattccagaaaatgcccttgtggaaatgcggattgtggcaaaaatggaagctctgtaa

SEQ ID NO: 236760 - DNA, 1482 bp, Klebsiella pneumoniae
atgtcgacacctaccatcatgcaagccgagccgcgtcgctgggcaatgtttgtcatcctgctggtcggcgcgtttttgccgccgctcgatttttttatagtcaatgttgtgctgcctgccattcagggtgagctgggtgcctcatcctccgctgaacaactggtcatttcatcctatgctgccgtgtacgcggtcacattaattaccggcggccgcctgggtgatatatatggtcgtggaaagatgttctttcttgggctggtcggttttgctgccgcatcgctgctgtgcggtttagcctggtcaccatgggtactgattaccggacgggtgttacagggagccacggccgcgattatggcaccccaggcgctggcttccgtacaggctattttcccggaggcggaaaaaccgctagcactgagtatctatggcgcagtatttggtctggcgtcggttatcgggcaggtgttgggcggcattctcatttcagtgaacctgtttcacctgggatggcgagctatttttctcgttaacctgccggtggcgctgctggtcattctctgtggcctgccgctggtaaaagagacacgggcgcaatctgctcagaaactcgacccggtcggtatgctgctggcaaccgtcatgctgagcacgctgattgtgccactgattgaaggccgtgaggcgggatggccctggtggacatggctgtcatttttggccttcccgttactggtctcattgttatggcgttatgaacgtcgccttagccagcatggcggttctccgctgcttaatccgacggtgttacgtgccccaggcctgggccagggactggcgatcgttttgctgttttattccatcggcgccttttttctgttgttttctgtctatctccaggacgcgctacatttaaacgccctgaacgcgggcctgatttttctgccttttggcgtcggctttcttatcggtccgttgctgacccctttcctgagacgttttgccggaaattatctgagtgcaatagggatgggatgcgagacttccgggctagcaggccttgcagggttgattgccaacacaatgacgggcacgtctccgcccatgctgcctctcgcgctactgctctttgtcaccggacttggccagggactggcgatgcctacgctggtgcggatggtgacaggccgcgttgcgccagagttttcagggatgattgccggcgtgaccagctcgacgctccagatcagcacggcgctaagcgtcgccatcatcggcggcattttttacagcatgttggaaaacgggagaagtggcgcaaacatcacgcatgcctttatcgtcgccctgctaacgatggcggtatgtctcgccatgggcgccgggctaagtatccggcttatcagacgctccaccggtttattttcaactgcggcccgtcttcctggcagcaaaagcaacgggcaggtggctgattga

SEQ ID NO: 236761 - DNA, 747 bp, Klebsiella pneumoniae
atgaacaaattaaaagacaaagtggccattgtgaccggtggatccagtgggatcggagcaggtattgcccgtcagctggcggctgacggcgcgagggtcatcgtcaactacgcgtcaaacagaagcagtgcagataaggttgttgcagatattgaagctgccggaggacgggccgtggcggtagcggcagatgtcaccaatccatccgaggtcgaggcgctggttaactcagccattggcaacttcgggcgcctcgacattgtagtgaacaacgccggtatctatcagtttgccaggattgaaaatagtacggaagcactctatcgcaggcagtttgacatcaatgttctcggcccgctgctgttggttggcgccgccaccccgcatctgggtaagggcagcagcataatcaacatcagttcgttcgtcactcgcgtcgctatccccgagagcgccatctacagcggcaccaaaggcgcaattgacgccatcaccagtgtactctcacgagaactcggcccacgaggaatccgcgtcaacgcggtcaacccaggacttatcgaaacggaaggtagccatatttcgggcgcaatgaactcggattttcagatatggaatgaaaagcagacgccgcttggacgcatcggccaggtgcaggatgttgctccaattgtcgcatttcttgcatcagacgacgcggggtgggtcaccggcgaggtgattctggcctctggcggcatgcgctga

SEQ ID NO: 236762 - DNA, 870 bp, Klebsiella pneumoniae
atggaatggggcgacgtccgggtgtttcttgctgtcatgcgtaaggggtctttcggagaggcggcccgtagccttggcgtaagccatccgacggtgggtcggcgaataaaggcgcttgaggctgaggcgcagcaggcactgtttcgccggacaaaggaagggctggtgctgacggatgctggtgacagagtgttgaagctggcagaggcggtcgaaaactccgcactggcgatggagcgacgcctggcagggaatcacgaacgtctcgaagggatactgcggatatcttgcgctgagtggtttgctaactatgttctggcgccggttctgagcgagttgacgcgccgccatccagcgattgtaccggagataatcgcgagttaccgtttgcttaatctgtcgcgccgtgatgccgacatcgcgtttcgcatcgtgccctttaccgaaccggatattgtccagcgccgcctgatgaccattccctatgcgctgtatggaacgccggatatggccgggatcgcgcaacacgacccggctgcagtggggcttattctgatgaatacggcgcaatcccatttctctgacgtcgcctggctgctcgacaggttccctcagtcacggcgtgtgtttaccagtaccagccgggccgtacaggcgcagatgtgccagcgggggatggggattgccgtgctgccgcggccgcttggcgatgccatcaccggtttgcaacccatcagcatgccagagccaccgccatccaaaaatatatgggtgggttatcactctgacctccggcatatggaccgcctgcgtgtcatgctggatattgccgatgtgttgcttgcggatcccgggacggccgcaacgtga

SEQ ID NO: 236763 - DNA, 540 bp, Klebsiella pneumoniae
atgaaacaggttgcttactttcatccggctctgcgcgtccttcactggctgatggccgctgcgatcctcagtatgttatttatcggcgtggcgatggtctcgaccgtatcctccttgcacagcctgttggtgtcgatccacaagcctctgggggtgatgatattgctcctggttatcgttcgcttgtgggtgcgattcaccacgcctactccctctttgcccgccaccatccctgcctggcagcgtggcattgcccacctttcgcactgggtactctatctgatgatgttggtccaaccgttaataggttgggccatgctttcagctgcaggatatcccgtcacccttggttacgggatcgtcctgccccccatcctgggagttaataatgactggtatgcggaactacggcctcttcacacctgggtggctctggcattattcgcgacagtgatgcttcacctggcggctgcgttgctacatgctttcgtgctacgtgacggcgtgttcaacagcatgactggcatccgtaaaccgtaa

SEQ ID NO: 236764 - DNA, 1056 bp, Klebsiella pneumoniae
atgaatatcaaagtacaggtaaacaaacagacagtagtgcgtctggcgctggtcggcattattccactgttccttattttattattcctgtgggctggtggatggcttacgcctgaaaggctgacgtcggataagcttgtcacggtattacaacagtcgggtggcgttcatcaaggctatcggcggaatcatgctaaaggcatgtgcgtgctggggagttttatctcaaacgggaatgccagcacgctatcgcgcgccttactattcagcaaaggcgaaaccgcggtaacaggacgcttggctattgcaggaggtaatccggcagctccggattataccgtgcctgtcaggagtatggcgctgtcctttacacaggccaatggtgaacagtggcgaaccgggatgaacgccatgccatttttccccgtcagttccgtcgaaagtttctatgagcttcaaaccgcgacgctgccagacgccaaaaccggcaagccgaatccggaaaaagtaaatgcttttgtcatgagccatccggaaatcaagcctttttttgcctgggcaaagcaatacatcccctcttcaagctgggccagcgatcgctttaacagcctgaatgcttttcgcctgatcgatcagactggcaatgaacatctggtacgctggagtatggtgccgcacaccaggtttgtccccataagcgatatcgataaacagaacaaagattttctgcaacaggatcttcagcaacgtctggaacagggcacgctggagtgggatttagttttcacgctggctcaggcggatgacaaaggtaacgattccaccaaagcctggcccgcagaccggaaaacgattaatgccggaacgttagtcttaaacaaggccatccctcaacagcaaggaccctgtaatgacattaactacgatcccttgatcttgcctgatggcattgccgcgtctgatgacccgatacttaacgcacgctcatcggcttatgccaaatcttacaatctgcgtacgcatgaacaggcacaacaagcaggagagcatttatga

SEQ ID NO: 236765 - DNA, 573 bp, Klebsiella pneumoniae
atgaccgacagtattcatcaggggaatcagcagagctggctcagacagtattatttttcccgcaccatcttctcgattttatgggctgtttccacatttatcgctgcccggcattcttatttttgggtctcatttttgttaattctttatcccgcctgggatgcgatagcgaattacattgatgcgattagaaacggtggattcggccgtaaccggatgcagacggtcaatattatcgtaagcgccgtcacaacgctggcggtgatattggctatcaatagcagcataaatgttgtgattcggatattcggttgctgggcaatattatcaggcctactacagttgggcgcagcggttcagcgctggaaaaactatcgtgcgcaatggagcatgatattaagtggcgcccagtctacgttagcaggtgctttttttctttttcagtcccgaacaatagaaccaccgtctgtagacaacattgttggttatgcggcctttggggctttctatttttgtatttcaaccgtgtcgctaaccgttcgacaaaaaagagaagcacaacaaccaggctga

SEQ ID NO: 236766 - DNA, 585 bp, Klebsiella pneumoniae
atgatcgaacgttcgccgaaagcgcgagaaattatggcaaatacgagacagctgctcaccgtcggagggtataaaagttttagctatgccgatcttgctgagcgcgtgggaattcgtaaagccagtatccatcatcattttcccagcaaagaagatttagttcatgctgttgtacaggagtaccgtgcagaagcccgggcgggcatggaggccatggatcagcaaatacacgatccactgatcaaagtgaaaaggtacgccgatttctggtcagcctgtatcaaggatggtacttcgtcattttgcatctgtgtaatgcttgccgttgagcttccgacattacctgccgatattgccgctgaggtcactggccatttcagcgatctcactgactggctggcatcgttacttagggcgggtgaaacccagggcgttttcaaacttaatgaaacggcggaagtagaagccagagccctgatggctggtatacatggtgccatgctggcagcgcgggcattcaataatccgctggtgtttgatcagattgcctggcctctgataaacaaaatcataaaagtcgcctga

SEQ ID NO: 236767 - DNA, 903 bp, Klebsiella pneumoniae
atgcgccctggcgaaggtaagcggaaaggtgaaaacgtggccgttgcacaatgtcccgcctcgtgcggagaacttatccagggctggatcctcggcagcgagaagctggtctcctgcccggtggactggtacagcaccgtcgaggtcgagaccggcacgccgcgaaacgatgagcggccactgtcgcgggcgatggtcgaccagctgctggcccactggggctacccggcggcgctgagtcagcagatccgcatcaccctgcactcgacgatcccggtcgccaaagggatggccagcagcaccgccgatatcgccgccaccgcggcggctaccgcccatcatctgggccacgcgctggatgagccgacgctggcgcgcctgtgcgtcgcgctggagcccaccgacagcaccctgttccgccagctgacgttgttcgaccataataccgccgccacgcagattgcctgtgacagccagcctcagctcgatctgctggtgctggaaagccccgctacgctgctgaccaccgattaccaccgacttccccggcttgaaaagctgcacgcctactccgcgtctctgcagctagcctgggagaaagttcagctagcctgcgagacggataatccccggcggatgggagaggccgcgacgcttagcgccgtcgccagccagcatctgttaccaaagccggggtttgatacgctgcgggggctggtggaagagtgcgatttatacggtattaacgtggcgcacagcggcagcgtagtcggcctgatgctcgaccgtcaacgtcacgacattgagtatttacagcgacggctggaagagacgcgacttagcgagctctggcccaggcagcacctgctgcgcatggtgcagggcggcgtcgaactgcgctaa

SEQ ID NO: 236768 - DNA, 1080 bp, Klebsiella pneumoniae
atggccttactgaaaagcgcccatggcggcaatatccgcgaggccgccgccctgctgggcattgcccccaacgagctgctggattttagcgccaacatcaatccgctgggaatgccggaaagtttaaagcgcgcaattctcaacaatatggactgcgctgaacgctatcccgacgttgagtatcagcagctgcaccttgcgctggcggaacatcatcatattcctgcgtcgtcgatccttgcaggaaacggcgaaactgaagcgatttttaccctggttcaggggctgaaaccgcgccaggcgatgatcgtcactccgggttttgccgaatatcgccgggcgctgcagtcggtggagtgcgcggtgcgggaatttctgctgcgcgaggaggatggctggcagctcaccggagcgattcttgacgccctgacgccggatctggactgcttatttctctgcacgccgaacaacccaaccggcctactgcccgatcgtcgactgctggcgctgattgctgaacgctgtcagtcgctggacatcgccctgatcctcgatgaggcgtttatcgattttatccccgatgagccgggatttattccgcttctggcccacaatccgcacgtgtgggtgctgcgttcgctcaccaaattttatgccatacctggcctgcgcctggggtatctggtcaatggcgatgcgcgggcggtggcaagaatgcgcgagcgacaaatgccgtggtcgataaatgcttttgccgccctggcgggggagatcattctccaggatagcgcctaccagcagaaaacctggcagtggctggcggaggaagggcagcgcttttatcatcaactgcgccatattcccggcctgacggtctatcccggacaggcaaactatctgtttctgcgctgcgacgttgcagatctggatctgcaatacgcgatgctgcagcagcacatcctgatccgcagctgtgccaattatccagggctcgacgggcgctactttcgcgtcgcgatccgcagccagcaggaaaatacccggctgctgacggccttcaggcgggtatttaacgagtag

SEQ ID NO: 236769 - DNA, 867 bp, Klebsiella pneumoniae
atgtcagagcaaaactaccagccaccaaaggtgtgggaatggaagcaaaacagcggcggcgcgttcgccaacatcaaccgtcccgtgtccggcgcgactcatgaacgcgtcctgccggtgggaacccatccgctccagctatactcacttggcacgcccaacggccagaaggtgacgatcatgctggaggagctgctggcgctgggcgtcagcggcgcggagtacgacgcctggctgatacgcattggcgaaggcgatcagttttccagcggctttgtcgacatcaacccgaactcgaagatcccggcgctgagcgatcactccaccacgccgcccacccgagtattcgaatccggcaacattcttctctatctggcggaaaaatttggcttcttcctgccgaaggatcccgccggccgcactgaaacccttaactggctgttctggctgcagggcgccgcgcccttcctcggcggcggcttcggccacttctataactatgcgccggtgaagatcgagtacgcgatcgatcgctttaccatggaagccaaacgccagctcgacgtgctggacaaacagctcgcccgcggtcgctatgtggccggcgaggagtataccatcgccgatatggcggtctggccatggtatggcaacgtggtgctgggcaatgtttataacgcggcggagttcctcgacgccgggagctacgccaacgtgctgcgctgggcgcaggatgtcggcaaccgccccgccgtcaagcgcggacgtatcgttaaccgcaccaacggcccgctcaatgagcaactgcatgagcgccacgacgcccgcgactttgacacccaaacggaagataagcgccaggcgtag

SEQ ID NO: 236770 - DNA, 1227 bp, Klebsiella pneumoniae
atgctgatgcggacagtgactccgactccgacagcgactcggattccgacagcgactcggattccgacagcgactcggactctgactccgactcggactctgacagcgactcggattcggactctgactccgactcggactctgacagcgactcggattctgacagcgactccgattccgacagtgattcggactctgacagtgactccgattcagacagtgactctgattccgacagcgactcggactctgactccgactcggactctgacagcgattctgactccgacagcgactccgactccgacagcgactcggactctgacagcgactccgactcagacagcgattcggactcggacagtgactcagattctgacagtgattctgactccgacagcgactcggattcggacagtgactcggattctgacagcgattcagattccgacagcgattcggactcggacagcgactcggattcggacagcgactcggattcggacagcgactcggattcggacagcgactcggattcggacagcgactcggattcggacagcgactcggattcggacagcgactcggattcggacagcgactccgactctgacagcgactcggattctgacagcgactcggactcggacagtgactctgattcggacagcgactccgactctgacagcgactccgactctgacagcgactcggattcggacagcgattcggattctgacagtgattctgactccgactcggacagtgactcggactctgacagcgactcggactccgacagcgactccgattccgacagcgactcggactcggacagtgactcggattctgacagcgactctgactccgacagcgactcggattcggattctgactctgacagcgactccgattcggacagcgattcagactctgacagtgactccgactcggatagcgattccgactctgacagcgattccgactctgacagcgactccgattcagacagcgattcggactctgacagtgattcggattctgacagcgactcggactctgacagtgactcggactctgacagcgactcggattctgactccgactccgactccgattccgttgaggcaatacctgatactaatagttctgagattattcagcagtacggcaaccttaatggcactgaaggcaatctctcgcaactggttggtgtctcgctgttga

SEQ ID NO: 236771 - DNA, 1686 bp, Klebsiella pneumoniae
atgaaccctgaaaagaagccactgatttatctgttgaatacctttaaaaccgttgagaaggctcttagcccagtcttcaatgtaagccattggtggatgaatggatgtagcaaatatgaagcagccagccatcgttctttagaaataccctactcttctgaacttccctcaaacttacatgaagcagaaatagtagttattgatacaagtttaagagatgcttttgttaaaggtcattcatctacaaaagtgatttatagacatacgcctagcgttgttgacttgtttcctctggatatgaaaattgctcttgaaaacattttctctactaaaaaacctcaacttttatttattttttgtgaaagctataataacgaagtgtatatccttcaggatgaggcaggacataaccgtcagtgtcaagctaatacttattgctttccaaattattatggcgtttatccttcaagaagagaaggaaacagaatgaaggtggttgaaggagatgaaggggtagagttaaagaaatgtctcgaaaaatacctttcgcagtcaagctataaatttgttttccctatacatcaaggtggaaaatttcaagacctccctttactcgttaatgaagctggagaatgtgtttcttatttaacaataatggattctaaggttgttttcttcttcccagaaatatatgataaggaaggtttgttattagatctttttaataatgttttgccggatgttgggttttgtagtgaaatgttcccaaatcatggaagctttaaatggattaaagatttctcatatatctctttagatgagagaaataaattaatagatattgataatgagataaaaagacacgaagaaaccttgttatctctgaaagaagaatacgaaagagttcattccagagatgaaaatgtaaagctcagggctatgctaaaagaaaccggggatgaccttgtatctgcagtgaagtggtttcttgagtatatcggttttactaatgtggtagatccagataaagatgttgatgtagacgctggagaagtgtttgaggaagatctgaactttgaatataacggtgttcacttcttactggaagtaaaagggattggaggcacttcaacagatgctcagtgtgctcaaatatctaagattgccttacgtaggaagaaagctaatccgggaaatacatacaaagctgtctatatagtcaatcaccgtagatacaaagcgcccaaagaaagagagattatccctttcaatgataaccagattgaagatgctgagatggctcaacgcggcatgacatttacttatgagctgttcaacatctattacatgatagaagcaggtgttatcagtaaagaagcagctcgagatgcctttaagcaagagggacttatcaacttcagacaaagccttcataagcttgagttctatcactgctacaacggggcatttgtctactcttttgtcatacccgagggcagttcgtttactatcactaaagctgacagaattgcaatacaagacaatgaaaatcactggtaccgattgtctattgaaagcttacagatagaccgggttgatcatgaagaagtcagcaatggtaaagttggcattaaggttgataggctagtgcctggagcaagagactactatgtagtaaaggcttaa

SEQ ID NO: 236772 - DNA, 372 bp, Klebsiella pneumoniae
gtgatgtatttaaccgaaaaaaaataccaagaaaggaaagagtttcttcgaggggcttctactaccatgctatggaaaaatatcgaccccgaaagcgttgatggcacctatgagctaacatatgaagaagaaaaagcgctttatatctggtttattaggcgtttgctggaagatggtgagatcaaacttgctcgccatggaaagttcctctcaggaagcatcgacaagcagatcgaagcttttgaaatagcatttcccaaaactgaggatgatatggattgcgatgcatttgaaggattttggtttttgagtgaaaactgcccagcgggtattgtctggattcacgaaaacggttaccaagattggacttag

SEQ ID NO: 236773 - DNA, 840 bp, Klebsiella pneumoniae
gtgaggttatatatcagagagtctctggcggcatatacaggcgccgggcgcgtactcaggcgggaagagcagataagaatcaatcaggctattggatcctgcggattttcaatgctcaatcttggtgcctatctctctggtgcgaatgacgaagaaaaaggtgcaacagtgttcgctgttcagagcaccagaaaactctcacgtactgagtacagcatcacgatcaacgacgaagcgggggccgggtttgcgatagctaacgggataaacagtgcctcactggttatgtctgtgagtgaaaccatgaatgttcgccggtttggtatcactcgcactgtatcgttccggcagctgaaggcggttgcggcagtgctcaaaagcggcggggtcatgacagatttgcaactctcaaccgtgttcggctgtccttttgaaggaaaaatgaacgacggcattgtattgcaacttatcgactacttctgtctgctgggaatagacggcgttacgcttcgcgattcatcgggcgctgcttcgccgacagaaacggctgcgctgtgtcgtcgtctgcggcaggactatccccacctgactattacccttcatctgagcgatgcgaccgggcgagccgcacagaatacctgcgcagctgctggcgagggcgtgacacgttttggtctgaccggcagagaactggcggtatcgggaagtatgaatatgaagcatctgattgaaacgtcgttaaagtatatcgcagaggttgaacattatggttttacaacggagattgatactgaaaagctcgggcaggtgagtgaatatgctttgcttactgaggtttaa

SEQ ID NO: 236774 - DNA, 186 bp, Klebsiella pneumoniae
atgccagaaatagttattaatcttgctaccggacgtgacagaaagcaaaaagaaaaacttatgcaagtagtttttatggcagtaaaagaaagtctggatgtaaaggatgaatacattgtcatttctctgaacgagactcccagggacaacaaatcacgtggtggtaaactttttagcgaaaaatga

SEQ ID NO: 236775 - DNA, 129 bp, Klebsiella pneumoniae
atgattatcactcatgggattttattaatcgcttatctaaaaatggttgggttccaccattatcacttgattgttatgaatatttccaatgtcattcatcagaattgtcagatgaagatattgaattag

SEQ ID NO: 236776 - DNA, 768 bp, Klebsiella pneumoniae
gtggtcgcgcagacgcaccgggatcattttggcgttataggtctggttttgcttcagactgaacacctgcgaggtcccggactttgccgcgatctgatacggcgcggtatggaacagtttatagccggtgccgttgggcagattcgccatcccatacatgccgttgcgcacaatgccccagtacggggatttcggatcgccgacctgcggcaggttcgccggctgctgataacgttccacatgattgccctgcttcatcgaatagagcagatgcggatcctgcaccttgccgttgttcagcagcgtggtaagcgctttcaccatctggatgggagtggcgatccagtatccctgaccgatgccgacggagatggtatccccctgataccagggctttttatgcacccgctgcttccacgcccggctcggcagcaccccggcatactcctcattgagatcgatgccggtagactggccgtagccgaacttgctcagccactcatggatccggtcgatacccatctcgaaggccacctggtagaaaaaggtgtctgcggactcttcaatggctttggtgacgttgagcatgccgtggccggttttcagccagtcgcgatagcggcgttgcgtgcccggcagcgtccacgtcggcgccccgaagaaggtggtattcggcgtgatcacgcccgcggagagcgccgagagcgccatatagggcttcaccgtcgaggccgggggatacagcccctgggtgacacggttgattaa

SEQ ID NO: 236777 - DNA, 840 bp, Klebsiella pneumoniae
atgattaatataaacaagccaacaatcaatgatataaacataattactaactgtgctttagcttgtactgatgctttattagcacaggaattgatgggtgcaattccatatttcacacagatttatcaagactatgatcgtttgatgactgcgagtacgggctatacgatcccgcgttcactggcgcatggaaatctgaacgcagattttatgaagagtctttacaccagacaacttgtaggcaaaacaggccgttgccgcgatgactatgacagaattttggcttcggcgccaagaaaaaaatgtcctatgtgttcggaaagtatagtaacagccttagaccatcacgttcccaaatcaagttattttctttattctattttcccaaaaaaccttgtgcctatctgctccagatgtaacgaagcaaaaaaacacacgatgcctgaccaactgaataaacaatttattcatccttattatgatgacttttcacaagcacaatggtttgaagttagattcacaagcattaaccctattgagttgacttacgtatgtaaaaataaccttcatttaggaaacggtgcagacgagaaacttaaaagccatttcagacgtttgaaactagatgagctttattcttcaaatgcaatagtaagattagaggatatgaaaagtaacttccagccgcttctggaaataaatgattgggattcggtttatgaggaacttattgatcaacaaagaatggccagtcgtcgacctgactcttgggagtatgcattatttagcaagttaattaacgaaagatggtatatagaaggtggattttcaaatatttaa

SEQ ID NO: 236778 - DNA, 1593 bp, Klebsiella pneumoniae
atggaatttagaaaggtaaaaaacataccagataagtcagaaaaaaatacggtctacctggttaaagacggatggaatgactggttttactgggaaactctttttactatgttttatagcaatgactctggtgaattatccaaaattggcaatacaaaaatagcaaaaaaagacatgaaggggtcatcttcactttcagaagatgaaaagggacagcctttctttacacctgacctacctgatacattcctctcattggatgaaaattttttctctctgggtcaaagcgagaacttttatgaaactcttaaccagatccctggaaatacaagagttgaaatactaacaggcatcagggactgcgcatacaatttagagatttttgaaaattacaaatctcaccctgctatgaaggagtctcttttaagggacattagcgaaaggaatgttaaagaatctttgcatgccattgcttatgaagaagaccacaacaagcctttcattttctcgtatcttttcccaaacagagatgttaatgagaaagaaataagactggaatttagcgttaataataaagatataccacagagcaacatccaagctttaattggcagaaatggagtgggtaaaaccaccttattttcaggatttattaaaggtataataaaacttgatactgatattgaaaatcctgtcggttcacttcaagtaaaggtagatgccgagtgggaagacaacagcacttattttaactccctaaacttatgttcatatagcccatttgatagatttggccctatcggacataataggttaccctctggcgttaaatatcagtatataggtttgatgatactagaccagagaggagataaaaaagaacaaaaattaaggccgaaaagttcagatgaactacatgcagaattttgtagtagtatgcaggaatgtttagtaggagtacgaagaaacagatgggaggaatgtctctctattttagagaatgaccctcttttttctgaggcaggtgtttcgaaactcgcgcaatttgaggataaagactatacaaaggactggagagagattgtaaaaacacttttgaataagttgagctcaggtcatcttgttacgctactcagcatcactaaattggttgaggtaacagaagacagatccctgactctcattgacgaaccagaggctcacctgcaccctccgttgatttctgcttacatccgtgccgtgtcacatcttatgagtgaaagaaacggagtagcgattgttgccacacactctccggtagttcttcaggaggttcgctcagactgtgtatggatattaaacaggacaggtcagtatgttagtgccgacaggccgcaaattgagacgtttggggaaaatgtcggaactctgacacgtgaagtattcagccacgaagtagtgaacactggcttttataaaatgatagcggacacctgtgaaaaatttgctacatttgatgaagtaaataactattttagcaataaattaggtggagaagcacgagccttagcccggtcccttataaataagaaaaaaagggatggcgatgattaa

SEQ ID NO: 236779 - DNA, 732 bp, Klebsiella pneumoniae
atgtcaagagtcccttctaaaatttataggtatcacgttgccaaccttcaagagttgcaattggctctgggtcatacaggtcgacttgctcgtatagaaatagcttcgaaagatcctcagaaggggctcaggtctcttcttcgtctgtactcattcttggttggagcatggattgagactcgtcttagaaagttacttcatgaagagtttggtttcactgaggctgagcgtaatcagattgagcagaaatcatcgcaacttgatcaatggaaagaaactgttgatctagcatttcgtaagcatcataaaataaccaaagcacctcttgatgaaagaaatcttggggtagcacacgccgcacgaagagcagcattacatgatgttttgtcgaatgagctacgaatcctgatagaaatacgaaacaagttagcacatgggcagtgggtctatcctttcaatagtgagggagatgccgtggagcctgataaatttcaattaatcaataaagaaaatttgcaatcactccaattcaaatattcattagcggagcatttagctgacgctgtacatgatttagttgttagtccagcaacattcgaacgagattttgaaagtcattttaagagattatatcaagtacgaacaaacttggtgacaaaagattacgaaaaatataaagcaagtttagtattaaatagagaaaaatcgcgtgctactagaacgaagaaatag

SEQ ID NO: 236780 - DNA, 666 bp, Klebsiella pneumoniae
  misc_feature (499)..(508): n is a, c, g, or t
atgagcaaaacggtggttcttccgcagagtgacagtccttccgtcgtcgcctccgtctccttctggcaggcctttcgcttctggctgaagctcggctttatcagcttcggcgggcctgccgggcagatcgccatgatgcaccaggagctggtggataaccgccgctggatctcggaaggacgattcctgcacgcgctcaatttttgtatggtcctgcccggcccggaggcgcagcagctggcgacctatatcggctggctgatgcataaaacctggggaggcgtcatcgccggggtgctgtttattttgccctcgctggcgttactcatcgcgctggcgtggatctacctcgtctggggagatgtcgcggtggtggcggggatattttatggcatcaaacccgccgtggcggcgatcgtgctgcaggcggcgcaccgcatcggctcgcgggcgctgaaaaatggcgcctactgggccatcgctgccgctgcctttgtcnnnnnnnnnngcctttgtcgctatttttgcgctgaacgttccttttccgctgatcgtcctgaccgcggcgatcgtcgggtttatcggcggacggatggcgccggcgacattcggcaaagcggacgcccaccgtgcgcagagtcaccccggcggggccgccatcattga

SEQ ID NO: 236781 - DNA, 414 bp, Klebsiella pneumoniae
atgctgaccatccgcggggtaagcgagcctctgaccacgctgcttgacggtcgggatcccggcggcgtggcggaccgctggtttgtcgataacggcctgaccaacctgaccctgtttcgccactacctgatgcactatctcgccgagcgaccggatattattaaggagatgtatattgtggcgaggacgctgaaaccgtcgccgtcgggcatcccgttagagatttactgctttacctcttcgacgctgtggaaagactacgagaatacccagtcggcgatatttgagtacattaccgcggtggccgggcaattttccctgcgcctctatcagtatcccgccgggcacgatttctggcgtctctcccaggagcacgccgcccgggcgggcctgccgccgtcggcggaaggctaa

SEQ ID NO: 236782 - DNA, 669 bp, Klebsiella pneumoniae
atgtctaaacaagagcaatcagaaaaacatccagacaagccagtaaataccgaaaagtggcatcctcgtaatttattgaatcccatcaccgagattattaccattttcgtcatatcaaaagatgaaaatgaagttgagaaattggctgaaagatttcaaatgcgaattcagaaatggatatttgtaacattaaccttcttgcttttagctaaaggtttttttgaggtgttacaaactttatcctttctagaacaaccaattcgattagatatccccactttaaatgagccactaattttctataaagattatggtattgccagcaatctattaaaaattaaatcgcttgttttcgttgccaatgctctggctctctcctgtggattccagttggcatatatgcttgtaactaaaggccctgatgaagctgttgaaccaattatgctaggaattgcatccgccattcttttgattctttcagatagttcaccgagcgcatgggggcaagagaaatctttagcaattcttcttttaataattagcatccctattttatattggtcatcaagaaaaatgaaacaagatagagacattgacaaagagaaagaaaaagaggagaacgaaagaaaggagaaagaaaaaaatgaatcaaaatccggccccatgtaa

SEQ ID NO: 236783 - DNA, 453 bp, Klebsiella pneumoniae
gtggctgagctgcaggaagttgacgcctggttagatgcgctcttggcgggtctggagcctgccacacgtaagcgcatgatgcgggagctggcgcagcagctgcgccgcagccagcagaaaaatatcaggatgcagcgcaaccccgacgggacggcttacgagccgcgtcgcgtgacggccagaacgaaacagggccgcatccgtcggcagatgtttgcaaaactccgcaccacaaaatacctgaaagccctcgccagccaggacgcggccagcgtcgagtttgagagccaggtgcagcgcatcgcccgcgtgcatcactatggcctgcgtgatcgggtcagcaggaaagggatggaggtgcgctatgcaaaacgccgtttattaggtatgaaccatgaaactgatatgttaattcaagggaaattatttgagtatttatcagggcctagttga

SEQ ID NO: 236784 - DNA, 1905 bp, Klebsiella pneumoniae
atgacattcattaaaccaactttgattgttaatcgattgagtgtatttcagaatggacaccgtgcttttgactgcgagtttcataaaggtgtgaatattattcgcgggagaaatagctctggaaaaacaaccattatggatatgttagccttttcattaggggctgagaatattagatggaaaccacaggctttgaaatgcactagtaccattgttgaggtatccctaaatgatgaaaaagcatgttttaagcgagagatatcaactgaactaatgcgtcctctttatatctactggggaccaatggctaaagcactagacgccggtgtgcatgagtgggaattatatccgttcaagcgttcagagagtaaaattagctttacacaagcgatattcaatgcactgtcaatgcctctagcacaaggagcaggttcgtcgaatctaaccttacatcaggtattacgtgtcttatatgcagatcaaccatcagttcatagtccgatctttcgttttgatagatttgataacgctctaacacgtgatactgtcggtgggtatttatgcggggtgtacaatgatgaattatacaatgcccaactcactttgagagatgttgaaacagagctaacaaagaaaatttcagagttaaagagcattttcaatgtattaggtcgttcaggccaagctccagatatacaaggtattgatgagaaaataagtgatttaaatgagcagagagaacttgaaaataaaaagctaactgatggttctattttttctgaaaataataaagtcgattctgaaaaacaacttgactctttaaggggggaactcaacaaagctaagggagcgactgcgaaactaaaaggtaagattcaatctctggaatttgaaatttcagactctgaaatgttcatatcagagcttcaggacagattgaaaaatttagaacaatcgggagaaactcgcgctatcttcgatagtatgaattttgagttctgtccgagttgtctttcaaaaattgatatgcttaatagtagtcatgtttgccatttatgtaagtctgaacagtcagatgataaagctgcaaatcaattactacgaatgaaaaatgaacttacgcttcaaatcaaagagtctctgcagttaatggctaggagaaaagatgaattaataaagttgaagcgggatgtgccgttagcggaaaatgagttaaaaagccttgaacaagagtttttcaaagagtcaaattattgggcatcaccacaagaaactgttgtaggtgaaatatacagagcaattggacggctcgatgaggaaataaaaagagcttatgaggataaaaagcttatagttgttatcaatgaattgcaggaacgtcgtgatgaattgcaggcggaaaaaaatagattggatgatcttattgaactatatgaaaaaacagaagaaaaactaaaggataaaatttatacgtctgtaagtacaattgcacaagaacttttgcaagaagatttgccattgcaaaaagaatttatgagtccagagagtgttgagtttagttttactgataatagtgtttatgtgaatggaagtaaaaacttctcagaaagctcagctgtagtattgagacatgtattccacttggctcttttgtctgcaagtatggaaaatgtgtcaatgaggctgccacgtttcatgatgctagatggaattgatgatggaggtatggaaaaggatcgaagccataatttgcaacaaataataattgatgagtgctcacgttatgagcatgatttccagttgatttttgcaacttctgaaattaatccaaagtatagcgaaagtgagtatgttgtcggtgagtattattcacctaataactattctctgaatgttattgagtga

SEQ ID NO: 236785 - DNA, 501 bp, Klebsiella pneumoniae
atgctagtttatcatccggcgtatgatgcctatcattgcctttttagaatgatggcgattatcgaaagagcaggtgagcttgaaatagataagctcaagattttagatttttacatcctattcccgtcattgctaagtaatgtgaaaatgcctcgtcagtttgttaaggttaaaaaaacggctgagcgattctataatgagtatcatgatcctatgaatccggggatgacatttaaggaaatgcgacatatacaggatgctgcaataaaatgcatgctggcggctggatatattaattcagatgagttaagcaatggctatgttgtaagaaccgataaagaactaccagaaaaaatatctttggagatgaaggtttttttagaaaacaaagaaccattttcgtcgttcattatacaaaacatggctaaatttcatttaactgggccggacggactaaagtctaggactcaactaatggagcatagatatgacattcattaa

SEQ ID NO: 236786 - DNA, 567 bp, Klebsiella pneumoniae
gtgtttagcaaacaagaacaatcaggcaacaaggtcggaaatgggagtattgttggaggagaccagaagacttacataacaaatatagttcgcagtagtaatcgaactttggaccgcttgtatcaaaaattatcgctagaagataaaataatcggtgaacaagacttctgtgataaattgaagcattatttagctacagacacaaatccggacataagagatttagaaacaaagttaacggatagtgatagggctgaacttatatactttgcaacagatctcaaagaaaaagcttttaaagcgataatgaaatgtcagtcatcaaaaactgcgcaagaaatatacgcattaattcttgataaaatccatactgattttatgcttaagataaccccacttattcaaggcgatgaggatagggtgactgttgatgataaaacagcattaattttagaaaatattagtgaaatgttaggcgataatttgttagacttatcagaaaaggaccttttagggttattgtatttccttggtggaaattgtcatataaggtgggataaatgctag

SEQ ID NO: 236787 - DNA, 183 bp, Klebsiella pneumoniae
atggaatatttaggcgaaatcatcagttttctggcaggggccggtgtaagttgggctattactttcactgtatatagtttcaagctgaaacaaatcaacatgaatcagagctctcccactcagaacggcaatattgtgaagaaaggaagcatagtcggaagggatcagactaattctcattga

SEQ ID NO: 236788 - DNA, 1227 bp, Klebsiella pneumoniae
atgaattctcatcaaaacttatctaaggaactgagtgatgtgtttattgctatccttaggcgttcaaccttccgccctcctttaaagataagtggagatatagttaaagattttactaatcgttgcaacgaattcaaaaagtgtttgaacgaacatgtcgcatcaaaagataacttggcatctgataaaatcaagaaaagattaaacgccattagtatcatacaaacaggaataactgaatcgcttaaagcttttctttcaggagatataaaatcagcttatgatttatttgatgagatgttatcaacccctattatttatcgacacattagaaggatttgtattccattgcacgatatttgcaacgaaacaaaaccactttttagagtaaggaaatctgaaaagccaatatcaacaagaagagaaatatttcacattccttttactcatcgtcacttagtgaatgcacaacgatactctgtagctggtcttccatgcctctatttgggttcatcactttacatatgctggcaggaaatgggaaaaccagatttcgataaactatatatttcctctttcatatcatgggatttcaaatctcagatccttaatctcgcagccgattttttatatagccaggcagcattaagatctaatcgagagatacacattaaagataacattgtaaaattatcatacctgacattatggcctctaataatagcatgtaactatttaaagaaaaatgacgatgcaccattcaacccggaatatattattcccaacctgttaatgcaatggataagtcgcctagataatagtccaattgttggaattgcatatcgttcaacaaaactttttaaatcaactaatactttgaaagcaacgaatgttgtcctaccaccgaaagttagttatgaagatacggtttcggaaccattctgtaaaaaattatcatcaatgtttgagttaactcaacccgtatcctggcaagtgcttaagacattagattataaaattgatggtggattgaatgaggaacaaataaaggctaggaatgtactcgaacgtaaagaaaggctaactggtataagtgatctcaatgaagctcttattaacttgtatccattaactgacttttacaaactcgaacagtgcatggatcgactacttaattactcttcaattgaatcacaatttggcggcattttggcggcagaacggtaa

SEQ ID NO: 236789 - DNA, 1176 bp, Klebsiella pneumoniae
atgataatagatcaaaattcatccatcaatatcattacagggaataatggctctggaaaaagttcaatattagcagaaatttcaaatgaagagttcgcagtaggtcaaaacgtcatatgcttatcaaacacatcaaccaataaattcccaaaaaggaggagtcagcgtttccatgtcctaaatcaatcatccaacacactaaataaagcaatcaaaaaggtagtaataagtaatggccatgataaaattagaacgtctcacgcacatactttcccaagagttttgcaatatttagaatttgaggaacaattgacttttaaattcacagtattcccatatgaaagctttatcaggaagtttcaatccgaaacatataataacgaatggattagaaatgatatcgaagagataacaaacaacctaaataaattaattaaaattaatgatgacatcaattaccaatcagacagagaaataaaaagctctcacatactttatttggaatactcattcacatatgaagcagataaaagaatcaacacaatacacaacatacttattgagttgatattaaaacatgagagattattaaaaaaacatcatttgatatcagatattgagataaattttcatcgcggacataacattataccatcctcacatttaagctccggcgaagcgggttatattgcaacacttgcatttattcttacgcatgtatcagatagcaacacaataataatagatgaaccagaaaatagtttgcatcctcgctggcaaaaaaaatacacttccaacttattagaccttctatattattttaacgtgaggataatattagccacacactcaccgatgattgttattggggcagtagaggacaatagcagtcttagagtatttaaatccgaaaatagcatcctctacccacttgagggaaatgaaacaaatatagatgaagttatggtagatgttttcggagtactaacgtctagaagcagatattttagttataaaatcaatgaaatcttaaatgaattcaataataaaacaattaatttagctaccgctcaacaaaaactggataaaactttatcactaggccctgatgaaaaccaagagaatataataaaagcagcttataaaatccttgatgagatgagtaaaaatgcctaa

SEQ ID NO: 236790 - DNA, 591 bp, Klebsiella pneumoniae
atgcctaactttatatttaaacctgaacacatttcacacatacgaaccgttattgctgaaaagaatgctgatgataaagtgaaagtgtgggagaactctttactgagccctttgagaagagaactcaagcattatatcctttctaatcgtactgacggtataaaatgtgcatactgcttaaagaatttttacaatgaacacagtatgaatattgatgttgaacatattcttcctaaatcgcaatacccagaatatactttcacccttaaaaatttagctgttgcctgtaaaagatgcaatctattaataaaaaggaatgacgtttcttttttgaatgataatttcaatagaaaaaaaccattcaattcaaaatattatgcaataacccaccctgtaatcgacagaaaaaacaacctatatcttttagatgttcactttaacgggtgccatataattaaatatcaaacaaaaagtgtaaaggccgagaatacttataattacttcaaacttaatgaagtagagatagaagcattgaatagtgcacagggaattaatcagatagttgatttactcaacactttcaatccttga

SEQ ID NO: 236791 - DNA, 300 bp, Klebsiella pneumoniae
atgaaaataaccaccctgggtctggcgatgctcttcgtcggactggccgccggcccggtttacgcggcagacggcacgctaaatttcatcggcagggtcgtgaacggcgcctgcaaactcgaaggggcgggcaataacggggtcatcgacatcagcatgggcgatattccgctgtcgagactaaaaaaacagccagtcgggtaccgggccagcggtcggcgtcgatattcgcgtcaaagattgcgagaaaggcacctactacattgtggtggatggcccctctcccaccgccacgcctga

SEQ ID NO: 236792 - DNA, 2121 bp, Klebsiella pneumoniae
atgagtacatatcataatgatcaccctattcgaggtggtgaaaacgaccctgatttattaaatagacttgattttgccaatcatttagcaaatattcttttgttaaatcatgatgatgattgcattactgtatcattagaggcggagtggggatatggtaagacgtcagtaataaatctcataaaaggggctttgaatgaaaaagattcttttccaattataattgaatataatccttggttagctggtcagcctgaatctttaattcaggactttttgttacagttttctgcacaactaaatataaaagataaatcggaatctgcattaaaagcttctaaagctttgattgcatattcaagtctattcagtgcagcaaagctagttccaggagctgagccttgggcttccattttagaaaaggttttctcaaggtttggaagtgcaacaaaaaagattgcagaattgaaaaaactcgatctgttaggaaggaaaaaacaagttgaagaggcaatcaaaaaaataaaatatcctattgttgtgattatagatgatattgatagattaactccttccgaaacatttcaagtcctgcgattggttaaagctgtagctgatttttcaggaacttcttttttactcgcatttgaccctaagtatttagtttcagtattagataaaaataatattgttaactcctccgagtatattaataaaatagttcaattgcgagtgccgcttcccgtaatttcagatcggggtatgaatgaactcgctaatatagagtttgagaaacttagtgataagcctctaactgaccgctttgaaaatgatcaagaaagattaagctggatttatcataattattttaaacaacttataaaaaacccgagggaattaaaaagattttttaatcacttaaggtttgttttagaacaaattgaaggagaagtatgtttttctgatctctttgccttatcattaatctctacaaaatccaacattatttacgatcatatcaaaaatacaccagaagcctacataggaaagagatttaataatgatgggctattaattgataagattcaagatattgtcgataggtttagtgctgagcggaatgataaattaaaaaacttcagtgatagagatcgtaagctaatgcaggaccttttgggcgatattttccctcttgtacaatcaggtgcatattcacattttagagtttctgatcctgataatgcaggtagagtggctgcaccacaaaggcttcatattgccttccattataaaactcctaatgggtatatttctgatgatgatattttaaaatttataaaaggagaggatgacagaaatgagttcctggaggaagttatttctcaaaaagcagaagaaagatttttcgaaatgatgaatatttacgctggtttttgtaaggacgatagttttgatatattaacgtgtatctatgataacttccttttctctcaagaattacaaaaatcactagaaagcaactacggcttcctaacaaaagatctttatatacgaatgaattggcttacgaataagataatatctgaaagtgataataaatatgagttaattagaaggcttgttggtaggcatgaaagtgctccactaggtgcagacgttttatatgaatctagagatcagattcaaaatggtggccataataaatcgtggatcaaccttgaacaattaactgagcttgaaagtatttatcaggaaatggcagtgaaagtattaaaggataggacttatttagattatcatcttgagtctcatatattctttgagttaaaaagaacttctgtgcaattgacatcgagtttcattaattcccttctaatagaagatgggcttgttagagtgtgtgagataattagtgaaacaggtagtgactcaacaaatggaccttatgttaggatcagtgaaagttacttcggtgagatattagatatggataaaataagaagtgaagttaaaaagttagatttttcactttattctctgcgtattcaagcggtgtttaatagcattttggatggtcggaaatattatttaagagatgcttctgttggcgagaactggtag

SEQ ID NO: 236793 - DNA, 786 bp, Klebsiella pneumoniae
gtgagctactcaatcaagatagggaaacacagtatcgagctggcaggttatgccggtaaggttgttgcgccaaatactcagatggccgctttattccgtggtatggcgggcgaactcaccagcctgaggacaacggcgcagcaggccgaagctgaggcggatttgctggacgttatccgcaacgatccggatctgaacgaacaggcaaaaaatcgcagggcaggtgaagtccggaacccggacacgctcaaagactttacccgcggggtggcagccgtaagcgagcaggccgcaaacattctcgattacctgaagaacaagctctctccggttaaaccactggcatctgatgacgttcagggattcatgcgtgacagcgaaatgcgccaggcattcgcccgactggatcgccgcagccaggaaaaaatgctgctgtcgatgcacagtggaaagcatcaggagctggcggacgccttactgagggcgcccgcagtgtgttcgggactcgatacggaacagctaaaacgtctcggcttctcccgtattgcatcagagaacgggcaggtgattaacgcggttgccgatctggtcgacgcggtaaggaaggacgtcgcacaaattacagctgtccgaacctggtataacaatctcgtctacgggaagaacgacgatccatcagacgtacagccacgcatgaccggccttgaccagttaagcgaacatgtcagcgcgatgctcaaaggcagccagcggcagacacattcagaagagaagcaggccgcctga

SEQ ID NO: 236794 - DNA, 174 bp, Klebsiella pneumoniae
atgagcaaggttaacgtcaagcccgttctgctgaacggggaacagattcaggctctgaaaaccattcaggagagggaacgccagaagtcgggcatggggatcgcgccgtcaatccatgctgttgcgcgcaaggtatttgatgcagggctatcaaaaatggaggctggccagtga

SEQ ID NO: 236795 - DNA, 459 bp, Klebsiella pneumoniae
atgccaaaactcacagatattcagattcgatcatggatcaaatctggggaacgctttgaaggtcgagccgatggtaacggcctctacctcagataccggaaggtggacaaaagtccaaactggcggtatcgctatcgttatgccggcaaagcaagagccatgctaattggttcatattctgatctctccttggccaaagcgcgcgatattgctaaagaactgtctgctcgagtagcgcttggttatgacgttgcgggagagaaacaggaaaggaaacttgaggcgctggcaaaaattgaggctgaaaagaatgccctaagcgtcgctgaattggccgctgagtattatgcccggcagattgaaaacacgtataaacatcctgagcttttccgtagcagcttgcaaaaaaatatcgtggctctcattgggaaaatgaaggtagccggtcataaagaatga

SEQ ID NO: 236796 - DNA, 219 bp, Klebsiella pneumoniae
atgtgcccgttccaggcgatctcgtttttgtctcttcatgcctcgtttccctcattctttgatctggtggaaaagaaaacagtggtcgcaaattgtgcagccacgggttacgaataccgcgaaatgaaggcgacgtcaatgcgcaaaattcacgccattgtcatatttgtgacctatataagagttcattttttgttcacctggcacaccggccggtaa

SEQ ID NO: 236797 - DNA, 303 bp, Klebsiella pneumoniae; identical to SEQ ID NO: 153904

SEQ ID NO: 236798 - DNA, 696 bp, Klebsiella pneumoniae; identical to SEQ ID NO: 153903

SEQ ID NO: 236799 - DNA, 759 bp, Klebsiella pneumoniae; identical to SEQ ID NO: 153902

SEQ ID NO: 236800 - DNA, 567 bp, Klebsiella pneumoniae; identical to SEQ ID NO: 153901

SEQ ID NO: 236801 - DNA, 1512 bp, Klebsiella pneumoniae; identical to SEQ ID NO: 153900

SEQ ID NO: 236802 - DNA, 237 bp, Klebsiella pneumoniae; identical to SEQ ID NO: 153899

SEQ ID NO: 236803 - DNA, 843 bp, Klebsiella pneumoniae; identical to SEQ ID NO: 153898

SEQ ID NO: 236804 - DNA, 534 bp, Klebsiella pneumoniae; identical to SEQ ID NO: 153905

SEQ ID NO: 236805 - DNA, 1356 bp, Klebsiella pneumoniae; identical to SEQ ID NO: 153896

SEQ ID NO: 236806 - DNA, 789 bp, Klebsiella pneumoniae
atgaatatcaaaactgctttaattgcggtggctgtctcctcttatatgctaacctctaccctgggccaggccagtgaacattcttctgtattcaacccggagcaggaaaaaagaattggtgaaattgcagcagattatatgcgtgcgcatcctgatattcttattcagatgagcgaaaagctgcaggcagaacagcaggaaagggaaagtcgcgagttgaaatcagctgcgctggcacaacaagccagaattctgtctgatgaaaacatcccatcatggggacccgctgaagggacggtcatggtcgtcgagttcttcgactatcagtgcatctggtgcagcagactggcaccagaactggaaaaagtcatgaaggctaacacgaacgtgcggtattacttcatggagtggccagtttttggcagccgctggccggcatcactgctcgctgcgaagactggtctgcaggtctggaaagagaagggggccgaagcttatttaacgtaccataataatatctatggtaccgggctgagtgaaggcagactcacgcaggagattattgaaaaacaatccgggaaaataaattttaatcaacacaccattgaagcaatcaataatacgttgaagaatataaatcagatcgccacaacaacaggcttaaccggcacgccgggtgtaattattatgccgctcaatggagcgacagaggataacaccaccgtcttttccgggatgacagaagcagagaatattcagcaggcaatcaataaagctcaggggaaataa

SEQ ID NO: 236807 - DNA, 585 bp, Klebsiella pneumoniae
atgacggaagaaaaacgacccacgctcagtctgaaaaaaaagccagcagaacagtcgactggtactgagcctgaaagcccacgcattgtcaggcgcaagcaagtggttaatgtcaccacgccgccggcatggaaagtcaaaaaagaaaagctggccaggaaagcggagcagatcgcttcggctaaacctgttccgcctgaacccgctaacccagaaaaaaccaacaggaaaattcgttacctccgcttgccggcgttgcaggtggccattgataccctgcaaccctggtggcccgcactttttgatggtgatacaccacgtctgctggcgacggggatccgggaaaccatatttaacgatatagcttcccgcgggataccgctgtcccataagcaggtcattaaatgtctgaaacggattactcgctctgaacaatacctgtcatcgatgatcgccggtgctgaacgcgttgacttaaatggtactccggtgagtgtcgtgacgccggatgaagagcagtatgcgaagctgagaatggaaaagcagcgccggcagcaggcaagaattcagagcgatatggtttaa

SEQ ID NO: 236808 - DNA, 723 bp, Klebsiella pneumoniae
atgagagcacaacacacatttcttggcgcgacagacagctggcttcagcgcctgctgacctggacaccgggacaaacggatatgattaaaacggtcgcactggtactgatggtgattgaccacactggcttactgctggccggaaacaatgaagtgatgcgtctgctgggacgcggttgttttccactgttcggactggtgtggggaatgaacctggccaggcaccaggaaatccgccagtcgcagctgaatcatctctggtgctgggcgatgatcgctcagggggcgtttatcctggtgggctatccctggtacatgggcaatatccttttttcattcgctgtcacggggcaggcgatgcgctggttcagcttacggacccgtaacgatatgcttctggctatcgctattgtgatcgcctgggtgccgttgtccgcggacagctatggcctggctggcgtctttatgctgatcaacagttaccggctgtgccgcgccacggaagcggtggaaagaacgggctatgcttttctgtgggcggtaatggtcctgctgttgaatcttcatgatgccgggcagtctgtcgctggtctggcgatcgcccttcttgtcgtgagtgtgtgctctgatatcgggaaacaggttaaacggttctggccaccccatttttttgtattgttctatgctgttcatctggcagtgctggggattgtggctgcataa

SEQ ID NO: 236809 - DNA, 546 bp, Klebsiella pneumoniae
atgcggtcacgctttagtctacggttatctccctttacttcattttctttctcacaggccagaaaacataactggcctgaatactctctctgggaccacggtcccacctgcatcgtcggtcaggttatctgcctgggaccacggtcccacctgaatcgccggtcaggttatctggctgggaccacggtcccacctgtatcgtctgtcagcttatctgcctgggaccacggtcccacctgtatcgtctgtcagcttatctgcctgggaccacggtcccacctgcatcgccggtcaggttatctggctgggaccacggtcccacctgcgtcgtcggtcaggttatctggctgggaccacggtcccacctgcgtcgtcggtcaggttatctggctgggaccacggtcccacctgcgtcgtcggtcaggttatctggctgggaccacggtcccacctgcgtcgtcggtcaggttatctggctgggaccacggtcccacctgcgtcgtcggtcaggttatctggctgggaccacggtcccacctttattga

SEQ ID NO: 236810 - DNA, 3510 bp, Klebsiella pneumoniae
atgcagaaaaaaatcagaaataaaaggccattcgcaaattcgatacatttccttaagatgaagttaagaggggaaaataagtcagctctagatgctttaaacaatataaaaaaaagcaagtcagatgaattgtttgatttatacaggaccacaattaataaagaaatattagagaaattaacaggtaaaaaaaaggtagagtcattacagaatttattaacaacgaatggcatgttgtacagtacatctttagcaaatgaagtgctatgggcaatatcaacatgtatcttgtataaagatgaattaaagttttttattgaaaggcggaatgagattgaagaggcattattaagtaatgatgagtcttgctataatcaaataatatcagaagtacgagataatctcggagtatcatattggttattggagaactcaatttcaggagttcaacattgggcaggaaatgatgcaaaaagagaatttgtaagagagttgcgagcccaatgtatagacaataatttagtggacttactgattacatatattagcaaacgcgtagaaggtacttctataccaggatatttgcaaagtgaattatcgaaacatttcactgatccagatgcaagaaatatctttgattattacaaagcaaaattatttgatatgaataatttaagctttgaacaaatacctgttgtattaactttggattttaaatgtagcattgttgatttatatgaatctctaatatcagttttacgttggttagcaataaatgaagatgttctaatacaagttaaacatattttagcaaaaccaattttagtactgtttaatgcattaaaagatgagcgactattttcgattttaatctctctaagcattgattttgattttaaaattgataaagagagagaagatattattgagaattatacttctggtgactatgctaaggtctcaaaattaagcaaagaatattttagtaaaagaaaaaatctaaatgatttttcgttattatttatttgcttaaaatccgatataaaagaaggtgtacgcaatgaatttcctggtattttaaatgatatttcaaaagaaatatataatgtattgatgttaggcgatgaatcttatcctgctgctctgactttaaatgctattaatgataaatttaaaacgcatacatggtcagtatatatgcgaattgcggtaatgaatgagttgtcagtgcaagattttagttcatcgttagactatattaaagatctttacgtccttgaaacaaggataagcccattctccttttttctatctgataactataattacatatcaacacatatcaataacagttcaagtgatttttttaaattaaccaaggaacttctcaaactatccttgaaaggaaaattttcgtctgaagaattgaagtttcaaattagtccggatagatatttaaaatatttaggtcgttattatcttgtaaacaatgattataaaaatgcgattttagtatttgaagaagcacttagccatacaaaaagcccagagtctctcaagtgtaagtcggcattaataatttcatatttaagacatgggtatagtgctaaagcaattagtctattaattaatacatttatggaatggagcgcaacgccaacggctcttccatttgaggaaataataaataatattgaagacccagaatattggccctctactatagacttaccgcttacactagcactatacacaaattatattagaaatgataaacttgctcatcttcggtatgcttttgagaaatttaatcttgataacaatattaaaaccccacaagatctcaaatcagttgagaatattactgatgatcatataaaactatatttacaacttgtttggcgtccagaaataatggggcagacattactatataatgggtctagggatatagaggaagcaagaatacaggtgtgtaaattgcttgttgatattgacccaataaattcaagtgaatatcaaatggaaatcagggaaagagtcaaaaatcttgagttagctaaagttactaagttagttgatcaaagcagagtttatgttgatgtttcgacaattaagaaaactttgaaaaataagctaggagatatctatctaaagtataaaaacacattagttatagaacatgaagataaacaaggcttagttgaagttatagaggatgtttttaaaaatttagaagaacccagtatgtccttttctaatgttctttctacatttcacgttttaggagaagaagacatgcaatttgcagctatcttttcagaaatagtgaatgagtttttgttaggggagcatggcctaaatgcttatttaagtaccagggtaaggcatgggaagtttagtaatgcaataagaaaacctattgctgatgaacatttaattactgagctttctgaaggaactggaaattatactcaaaacacgtattggattaagtctttatcgaatttaaacgaacttgaaaaagaaaatgtactttcactgttaattcattttggaaaaaaaattgacgaaattatatcatatgtgagggatgatctcatacaagttgctatacatgatgaattaaaagggaacattgcaaaccgtaaggctttatttgtatataagacatcaagcttagaaagagtttatgcaaaagcgaaattaagcagtttaaataatattgacgaatttattgatttttgtatcgctatactttgggaaaaaacagatgataacttagccattgtaaaagaaaccatattgggaaatattaaaacaagtatattatcggcttttgataaacttagtgaatcgcttggacagcttggttatcaagatagattaggggaattacctaatcatatagcaagggctaaaacgaacatacaaaatcatattatgaatgttagttcatggtttactagaaatgaagtttatgacagacctgatcatacaccagatttccctgttttaattgcaaaaaaaatggtgacaaatttaatatctggcactgaaagttgggatggtgtaaagatagttggaactaacttcactaacaacctcccaggtcgaaccctcgatagtttagttgacatatattgtgctttatttgaaaatgcaattgaacattctggtttgccactcaaggaactatatattacagttgagccgcattatgaaaataataagtttaatgtgatcgtatgtaattcagtcttacaagacgattcttatcgagataaattaaataaaattgaacttatacgtcaagaaataagcaaaaaggatactcgagcgaaggcacaaaaagaacgagggagcggctttcataaaatatggtctaccataaattcacctttattcaaaaatccaaatctcttttttagttatatggatggaaacaaattccaggttacaatttcttttaatttggagtcaattgatgagcaaaatactaatcattga

SEQ ID NO: 236811 - DNA, 1230 bp, Klebsiella pneumoniae
atgactaaaatacttattgttgatgatgaatatttaaaacctcgtgctatatctgaattagcatataaattagatagcgagatcgatattcaacatgctactacagcacgtgatgcacgaataaaaatgagagatgtacagtatgatttattattaatagacattgatttgccagaagctatgggggcatcgcctatccctttagggggaatgtctctttttgatatgttcactttagatccaatgtctaagacaccattggatattgtatttattacagaaaaagaggattcgattgacctgtataattttgagtctgcaaagcgtgggacttcattatgtaagtttgactcccaaaacgacacatggaagctatttataactgggaagttaaatttaattatcaaccgtagacgggttagtttaataacgacgccaaatgcagacattgcaataatcactgcacttggctatcctgaacttgatgctgttttaaagttaccatacaactggcaaagaaaacgtttttctgatgaccctacgggatataattttggagtcaagaatacggatggtgttaagttgaatgttgtcgcagcttcatctatgagaaaggttatgtcttcttcatctgctttagccatgaaaatggtagaaagattcaagcctaaagtgttagtgatgctggggatatgtgcaggtgtacaaggtaaagttaacataggagatgttataattgctgatcctacatgggattgggggagtggaaaaatgtcacaagacaataatggtacttctatttttttgtccgctccacatcaattaggtttagaacctcatatcgcgcaaattgcaatggagatgacctttgaatcagccctttcacaaaaaatacaaagaggttggaagggaaaattacctacagatacactatctatacatgttggtcctttagcttctggctctatggttttagcagcagataaatccatcgaaacgataacaactcaaaatcgagatttaattggcgttgacatggaagcttatgctgtaatggcagcgtctgagtatgcacgaaaagaaaaaccaataagtatagttataaaatctgtatcagattttgcagactctaccaaggaagataattggcaagagtatgcttcatatacttgtgctaatttttttgacgcattaatcagtaatgttttttttacatcaaccattcaataa

SEQ ID NO: 236812 - DNA, 1074 bp, Klebsiella pneumoniae
atgaacagcttacttcctgacaatatcgatgaactgaaacgtctccttgccgaacaggaggcgctgaaccgtgcccttctggaaaagctgaacgagcgtgaacgcgaaatagatcacctgcaggcgcaactggataagctgcgccggatgaacttcggcagccgctccgaaaaagtctcccgccgtatcgcgcagatggaagccgaccttaagcagttgcagaaagaaagcgatacccttaccggccgggtggatgacccggccgtgcagcgcccgctgcggcagacccgtacccgcaaaccgttccctgaatcacttccccgtgacgaaaaacggctgctgccggcagcgtcatgctgcccggaatgtggtggtacgctgagttacctgggtgaagatgccgccgaacagctggagctgatgcgcagcgccttccgggttatccggacagtacgtgaaaagcatgcctgtactcagtgcgatgccatcgtgcaggcccccgcgccttcacggcccatcgagcggggtatcgcaggaccggggctgctggcccgcgtgctgagttcaaagtatgcagagcacaccccgctgtaccgccagtctgaaatatacggccgccagggtgtggagctgagccgctcactgctgtcgggctggatggatgcgtgttgccggctactgtcaccgctggaaggggcgcttcaggactatgtgctgactgacggtaagctccatgctgatgacacgcctgtcccggtgctgttgccaggtaataagaaaacgaagaccgggcggttatggacctacgttcgtgacgaccgtaacgccgggtcagagctggcgccggcagtgtggttcgcttacagcccggacagaaaaggtatccacccgcagagccatctcgctggcttcagcggttctgcaggcggatgcgtacgccgggttcaacgaactgtaccgcaatggacagataacggaagctgcctgctgggctcatgcccgccgcaagatccacgatgtgcacgttcgcaccccgtcagcgctgacggaggaagccctgaaacggatcggtga

SEQ ID NO: 236813 - DNA, 1044 bp, Klebsiella pneumoniae
atggcaataaaacacacttataacggaaaatatctcaagcttcataaggcttataaaacaccatcatggggtaaagacactgttctcgtaactgacacttgggactatgtatctctttggctaaaaagagagaataaacctgaagctcagttctattgggaacaagcaaaatctttttttgaggcaacgcaatcacttcccaagacttctgcaccgctcaccgcttactactgttttcttaacgcagcaaaatgcctactgatggtaaagggaatcccctttgataaacggcacggcgtttctggatggagtaagccgggaagagttagcctatcaaaagagattgtaaaattacaaaacaagggaatactttctgaactttgtcgttactatggagagaccattaataagaatacctacagcattaaaaatatattctataaccttccatttattcacagggcttaccacctgacatatataagcgagcaagaactattcttgccgataaaagaacctgagtacgtacatgcgccagcatccacaaagtcgtggtttactgcaattctcgaccctcactatgttcacgggcagactttaagaattctgccgcccacttttgaaaaagatgtcggtgacaacacttgctatcgagtaagaagaaagaaaagatttaagtggcagagaggaaatggaaaccaaacaacaaatctacagcaactaacaaaataccatcaagacactagaaaatatgtattctatatccacggccctatgcgtctttggtatttaaaacgagacaaacgcaacctgccagcatttatagaacgacatacagtcccactaatgtttggagcaatgcatcgactaagcgagttggcaagatataacccagattatttagccaagcatttcgttagtcagcataactggcttttaagtgaattcatccagatagccccaactcaatttattgatgaaatatcctctgaaattactggccaagagttcatgaccccggggcgcgcagcaagatcactctaa

SEQ ID NO: 236814 - DNA, 1023 bp, Klebsiella pneumoniae
atgttagacttagaatatgctgtaactgagccttttttaaattaccatttatttcatgaaggattaaatacgaaggttaaggttttaacctcatcacttaatcatgtgattgaatatttattgacgccaggcaatgaaaataaaatgaatgagctcattaagaaaactgataaatcttggcaattcccgccgaatttttcacttccaaaccctccagtcgatgaatcaagtttaaaaagtaaaacattatcaaaaagaccagataaggtagatgataataatgaattggattatcaattaaagaaaaaagaattagcgcaagagatgctgtattggtatgtaagtgaaatggctatatttggcagtttttctgctttggatgattgtattgtcgatattgattcttggttttcaagttgggcaatgttcaataacactcatgataaaaaatcggaatcaaccagtagtaacaaaattgaaaggttatatgattcgcacgaatggaacatgacaaacataaagacatcccttccgatttatgagtatttttcagcagttagaaattcaatagctcataggcaatccaaagcatctcataagttatcagagatatcaaaatcccaagaattaaaagagtcagtagagagaaacttcccaaaaggtaaaccattaagtgaatttgaatataatgaagatatattcatctctccaaaaacgtcgttgctttgctctcacataataagattaattttcgaagacatcaataaatacatcataaaagaaatgggtattgaaggtatcatctacatgtcatgcaaacttgcatttgaaccatcatcttataatgaaaataaagttgttaacttagctaaaaatagattaaacgaaatcgttagtggtcgatatcatgttattataaaaggtgaggatgaagccgttaaggttgctgagtcacttggcatttggcgtgattgcgctaaatttcatgcgaacaatatgaggaaattagaacctaaattctaa

SEQ ID NO: 236815 - DNA, 1179 bp, Klebsiella pneumoniae
atgctcattactctgattgttaaaatactaccacccttagctttgtttattctttttatcaatagtgctaacgcggcataccctgccattgaggcgtttactcctccgcctaagagttataacgttaaaaagaatgttaacgaagttactaatatagcgaaaatcccttcgcaaggaggaagagagatatgctatgcagttgcagcatcagtatttctaaatgccgaaaactgccgtgtatccaaattggattgcaagcacttaacgccagacagcttattctcacccgcaggtttggttctggatggtatcggtgatgaccctgaaggtaaaaaaatttatgctagagagggcgggagctcttttaactcaataaagactgttatatatgaatcatattcttctccttcccttgagtgtacatctaaagagaagaccatgccggagtttgcacaaaatgatgatggagtggaaaaggagttcgccatgtggaaagagatgtttaatttatataagaaaatttctaaacatgcgaaaactatagacgatggatgtgatgagtgcgctcaggtattttatgataaatataaggtcgaattctcaaaacttaaaaccatattccctttactagaagataaaccttcatcatttgtaagtttaatgaaagaacatacatttcgagaatttgttgtgagattaacagttccagccgtttgcagaagagccaaaaaccttgcttttttcgagaaatccgatagcttagacgtggctatgtatccaggagttaacggtgaaacaaatgcaaggctcatgtctggcattgatgattcattgaaaaccacagggaattacactgaatcaatgtcgattattcgaggggcattggctgtaggaaaggttcttactctacaagggatttgcctaagtaaatacgccaaagatggcacttgtaaagatggacatgtagcagttataagtggggctatgaccgtatgcaataatcaaaataataaatgcaccgaacttctcaaggtaataaatccctggggagacaaatggcaggccgcagtaaatgatggctgggttatggccaagcctctgctagaaagcacaaaataccgttttggaacgctaatctggcttgtagacaggcctcccgagcatgagctctcagaatag

SEQ ID NO: 236816 - DNA, 324 bp, Klebsiella pneumoniae
atgaatgggtatatcgtcacaatcattattgcattcatttttggtcccattctggcgttgccgatattgaccgtcggtttgtttaatataatggattttgcgctgtattcattccccatatttttcttttgtattatgggttataggcaagagaagaaggttaaggatgcttttaaggcattaataccgggcctaattgtatctctgatgctgatgacttttgttctgtttgttaaagatcagagcgactgtacgaataaatatgacaaaggaagtctgcctgctgctgtgtgtgagacacaaaaggggcctggatttagataa

SEQ ID NO: 236817 - DNA, 996 bp, Klebsiella pneumoniae
atgagctggtttaatgacgtatttggattcgaagaatcagactatgcagagactcaggctcgcttttttcaggaaggcccttttcttcataccagaagccagccatctgtttcttatcgctctggtattctgaccatgccgagtctggccgaattaaggaaagcagtcagtaatcttgtgaccgaaccgtatggaaggtgcaggtttgacatacttgaggctgatgcatatgacctccaccgaaaatccgaagtaaagggtgcgctgatccaggttgccagtcagttcaacttgctcgaaatgccatgtgaatatacaacgccagaaaaggggattaccgaataccagtttgatcatactcaaggacctgcctgcgctatggcctgtgctgctgccacggtatttcgtaactatcttgtcccgatagggtcacagacaggacaatccattaccagccagcttaacacgctggctgatatggaaaaggctatcggcattgatggcatacgaatgaaaaacgggtatgccctgatgtcggctaatacggtgcaggccattagccgtcatattgcatctctggatgagcaaatgcgggacaggctcagacaggagttacgcatcggattgcactcagatactgaagtcactataccaggagtacctgaagatcagtttgtgtctcaggctctctgctctgccttacctgtcgcgtataactcatctccccgggaagactgggcttcttttgcatcgctggttctggaagccagttacgaagcaacgttgctggcaggtgttctgaactaccggcgtacaggcaatccgagagtatatgtgactatggtcggaggcggagcatttgggaatgaacctggctggataattactgctctcaggcgtgccttatatctggtcagccatcataatctggaggtgatgtttgtaagctaccgacatactcctgctgctttatattcattaattgaggaattttga

SEQ ID NO: 236818 - DNA, 198 bp, Klebsiella pneumoniae
atgacgcgccccgtaagcgaacacctcacctcaggttctgaagagaagcaaacgcatacagcggcgctgcgtacatcgctgcagcaggaggacagactcctcagggctgaagagcagggcataatcgaccagcgcgccagaaccgctatccatatccgggaacaggaggtacagcgagacatccgggaattgcgctaa

SEQ ID NO: 236819 - DNA, 1266 bp, Klebsiella pneumoniae
atgaacccgaccgtctgtacccacaaaaacaaccccaacttctggattttcgggctgttcttctttctctacttcttcatcatggccacctgctttccgtttctgccgatctggctgtcggacgtcatcggcctgaataaaaccgaaaccggcctcgttttctccagcctgtcgctgttcgccatctgtttccagccgatcctcggggtgatctctgacaagctggggctgaaaaaacacctgatgtggatcgtgaccgttttgctggtgctgattgctcccttcttcctttatgttttcgctccgctgctgaaaaccaatatctggctcggggcgttgagcggcggcgcttacattggctttgtgttctccgccggcgccggcgcgatggaggcctatatcgaacgggtaagccgcaacagcgggtttgaatacggcaaggcgcgcacctttggttgcctgggctgggcgctgtgcgccaccacggcggggatgctgttcagcgttaacccggagtgggtgttctggatgggctcggccgccgcgctgctgctggtggtgctggtggctatcgccaaaccgcaggccagtcagtccgcgcaggtaatggactcgctcggcgccaatcgcccggcgatcgatttaaaaacggcggtgcgcatgttccgccagcggaagatgtggatgtttattctgtacgtcatcggcgtggcctgcgtgtatgacgttttcgatcagcagttcgccaccttcttcaaatcgttcttcgcgaccccggaagcaggcacccgtgcctttggtttcgccaccaccgcgggagaaatttgtaacgccatcattatgttcagctcgccgtggattattaaccgcatcggggcgaagaataccttgctgattgccgggatggtgatggcggcaagaatgattggctcttccttcgccaccaccgccgcggaagtggtggcgctgaaaatgctccatgcgctggaggtgccgttcctgctggtgggcgcctttaaatatattaccggcgtgtttgacgtccggctgtcggcgaccatttacctggtgggcttccagttcgccaagcaggtggcggcgatcttcctctccgccttcgccgggaatatgtatgatcggattggtttccaggagacctatatgatcctcggcggtattgccctcaccgtcactttaatatcggcgtttacgttagcgggtaagacgaaaactgagccgctgcgcgataatgcgatgacggtttaa

SEQ ID NO: 236820 - DNA, 1689 bp, Klebsiella pneumoniae
atgtccctgtcatttaatataaaacaaggtcagcgcattgatttgtggctgaaagcgtccaaaccggcggcgcaacccctgttttctattcgcgtgaacggtcaggttatatttaagattcaggaggcgtcgggctatttccagtattttacctggacctcgtttcaggacggcgttgccaccctggagtggcagtcggaatatagcgagatatcgctttgttacacctggcatccggattcactgcgcgcgagcggcgtcacctttatcgcgacagccgggcaggatttgcgcctgatgagcggtcaggatattgctgacgagtatctgcaggagccgctgcgtccggcattgcatttctcgccgcgtaccggctggatgaacgaccctaacgggctgcactacaagaacggcgagtggcatctgttttatcagtatcatccgcactccagccaatggggcccaatgcactggaatcatgcggtgagccgcgatctgtatcactggcggcattatccggttttcctgcagccagagcagaatctttccgcgttaggcgcaacgggcggtgcgttttccggcagcgcgtatattgataaacaagggaaaacccgcttctggtataccgaacgactcccggcttacgatctgtatcgcggataccgggaagtgcagaaaatggccgttgcgcacgacgactacgataagccggaatgggtaaaaaccgtcttaaccgacctgcctgcgggcgtggactgcgatttccgcgatccaaaagtctggtacgaagaggccgatgccaccttttatatgatcctcggcgcgtcggtaaatggcgatccggcgatgctgctatttcactcggcggatagtgaacgctggacgttccatcatgtgctgtatgtcgctcccggctattttcgcgaaaacggcggtcgctgcgtcgaatgcccggatttcttctgcctggatggcgtatgggtattaattatcggcgtcgttggctacacggagccgacaaccgggcgacataatttgctttttgcccagaccggtactttccggaacggctatttcacgccgtccgagcagccgctgcagactttagatttcggtacggatttctacgccctgcaaacctggggtgaggacgaccgaagaatcggctttgcctggttatataactgggcgacgcagaaaccggtggactccgcttactcgggggaaatgtcgctcccgcgtcgctttcatctcaatgcgcagcagcggctatgcatgatgccggagctgccgccggaatcattggtcgtcagccgccatgcgctggatgacggtgatatctgggttaatgagaaaggctgtaaagccggcattgtaacctttatgccagccgatggtttccgtttgacgttaacgggcgatagcggccagcaaatcatcctcgaacaggacggtaaaaatctgacgctatatgaaaaaggccgggacgatgggcgttaccgcgcgccggtggccggcgtcagcgacgtcacgctgtgttttgatgccgggattgttgaggtcttcgcaaatcagggcagcgtatgcggtacgcgacgctattactcatgcagtcagctcacccggatccagctctccggcgcgcaggcacagcttacgcaatatcgctcgacgtattcgcaggaataa

SEQ ID NO: 236821 - DNA, 1338 bp, Klebsiella pneumoniae
atgacgggatcggcggtcggaaaaaataatcaactgacgctggaacaacgaatggaacagcttgaagcgcggctagccgccgcggaaagccgggcgacggtagcggaaggccaggtgcgggatttgcaggcgaagcagaatgccgcgattcaggcggcgcaaactcgtgtgccggtaaacagcgcggcagcaaccgcggagagtaaaaagaatcttagcgtcccggagctgaaattatccggctatggcgatctgaaaatctacggcgacgtggagttcaacatggacgcggaaagcaaacacggtctgctggcgatgaccaacgccgatgtcggcagcgatcccacctacgataagtgggatttaaacggccgtatcctgctcggcttcgacggtatccgcaaaacggataacggccattttgccggtttctctgtccagccgctggcggatatgaccggctcgatgaacctcgacgacgcggttttcttctttggtcaggagaacgactggaaggtgaaagtggggcgctttgaagcgtacgatatgttcccgctgaaccaggacaccttcgtcgagcactccggtaataccgccaacgacctctacagcgacggccatggctatatctatatgatgaaagaggggcgcggccgctctgacgcaggcggcaactttctgctgagcaagcagcttgataactggtattttgagctcaacaccctgctggaagacggtacgtcgctgtacgacaacgatggctaccatggtcgagatatggagcagaaaaagaacgtcgcctatttgcgtccggtggtgtcatgggcgaaagacgaattttccgttgccgcggccatggaagcgaacgtggtgcagaacgcctacggctataaagatgcccaaggcaactttatcgatcagtcggggcgcaccggctatggcctgaccatgacctggaacggcctgaagcgcgacccggaggacggggtggtggtgaatctgaacaccgcttatatggacgccagcaacgaacaggatttgaccgccggggtgaacgcgctgtggcggcgcttcgagctgggatatatctacgcgcataacaaaatcagcgattatgccggggtgatttgcgataacgattgctggattaaggatgaaggcacctacaatattcataccttccacgcgtcgtatcaaattccgaacgtgatgaatatgcagaactttaatatctatctcggcgcctattactccattctggatagcgacaataagctgagccagagcgatgacgacgatcgctacggcgcgcgcgtgcgctttaagtacttcttctaa

SEQ ID NO: 236822 - DNA, 840 bp, Klebsiella pneumoniae
gtgcaaaacacggccctcagcccgcatccatgcgggctgccccggccttgcgggaacgtttcagcgattttgaggccgtcagcaccggcagtttcagcaacaatggtgaataaattaacgacaggtcgtacgaacgtaggccgggtaaggcgccagccgccacccggcaacatgacgggtatcgagcctgatatcttgcccggtggcgctgcgcttaccgggcctacgaggtatgagcctgtgagaggaccccgtaggccggataagcgtagcgccatcctgcataaatacggcgacggtgtttgcggtgtcctgcccggcgacgctgcgcttgccgggcctacgaggtatgagcctgtgagaggaccccgtaggccggataagcgtagcgccatcctgcataaatacggcgacggtgtttgcggtgtcctgcccggcgacgctgcgcttgccgggcctacgaggtatgagcctgtgagaggaccccgtaggccggataagcgtagcgccatcctgcataaatacggcgacggtgtttgcggtgtcctgcccggcgacgctgcgcttgccgggcctacgaggtatgagcctgtgagaggaccccgtaggccggataagcgtagcgccatcctgcataaatacggcgacggtgtttgcggtgtcctgcccggcgacgctgcgcttgccgggcctacgaggtatgagcctgtgagaggaccccgtaggccggataagcgtagcgccatccggcacaagacgggtatggcgccagaggtgtcctgcccggcgacgctgcgcttgccgggcctgggattgggattccgcggagcctttcgctaa

SEQ ID NO: 236823 - DNA, 213 bp, Klebsiella pneumoniae; identical to SEQ ID NO: 34929

SEQ ID NO: 236824 - DNA, 756 bp, Klebsiella pneumoniae; identical to SEQ ID NO: 34928

SEQ ID NO: 236825 - DNA, 1521 bp, Klebsiella pneumoniae; identical to SEQ ID NO: 34927

SEQ ID NO: 236826 - DNA, 765 bp, Klebsiella pneumoniae
gtgaataacttgctttatgagttagatgaacaagcaatactatgcagagatcctatttcaaaaaaatatttagttgaagcgatttcttgctataaaactggagcattcagatctgcaattgtaacaatatggatagctatcgtttttgaccttatcaacaaaacaagagaattaagtatagcgggagataaagctgcagaagaaataataaataaatttgatgatctaagagagaagaacgatataagctcatctttaaagtttgaaagagatattctttctttagctaaagagaggttggagataatatcacatatagaatacattgatttagagcgtatacaacaagatagaaacaggtgtgcgcatccctcaatgttaaatgataatgatatttttagcccatcaggtgagttagttcgtaatcatatagtagtggctgtccagtacctactgcgatatccaccagcacaaggaaaagcagctttatctaaaatattatcagaaatagattccgattacttccctgaaaagcctgaagaaataaaaaccactttaaataaaacaccattatttcgggcgcgagaaacactaattaaaagtgtcattattgtattgattaaaaatacactaaaagatgaaaaaaacattaaatataataataaaataaaaaatgtattactctttatacaagagcaacattacaaattatactcaagcacattgaatgataaaatatctgatctgtctcttatacacatctga

SEQ ID NO: 236827 - DNA, 678 bp, Klebsiella pneumoniae
atgactgattataattcccaggcatcgtatattaagtcttatgatgtcactacctttgcttcccccagcaatacttcgccttatgaagatattggaaaaataatatctgagatccaggatgacattatattacagcaacagacaaatcaggatgataaaggtttgcgtcctggaacaactatttttattccagcagggcgttatcggttacaaaccacttttgttatcaccattcactacctggtaatacaaggggcgggccatggatggatgagccaggcaagtcgggatgctccggatacagatagcagtggttggcttgaaacagcccctggagccagctttattgagctggataccagttcaactctgacggcaatcaaaattgaacgagatgattttgctaccactgggcgaatatcaggcgttgagctgcgtgatttttgtatcggtctggtggttgccacgaatccctacaatacaagcggtacaaaagggatcgatatcgcgagcgatagcgattcattacggattgaaggcatggggttcagccttcttgaggaggctatggtggtcagaaatgctgactctatttcaatcactaataattttatcggtgaatgtgctaattgtattacaatgacatccagctccattgttgcaaaaaataaccaataa

SEQ ID NO: 236828 - DNA, 1350 bp, Klebsiella pneumoniae
atggctcaacaatacggtggttttttacaaagtctggcaacggttcgggatgcaaaaacggggcgtctttcaagctgggatcaaagcggtaagaatcaggattattggcttattggtcccggggaaagcgtaacgctagcagatattcaaggggctggctgtatcacccatatctggatgacgcaattttgtcgccgcgtgctgggggctagtgttattgatcccaaaatgggccaatggattgcgccagtcaatgaaattcacaatgcgttgggcgtgtgttgggaagtggccgatccccattattaccgcaaagtgctaattaaaatgtactgggacaatgctgaagaaccgagtgtggttgtgcccctgggggactttttctgtattggtcattccatgcccggtaatattaataccctcccgattaatatttctaccaagcctgaagaacgctataagtttggcggcagcgcggcactgaactgtttctttccaatgccgtttaacacgcgcgccgtcatcgaaattgaaaatcagaatgatattccctatgggcagtatttttacatcgattatgaaatgtatgctgaagaacacaaggatgatatcgcgtattttcatgctaactggaagcgcgctaacccatgcaatggctggggacccgagctgcaaaccaatagcccggaagtcaatatctcaactttgagcgctgaagggaactatgaagtgcttaatgttgaaggcgaggggcattatgtcggctgtaatttatcggtcgctcatttccagggaagctggtggggggagggtgacgacatgatatttgtcgatgatgatacatggccgccgagtatacacggtaccggcacggaagattactttaatcacgcctgggggatgcaggataacgcgggtttatataatggaacagcattacacgaaagcatcgttcccggcttccagacaagctataaatttcatattaccgatcctgtacatttcaagaaacgcattcgcgtaacaattgagcatggtcacgccaaccatctttgtgatgactgggcctctacggcttactggtatcaaaaaaagccaggcgctgtcactatccagcctttagatgaacgtattcctacgacccctggcgatattgaacgtcggggtatcggtaaatcaacgtgcgaattgaccgcagagcagcaaatgcagaaggacacggctaaacgccgcttcgaagagtttatgaaaactcgacaagttgaaatcgaagccaaattaaaagccactcgagaaaaagaagccggcaataagaagcacgcgcaatttatcgcacgcaaggtgaagtaa

SEQ ID NO: 236829 - DNA, 1701 bp, Klebsiella pneumoniae
atgaaaaatttctcaataccctctgctaaaggcatcacgattgaattttggctgcgccaaaagaaaaataatgaaccgctacctctattagttattaaaagcgatgatcaactgctatataaaatccaggaaggagctggtttttttaattattatcattatacccaccatcaacagggggagttaaccttaagctatgatgaagacagggcagagatatcccttttttattactatgataaaactaacgtctatcatcaaggcgttatttaccttattgataatggcaccggtctgcaatgctacccaaaatcaaaactgaaagagtggtatacgcaagaaacattcagacctcaactgcatttttcaccttttcaggcatggatgaatgatccaaatggtttgtgtaagatagatgacacttatcatatgttctaccagttcaatccaaacagtaccgagtggggcccgatgcactgggggcatgccatcagtaacgatttgatttcctggacgcatttgccggtatttaaccatcccgaacatcccttggcttctctgggggcgaccggtggggctttctccggtacgacctttatcaataacgaaggcgaggcggaaattttctatacggaacgtctcccggcctacgatctctataaggattatattgaagtacagaagaaggccgcgattgatcgctatggtattaaagcaacgcatatccagactattctggagaaaaaaatagaattagtcggctgtgatattcgcgatcctaaagtttggtttgatagcgaaacgcagtgctatcgaatgatcctcggctccgtttatgacgggaacccgtccgtgcttcaatttgtctcacgggacagtgaggaatgggcgtttgaaaatgtcctgtatacggcgccgggatattttgctgaaaataaaggccgttgcgttgaatgtccggattttttccagctgggcgctaaatgggtactgactatcggtattgtcggttaccaggagccagagacaaagcgtcacaatcttctgtacgccattattggcacatttgacaacggcgttttcactgcggaaagcgagatgcaagtgctggacttcgcgacggagtattatgcattacaaacgttcaaggacggccagcgccaggttggtattgcatggctatttaattgggcaatgaaaaagccaattaaatcatcatataacggtgagatgtctattccaaaagaaatcttcattaacgccaacaataaagtcgctatgcgccccgttaacgaacttgaaaaatacgttgacgaatattgtgacgtcaaattgaaagccggtgaggaccatcgtatcaacaagggaaaatcgttaaggatccgcttagagcagggtttacagccgaacgaagacctcatattggccggagataagggggaatggctggcgatttcataccgcgatggttatgtgagtatagaagaaaccgtcgtgagtgaagcgcaataccgggctcgcgcagcagagataaaaaatctcgagattatttttgatgcgggaattgtcgagctgtttatcaatgatggtgaaatctgcgcaacgaaacgcagttataaactatcacactgtaagcaattaaaagtgaatactcttcgcgaaaaaaacatacgaatcgaaaccttacatacaagctggtaa

SEQ ID NO: 236830 - DNA, 1395 bp, Klebsiella pneumoniae
atgaataccagaagccaagaacggatgtccgtgcgtgagcacgtggcatacggctccggagatatggccttaagtgtttcaattatttccgcctctctccttatttatacttttatgatcagcgtggtagggctaacgccgattgatgcgggatgggtactcctcgccgtgcgtttgatcgatgccattaccgatcctgtgatggggtggttgtcaggtaaggtgaaaactcgctggggccgctatcgtcattggatcgctatctgttcaattccctttggtatttccctctttatgttgttcaccgtggttggtgaaagttacaatgccaggctggggtggacaacaggggcatatattttaaatagcattatgtttaccatgattgcgatcccctatatttctcttgtcggggtaatgaccaacgaccctgctgaacgcctgaaggcgaatacgtttcgtttcccgatggcgaaagccgccaccattattgtgaccacctttgtaccatactatgtgacttctaaaggcgctgccgaggctggaaatgcctatgctctggcctttttggtcttagggattgccagcattattgttcttatgttttgtgccttttatgttaaagagcgagttgaaattaatagtcccaaaaatatttcaacgaagaagcaaattctatcattaatgaaaaatgaccaatggttgattctctgtattactatggtcctgctactaattgctttcgccacgcgtggtaacattgcctttatttatggcactgaatttgccaaagccgcaggtggatgggaaatcggtatcttcatgggtatgtggtctgccggtggtatcgctggcgcgttgatatctaaatggttaacggatcgctataataagctggccgtatttcgctggtctctttatttatccgcgttaatggcggttgccatgtatttcatcgtcggtatcggtgatttatatttggccatcctcttctatttcctgtgttgcgccgtctcggagattaactcgcctattttatgggcctctatcgctgaggtgggtttttatggcgaaattaaaaccggggtgaatacctcaggcttatcgattggctttatctcgtttagccaaaagctgggaatgagtatttctggccccattacgggctataccctgacctggattggatatgaagcgggagctaaattatctatggaaacattgctggggctatcgatggcggtaacatttattcctgccgttttctttttgatagccagttttgtatttaaacgctattttattgataatgaatatttcagggagatgatcgttagcaataaattacccactgataagctgtctagtgaaaaagatcggatagtagattgttaa

SEQ ID NO: 236831 - DNA, 993 bp, Klebsiella pneumoniae
atggtcacaatcaaagatatagcgttggcattgggtatttcacacgtcaccgtatcaagagcgcttaataaccctgaaaaagttcaagccaaaaccagagagaagattttggccaaggccaaagagctgcactatgtccccaatgcggcggcaagggacatgaaaaaatcccggctaccggttattggcgttatctcattaaatatgggaagaagtagctatggtagtgaaatgctgggttcgatcagtgaaaaagctaaggaaaccaactatcagttaatttttatccatgttgaagattcctctcccaccgaagtggaccttaattttcttagagagaaacgaatatcaggtcttatttacctttcgcttgatccttgtgaaattgagtatcagtcaatatttgatgaggtcaagaccgtgtttgttaactgtcattgtgcgcgcggtaattattctagcgtgcaggctgataacgagcaaggattgtataatattgctaatctggtctttcatcgcccatggtttacccgcagcctttttattaattttgatgaaagttatcacgccgcggttaagcgcaagcagggatatataagggcgcttaatgataatcacattgcgttttctgctgatgattattttgttgttccagttagctataattatgatttcacagtattagataatgatattcttggcgctattcagcgtggcgttaatgtcatcttttgcggtcgtgacgaaattgcgctggaagtatacttttctttgcaacggctggggttttctattccccaggacgtttcggtgatcggttttgataaccagagtattatttcgcagagagtctatcctaagcttactacggtagagttaccttaccgaaatatggtattaaaaggttatgatttaatcgtttcggaagattcacactccatctgtaacgtagcgattagttgtgatccgatcattcggggttcgttaaagtag

SEQ ID NO: 236832 - DNA, 126 bp, Klebsiella pneumoniae
atgccaattcctccgtatatgtatcttaaagacgatggtggcgcagacattaaagggtccgttgatgttcaggagcgagaaggtagcatcgaaacccgcttatcaccatcccccctcatcccctga

SEQ ID NO: 236833 - DNA, 1389 bp, Klebsiella pneumoniae
atggctaagtataaggcgtatcctgagtataaggattctggggttgagtggttgggggagattcctggtcactggagacttagtaaacttcgataccaatttgcttttggtaaagggcttaccattactaaagaacaccttcaggatgaaggtattccgtgtgtaaattatggggaagtacattcaaaatatggttttgaagttgaccctaaaattcatactttaaagtgtgtaagtgataaatatcttaaagataacttcaactcgttgttatttaaaggtgatattgttttcgcagatacatcagaagatatagatggctcaggaaatttcactcagttagtgagtgatgcgactacgtttgcaggatatcacactattattgcacgccctttcgaaagaaataatagccgtttttatgcttatctcttggattgcaaagagttaaggacccaagtccagcatgcagtaaaaggagtcaaagtatttagtattactcaagcgatcttacggaatctttcgatatggcttccatcaaaagatgagcaagagcaaatcgctactttccttgatcacgaaaccgcaaaaatcgataatctgatcgagaagcaacagcaactgattgaactgttgaaagaaaaacgtcaggcagtgattagccatgccgtcaccaaagggctaaaccctgatgcgccgatgaaagattctggtgttgagtggttgggggacgtgccgacacattggggtattcctaaattactgcatgttacaaaagcgatcggagatggtctgcactcaacaccaaagtatgatattgctactggatattattttataaatggaaataatctagttgatgggaaaatatctataggttcaacagcaaaagaagtttccagagatgaatataataagcactatgtctgcttggataaaaaaactgtacttttgtcaataaatggaactattggtaatgttgcaatctataataatgaaaaagttatacttggtaagagcgcagcatatataaattgtggtagtgaactggatgttaactatctaatgtactatttcataacgaatgagtctcgttattactttgacttggaggtcactggtacgacaatctttaatttgtcgttaaattcaattaggcaaatgaaagtttgtattcctccattagaagagcaacgattaatagtcgaatgttgcgttgataaacaaaagcaatataattatttaatcgattctgctgaaatggcaattaaggttatgcaggagcgccgcactgcccttatctccgccgccgtcaccggaaaaatcgacgtccgcgactgggttgcgcctgacacgcagggcgttgaggaaccacaggaggccaccgcatga

SEQ ID NO: 236834 - DNA, 480 bp, Klebsiella pneumoniae
atgaaagctgagcacagccggcgtatcgccagtcgcgagctggccgacgagttcaccggccggattgcggagcttgagaccgacctgacacgcgccatgctgaatgcctgctccggcgctaataaatacctgtcagcgcatgaagatgcctttatcgcttacgccggtacgcaatggactcaggctgtcaatgcggtgcccgtctccctcattcgcgctttcctgctgcgcatttatgccatcgaaatgaagggtaaaagcgccccgcagtccgtggccaccgtcgagctgcgcgatgcgctgagccgtcagggcagcctgtatcacttcgatatgacgcaggagccggtgttgtccgtgacgggcatgtaccggccgcagattaccggcgtggatacggaactgttacgcagcccgctcaagttaaccatgctcgccagaaagctggctgaaaacggcgagacaaaagcggagatgtaa

SEQ ID NO: 236835 - DNA, 564 bp, Klebsiella pneumoniae
gtgaccacactgatgctacagaaaacctttgaggcctgtcagacaaacaaatccgcctggctgcaacgcagggatgaactgacgcaggccgaacaggcataccgcgaacagcttgtccgtagcggccacagcgaccggagcctgcaaacgctgcgcgagattgtcgacgtgaaaaagtggaaaattaatcaggctgccgggcgttatatccgctcctatgaggagttgcatcccatcagcattcgtaaccgtctgaatgattttatgcaggcgcacggcgcggagctggccgccgcccttgcccctgagctgatgaattattccggggaacactccgccgttcagcgctgcgcaatgcagcactcactcgactgtctgcgcgatgccctgctggcctggctggccgccggtgaaaaaattaattattcagcgcaggataatgacgctttaacggccattggatttatgcctcacgcggcttcgcgcgatgatagccgtgaaaaattcacgcccgcacagaacctgaattacacccgccgccgtgcagaactggccgtgcagtag

SEQ ID NO: 236836 - DNA, 705 bp, Klebsiella pneumoniae
atgaaaattaaaaatgagatctcagcagccacaatcctttcaataatgatgttcatttcagtttatgctttcaaaagtggcgaagctatgttttttggctatccgtcatattatatttatttagatacaaatgaggtcattaacaccttacttaaactatcagttgtaataataacgcttatcacactaactctatttatacgcatcccctccaaattttttattttatttgttgctgtagcacttatcacaaaattcataagaattgctgttttaagccatcaccagcccttaaatgtcatggctgtaataaatcttggcactagtcatattctttttatatgcttgttattcttaattccaaaagctgttaagcaagaaactgtatattactcattgaatgctaagccatgtatgttggcagtcctagccttccttagcttctcctatttcttcggacttaattaccatagttttttccctggtggaatttggcaaacagatgatgaaaaagttgtagttggacgataccaagacaaattcatcttgagacaatgcaacaatggcaaggctttattctatatagatgaaattagtaaaagtaagtttgagaaatttaaaattgacacccgtagcgttcttcttcttagatgtcaaacagaactcgatgagatgaaaaaaacagagccaatggtaaactggtaa

SEQ ID NO: 236837 - DNA, 570 bp, Klebsiella pneumoniae
atggcgtatgcaaaaataaaaaaccagaatggtgaatatggtgaaatcagtttcagacgcaacatagttgatgggaaaaaatttctatctatagatgaaacagctgattgttcaagccatagaggtatgggcgtaatatttagtggtgaattccaatggtccagtgacaacctttttgaacttggatttttaaacgaacttgacttacaaagaatatacaatgttttaggctcatattattttgattttaaaaagagaatggaaggtatcggtgaaggcgaaaatctagatacttttgaggccaaagttttttatggcggcgttagaggaatgtatacctatatggaagggataataatgctctcttcagaaggagggatatggctggcatatttagatgacaatgatattaaatatttcaccaatgacattaactggaaaaccaaaacacctaggacaattgataattggcgtagtcgatttcaacaggtagaaataaaatacatatcagatacaagtactttaccacatgatgccttaggcgaaacactcaaaaatttagaagattaa

SEQ ID NO: 236838 - DNA, 825 bp, Klebsiella pneumoniae
atgccgccatccggcactaccgcgggtgcggcggcagaccgcccggcggcgctgcgcttgccgggcctacgaggggatcccgcaggcctcctcaggaacgtaggccggataaggcatgtatgccgccatccggcacaaccgcgggtgcggcggcagaccgcccggcggcgctgcgcctgccgggcctgggggtatcccgcaggcctcctcaggaacgtaggccggataaggcatttatgccgccatccggcactaccgcgggtacggcgactgaccgcccggcggcgctgcgcctgccgggcctggggggtatcccgcaggcctcctcaggaacgtaggccggataaggcattgatgcggccatccggcactaccgcgggtgcggcgcctgaccgcccggcggcgctgcgcttgcgcgggcctacgggggtatcccgcacgcctcctcaggaacgtaggccggataaggcattgatgcggccatccggcactaccgcgggtgcggcgcctgaccgcccggcggcgctgcgcttgcgcgggcctacgggggtatcccgcacgcctcctcaggaacgtaggccggataaggcattgatgcggccatccggcactaccgcgggtgcggcgcctgaccgcccggcggcgctgcgcttgcgcgggcctacgggggtatcccgcacgcctcctcaggaacgtaggccggataaggcattgatgcggccatccggcacaaccacaggtatggagcttgaagtgtcctgcccggcggcggtgcgcttgcgcgggcctggggggggtatcccgcacgcctcctcagaaacgtag

SEQ ID NO: 236839 - DNA, 216 bp, Klebsiella pneumoniae
atggatttttatctattcagaacactgaacgaagcacgtgaaattacagagcgctggctggctgaatataacagcgagcgcccccatgaatccctgaataacctgacgccggaagaataccgactgatggctgaaacccccgggattctcaaaaagtgcgtggaactaaaacgggtgcgcttacacttaccccgccgtaagttaggggtaagttaa

SEQ ID NO: 236840 - DNA, 201 bp, Klebsiella pneumoniae
atgaaaaagctgattttgttgggtctactagttctcagtggtcaggctatggcaactaaaatcacattgacggccccgcaagaagaacagacggagaacggtaaaacgttatgcacgtatcaaaacaacatctacttgttcacctacacaaccagcgctcagcactgcccctatacgaaaacattcgatacggaggactaa

SEQ ID NO: 236841 - DNA, 1146 bp, Klebsiella pneumoniae
atgaaattatttttggctcacgcaaaagaagatgaaaaggttacagagtcaatttatgagaaattaaaaaacaatggttatagtccttggatggatataagggatattcctgcgggtgtaaattgggacaacgaaattcaaaaaaactttagcagtgcaaatgttataattattattcttagcaaaattagctgtcaaaaaaatggttatattaggcgtgaaatgaatgaagccattgataaattaaaatattacaaacctgatgacatttttgttatacccatccttattgatgattcacctgtcccaacattcatatcttcaaaaattcaatacatcgattataaacgtgaagatggctgggcgttgttagaaaaatcgttagccttagctgcaactcaacaaaacattgaaattgcgaaaggggtaacgtacggtaattttacattcacaagtgaaacatttaaggaagaatataacagcatacctggacatgaaattgatataacctatccgattgtttctaaccaaactcatcctcagtcagcaaagatcatatctaactatttcaaaggtcgggccacgcacttagttttcaataacagaacttcaccttggccaagtaattttggttggagtgaagagtataaaagcacttataccagtgactatattgaaggatattacattgcatactgtaataaccatatcctaagtattctccatagtgtcaattggtatggtgcaggcgcagttcacccgaatagccatttcgatgttagcaatttcgtagtaaccgacggtgattattcctataaattttcattatatgatctcttcattgatgaaaaagggtacgatgctattaacaaaattaaagaaaggcttatatcggatgcgccccgtgtattctgggaaagaacgggagaaaaacctgaggaatctgatatggaatggttaattaggggggtaacggatagtaaactagatattttcaccattagtgaatcaggattaacttttcattttgctccatatgaaatccactgctacgccttaggtccgtgggagttattcatatccttcttcgatatcattgattatcttaagccagatggtatttactcgttaattaaggtcgtataa

SEQ ID NO: 236842 - DNA, 795 bp, Klebsiella pneumoniae; identical to SEQ ID NO: 34941

SEQ ID NO: 236843 - DNA, 258 bp, Klebsiella pneumoniae; identical to SEQ ID NO: 34942

SEQ ID NO: 236844 - DNA, 948 bp, Klebsiella pneumoniae; identical to SEQ ID NO: 34943

SEQ ID NO: 236845 - DNA, 1149 bp, Klebsiella pneumoniae; identical to SEQ ID NO: 34944

SEQ ID NO: 236846 - DNA, 1173 bp, Klebsiella pneumoniae; identical to SEQ ID NO: 34945

SEQ ID NO: 236847 - DNA, 963 bp, Klebsiella pneumoniae; identical to SEQ ID NO: 34946

SEQ ID NO: 236848 - DNA, 948 bp, Klebsiella pneumoniae; identical to SEQ ID NO: 34943

SEQ ID NO: 236849 - DNA, 834 bp, Klebsiella pneumoniae
atgtcacagctaagttttgccgatgtgttcaatatggccagagaagccgctgataacagccctgtcattcaggcagggcagcagatcgcggaaacggtgcccacggttccgcgtatgttgagcgagcagtacagccgaagccggtttatcagcgtatttaaagacacggggcgccatctgggtcgctgggaagtgttcagtgattttctgtcacttgccgccagtgagctggatatggcctggataagaacgccggaaagcatggagcactgccggaaaatctgcgcccggtacggggccaccgacatcgcgaacatgcaggaaatgttctgcctgatggtgtgtgcgctggaggcgaaatttcatgatttcctcggcgcgatttttatggagctggagctgggcgataattttcgcgggcagtattttacctcgtattccgtgcagtgtctgatggcacggatgctgatgccaggcgtcagagacactatccgccgggaagggattgccaccgttagcgatccggcgtgtggggcagccggaatgctgatcgcctatgcagagtgcctgcttgaagcggatatcaacccctccatgcacatgttcggcagctgcattgacatcgatccggtggcggcagatatggcctttatccagatgtcactgctcgggatagcggcggaagtggtgacgggcaatacgctcacgatgcagttgcggcgggtgaggtataccccggtttactacctcaatgattttgaaaaacgactggccgatctgcagcggttcagggccatgcgggactttatgcgcggaatacaggaggccgcgtaa

SEQ ID NO: 236850 - DNA, 915 bp, Klebsiella pneumoniae; identical to SEQ ID NO: 27201

SEQ ID NO: 236851 - DNA, 810 bp, Klebsiella pneumoniae
atgatgtggtcgcgctacaaagtgcggaaagtacatcaaatcccaatcgttgagagaatgtggcaagctatcgcccaacaaatcgctgcagccgacccaaaaccgctacgcggtttcggtcggctgagctcagtcgttaggcaacggtgttgttgcagatttttggtgtggaattatatgaagaactattttgagagcccgtttaagggaaaacctctcgtcgaacaggtaaagaacccaaatatcaaggtgggccgttatagctattattcaggctattaccacgggcattcatttgatgattgcgctcgctacctcctgcctgatcgtgatgacgttgataaattgataattggaagcttttgctccatagggacgggtgcatcttttatcatggctggaaatcaaggtcaccgatatgattgggttacatcattcccttttttctatatgaatgaggaaccggcattttcggaatcagttgatgctttccaggcggcaggtaataccgtcataggaagcgacgtgtggattggctctgaagcaatgattatgcctggagtaaaggttggccatggagcggtaattggcagccgggctttggttaccaaagatatagagccatacacaattgttggtggcaaccctgcaaaagagataaagaagcgcttttcagaacaggaaatttcaatgttgctagatatgaagtggtgggattggccgttggagcaaattaaagaagcaatgcctcttttgtgctcgtctgatattgcaggcttgtaccatttttggcagcgttcaagtgcctaa

SEQ ID NO: 236852 - DNA, 144 bp, Klebsiella pneumoniae
atgttgtttgagatattcagcacaaccgacatcagggacgatataaacctgtttgttgctatttcccattacacggacagaacagcgggaaacaaactggtagactttttcgtagttcagtgctgcctgccgtttcacttctaa

SEQ ID NO: 236853 - DNA, 171 bp, Klebsiella pneumoniae
atgacaacaaaaacaatcaaacaacaaattgcttcggcacaggaatgtctatacttcttggaagctaaaaataaacaacaaacaaaaaaagaaaacacacataagaaaattattttctgtgcagaggttaccaaagtcttagaatgtgatattagttatgtagataaataa

SEQ ID NO: 236854 - DNA, 162 bp, Klebsiella pneumoniae
atgcgcaagcctaaatggcaaaccgtagagcctctgcatgatggaacagcacgactgagtaatattgaaaacctttactatgcggcgatccgtaacaactatccagaacgtttagaactatttaaaaaggctctggaacaatataagaaggagaaaaaatga

SEQ ID NO: 236855 - DNA, 657 bp, Klebsiella pneumoniae
atggatattattgataaagtttttcagcaagaggatttctcacgccaggatttgagtgacagccgttttcgccgctgccgcttttatcagtgtgacttcagccactgtcagctgcaggatgccagtttcgaggattgcagtttcattgaaagcggcgccgttgaagggtgtcacttcagctatgccgatctgcgcgatgccagtttcaaggcctgccgtctgtctttggccaacttcagcggtgccaactgctttggcatagagttcagggagtgcgatctcaagggcgccaacttttcccgggcccgcttctacaatcaagtcagccataagatgtacttctgctcggcttatatctcaggttgcaacctggcctataccaacttgagtggccaatgcctggaaaaatgcgagctgtttgaaaacaactggagcaatgccaatctcagcggcgcttccttgatgggctcagatctcagccgcggcaccttctcccgcgactgttggcaacaggtcaatctgcggggctgtgacctaacctttgccgatctggatgggctcgaccccagacgggtcaacctcgaaggagtcaagatctgtgcctggcaacaggagcaactgctggaacccttgggagtaatagtgctgccggattag

SEQ ID NO: 236856 - DNA, 837 bp, Klebsiella pneumoniae; identical to SEQ ID NO: 34951

SEQ ID NO: 236857 - DNA, 204 bp, Klebsiella pneumoniae
atgatcgaaaagctgattcaggcacgcagaatttatgaaagtacgggcttagatcaacatagggaacagtttaatactgattataatattgctactaattatggcgttggtttaaaagagatacatttacagacgatgggaaaataccaaacttgcttagcttcaatagctttggaagtagaaactctcaaatcaattaaataa

SEQ ID NO: 236858 - DNA, 831 bp, Klebsiella pneumoniae
gtgttcggcattctgaatctcaccgaggactccttcttcgatgagagccggcggctagaccccgccggcgctgtcaccgcggcgatcgaaatgctgcgagtcggatcagacgtcgtggatgtcggaccggccgccagccatccggacgcgaggcctgtatcgccggccgatgagatcagacgtattgcgccgctcttagacgccctgtccgatcagatgcaccgtgtttcaatcgacagcttccaaccggaaacccagcgctatgcgctcaagcgcggcgtgggctacctgaacgatatccaaggatttcctgaccctgcgctctatcccgatattgctgaggcggactgcaggctggtggttatgcactcagcgcagcgggatggcatcgccacccgcaccggtcaccttcgacccgaagacgcgctcgacgagattgtgcggttcttcgaggcgcgggtttccgccttgcgacggagcggggtcgctgccgaccggctcatcctcgatccggggatgggatttttcttgagccccgcaccggaaacatcgctgcacgtgctgtcgaaccttcaaaagctgaagtcggcgttggggcttccgctattggtctcggtgtcgcggaaatccttcttgggcgccaccgttggccttcctgtaaaggatctgggtccagcgagccttgcggcggaacttcacgcgatcggcaatggcgctgactacgtccgcacccacgcgcctggagatctgcgaagcgcaatcaccttctcggaaaccctcgcgaaatttcgcagtcgcgacgccagagaccgagggttagatcatgcctag

SEQ ID NO: 236859 - DNA, 156 bp, Klebsiella pneumoniae
atgccgggtggcggctgcgccttacccggcctggagggttcgtgcgacctgtcgttgatttacccacttgtgcgactgaaactgccggtgctgacggcctcaaaatcgctgagacgttcccggcaggccggggcagcccgcatggatgcgggctga

SEQ ID NO: 236860 - DNA, 699 bp, Klebsiella pneumoniae
atgttttcatacgaatcaaatcaggaagtattttgttcaataattaataatattctcgagaggttagaaaaagatgattatcactcatgggattttattaatcgcttatctaaaaatggttgggttccaccattatcacttgattgttatgaatatttccaatgtcattcatcagaattgtcagatgaagatattgaattaggattgattgatttttttgaagataactatgataatgttttctttaaaataataaatcttgaagaggatcaaaatccatttttacacaagttgatgtgtgaggttatgcaggcatataaccaacaactgtatcagatatgtatcccatcattattttcaatattagagcgctatttagccgagttatcgaatgacggtgatttgaacaaagtacgatatggcgcaggactggagcggaaaattgggatgggaaataatgatgatggtgagttgccttatcaatttgttaatagttgttacttgataaagaaatacctcgatgaatatttcaaagcaattgattttgaaaattgtaactcgctgaataggcatgcgtatgcccatgggcggcaacaatattatgcagctaaagtagatgttataaaactaatttttattgtcacgaatattatcagtatgtattacaaagttgaaataatctccaatgaggtaggttga

SEQ ID NO: 236861 - DNA, 894 bp, Klebsiella pneumoniae
atgagaaaattaattgtagttgcttccgttgctgccagtttactgctcgggtgtgaccagaagagtactggcaagcgtgaaaccttgtctgaagcgcttgttgctaagtcgctttctaacatggttcccgttaagggcggcgagttcttaatgggggattttggcccattagttggtgaaaaactgcctttcagcataaaccaggatgataaggtattacataaggttgtattaagtgatttttcgatatcaaagtttaaagttaccaacgatgattataataaatatctgcagataacaggaataaaaaaacctcccattaatattctggtaaaagagtacccatccttgcaaaaaggtgattactctgttggtgttacctggcaacaggcaaaagattattgtcagtggctaggtaaggagtccgataaaaatattgatttaccgacagaagcacaatgggaatatgcggcaaggtcaagagggcagtatcttccttttgcgacaaataatggaaatttcgagcttggttctaatatacctgaacaaaagaaattagatgaatacacagatggttatggttttcctatttatccaattgggaaatatcctccgaatccgctaggtttatacgatatggggctaagtggagccgaatggagtaatgattggtattcaactgattattattcccactcccctgtttatgatcctcaaggtccagttaaaggtaatgaaaaagttttaagggggtatgttggcggagatcgtcagtatgccttgactatattcaggcaatcgtcacaacctgtgccaaaatttgctgggcgtgatgattatcaaaagtttggagttagtcctctttttgtatttcgttgcgttattaataaataa

SEQ ID NO: 236862 - DNA, 2262 bp, Klebsiella pneumoniae
atggctaccggagaagagaaaagtaaaacatcggtacaagggacgggaacggttgtaaaaggaaaatatggcccagaatgttattttcacccaggtagcgcaacattgctttttttggaggcttcagatactaaaattatcgaacaggagcatgattttctgtctggcttgcttgaaactcagaaacaggcgcaaaaaaatcttgatgatattaattttgaagcaatcactcaggcaggcagagtgccagcaagaaaatttgaaagtgaaatcactaaagcctatgaagccttaaacaaagcaaatcaggctttgcggaaagagcttatgtcgctaacagcgaatcctccggagggggaattgcttaatgataaaatgaaagatactgccattggtataatggaacttattccgcttaaaaataacacagtgaaaggattcaagaaaacttatgtgcgttccgataaaataaaacaacagtggcgaacatataagctcagcgaagttgataaagaaagtggtgaagccagtttcataaaatataaaaacaaaactattgtttctcaggatgcgaatggtaatcaggttaataaaaccatacgtcagggaaaaatagatacagcggaactaaaaaaacaactaagtaacgtacctgtttcactgaaattcgatcttgttgacgatacgaatgttattgtcagtcactgggcagaggaaatgaacaaatctctgacctggccaaagggggatggtaaagtcgacgaatctgtttatcaccagtatgttgatatcagcgcgcaggctcaactgatgcgctacagccatggagcgggtgcatcagcggaatataatccgtcagaaaaaaaactggagggcaaaatagaaggtcatgccagttttgcactgggggaggcgaaggccgaaacggccctgtacctgccggacaggttaggtgtcagccttttatttccggcgaaaaaagtgactccacagacaccggatggtgtctgtaatatgggagcgctgcgttttgccatgaaactggtattgtcaggtagcgtaggtgccagtgctgcaattgaattaggggtgacagtagactggagtggagaaatgggaaagggctatggcattaaaggccgtcctgcaaccctgactgccccaccgttaccaggacagcagcaggtgaatttaaagacctcaacaatacctgaagcacaggggggaggtgaaattggtgtttttgttggtgctcaggcgggaggtaatatcagtggtgccattgagtggtttgacccgcatcctgatgatacgccagtagctataggtgttgagaaagataacaaacccattgtcaataaagagaagaagtttgccgcgatagccaaactggaagcggggatgacggtgcaggcaggcgcagggggaagtggggttttttatatcacctatattcagggacgttttcgtatttactgtaaagcggctttatgttggggagtgggagccaaaggggaagtcggttttgaagttgatggcagcagttttgcggcttttatgaagagttttatgtttatgttaaggaatgtggattatcagaagttagaagatatgatgggagagaatgcttttagaggattatgttcaatcccaataattatagcagcagaaggaatacaagcactggagaaaagatataatcaagttgtggatatattggacagcttaagagtagatcttctggaagaaaataaacgtgtggatttgatgagcagtattttatctaatcctgatcagcttaagtatacccctccggaaacaaaaggggcagtgattgccacattaattgatcagaactgggtggactggcttgaccctcgcaatcagaataatgattttttttccgttaacagctggaagctcggtcctctaaagaggcgaaaacaagcggtgtttatggcgctgaagtggatacaaagtcaggcagattataacaatgtcatgcagcatttgacgttgtcgccaggggagaagaaaggtaataaagaactgaatgaaaaagatgtgattaactttttaggtatcggggaacaaaaattgtttttttacaccaattatggcgaaaagctcaccttactgcataataacctcccggtttttgttgacccggatgagccatttaaacctattccagacatcctgatgtcagaataccttgccatgattgatgatcagcacccgacttttacaatgactgcctga

SEQ ID NO: 236863 - DNA, 225 bp, Klebsiella pneumoniae
gtggataatctcatccttcagaaaaccatcattatctttattctcatcctgtgggtaatcgatgaattcagggccaggaaaagaaaatattctgaccctgcgattgaagcagctgatgccagagaacgccatgaatggcactatctcagatgggggttccggactatacaagtggcagcgacagtgtatatcttcgttcagctgattcaggtattactgagataa

SEQ ID NO: 236864 - DNA, 3615 bp, Klebsiella pneumoniae; identical to SEQ ID NO: 25044

SEQ ID NO: 236865 - DNA, 906 bp, Klebsiella pneumoniae; identical to SEQ ID NO: 85417

SEQ ID NO: 236866 - DNA, 207 bp, Klebsiella pneumoniae
atgaaaaatatcatgacgttattcgtctctataatcctgcctttttcagtctgtgctcaaaccgagacggcaacaggcgatacactggagcagacggaagaaaaaattcgccagcaggctgacaagctgggtgacagggattataaaatcacggaagcccgcatgggaaataaagtacatatcacagcagaaatcctgccggaataa

SEQ ID NO: 236867 - DNA, 333 bp, Klebsiella pneumoniae; identical to SEQ ID NO: 158854

SEQ ID NO: 236868 - DNA, 690 bp, Klebsiella pneumoniae
gtgacatccaaacattcgtgcgtactccctactgaacggcgaatagctctcgtagcctcttgcatacgcagaggatccgactttcatccgcaggggcgggatcatgagccgcatttccagcaaccgaatccaagtgctgtgagagcattttctgtttcttacgtagccaaccttccagtgcgttcggttgcggtattgctttttcatggcggatatccagcctgcccgctgcgcttttaccccggatactggcttcgatgccgtacagtttaccgatgcgatgcagtgcttcggtcgttatttccgacggggtgcgcacgtgcacgtcgtggattttcgctgtgcgtaagcccagctgtcgcttcctttatatgtcactcgcgatacagctcgttgaaccctgccttagcatctgccttcagcccccctgaacccgcaatatgcgtctgcgggttcgcgggcatggttttatctgtttcatatggatacatttcgagatcacgttacctccgaagatatatccttactgatcactacgaatccagtctaaggcagatgcctgttccggggataagttggcaggtactaaccatttggggaatgtccagggagggggggcacttcaaaaatccctcacttcaaacaccgttcagctcgttttgtaatggcagattgaatttaaccaactga

SEQ ID NO: 236869 - DNA, 678 bp, Klebsiella pneumoniae
gtgctcagcggcgtcgtcggcaccggctcgtcgctcatcatgctgcccgtcctcatcactctgtacgggccacggatcgcggtacctgttatggcgattgcgtccctgttcggcaacatcgggcgggtgattgcctggtggcatgagatccgttggcggccggtgtttgcctattcgttggcgggagttcctgcggctgtgctcggggcgcacacgctgctgacgatctctcctgccactgtggacatgttcctggcagctttcttccttgcgatgatcccgctgcgccgcctcatcagacgatcgaacctcaatctgaacctctggcacctgagttttgccggggcgattgtcgggttcctgacggggttcgtgctgtccaccgggccgctcagcgtgccggtattcaccgggtacggaatgagtggcagcgcgtttcttggatcggaggcggcaagcgctatcctgctctacgcaggcaagctcggtacattcggtatatcgggcgtccttgcaccggccgtcatcacacgtgggtttgccatcggcatcgcattgctcgccgggtcgatgattgcgaaacgtctcgtccagcggctccagatgcacacgttcgagtttctcatcgatgcggttcttatcgccggggcagcaggaatgatcctctccctaaaatga

SEQ ID NO: 236870 - DNA, 2775 bp, Klebsiella pneumoniae
atgctcaaaacagaagatctcaacactatgatatcaattgatgagattcactttgctgactggcaaatctggccacagctaaggattctgttacatcggggtaagccagtaagaatttctgccagagcttttgatgttctggttgttctggtgagtgccagaggtaaagccgtaagtaaagaatctttacttacgcaagtgtggggaaatgaaatcgtcgaagaaaataatcttcaggcacaaatttcagctatacgccgcatactgggacatgaccgccatctactggttactgaatttggttgtggttatcgctttaatatcaacaaatcgccaactgaaccgctctctaaatcaaaaatacctgagcccgctattaccccttttctagcgtcgattctggggcgtgataaagctgtgcaggaattatgcgccttattggatcaataccgtctggtgacgattacaggctcagggggcgtgggtaagactcgtctggcatgggaagtcgtcagtcttacacacacgcattttcctgatggaatatgtgtggctgaactggctcatatcaccgaagcatccagcttgctatccgttatttcacaagcgctccatcttccattagctgccattcataatgatgccgattcacggcaacagcttgcacggcgtcgatgtttactgctgattgataactgtgaacatgtaattaatgaacttgaaccagtgattacgttgctcctgcacctggctccccatatcaaactgttgttgaccagccaggtagcgttgcaggttgccggcgagcaacaatatctactaccaccattacaagttcctgagagcgaagaggctgatacccacgagttactgaatttttccagtgtccgcctctttatcgaacgcgggcaggcaaatcgacatgattaccatccatcagccagcgaactgtctttgattggcgagttatgccgtcatcttgacggtttgccgttggcgattgaacttgcggcctcccgtctgccagtcatgagtgtcaaagagatctatagccgactggaagaccgtttccagctattgagcaatacgcacagatctctggagcccagacatcagaaaatactgaccgcgctggagtggacttatcagttgctcaacacacgtgaacaacgattattttgctctctggggatctataccgatatgttcagtgtgaaatcagtaagcgaccttctgctgattaaagacaagcatcgctggcaggttgttgacgatctgcaaagattactggctttatccctgattcaagtcagtactcaggtaccagagacccgtttccgcctgctggaaaccatgcgccagttcgcatgcgataaactcaggcaacagggtgaatatactgttcttgaggcccgttttgccggttattataaagttctggtagaagaggcccaaggtgattggtttatgctgccaacgggacagtggcgtgaacgttatagccatatgcttaatgatttgcggagtgtattacagcaaacgttgactgagggggccgatccttctaaggggcttaagatattacaagcgatgacccctttttggattgaatattcactatacgatgaatgtcagcgccatatttatcctctgctttatgaaaatacttcgcaggtagtattaacgctacgccagagaatgaatctcagcgctgtagcaggtaaggcgtcaacctgggcaaaaggccctacgcctgaaacacattcagcctggaaaaccgcgctgacaattgcagaaaagctcgacgacaaagaaatacgtttacaggcacattacggattatggttgtattatctgcgtactggcgagttggataaagcgcttgagcatgcgcaatctatgtgcgagctagcacggtccattaccgacgaggaggcgatggcaaccgggctgcgtattctcggtgtatccctgcattttttgggccgtcatgatgtcgggcgtgattatctccagcaatctcttgattggtatgaacatggtgaattaagccactctttccgttttggtcttgatcaagagagcgccggtcaggcctttctgtctcgtttactctggttacagggtgagtataaggccgcgaaacagatggcatggcgcggtgttaaaaaagccgctcgtttgcagcatgtctgttctctttgctgtgcactggctgaaggcgcttgtatgacagcagcactggatcgtaatccgcgttgggttataaaggccgcaaactggcttattcatctggcaaaaaggcatgatttatatttctggaagacatacggcgagctgtttcttgtttgggccaaacagttcagtcataccgatgttagtcaaaccacactgtttagctcgttgcgggcgatgggattagattggcaatattcacccttgttgtcagaaattgataccgggttatcgctgagagccacccgccaggatcatgaaaactggtgcacgcctgagctgatgcgtctttctgccactcaattacctcctcggaagcaacgcctgctgttggagaaggccctggacaaagcgcgtcagcaacaggctcatggctgggccctccgtattgcttattcattggcgacattgcaggctgaagccggggaaaaatgggctgctaaacaattgatacaggacgctttacatgatgttgatgactcagacaatgcgacggatgtaagaagtgctattgcgctatgtgcccgaataggggcctga

SEQ ID NO: 236871 - DNA, 585 bp, Klebsiella pneumoniae; identical to SEQ ID NO: 85412

SEQ ID NO: 236872 - DNA, 210 bp, Klebsiella pneumoniae
atgccggatgagatcgaccgcgatcaggagttcaatgaacaacgactggaagagatgattgaacagagccgtttcaaaccaggaacaacaccatcattattccactgccgtttatgcggtaaacctattcctgaaaaacgacggcaggcactaccaggcgtaacaacctgtacggaatgtcaggataaacttgaacgccatcgttgttaa

SEQ ID NO: 236873 - DNA, 234 bp, Klebsiella pneumoniae; identical to SEQ ID NO: 158860

SEQ ID NO: 236874 - DNA, 663 bp, Klebsiella pneumoniae; identical to SEQ ID NO: 85411

SEQ ID NO: 236875 - DNA, 684 bp, Klebsiella pneumoniae
atgtctgatattcagaacattgttaatgtttcccgctcttttgaatccatcctgctggaaaaggaagagcgttcccgaagaaccgcctggcgggtggccgctgccggactgattctggccgcaatggcgattgcggccattattattctgctgccgcttaaaaccaccgacactgaattatggtcagtggataaacagaccgggcgctatgaatatatgacccgcgtgaaggagcgggatatttcttctgaaaaggcactggcgcattcactggcagcacactatgtcagactccgcgagggatataattatttctcccttcagcgtgattatgacgacgtgcagttatttaacagcgacagcgtgaaccgggactatctggacgggtttaacggcgaccaggcaccggacgtgatttttaacaaggcggaatatgttgttgatatcgacattatttccaatgtgcatgcgcctgccaccgggccggataatctggcaacactgcgtattaagcgcacaattcgtcgtattgctgataattccgtgaaaacggatgtatggaatatccgcctcacttaccgctacgttccgcaccggcaactgaccgacagccagcgcgaagtaaacccgctgggctttatcgtcaccagctaccagcgcgacaaagagctgaggggggaatga

SEQ ID NO: 236876 - DNA, 906 bp, Klebsiella pneumoniae; identical to SEQ ID NO: 101327

SEQ ID NO: 236877 - DNA, 2004 bp, Klebsiella pneumoniae
atggctaacatgttaagctccgtatttgccaaaaatcgtacagaagagtttcctgatgacgtatattcaaagtatgttcttcctataaataatcatgaaattgatattagtgatgcctcaaaggcctgcgtgatcgtaggagggagagggtcgggaaagacgatgtatttaaaatactattgctttccaacaattttgagttcaaatagatctgatattgatttaaaaaatttgaagaacctagggctttattggagacctgatacatcatttacacaacatatatcacaaaattggcttggacaatattggtcaagtgcatttaacagctatatgacattgtctatattaatagaatataataagttactccagacgttgattaatcataatcaactatcagaaaattctaaaatatcgataaaaaatatcgaaatccccgaaagcataacaaaccaattatctgttaaaagtgataaaatttatttatttgaagcaaagaagatattacaaaattcattattcacattatgcaactggatcaactctccattcacagaaacacctcctttttcgttaaacacaaaaggaactttgtcacttattgctaatgagctaaatacagctgttagtgaacttgaaaacataacatatcatatattcattgacgaatttgaaaatcttacagaatcgcagcaaataataattaatacattaatgaaacatggggaaaaacagttaattttcagcattgctcataagaaaaatgccataatatctcatgatactttaggcaatgaaaaaattgttgaaaggaatgattatagaacaattgatttggaaaaacattataataataattttgatgtatttgctggagaagtattggctttaagactggaggaattttttgatcaaaagcaacttaatctttttgttcgtaaagaagaaaacctagaatacagacaaactcatgattatttgaaagaaataaggaatttagctgaaagatttttgccaagcttaacgtatagtgaaatggctcaaaatattttcagcgataattcactttatgataagttattagcaattatagccgatgggctggttttgcataaaaaaacaaaagtattaaatgcagaacaatttattgacataaaatttcctgaggccagtttagttaatgctgccatattaaatagaaacaatacattacctcatgttttgctagaacaattcgaggaatacaaaggaggaacatcaaataaatatcaacagtggattcataattatttggtaggtgtaattcttttaatatataaaaaatcaccttcaaaagattgtcctttttattccggttacaaacaatacgttctactctcaagaggtaacataagacattttctggagttatgtcatcaatctgtattgttgaatgagcaatttaatgccaagacttcctcgagaaggcttgaccaaatccccgtaaatattcaatctagggcaacaaaaaaaacaagcggactagaattagaaaaaatatctgatttaggttcacatggctctcatttaaaaaaaatagcaactagattggggagaatatattcatatagccaaactagaaaaagtcaaagtgaagtagaaattaatcatttctctctggatctatctgatgaaacagaactaaacgaagatactcgcacgttacttaatgaagcaataatctggtctgtccttatcgaagaacatagtactaaacaaaaaaactcagaatctttagaggttaaggattatgtacttcaccctgtattatccgcacattttgggataagctacaggaagaagaaaaaattaaaattaaacaaagaaagtttaactataatatttactgctgatgataataaattcaatagattattaaaaagctttattaccaagtgggatttagatgaagagcctttagaaaatacaaatgatgtggtaaaacaactggggcttttatga

SEQ ID NO: 236878 - DNA, 915 bp, Klebsiella pneumoniae
atgatcacaataaatagaataaggcaaaaccctactatagattcatgttgtactgaagaatatgatgttttcttttgtggtaaagcaattgatgaacgaacaaatactgttttaaatcaaataaaagttaccccaaattatgcgattacgtttgataagtcaaactattcaataacgataggttcaacgcaatataaaatattcagattacaagaattcttcatttcatccgatatcagtagagttttaattgattcaacttcactaggcttccctgaacttctatacctattggattccatgaataagtcaggaaaacatttatattgcactataatatatgtagagccgaaagaatatgcaaaagaagtatctaaagatggtgatgacgaatttgtactgagtgacaaacgttatccatttattgcattaccggcttttgctttagataatcaatctaattcggatgataaagcaactctagtatctttcctgggatttgaaaattctaggttaggtcatattttagagcatgatgatggtgccagttataaaaaactattggctcaccttgctattcccgcttataaagcaggatgggaaaacatttcgttaaaacggcatatgaaatattttaatatgttgaactcagaattaataacatacccaggatctaatccctatgcagttaatgaactccttaatgatattatatctgaacataacaaaattgttataacatctttaggaacaaaacctactgctatcggaatttgtgtttttctaataaataacatatcaaaaaataacgtggataatcaaataggcgcaatttacgacttccccgaaaaatcagctaatcgaagtaaaggtattgggcaaatttactcatatgaattagaaatatataattag

SEQ ID NO: 236879 - DNA, 1080 bp, Klebsiella pneumoniae
atgattgagcagtcgtacccacaaagttgcctagagttaagtgcaggagagggggctctaatcgatgcattggtgaaacgttttccagatattaaaataacggctgcagatattgatgcaaagaatgttgagtttctcaataataaacatcctgatgctgtttgttattatatcgattcgaccactccagagctatttgctcttgtgccatgtgaatcatttgatgttgctgtatgcaatccaccatttaaattcatagaagttaatgattatttattatccttaatcacaaagatgacatcgaaggttattaatgcaaaaaaaattagggcggaaatagtttttttaatcttaaatattatgaagataaaaaaaggaggtgaattagctataattcttccggatatgtttttctcttcaaagtcttttgtttggctaaggtcgtttttaatttcgaatttcgaaattaaaaaaattatcgaatgcaatcataagtcatttaaaaaaacagaagctaaaacacatatctaccacattaagaaaaatgtaccttcaaaatctcaacaattagttttagtgagggattgcactacaatttcattaagttataaggagtttgtaaatgaaaaaataattcctcagaatgatagtattgataattatttccatctttttagaggaaagaaaacgggtaaagaatgtcgggcgtctaaaaaatcattctttcacacttcatcatatagcaatccatcagagtatcaaagaggggagtcgccagtaaatgaatgcttggttaaatctggagatattttgatcgctagagtaggaagtagagttctagggagaactattttgtatgcaggcacagatgcgatattaagtgattgtgtgttttgtttgaggataaatgacccggctctaagagattatattttccaagcatgggaaaaagataaggctcaatggttagattattatgcaacaggaacgtgtgctaagcatattagtctggaaaatttcaaaagctatattagaattaaattgaggaaatatttttcgtcagataagaaattcggttag

SEQ ID NO: 236880 - DNA, 1701 bp, Klebsiella pneumoniae
atgactacaaaccatatcgaaaatctgccagacgatcttgacagctttgagtttgaggaaagagcagactaccttccggacgatgtccttgtacgttggtctccaaataatagccatttttactcagtacaaaaaaaactaacgcaagttggagcaaaactcttggtgggaccgagaggctctggtaaaactcattatatgcgacacgcttatcttgaatgcaggaaaaataaatcacttcctcttccactatatgtgtcgtttaatcattatctacgtctagaaacatacattcatgaaacttcaaatgctatcgagatttttcacacatgggtcctcgccaagataataaatgcatgtcatgaagattatgatattttcccttttgatgatatttctataaatgatattaaaaacttcattatagatattgagaagcagaattatttgccagagcataacaatataattacatcattaaacattgatattgttcaatcaataattgatacctgtgcaaattcacaaaatagaaaaagatccgttctgttctttgatgatgctgcacttaccttaacaaaagaatatatggttgagttttttgatattttcaggagcattaagacttcaagaatatcacctaaggcatcagtatatccaggcacgacacaatatggcccaagatttcatttaggtcaagatgctgaacctgtattaatatggcaagacgttgaacaaagtgaatacatagattttatgtatgcgctcgtcaaggaaagatttaacaaccaagtcgttgaagataaagatataaacacccttcttatttatgcatcattcggaatcccaagagcttatattaatttgataagagcttattctgagtcaaagtctaaaactaaacaagcaaaattcaatcatgttattgaagacagatgcaagtacacctatgacgagtacatttcaattattgataaattacctcaatatggtgaatatattaaatctggatgggaacttttcaataaaatattgatggatttaaaaacaataaattatgaaaacatacaaaaggataaggctaattataaaaaaacagtttcagtcggtattgaagatatggattctgacaaaatagaaagaataattagtttcttaatcgaagcaggtctcctgtatgaatatacaggcacctcgcatggccgcgagagaaaattacgccgctttacaccacattatgctttccttataaaggaaaaaacgttttcaattagccgaggatttagtgcaacgagactggttgaaatattaacatctcgttctgaaaaacatcccttgcgaaggtctgttttttcgttattgtctaaggaacattttgaaaaaatatcgttaacattaccaaactgctctaattgtggtgaaaaacggttatcggacaatcagaaattctgtcataactgcggtaaagaacttatcgatgaatcatcttttcgtttgtgtatgaagaaaaacttacttgaactacctttaacaaaattccaaaaggcagtaatccaacaaactaatttcaaaacagttgaggatgttatttcatctaaaaacactgcgacagaatttatgaaagttagacaggtcgcgcagaaaagagctgcagcattagaatttaaagttcgctcttgggttaacgagtttttagcttaa

SEQ ID NO: 236881 - DNA, 855 bp, Klebsiella pneumoniae
atggcagaaaaaatcatgaataacaataaattttcatataatatatctgggcaaaaaatcacgccaaacattaatacaattaatttttttgatcaaagttatcaagaacctcaattttctgctatagatatttacaatagcaaaaaaaacgttcatatcagattactaggtgaaccaagcgaatcagatgaatggaaattgcttgtaaaccttatcatgctaggatttatatcattagttgaaagctattgccgttgtattatacgcagagtattgattgttgataaacaagcaaggtcattcagtttcaaaaataacgtaagctatgctgcagctgtttatcatgaaaaaagcattttaccagaagctttattagaagatgccacattcatctctgaatcaaatatacttgacaccattaaggtatttaccggattacgtatagatagacaaaaatcaccatctgtaatatctgctttgcagaagtatgaacaagtatgccaactacggcattgtatagttcaccgttcaggtttattaggtacaaaaaatgctttaaaacttggccttgaacaacattatacttttttagaaaaaccaattattattagttatgatgcaatacagtctattatttcagtatgtgataatgttgtaaaagaattaaatgatgaaattttcaacctccttcttgatgggattgctcaacaatttgaatggactggagaccttagaaaagataaaaaaacattctcaaaatattttgatgttttttattcttcaagcgcgaatgctaataaatctgctgaattaaaaaaatgttatcgttctttttgcagccattatggtttttag

SEQ ID NO: 236882 - DNA, 123 bp, Klebsiella pneumoniae
atggataaatcaaaaagccttgatcgcatgctatctttagctaatcgtcttaacgaaattgttgaagaaatgaaagctcgacgcgatgccctgcttgctgagcagaccgcaaaagctgcataa

SEQ ID NO: 236883 - DNA, 378 bp, Klebsiella pneumoniae
gtggcccataacgagatagacgttagtaagcatcagtcttatttgaagttagtagtcgttaacaaccaagatcttggatcatcggcagatgaaatcaagctcaacagtgtgaagattgctgtcattaatctcatagcgtttgttatcagaagctttgaccagcacggaatggatatgctcagcaagattgtagatccatctcttgaagagctagaagagattattaccgagcttgagaaagaagcgcagcagcatgacgacattaacttgaaacaagctctactgctatcgcagatgctaatcaatgacatacgacagaaaaacccagagttatgtgcacaaagctcaaccatgcttagcaacttacaaattttctag

SEQ ID NO: 236884 - DNA, 420 bp, Klebsiella pneumoniae
gtgctggaccttatggttagtgccgggccgggcatcgtgaaccaggagttcgtcgagattctccgttctgttgagtatgagccagctgaagcccgccacatgttcgatggacgtaaggctgaaagcatccggatcatcaacgtcaggggtgacagcatgtccggtacgattgagccgggtgatctgctgttcgtcgacatcagcgttaagagcttcgacggcgacgggatatacgccttcctgtacgacgacactgctcacgtcaagcgcctgcagaagatgaaggacaagctactggttatctcagataacaagagctatgcagcctgggacccgatcgagaaagacgagatgaaccgggtgttcgtgttcggcaaggtgatcggcagcatgccgcagacgtacaggaagcatgggtaa

SEQ ID NO: 236885 - DNA, 225 bp, Klebsiella pneumoniae
atgatttttctcaaattgacccaaaactcaacggtagagtttcaggggaaatatggtcgtgaatctgaaaccgtatatgactcggtattcattgcgccagaccacatagaaagtatgaccccagccggccttacttatctcaggatggcctctggcgagcgtattgctgtgcgggaaaccccggaagaaatcatcgccatgctcgccgaaggagcagccaaatga

SEQ ID NO: 236886 - DNA, 207 bp, Klebsiella pneumoniae
atgagcaagcctaatcacgtttatatcgaggtatctcataaccagagcggtggtctgtctctctgcgtcagcaatgacgactatggctatcgtatttcgggtgacaaagttggagggtgcaaaacgctggcgcgctttgaggtcgacgccggcgagcttatcgaacaaatccgcgagcatgcaaatacagagggggccgacaaatga

SEQ ID NO: 236887 - DNA, 309 bp, Klebsiella pneumoniae
atgagtaacgtaactaaaccaaccagcaagggtaaatttgatggggcagttgattacctttgttctgatgaggctcgctttctggttatgcggggcgactatagcgaagcagatattatccaggcgtctgttaatcaggatgtggttgatgctgaaggagcggaagattttgcttccagcgctcgctattaccagtgttggtacaaagtcagtccaattggtgggcaggaaggatattcaggctggcatcatccacgtgatacgccttgtcgcggtgcgtatttcgcatctgttctgcagtgggattaa

SEQ ID NO: 236888 - DNA, 1155 bp, Klebsiella pneumoniae
atgtctcacgattataatgttggaatagtagcagattggttagttacatatgcaggtgctgaaagagtaattaaagaattgattgatttgtatcctgaatcaaaactgtactccttggtggactttttatcacctgacgcaagagaattaatgggaggaaagcatgcaacaactacttttattcaaaaaatgcccttttcaaaaaataaatatcaaaaatacttacctttaatgcccttggctattgaacaactagatgtgtcatcccacgatgtggttatatctagtagccacgctgttgcaaagggagtattaactggcccagatcaattgcatattagctatgtccattccccaatacgttatgcttgggatcttcagcatcaatatcttagagaggcagctttagattctggtattaaaggtattttggcgaaatatattcttcacaaaatgagagtttgggattcaagaacttcaaatggggtagatcactttattgctaactcccattttatttcaagaaggattaaaaaagtttacggacgagaagcagatgtaatttatccacctgtagatataaatagattcccattatttgaagaaaaagaagatttctatcttacagcatcaagattagttccttataaaagaattgatcttattgtcgaagcatttagcaatatgccagataagaagctggtagttatcggtgatggaagtgaaatgtcaaaaatcaaggctaaggcaaaatctaacattgagataatgggatatcaatcctcaaatgtcatgcttgattatatgcaaaaagcaaaagcttttgtatttgctgctgaagaggattttggtattacacctgtagaggcccaagcatgtggtacaccagtaatcgccttcggaaagggaggatctttagaaacaatcaggccattaggagttttaaaccccacagggatattttttgaacagcaaacggtaaaagcgattattgaatccgttgagtattttgaaaataatcaacataaatttgaaccaaatatttgtagagcgaacacatttcgcttttcttctgagcgcttcgataccgaaatggaaaattacattaaccaaaaatggatgaatttcaatgaaagaaaaaaaatatcttattga

SEQ ID NO: 236889 - DNA, 1101 bp, Klebsiella pneumoniae
gtggaaatatatataataacaatcactttatcgctgttcttatcttttgttggaatgcattgcaaaacaagagtgctccaaaaaatatgtatcggacttatcgtagttatatgttcgttaatgccaggactaagagatattagcgtcggtacagattctttgatgtatgctaattttcttgttgttgatagatcgtatcatgactggctggtcagcggcatagcaatcgaaccaggtttcgtattcttaattaaattatatcaatttattggttttacgaattatgcatacttttttttcggtgttgccataattttcaactatttagtaatttctactatatttaagttatcacctaatccacttatatctgtattgtctttattaacttttagtacaatttattttttccatttcaatgtcatccgagcaagtttggctctggccgtatttttatattccgtgccttatatattagagagaaaatataaaaaagcctatgtaattattgcaatatcagtattgtttcatatatccggattgatatttttatttatccccttagcatataaatatttacgtaaaaaaccattattagtaacttttggttctatagcttttatgggggtttattctgcttcttcattaatacttagttttcttggtaatctaattgggacaactaaatatagctcctatagcgctgagagtaacattggtggtggtttttttgctatttatttcatattagctttattatctattttctcgttaattaacagaaagatccgagaaaacgatcttcatctattttgtgtttatttcatttgtatgtcagctttgacatggttctgtataatttttttagggttaagatatgaggggccaggacgagtagtagtgtatttctatatcggcagcatttttatattctctacgctgcttcaaatgttcacttacacttctcgattggtattgtctgtattaatattagctctatgtttggtaatggcatattatatatttgtcattaaaggagtttatggcgtattcccttatactttcaatactattataactaaaacatttgaattcctttaa

SEQ ID NO: 236890 - DNA, 843 bp, Klebsiella pneumoniae
atgaaagaaaaattagttagtgtctatatacctacttgtaatcgtttagagatgctcaaaagagctattcaatctgtcttattacaagactataaaaacattgaaatattaatatgcgacgatagttcaacagatggtacagcagattatgtaaacgaattaattgcagaagggaagaatattcgttatttttgtacggaacgccaatctggtgcatgtgcagctcgtaatatggggatattttccgctaagggtgaatttattacaggcttggatgatgatgatgaatttatgcctgacagaattagttcttttgtatctgcttgggatgaaaaatattcgttcctatgtagtgattatattgataagtatgcagatggaaatgagaaaagattcaaacaaagaagacataagttaacacttaaaggtctgttattagaaaatcttgcgaccaatcaagtatttacattgactgagcgacttcaggcaattggtggatttgacttaagggcaagacgttttcaggattgggatacttggattaggttatgctataaatatggtgatttcaaaaatttatcgaaaccattatatattatgcatcatgatcatgctattggcagtagccgagtaactagcagttatccagcgaaccttgctttgctagatttaaaaaatagaaatatagataaatactcatcatctgagctatatgttattaattatttaattaagtatcatgcaggcacctcaaatatactggaagcagttaaagcatctatattagcaaaaaatataaaattcctaatcaaggatatatttaaaaagttagggttcttgtga

SEQ ID NO: 236891 - DNA, 549 bp, Klebsiella pneumoniae
atgatctccggtcccgggatcacccgccacggtaaaatcgacgcctcgacgatggcggtgtatgacgtggcgccgacgctatatgagttcgccggcatcgatccgaacaagtcgctggcgaagaagccggtgttgccgatgatcggcgtcagctttaagcgctatctcaccggcgaagtacaggagccgccgcgcggcaactacggggttgaactgcatcatcaggcggccagggtcgatggcgaatggaagctgcgacggctggtgccgcgcggcctcaccgccggcgacgcgccgtggcagctgtttaatctgcacgacgacccgctggagacgcatgatgtcgcggccgaacatcccgatcgggtcaaagccatgagcgaggcctacgaggcatttgctaagcgcaccatggttaccaaagcgcagggcaaaatgatcgactacgtcggtatcgatagcaaaaccgggcgctatctggcggtcgaccccgccaccatgaagccggtgcctgcgccgcaggcgatccctgtgagcgagatccattaa

SEQ ID NO: 236892 - DNA, 204 bp, Klebsiella pneumoniae
atgcctcattttgttcacatctatgttgaaattagtgatgttaccgagctaaggactctagtaggagtagagcggccatattgttcgtctgaacagcctgtagacagctctattattgagacatggtatttttcgtggtatctgctaagtggtttgtttcaacgcattgatttgtttgaattttattttctcattgatagctga

SEQ ID NO: 236893 - DNA, 486 bp, Klebsiella pneumoniae
atggtcatctcaccaataacgctgaaagcggcgcaggcatttatcgcacaacaccatcggcacaataaaccgccacgcggccacaaattcagtatcgggctgaaaaatgccgagggcgaactaattggcgttgcgacggccggtcgcccggtagcacgtcactttgacgacgggctgacaattgaggtcaatcgcacctgcaccactggcgagcgtaacgctaatagcgtcctgtacggcgcggtatggcgcgctgcccgcgcaatggggtatcaccgctgcatcacatatacccaggctgatgagtccggcgcgtcactgcgcgccgctggttttgtgcgcgtcaaagagttaccggctcggcctggctggtctgactcaagcgtggcattgaaagacaagcgcgacccggttggaaatggtggcgttcaccgcgtgctctgggaaattcgtagcgccgctggcatcaaggtggaggtgaaatag

SEQ ID NO: 236894 - DNA, 144 bp, Klebsiella pneumoniae
gtggactcttcactagaatacgcctgcaaacgcattgtatattttgaacagttaatgctggcggatgtgcaggaaattatatggctagccgaggccgcgattttttttgtcaaaggcaacggtaacaggtatcaatggcaatga

SEQ ID NO: 236895 - DNA, 1497 bp, Klebsiella pneumoniae
atgaagataaaaatcaacaatattaaaaatatcaagaatgcagatatcgaactccctatcgaaggaggcctgtatagtttagttggtggcaatggatgcggtaaaagcaccttgatgttgatcatgtcagttctattaagttccaaacgtttcaatatgctccaagatgaagattttgatgataactcaactatcgatgtaactatttccgctgatgattatgaggaatctaaccattggtttgtaaaaaaaagacagagaaataatgaaaatatgtggtggtgctctagcagaccattatcatacaaaggggtttatgaaggtagtttgttttatggaactcgcttcagagactcgactattgttgataaactactgcgaaataaccaaataaaagatgaccaaattgtcgatgcattcgattacgtcaaaaacaacttaagctatatacttcatggagacttcaatcactacaaagacatgaagaaaattaaaaacaaaaacatctccgaaaacttcgaattatctaacttaccttatttcatgacaacccaaaaaggtgacctgctaagtcaatatcgaatgagctcaggagagtgccttctaatctcacttctaaattatatttatcacaccctgattaaccaaggtaaaaacagaagcataacagatagaacttttttcatccttatcgacgagatagaattagcattgcatcctattgctatttctcgtttaattggttatttgaattcattattagaatcataccctaaattatgtgtatatttaacatcccattcaccggaagtgattcgtgctcttaaaccacagaacatgtacttaattaataacaacgaaggaacgttggagttagttaacccttgttttccaagctatgctattcgagaggtctaccgtcatgatggctttgattatctaatattagcagaagatgctttggcatcactagtgattgatagtgttctctctgatacaggtttaaaaaacagcaggttaatacacatatcacctgttggaggatggcaaaatgttttaaacttgcatatggatttattaaggaacaatgttataggtgttaataagcaaataatcagtattttggatggggatgtcataactgatgtttcaaagaaagatgaatacaaaaacttagctaaacttttcttaccgatacaaagcattgagaagttcatattcagcattgtattcaataaagaaagcgaaagattaagaaaaacaattaatgataaatatttcaccatcaaatcattagatgatcttgcggcagagcatcataaacaatatcctggctcaccaaaaaaccctgataaattattttactttagggttaagaaagaccttgaaagtagaaacataaatgaatcctattttatcagaaacttgagtgaagacattaaacgagaagtagactttactgctttcggttcccaactgcaaagactactttcttaa

SEQ ID NO: 236896 - DNA, 228 bp, Klebsiella pneumoniae
gtgctgcggtatggcgctgcgtttttcaaggatccgcagcaggaaaaagcgccgcacccgccgccaggcgcggaaggcgccgtagtaaaacagcgccagcagcagccctccggccagggctttaccggcggagatgaacagatagcggttgttgaactgctcctggaggctggtgcgctgggcttccatacgcgccagcacccgctgggctgcctggtcgagggttaa

SEQ ID NO: 236897 - DNA, 369 bp, Klebsiella pneumoniae
gtgcccgaaagcctgctggcgttgccggacaccaaggatgagttgatccgtcactacacgttcagcgaaagcgacctctccatcatccggcagcggcgcggcccggccaatcggctgggcttcgcggtgcagctttgctacctacgctttccgggcgtcatactgggcgttgatgaaccgccgttcccgcccttgctgaaactggtcgccgaccagctcaaggtcagcatcgaaagctggggcaagtacggacagcgggagcagacccggcgtgagcacctgatcgggctctgttgcaaagattggcggcagtcagaggtaggctgtcgctctgcgccgatcaggcggctgctgcgaaatggtggttga

SEQ ID NO: 236898 - DNA, 441 bp, Klebsiella pneumoniae; identical to SEQ ID NO: 124395

SEQ ID NO: 236899 - DNA, 891 bp, Klebsiella pneumoniae; identical to SEQ ID NO: 124397

SEQ ID NO: 236900 - DNA, 267 bp, Klebsiella pneumoniae; identical to SEQ ID NO: 124398

SEQ ID NO: 236901 - DNA, 531 bp, Klebsiella pneumoniae
atgattaattcaaatgagttaagggctttgcttacatacgataaagatactggagtttttcgcaggaatacatcatccggtggtcaggaaattggcagcattgctggcacaatttctaagtatgggtatataagaataaggattaaaaataaagcatattttgctcaccgccttgcttggctgtatgagtatggcgtgtggcccgaaaatgaaatagaccacataaatggtgaaaaatcagataacagactgataaacctaagagaagcatcaagaactggtaataaccacaacaaaaaacatcaaaaaaacagcgcatccggagttaaaggtgtttcttggagcaaaaaagataagagatggcatgctcgatgcagagcaaataaacaaactgtttattttggttcatttatggaccttgaagaagccatgttagcagtaataaaagctcgcgagaaatatcatggtaagtttgcgaataacgagattgttaatattaatactttgcaggaaaagtcatgtcagaaataa

SEQ ID NO: 236902 - DNA, 411 bp, Klebsiella pneumoniae
atgttctctctgctgaataacacgacgctgaaatacgttggtttcggtctgggcgcggctgacagctccaccgcgttccagtccctggctgcacataacattaacgccggtagcacgctggcgggcattccgttcaccggaaaaatgttctctcaatacggtgaatatgcgctgatgatcaccctgaacaacggagtgctgaaagtatacagcggcatgaccgatagcccggaaactctactgaccggatgtccggcatttgattacgtcatgctgggcagaaacagctcggtttctggctctacggtgtcaaactcaggtttctggggcggctggctgcagaaagccgtactgttcgattcggcgctgagtgacgctgatatgattgcgcagtttgatttgctcttataa

SEQ ID NO: 236903 - DNA, 399 bp, Klebsiella pneumoniae; identical to SEQ ID NO: 224269

SEQ ID NO: 236904 - DNA, 519 bp, Klebsiella pneumoniae
gtgtccggaaacgccagcgcgtcgttttcatcgacccttagcgaaggttaccataccttaagtaataacgtagcgcagacctggaatgagccggagcactatgatttgtacgttccagccatcacctggcatgcgcgctttgcctatgacaaggaaaaaaccgataagtataacgaacgtccgtggggggcaggtttcggcgtctcgcgctgggatgagaaagggaactggcatggcctgtacctgatggcgtttaaagactcttttaataagtgggagcccatcggcggctacggctgggagaaaacctggcgcccgctgacggaccagaatttccacctcggccttggctataccctcggcgtcacggcgcgcgataactggaactacatcccgatcccggtgatcttgccattggcgtcaataggttacggtccggcaactttccagatgacctatattcccggcacctacaataacggtaacgtttacttcgcctgggcgcgcttccagttttaa

SEQ ID NO: 236905 - DNA, 1374 bp, Klebsiella pneumoniae
atgctgacgtttattgagatcctgatagggattgtggtcattgtgggcgtagcccgctatatcattaaaggctactcggccaccggggtgctgttcgtcggaggcttaatcttactgttcgtcagcgccctgctgggacataaagtgttaccgggtaataccgcgagcaccggctattccgctaccgatattattgaatacattaagattctactcatgagccgcggcggcgatctgggcatgatgatcatgatgctgtgcggcttcgccacctatatgacccatattggcgccaatgatatggtggtcaaattagcgtcgaagccgttgcgctatattaattcgccctatctgctgatgattgccgcctattttgtcgcctgcctgatgtcgctggccgtctcctccgcgaccggccttggcgtactactgatggcgacgctgttcccggtaatggtgaatgtcggtatcagccgcggggctgccgccgccatctgcgcctcaccggcggcgattatcctctcgccaacctcgggtgacgtcgtcctggcggccaaagccgctgaaatgccgctgatcgactttgcttttaaaaccacgctgccgatctccatcgcggccattatctgcatggcaatcgcccactttttctggcagcgctatctggataaaaaagagcacatttctcacgagatgctcgacgtcaacgacatcaccaccaccgccccggcgctgtatgccattctgccgtttaccccgatcatcggcgtgctgatctttgacggtaaatgggggccggagctgcacattatcaccatcctcgttggctgcatgctgctggcggcgatcctcgagttcctgcgcggtttcaacaccaaaaacgtctttagcgggctggaagtcgcctaccgtggaatggccgacgccttcgccggcgtagtgatgctgttggttgccgctggcgtctttgcccaggggttaagcactatcggctttatcaacggtctgatctcaatcgccacctccttcggctcggccagtattattctgatgctggtgctggtgatcctgaccatgctggcggcgatgaccaccggttccggtaatgccccgttctacgccttcgttgagatgatccccaagctggcgcactcctccggcatcaatccggcctacctgtcgattccgatgctgcaggcttctaacctcggccgcacgatatcgcccgtctccggggtggtggtcgccgttgccgggatggcgaagatttccccattcgaagtggtcaagcgcacctcagtgccggtgctcgttggcctgctggtggtgatcgttgctactgaaatcctggtgcccggcagcgcgctccactaa

SEQ ID NO: 236906 - DNA, 228 bp, Klebsiella pneumoniae
gtgtatctcaacgtcggcaatttcctgctgggcgtagcggcgatgggtctcgacgccgtgccgattgaaggggtcgattttgcgatcctcgatgaggaatttgacctgaaagcccagggctacaccagcctggtggtggtcccggtcggccaccatagcgtagaagatttcaacgctaccctgccgaagtcgcgtctgccgcagtcgacgaccattaccgagatttaa

SEQ ID NO: 236907 - DNA, 783 bp, Klebsiella pneumoniae
atgaacgcactatctgttttctcgtttcaggaaaaccaccccgttcgggtggttctggttaatggcgaaccgtggtttgtggctaaagatatctgtgatgcattgaaactattgaactcacgaaaagcattgtcatcgcttgatgatgatgaaaaaaataccgtaactttaagtgacggtaatcgtgggaatcctaacatgtccattatttctgagtctggcctgtacactctgatcctccgctgccgcgatgcggtgaagcagggaacgacggcctggcggttccgcaagtgggtcaccaacgaggttctgccagctattcggaaaagcggtgaatacagctacgtcgaacccgcgccaaaaagcgccggtgaaccattggactggcggcaaaaggaagaattacgcggcctgataaacgatatagcccaaagttttcggtaccacaacgcatggaaaagtggtgtatggctggcgctacgtcgcgcctgcaggaatccatcccccaatccgattacggttgacgatctcccggccatcactgccgagttgcgccggatattaacgtcggcagaaaccgcgctggacaatatgcggacctacgagcgggaatttttgcgtgaggtggttcgtggggcgcgtcggagtgtgtcgcgagaggaattatcaatcatcgaccttggctcagaggtggagaaggtgctgccagcgcatttcgagctggccatcaataaactggaggccttatccacaaaattagaggctcctgccgtctcttcctga

SEQ ID NO: 236908 - DNA, 165 bp, Klebsiella pneumoniae; identical to SEQ ID NO: 199860

SEQ ID NO: 236909 - DNA, 336 bp, Klebsiella pneumoniae; identical to SEQ ID NO: 199854

SEQ ID NO: 236910 - DNA, 288 bp, Klebsiella pneumoniae; identical to SEQ ID NO: 229143

SEQ ID NO: 236911 - DNA, 309 bp, Klebsiella pneumoniae; identical to SEQ ID NO: 180595

SEQ ID NO: 236912 - DNA, 492 bp, Klebsiella pneumoniae; identical to SEQ ID NO: 229137

SEQ ID NO: 236913 - DNA, 1005 bp, Klebsiella pneumoniae
atggaaaacattgcgctcattggtatcgatctgggtaaaaactctttccatattcattgccaagatcgtcgcggcaaggctgtttaccgtaaaaaatttacacggccaaagttaatcgaatttttggcgacatgccccgctacaaccatcgcaatggaagcctgtggtggctctcactttatggcacgcaagttggaagagttggggcattttcctaagctgatatcaccacaatttgtccgtccattcgttaaaagtaacaaaaacgactttgtcgacgccgaagctatttgtgaagctgcatcgcgtccgtctatgcgttttgtacagcccagaactgaatctcagcaggcaatgcgtgcgctgcatcgtgtccgtgaatccctggttcaggataaggtaaaaacaaccaatcagatgcatgcttttctgctggaatttggcatcagcgttccacgaggagctgccgttattagccgactgagtacccttcttgaggacaatagtttgcctctatacctcagccagttattgctgaaattacaacagcattatcactatcttgttgagcagattaaagatttggaatcccagttgaaacgaaagttggacgaagatgagattggacagcgcttgctgagcattccctgcgtcggaacactgacagcgagtactatttcaactgagattggcgacgggaagcagtacgccagcagtcgtgactttgcggcggcaacagggctagtgcctcgacagtacagcacgggaggtcggacgacattgctgggaattagtaagcgaggtaacaaaaagatccgaactttgttggttcaatgtgccagggtattcatacaaaaactggaacaccagtctggcaaattggccgattgggtcagggatctactgtgtaggaaaagcaactttgtcgtcacttgtgctctggcaaacaagctggccagaatagcctgggccctaacggcacgacagcaaacttatgtagcataa

SEQ ID NO: 236914 - DNA, 1005 bp, Klebsiella pneumoniae; identical to SEQ ID NO: 236913

SEQ ID NO: 236915 - DNA, 198 bp, Klebsiella pneumoniae; identical to SEQ ID NO: 199256

SEQ ID NO: 236916 - DNA, 1107 bp, Klebsiella pneumoniae
atggccctgaccggcagcggcgatatcaccctgactgacccgatcaccggaaagcaggtgaccgtgccggcgatagccgggatggcgaaggcatcagatcttaacgcgctggcaaaactcaccggaggaaacaaactcgacggctcgcaggttataaccagcgataatgccggttttatactcggtaagaactcagatctggctctgctcaaaaaacaggggcaaggcgggacaattgccgttggctcgggaacaccgtttagggttcagcgttcaagagcgaccactgtatcaccggcagacacctttgatgacatcctcgttattggcaccaataaccagacgacgttgcccggagatttggttgtcggtggtggtttcgataatacggcaaagggcaagctgtattcccaggcgttagagctatcgatgagcacgccatacatcgactttcatttcaacggcagcatcgccgactttaccgcccgcattatccaggaccggcaaaacagactaaatattcagggcaatgccagcttgttagttaccgatggcaatttaaccgctggctcaacaatgcccggcaatatcgcagtcggccagcaggtcaccgccgcacctgtgcggtctcagatgttgggaagaggcgcttacggcgacccggacggcgcatacgtgcaaatgtacatggaggagaaggtcggcactgagcaccggatcgtgctgtactctgacggtttcggaagaaccgatgcctggctatttcggcctggcggcacaatcaccaccggcaaaggtgacgtcatgactaccggttctgacgttcgtctgaaagacgggtttacagaacctcaggaaggggcctccaggcgcattaatgcgctgggggtatgcgagttcaatatgaaaggcgaaacgcgccggaggcgtggttttatcgctcagcaggctgaaaaagctgatgatctgtatactttcctcggcatcgagcaggagatcgatggcgaaaaattcagggtgatgaatgttgattacacggccatcatcgccgatttggtaacagtggtgcaggatttgattaggcgagttgacgcactagaaagttga

SEQ ID NO: 236917 - DNA, 381 bp, Klebsiella pneumoniae
atggaccgtcagcgtgcagctggtggaggacaaaaatccgcctcggccagactctcgctggcgcaacaggatgtgggggtgagtatggcgaaccttcgcaaagcggcccgaggtcgcgaatgtacagtgcggatccctggttactgcaacggcaacccggaaaccagcgtgttggcgcattaccgcctggcgggtacgtgcggcacaggatgcaagcctgacgatactcaggcggcgatcgcctgcaacgggtgccatgacgtaatcgacggcagaaccaaaaccaccgatttcacctacgacgaattgcgcctgatgcatgccgaaggcgtgctcagaactttggctatatggaaacaagaggggttactgaaagcatga

SEQ ID NO: 236918 - DNA, 387 bp, Klebsiella pneumoniae; identical to SEQ ID NO: 235912

SEQ ID NO: 236919 - DNA, 630 bp, Klebsiella pneumoniae
atgcagcagcaggttcccttccagcagaatcccggcgtggttccacttatccgcctgcacctgcatgatcaccatatcacccggttgcggtggaccatcaaactcacggaacccgcattcataccagcagtcctgataaaaattgtccggatactccttttcccaccacggataatcgacgcggtaatcgtgcagctcgatgccgtgggtttgccggaaatagctcatcaccaggccccagcaatcgtagtggcccagcacgaatggtcgctcgaggagcggcaactcaccacgcgggtggatggtacggagatcgccttctggccagctgataatatgccaggggagaagggtcgcgtcgcattgcgctttatccagttcgctcggctgggtggtggcatcaggatggctgtgaacaataccggtgatcgctccccattcctcaacctccgcataatcctccggcgccagcacaaaattatctttcgactctgtggccaggttccggcaggggaaataacgctccgctcggcccctctgggcgacgaggccgcaggcctcgcgcggatattctgcggccgcatgttcctggatggccttaatcgttttctgacgcatatcagctcctga

SEQ ID NO: 236920 - DNA, 228 bp, Klebsiella pneumoniae
atgtacagcagactgttagccatatgcctgattacgatgttgatcgggagttgcgcgaaaagtttgcccgccccggtagtcgttgattcggcctgcaactgggtgagggtcatctacctgaccgtccacgatattgacgtgatggaccgtcagaccaagcgagacattctggcacacaacaaatctgtgctggccaactgccctaacattaacccgactgctggctaa

SEQ ID NO: 236921 - DNA, 693 bp, Klebsiella pneumoniae
gtggatttagcgggggcgctgcgttactccttcaaagaggtcacgaacatccggctaaatggtgttgatggcgggacaggtttctgcgtcgacaccttcaacatccagttcaacaacaatatgcagactcagcgctgcatcggtaccggttcggcattcgccggcgcaaacattccgacaacctttaccccgtcaggtcaaatcacgctgtcatggtcaaaggctgcctgggaggtttacaaaaaaacgttcaccggcgaaacggtgccgtttagcttcacgctggagaatgctgaaggcgcctataccttcgatttcccggaagtgcagatctccggcgactggccggatgcggggagcactgacattgttcaagttcaactggatatcaccgcggccaatactccgccaactatcacccgcgtccccaaagtgccggcgacggcgatcagcgttgcgccgggcacttcaactggggccgtgggttctacggtgacgttaaccgccacgcttaccccagctgattcaactgataccgtcgagtggacgtcatcggatccgactatcgccagcgtggtttctaccggacagaaaacagcgaaggtcacgcgtaacgcagccggtactgcaaccatcaccggtaaggcccgcacctttacggcaacgactgaaatcaccgttaccacgccttaa

SEQ ID NO: 236922 - DNA, 267 bp, Klebsiella pneumoniae; identical to SEQ ID NO: 229069

SEQ ID NO: 236923 - DNA, 492 bp, Klebsiella pneumoniae
atgaaagtaactgaacccagactgaatacgctgatcgataacctgaacaccctgatctgtgaggacagcctgctcacgcgcaaggagcgtgaaacgctggtactggccgtcgccgccatcggcgccatgaaagcgcgcgtcggcatgaaaaagcccgcgataccggcatcgtcgaaaccgaaggaagagaaacaggcacctgtacctgacccacgctttccgaatgcccgccaggcctgggtggctgaagaggaaactttattactggatgcgctcgatggcgtcccgaatgatgatattggtaagcatcttttctggctttccgagaaactggggagaacgccgttcagcgtcgcctgcaaaatcgcgtcactaagacatctgacaaatggctggaaagagcagttcagggaagtttcggataaaattcgcttgtccggcctgagcatcagtgattatcttaagcagaacggcacggtccataacgcctga

SEQ ID NO: 236924 - DNA, 768 bp, Klebsiella pneumoniae
atgcgtaatgtatgcgttgtatgggtgcttcataatattcaccctcataaaggagagaatgcgctaacaaataaaataaataatctcatgtgtaaatattcagacttggttatcgtccattcatccgaagcaaaaaattatatttctcgtcacaccaaagctcaggtttgttttttacatcatccgatagaaccaattgcgttagataaccaagattcgtttaatagttgtatcacgtttgatttccttatatggggctcaatagaaccatataaagggattttagaatttttacaattttgctctaataataaaaaagttactgcagattggcgtatcaaaatagttggtttgtgcaaagataaagcgtatgaagaggaagttaagaaatatatatctccgaatgtaatttacgagaatcgtaaaattgagtttcaagagttggctaaagaaattagcttatcacaatttgtattatttccctatacatcatcttctgtatcaagttcaggggcactcatggatagtcttgcgctaggtgcaaacattattggtccttccaaaggagcattcaaagatctggccaaaaatggaatctgctttgtttatgaaagtttagaggatcttccaaatttaaaaaagcgattttctgagattaataaaacagaaattcaattttttgttcataagcattcttgggatgactttgcgaacaatgtttctggtctgatcaatacatcaataaatgagaaatcaaaacatgagtaa

SEQ ID NO: 236925 - DNA, 804 bp, Klebsiella pneumoniae
atgagtaataatgtaagcgcaaagattattattgcaacgcataaacaatatcatttcccgagtgatagcatttatctcccattgcatgtcggaaaagtagataaaaaagatttaggacttaatggtgatgatacaggtgataatatttccgctaaaaatgcttcatattgtgaattgacagggctatactgggcttggaaaaacttatcggaagattatattgggctcgtgcattataggaggcatttttcgtattctaaaaagaattcaaaaaataaattcgaaaatattttatccgaaattgaattgaaaaaattaatacctcagtatgatgttttggttcccaaaaaaagaaagtactatattgagactctttattctcattataagcacacacattacaaggaacatttggattatacgagaaatattttacagtcaaattatcccgattatattgcatcgtatgataaagttgtcaataaaacatccggttacatgtttaatatgtttattatgcgtaaggaattggtggatgagtattgtagatggcttttcccaattttgcttgaactggagtctttaatagactcagtttctctaactgcatttcatagacggttttatggtagagtaagtgaaatactctttaatgtatggctggaacattataagcttacaaatccgaggttgaaaatcaaagagcttaaccatatccacatggataaaataaactggttcaaaaagggaatgtcttttttaagagcaaaattctctaataaaaaatacgaaggtagtttttaa

SEQ ID NO: 236926 - DNA, 1101 bp, Klebsiella pneumoniae
atgaaatatgattatttaattgttggtgcaggactttttggcgccaccttctcgtacgaagcaaaaaagaaagggaaaaaatgccttgtcattgataaacgctcgcatgttgctggtaatatttatactaaagaaataaatggaatcaatgtacatcagtatggtgctcatatttttcatacaaatgataagtttatttgggattatgttcaacagtttgctgaatttaatagatataccaactctccgattgcaaagtacggaaatgaaatttataaccttccatttaatatgaacacattcaataagttatggggggtggtcacacctgagcaagcgaaagaaaaaatagcagaacaagtaattaatgaaaatattagcaacccccaaaacttagaagagcaagctatttcccttgttggtagggatatttatgagaaactcataaaagggtatacggaaaagcagtgggggagagctgctactgagatacctgcatttattataaaaagactacctgttcgttttacatatgacaataattactttcgcgataagtaccaaggaattccagtgggcggatatactcagattgttgagaaaatgctcgatggtattgatgttcttcttgataccgatttcttcgagaacaaggattattatttctccatagcagataagattgtatttactggaatgattgaccagtattacgattattgttatggaacactagagtatagaagccttaaatttgaaaccaaagaacttgacattgaaaatttccaaggcaatgcggtggtaaattacacagaataccaggttccatatacgaggatcattgagcataaacattttgaatttggtgaacaaggcaacacgattattacctatgaatatccatctgactggaataaaggtgatgagccttattatccaataaatgataataagaataatgatttgtatcagaaatatgtgttgttatcccagcaagaagataaagttatttttggcgggcgcctaggaatgtacaaatatttcgatatgcataatgtaattgctgaagcgttaagttgtgcaaatgaaaatattaaatag

SEQ ID NO: 236927 - DNA, 1023 bp, Klebsiella pneumoniae
atgccgatcatcagtgttattttaccgatatacaatataaaagaagaatatcttgaaacttgtattcagtcggtatgccgccagactttagatgatatagaaattattttggttaatgatggttctaccaataattgtctggaggtatgtacaaagttttcacaccttgataatagaattattgttatagatcaacccaatagtggagtttctgtagcacgtaatagtgggcttgatattgctcgtggtgagtggattgcttttgtcgaccctgatgattggcttgaaccagattatttattatcgttatataataatgcttcatcaaacactgaaatagtcatatgtgactgtaatgttttttctaatggagaaaaaagaggaaataattttcttcctgctaattcgattggtgttcttaaaaataaaaatttattattgggccagcttgtaagcaaagttattgctggttattatccacagttaatagggcctggggttccttggggtaagttatttaaacatgacttcatcaaaaaatataatctgaaatttgtacctggtatggttaggatgcaagataatattttttgtttatatgctttctattatgctagtcaagttttttacacaggggagaacaaatataattataggatggaaaataattctgctagctttaaatataataaaaaaataataagccattttgaaaaatattttgaagaagtgaaggcattcattgataaatgcatgagcggaaatgaaagatatcaaaaagcgctagatgctaaaacgttaactagtataaactcctatttattatattatttttgccatgataatcatacaattgaatcagaaaacgatacgctgggtaatttgatgtgtagacaaccatatgcgagtgcacttaaaagggttgatttcacttacttaactacacaagagaaaatattcgttatattgttaaagttaaggctatatggtgttttgaaattaatttataaaattaaaagatga

SEQ ID NO: 236928 - DNA, 483 bp, Klebsiella pneumoniae; identical to SEQ ID NO: 229372

SEQ ID NO: 236929 - DNA, 174 bp, Klebsiella pneumoniae
atgattgactgtgtgagcgaggaaaacaggtcagccatgttctccttaaagcttctcgtccgcgtcagcatgctcgtcaggaagttgcttgagcgctcatgggccgtttcaaataacccgacggccaggctctgcatctccccctgtgaccggtacaactccagcgaagtctga

SEQ ID NO: 236930 - DNA, 483 bp, Klebsiella pneumoniae
atgactcagattaaacgcctttacgccagcagcgggccggaggagatcattgagacgctgcagatctccattggctctgacgtccattatctgtgccagggctacgagggtattacggcaacgacggagaacggcgataccgtaacgtttaccgcctgtgcgatagacattgctctgccggcgcgcaatgcggacggcacgcaggacctcaaatttgccctgtgcaatatcgatggtgttgtgtccacggcgatccgcaatgcgctggctaaccgtctgtctgcatttctgacgtaccggcgttatatctccactgatttagcggcccctgcggaagtgccgtatacgctgaaaatcaagtcgggctcctggacggcgacagaggtgcagatcactgcgggctacatgaatatcctcgataccgcctggccgcgataccgctacacgctccctgtattccccggactgcgttatatcagctaa

SEQ ID NO: 236931 - DNA, 474 bp, Klebsiella pneumoniae
atgactgatatcaactacccacatgacagcctccctatgccattacaggaaggatacggattccagcctgtaagcccgttaaaacgtacccagttaatcaccggccgcgcgcggcaaaggcgagcttatacgtccacgccgacgcaggccagcatcacctggtttatggaaaccgatgcgcagggactggcgtttgagtcctggttccgtgaggcgttatctgacggggctgcatggttcatgatgaagctgcagacgccggcaggcattaagttttacaaatgccgcttcaaagatatatatcagggaccggtgctggtggccccgatttactggaagtacacggcgacgcttgaattatgggaacgcccccttgctcctgccccatggggtaattatccggaatggatcgtcggcagctcactgctggatattgcgctgaataaggaatggccgaagcatgactcagattaa

SEQ ID NO: 236932 - DNA, 132 bp, Klebsiella pneumoniae
atgggcttcttcaatttgctgccgcagcgttttgaactggtcgaccttggacttactgcctttccccgtgccggtaccgccatcgccgccccagggatttccatctccggtctctttggggggcgtgcttaa

SEQ ID NO: 236933 - DNA, 354 bp, Klebsiella pneumoniae
atggtattgatggtgctggtcagcgacgtgatgctctgcgactggctggtgatggtgttttccacctggcttacgcgaccggtcagtgaactcaccgcggacgtgtcagcctttttacccagctcagtattcatcgtggtcaggctgttctgcagactggtgagctgctgcgactgcgaatccagtttaccctcggcagacgtcatccgggtggtcaacccggtgacagtgctttgctcggccttcttactgaccgccgcattcgtgacggccagatcgccgctgagtttcgtcagctgctgcgcctgggtggtgatagccccttccgcagcggtgacgcgggtattcatctga

SEQ ID NO: 236934 - DNA, 1131 bp, Klebsiella pneumoniae
atggaacgcctggaagccgccgaacgtgctgcggcgctggtcgcaaagcccgtgaaagcgactcagcaggcccccggcattattattaagcaggagccgaaacagtacaccggtgctggcatgacccgactggtgatgtctgtcgccgcaggcgcaggtaatctgcaggacgcggcaaaattcgcttcagaagagctgaatgaccagtccgtatcgatggccatttccaccgctgcgggttccggtggggcgctcatcccggagaacatgcaaaacgaagtcatcgagctgctgagcgaccgtaccattgtccgtaagctgggtgcccgctccgttccgctgcctaacggcaatctgacgttaccgcgctcggctggcggtgcaacggccagctacaccggcgaaggaaaggatgccaagacgtctgaatcaaaattcgacgacgtaaaactgagtgccaaaaccatgatcgccctggtcccgatgtcgaaccagctgattggtcgcgccggttttaacgttgagcagctggtcctgcaggatattctgaccgccatcgctgttcgtgaggataaagcgtttatgcgcgatgacggtaccggcgatacaccgattggtatgaagtcgcgtgcgacgcagtggaaccgcctgctgccgtgggaagcgggttccgcgatcaacctgaacacggttgatgagtacctggacaagattattctgatggcgatggatggcaacagcctgatgatccgttgcggctggggtatgtcgaaccgtacctatatgaagctgtttggcctgcgtgacggcaacggcaacaaagtctacccggaaatggcgcaggggatgctcaagggctatccgattcagtataccagcgcgatcccggttaacctgggcgaaagtggtaaggaaacggaaatttatttcgccgacttcaatgatgttgtcatcggtgaagatggttccatgaaggtcgatttctccagagaagccacctatctcgatgcagaaggtaacccagtttccgcgttctcgcgtaaccagtcgctgatccgcgttgtcctcgaacacgatatcggcttccgtcatccggaaggcctggtgctgggtaccggcgtcctgttctaa

SEQ ID NO: 236935 - DNA, 327 bp, Klebsiella pneumoniae
atgggtgtagtcaggattgcgatcggttttattaccgccgccagcattcgtacctgcatcggttttcaaaaccgaagaaatgcagttaccggcagcccattccctggtgagaatgccgcgatcgatcgcgttcgtggcgaaccacagctttgcaaactgaatacgtttgccgagctcatgcagtttcccttccgggaagacttttttattggcgctggtgaatttccagagcgccggcatatcgtattttttgatttcagggatattctcggcggccagaatcagatcctggacggctgcgttatcagtgtccatttccagaactga

SEQ ID NO: 236936 - DNA, 1089 bp, Klebsiella pneumoniae
gtggccagtatcaccagtacccagcatacgcatgcaacggcactggaggcgctggcaacgcagcagacgaccctgacatccagtgtcggggatctcagcgcttccgttcaaaacaccgctaaaaccgtggcggatgtgaatggtacggtgagttcgctgtggtcgatgaaggttgagacggttaacgggaagaatgttggcgcggggattacgctgggcagcaatggtgaaacgagcgacatgatcctctacgccgaccgcttctcgctgtttaaccgtaacaatgcgacggcagtgccggtgatgattgccgaaggcaatgaactgtatatcgatacggcacgtatcaaaaacagttccctgacctcaaccaaaatcgcggacggttccatcacgaacgcgaagatcggcaacgagatccgctcgaatgactttgttgacgggtcacgcggctggcgtatcgctaaggatggctcttcgcagttcaacaacgtgatcgttcgcggtgcggtttatgcgactgacggctggttccaggggacggtatatgcgaaccacatcgagggcgacatcgggtcatttgcgatcaacatcgctcagcaccgcacgcgcaaggtgccgaaggctacatggcagtggtttgagctggcccggttccggcggcagaatttcgaccaggtgatcaatattcgcggtggactcctccagacggatagcatcactatcgacggcggcgcgaaactcagagcggggatgtcctacgcgccaggggatgacggcggactgaatcctggctatctgtcgtatgcaatgcttcttcgtggcacaggcgctacgtctggtggcggcagtatggagctaggcattgagcttatgtatgaaacaggtggagcaacacgcctgttaacggcgcaagagtcaatgaacgtagacaacatgtcatttgtcgtccctgccggtactggcgacgctgttctgcgatatggctgttacctggaccgtaacggacagatggtattaaccatcctctcaagattcgacgccttcgccgcgcgcaataacaacgtaattcgcggttcatcaacctga

SEQ ID NO: 236937 - DNA, 921 bp, Klebsiella pneumoniae; identical to SEQ ID NO: 207001

SEQ ID NO: 236938 - DNA, 459 bp, Klebsiella pneumoniae
gtgaccgggctccattatgactcgaccaaaattcaggcagatggcggctattcattctccgacatgcacatcaacgataacgcccaggatgcgattttaatcgaggctggcgctaacaccctggcggatgttcgcttcgacaatatggatatcaaaaataacggtcgttatccggtgaatgttgccagcggcacctttaccgacctcgacttcacgaatcttcgcatgctgcgaaatggcggcgataccgcgtttaagctggacggcaatatcacgcggggctcgattcatgattgtaagcttcgctcacagaatggcgccgcagcgattaccggtgcagggacgatcagccatttcgacatcgccgaaaaccagtacaccgataccaacagcaaccccatcaatctcaccggcacactgactaatgtcacctacggccgcaacccaggactggagtaa

SEQ ID NO: 236939 - DNA, 459 bp, Klebsiella pneumoniae
gtgaccgggctccattatgactcgaccaaaattcaggcagatggcggctattcattctccgacatgcacatcaacgataacgcccaggatgcgattttaatcgaggctggcgctaacaccctggcggatgttcgcttcgacaatatggatatcaaaaataacggtcgttatccggtgaatgttgccagcggcacctttaccgacctcgacttcacgaatcttcgcatgctgcgaaatggcggcgataccgcgtttaagctggacggcaatatcacgcggggctcgattcatgattgtaagcttcgctcacagaatggcgccgcagcgattaccggtgcagggacgatcagccatttcgacatcgccgaaaaccagtacaccgataccaacagcaaccccatcaatctcaccggcacactgactaacgtcacctacggccgcaacccaggactggagtaa

SEQ ID NO: 236940 - DNA, 459 bp, Klebsiella pneumoniae; identical to SEQ ID NO: 236939

SEQ ID NO: 236941 - DNA, 489 bp, Klebsiella pneumoniae
atgctgaactgtcaggctgagcgtaacggggtgaccgggcttcattatgactcgaccaaaattcaggcagatggcggctattcattctccgacatgcacatcaacgataacgcccaggatgcgattttaatcgaggctggcactaacaccctggcggatgttcgctttgacaatatggacatcaaaaataacggtcgttatccggtgaatgtagccagcggcacctttaccgacctcgacttcacgaatctccgcatgctgcgaaatggcggtgataccgcgtttaagctggacggcaatatcacgcggggctcgattcatgattgtaagcttcgctcacagaatggcgccgcagcgattaccggtgcagggacgatcagccatttcgacatcgccgaaaaccagtacaccgataccaacagcaaccccatcaatctcaccggcacactgactaacgtcacgtacggccgcaacccaggactggagtaa

SEQ ID NO: 236942 - DNA, 351 bp, Klebsiella pneumoniae; identical to SEQ ID NO: 180567

SEQ ID NO: 236943 - DNA, 459 bp, Klebsiella pneumoniae; identical to SEQ ID NO: 236939

SEQ ID NO: 236944 - DNA, 252 bp, Klebsiella pneumoniae
gtgttgttcagaaccgtcgatctcgacatcaatcaggttaaagttttcgaggtagatttcctgcggcgaacggtaataaaacgcggcattcgccagcatcggcatgaataccgcgccgggaacgcagcggatcgtcacgttaggtttcgcagtgatataggtatgcaggcgatatacgccagggcgaaaaacgatttcgccaccatatggcaacttgcttacatagttgactgcggtctgcatctgcagtga

SEQ ID NO: 236945 - DNA, 318 bp, Klebsiella pneumoniae
ttgatactgacattggatgatgtgaaaacccagctacgcctggaactggacttcacggagcatgatgccatgctcacgcaaatggtgaacgccgcgcagcggagcatcgagcgtgattactactgcaagctggtcaccagtgatgaagagctgcaggcgctcccggagaccgtccgcggatttatcgcggatgaagatatccggctggctattcagtttctggtcagcgatgcgtatctgaatggccataccggacagtggctggaaaccgctgcggtgaggcatcttcttttccccctgcaggagcatacgctatga

SEQ ID NO: 236946 - DNA, 372 bp, Klebsiella pneumoniae
atgacaacggcggggggcgtgacaacgttcaccgttacggagccgctggactggtctttcgaaaacccccgcgcactgatccgctatcaggatggctctgcatccgggctgatggtggcgagcagggtgggcgattttcagctgtcagtctcacacctgagcgagtttgatgacccgatgaaggttgacctgtcgtcggcaaccatcgagccgatccgcctggtgttctgcggctcaacgcgccacgtctacgacgccattgtagaggagatcgccccgcagtcagacggaacctgtcaggtcaccgctaaagaatacctcgaatcgttctaccagtacgacgacgccacataccctggcgacgctgcttaa

SEQ ID NO: 236947 - DNA, 156 bp, Klebsiella pneumoniae
atgcagaagaaatgcggttactgccgtaaagcgatcgagggaaaaccagtggtgagcaccctgttgtacctccaggggaaccagctcgcacggaaagaaaaagagtattgctcagaacgttgcgcctcttacgaccagatggcgcacgagggctaa

SEQ ID NO: 236948 - DNA, 888 bp, Klebsiella pneumoniae
atgctagcttacatgctatctcaacatgccaagctacctgtgcctgaagttaccctactttcatggctaaaacaatggttgtcagagcaggaatcgagatgtacagacagaagtttctcggcgcgatttccctggcgagaaactggattatgtcaggagtattttttacaacgaaaactcaaaattgatggaaagcaatttcttactggcccccgttatcagggcggaaatattaataaaccttttattgatattgtaggtatggattctgacctaaatcatactgcattagaactcattagtaaggaatggtcacaactcagagctcagtatgtccgcattcttgtaccaggccagtacttcccgcagggtattcccgaccagtatatatatgccacttctttttctgccccccctgaattcaatgataaatctcttactttgcaagtggcaacatacgaagattttgactggtgttgtcaggccctgagcgatgcctataagcatacatggcagtcagttcgcgaactgtctgcaagcaatttggtagcagttgacgacgaagatttgtgtgaccatatttctgagagagaagtatatattatttatgaaaacgatgttcgcgccgggttgctaatatgccagaaaggaaacatcgcttttctgagaggatatcgtattactgaaaaagtaatacttcctgcttttcgcggtcgatcattgtcagcccgagcgcaacgcctgctgtaccgtttattaactcattccgattcggaactatctttgtatatgggcacaattattccggagaatatcccctcgatgaaaactgcagaaagagcgggacgaacttgcattctaagttatcaatttctacccatctgctga

SEQ ID NO: 236949 - DNA, 237 bp, Klebsiella pneumoniae
atgtggcggcgcgtggcgccttatccggactacgctgttgcgccactcttgtgccgttattttgccgggtggcggctgacgccttacccggcctacaaaaacagggccgcccgtactctgctggtggcatgcccaggcccgcgcaagcgtagcgccgccggacagtcactgcgcctgctgctgcgcctgcgccagctggcggacgatcgcctcgcgccgcgcatccccttccggtag

SEQ ID NO: 236950 - DNA, 156 bp, Klebsiella pneumoniae
atgcagaagaaatgcggttactgccgtaaagcaatcgagggaaaaccagtggtaagcaccctgttgtacctccaggggaaccagctcgcacggaaagaaaaagagtattgctcagaacgttgcgcctctcacgaccagatggctcacgagggctaa

SEQ ID NO: 236951 - DNA, 156 bp, Klebsiella pneumoniae
atgaaagaagataattttgataagtcattagaattaagagagtggcaaaagctatttaaccctaaaaaaacaaaagaaaaacagtcacttctgcttaaagaaaagaaaaatcctacagataatcagttgcttaaagaaagatcttttacatggtaa

SEQ ID NO: 236952 - DNA, 1299 bp, Klebsiella pneumoniae
atgacagcagaaatcgcagttttcaataaatcagcagttgctttagcagcagactctgctgtcacaatatctggtgaagatggtgtaagcaaaatatataatggtgcggataagcttttcgctcttagcaaacaccacccagttggggttatgatatttggctcggccgatttatgtggcatcccatgggaaatgattattaagcaatttagaaaaaaccttactgatagaagccatgatactatagaaaaatacgctgaagagtttttccaatttctttgtacaagcgaaaacattatccccagcgatgtaagagaaaataatttattagacatatacaacaatcgattcttccctgcatttattaatatggtggaagaaaaaagaatcaagccactcattgatcaattcggtcaaaaaccctctactcttgatacatataagattatcgaagaggaagccaattcaatgctcattgatctagctagcgagcctttttttgtagggtttagtgaacatgacattgaagaaataattaggtttgtatttcctattgctaaagatacctgtgatgaaaaactattccaagagccagaggttgaaatcccacaatctctttatcaagttattggagctttatttgcaaccataacatgtaaacgttctaattttggaagaaataccggtgtcgtttttgcaggctatggtgatgaagaattcatgcctgctgtattagcttatgatgtattgggtttctttagaagtaaattacgattttctcctaatttagaaaagagttcatcgggtggtttatgtggagtaaaagcatatgcacaggaagaagaggtagaaacttttcttcatggtataagcaattcattaaaagaatttatcctttacggtttcgaatatgaatgcgacagaataagagagaatatcagcgaagaattagcctcacttacactttccaatgaagaaaaaaaagcttttgaagacactatcatccaaaaaatggaaagccgtaaagacatatatcgcaaggttattaacaatcagataacagacaaatactcctcgaaagtcacccagatgattgaatttttaccaaaacaggacctagcctacatggcagagtctttggttaatctcacagcgtttaaacgaaaagtgtcaaatgataacgaaactgttggcggtccaatcgatgttgctataatctccaaaggagatggatttatttgggtcaagcgtaaacactattttgacaaagacctcaatcatcattttttcttaaaataa

SEQ ID NO: 236953 - DNA, 204 bp, Klebsiella pneumoniae
atgacaatcgtaaaaacccataccggcaccgtgatcaccaaagacggtccgcaggtaaaaaaactgcaccagacagagcggatgtgggtcgtcggcaaaaacgagttttaccacaaagaaaccgggcgccgtcactttgcagaaaatacacgccgccggctgctgctcgacaccatcaagcctatcgaggtgaagcatgtttaa

SEQ ID NO: 236954 - DNA, 747 bp, Klebsiella pneumoniae
atgaccgagcaaaccatcctcgacatgtgctgtggctcccgcatgttctggttcaacaaacgagatactcgcgcggtattcgctgacattcgagccgaagagcacaagctgtgcgacggccgccgtctggttatcagtcctgacctcgttgctgacttccgtgcgctgccgttcgctgatgcctcatttccggttgttgtgtttgacccgccacatcttgaacgagtgggcgaaaacgcctggatgggtaagaaatacggtcgcctgaacaaagacacctggcgcgatgacctgcgcgcaggttttgaagaggcttttcgcgtgctgcggcctcatggcgttttaatttttaagtggaacgaagttcagatccctgtgcgcgaaattctagctcttaccgatgagaaaccagcaatttctcagcgcactggaaggaatgacaaaacccactggatattgttcgtcaaaagtggacgcgagataagaaaggccgatccacttctggaatatacaaccaagagatttctggagttggaaagcttactgctgatggacatacctgaaacagtatggccagcggaagtcagcatggtcttcgctcagattgaaaaagccgggacactcccggcgcaccaccagcgcagactgcagcaccatatcaaccgtatgtggctggaaaaaatgccggtaccgtcaattatcgccgcggcaggttcgctggccagcgctatggagaaatacgcgtga

SEQ ID NO: 236955 - DNA, 744 bp, Klebsiella pneumoniae
atgaaaaaaacattgatcgcaaacgttttatttgtaagttgcactatctttcaggcagtaacaccaacatcttcacacgcagagtcagcaacgtcttcaatagaaaataaatcagaacaaaaaaatgtgttaagcagaaaagcagataaggaaattgttgtttctatgactgtagatgttgatggggctccaaacgcatatgggccggacaacaaaagggctcttgactacaaacaggatgctaaccataaagactcgagaactgttgtcggttatctagttgataaaaatggcaatccatttatccaaggaaaaactgatcccgcgccaggattttacatttcagtaaccaggtatgtcgatgttaaaaataaaaatgatttagaccctcgaaagtatgtaaatgctgccgaaataaattatacagtcttagcctctagtgcggcggctaagggggttaaatatggtgacttttgtgtggttcactctattaagactaacaagacggtatttgcaatagtcggcgactctgggaatagtaaaggagctgaagggtcgttagcacttctccagcatctagggtataacgccaaggatggaaagagtgttcccgaaaattctggtatcgttgtaagatattttgcaaattcaaatccatctaaacaattcttctttaatcaagctgatttagacaaaactgcgaagacgttgaatctcgataccgatttttcaaattttcactag

SEQ ID NO: 236956 - DNA, 3639 bp, Klebsiella pneumoniae
atgacagaacaaacttcccgcttggccattgttatagatagctctggggcagaaaaacaggctgacagccttgcaattgcgcttgataagatgactcagtctggtgataaagccgtaaccagcatgttcaaagtgacaaaagcgactgacgaggaaaaggatgcgctcaataaattgcgagcagtcattgatccggttggtgctgcaattgatacggttggccgccgctttagtgagctgaaaaaatacttcgacaaggggctaattgacgaggaagagtttcgcactctctccaaaatgctgaatgatacgaccgatgagttaagcggcgttgcacaagctcaacgagaagcagaaaaggccagcaaactggctgccgtgcagcaggaggcccagacacaggcattccagaggatgctggataaaattgatcccgtatccagcggcctgagagggttaaaagaacagcagaaagagatttatcttgctgctcaacgaggtgatttaagcctcgaacaatatgatgcctacagtcaaaaaattgctgatgctcgcaaggagctaactggagaagcccaagcccagcgcgacgcagaaaaagctgcggctgatgcaattaagcaacaagaggctcaagcccaggcatttcagaggatgattgaccgcattgaccccctgtcagcggctctgaaaaatttggatcaacagcaagcggaactatcctctgcactatcgtcagggaaaataaataccgcccaattcgacacctacagcaaaaaactgcaggagactcgccgggagattactggagctgctcaggcagaacgagaggctgcaaaagctcatgatgaacaggtagccgcgctgcgacgcctggaggctcagattgatcccgtaggtgaggctttccgacgtttaaatgaacagcagcgccaactggatagcgccaaagcatccgggatgctctcgccgttagcctatgatcgcctgaatagcaaacttgctgaatcccgagacgcattggagaaaacccaaacgcaattgggtaaaaccggccaatccgcagcacagactgcctttgccatgcgcatgatcccggcgcagatgactgacattatcgtcggcttatctacgggtcagtcgccgtttatggtgcttatgcagcagggcgggcagttgaaagatatgttcggcggtattggccccgcgattaaaggtgttggcgggtatgtgctggggttgattaatcctgtcactctggctgctgcggctgttggtgttcttgggctggcctactacaaaggttctcaggagcaggacgagttctataagtcgttgacccttagcggtaatctgattggtaaaaccacagggcaactagcagatatggccgctcgggtttcagtagttgccaactcaaccactggcgtgtccgcagccacactcaaccagataatttcatctgggaaagtggctggagattctctggaacgcgtgacaatcgctattgttaagatcagtgatgcgacgggtattgctacagaaaagttggtgagcgacttcaacgatcttgctgctgatccagtagcggctataaccaaacttaacgaccaataccattttctgacactggcaacctacaaccagattaaagcgctacaggatgaaggtaatcagcaggatgctgcacgggtggctactgatgcttacgccaatgccatgcagcagcgtgcgaatgatattcatcagaatcttggtcttcttgaaagtgcatggcactcgctgggtaaaacggccaaaggcgcctgggatgcgatgctcaatattgggcgtgaacaaacactaacggataaacttgccaccttaaacgaaaatattgctgaagcccaaaaagggcaaaaagatggtgggttctggaacagttttagcgcgaggtttaccaacctcccggagatgataaaacagagagatttgctcgaatcagttgccaatcttcagggggatgtaaccaaaggacaggcgaaggctaaggaagccgaacagcaaagaattaaaacgcagcaggaagcagatcgcgttaaccagcaatatctgagcaatgcggataagcgcaataaagctattaagcagcaaagcgaattcctgaaggctggtgcaattactgcagagcaatatgcaaaaaatgtttctcgcattaacgagatgtacaaagatccgaaaccacccaagacgccaaagggtaaagcatataccgaggacgcagcaacccggttgcttgatcagataaaccagcagaccgctgccatgcagtcccagctggatgccagtgataagcttaacagcgctacccaggcgcgagttaaattcgaacaacaaattgctgacctaaaaactaaaactcaactcaccgctgaccagaagtcgattctttcccgttctgacgaaatattacaggcctataagcaacaggaagcactgcaaaacaccgttaaaacactggatgactaccgaaaaatgcaggcgcaaattgcaccaaaggaattgcgccaaaatgagacgttgcaaaaacgcctcgaaatccttcaaaggatggttgagctgaagaaactgactccggaggcggcaggtaaacaggcaagcgatctgattagcaaatcaatattgccggactctgttatctcaggggtgaataaagctggcgggacgctaacctctggcgcgactaacagcgacctggcagggcaaggcctgaacatgatagggctgcaaatcgatccgcagctagaaatcattgataagttgaaacaggcccagactgattatgcagactggctgaatcagcaacagcaggcgataacgcagagcacagtcctcaatgagcagcagaagcagcaacagctcttggctttgcagcaacagggccagcagaaccaggaggcgttaagcacggcggtgtacgtcgctcagatgcaatctgcccaaaattccttctccggtatcaccgatgcgatgggaacgatgttcggtgagcaatccgcgatgtataaagtcgcctttatgacccagaaaggattcgccatcgctcaggctgccttgcagctccccatggcgatggggcaggcattagccggattaccattccccgctaaccttgctgccatggctaatgttgtggggattatggcatccatctcttcgagcatcaccagcgctgctgctgttggcttcgcctccggcggttataccggccccggtggtaagtatcagcccgcgggtattgttcacaaaggtgaatacgtctttgaccaggcatcaactaaccggatcggagtgtcgcagcttgaggcgttacgtaacggcaaaccgcttgatgtgacattggggcgttctgggttcggcactggcgttcagaacgttagtaatagccagcaaacgaccatcatccgtcccacagtcacggttcctccgataactatcaatggaaacccttctgatacgactgtgatgcttgtacagcaggccgctcgtgatggtgccaaacaaggttatcagcaggtcgctaacgatctggcaaagggggtaggccaggtgcataaggcattaaccggaggatataacactggacggagaacaggataa

SEQ ID NO: 236957 - DNA, 651 bp, Klebsiella pneumoniae
atgagcaacccggtatatgaacccgaaatcactgcattgctgtgcatcgatctgtataacgattttctggccgagggcggaaagctatttccctgggtgaaagatatcgctgaagaaaacaacatgcatgagaacctgcgtaaaatcgtggcggctgcacgtgaagctggaattaccgtttaccacgtcccacaccatcgttgggagccgggtgactatgaagactggaaatatccgtcaccttaccagctgggtgccgggcaacgtcaggcattcgcaaaaggaacctggggggggactttccatgacgacttccaggtacatgaaggggatgtggtcgcaaccgaacactggggatcaagcggctttccgaacactgatcttgagcacaaactgaagcgctatggtaaggaaaaaatcatctgtgtaggccttttagccaacacctgtcttgaagctactgcccgtattggtatggaacttggcttccacgttactctggtaagagacgcaacatctgcccgttctcacgaagccctgcatgccgcaatggatattgacggcccgacatatgcaactgaagttctcaccaccgaagagttgataaacgctatcaaaaaatccgcaacctcacagttacctatagcttga

SEQ ID NO: 236958 - DNA, 549 bp, Klebsiella pneumoniae
atggggcgttcaagtaagctgcaggccgaagctaaccgggcactgattgtagaaaaagccagtggccttttcagggcacatggcatagcgaatgttagcgtctcagacatcatgaaagcggcgggaatgacggcgggcgggttttataagcatttcgaatccaaagagagtctggcacgggaagccgctagcctggcatttgaaacatccactgccagctggggcagcgttccctcagagcaaaatggcaataagcaacaacagatagcccaatattatttcacgccaaaatctacagataaacgctgtccaatgctggcttttggtaatgacttaatgaaacgggacgatccggtacttgccaatgcgtgtactgcaggcattaaagaactttttcaggtttttgcggagcaagtaacatctaacaaaggcggcgaccgggatcttgcaatgtttgcagcaatgattggggcaaattatttgagtgagctgagtagtgaccctgaattttcaacacgaatcagaaatgctgttctcgatctgttgtga

SEQ ID NO: 236959 - DNA, 645 bp, Klebsiella pneumoniae
atgtttgctgattttggtatcgtgaatttcgggacgtatctgcttggtgcgacactgatagttcttgctcctggccctgagaccatgttcgtgattaaaacaagcattacgagcgggatcaaacgaggctttgctgcaatattttccattctcatgagtgacgtacttctggttctgctggcatggtgtgggcttgccgcagtcataagctcaattccagccttgtttaacgccattaaatacgcgggtgctgcctatcttttctatctcggtgtccagacgatacgcgctatctttaagccaactgtcgaaacgagtcaggaaaagaaatcttcagctgatgctaaggggatcatcgggcgtggaatgcttgttactctactgaatccaaagacgctgctgttctatatctctttcttcgcccagttcatcaatgttcaggctgaacattcctggatggcgtttatcatccttgcagcagtaatgttcacgattactctcgtttatttcggtttcctcgttttctgcggctcttatctgctaagccgtttgaaaggcaaccgtagattatcaaccattggaaacgcgctggtaggtatgttcttcattggatttgcagcgcgactcgcaagcgcaacctcctaa

SEQ ID NO: 236960 - DNA, 264 bp, Klebsiella pneumoniae
atgaatatcaagcctccaaagcagctttataaatgggataaagcccgggtgaaactcgccagacctgcatcaaacatgatggcatctcttccgacaggtacaaccggaacagtaagaaaagtggggcgcggccttgagtttaccgccgacgcttgccagtgctgtggtgttcaggttcgtataacgagaatggggctcgattatttcgaacttgttgaattaggcccacaagccggaggaaacaatgaagagcctactgcgtaa

SEQ ID NO: 236961 - DNA, 498 bp, Klebsiella pneumoniae
atggaatttatgatcgccctgattattttcggcatttctgtcgctgtttacaaagatgctcaagccaagcaaatttctcgcccggctagatggggtattggtgtatctttactctttattatcattttacctttgtatctttttaaacgaaacaaaatagccggttctggagaagagttaactgaggctgagggaatccagggtggaaaaaacctcaagcctgtagcagcttatgctctgatgtttctactctcttttcttgcccccttattgggttttttcaaaggagaacttcccgagtgtaactcaccagaagtagccagtgtcattacagatctgcttaacggccaacaatttagcaatgccgcacaggtaagttacgataaaatagatgaggttagacactgtaatctgacaacggcagaccacgttttctcctatacggtcaaatggtacagtgaggacaaagatcaattcgttgttaaattcgaaaactaa

SEQ ID NO: 236962 - DNA, 396 bp, Klebsiella pneumoniae
atgaaagcatcaggacaactgctgtacggcatacctcacggcgacgtcattcattatgactacaccgtggcggtcccggtaattcgccataccattgcggcgctggcggcgacgacagaggctatgggggaatcggattctcctgcagcttccatgtattaccgtgcagcgctaatggctgaagtcatcgagtcacttggcgatctgccaaaagaggctatcactgcagaacttctgctggacgggttgacggatgaagatatggatctgctggatgcagagctgagcggacttaaaaaaaagcggatgcgcgtaccgccggtctctcagggctccgacgagccaccctcatcctcggacgattcggcatcagcggagaccgcatcgaaggaatga

SEQ ID NO: 236963 - DNA, 2157 bp, Klebsiella pneumoniae
atgcgttctctacagcttgccatgaccctgctggcaaaagaccagggatctaaggtactgcgccagacgctggctgacgtcctgaagcagaccaatgccaataaaaaagccgaagaagaagccgcgcgcgtacgtgagcagtcggcacagagcggcatccgtgcatcacgaaccctgcagcaggaatatcagcgggcagccaatgcccggtctgtgctggggatccgctcagaacgtgacatccagcgcgagatagcgcaaacgcaggctgcatataaccgtctcttgcgtactggtacccttaccgctaacgaacagacccgcgcgtttcgcgcaatgacgaaccaggtcgcgcagctgcgcaccgaacttaatggtgccggtcagtcaatgtcacgcatggaacgtgcccgtatgtggggtggcaatgtcacagcgttcgccggcggcatcgcagcagcgggggccatcgtcgccccctcggtgcgtaaccagatgacttatgagcaacgtcttgccagcatggcgaatacggcatttgcagaacaaaacactgctggacgtagggctggtatgcgttctatggatcagcttattcgtaggtctgttgctgtgggaggtggtaataaagaaacagctgcaaatacgctcgacacgctcttagcctctggggctgttgaatataattcagctgaacgtctgttacctatgttgcaaaaatattcgaccgcaacaggtgctgattctaaagaccttgcaatgattgctatccgactaaaacaaactttcggtctcaaagatagtgatataccgaaagctcttaatatggcgatcagtgctggtcaggctgggtcatttgaacttgccgatatggccaaatatttacccgagcagttagcaaatgccagcagcattgggatgaaggggcttgatgactttgcaactctccttggtctcaatcaggcatcagctatcactgcagggactagtgataaagctggtaacaacgttatcaatctactggggaaaattagtagccaggatgcatctaatgccgctgccagaatcaaaatcaatggtaagggtattgaccttcctggttcattggctgctgctcagggtaagggtatgaacgctcttgatgcttttagcgcaattgttgacaagattgtggctcagaatcctggttatcagaaacttgaaaagcaattgaaaaataccccagatgacccatcgcgacttcgcataatggactctcagcttcaaatacttcaaggttctgcagttggtcagattattgctgatcgtgaagcgctaatggcccttattgcctatcgtggcaatagaaaatatgcatatggcgtacgagatgacgccaatgcacaacggacactccccgaattacaaacggccggtgagcgaaattttgatctgattcaggggacaaatctctataaagtaaaccagctcaacaatacccgggactttgcgcagatggactcgatccagccactttctgatgtgctgggaaaactttctggtgaactcaatgactacgccggcgcatatccaggactgacaaaggccctggctggtgctgaaacggccattaaggctatgactgctgccgcgtgggcgtttgctggtatcaagttcctttcctctgctggcgcagctgcaactgctgcaggaaccacggcagctggtgcaggcactgctgcggccactgcgacccgtattccaggctgggccggtcgtcttggccttggtcgcgtgctggctccctttgctgtttggcagggagcggaagcagtacctcttatgcaagtcagtcgtggtgatgccgaggcccgcgggcgcctggaaaaaggaaattaccctaacgagcaagcgcgaatgctggatgcgctcaaatcccgcccaggtctgatggatgcctgggatgaggtcaaatcgtggtgggcttccccttcaaacatccgcgttcctgaatcagcaaacggctatccggtgccaccgttcgcccggactccgtcacagcagccgcccatcaatatcaccaccaaacttgaactggacggccgggttattgctgaggctgtgaatgaagtcaatggccagtcagctgcccgtggcccacagggaggaccgcactga

SEQ ID NO: 236964 - DNA, 678 bp, Klebsiella pneumoniae
atgtgcggacgctttgctcaatcacaaacccgtgaagaatatctggcatacctggcagatgaagccgagcgcgacatcgcatacgaccctgagccgattgggcgttataacgtggcgccggggactaaagttttgctcctgagcgaacgagacgaacagctgcacctcgatccggttcactggggttacgcccccgggtggtgggataaaccaccgctgattaatgctcgagtagaatccgcggcgacaagcagaatgttcaagcctctatggcaacacgggagagcaatttgttttgcagacggctggtttgagtggaagcgtgaaggagacaagaagcagccctatttcatccaccggaaagacggccagccaatattcatggctgcgatcggcagcgttcctttcgagcgcggggatgaatctgagggatttttgattgtcaccgctgcagccgatcagggtctcgtcgatattcacgaccgccggccgctggtcctggcgcctgaagccgcccgggaatggatgcggcaggatcttggagggaaagaagcagaggaaataattgcagatggcgctctgtcagcagaccatttctcctggcacccggtgtcgcgtgccgtgggtaacgtgaaaaaccaggggcctgaattgattgaggctatcaaaagcctatag

SEQ ID NO: 236965 - DNA, 372 bp, Klebsiella pneumoniae; identical to SEQ ID NO: 212322

SEQ ID NO: 236966 - DNA, 855 bp, Klebsiella pneumoniae
gtgaagaaaaaactatttcaggccgccttagcggcagccatgatcgtgtcggtttctgtacccgtgtacggtgaaaactatcggtggaaaacggtcaccgcagtaaggttggtccctttcggttcgggtactgagtggattatcaccacaggtgatattaccgtgagttcaggtagcgtcagcctggatacaccagcgaactttggcagtaatggcggacttttggttgcaaatgtgctgactgcgaatggcgacttttgggggacatcggatgttgccacgagttatcccccgcccggcgtcccgtataagggaacctggcgagaagtgcttaacgcgagcgtcgatagcgtcagaaatcaaatttccatccgaaattatagtgtcgtgggaggctcttccaccgtctgctttggatacacgcttcatgaagttaatggtaactttaatttttccgaccttgtttatccgccgggtgccggtagcggtataaactgcatgacggcgccaccgctaaacgagtggtgcgccatgtctgtgcctcaggtaacgctaagtttcggtacgctaatgcttgaccaggcggcgggcaaaacggctgatagtacggtgggcgtttcctgcacgtcttcctcggttagctatgtgttaaagctacaaacaggcaatacctatatcccgctcagcaacggcatgcgtgccaatctgggacttggggcagctaactcagcgccgggtaataccacctattccggctctcagtcctcgctacggttaagaggaacgctggctgggacgccaacctcaaccggcgccttcaacggaaccggcgtgatgatggtggtttataactaa

SEQ ID NO: 236967 - DNA, 525 bp, Klebsiella pneumoniae
atggcgcagggaaacaacatgatgaaattgagcggatatgcccccttgctgttggttggcctgatgatgacgatgacgtcacctcttcaggcggcagacccggaaaacctcgagtttatcggcactctggtgacgccgccggcttgctcaataagcgaagacggccctgtgtatgtggatttcggtgatgtccgaataaaaaaaatcgtggagggaaaataccgtgaaaccgttccactaaccctgaaatgtgaagacagcacccttgcatggcagttgcggattagcgtacgcggtaatgcggccgggtttgatgccgacaatgccaccgtggtgacccctgagcaggccaatcttggcgtgaaaatctaccagaacggccagccgtttaagctgggcgaggccatcaacatcaatagcgtgacgctgccgagtattgaagctctccttgttcagcgcaacggggtggagttggtggaaggggtatttagcgccaccgcaaccctgcgggccgaataccagtaa

SEQ ID NO: 236968 - DNA, 486 bp, Klebsiella pneumoniae
atgacccccataaacctgcgtggtctggtgcttccccttacgttgtgctttggtaccagcgcgctggccgacgcaacggttaactttagcggcaccttaatagaagcgcctccttgcgtggtacataacaacaacgttatcaccgtcaactttggcaacgaggtgatgaccacccgtatcgacgggacgcaataccggaagctgattgatttcgatttagattgctccatggcggtatcgtcaaaacagaaagtgcgcataacgggggcagcggcaagctttgacagcacggcgctggcgggaggacaaagcgggctgggcatcgccctgtacaatggtgatacccgccttaacgttggcacctggctaaatttcaccgaccccaatatccccaagctttacgccgcccccatcaaacaaagcggagtgaccctgagcggcgggccgttcagggtcatggcctcgctggtcgtggagtatcagtaa

SEQ ID NO: 236969 - DNA, 528 bp, Klebsiella pneumoniae
atgacgcgccaacactcaataacatcccgagcgtatctgatgatggctggagccttactgcttttttccggcggacaggcgaaggccgctgaaggagataccaccactatcaccgtcaacggcactctgatcgatgggccgcagtgcgttattgacggtaacaacaccgtagacgtgaagtttggtgatgatctgattactcgtctggtagacggagtgaattataagaaagagattcaatatggcctcacctgtactggcctgaacagtaatgccctcaaactgacgattcgagggtctctggcgagttttggcagcggtcttttgttgaccagtaaagggggcttgggcatacggctgtacagcggaagtgccggcaccacgctcatgactcccggcaattatgtcaacttcaatggcacagccaataaacccaggctgtgggccgtacccgtggctcagaataacgccacgcttaccgcaggtccgtttttcggcacaggcaccatggtcattgactaccagtga

SEQ ID NO: 236970 - DNA, 756 bp, Klebsiella pneumoniae
atgaaacttaaattaacgtcttttctgggtattctactgtttaccggaagccagtattcagctcaggctgcattatctgtggaacgctcccgggttattttcaatgaaggggagaaatctgtcggattgagcgtgaaaaataataatacgcaggatccctatctcgcccaagggtggatggaaaacgagaaagaagaaaaaataaacggccctctgatgattttaccgcccgtacagcgtattgagcccgacggtagaacgatgatcagggtacagcaggttgcggatgcctcttcactacccaacgacagagaaagcgtattctggcttaacttacgcgagatcccgccaaaatccgacaagcctaacgttctgacgctggctatgcagacgcgaatgaaagtgttctggcggccaaaggggatcaaggtggatcccctgctcgatactgtgcccggcgtagaaacgctgaccctcgctcgtaagggggaccgctatgaggttaataatccgacaccgtaccatttttcatttgttgaagcgcgtgacagtctgaacggaaaagcgctggacgatttcgagcccgtgatggtttctccaaaagataaagcggcgctgaggctacccaccttgcggttgggaaataatccgacgctgatgtttattaatgattatggcagcgcgcgattattaccgtttacctgcaccgggacgctgtgcagggcgggaaaagtggcattaccaaaggaaggctga

SEQ ID NO: 236971 - DNA, 975 bp, Klebsiella pneumoniae
atgatggatgacaccgaaggtacctatttgccagtttatgtggcaactgagaataattatttttctcagggagtggtctttctccttgaggagttatttgaggatgagtttagcggcaatattaccgtatccttagtcaaaaaaccgcaggaagccgatctcattgtgcaagtgcaatctcctggggaaaaagcctttgattgggtcgattgtcaacgatttcgcgcccacaatgactataaatttaagctcctcaggaaaaagtggttaagcgtttatccacgtagtgaacactatgataaaaactttcattgcccggttgtttgttcagttctcgcgatgaggaactcagtggcgaccatccggcgaaagctgttcatgctgtttttcgccgatctcatgtgcgggcctccggacttacgtaaaccaaattgtaataaatgtcctggcccctaccagttgacatggcgtgaacagctaatgttaggctatttgagtcagggtttaggccacgatgaaatttctcgcaaaatgggctgtagtattaaggcgctcagtggctatcgacgctcgattatgcggaaagtcaatatcaccagatacagtgatttcgtttcgtggctgggtaccaaatcggtttctgataaatatgttgaggttgttaataatcacgaacgtgatgcggataaagatcagcgaatatggaaaaccacgttgtccggtgatatggagagacagctcgatgataaagagcgagctttacaaagtataaaacgcttgaccaaaaaacggttacgaaaaagcgaactggttgatgaggtatggctgacaacgcgagaaatagccaacgagatggatatcagtatctacagcatgcgttatttattatgccagatggaatcaaacggtaaagtgatcagtatcaaaaccggaaaagggagaagtcatacactccgctggaagctggcaagttaa

SEQ ID NO: 236972 - DNA, 1071 bp, Klebsiella pneumoniae
atgacatcacctgcgattaagccttctaaaccgacggataagcaggcgccaacggtagtggaagaccgggacaagttagtggctggggccggtaagaatccctctttagccgatccccagattttagggcgctggtttaaggcgttaagacaatatgcgtcactgagtcctgcagagattgatttacgcgaaaatttccagctatcgcgcaatgaggtagagagattgaaggctcaactcgctttgcgacaccaggaagtacagcagcagttcgttgccctccaggcggcttctgaacagctcgccgcggcaatggagaacaatggcaagcaacaacaggagctccaggcgctcaccgtgcgtgccaatcagctggaagagaaaaatgcgcagtggcaagtagtaaccagaaaattgcaatcgagccttaagcaagcacagcatcccgcactgccggcgaccgacgatgaactggccgattttgccgccgggatggcgatggggtttgacattttgggcgtactcgaagagcggaatgaacaagatgttcatgttgataaggcggcctttctggccggcattagcgaaacgatacgcggcgaacgccggttatctcaggaggagtttgagcgccatcttaaccgcgccaatcagcgagtcgaggatgcgatgcacaagatcaagcagcaaaaggaagcgcgggataacgcatggctggagaaatttcgccaggaagagggcatacaaactgcgggtgagcaggcctggtataaagtcatccatgcgggagaaccgctgttcgaggatgagcactctgaagcggcgctaaccatttcggtcaatcgccgtctgtcagatggtaccgtgattgcggacaccgatctgacgggcctggtattacaggaaaagttgtccgctcttcctggatggcttcagattgtggtaaaggatattcgtcttcatggtgaagcagagttagctgttaaggttgatgagtatggcgatcctcgaaagcatgggaattatattgaacattggcgtatccgggtaattgaatcgcatgcaatgtaa

SEQ ID NO: 236973 - DNA, 252 bp, Klebsiella pneumoniae
atggtgcagtgcgaaaaagaactcagggcgctggagtcgattaaccctattaaacatgtcgagctcaagtctcgctttgagcgagtgatgctcggcgcttccggctataccaacgtacgaagttccgttaatcctgaaacgcgtaatgccattgacgctttgtataagtttcaggcggtaaaattatgctcggaggtccgcgctgaaatgctcaatagcctcgccgtgaagccaacgggtgagagtatttga

SEQ ID NO: 236974 - DNA, 528 bp, Klebsiella pneumoniae
atgaaaaaaaatatcgtgcgcgtaatcagcctggcaagctttcctctgctgcttttgttggctggtgtgtcggtcactcatgccgatactgacgttcatttctccgggaatctgattgccgacccttgtgaattacacgtggattcggaagatcagattgtcgattttcgtaacgtgccttctaagacatttatgaaatatccccgcagcgaacgcgagcgtttttcaatctggttgacggagtgcgatctctcgctgggcgacacggtgaccgtaacctttatgggaactgaggatagcgctcagcaagggctattcgccgtcagcggaacggcgagtggtattgccattgcgctggaagatgagaacggtacgccgataaaacccaatgtccctatgcggccggcagcattgaaggcgggagatacttttttaaatttccaggcctttatttccgcaccagtacatcatctggtcagagagggagattttgaatgcgtcaccacttttcttctggaatatgattaa

SEQ ID NO: 236975 - DNA, 594 bp, Klebsiella pneumoniae
atgaaacaaggatttggtcataccaccctcatgttgtggcttttgatggctgtaatcgtttccgcggcgagcgccgcgaactgggataccgatggcctgaatggcggcattcgcgcaagcggaacgcttgttgcgtcaccgtgcgcgctgctgcctgagtcagcagaacaagagatcgatttgggcagcaccgttgcctggggactggaacggccgggtagcgttacgccatcagtactggtgtacatcaaattagatcgttgcccgggagaatactcgtttatgcgcgatagccaaatgatgcgcggcgccacgatgttaaacggacagtctgcggtaagaatgactatctatggggaagcggaaccgatggatgaccgctttttccgggtgcatggtggggtagaaggggtcgcgttgcgccttagcgaccgacagggagaacttttacgacctgcgatccagagtcgaccgcagattctctatccgggacgcaacgatttggtggtgcaggctcagctatggcgtcttcccgcgccgctgatggctaatgaatggcgcagcgtggtgaatatcggcctggagtacgaataa

SEQ ID NO: 236976 - DNA, 735 bp, Klebsiella pneumoniae
atgaaaagcaaacagatagcgatgacgatagtgctggcaagcctggcggcaggtctggttaacgaagccggggcagcgattgcgctggacagaacgcgggcgatttttcctggttcggaaaagagcatttccctgagtattactaacgacagtacgtcaatgccttacctggcgcagggatggattgaggatgaacacgggaaaaaaatcagcggtcctctggtggttgttccgccgctgcagcggcttgaagcgaaagggaagagcatgatgcgtatcaacgccatgccggatgccgcgatgttacctcaggacagagagagcattttttatttcaacgtgcgcgaggtgccgccaaaaagcgagcgacccaacgtgatgcagctggcgttacacaccaaaataaaattgttctatcgccccaaagccattctgccggagaagtatagccgctgggataaccaactggtgctgcataaagtgaacggcggttatcgggtagaaaacccgacgccctattacatgacggtgatcgggattaccgctgcgccgaaactggcggtggccagcggatttcaaacggtgatggtaccaccgaagtccacctcgatggtcaatagcgcgcactataccgtgccgcatgtcaccacgattaacgacttcggcggtaagccaaccctgcggtttagctgcagcggtaacatctgccgggctgcggataccccggcaagctga

SEQ ID NO: 236977 - DNA, 2502 bp, Klebsiella pneumoniae
atgaaaaaaaacagaccaccagctttttacctgcgacgtctgggtatttacattgctgttgccattttgggctctacatcaccggtagtggcggtagaatttaatattgatattctggactcggaagaccgggaaaatatcgacttatcgcgcttttcccgggccggctatattatgcccggaacctatacgctcagcatgcgtttgaatgagcacggtatttctgaccaggaaatttcttttattgaaagaacccgtgacgatggggtggttgtagaaacctgtctgacgcctgcgcaggtcgaacttctcggtctgcgggatgacgcgctcaacatgattaagtggctcgatgaggggcgttgcgctgatttttccgctcttgaaggcgtcgtcctgcgcggcgatctgtcagaatcttccctgcaaattgcggtcccacaggcctggctggaatatcaggatgcttcgtggctgcccgtttcccgctgggaagagggcatccccgggatgttggttgactataacctgaataccaacgtcacctggcctcgtcagggtaatcagagccagaatgccagtatcagcggtacaacaggtgttaatctgggtacctggcgcctgaggggagattatcaggggagctattacaatacgaccggacgcgcggataaaaattcacgtaattttgattggagtcgtttctacgcctatcgcgcgttacctggaatgatgtcgaaactcaccgttggtgaggattatctctcttccgatctctttgactcctggcgctataccggtttgtcgctggcgagcgatgaaagccagttgccgcctaaacttcgaggctacgcgcctgaagtctccggcattgcccataccaacgccaaagtgacggtcagccaacagggtcgagtcatctatgaaacgacggttgccgctggcccgtttcgtattcaggaactcaacagcgccctgaccggacgtctggatgttcgcgttgaagagcaagatggctccgtgcagacattttcggttgaaacggctcaggttccttatctgacgcgccccggccagctgcgttataaaatgaccaccggtcgtccgcgcgattataaccacagcactcagggaccatacttcgccacaggtgagctctcgtgggggcttaccaacgcgtggtcgctgtacggaggtggtattttttcccaggactacaacagcctggcggtgggggcgggtcgtgatatgaacgccttcgggacactttctgctgacgtgactcatgccagcgcgcgtttcccgcatgataaaaacaggcaagggcgatcctggcgcctgagctactccaaacgttttgatgaaatcaacagtgaagtgacgtttgccggctaccgtttttctgagcgcaactatctcactatgggtgaatatctggatatgcgctatcgggaaggctacgtcgggaatagcaaagagctttatacccttcaggcgaccaaaaatttcgcagacttgcgcctgtcgacgcacatcaactggtcgcatcagacttactggaaccgcccggcgaccgatcgctacagcgtgtcgctgaataaatattttgacctcggcgactggcggcatctgtcgttttccctcaacgccgcccgcagtgaatttaacgggcgtaaggacgacagcgcctatatctcactgacgatgccgtttggatcgggaaccgttggttataacggcagcatgagccgcgaccgctatacacaaaatgccagctggagccaaaggctggataacaacgactattacagcatcaacgccggcaacagcgtcggcggtggggaaggaactcgcagccagatgagcgggtactactcgcacttgggcaatatagcggatgtcaccaccaactttaactgggcgcaaagccagtactcctcgtttggtatttccgccagcggcggtatgaccgcgaccgctgaaggcgtggcgctgcaccctggtggggtacagggagggactcgtctgatggtcagtactgatggggtaagcggtgttccggtgggctttcagggccataccaatgcttttggcatcgcggtaatccctggggtgccaaattactatcgaacccgcgctgagattgacgttaatcgtctgccagacgatgtcgagtctggcggaacgccggttgttgaactcgccctgactgaaggggccatcgggttccgtcgttttgatgtgctgaaaggcgctaaggtcgtggccatcctcagccaggaagatgggcgccatccgccattcggcgccacggtacataacgcaaaagatcgcgaactgggtatggtcagcgacagcgggctggcctggttgaccggcgtgaatccggatgaacgcttaaccgtgcactggagtggttccgctcagtgtgaagtcgtactaccacgggttatccctgcacagcagctattgctgccgtgcaagccggtcactcgcggctga

SEQ ID NO: 236978 - DNA, 534 bp, Klebsiella pneumoniae
atggtaaatatatcgcgttctctaatgttgagtttgttattaggcatatcaccgctgtctcaggcatccgaccatgggcggggcctggttacaatgaatggtcaaatccgggagtcggcctgttctattcataccgacgatatctggcaggagattccattcggcgtgatctcatatagcgatcttaatcaggaaggcaaagcggtcatcaaaccttttgcggttcgactggtgaattgctcactggaacggagtcgcggcggtttatggcaaagcgtaaatattacctttagtggcgaaacggaaatatcccgcccggatatttttaaagtcaatggcgaggcgcaggggcttggactgcgtatccacaatcaggctggcgatgtggcgcgtgatggaataccgatgcctgtcgtcatgatccaaaatgaaaataatgaattacgttatttattatcgttagtgcgcggtggaaaaacgttgtcagaaggcgactggtacggaattattcgtttcatggtgacctatcagtag

SEQ ID NO: 236979 - DNA, 546 bp, Klebsiella pneumoniae
atgaaaattagcaaaattgcatctgctgttgttctcactatgggtgtcgcctctttcgcagctcaggccgatcagggaagcggcaaggtgactttctggggttccattattgatgcaccatgctcaatcaaaaatggttacggcgatcagcgtattgaactgggtcagatttccaatactcatttagataaaggaggtatttccactcctcgtccgttcgacatcgagctggaaaactgctccttcgagaaggatcaagacggcaagacgttgtttaacaccgttaaagtgacctttgctggcggtaacgtcccaggagatatgaccatgttggctatttccggtcaggccgctggcgccggcgtgcgtatggaagatagttctggtaaacccgtgactttattagtacctactagcggtcgcgtcttgggcattggcgacaataccctaaacttcagcgcttacctcgaaaaaatctctaccgtaaaaaacgtcactccgggtgattttgaagcggtgaccaactttaccctggcttatgaataa

SEQ ID NO: 236980 - DNA, 741 bp, Klebsiella pneumoniae
gtgagatttgcatcagtccctttcaatcaaaatcaggtgggatggccgctgaatgagattgaccgtcaagtacagccgcaactgagcggcgacatccaggccgactgggtgataatcggctccggctatgccggcgtcagctttgcccgccggctggccagcctcaatccgcagctgaatatcgtgcttatcgacgctgaatgcgccgcgaccagctcctcagcgcgaaattccggctttattatcggcctgccgcacaatatcggcagctctaccgccgagctgaaaaaagcgcaggattaccgcgccctgttgcaggaagggatccgcctgctcgatgaaacggtgaccgagcaccagatcgcctgcgaatgggaaaacgtcgggaaataccactgccagatagatccgtccagcgaagccattatgcaggagtacgtggataacctgcagttgatgcaggagccttacagcctgctggacggcgaagcgctgtaccagaagctgggaacccgcctctacagcaaaggtatttacacccccggctgtattctggtcaacccggcaaaactgatcgcgggcctcgcgcgtcatctgccggaaaacgtcacggtttaccatcaaaccccggcgctggctatgcgccaggaaaacggcggcgtcagggtgacgacgctgcagggcacgatccgcgccgaccaggcgatgttggcgaccaacgcgaactctcgcccaccgtga

SEQ ID NO: 236981 - DNA, 558 bp, Klebsiella pneumoniae
atggcgacctacgccagcattaccgccccgctcacccctgaacagcgcctgcgtctgccggcgatggaaagctggggattaacgccggtcaacgcgatcgccggcgccacgctacgctatacccacgatcatcgttttctggtccgccagcatgtcgatccggcattgcggggagtgattaccgccggacagaccgccagcgccgctcgccagcatctggcgctgttccatacggcctatccgcagctgcaggatgtgccgctggagcgaacctggtccgggaccatcagcgtcacccgcaacggcgcgccggtctggggtcgtattgcgccgcagatctggaccgccgggggctgtaacggcgccggggtatccaaacagactatcgccgggacgctgcttgccgatctggcgatggggcaggacaatccgctgattgccgcgatgctgtcacttgggcaggcaaactttatgccgccttccccgttcctggatatcggcgtagccggggcattatggaaagagcgctatatgggccgtaaagagatgcccgcgtag

SEQ ID NO: 236982 - DNA, 780 bp, Klebsiella pneumoniae
atgctatcaattcccattaagaccgcggacgagctggccagacagcgccgcgcaggcgagctgttggcctcggttttcgacatgctggatacctttattcagcccggtatctccaccatggccatcaataaccgggtggaggattttatcgtcaacgatctgcattcgcgcccggccagcaaggggcagtatgatttcccctacgtgctgaatacgtcgatcaacgaagtggtttgtcacggtatgccaaaggagagcgaacatctgaaatccggtatgattgtgaacgtggatattacgctggaaaaagaggggctgattgccgattccagcaaaatgtacttgattggcgaggtttcaccgctggcccgtcggctggtgcagaaaacctacgaagcgatgtggaaagggatcaaggtcgtcaggccgggcgcgacgctgggcgatatcggccatgcgattcaaacttatgtcgaaggcaacggctatagcgtggtcagggagtactgcggccacggcgtggggagagagatgcatgaagatccccaggtgctgcattacggcatacccggcaccggcgccgtacttaaggaagggatggtgtttaccattgaaccgatggtgaatcagggcgatagccgcattaaaaccaaaaaagatggctggacggtggtcacccgcgataaaaaactgtccgctcagtgggagcacaccgtcgccgtcaccgcggatggattcgaggtcctgaccctgcgtgaagatgaagtgattccagactag

SEQ ID NO: 236983 - DNA, 219 bp, Klebsiella pneumoniae
atgggcattgtaaaaatttccgacctgctgcacgacgatattcgtgacgccagcaaggcgatgtcgcgttcggtcaacgcgcaggcggagtactggatccgtctgggcatgatgagcgagctctatccggaacttaaccatcagcaaattaagctgatgatgctcaagtccgggtccgaccggttgctggaggtgatcaatgctatcaattcccattaa

SEQ ID NO: 236984 - DNA, 468 bp, Klebsiella pneumoniae
atgtcaaaaaataattcagttccttacctgttaccggagctttgcgggctttctgcggtagcggaaatcctgggagatcaatgggttttgttgattttaagagaggctttatacggcgtgacgcgctttgaaacgatccgctcgcatacaaaaatgcctaagcagacgttggcaaatcggttaaagaaaatgacggaactgggtttactgagcaaaacgccctatcaggaagaaggggcgcgcgaacgttatgagtatatccttacgccgaaaagccgcagtctggcgccgatcctgttttccctgatggcgtgggggcataaaaatgtcctgcatgatgagcctcatattgctttggtggataaagagagcggggacgtcgtccacaacgcctttgtgacgacaaaaggcaccgttgttgactctcagaacatccagatagtggctgtgaacgttagcaacccgtag

SEQ ID NO: 236985 - DNA, 231 bp, Klebsiella pneumoniae
atgcccttcgtcaatgtacaaaccattaaaggaataatgaacccggagcaaaaaaaagagcttttgcgccgcatgaccgatctgattgtcgaaattgaagggaaaggcgatcccgagttccgccgttcagtctgggtgcgtattgatgagcatgagccggaacagtggagtctgggcggcatacagcccacggctgaggcgatcgcggcaaaattttcgtctactcaatag

SEQ ID NO: 236986 - DNA, 879 bp, Klebsiella pneumoniae
atgccgagcctgatatattcttttgcccagctggaggccttcaccgccgtggttgagtgcaaaagcctggcgaaagcggcgcgccagctgggcaaggaccggacgacgctgcgcgatttaattgagttcctcgaagatggcctggggtatgcgctgttcctgcgcgaagggcgaagcctgcgcctgacgccggaaggtgagcagctacagcggcaggcgcacctgctgatgcgccaggtgaaagcgtttgaagcgtttgccagggcggtgccgaacagcgccacgcaggacatgaccctggtctacgatccctttacccccagaacgctgctgcaggagctgactagcgctatggcccagcgcaacgttcgtttgagtctgataaacgcgtcgcgcgacgaggcggaaaagctgctggcgagcgggcaggccgacctggtgatctgccaggcgcgccatcgtagcgtgggagacgctatggagtggcgcgccttaggggcaatcgagatggatttttacgctgccgaagcgctttttcccggcgctaaacaaccgctttccctgctggagctttcgctggcaccgcaggtgattatgcacccggatactgacgagcccgtggcccgccgtctgcaaatttcaggacataccatctttaccaacgatctggagatgctgcgcggcctgcttgaacagggctgcggctggggattcttgccgacgcacatgaatgcggcgcgctggaaaaacgtcacaaccttgcgcaccgaagttggcaatcaggggatcggccaaacgatggtcactatctggaagccgggcaacgacaggcgggcgctggtggctgacacgctggacttgttgccggcattgtggtga

SEQ ID NO: 236987 - DNA, 1308 bp, Klebsiella pneumoniae
atgaaaagcaaagtgtttaaccctggcctgctgtctggcgttgttatcagtctctgcagcgtcctgctggcgcccgccgcacaggccgcctgtaccggcaccgaacttagcgcctgtcccgccccctttgatgcgacgcttccggatccccacaaaatgctcacctggagccagaccgagcgggtaatcggctttcgtaacgactaccgctattacgcgggcgatgtgtttcatcacggtaatgccgtgccgttgcaggccgcggcgaaacgattaaccgacgcaagctatcgggtgaacggccaaacctggaatctgcaggattacctgcggcgccagaacgtcagcggcatgctggtgctgaaaaatggcaaagtggcctggaaatatctggcagaaggcaataccgacaccaccctctggacatcgcgctcggtaggcaaatccgtggttgccaccctggtgggcgtggcgattaaacagggcaaaattcactcgctcgacgatctcatcacccagtatgaacccgacctgaaaggcaccgcctgggacggtgtgaccctgaagcagctgattagccacacctccggggtggcgtggaatgaggactacactaatccgcaatcggacttcgcccggcttaccgagtgtgaagccagacccggcgcctatgactgcgtacgtcagttggtgtccggcctgcgccgcgcgcatcctgtcggcgagaactggtcttactcctccggcggcgcatggctgctgggggatgtgctggaacgcgccaccggcatgacgctggcggcatatctggaaaaaagtatctggcaaccctacggtatggcgagcgacggcgtgtggcatgcctacacaaaaggtgagcacgatgtgggcgcgcacggctttaacgccacgttagaggattgggggcgcttcggtgagttcattctgcataacggcgtgctgccggacggcgagcagatattgccggaaaactgggttgccgagtcatcacgctggacccgggcggcaggctcggtgtccgcggcgcatccaaacggtatttacggctaccagtggtggagcaatgaagtgccggccaatgcgaccaacgttgaacctgcgccgcaggcatcccttaaacactcgctgtgggcgctgggcatttttggtcagatgataatggttaatcaggcggaaaatctggtcatcgtccagtggtcgacctggccgcaggctgagcccgccttcagcgcccaaccgctggaagcctcgctgatgtttagcgcgatagcgaaggcactacgttaa

SEQ ID NO: 236988 - DNA, 669 bp, Klebsiella pneumoniae
atgaaccgctatgaaaaagagtatcggcagttgctggcaaatggcgctatcgcctgggctggcgaaggttattcccgggccaaagaacagcaggagcgcgtttttagctggcttcatttacagcactatttcccccaacccggcgcgcctgtacttgagctggggtgcgggaatggcgcgatggccgcgcagtattttgcggaacgaggctattcggtgtgggggatagattggtccgaaaccgcgatccgatgggcacaaaatcgttttcagcaagcgggtctcccggcaaatttttttgtcggagatgtctgccatattcatcagtgtcaggatgcgacgtttgagctcattgttgatggcagctgtgtgcattgcctgattgatgatgcccgccacctttgcttcgccgaagtcagaagattactgaaacccggaggacgactggtgatcggctccatgtgcggaaccccgcgtcatcccgaggaaattctcgcgtacgatcctatccgccatcatttacttaaagagggcaaaccctggcgtacgttgcgaccgctccaggccctgctggacgagattcgggcggagcaatttacggttcttgaggtgaatattaatgagaacgcatggtgggatcatgccaccgtggtatgtaaagtagattaa

SEQ ID NO: 236989 - DNA, 888 bp, Klebsiella pneumoniae
atgaataataagctcaacgccatttccaccttcctgcgcgtggtagaggcgggatccttttcagcggcagcccgccagtgcgggatgaaacaatccgccgtcagtcagcagatcgcggcgcttgaggaggagcttggggtggtgttgctgcaccgaaccacgcgtgcgatggcgctgaccgagcagggggaaagctaccggcgcgatatgcagcttttgctggaagcgatgcatgaagcggaaaggcgcttacagccaaccgatcgccagtggcaagaccgggtgcacgtgcagctgccgagcggtctggggcagctctttttgccgcatctgctggcgctgcagaaaatgcaccccgagctgcgtctgacgctttcccttgatgaccacattgccgatctggttgctgaaggggtggatgtcgcgctgcggttgagtagtgaaccgccgccggggagtgcggcgcgcgtgctggcgcgtattgaaactgcgctctttgccgctccgggttttaaaacggtgcatgccgtcagcgagctggctgcccacccgcacgtgcggttcagcggcatcgcgcaggacgcgccgctgcggttggtctcgggtgataaaacggttgatatgaaagtgaataccgttttccgtgccaacaccagcgaagcgctgctgcaggcgttagagtccggcattggtatcggcggtatgcagtcaccccttgcggcccatgctttgcaatccggcaggctggtaccggtattacccgcctggcgattacccgatcgcgttctctatgcggtctatcctgacgcccgctttatcccacggcgggtaagaagtattatcgacgtgattgaacaattgctgcctgagatgacggagagcgtctga

SEQ ID NO: 236990 - DNA, 1056 bp, Klebsiella pneumoniae
gtgaataagatactgcaacccaaaaccgccctggtcgccggcgccagcggcattattggcagagagcttgtgaaaacgctgttacgcaatcgctgggaggttatcggcctcagccgccatgcatcgtcccacccggacaacattcccttcattcacgtcgatttactggatgcgcagcacagcgcgcaaaaactgcattcgctcaacggcgtcacccatattttttacagcgcatgggccaacgccgggaactgggcggaaatggttgaaccgaacgtcaccatgctgcgcaacctggtcagcaacatcgagcagaccgcaacgctacggacggtaagtctgatgcagggatacaaagtgtacggcgcgcatcttggtccgttcaaaaccccggcgcgtgaaagcgatcccggcgtacccggggccgaatttaacgccgctcagctcacctggctcagccatttccagcgcggaaaaacgtggtactggaacgcgatcaggccgggcgtggtcggcagcacggtgcccggcaacgccatgaatctcgcactcagcatcgcgatctgtgcttcgctatgtaaagcgcagaatctaccgctgcgtttccccggttcggaaaaaacctggcacagcatcgtcgatcatacggacgcggggttgctggctgatgccacgctctgggccgcgacctcgccaacggcgcaaaaccaggcgttcaacgtcaataacggcgacatctggcgctggtgcgagctgtggccgcgcatcgcgagctggtttgaactggcatccgccccgccggtcagactgtcatttcaccagctgtttgtggattaccgcgcgcactggcgcgaactggccaggcagaatctggtggaagcggacattttacggctcagcgacggtaaatttgctgatttcgtctttggttggaactacgacatgtttggcgatggcagcaaactgcgccgggcgggcttcactgaaatgcaggccactgacgacatgtttttccgcctgttcgctcagctgagaaccgcgcgcattatcccctga

SEQ ID NO: 236991 - DNA, 756 bp, Klebsiella pneumoniae
atgtttgagtcggatggactccctctctatttaaggataaaagacgttatcctgcagcggatcctctcttttacctatgacgataaactcccgggtgaactgctgctcgccggggagtttaaggtcgcgcgcggtaccataaaacaggcgatagattcgctggccagtattggcatggtgtaccgcgaacagggtaaagggacgtttattaaccgcgatgcgctgcagaaatactacaccgacctcccggacgtactgacgacctttgctccgccgggggagatagccgtggaagttctgtcgctgatttcaaccatggccgaccgccaggtggcggagcaaatggggctggatttaggctgccagctgatgcgtctggagcggctgttagtgcagggcgacaggccggttggccatgtgctgacctggctcaatggccgtatctataacgatctgagccacgtggacggcagccgatcgctgtataagcagctgcgggaaacgttcggctactcgccggccaacgccacggaacgctatacgccggtgtgctgcgatagccgcacggcgggattgctcaatattgaacccggccaggctctgtttcgcattgagcgcgtcgcccgcgatctggatgatgtggtgcttgaatacagcgtcacgcatacccttgacgccagcctgtcgctgcaaatcgccaccagccagagcagcatgagccagcagtgggcctgcacgatcgagaaagggcgttaa

SEQ ID NO: 236992 - DNA, 741 bp, Klebsiella pneumoniae
atgagtcaggcactgaaacaatactacagtcagatccgccagaagctggcttttcttgagcagcgccacgatgaactcacacgggcggcggaaatcatgtcccacagcattatggggcagcgcaacatcttcgtctttggcgccagccacgccgggatcctggcggaggagatgagctatcgcgcgggcggcctggccatcatcaatccgctttttacgcctgcgctgatgcttaacgtcaggccgttaaccctcaccagcgcggtggaaaatgtggagcacctcggtcgggtactggtggagcagtcgccgctaagggctgaagatacgctgctaatccattcggtgtcgggacgcaacgcgattaccattgatgtcgcgctggcggcgaaagcgtgcggcgcaacggttatcgcgattaccagcctggcgacggcggcgcgcgtcacgtcgcgccactccagcggcaagctgctggtggatgtggccgatatcaccattgataaccactgcgaatatggcgatgcggcggtgagcctgccggggatggcgcagaaagccgcgccgctctccaccatcatgggcgcgaccatcgccaacagcctggtattacgtatttgcgaaatcatgctggaaaatgcgcgcacgccgcccattctcgccagcgcaaacatagacggtaatcaggagataaatcaggatatacttagcgcttacaggagccagatacactacctctga

SEQ ID NO: 236993 - DNA, 1311 bp, Klebsiella pneumoniae
atgagcgagtttcttggcgtgctgcgctggatcaccatcaatatatttggtgaagcgtcgatcttaattggcctgattgtgctgctgggccttgtgctgcaaaagaaatcgctggcggacattgtgtccggcaccctgaaaggcattctgggctttctgatcatcggcgcgggggccgggattatcgtctccgcgctgctgatatttcagccgatctggaccgaagttttcggtctcagctctatgaacctgactaatattattggccaggcgcgcttcagcgaacgctacggaagcagcgtgaccatcgccattgccggcggtttcgccatcaatttgctgctggcccggctgacgcgatttaaatacatctacctgacaggacatatgatgttctggacgacgatgatctttgccggggtgatggtgaacaccgagcccgctatttcagcggtacagctgacgctgatgctaacggtgattatggggctctactggactctacagcccgcgctggttcagccctgggtgcggaaaatcaccggcaacgacaacgtggcgctggggcatacttccgcctccgtcgcgctgctgggggcgatttttggccagattttcgcccgcaacaaaatcagctccgaagatatcaaagtccctaaaaagctgggttttctgcgcgactccaacgtggtgacggcgttgaccatggcgctgctgttctttattggcacctttattctgcagattaaaggtacgccgaaagcggcggagattctcgcgcaatccggcgacctgagcttctacatctatgccctcaaacaatcgctgatgtttaccggcggcatcgccgtggtgctgctcggcgtacggatgtttattggcgaaatggtgccggcatttaacggcatcggctcgcggctggtccccggcgcaaaaccggcgctggattgcccgatactgtttaactttgcgccaaacgcggtggtgctggggtttgtcggcgctttcgtcggctcgctgctgtggctgaccctgatcggccgctataccggctacgtctttattcccagcatgatcgtgattttttttcacgccggtacggcgggggtcttcggcaatattaccggaggctataaaggcgctctgctggcggggtttatcacctcgaccgtggtcgcctgggggcagtatttctgcgtcaccggttttatcgaccatacgattccggataccgcgctatgggcaggcgacagcgatatgtttgtcctcgcgccggtcattcatctattgacccgcctgctggcgttctga

SEQ ID NO: 236994 - DNA, 288 bp, Klebsiella pneumoniae
atgaaaattctgacagtctgtggtttaggtatgggttccagcctgattttaaaaatgaacgttgaggcggtgttaaaacagcacgggattcaggcctccgtggaacatatggatgtctcttccgccgcttcgtccaacgccgatgtggtgataaccaacgcggagctggtgtacaaccttaagcatatgtcctgtccggtggtggtggtgaacaactatatcgataacgccgaaatcaccgcggcgctgacccaggcgaaaattctgcccgcaggagagccgtcatga

SEQ ID NO: 236995 - DNA, 444 bp, Klebsiella pneumoniae
atgattgagcgtcaggcgatacgcgttgactgcccggccgctacccctgaggaggccatccgcgaggcggggaacgcgctgtgccgtgcgggagcctgtagcccacaatacgtccaggcaatggtcgatagctaccgcgatctgggcccctattttgtcattgcccccgggctggcgctgccgcatgctcgcccggagcagggggcgataaaagcgcagatcagcgcggtcaggctgcgtgaaccgctggcgtttggtcatgcggaaaacgacccggtgcaggtggtgctggggctttcggcaaccagcagcgatgcccatatccaccttatccagcatatcgtgaccgtacttagcgatgaaaataacctgcataccctgatgcattcgaacgatccagaacaactttatcggctgttagccagcggctcgcagcgtttgtag

SEQ ID NO: 236996 - DNA, 741 bp, Klebsiella pneumoniae
atgaagctgcatcgtttaaacgaaagcgaggcccggcgggcgttacaaaaggcgcggatcgccttactgccgctcggcgccgtcgagccgcacggcgaccacctgccgctggataccgataacctgctggccgagcggttttgcgcgctgcttgatgagcagctgggcgagtgcgccctgagcctgccggtcgtttcctacagccaggtctggtccctgcgcggtcacgcgggcgcgattgatataggtcatgaacggctgacgtcgctgctggtgtcgctggcggaaaacatggccagctacggtatcaccaccacggcggtgattaacgcgcattacggcaattttgatgcgatgaaagcggcctcccggcaactaaaagagcagggtattaccttgcttagctatagctgggcggggatggaggaggaggtaaaacagcggcaaaccaccgtggtggcttaccccggctatatgcatgctgatgaggtcgaaacctcgctgatgctggcgctggcgccggagttcgtcaccatgaccaacgcccgcgcgcactatccggctttccccaacaattttcgctatcagccgataccctggaccgagttttctgactatgcggtgttgggcgatccgactgccgccagcgaagagaaagggcgcgcgttcgtccagcgggcgctggcgaccacgcttgcctctatccgtcatcacttaacccaaggagcctccgatgattga

SEQ ID NO: 236997 - DNA, 972 bp, Klebsiella pneumoniae
atgggcatcattcgaacgttaaacggggatatttccgctaatcagctgggcgtcacctacagccacgaccatatttactgtattccgccctactgggccgagcgtcaggatgacgatctgttactcgacgatccgcaggcttcagagcgtgaattgagcgacttccgccgggcgggtggtaacgccatctacgacgccaccgcgccggattatggccgtcaggccgcagccgtcgccgccatggcgcagcgccagcagctgcacattatcgccactgcgggttttaacaaaggctttctgtggagcagcaagcggccgggctccgcgcaaactttcgccgagtggattgcacattcagaggttgatgaactggttgaacatgtctgtcgcgaggtcactgaggggatagagggcaccgaacatcgtgccggcgtggtgaagtgcggcaccggctataatgccatttcccctctggaacaaaaaaccatggaggttatcgttcgcgctcagcagcgcaccggggcgccgatgcacagccatacggaaatgggaacgatgggacttgagcaggcgcagctcttcaaaaaatggggactggatctatcccgcttatgttttgctcatatggatcgcaaccccgatccctggctgcaccgtcagatcgccaacaccggggcgtttctctctttcgacggtatcagccgcatcaaatatcatcccgagcacatccgtacccaggccatcctggcgctctgccagcgcggttatcaaaagcaaatcttaatcggcggcgattttgcccgtaaatccatgagcgcgcattacggcaaaggggggctggggctgaaatttatcctcagcgactggcggccaagattcattgacgaggcccgggaagccggttttgacggcgaagcgctgctgcatgatttcttcgtcgacaatccggcgcgttacctcgcttttgcctga

SEQ ID NO: 236998 - DNA, 249 bp, Klebsiella pneumoniae
atgttacgtgattttttgaaggtagaaaaagaggatcgtctggtcgagcaacaggacgccagcagcggtaaagcgaattcaacggacgtcaccgaatggactattgtgaataaaaatggtgataaaaaaggccgggtggcgttattcaatcaatttaccacccgccgttcctattgcgtgaattaccgcatcacccagtttgataatagcggcaaagtggttgtcgaccggctggcggaatcaatctga

SEQ ID NO: 236999 - DNA, 207 bp, Klebsiella pneumoniae
gtgccgcaggaaattctcgccggttttcaccgtgcgcctccggatttaagcacttcaatactgacggatcgcgaggccggtctgccgctggagtgggatattcgtaacggggtcgttcagcgatatggccgtattcaccatatccccactccgttaagcgatgtgattgtgccgctgctggccgccgccagcgacgggccgggctaa

SEQ ID NO: 237000 - DNA, 429 bp, Klebsiella pneumoniae
gtgctccaaaacggcgttgaacaaaaaacgctgttcgcgccgtacgtggcggaagcggccgtgctgccatcggtcgtctggttccccgcccagcgtgaacctgaagcgtcagtctggctgcgggcgaaaccgcgcctgacgctgccggatgttgagggggccgagcgggtgcggcacgcgctacaggacacgcgctgtgaagtggatatcagcgcggattttctctccgttgcgtggcgtaaacttctgcagaatgcggtcgccggtctgatggtgctggcgggggggcgggcagggatgtttgcccgcgacgatattacggcgcttgctttagcctatttgcaggaggggctgacggtggcgccagcctggacgacggcgtgccgcaggaaattctcgccggttttcaccgtgcgcctccggatttaa

SEQ ID NO: 237001 - DNA, 423 bp, Klebsiella pneumoniae
atggtgaaaagtgtgtacgctgacacacacattcagattacccatatgaataaaatggtaatgcgaacgaagtcgcgtttatgttacgtacccaagaaacctcaggggccggaagcggagatgacagttgaagaacccaccgttgcgctgatcggtccgggcgcaattggtaccaccatcgccgcggcgctgcacgaggttggccgtacgcctctggtatgcggccgccgtgctcacccgcagctgtcgttgcgttttgatggcggaaatattgtggtgccggggccggtcttgacggaaccggcatcggtcgccgcgccgtacgacctggtatttgtggcggtaaaagcgacacattgcaccgtggctgcaagcgctgtgtcacgaacgaacagtagtctgcgtgctccaaaacggcgttga

SEQ ID NO: 237002 - DNA, 219 bp, Klebsiella pneumoniae
atgtttccagaatacagagagctgatttctcgattgaaaaccacgcatccgcgctttcagtcgctattcgaaaaacataatgcactcgatcacgacatttcccgcatagaaggagtcgatggcaaaggatacagtctcgagcttgtacagatgaagaaagaaaaacttatgttgaaggacgaaatgctcaaaatcctccagcatgaaagcctgatgtaa

SEQ ID NO: 237003 - DNA, 684 bp, Klebsiella pneumoniae
atgccgatgattgaccgacgcggtcatggtcgttcagatcaggtgagtgacggtcacgatatggatcattatgccgctgatgcctcagcggttgcggagcatctggatctgcataacgccgtgcatatcgggcattccaccggcggcggacaggttgcgcgctacgttgcccagtatggccagccgcaggggcgcgtggccaaagcggtgctgatcagcgcggttccgccgttgatggtaaaaacggagagtaatccgggcggtacgcccatcgaggtgtttgatggttttcgcaaagcgctggccgccaaccgctcgcagttttatctcgacgtggcgtccgggccgttctacggctttaaccgtgagggcgcggaggtgtcccagggcacaattcagaactggtggcggcagggcatgaccggtagcgcaaaagcgcactatgaggggattaaggcgttttctgaaaccgaccagaccgaagatttaaaagccattacgctgccggtgctggtgctgcagggcgatgacgaccaggtcgtgccttatcaaaacgccgcgatactgcaggataagctgctgccgaacagccagctaaaaatttatcccggctttccgcacggtatgcatacttcgcacgccgatgtcattaacgccgatctgctggcgtttattcgcgcctag

SEQ ID NO: 237004 - DNA, 2322 bp, Klebsiella pneumoniae
atggataactggtcagcgcttttcgacggacagagccgctatgttctggagattaataacagcccgctcaggccggatgtcctgcgctttcgcggcagggaagccctgagcgaaccattcagctgggacatcgagttcacaacgcttcaggcgaatatccctcctgaacaggtgctgatgaagtatgcgtcgctgcggatgcgtggcggcaaaaatgtccacggcatggtgacccgcctggaatggctgtccacatcaaaagaccagtcgcactaccggctcacgctcagctcccgcctggcgctcctcgggtacacccggcagtgcgccgtatttcagaaccagtccgtcccggaggtggtggagcaggtgctgcgccagcacgggctggaaggggctgattttgagttccgccttgagcgcacatacccgccacgtgagcttatcacccagtggcgggaaacggatttgcagttcatccagcgcattctgtctgaagtgggaatttactggcgcacggagatggacgacgtgcgcggtctggatacatacatttttgccgacagccagctgaactatcagtttgatgtacgcctgccctacagcgaaccctcgggtctgtttgacggcgcggcagagtcggtctgggatgtgcggacctggcacaggattgccaccggcaccgtcgccacgcgggattacaactaccgcaccgccaccacgccgatggatgcaacggtcagcgtgcgcagtgatgcggtcaccaccggggaacactaccgctacgccgcgccgtaccgtgacgcgggcgatgacaccagtccggagccggaaaccgaatccggcgcattttatgcccgccttcaccacgagcgggagcttaacagatcggcccgtattcacctgttcagcaatgctgcacacctcactcccgggcaggtgctggagccgcagggcgacgtcattacggccctgcaagaaggcgtgatcctcacgctggtgaccttccgtggcgctcgtgattcccgtctgcacgtgtcggtatggggcctgccttacaccgaacgttactgtttccgcccggcggaaatcccgcgacctgaaatccacggcacgcttccggcgcggactgaaagccgggagaaaaatgatatttacgcgcatctggacgaacaggggcgctaccgggtcaggctggattttgaccgcagcgacagcgaaccgagctacggctacctgtggttgcggatggcgaagccttatgcgggagacacgctgggctggcatacgccgctcattgacgggaccgaagtggcgatagcgttcagcaacggtgatattgacctgccgtacatcgcgtatgcgctgcatgactcggaacatcctgaccacgtaaaccgggacaatcacacccggaacattctcagaactcccgcgaacaacaagctgcggatggaagacaaacggggtgaggaacacatcaaacttgccacggagtacggaaagacgcaactgaacacgggccatctggtgggcagccagggacaacgtcgcggccagggctctgagctgcgcaccgacgagtggggagccctgagggccgggaagggactgtttgtcagtgcggatgcgcagccgaaagcgcagggtgacgcactggatatggatgccgcgctgaaggaaatcgacaggcttaaccagcaactgcaacagctggaaatggccgcagagcaggctctggcgctgaaggcggatgttgacagtcagatagagatgtttgagcagcggctgaaaccgctcaacgaagccgtgcttttctcggccccggaaggcatggccctcaccagcggggagcatctgcaaatgacggccacgaagaatgtcgccattaatgccggggaggatatcagtgccggtgtcatgggcaacatgaccgcactggccggggagaagctggggctctttgcccggaccggacaactgagccagaaatccggagaagggccggtagaggtccaggcccagaacgccagcctgcggctgtttgcggagaagaagctgacgctgagctcggcgagtgacatctcgtttgccgggaaaaaacgcatcacgctgattggtgggggaagttacctgcgacttgaggccgggaaggtggagtatggtacgacagcgatgtatatgcgcaaagtgaaaaggacgatggcggcgggtgcggcgagtatgccggttaaagccgtgacgggtggagggatctgcctgagctgcctgatgaaagcgacgatgaatggagacacttttgttataaggggcgagtcatga

SEQ ID NO: 237005 - DNA, 876 bp, Klebsiella pneumoniae; identical to SEQ ID NO: 95002

SEQ ID NO: 237006 - DNA, 975 bp, Klebsiella pneumoniae
atggcaagaagcgatcttgtattgaaacttgctcaagcaggtttaggcggcgataaggcctcagtgaggcgtattgttgaggctattatctcagaagaaagtactaggcaacatcacatctacgcgcagaaactaaaagacacacttaggtccgctaggtgggctgaaccttctgattcaaatggtaacaatgctgttttctcatatggcagcgcttcaaaaatagattctacacaaaatctttattcagaagttgttagcaatagatgtatttccgatctttatttggaaccggacgtacggcttatttttgaagagttaattgaggaacatacgcgtgctgatttattgcgttcatatgctttagaaccgagaagtaaggtattattgaccggacctccaggaaatggaaaaacaagtttggctggagctttggcttatgagctagggcttcctatgtatgtaatgcgttatgagagaataattggtagttatcttggcgagacagctactcgacttcaagctgcttttgatttttttagaactcgaccatgtgtaatattttttgacgaatttgatactattgggaaggaaagaggcgatgtgcacgacactggagaaattaaaaggatagttagtaccctgttacttcaggtcgatgatcttccttcgtataatgtttttgttgcagcaactaatcatcctgaattaattgatagagctgcttggcgtcgctttcagattcatgtcaacttaactcctccaaatcgtgagcaaattctaagttggttaaagagttttgaagttttgattggtgagagtttcggtgaattgactaatgatacggttgataaattggatgggcttaatttttccgatattgaaggggtttttcttgatattagaaggaaaatcgttctttcagaaggtcagttaagccttaaagacgtcattaggaaaaaattatcattttaa

SEQ ID NO: 237007 - DNA, 2547 bp, Klebsiella pneumoniae
atggcaaagcttccattactgattcttaaccctccaagcgcagacactcgcataaagggtagtcctagattttttagcatctcaacgcctaatccaagccgtcaattatctcggttagggccaaagtttgatgctctgagccgttattctcaaaatccagtttctaatggagttatttctgatgatactgatggcttgcatcctgaaaaagcgattgtattcgaattagcacaatccaaacaagagtttaaaaaagctgctgagaagcttggtttgacttgggttgatgaatcagacttttcatatgatagtgatgatgatttttacgataaaaataaatccggaaaaatgatggagggtcggctctatttaaccgtgccaaaccagcgtgcaattaatgaactgctcaagctatggtctatttatagcacaggaaaaacgctgcctaccggctataaagattgggataagctattttctcacttgattaatatacgtccatggggcgcgcaagatagacttacaccagaggcagttaaatatattgaaaatttgagaggggaaggagatgagagagttaatttcgaggttgagctgatatttcacggctcagaaaaacttgacattgcagctgcgcaagccgtgctgaaagacattgagtctacatcaactgaagttcttgatacctcatatatacccgagattaggtatcatgcgattcttatttcaagttcttatcctgaggctaaaaaactattaaaattagaatctagtttgttaaaaaccgatgaggttgcatatatacgccctcaagctatgagtattttttcttcagagcctgaggattttgaacaagttaatgagttaccaaaaaaagtacatttgaagtctccggtagcagcattgtttgatggggttttattacaaaatcatgaacttttgactgaccgtttgataattgatgacgaggaagatctagaaagaacatccccggttaatactcgccatcatggtactgccatggcttctctaattttacatggcgacatcgcaaaaaaagaagagcctttacaacgaaagttgtacgttcaatatttgcttgcagcaaatcaagagtcttccgttgaaaccacccctaaatcacgattgttacttgacgttatttactctgccgtcgtgcgtttaaaaaatgctccaaaggatcttggtggtgatgtttttgtaatcaatctatcattaggtgatgtaaatcgacctttcctaggtcaaatgagcgcttggggacggctcatagatttccttgcatggaaatataatctgctttttataataagtgcagggaatatttcagatggtttaattcttcctgatgttatgagaccaactcagataacaaaaatgactgatgagaatagacatcttctattcattaatgcggttcaaactaaaatggcatatcggagtatattttcgccagctgaggcgattaatgctcttacagtaggagctagccattctgatggttgtacaactattccaagcccatatcttattgaaccatattccagtgataaattccctagtttgatttctggtttaggtttagggtataaacagtcagttaagcctgagattcttacttgtggaggtagagcactatattcttattgtacatcagcagatggattaaccttgattccgggaaaggcagggcgctactttggtcagcaagttgcaggtgtttctagcacaaatgacttagttcgtacgataggcacaagtaattcggctgcgttagcaactagagcagcagttattattcatgatgagcttaaatctcaattttctccttcagagtttggacgtattcggccatatttaccatcgctcgtgaaaggattaatcgtgcattctgctagctggggaagtgcaggatctttcttggaagacaccttagagccaaaaggtggtcgattatggaaaaaccgccgctctaacatcacacgttttttaggttatggaaagattgactatacgcgtgtcctggaatgcaccaaacatcgagtcactatgctaggcgttggtaatttagagtgtgagggggcagacctggttagtttccccttaccaaaatctctctcaggtaaaaaagatgttagaagactagtgattactttagcttggcttagccctaccaagcctgcagagcagttttataaagatgcactattagattttatgactgaagatactaatggttcgccgattggggtttcacgagtggctgcaaatcagcctccctcagatacatctcggcggggtacagtgatacatgaaatatatgaaggggaagatgctgtaccaattgctgaggacgacattctgagaatccgagtagaatgtcggacgcaaggggcaggaggattaccacgtataccatatgctttgattgttacatttgaagtggccaatactttaaaagctaatatctactctgaaatacgggatggaattgtattagcttctcgtagcaaaattaaaaattaa

SEQ ID NO: 237008 - DNA, 1254 bp, Klebsiella pneumoniae
atgctgacagcgattcggactccgacagcgactccgattccgacagtgattcggactctgacagcgactctgactcggacagcgattcggattctgacagcgactcggattctgacagtgattcggactctgacagcgactccgattcggacagtgattccgactctgacagcgattcggactctgacagtgattccgactctgacagtgactcggattctgacagcgattctgactcggacagcgactctgactccgacagcgactcggattctgacagtgattccgattccgacagtgattccgactccgacagcgactcggactctgacagtgattccgactctgacagcgactcggattctgacagtgactcggattctgacagcgactcggatgctgacagcgattcggactcggacagcgactcggactctgacagtgattccgactctgacagcgactcggattcggacagcgactccgactccgactccgactctgactctgacagcgactccgattctgacagcgattcggattccgacagcgactcggactctgacagtgactcggattccgacagcgactcggactctgacagcgactctgactcggacagcgattcggattctgacagcgattcggactctgacagtgactcggattcggacagcgactccgattctgacagtgactcggattctgacagcgactccgactctgacagtgattccgactctgacagcgattcggactctgacagcgactccgattcggacagcgactctgactccgacagcgacagtgattcggattccgacagcgactcggattccgactctgacagcgactcggactctgactccgactccgactccgattccgacagcgactcggattctgacagcgactcggacagcgactccgactccgacagcgactcggactctgacagcgactccgattccgacagtgactcggattctgacagcgattcggactctgacagcgactcggactccgacagtgattcggattcggacagcgactcggactccgacagtgattcggattcggacagcgactccgattcggactccgacagcgactcggactctgactccgactccgactctgacagcgactcggattctgacagcgattcggattctgacagcgactccgactccgattcggataccgaaccgcaggcaaataatgatacccatacggcggctatcgataccgtag

SEQ ID NO: 237009 - DNA, 450 bp, Klebsiella pneumoniae
atgaggctcaattcagaattaaacaatactgatatcgatgaagatgaaatggaacgatattataactttttaaagagcacatttaataacattgtttatatgaaaatattatctgaccctataatgttaaatgagcataaatttataattaacaaaaaaaatgaaacgattattaaggctataaaagagattgaatcatttaaaggccagctggcaaaagaaactgaaaaaaaagaattatttgaatcaacaataaaagaaatgaaacaggaaatatttaagctaaaagaatcaatcgataatacaaaacatcttaataattctttgctaacgcaattagataatgaaaaaaacagagctaattcattcaatgaaaaaattaatgaattaaaactcaaggattatgaaagcatgaactttctagagcgttttaaacgacttttcaggtaa

SEQ ID NO: 237010 - DNA, 285 bp, Klebsiella pneumoniae; identical to SEQ ID NO: 70433

SEQ ID NO: 237011 - DNA, 942 bp, Klebsiella pneumoniae
atgaagttaaattatttcacttacagaataaccgacaatagaaatcaaaaagtttattttgataacatttcagatattatcaaaaatttttgcttgcatagaaaaaaatctctttttgagaaaagcaaaggattaaaaagactgtacctagccatgcccacttcatttgatggcatatactatttgaccacgccagcaattactacagcatttaaagctgtagatagagcaactggtgtagtaaatgatttggcgtctgtgctgggtaaagatagtctagagaaagttacttacttttttattgaccctaaacattcgataatcggagtaactgagggtaaaggtaatgctgacattgatgatttacaattctttattaacgaaataattaatcaagattttcaatcgcatatttacaccttcgagctttgcacgttaaaaatagaaatcaaatccacatcagctacgaaattcaaactcatcactgaagcacgagtgaagttaaataatgattccgttggagatgtaataaatggattatttggtaaggatccatcagacaatatggaagtgcaaattattgtaaaaagaaaagatagaaaagagaatgtgaaggattatatacagccattactctcaagtctatcttcatccaatgacaaagaatatgcagaaatttatttcagagctaaggcagatgaatttcaatcaaatgtgaaagagtttatcttagaccaaaatcagaatatttttgatataataaatcctcatctcaaagcaaaaattgaagagcaaatacttgaaaaaagatacaaaaatcaagttgtgataagtgaattgagtacatatgcccaaaaatttactggacgcatacattcaggtattattgatccagtgtggaatgatctaaaaaaagaaagttaccacaaatcaaaaagttga

SEQ ID NO: 237012 - DNA, 315 bp, Klebsiella pneumoniae
atgccccgtaacctgcagctggttgccccggaagtgattacggtcgcagaggctgaaacctatgccgaccgcaaagcagcagtcacgctggccgtcaggctcatggagaaaacccgaccggccaccggcaacgcctacctcacccgcaagggttttcccgctctggaatgtctgacgctcaccgccatgcataaaaccggcggcgtgacgttccgcgcgtcccgctgtatgacgataccggcccactggttatctggaaatgctcccgaagaccaacgggatgtttgtgtggaatgctggcatcaacccgcgtaa

SEQ ID NO: 237013 - DNA, 228 bp, Klebsiella pneumoniae
atgctcccgaagaccaacgggatgtttgtgtggaatgctggcatcaacccgcgtaattactctaaatatctctatcacgtgtatctggactatatggcggccagcgggtacagaaacgcgctcagcctgaaaatgttcgggctggggttgcctgtgatgctgaaagagtacggcctgaattatgagaagcgacacacaaagcaggggatacaaccaacctgtcgctga

SEQ ID NO: 237014 - DNA, 867 bp, Klebsiella pneumoniae
atgagcaatactaaaaatattggacagctatttacaagtcaggctattaatgctgttgcagatggcgatttttccttactccatgagttaataggtaatgtattaactcctaaattttttcctgttaaagtatccgaaatattcgatatagcatttaagaaattatcacgtgaatataaatcagaatattttttcaaaaatattatagcaaatgaagtgtttttgaaaaaacataagaagaatgcagctgtaatgctttctgaatttcgagttggaacaaataaagctgattgtgtaatattaaatggattatcaacttgctatgaaataaaaacggagttagataatttaaagagattaccggaacaattaaattcatatataagtttattcgataaagtttatgttgtagcagcaaaaactcacatcgaaaaaataaaactaatcgttccagaaactgttggtatcattgaactcacggataaaaataagcttgaggaaattaaacctgcattaatcatcaactctgaaattaatccaaaattaatgattggttcaatgaggattgcagaatataaatttatggcagaggaaatatcaggggataagattaaccttccaaacatggatgtatattctttctgcttagaaatatttgagaacacagattcttataccttaagaaaatactttcgtaactccctgaaaaagcatagggctaatgatattaactttattaatacgctacctagatcactaaaatcatcggcaattagctatagtattactcagactcgtcagagatcgctgaccaaaatactatcaagctacattgaaaaggatgatatatgtacttccctttattga

SEQ ID NO: 237015 - DNA, 912 bp, Klebsiella pneumoniae
atgtacttccctttattgagaggtaagcagtacgagttgatagcattaaaagagttatcaactattgttccaaacgatctttttaaaccggtaattgaacccgtacgaaaaaatctcaagcagctcgaaggtgcagttaagttattgaataaaaacaaaatcataccaattataattgttaactctgaaataggtgaattaaaaggtaatacaaataatttcattaaaaatctatataatattaaagaaatatcattcatgccgtgtattaaatacgttgatgacattcaagaatttgatagattgaatggtattataaatggtgagaaagcatcctatgttgagagtggagtaaccaaagagttagtttctcgtttaaaagcgttttctattaacattatacctgaaggttctcctaatattgttttacaacagttatccaacatagtattaatggatgacccctttaaaaagaaaaaaaggaacgctgactatccttctaattcatatttttcggacttgcatgtaaggtattcccgagttcataattcagtaattggttttggtgactttaatattgcgggttcagattacgctgagtctggtggtcctgcatacgtagtgactattcatgtgagctatctagatagtaatgaatttgacgctatgtcagtcagacatttttcttctgtagatgatggaactccctcgaatccttcaggtaaattccagcaagctttagaaaaacttgtattgcacgatcaaaattttcccaagttttttgataatacatcaggcctaagaggtttcaaatcgttacatgcgcgaagacattaccctggattaggtcaggttaagcaattgtcaatgcaacatcatattgaaacgatctgtaacttcatcgcagtctag

SEQ ID NO: 237016 - DNA, 399 bp, Klebsiella pneumoniae; identical to SEQ ID NO: 71312

SEQ ID NO: 237017 - DNA, 465 bp, Klebsiella pneumoniae; identical to SEQ ID NO: 49359

SEQ ID NO: 237018 - DNA, 561 bp, Klebsiella pneumoniae; identical to SEQ ID NO: 15275

SEQ ID NO: 237019 - DNA, 876 bp, Klebsiella pneumoniae
atgctcaccaacctcgaaggccagctgaagcagcagagcgccgcccaccgtctggatgaagtgctggcggaaatcccccgcgtgcgcgaggacctcggcttcatcccgctggtgaccccgacctcgcagattgtcggcacccaggcggtgctcaacgtcctgaccggcgagcgctacaaaaccatcgcgaaggagaccgccggtatcctgaagggcgagtacggccgcaccccggccccggtgaacgccgccctgcaggcgcgggtgctcgacggcgccgacccggtgacctgccgcccggccgatttgctgaagccggagctggccgcgctggaagccgacgtcaaacgccaggcacaggagaagggcatcacgcttgccgaaaacgccatcgacgacgtgctcaccgtggcgctgttcccgcagcccggcctgaagttcctcgaaaaccgccacaacccggcggcctttgagccggtgccgcaggtggaagccgcgcagccagtggcaaaagcagaaaaacctgccgcctccggcgtctacaccgtggaggtggaaggcaaagccttcgtggtcaaagtcagcgacggcggcgacgtcagccagctgacggcggccaccccgtcttccgcaccggttcaggctgccgccccggccggcgccggtaccccggtgaccgccccgctggcgggcactatctggaaggtgctggccagcgaaggccagacggtggccgcaggcgaagtgctgctgattctggaagccatgaagatggaaaccgaaatccgcgccgcgcaggccgggaccgtgcgcggtatcgcggtgaaagccggcgacgcggtggcggtcggcgataccctgatgactctggcgtaa

SEQ ID NO: 237020 - DNA, 957 bp, Klebsiella pneumoniae
atggcctggatcaccgcctggcgcatcgaccgctatgccagaggctcgatgctgaaaacgcccttctatcagcgcgccacgaataccgaagcgctgcctgccgcgcggaaggcggcagaagtgattcgtgataaagaacaggagaaggtgctcagtgctcgccagaaccagatagcaaaccagtctcctgacaggatggacgagctggttctgcagccgggcgtgaaggattttgacccaaagatggatcaaacccagctgttcgacgcggcgaaggagttcggaaaggattaccacgacggttaccgtattccggataacctggcgcagctggtgctggataccgtgctgcagccggtgattttcgttctcaataccgatgatgaagcgcaggaataccggcgcatgaagcgtgacggagaagcccgggtggccgtcctctttcccgatgccggggaggccagcaacgcggagcagcctgccgggctggtgagggcgctgtttgatgaccagatacatgactcacgcgcctggtttatgtatgccgcgctcggcacgcgcgagatgtggaccggttacttccgctaccggatgatttacttcagcgagcgctgcagtaaaccgctctcgccgctggtgctcgccggagacctggtgggttttgcgaccgtgaccgcgggcgtcgtgctcagtttccggcaaaagcgcctgaccggcaagctggccgggctggctgcgacaggcgccgtgcgctcgctggaggtggcggtgctggaccagataaccggggaagcgctgccggagctgcccggaggggagcagctgcgggcatttacccacgagccgggaaccgttgtcgcacagcaaaaggcgcggaaagcggacgagcagctggcgcgggggcaagccgcgctgccggccagctggctggaggacgttctgacgacaacggtctga

SEQ ID NO: 237021 - DNA, 777 bp, Klebsiella pneumoniae; identical to SEQ ID NO: 121845

SEQ ID NO: 237022 - DNA, 954 bp, Klebsiella pneumoniae
atgccgcactttttcattgagcgccccatcttcgcatgggttattgccctgtttattgttctgacgggactgttgtccatacctcgtttaccggttgcgcaataccctgaagttgcgccacccggtattatcatttcagtgagttaccctggagctagcccggaagtgatgaacacatccgtcgtgtctctgatcgagcgtgaaatttcgagtgttgacaatttactctattttgaatcttccagtgacacgacagggatggcgtcaattacggtaactttcaaacccggcaccgacatcaaactcgcccagatggatctgcaaaaccaaattaaaattgtggaatctcgcctgccgcagtcggtaagacagaatgggataaatgttgaggcagctaattccggttttttaatgatggtggggttaaaatcgccaagcggagcctatcaggaagctgacttaagcgattattttgcaaggaatgttactgatgaactccgtcgcgtacctggtgtaggtaaagtccagctttttggcggagaaaaggcactccgcatatggctggacccgatgaaattacacagctatgggctctctgttacggatgtattaagcgccatcagtcaacaaaacgtgattgtttcaccgggcagaaccggagatgaacccgcgacgagcagtcaagaggtgacctatccaataacggtaaaagggcagctctcttcggttgaagaatttcgcaatatcacgattaaatcacaggtctcagccgcccgggtgacactggcagacgttgcccgcgtggaatccgggttgcaaagttacgcatttggcatccgtgaaaatggcgtgcctgcaacggctgccgccattggtaatgactccaacttactgatagtgttttatgttcagataatgcccgatgaccttgtcatgcagctccaccgattttga

SEQ ID NO: 237023 - DNA, 1020 bp, Klebsiella pneumoniae
atgctcatgtcgtaccgttatcactgggcgatgtggggagccatggtagtgctgattgggttgatgttattcagtattaccagagggacagtctcactgtcgctaatgcaggtgctgggagcactgaagctggtggatgagccggtatctgccatggtcagcagaattgtgacggatttacgcgtaccgaggatgttgctctctgtgctgacaggggcgggactggcaatggtaggggcgttgttacaaactaccacccgtaacgatctggccgatccttttttgttcgggctatcctccggcgcgtcagcgggggcggtgctggtgatcacccgttttggtgatcgacttggtgtattaacgctccccgtatcggcgtttgttggtggtgtgtgttccgccatagcagtaatgctgttgtttcattttaaaaagcaacgcggagctgagcatctaattctctgcggtcttgccatctcttttttgttcggggcgctgaccagttatttcattttttcgggcgatcagcgagctgccagctctgtgctgttctggtcactgggtggtctgggattagccacctggaataatttgcctttcgcagtgttcagcctggtgttgctgtttgcttttgtcctgttacggtggcgctctctggatggtgtgctggcaggagaacagacagcgttgtcgctggggattaacgtgagtcgtctgcgcatcgagatttttctttgttgcgcactggcaacatcgttgatggtggcattaaccggcgtgattggatttgttggcttaatggtgcctcatctgtgtcggcattttgcaggcgttaagcatctgttgttgttacctttgtgtggcgtctggggtgcaatattactgtgtggcggcgatatagtcagccggacgatactggcaccgcaggaactaccaattggcattattacggcgggcattggagggttgtttattatcatgttactcgcacgaaattcgtccagaaatacggcctgttaa

SEQ ID NO: 237024 - DNA, 2028 bp, Klebsiella pneumoniae
atggatatgcaaaaagaaacgcttttttcagaagtagaaacagctaacagcaagcagcttgctgtattaaaggctaacttcccacagtgttttgataaaaacggggcgttcattcaggataagctacttgagatcgtcaaatcctcggatgttgaactctctaaagaatcatacagcttaaactggctgggtaagtcctatgcccggctgttggctaacctaccaccgaagacgttgctcaccgaagataaagaccataaccaacgtgaagagaacaagaacagccagaatctgttgatcaaaggggataacctcgaagtattgaagcatatggttaatgcttattctgaaaagattaaaatgatttatattgacccaccatataacacgggttcggatgggttcgcttataacgatgatcgcaagttcacgcctgaacagctttctgaacttgcaggtatcgagcttgatgaagctacacgtatcctcgattttactgtaaaaggttcaagtagccatagtgcatggctgacattcatttacccccgtctttatattgctcgtgagcttctccgcgaagatggcgttatctttatttcgattgacgacaatgaaattagtcaactaaaaataatttgtgatgaaatttttggtgaggctaactcgttgggtattataattcataataaacttaactccaaaagcgacactctaaatatacaaaaaaaccatgattttttactttgctacagaaaatccataacccctgatgcatctttaatcaactattccgtcagtgagcgagaggtatttcaggataatggtaggttttatattcttaaagattcaatcacaacaagaggtgatggtggtacattaaataaaaggaagaatttaggctatactgtatattaccatccagaaacaacagactttattggcgtaattgattacgatatagagttggcatcaagctcaaatagtgaggaggaaatatatagtgacaatgaggaactcatagctaatggatatgtgaaaatacgtcctccaaaagtgagaggtaaacttggagtatggacatgggacataaacaaatttaacaatgaaaaggaaaatattgttataagaaaaacaaacaatgggtatcaagttagaaagagaacatttattgaagaaaaagatgtatttaaaaaggctggttccctctatacaaaggtaaagactgagggaaattcaaggagcattctagattattcaacgaatgatggaacaaatcagttatccagcattcttggtcaccctgatgtattcagcaatcctaagaatgtaaattatttgaaatatattttcagcttggtgcctgaaaataattatatcgcacttgacttttttgctggttctggatcatcgctgcaagctatatgtgaactaaatattgatgatggtggaataagaaaatttattggaatacagatagatgaaaaatgtaaatcagactcaactgcttttgatcttggttataaaaatatatttgaagtaaccaaaaaaagaatcatcaaagcgggagaaaagttaaaaaatgaaaatccaaactataatggagatcttggtttcaaaattttcgaaactgttgatgattttcgagcaaaagatgagtctgaacttacgctgtctaatcttagcttctttgacgatgctgtattgacacctgaacagtatgacactctactaactacatggtgtgtatatgatggcagtttgcttacaacgccaattgaagatattgatcttgatggctacaaagcgcacttgtgcgatggtcgtctgtatatgattgcgcctaatttcaccagtgtagcactgaaagctttacttcaaaagctggattcagacaaagactttgcacctaacaaagtcgtgttttatggcagaaacttcgaaagtgcgaaacagatggaacttaatgaagcactaaaaagttatgctaataaaaaatctattgatttagatttggtggtaaggaactaa

SEQ ID NO: 237025 - DNA, 141 bp, Klebsiella pneumoniae
atgctcgctgtttattttgtactcaataactgctttctgattgatcaggtcccaaagttctttcagttcagtgaacttgccaatacgcattttagtgcgttttttcccatcagtggcttttttgattttgcttggttttaa

SEQ ID NO: 237026 - DNA, 1272 bp, Klebsiella pneumoniae; identical to SEQ ID NO: 235472

SEQ ID NO: 237027 - DNA, 261 bp, Klebsiella pneumoniae; identical to SEQ ID NO: 233400

SEQ ID NO: 237028 - DNA, 234 bp, Klebsiella pneumoniae
atgaccatcgcacaacagcttgaacaaaaaggtatcgagaagggtatcgagcaaggaatccagaagggtattcagaaaggtatccagttgggtgaacagcgcggtattgaaaaaggtgagcgtgaagcctcactgaaaatcgcccgcaccatgctggccaacggcctcgatcgcgacgcggtcatgaagatgaccgggctgaccgctgacgacctggcacaaattcgccactaa

SEQ ID NO: 237029 - DNA, 534 bp, Klebsiella pneumoniae
atgcctgaacttctgacgccgcgcctgcgctgctcaccgctgcagctggacgactggtcgttttttctttccctgcagcaggatccgcaggtcatgctctacgtcgccgatccccgaccgcaggcggccatccgcgaggcgttcgattcgcggctgccgccgtggacgcccggggatgaacactggctgtgcctggtggtgcgcgacaggctgacccataccccgctcggcctgaccggctaccagcatcatcagcgcgacattgccgaggttggctttctcttcgccccggcggcgcagggccggggctacggctacgaatcgctgcgcgcgctgtgcgactacgcctttaccaccggcggcgtgcgccgcctgaccgccagcgtcaccgccggcaacgaggcgtctaagcagttactgctcaaagccggcttccggctggagggagagctgcgggaaaactactggctcaacggacgctggcacaacgactggctgttcggtcggctgcgtggggagggcgatgcgccgtag

SEQ ID NO: 237030 - DNA, 2967 bp, Klebsiella pneumoniae; identical to SEQ ID NO: 59353

SEQ ID NO: 237031 - DNA, 738 bp, Klebsiella pneumoniae
atgtgtataagagacagatttataaccaacaaagtaattttgattcacaacttagttcataagggacaaactcaagactatgctgcctaccataatagaatagcaagtagcatttttttggcactactaatctcccctccccttaatcgtacagacgaagtataccatgcattattaaccaaagaaaaaataacaaatattattgaaactgagttctacaatgacttagacgcttttagcgagaggcaaattgaatcgatatcaaacgttttcagatttatttatagcttaaattataactctgccatacagatgcatacctctttgcagcctcatagacaaaacaatgttataaatgaagatgatgtccgggattatcttgatgtagtatcagcaatatctcacataccaaatctgataggcttgcctcattattcaaaaaaaataaacaaataccttccaacagctttgacaattagagatggaagaagacgaaatacttcattccaagaagagttgaaaaaacacataagggataattccacgcttgcatcattgctttatgaatataataacataatagcctataaagtatccgatgaaacgatagtatcagcaacctcagaaaaaattacaacagttaacggcactaaagagaacaataaccatattgtaagggaatttgatttaagggttatatcaactgataaagcagaggcggaactaaatgctaaatga

SEQ ID NO: 237032 - DNA, 261 bp, Klebsiella pneumoniae; identical to SEQ ID NO: 230755

SEQ ID NO: 237033 - DNA, 1002 bp, Klebsiella pneumoniae
atgaataaagtctggtcttttatacttctcttgccttctttattgtttatttcaaaatttagcatggcatatgaagttggagtgggaattcatcctgatggctactatggaaattctgattcaatattgaagcttatacaaaagtatcatttcacttcgtttcgagttgattatagatgggatgtgattgaaaaggaaaaaggagtgtttactcctcctcagaataaaacagaaaaaatcataatggatgcaaaaaagtataatatcaaacctctcgttatattaggttacgggaatcgcttatatggaggaggtaaaccgaaaacagaggagagtattgcagcttactgcaattttgcaggctggacagccaggcattttaaaggacaaggtgttatttatgaaatttggaatgaatggtctaatcgtaaagataaaggtgcgaatgacatcgattcggcaaaggcctatgttaaattggtaaagtatgcgtctgcatgtataaagcgttctgatcagtctgcaactattattgctggttccttcaatccacttgattatattgacttggattggggggttgagatcgttaaagaaggtattttaaattatgttgatggactttcaatccatccttatacttggggaagcaagagagcctctcgagcagaatttaatattcatctactagataagacacatgatgatctgttgagaatttctggttctaacaagaatattgatttttatattacagaaattggattcccaaccaatagtggcaagcctgaatatagtgaggagtttgtggcgtcctttgcgtataaatatattatcatggcaaaaagaatgaattatattaaaggcgtgtggtggtatgattttattaatgatgggaataatataaattatagggagtataactttggtattcttaatcgagatctctcagaaaaaagtattgcaccagcgatacgcagtgctaatcaacaaataagataa

SEQ ID NO: 237034 - DNA, 1188 bp, Klebsiella pneumoniae
atgaaaatcaataaagttcaagttatttcctttatattctctctatgtaccagtgttgatctaatcagtgtgatggggttccggttaactttaataccattgatcatttatggcatatttattttaattaataaacggacgattgataaaaatatttggtatgtactgttttttttcctattgtgcaccccttctttattttatacttatgacatagggaaatcagtaggttatcttttttggattatctttaattttatttttatatcatgcgtatttaagtctctagcacaggaagattattatcaaactttacagggggttatgaattcatatcgagttcagattgtcattggtgcaattctctatattttacatattcaggaacgagctcatgttttgtactatgagccatcctattttgcaatttcattaattccctatgtggttttagtattagcatcactattaaaacagaatcattcgttgccaactcctgcggcaagaccattagatttgtttttatgcttagtcgcaattgttacaactaaaagcgcgaatttgatactgatttttctgatcgggtttttaattttatcattgtatggtagacgaaaattattaaaagtggcggtaaccttagtatttgccagtattgcatttatgtgtctatacttttatgcgaaagagaataatgatttaattgcaattacatttaaaaacatttttatgtcggataatgtcactcaggctctaatcgaacgcgcaggaaaccgttggtatagagttgaaatggcttatgatgtagctttgcaacatttttggggggttgggattggagcatatacggagttcacgcttaataacaaaagctcatacccgtactatagttcacttccttggtatctgaatccatttgggttgcctgcgataagtctgtatattgaaatggcagctacgtgtggatggttagcgttaatagtgtggcttgcatggcattataaaatgcttttttctaaacatgtatcttcagcaaagggaagtgtaatatttttttctctcattatctccatgttaatcttaatcatagagtcaagtttcatgcgtccctactattgggcattgattgggatttgtttagcccattcagacaaaaaatactttcctcgacgtatcagaaatgactga

SEQ ID NO: 237035 - DNA, 1140 bp, Klebsiella pneumoniae
atgataaaaaacatcagcatcggcattgttgccgattggtttgtaacttatgctggctcggaaaaggttgttgcagaatttttaaaggtatttcctgattccgatttatatgctgttgtagattttttaagcgctgaaaataagacgcgatttaacaataaacctattcaaacgacctttattcaaaacctaccaaaagcaaaaaaatattatcaaaaatatcttcccttgatgcctttggcaattgaacaattagatgtatctcaacatgacattattctttcaagcagtcatgctgttgcgaaaggtatccttacaggaccagatcaactgcatatcagctatgtccattctccgatcagatatgcatgggatttacagcatcaatatttaagagaagctggtcttgagtccggtgctaaagccatgttggcaagatggatgctacataagattaggatgtgggatactcggacatcgaatggcgtggatcattttattgctaattcaaattttattgctaagcgaattaaaaaggtttacggaagggatgccgatgtcatttatcctccggtcgatgttgattcgtttgaattagagcagttcaaagaaaactattatatgacagcatcacgattggtaccctataagagaattgatttaattgttgaagcatttgggttcatgccagaaaagaaattaattgttgtaggtgatgggccagaaatggcgaagattaaaagaaaagcacaaaaaaacgttgagatcttagggtatcaaagcgatttagaaatgcaaaacctaatgcgcaaggctaaagcttttgtttttgccgctgaggaggattttggtataactcctgtggaggcacaagcatgtggcacaccggtaatagcatatggtaaaggaggtgcgcttgagactgtgctggatattaatcattcaaaaactccaactggtattctttttgataaacagaattgtgattcgatcattgaagctgtagaaaattttgaaaatagcaaagactgttaccatccggaagattgtcgtaggaatgctatgaggttttctgttgagaggtttagaatggaaatagaaaattatgtgatgtctaagcattctgcatttataaagtaa

SEQ ID NO: 237036 - DNA, 1008 bp, Klebsiella pneumoniae
ttgacaaagattaaatttaaagaccgatttttatatgatgaaagatggattggcgaacatggaattggcaggtatgcctatgaaatacagactagaataaaatttaataacacgattaaaagtaaagtgaaaccaaccagtccgctagatatttttgtgacaccttggtatttactgttcaatagtttgatatttattacccccggttttaatgccccttggtttttcgccaaaagaacaattataacaatacatgatttaaatcatattgatattaagggtaatgatagtgttttgaaatcactatattataacttaatactaaaaagggcatgtaaaaagtgcatcgccatttttactgtttctgaattttcaaaaaaacgaatcgtagactggagcggcatatcacctaagaaggtggtagtagcaggcaatggagtatcaaaggggtttattccaactggagagaagtatttaccaggctataaatattttttatgtgtgagtaatagaaaagagcataaaaacgaaaagcgtttaattgatgcatactgtcgattagaaaataaacatgatgtgaagttattatttacaggtaatccaaccgatgagatgattgattatattaaatcaaaaaatgcacaagaaaatataatatttactggatatattgacgaagccgatttcccaaaatactatcgtggttcgattgctttactcatgccatcgttatatgaaggatttggattgcctgtcattgaagcaatggcatgtggggttccggttttggcgtctaacactaccgcactgaatgaattggcgagaggttatgccattacagtggacccattttctatcggagaaatcacggcggggcttaactcacttataactgatgatgttttgagggaggagttggttataaaaggattgcaaagagcaaaagaatattcatgggataatacagtcgaaataattattgacgagataaataaaattaattattaa

SEQ ID NO: 237037 - DNA, 1122 bp, Klebsiella pneumoniae
atgaagaaaatcctaatcgcatgtcgcggatattatcctcatattgctggtggcggagagatatctacaaaaaaactggctgaagaattatccagtcttggatatgatgttcatgttctagcagttgattgcaaagacaaggatgatttgatagaaaatgttaaagttagtagagtaaagtttaaaaatatttactggtctatgggaaaggaaaagcacaacccactcgcaaagttaatttggcacataatagattctaacaatatcttctttgaaagcaaactgacagaattattagaacgaataaaacctgatgtcttaataactagtacaatcgaggatgtatcctcaattatctggcgggtagcgtatgaccgtcgtattcggacattacatatacttcgcagttactctttactttgcaaaaatgcgaatatgtataaagaagataattgtatctcccaatgtgccagttgcagaacattaactttgatgaaaaagaccaattcacagtatgttaatgatgtagttggaatcagcaaatatgtactagaaaaacatattgaaaatggttattttcgaaatgcaaaagctcatgtaatatataatatgtgcatagatgagattgtcgaaaaaaggaagttgaatggttttcaattaccaccaattaaacttgggtatttaggacgaattcataaaacaaaaggcatagaacttatcataacggcagttagcaagctaaaaaaagaacaaaaagataaaataataatatgtatagctggtactggagaacctggctatataaatgaacttaatatgttatcagtgaatttcggtttgaatattaaattttatgggaatgtaaaacctacactgtttctagatgacatggatatgcttattgttccatcgaaatggaacgaaccatttggaagagttattgttgaaagtttaggtcgaggggtccctgtagccggggattttttatttgacatagcggaagaattaactgaaataataaatttatatttaattggaaatattgagttcaattttcagttagaaaaatttgaaacgaagaatatacttgaaatatgggggcaggtccttgacaaagattaa

SEQ ID NO: 237038 - DNA, 2166 bp, Klebsiella pneumoniae
atgtctccagtaataaataaaaccaatacaaaggatgcagatgaggtagacttaggccgtttgattggcgagtttattgatcatcggaagctaatagtatctattacagcattatttactctcatagctttactttatgccttatttgcaactcctatttatcaggctgattcacttattcaagttgagcaaaaacaaggtaacgcgattttaagtagcttaagtcaagttctacctaatagccagccaagttctgcaccagaaattactttgcttcaatctagaatgattctagggaaaacagtcaatgatctgaacttacaagcgaaaatagttcagaactatttccctatttttgggaaaggctgggcaagactgatgggagagaaaacagggacgatttcaattagtcgtttgtatattccgaatggaattgaagattctgtatcggaattggaattgaaagttgtagataaatcacattatattgtggatttcgaaggtaaaaaaattagaggtgaagtcgggaaacttctaaatgaggatggaatttcgcttaaaattgacaatatagatgcgcagccgaattctgaattcacgatatcgtatattagtagattaaaagcaatatcagaaattctaaatactttcacagtaaccgatgaaggtaaagatacaggcatgctaagtctgtcaatgacaggtgaagactctactcaaattgtaaaaatattagatagcatcagtaataactatctggcacaaaatatctcgcgccaagcggcgcaagatgctaaaagtttagaatttcttaatttacaactgccaaaagttagagctgagcttgatgttgccgaagataaattaaatttataccggcgtcaaaaagattctgttgatctgtcgctggaagcaaaatcagtacttgagcaaatcgttaatgtagataatcagttaaatgaattaacatttcgtgagtctgaaatatctcagctttataccaaagaacatccaacatataaggctttgatggaaaaacggaagacattaaaagatgaacgaaataagttaaatgagcgagtgtctgcaatgccgaaaacgcaacaagaaatattgcggctaagtagggatgtggattctggacaagccgtatatatgcagttgctcaacaggcagcaggaactaaacatagcaaaatcaagtgctattggtaatgttagaattattgataatgcggtctccttgcctaagcctgtaaaacctaaaaaagtaattgtattattattaggatttatagcgggattaatggtgtctgctggcatcgtactcctcaaagtgtatttaagaagagggattgaaagtcctgaacaattagaggagattggcattaatgtttatgctagcattccggtagcagagactttttcacgatcgattagctctaaagctatcctgaaaaaaacacaaagaactgaaaatacaaaatttcttgcagtcgagaatcctgctgatcttgcaatagaggcaatacgaggattaagaacgagtttacattttgcgatgttagaggcaagaaataatgtgttaatgatttctggggcaagtcctaatgcaggtaaaacctttgttagttcaaatttggctgcagtggttgcgcaaacaggtaaaaaagtattatttatcgatactgatatgcgaaagggatattcgcataaattatttgatgtaaataacgatagtggtttatctgattttctttcaggacgaaatgaaatagagaaaataattaaaacaattcctgcaggtgggtttgatttcatatcaaggggagtaactccaccaaatcctgctgaattactgatgcaccgtaattttggcgcacttattgattgggtcagtaaaaaatatgatattgtaatattagatacacctccaatcttggctgttacggatgcggcaattattgggaactatgcaggaacaacacttttagtggctcgttttgaacagaacactgttaaagaaattgatataagttccaaacgtttcgaacaaagtggagttcaggtgaaagggtgcatattaaatggtgtagtcaaaaaagctagtagctattatggttatggctataaccattatggatattcttataaagaaaataaatga

SEQ ID NO: 237039 - DNA, 132 bp, Klebsiella pneumoniae; identical to SEQ ID NO: 97124

SEQ ID NO: 237040 - DNA, 603 bp, Klebsiella pneumoniae
atggactttgttgattacaattattatacagagggatatgctcgtacctcatacatggaaacagaagaaaaaacaggatggagtagcattggtatttttaaaaccatgttattctttgctgctgcaactttttccttcaatactgatgctacgtcttcagttgaccatcatgcaattgagtgccaaataattaaagagattcaaaataacgatgccactttcttttctgatgaaattgatgataaaaagtctaaaatacatgctctaagttctagcttgcaaaagaattttggtttcaagaaagcacaatgggcaaatgtgctcagtgttgaaaggaaaactctctataactgggaaaataatcctgaatctactcctcatgctaaggtttgggataatttgaatacactcagcaaattcgcagatgaaattgataatggtcatgcaccttacatttcgaaaatgacctttggaaaggggcgtaaggaagagtttactcaggctttcacaactcaaccgctttcgtttgagtcaatgatttctgtatatgaaaaattttatactgaaatcgacggtttctacaaaagacaacttctttcttga

SEQ ID NO: 237041 - DNA, 762 bp, Klebsiella pneumoniae
atgagtaacgatcttgtattcgtattgtctagagttcagtttggcgaagtcccgcaatcgaagtttgctcaagttggagagactattcaagagagattacgagcggagtatccgtttttccactcagcgcaagatgctgaaacttttgagattcagtttggtcctgatggtcagaaggtcaaaaagattgagataccaactttgacgcttgtctctgctgagagagattggggaatcagagtaacaactaacgatttgttcttatacacaaatagctacgataggttccagagtttcgaaatcagaatgagagaaattcttggcattttagcagagattttcccaatttatcatactggcttcttgggaatgagatttttgaataaattccctcttgagggcgagcgttctttcaggcaagtgtataaaagaactgaatttctacaaccggcaattgaaaactataaacaggcaggctcaaatctttcggcaagatatcaaacagatgctggctggatgaatcttaatagtggcattactgtgaagggcgcacttttacctcctgatatcgaacagtttgctgccacattaaaccctttacatgtaaatacaaccagcgatggggtatgggctcatttggatatggattctcataagccaagtaattctctgcttaagtatgatcttgacagagttgtagagacattttcttcactaagagagtgtgccaataagttttatagtgaaattgttaaggtttaa

SEQ ID NO: 237042 - DNA, 849 bp, Klebsiella pneumoniae
atgtcttctttgtggggtaaaaagcaaatggcagaagaacaagatccaagcaatagcgagccagacccggaacaagggagtttatttgaattagaattcaatgaatatactccgtcaaacttgggtacagtgcatctttctggctttgctattgccactgatgagatggagtatgcggttaaaagcatgaaagccgcacctcctttccctgtacaaaaccccactcaagtacctgctgcagagtggttttgcacaaatttggctgaaagatgtgggattgcaacacctgtttgtaagattcttaagtgtatcgctgatggcgagtatgtatttggctctcgtattgagttttctgcatggaagtcaggacttaacggcccgcaatggatcaatttgctggcgaacgcctctgagtcattgaaaaaacagctatgggcaatttatgcttttgaccaattcgtgtacaacattgatcgccatctcaataattacctttacatggaaaatacgcgcggtcacatcatagtaaaaacgttcgattttagcttgagctcttttgttatcggttggccacgtagcaccccgcacacactccccacagattcaagcacatcaacaaactggtctatagctaagcaatttgtcggcgatacaccagaattaagaatgtgcgcattgtcagtacttgacaagattgagaaaattggagttgctaccatctctgatatactggaatctatgcctgtcgcatggatgccaccaatgcataaagaatattttttgaaatggtgggatagtgaagaaaggattgagcgaataaacgctataagactggagataacctcttga

SEQ ID NO: 237043 - DNA, 807 bp, Klebsiella pneumoniae
ttgaaaactttcaaatacagcttaatcagagttacgccgaatcttgagaaaggtgaaacgattaacgttggcttgatcgtttaccatgactccgacatagacgtacgcatgcttaattcagtttcaaagcttaaagcaattgataaaggtctttcacaaaattacttggaagatctttcaagctcactttttgatttgtcacacaaaattaacgacgttgaacttcttccgtgcctttttaagggatcgttatcattatcttcttttggtatgtttaccattccaagtaatgataattacgaaacaaaaattaatgatttgatgaacaggttagtaaatccacagaagcaatctcacaagcaactgaaaagaaaagttttttttgaaataaagtcaaccttcatgcagcacggaatctttagcaaatactctgaagacctttatcagcacaagattgttgctaactatcctataagcgatgacgaaggcttagttgccgatttcttgctaaagaatggcaaatatcatcttacagaaactttagatttccgttcagaaaatattaaaaaacaaatgggtgaggctgctgttagtgctttaacaatctcaaaagcatgtgaaatttacaaacataatatcgactcatttgttatttatgcagctgaaactacagcacaagaaaaaaccgcaaaacagcaaataaatcttcttgaaaaacatgcagataaccttataaatgcgtacagtaaagaagatatgaatttttattatgaaaagatgttaaacgctgcgtcaatgctccagtaa

SEQ ID NO: 237044 - DNA, 144 bp, Klebsiella pneumoniae
atgtcgatctggctgtggtattggcccttgacgttctgtcgctaccaaaagaataggggcattaaaaacccggcatggtggccgggttggattcataaactaaattactggagcattgacgcagcgtttaacatcttttcataa

SEQ ID NO: 237045 - DNA, 288 bp, Klebsiella pneumoniae
atgggtaaactaacgctgctattattagctttgctggtctggctacagtattcgctgtggttcggtaaaaacggcctgcacgactacacgcgggttaacgacgacgtcaccgcccagcaggcgactaacgccaaattaaaagcacgcaacgatcagctgtttgccgaaattgacgacctcaacggcgggcaggaagcgattgaggagcgtgcgcgcaatgaactcagcatgacccgcccgggcgaaaccttctatcgtctggtaccggatgcgtctaaacgcaattag

SEQ ID NO: 237046 - DNA, 450 bp, Klebsiella pneumoniae
atgagtctgctgtggcttctggtaaccgactgcgaacaacggggttgttttcaccggctgcacactatgagtctgctgtggcttctggtaaccgactgcgaacaacggggttgttttcaccggctgcacactatgagtctgctgtggcttctggtaaccgactgcgaacaacggggttgttttcaccggctgcacactatgagtctgctgtggcttctggtaaccgactgcgaacaacgggtttgtattcaccggctgcacactatgagtctgctgtggcttcaggtatcagcctgcgaacaacgggtttgtattcaccggctgcacactatgagtctgctgtggcttctggtatccgactgcgaacaacggggttgtattcacctgctgcacatcatgagtctgtggtggcttcgggtatccgactgcggacatgctgaggggggttaa

SEQ ID NO: 237047 - DNA, 1017 bp, Klebsiella pneumoniae
atgaagctttattattattattcgtcaaaaggaaactttggagatgatttgaattcatggctctgggatgccttgataccagacttcttcgataatgatgaatcggttagattgtctggtataggaactattattacatcaaatatgccagtggcaaaacaatggattattttttctagtggtgttggttatgattaccccccgataggatttgggtcggattcatgggatactatttgtgtccgaggccccttgagtgctcgtgtgcttgggcttaatcaggataagtacatcactgatggagctgctttactacaaacacttagtgagtttgcacctcttactgaaaaagagagatcaggaattatttttattccacaccatcacgctttaattaccggaaaatgggaagaagtatgcaaacgtgctgggatagaatttgttagtcctgaatgggactctaagctagttattcacaaaattcgaagtgctaagcttgtcttggctgatgctatgcatgctgcaataattgccgacgctatgcgggtaccttgggtcccattaattacatctaatcagataaatacatttaaatggcttgattggacccaaacgattaaattaccttatctaccgactgttttgggctcaagttcattgagagaatccattcgtgacaaagggctgcggttatatggtgaaaaatattatcaatctgatgcagatgttgaaaccgcaatcaaatgcttcttagctcaacgcgatttaaaaaataaacgatggtggaaacattaccataatgctacccgtttacttatctatcgcattcctaataaaacagtagaattggtagaaaataatttcaaatttaatttgaatgataaatttatggagcatgcagttgatgtactatcaaaggcatcagctcagcaaggttttttaagcagtgaatgtgtttttaatgaaaatctatccagactcgtcgaaggtttagataagattcaaaagtatcgctaa

SEQ ID NO: 237048 - DNA, 1470 bp, Klebsiella pneumoniae
ttgaataaagaaaacgctcaacgccgtccatccgtgatgactggtgcaatatggtcggtgttagataacatggctgggcaagccattacttttgtcatctttataattttggcaaaaatgcttacacccgatatttacggaatgttgagcgtttctttgcttgtaactcagttttttaaaatgaccatatttgatagtattgcaacatctatagttaggaaaagtaatccgtcaaatattgattataattctgcctttttcctttgttttgttatttccatcccttcttttactgtcgtttattttatatcaccaataattgaacaatatatgcatatagaagggttaactactgtcataagatgcactgcagtaataattattttaagtggagcgagccgtattcatgaagcttggctctcgcataatatgctttttaaatctctagcattaagatcgattttatcgattacagttggtggatgcgtagggttgtatttggcgtatcaaggatatgctgttatgagtttagtggcacaacaaatagtaactgcatctatctctcttgttatcttatggtggaaaaccccatggaagccggaatttaagatttcaaaaaaatcttttaaagaatcttttgatttttccaaacatgttgcattgagtaactttacgaatttttcaaatcaaaatagcgacgttttttttatcacgtattttcttggcccagcagccgcgggaatatattccgcaggtaaaaggattgtaaatactttaaatcttgtcttatcatcagctttaatgagagtatctcttccagcattttcaagattcaaggatgatattgacgttttgtctaaaaaatatataaaaatgtcatattttactgtggtgatcacggcacctgcatttataggattggctgttttagcaaaagatattaccattctccttttaggggataagtggatagcctcagtcgaaattatgcaaatcgtcagtgcggtaggtttcgttacttcgattggttattacaatcattccattatgttcgcccgtgacagacctgacaggcaagccaggctaacaatgctttatgctataagtaatataatagtgttttttattttcgtaaggtatggcttgattgcaacggccttggccttttcaataaggacaatagcgctttatccattatcagtatggtgtgcatgtgatttacttaacataaaactaagaatgtatgtaaaagagttagcgctcccggtaatctgtgcattgttaatgggagggattatggtgtggttaaatgataattatttccagatagtcggttggggaacattgattctaaaaataatcatcggctttgttatttacttgtcttttactttgcttctctctccgaagtcaaaaaaacaagaagttttaaatctttttaaatcaataggctcaagaaaaggaatgtga

SEQ ID NO: 237049 - DNA, 993 bp, Klebsiella pneumoniae
atggttggttcattagataaccctttgattagtgtattgattccttgttataatgccgcttcatttatcagcaaggctcttttgtctgtgaagaatcagacatataagaatattgaattgatagttgtggatgatttttcaagtgatgattccgttgttattgttgagaaattcataaacaattatcctgagctaaatataaaactatttactaatgaaaataacaaaggtgtttcttatactcgtaataagctaatctctaagtccttaggcgattatatattatttttagattctgatgattttattgatgatgatgctgtggaatatttatataacattattcgtgataatgacacagatatcgctcaatgcttgtattatagcgaggatgtatctggggcaccttcaggtataactaatgatttttatatggatggttttcttacagggagggatgctgcgtttgctatgcttcaaaataatattacggggtatttatggcacaaaatgttccgtagtgaaataattagaacggttcattttgatgctaatctcaaagttttcgaagattatgaatttattatgactgtatttttgaatggcgcgagtatcgcattcggtagtcaaaaaaaataccattatattcaaagaagtggttcactaaccaaacagtcgctccaaaaatattttgaccgtgtggagtatcttgacagaacagatgcgttaataagatctcatttaacatcagaaaatgatagggttatactaacgaatcataaaataacggttctttctaatgtttatatcaatttaataaagaatggagcctctaaagaaacaatccatatgctattaatgagatttaagagtttcagcatacatcatatactaaatctcaaaggaactaagtcgaagtttattttcttcctatgtaagtactttcctgcgggcttgtcttgtttggttaatgctaagaatttcattaaataa

SEQ ID NO: 237050 - DNA, 285 bp, Klebsiella pneumoniae
atggattacagcaagctatcagattttgaaattaacaggagagtatttagcctggtaatgaatggtagagattggaaccggcaagggtcaggagtgttcgatttttgcaataatccagatgatgcatggccgataatcacttccaatcggattggaattgttcctggcactgccactgataagtgggctgcgcatcatggtgactgggatattgctatcgccgatgttaacccactccgcgctgcaatgatcatcttcctcatgatgcaggacagcaggaaataa

SEQ ID NO: 237051 - DNA, 168 bp, Klebsiella pneumoniae
atgatcggaagaaactacgacccaaccatattccccgatgatttatcagtacgtcgcagacaaagagcaatgccgccaagagatgagttgatgaagcgtaatagcttccagtcggttaacgagaataagtttctggatgccttgctgaagaagatgagggtgatgtga

SEQ ID NO: 237052 - DNA, 285 bp, Klebsiella pneumoniae
atgtcatcacctcttcatggggcggattacttacgcccaccaaaagcatcaggaagccgcgaagaggttttggcgcggtgctttgaggctatcgtaaataacgattaccagacgccaagcatggatgaaaggctagatcgtatttatgaaaaaacagtttgggagatgaacctgcaggcgagcatgcgtccaggattcgtgcctgttggcccaatgaagcactcgcgagacgacgaccgctttaaagaatacagattccgccttggtgccgtcagcaacaactaa

SEQ ID NO: 237053 - DNA, 549 bp, Klebsiella pneumoniae
atgaaccacttaatgattgacctagaaacgatgggtaatgggccgtacgcgccgatcgtctccattggcgctgtatttttcgacccgagcacaggcgcaacaggcgaagacttccaggtgaatgtatcgcttgaatcatcaatgcggttccgagcacggcctgacgcctcaacggtcctatggtggatggagcaaggcgaggatgcacgtaaggcattaactactgacacgcaggagctttccaccgcccttggccggctgtctgatttcatctccaagaacaccaatccgcgattcgttcaggtatggggtaacggcgcatcgttcgactgcgtcattctccgaaacagctactcactgaccggacgggaagcaccatggcaatggtggaacgaccgtgatgtgcgcaccgtcgtcgagatgggtaaagcgatcgggtttgacccaaaacgagatatgccatttgaaggcactcgccacaacgcattagccgacgcaattcaccagtctaaatacgtctctgcaatctggcagaagctaatcaaataa

SEQ ID NO: 237054 - DNA, 516 bp, Klebsiella pneumoniae
atggctagcagaggcgtaaataaggtaatcatcattggtcggttaggtcaggatccggaggtgcgctacgcgccttctggtgctgcatttgcaaatctcacagttgccacatccgagcagtggcgtgataagcaaacaggcgagcagaaagagcagactgaatggcatcgagtggtaatcagcgggaaattagctgaaattgctggtgaatatctgcgtaaaggctctgaggtttacctggaaggaaagttgcgcacaagaaaatggacagatcagaatggtgtcgataagtacaccaccgagattcaggtaggcattaacggaacaatgcaaatgcttggcggcaagcaggcaggaagcgaacaggtaccggagacacgtaatagcgggaagcaacagagacaagcgccacagcaacaatctcagcacagtgaggttcctatggattttgacgacgatataccttttgcaccggtaactcttcccttccctcgtcacgctgtatacgcaatttaa

SEQ ID NO: 237055 - DNA, 609 bp, Klebsiella pneumoniae
atgagcagtgaattctataagcgtctggctcatattcaggcgcaccttaacgcgccgaagaaccagtataactcgttcggtaagtataaatatcgtagctgtgaggacatcctggagggggttaagccgcttcttgatggccttttcctgtccatcagtgatgagatagtcctgattggcgatcggtattacgtgaaagccacggcgaccatcacagacggtgataataagcactcagcaactgctatggcgcgtgaagaggaaagcaagaagggaatggatgccgcacaggtaactggcgctacaagctcatacgctcgcaaatactgccttaatggattgtttggcattgatgattccaaagacgctgacactgacgagcataagcatcagcaaaattcagcgccggcaaagcaatcaaaaccatcacctactcctgcgcaggttctgaaggcatttactgatgcggccgcacaaaagacatctgtggatgagcttaaacaggctttcgctcaggcatggaaaatgcttgaaggtactgatgagcgacagaaggcgcaggacgtatatatgattcgtaaagatgaacttgaaggagcaatcgcttaa

SEQ ID NO: 237056 - DNA, 162 bp, Klebsiella pneumoniae
gtgagcgcaatggagaaatgggatgatgatgctttcattcaggtgatgagcgaagtcatcccagagcaggaaatgacacacgaactggcagcgcaggaagcgattgcggattttaaaacagagaggcaagtaagcctaatgaggggtatttatgagcagtga

SEQ ID NO: 237057 - DNA, 546 bp, Klebsiella pneumoniae
atgagcgcatcaccttttgacttttacgacctgggttcgaagatagttgtaggtattgccagcggaggatctgctgcctggtttgcatcaaaactagcgttgaagaagttctatagggagaaatggtgggataagaattatgaggcatatctctctctgattgatgaccttatctatatgcgtgactcatatgcaaaactttattcttttgaagaagataaacaccacggtaatgccagggaagaagatgagccacaaatagactgggataaaatgggattaattggtaagcgcatggaaaggcatttatacacgtcagcgctaactataagcagatcaacaagcgaatcaataaaggaattttcgcacaaaacaaaatcaatagataagcaagtcgaggatggttgtatgcatccatttgtagcttacgatgaattgagttttgctgctgcagagttgcttgaaagggtggttaacgacgcgagagataatctcggtcttataagcctcaaggagcgaatagaatcattccaaaaaagcatttaa

SEQ ID NO: 237058 - DNA, 288 bp, Klebsiella pneumoniae
atgactaatcgtgaacacaagaagttattacgcgccatccgtcatcaacaaggtatgcgcgaaagccagcaactggcgaagaagattgaccgcgctttctcgcgtatctcagaagactgcagcaatcgcgttgtgctggctacgtcattgggtagcctccgcgacaaaccagctcaggaagagattacagagcgtagaaaccgcatctggtacaaacagccaggagagcgcggcattacttgctcaggacggcagaagatgaaaggaaagtctattccattgatatga

SEQ ID NO: 237059 - DNA, 597 bp, Klebsiella pneumoniae
atgaaaacactatctgaacgtttggcttacgccatgaaggaaacggggttctccagtcagacggcccttgctaaggcatctggcgttgaacagtctttgatatctaagatattgagggggtctagcgagacgtctaagtcgtcaggaaagcttgcggccgccatggggataagcgctgactggcttatcaatgggcaaggcagcatctttggatcatcagatactaagcttgaaaaggtcgatgcctctaaacaggttatggtatgggataaggatggcgctacagggacatccattaactggtttaatgaactccctgaaaacttccaggcatatatcatgcacgggaagaccggtatctctcaggctccagctggctctatcgtgatcgtagaccctgacctgcagccatcaacatctgatttggttgtagcaaagagtggtgatttcatctccgtattccggtatcacatcaatggagctggcggtgtttttctgtcagtagacgatgacagagtcccgctagctgaaatagaagacacctctgtaatcagaggaacagtgaagcaaatcttcatacccgaactatccaagtaa

SEQ ID NO: 237060 - DNA, 738 bp, Klebsiella pneumoniae
atgcctataaatgaagaatttgtaaaagaacgccagcatggatttatcagagatgaagttcataggcttgagcataagtacagcatgcctatagacattggcggaaacattcctgaaacgatcaactctaaggggtggatttacatcctttcaaacccctgcatgccaggtttgttgaagattggcatgacgacaaactcgcctagtgtgagagctaaagaactttcttcttctaccggtgtgccagaaaagtttgtcgtagagggggcctacttttcagatgatcctcgtggtgatgaggctgccatacattccgcattgaatgagcaccggattaatgaggccagagagttttttaaatgttctctggctgtggcagatgaagtatgccgctcgtattgtttgtgtgatgccaaatcaactctggaagaacttgctgatgggtatgcaattatttgctccgatcagcctatcaaattaaatctccatgaatggttcgaggagttttgcgtatccactatcggatgcaagacaaatgccctgagggccatattcgaacttggatgtgagcgcttggaagacatgtcgagggatggaatttcgataattatcgaatgcggtgaaatccgcggcgttatgtccgaatctcatcaaagcctcctggcgtatctagaagaaattaatgagagagaaacgttaacgggcatttatggcccacgattacctggaggcttttaa

SEQ ID NO: 237061 - DNA, 870 bp, Klebsiella pneumoniae
atggctcgttctcgaaatatcaaacctggctttttcacaaatgatgaactggctgagtgctctccatatgcccgcctactttttgccgggctatggaccattgccgataaagaagggcgcttggatgatcgcccaaaaaaggttaaagcgcttgtcctacctttcgacaacgttgactgcgatgaacttcttcagcagttacatcagcgtaaattcatcaaccgctaccaggttaatggcgaaggatttatccagatctcaaactggaagaagcaccagaatcctcactgcaaagaagctgctagtgagataccagaaccagtagagaacaatgacagcaccggacatgaacagtgcaaggatgataaagaggaggataagaagggtgttgaatcacctcaagtcattgaaaatgatggagcaccagaaaagcaccatgcaagcacagtacaagaaccagcagagaacaatttaaatcctgctgattcccttaacctgattcctgattccctcatccctcatactgattccctaattaacacccaagccgctgatgcgacttgcgaaggggctgaagctgatgttcatgaaatctcaagtcgctatgcattcgaagggaatattgttcgtttaaatcacaaagacttcgaagcttggaagcgcctctatccgaacattgacctgaggtatgaactggaaaagctggatatcgaatttagccatgataagccaaaaaaatggtttatcactgctagccaaaagctcagctaccagaacaagaattcggcatccagaccggttaagcaggtagttaacgctccgcagcagcactggaacagccgcgaagcctgggagaatgaattcttatga

SEQ ID NO: 237062 - DNA, 708 bp, Klebsiella pneumoniae
atgagaaatctagtatcagcaattcagaatcgtgatgcaggagcattgtcccgtattgcaggagatgggcctgtccaggttgagcgtggagtacatgaaggcgttgagcggctagttgacgccctgttctcaaacctcaagcaggtattcccggcatcggtcagtactgcttggcgcaaccctaacgacgaagcagcagctaaacgccagtggatcgccgcgtttgctgagaacggtattcataacaagcagcagttgtcagcgggcatgaagctggcgcgcgcaagcggctcgcctttcctgccgtcaccggggcagtttatcgagtggtgcaagcagggcgaacatcgtgccgcaggactgccatccgacgaagagctgtatgaaatgttccggctattttgccgtgatcgagggctgtatgactgtgcagaaaactacccttgggaaagcaacgcctgtttccacatggtgacggctgtctacaaccagatgcggtcatttaacctgactgacggcgagtgtcggaagcgatgcggcgatgagctaagaaagatgaccagaaggattgaatctggagaagaaataccacctcctagggctcagctgccacacctgcatatcccgcttacaaacgagaagggtttgcagaaaatcgcagagttgagggctaagcacggtctaaggagcaaagggtatggaacttga

SEQ ID NO: 237063 - DNA, 159 bp, Klebsiella pneumoniae
atggaacttgaacgacagcgcttcgaatctcttttcctgagcatcttccgtaacaaatatcccatctccagaacattcaccggctatgaaaatccgttcgtgaatagctgttttttcttctggcagagcggcgcaaacattgagggtcatcatggatag

SEQ ID NO: 237064 - DNA, 408 bp, Klebsiella pneumoniae
atggatagtcttcagcagaaaatcatcgactacgtgacagaaaaccagccaacaaccattagagatatcgtcaaagatacagggatttacaggagtctgtattaccgcataacggaagaacttcgcgaaacgggtcggttacaggctatgcctggcgttggaatctttgccggcgatgagggaatacagaactggcttgagaatggcggcagggaaatgctcagccagtgggggaaggataccaatgcagcaagtcaggcagcgaaaggagtttttaagcatcgccaaaaagatgattctcctaagatgtttgaaccatataacccggagaaaaattgcgtggtgaacgaatacatggcaagcccggcccgtcagaggctgatggctgtatacgggaggattggatga

SEQ ID NO: 237065 - DNA, 330 bp, Klebsiella pneumoniae
atgggttttgagtccatttttgccgcatctcaaattaacaaaacgtcgctcaccatcaggtcaagtggagcttgtagcatcacaaaagaaattgcaggcaatcataaaaccatcagttgtgaagtggattttgatggcaagagaatcagattaagaaccggtagcgaccttgaaaggaaattaaccggtcgcattggcgtttgtttctctgtcccaaagttactgcatagggctgtattagcccccggcgtgaaggcaataaaaataccgatgaccatgaatgatgatggttggtggtatggggaattgaaactgattaacaacgattaa

SEQ ID NO: 237066 - DNA, 210 bp, Klebsiella pneumoniae
atgagcaagcctaccgatgaagaaatcatccaggttatttccgaacacggtcagtgcatgacttacgtcgtggcctactggctacgcaggaagcacaaaagcactaatacggcctatgcgctgcgtcgccttaagaagctcgaaaccatcggcgtggtgaagcgcatgaaaagttcgtacaaaactcaaatttgctgggggttggcatga

SEQ ID NO: 237067 - DNA, 306 bp, Klebsiella pneumoniae
atgactatagccatcgatcgacttaaagaagtgacaagggactttggccgcaggcatatcgcctaccagatggccagggaactgctggagatttatagcggtaacggcccggtagtctggaatgtgttgagcgatttccctcctgaggtgaatggcaaatatcttgtcattaccagctacggtgatattcggaccgcctgctatgactgcgagtcaggggaatggagggcttcagatggcaccattaccggagttatcaaatggatggatttgccagcagccccgcagggggttggcgatgcctaa

SEQ ID NO: 237068 - DNA, 423 bp, Klebsiella pneumoniae
gtgcaagagttcatcctgcacgaaacgaataaagctcaactctggtcacttctcaaagaaatcctttctaccggcaaacgctggcgcatcaaaatctctgagtatcgtgaacgacgttcactcccacaaaacagcctcctctggaaatggaactctgaaatagcagggcaactaactgctgttggttcagatagcttttccgatgaggaggttcacgagtggctcaaagatatgtattgcccagctaagccggtgactatttccggaatgaccaggtacgttaaatcaacccggagactggatatcggcgagatgcacaaatacctcaccgacattgaccagtgggctcaccagaagggattgagactgaccatcccagatagttgtgagtatcgtgaattacaacggaggcagaacgagtga

SEQ ID NO: 237069 - DNA, 549 bp, Klebsiella pneumoniae
gtgactgatagatcaaataccccaacagaaataaaagacctctggcgcactcctcctgagatattccatgcattaaatgcagagttttgttttgtacttgatgcggcggctagcgcaagtaacgccctttgcaaaaactacattacagaagagcagaacactttccacaccccatggaaatccatgatgccagatataccaggatatgcatggatgaatcctccttatagccgtccaatgccatttgttcaggtggcggcgcaggaaaatgaggataacggtattggatgtgtgatgcttcttccggcagatacttcggttatgtggttcagggaggcaattaaaaccgctcatgaagtcagattcatcactggcggcaggttatcgtttctgaatgcagatacaggaaaggcagtaaatggcaacaacaaaggttcgatgctgattatctggcatccgtaccctcgttgcggagaatgccgaatgactactgtagacagggatgtgttgatggagcttggcaagcgcagaattaaggtggcggcatga

SEQ ID NO: 237070 - DNA, 147 bp, Klebsiella pneumoniae
atgatgcttgagcgatctgaacgtgaccatccgacaggcctgtactacggtccatgtcaaaaatgcggccataactttatgggtccgaagcgtgagcgaatttgtgctttatgtgccaaggaggccaacaatggcaaaccttcgtaa

SEQ ID NO: 237071 - DNA, 546 bp, Klebsiella pneumoniae
atgacaaatcaaaccgtgaatgtttacggcgtatctgtccgggttgactctgcaggtagatacaacttgaacgatctgcatgcagcagctgttgccaatggagaggcgacagaatcacaaaggccgaacaaatttattcgaagtgcagctgtaaagcgtttcgtttctgcattgaactccagaggacaaaaatgtcgtctggaagagaatcaatcacttaacattgttaatggtggggtgagtcaaggtgtttgggcggctgaattattagctattcgctatgcggcgtggattaagcctgagtttgaaattcaggtgtacgaaacattccgagaagctgtgcttagtggcatcagcagtatgaatcggcttaaccgcctcgacttgctgatcgcgaccgagaccaaagaggtcagtgcctgcgcaagggcaatgaataaatggggcgtcggtggtcgcaagaagcttctcaattgcgctcgtgagcggatcgtcagccagatggaccctgacatggtcacgctgatggaagcgaaagcagggtag

SEQ ID NO: 237072 - DNA, 174 bp, Klebsiella pneumoniae; identical to SEQ ID NO: 165929

SEQ ID NO: 237073 - DNA, 330 bp, Klebsiella pneumoniae
atgagtaattggttcgtatatgacatcgccccaatcgactttcactggcgaatgctctctacagtagaggaaaccctcaagaagattgaagctccgggcgaaaaagattatgaatgggattcaatcaaccctgaacactttaaagagcattgggaattagcaaagcaatgggcaaaagaaaaaggttgggaaggtgacttccgtgaagacgcgagagttttctgggttccagacgattctcagttgtcatatggctttgtctggaaacaagacaataatggaacaacctatgtcgtgagcccaatcgcgttaccacacttacagtactga

SEQ ID NO: 237074 - DNA, 267 bp, Klebsiella pneumoniae
atgcaaaacatacaagctcttgataagtggctggttggtcattggtatacttcagggggagtggatgaaaagcagtttcatgttgcagtttttgagttaattcgttctaaccccggaagagttttagatagtagagagataagagagtatatcctttcaaagtatgaaggtattgctgaagaaggaggggatatatggaacgtagcctgcgagaaagctttcttagtaacttatatatccgaattcgtgaaagtaaataatatttga

SEQ ID NO: 237075 - DNA, 408 bp, Klebsiella pneumoniae
atgggcgttaagatccgcggcattgaacaagcaaagcgaaatctcgaccgtatcatcggagatatccagggcaggaaggtagtcagggctatcaaatcagccttgttaatcgtcgcgccagaggccgcaaggatgacacctgtagccaaatcctctaccctgattaactcgcagtttcaggaaatgatggtaaatggcacccgcataaccgggcgagtggggtatgcggctaattacgcggtatatgtccatgaggctaagggaacgctcaaaggtcaaccccgcccagcatcacagggtggtggtaattactgggacccggcaggcgagcctcagttcctgaagaaagcaggcgatgaaacgcgttctgccgttgatggcgcaatcaaaaaggagctttccctgtga

SEQ ID NO: 237076 - DNA, 390 bp, Klebsiella pneumoniae
gtgaaccctccgatgcataagcgcgtccgtaacttcctcgttgatgccggcttaacctccgggtacaccgttcagtcactgacatggaccgataccggaaaactggcggagcgattcatcgtattccggcccaacggtggtacggcagtagaccgcgatatggccgctgattattacgtcctggtcgatgtgataaccggtaaatctgccggtgactatgccaaatcagaggctgatgtgcaggccataatcgattatgtgaagcagaacccgatgacgaatccctgccttggacatatatcaaaccttggcggaaccccatcaccggtaatgactgcagaagggcgcatggtgtggcgcttgcagttcgcctgcctctttggcgggtaa

SEQ ID NO: 237077 - DNA, 753 bp, Klebsiella pneumoniae
atgcaaggctgctccaataacgaacaacttatcggtcgcgctaagacgcttgagctagcgtatggatgtgctgaccaggttccggcagaaggggactggaagcttatggggctgccgacttcggcaacctgggatatgagccccgaagcgctgacatcagatgcggataacggcggattcagttctaacctgattgccagtcttgatcccacctattccattgagggagaggtgcgagttaaagaccgaactgatgaattcggcattcagcaattcgtgaaatatatcgctgatgaagttagcgcccgccgtcaacctgcggtctggatgcgcttccattggggggacttttaccacattggctacatggtcccgaccggcgccagtgatggcggtggtgtaaaggagatcgtgacgtatagctttgagttcaaactggctgacgggaacaccttccagattactgaagctgatgatggcattcccgttacaggcgtgaccgtaacgcctacaaccagcacgattgctgcaggttcaagcacgaccttcactgtgaacattgcgccagcagatgcggacgacaaggtatttactgtttcgtcttccgtgcctgcgcgcgctacggtggccttctcaggtaatacggtaacagtatccgccccttctggcgctacagcaggcaccgcggtgatcactgtaactactgacgacggcgcatttactgcaactcacacggtaacggttactgcgtaa

SEQ ID NO: 237078 - DNA, 723 bp, Klebsiella pneumoniae
atgacaccagttaaagagtttggcgaatgcgtcattactgccggagacagggattatttcttccgcccgtcactgttagccatgtcgcgaattggcgatccggctgaaatcgttcaggcgttctatgacctgtgcaatgacgagacgacaccattcgcacagcgtgcagctgaggcctatatacgcgatgagtacagccgctttcctgattgtgtcctgaggtttatgcaaagcgggcttctgtcacgcaaagcgctcatggccgcgcatacggtactgacagcatgttgtgacgatgatatcagcgatctggttggctggatgaagcccgggaaatcacgcaagcgtagcttcgtctggcgcccgggcagcatgccgccagaaagcatggtcatcgtcgcccaaagtctgatgatgcacggcatcatcggtaaagcgaaaattagaaagctccagcggcacgaatccagcgatacaacctctgaattccgggcatcagattacatcatcgcagcgcgtaaccacttcggtatcagcaaggaagaggccggacaactgacgatgaccgagtttcagctaatgctcatcgctaaataccctgagcagaaagggtacacccgcgaagagtacaataacgcagcagatgactactttgcgcgccgtgagcgcagacaggcaatgatggagcaggagcattccaggacaacccgcacgaagaattaa

SEQ ID NO: 237079 - DNA, 306 bp, Klebsiella pneumoniae
atgtcagataaaccagtccgtgaatacgataaattcatgctccgtttcccagatggcatgcgcgatgccatagccgaacgcgccaaggctaacggcagatcaatgaattcggagatcgtcagtattctcgaggaaagattgtattgtggtgatggcgatctcgatgatatggacgtcaatgaaatgctggaagtcataaaaatgcagcgtgatcttttgaagaaatacagtgaattagttgaaagaggctctaaaacccttcaggagatctcagaaactcttaagaacaacaaaaagtccacctga

SEQ ID NO: 237080 - DNA, 825 bp, Klebsiella pneumoniae
atggtcagtaaaaacagcgaagccccattggcggcaacctttggggcttctatcgaaaataaccgcgaaggaaatatcgacatgaatagtataactaaaagcaaaaatgatttcaccactttcaaattcgatggtcgtgatgtgagggtggtgacgaagaatggtgagccatggtttttggcgtctgacctttgtgacgtgctggggctagatgcgacatcaattcgcaagctggatgacgatgaaaagggtctgcatttaacgcagacccctggaggagcccagaatgtggcggtggtttctgaatcaggcatgtggactctggtgcttcgttgtcgtgatgctgttaagtcgggaaccgttccttacagggtgcgtaagtgggtaacaagtgaagtccttccggctattcgtaagggcggcgagtttaaagctaaacctccgtcacgccgccaaataaaaactcgtgacgatctgtcattcaccaagcgtgatgaaatgggccggttactgaactggtttgtgccaaatagaaaggattgctttcatgagcatattcgcattggtcaggagttcttcgcggaaatcgtcgagctggctaaaaacaatcctgaagaggcataccaggccctacggttctcaggaaaagaaatgatgaagtttggtgattgcgggcattctgttgggtttgctgatatgtgggcaaaatttgccatgatggcaatcatcaacaacataagtattgacgcagcgatttttggtaatgaatcgttagctagggaaccaagggaggggattgaacattatttcaatcgtgttcactga

SEQ ID NO: 237081 - DNA, 123 bp, Klebsiella pneumoniae
atggctaccatcgttgtactggcgccggtggcttcgttcattttcccgaccagtaaggaaagagagacggtaaggctattgctggcctgctccattgtcctggggagtttattaaactcctga

SEQ ID NO: 237082 - DNA, 1338 bp, Klebsiella pneumoniae; identical to SEQ ID NO: 223336

SEQ ID NO: 237083 - DNA, 1044 bp, Klebsiella pneumoniae
atgcgtattgaagaagatctgaagcttggtttcaaagacgttcttatccgcccgaaacgctctaccctcaaaagccgttctgatgttgagctggaacgtgaattcacctttaaacattcaggcctgacctggtccggcgtgccgattattgcggctaacatggataccgtcggcaccttcagcatggctaaagcgctggccacttttggtattctgaccgcggtacataagcactacaccgctgaagaatggctggcgtttacccagggcgcatccgcagacgtactcaagcatgtgatggtttccaccggcacgtccgatgcggatttcgaaaaaacccagcagatcctctctcagaacccacagctgaattttgtgtgtatcgacgtcgccaacggctactccgagcactttgtacagttcgtggcgaaggcgcgcgaagcctggccgcaaaaaactatcatcgccgggaacgtggtcaccggtgaaatgtgcgaagagctgatcctctccggcgccgatatcgtcaaagttggcatcggcccgggatccgtctgcaccacccgcgttaagaccggggtcggctatccgcagctctccgccgtgattgagtgtgccgatgcggcgcacggccttggcggccagatcatcagcgacggcggttgcaccatgccgggcgatgtggcgaaagccttcggcggcggcgctgatttcgtgatgcttggcggcatgctggcgggccatgaagagagcggcggaaccatcgttgaagaaaacggagagaaattcatgctgttctacggcatgagctccgagtcggcgatgacccgccatgtgggcggtgttgcgaaataccgcgcggcggaaggcaaaaccgttaagctgcctttgcgtggaccagtggagaataccgcacgtgatattctcggcggcctgcgttctgcctgcacctacgttggcgcctcgcgtctgaaagagctgaccaagcgtacgacctttatccgcgttcaggaacaagagaaccgggtattcaatagcctgtaa

SEQ ID NO: 237084 - DNA, 189 bp, Klebsiella pneumoniae
atggataaacaacgaggttttaccctgattgaactgatggtggttatcggaatcatcgccattcttagcgccatcggcattccggcctaccagaactacctgcgtaaagccgccctcaccgacctgctgcagacctttgtccttaccggacagccatcgaactttgcgcgctcgatcatggcggcctaa

SEQ ID NO: 237085 - DNA, 1221 bp, Klebsiella pneumoniae
atgaagattttaatcatcaatactttttattacccgcatgaaattggtggtgctgaaaagtcagtgagaattttggctgagcatttagtaaaagaagggtgtgaggtaacagttttagcattaagtgataatggtgaaaaaaaaattgattatataaatgatgttaaaattataagagttcccgtaatgaatttgtataatcctggtataaataaagggaagggaggaggatttcatcgtaagcttagtaaaattatttggcatttgtgcgattattacaatcttgcctcgtatttatacttgagaaaagtaataaatgagccatatgatgttatacacaccaataatttgtcaggattctctgttgcagcatgggactgggctcgaaataaacatatccctatagttcatacatcacgcgattactatttatttaatcctaattgcactatgtatagtaaggggaaaaatcaagacccttcaagctataaaatccgtttgctttcttactataaaaaaataatgtcgagaaaagttgatgcttatgttggcatcagtaatttcattcatgatctacatatgaattctggatttttctcagatgtgaagcataataaagttatctataatagtataggtgggaacttatctgagcgagaattaaatcaagggcatcgacgagatggaaaaattagacttgggtatcttgggcgcttggatgatgctaaagggattagtgttgttatcgattacctgaaagattcagtgtttgatttttcgttcaaaatagcaggaaagggtgatgaagaatttgttgaaaaattaaaaaatgaatgtgtaaatgatgtgcgatttatttttttagggcaaactaagcctgaggttttattcaacgatatcgattgtttgatctgtccgtctaaatggcatgagccaatggggcgggtcgtgatagaagctttcagttatggtattcctgtgattggaaacaatgctggaggaattggtgaactaatttctccagggtatactggttttttatttgatattaactctaaagaaagctttattgatgctctcagttcttatgacatttctgactttaatgagttgtctaagaatagcatagaattgtcaaagaaatttacggatgaaagatatgtcacagcatataaaacgctttatcaggatttgattagtgaaagcaatattcgcacatga

SEQ ID NO: 237086 - DNA, 1197 bp, Klebsiella pneumoniae
atgataaaaaatgttgtgttattatctactgctgactgggaaaacccattttggaccaataaacagcacgtcgctgttgagcttgcaaagcagggtattaatgtcttttatatagattctcttggcttaagagcaccttccgcatcccgaagtgattttaaacggatctccaatagattaaagaaatcttttagtggaccaaagcataggagaaacaatatttgggtgtggtctcctataatattaccttggcataagtatggtattgtacgttttttaaataaaatttacattaaatcttttctttatcattatttgactaagttaaaaataaaacctagtgaaactgttttttggacatataatccaataacaacccggttggtagatttacgaggttttcagcatgtcatttatcattgtgttgatgagataaaagaacagccgggcatgccgacagatgtaatcgaaaaagcagagaaagatttattgcaaaatgctaatattgtgtttgcaacatctaaaaaattatatgagacgagaaaagatatctgtaaggaaatacattatcactcaaatgtttcagattataatcattttaacaccgcgttaactactgagtttgacatcccgtctgatttagcagggatttcaggacctaagctaggttttattggagcaattagcaactataagatagattttaatttactaaaatatattgcagaaaatagaccggaatataaaattatcctgattggtgaagttggagagggggagcctgggaccaatgtcgatgaacttagaaaatataaaaatatctatttcttagggcctaaaaattatttgcagttacctacttacttatctttcatgaatgttgctttgttaccaaataatataaactcatatacagataacatgtttcccatgaagttttttgaatacttatctgctgggcgtaaagttgtgagtgtgaatttgaagtcattatatgattttcgtgattattgtagtttaagtgaaacgtatcaagattttgtagataatattgataagttgattagtggtgatgttatttcactcgagaaacgattatccttagcacgagaatatacttatgaaactcgtacaaaaaaaatgatcgaaattataaatgaaaatcttaataaaaataatttatctcgaaatgtatag

SEQ ID NO: 237087 - DNA, 1170 bp, Klebsiella pneumoniae
gtgaataaaaaaatattcgttgtcgttagatctatatcatttgccgattctgttggtgggatggaaaaagcagcaaaagatcatattctggaaatggttaatgttggataccatgttacgttattatgcccaagaaaaaaaatagttggtaatattcccgatggtgttacatacattgatatatcatggcctaaatgggatcgctataaaatagcgatgacaatgggattagcctataatagatggtgtaaaaaagtatcattattcttaaatacgcatgctaagcataatgatatcatacattttcatggggcttcggcaggtacgcttggtttccttgattctaatattattagtaaaacaataactgttgttaacccacatggtatggaagaatttggttccggttcaatttttaggttggcgaatagattttttactaaaagattaattaagcagtcatttttagctgatgctattattgctacagataatttattaatcccagtagttaaaaataatctgggagttaatgatgataaggtttttttaattcccaatacaatagatgttcagaagaatagaagtgttataggcaataaaaaaaatgaactaaatgcagaacacgatggtttaaatatagttagcattggtcgactggaatataataaaggatatgatattcttggcaaagctctatcaatttttcaatctcaaaatcctaaagtaaacgtaaattggacgcattacggaagaggaaagaaaaaacagtcattattgaaattatgcattaaagaaaatgtcagtttaagaattattgaaaatgcctctgatattgaagtgcagaatagtctatacacatgtgacgtttttatacagccatcaagatatgaaggtagtagcttaactacgcttgaggctatggtgcatggttgcttgatcgttgctacgcctgttggtggtattccagataaaatagttaaccaacatactggttttttgtgtgaagatataactcctcagagtttatatgaaacgttaaataaagctttacaatatgaagatattcacataataaaggaaaatgctaaagtttttgttgagtctacgtatgatataatggtctctacaaggaaatatgtagccttatacgaatcatttgataaataa

SEQ ID NO: 237088 - DNA, 1146 bp, Klebsiella pneumoniae
atggcctatcacttccacgtgcggaaaaataaaggcctcagcctctccgggatcgtttcagcgatcaccggcgttaatccgcagggtttctggggccgtctggtcgatctgatgttcctgatcgctaccgtcggcgcgttaaccatttcgctggtagtcaccgccgccaccttcacccgcggcctgtcagcgctgaccggactgccggataacttcaccgtgcaggcatttgtgatcctgctctccggcggtattttctgcatgagttcgtggattggcatcaacaacggcctgcagcgcctgagcaaaatggtcggctggggggcgtttctgctgccgttggtggtattactggttggcccgaccgaattcatcaccaataacgtcattaacgccgtcggcctgacgacccaaaacttcctgcagatgagcctgtttaccgacccgctcggcgacggcgcctttacccgcaactggaccgtcttctactggctgtggtggatctcctataccccaggcgtggcgatgttcgtcacccgcgtctcccgcgggcgcaaaatcaaagaggtgatctggggactgctcctcggtagcaccgccggctgctggtttttcttcggggtgatggaaagctacgccatgcaccagttcgttaacggcgtgattaacgtaccacaggtgatgcagactctcggcggcgaaaccgccgtccagcaggtcctgatgtcgctgccggcaggtaagctgttcctcgccgcctatctgttcgtgatgattgttttcctcgcctcgcacatggatgcggtggcctacaccatggcggcgaccagtacccgcaacctgcgcgaaggcgaggatccggatcgcggcatgcgcctgttctggtgcgtggtgatcaccctcatcccgctgtcgattctgtttaccggcgcttcgcttgagaccatgaaaactaccgtggtgctgaccgccctaccgttcctggccattttactgattaaaaccggcggcttcgtgcgctggttaaaacaggactacgcccacgttccggtccatcagatagaaacccatacccccgagcccattattaaagccgagacgctgccggttggcgcggtactcaaaggcgacggccagtcgctgtaa

SEQ ID NO: 237089 - DNA, 1548 bp, Klebsiella pneumoniae
atgaagctgacctatttttcccgttttcctctgctggccggactcatggcgctgtggctctcactctccggcgcgcaggccgcgaccggtctgccggctgcggaatacgccccgcgtagcggggagctgacgccgagggagatgactatcgccagaaatgcctggcaatatttcgtcgccaactttcagcccaccaccgggctggtcaatgcggtaaacaaatacccctcgaccaccatgtgggacagcgcctcctatctggccgccatgaccgcggcccgtgagctggggattattgataaggcggagttcgaccgtcggatgctgaagtttctcgccacgctgaataagctcgatttattccgtaacgaattgcccaacaaagcctataacaccgtgagcggacaaaaggtgaactaccagaacaagccgggtgaaataggctattcggcgctggatatcggcagaatgctgatctggctgaaggtgatcaaggagcgctacccggcatacagcaacagcatcgataacgtggtgctggggtgggacttcagccatgttgtcgacccctgcggcacgctgtatggggcttatctggaaaacggccagcccaaatacgttcaggaaggacgcctcggctacgaggagtacggcgcggcgggctttcaactgtggggatttaatacctgtcaggccagccggccccagccttatgagctggcggaaatttactgcgtgatggtcccctatgattctcgcgacccgcggcaaaccagccagcataactatgtggtcagtgaatcttacgtgctgtatggcatggagtttggctttgataatcctgctgaccggaacgatagcccgcgcgagtactcccatccatggatgaaaaactttgccgaccgggtctaccaggcccaggagaatcgctacgccatcaccgggatcctcaccgctcgctccgagcatcagctcgataaatccccgtactttgtctatgacaccgtgttcagcgacggttttaactggaacaccataaccgacaaaggccagttcgtaccgaacagcgccgcggtgtcgctcaaagcggcgatggggatgtgggtgctgtggaactcgccctataccgatcgtttgctggacgccattgaaaatgcgaacgaagcgggaaaaggctattacgagggactgtatgaaaacggcgacgggccaatcaatgagttcaccgccaacaataacggcatcatgctggaagcgctgctgtttaaaaaagaaggcaaactgctgcagttttccagcgacaatccgaaaaaccgcgatttcgcgccgtcgctgtgggacaaaaagctggtggatctctttgagcccaataacggcccgcgcaaccgccccttcctgagcaatacccctgccgtcaagacatggtgcgaacagaccggaaccacgcagcgcacccaacccgcctgccaggcctgccagtgcgccgcctgcaaggctgacgagcccgttaaacttccgccggtgaccgcgcaatgcttaaaaccctag

SEQ ID NO: 237090 - DNA, 843 bp, Klebsiella pneumoniae
atgagcctgttggtggttatcgtcgcgctgctgctggctggcgcgctggggctgctgtacttcccgtggtcgggcaaaggggcggtagaccgcgatgccctcaaccgcgccctgtaccagtcgcgcctgcaggagctggcgcaggagcgcggcgaggacaacccggcgctggtcgtcgagctgcagcgcacgctgctgacggatattccgccccaggcacagtctggcgaacggccgctacgccgctgggcgctgcttccgggcgcgctgctgctggtggtcctgagtctgggcctgtatctgaaaaccagcgatattggtcaggtgctgctctggcagcaggctgaacgacattttcctgcgctgttgcagcaggttaaggacccgacggcggcgccgctgcgaatggatgagctggcggagctgcggcttggcctgcgcagccacctgcaggatactccgaacgacctcgccggctggcagctgcttgggcggctgggcctgttgttaaacgatggcgagacggcgatcggcgcctttggccgggcgcatgctctggcggcggacgacccggcagcggctttcgattacgccagcgcgctggtgcgggcgggagatagcggtcaggttcggatgggcgagctgctgctgcgtgacctgcatcagcggcagccgaacagcctgccggtgctggagatgctggccctgagcgcggtgcgcaatgaagattaccccgaggccgtggcggccctgcaggcgttgctggcccggctaccggaaggggatgcgcggcgcgaggcgatcgtccgccagctggcgcaggcgcagcagcaggcgcagtaa

SEQ ID NO: 237091 - DNA, 459 bp, Klebsiella pneumoniae
atgagaggggtaatggtcatcctgctggcgctgatgctgaccggccaggcgtgggccgccatcgatacctggcagtttaaggatgaggcccaggagcaggccttccgcgagatcacctcccaactacgctgccctaaatgccagaacaacagcatcgccgactcaaacgcgatgattgccgctgatatgcggcagaaggtgtacgagctgatgcagcagggtaaaacgaaagggcagatcgttgactatatggtggcccgctacggtcattttgtcagctatgagccgccgctgaccgcgggcacggtgctgctgtggctgggaccggggttgttcgtgctggcgggcgcgggagtgattatcgcccgcgcccgccgtcgcgacattcctgacgcggcactcaccgccgaagagcgccagcggctggcggcattattgcaagaaggaaaagaacgatga

SEQ ID NO: 237092 - DNA, 555 bp, Klebsiella pneumoniae
atgaaccggaagctactgtttatcccgctggtgctgtttctggcgctggccgccgcgctgttctggcagctgatgcgcaacgccgatggcgatgacccgacgaccctcgagtcggcgctgattggcaaaccgctgccggaatttcgccttgaagcgctgaatacccccggtcagacgctggaccgacggacgctgattgacggcaagccgctgctgctcaacgtctgggccacctggtgtccaacctgtcgcgccgagcatcagtttctcaacggcctggcgcagcagggcgtgcgggtggtggggatgaactacaaagacgatcgccagaaggcgatgagctggctgcagcgcctgggtaatccctacaggctgagcctctacgacggcaacggcatgcttggcctggatctcggggtctatggcgcgccggagacgtttctcatcgacggtcagggcattatccgctggcggcacgccggcgacctgaacgaacgggtgtggcgcgaggagctccagccgctgtgggatcaatacaaccggagggcgggttga

SEQ ID NO: 237093 - DNA, 459 bp, Klebsiella pneumoniae
atgcaagcgcgtcgtaaaacccggctatatatcgtgctggcggtgctcgccggcctcgggctaaccgtcagcctgacgctgtacgccctgagtagcaatatcgatctgttctacaccccgggggaaattatctacggcaaaacggaaacccgggcgctgccccataccgggcagcacctgcgggtgggaggctacgttcagccgggctccctgcagcgcgacccgcaaaccctcgacgtgcgctttaagctgtatgacgcccgcggggtggtggacgtcagctataagggcattttgccggacctgtttcgtgaagggcagggcgtggtggcccagggcgtactggacggcgagcggcatattaccgcccagcaggtgctggccaaacatgatgaaaattacacgccgccggaggtgaaaaacgccatgacgccggagaaaacgggggcgcagccatga

SEQ ID NO: 237094 - DNA, 231 bp, Klebsiella pneumoniae
atgagccccgccttttcgtctttcgccgccttcctgaatatgggcggctatgccgtgtacgtctggctggcggtggccgtggccgtcgccgcctttggcctgctgacggtgcataccctgtgggcgcggcgggcgctgttccatgaggtgcgacgccagcaggcgcgcgagcggcggatcgctgccgcccgcgaacatgacaaggaggccgcggatgcaagcgcgtcgtaa

SEQ ID NO: 237095 - DNA, 738 bp, Klebsiella pneumoniae
atgtggaaagcgttacatcaactggcgatccccgagcggctgtaccgcctgtgcggatgctggatcccctggctggcggcgttgagcgcgctgttgctggtcatcggcctggggtggggctttggcttcgcccccgcggactatcagcagggggaaagctaccggatcatgtaccttcacgtcccggcggcgacgtggtcgatggggctgtacctggcgatggccgtcgcggccttcgtcggggtggtctggcagatcaaaatggccgatctggcgatcgccgccctggcgccggtgggggcggtctgcaccctggtggcgctggtcagcggcgcggcatggggcaagccgatgtgggggacctggtggatctgggacgcccgcctgacctcagaactggtgctactgtttctgtatgccggggtcatcgccctgtggcacgcctttgacgaccggcggctggccgggcgcgcggcggggatcctcgtgctggtcggggtggtcaatctgcccatcattcattactcggtctactggtggaacaccctgcaccagggctcgaccaacctgcagcaaaccatcgacccaagcatgcgtctgccgctgcggatctgcatctttgccttcctcacgctgtcggtcaccctgaccctgatgcgcctgcgtaacctgatcctgcaactggagcgccgtcgaccgtgggtggtggcgctggtgaataaaggagccgcccgatga

SEQ ID NO: 237096 - DNA, 411 bp, Klebsiella pneumoniae
atggcagccctgacgctggtgcaaaagcacatccgccagcgcgatatggcgcaattgctggataagttgacccacctcttaatgctggagcagatgagcggacaacaaatcaccgtattggtaaactatatggctcaggcaggggatgccgaagatactcggacactcttgtacgggctggcacagcgcgtgccgcagcatggaggattactgatgacgctggcggaaacatggcttgcagaaggtatggagaaaggcatcagggaaggcgtacagcaaggcataaaagaagggaaacaccaggctctggtgcaggttgccgaagcgatgcgcagtcgcggtattgatgaccaggcgattatggaaatgaccggtctgtctgaagacgagctgcagcggcttcgccactga

SEQ ID NO: 237097 - DNA, 678 bp, Klebsiella pneumoniae
atgaccttgcggatcgcgctgcttatagatgccctgctgacggaaggtgtcgaaatccggcaggtcgggaatcgctttgcgcgactgctcatacagatagcgcatccagccttcctgggtacggccctcggtaaactgctcttcgacgcccagacgctttgccagttcgctggtcatctcatagatggttttgcattcaaagcgcggcttgatggcctgatcggcaaagataacgtaggacatgttgccgcaggaggcatccagcgcgaaatccatctgctcggaggcggtacagtccggcagcagaatatcagcgtatttcgccgaggaggtcatatggcagtcaatgaccacaatcatctcgcatttcttgtcgtcctgcaggatttcgtgggtccggttgatctcagaatgctggttaatcagacagttgcccgcatagttccagatcattttgatcggcacgtcgagcttatctttaccgcgtacgccgtcgcgcagagcggtcatttccgggccgcgctcaatcgcatcggtccacataaacatcgagatactggtctcaaccggattctccagcgtcggcatacgctcaaaaggcagactatacgagccctcgcgcgccccgctattgccgccgttgatcccgacgttacccgtcagaatggcgagcattga

SEQ ID NO: 237098 - DNA, 594 bp, Klebsiella pneumoniae
atggcacggaccgtaggccgggcaaggcgtcagccgccgcccggcataaaagcggctccgtgcccgcggcaatcgcccggcggcgctgcgcttgcgcgggcctgggggtattgtagatactgctatcggcttgtaacggttttagtccggaaaaaacagttgttttgtattaattccgagcacattgcgctcccgaaatgtcttctacgttatgtttctcatggcgcagggagcgcacagggggcggccagtcgccgccgccccctgtacccccgggctccggccagcaacatcgccactgcgtggtgccttcgacttatccctgcaggcttcgggtcgggccgaggcagcgtccttgcaaaacacggccctcagcccgcatccatgcgggctgccccggccttccgggaacgtctcagcgatgttgaggccgcaacaccggcagtttcagcaggactggtgggtaacttcacggcaggtcgcacgcaccgtaggccgggcaaggcgtcagccgccgcccggcataaaagcggctccgtgcccgcggcaatcgcccggcggcgctgcgctagcatgggcgtgggggtagtgtag

SEQ ID NO: 237099 - DNA, 228 bp, Klebsiella pneumoniae
atgtacagcagactgttagccatatgcctgatgacgatgttgatcgggagctgcgcgagcacttcacccgccccggtagtcgttgatacggcctgcagctgggtgcggatcatttacctgaccgaccacgatatcgacgtgctggataagcagaccaagcgcgacattctggcgcacaataggtcggtatccgcgaattgctccaaaaaaatccctttgagtccgtag

SEQ ID NO: 237100 - DNA, 198 bp, Klebsiella pneumoniae
atgtggattttatttgtttggttaagcggtacctattccgtgagtttgtctgatgctgtacagcccactctgacctccatgaaccaggaattcaactctgaaagcgcatgccgagcagcatttgtgaaaattaaagaggttaacaacggtgagctcatgctgcgtggtgtatgtgctccaaagggggatgcggactga

SEQ ID NO: 237101 - DNA, 237 bp, Klebsiella pneumoniae
atgactgatgccctgaccaaagaaaaaatcattgatgctatgcgcagttctattgagggcttcgccttcttaatcgtcgattcgctggagtttgaacttaagcgccagcttaccgacgctgaacagcaggaagtttcaacagttgttgagcagttggttctgacgtttcctgaaccatgtccgcgctgtggggtaacgtctacccgcccgaatggtgagcattattgccatgcttaa

SEQ ID NO: 237102 - DNA, 201 bp, Klebsiella pneumoniae
atggctgaacaacctgatgatctgctcactccggatgaggtatgtggaaaattgggcattacgcaaaaaaccctatgcctgtggaatacaacacacaggcatcgcgccacactggcaccaattaaatttagcgcaaaagtagtacgctacgaacgtaaaaatgtcgaagccttcattgaaaaatgccggagtcagtactaa

SEQ ID NO: 237103 - DNA, 1398 bp, Klebsiella pneumoniae
atgccgcgcactgtaacacagaaaccagatagccccaataacgacgatgttttagccgcatcagaaaaatgggacgcctgtaaacctccctataccagcacacacattagaatctgtgttgctgctgcgaaaacgatcctctcagcatctggtctggcccgacggtcgaaatacgagaaagagaactatctccgtattgattttagcaaagccggtaaggttacattttacgctgaatttcccaaaaaaatggggctgaaggggaaaaagctgggggagtggcccgaactggcgatccagctagcccgagagaaagcggcggaaatggctggagatggcctccgatcagaatccgtccatgctgcgattgaactgtaccgggatgaccttaaagccaaagtagtaaggcaaaaattgagtccggatagtttcaccacttacggggtacgcattgacaggattaaggcaacgtttggtgagcgcgaagtatttagcgatgtaacatacaatcggctggtggaggtactggatgagtggatcgccacccgctcgaacaataacgctctggagttgttcgccgaactccgcaggctctggaagttctgctcccctacgctttgtaatgggcgcaacattgcggccagtctgcctgatgattatgtatcctcccgcgtacagaaacccacccctacacgtctttttacagacattgaatcaatcgcccgcctgtggttgaacgtggcggcctgtccatcaatacatcaaaagaatgccgttaggtttatgatcatcaccggcgtacgtccgattaacatacataacctgcgctgggactatgtaaacgaggatgctggcgaaattatctatccggagggggttattggtatgcgtggtgctatgaaaacacaaaaggctttccgcctgccgataacgcctgaacttcgacgcgttatcgacgagcagaaagcctggcgtgactcggttcctgaatgcaataaagattatgtgttcctgcagccgcgtgacccaatgcaaccgttctctaaacggtctctggataagctggtaaaaacatacagtccagaaggggcagtcaaaggattgaagcatgacgggacgattaaggggaaagagggggcatttaatacgatgtgccgtaaattcctcaagagcaatgtaattgccctcatgaaggaaagaggctattcccgatcagaccgaagggaaattagcctcctgtgccttcatcactccagcaagtcagatgacccgatggcagaacactacgacttttcggatgagattttgcaggaagagatcgcgctgaagcgtgaagctttcgaggctcacgagcgtagcatactagcgcaggctgctttgataaggaggaggggttag

SEQ ID NO: 237104 - DNA, 579 bp, Klebsiella pneumoniae
atggagaaatacttatatttaactgagttatcttgggttgagccttgggttaatggaggggttgtcccattaaaatgtgctagttcttataaaagcatagaaaggcatggtattttcactcctgatgaaaatctcatagatacttccactcacgatatcaatcaatttgcgagcgtaattagcattgagaactcttcagttacatttttcggaggcgaaattaatggaattaaactccctaatgtaatgaagatagataggaaaacagaggatggcctggtgctttgtttagctaatagaaggagtaattacattgctaaaaggttaggtaaaaaagcctgtgtgaaaatttttaatatctacgaattaaaggatatgttggacgagcaaatcggcgtctgcagccttatggataagtgtgaatacaccaagactcacctgcgaaatcattttttgaagtctgagctagacagttggcaggaagagtacaggatattttggcctggggtcgaagcggctgaggttaaaattaaaagggatatggcaatgcaaattccgattagaggaagcggttattaa

SEQ ID NO: 237105 - DNA, 1071 bp, Klebsiella pneumoniae
atgaataatggtgatgacagaatcaaccaagagtggatagcactgaacgcaataagaggcatggtaaaaatcgcttcaaaaggtagcatgagtaaatctacatatgacaatgcgttagatttaggaggagttctttatcctgagctactcggtcctgacaatagccttttaagacgggagcgtgagagtgatacaactaaggaatatcgtcaaaaagctgaactcaggtctataaaaaatgagcttcctattactgcgctggaacttgttttgacggacattgaagattacgaatcactcatatcaatagctaaaaaaaatagaggtgataaacaaaaaaccgatcaactcaagaagaggttggctcagcttttaaaagcaaaatctgaactggagataaaaccccactctgaaaatcaactaatctttagagatgcttataatgccgaaagaaatctccctgaattatctaaaggacatgcttataaagactttgaattacccgatggtaattatctaaggcttcgcgtgctacatccagatagacctgagcatattactggcgcagatataatatatgagaggcataatgagaagtcggggaagataagtgtggtcattgttcagtacaaaatatgggaggataaaaagttatacatatcagatagtagaatgagagatcaaatagataaaatgagaaaatttacgtgtggaaataatatttgttctgttcaagaaggagataatacttatagattcccttgttgcgcaggattcttgagaccaactgacaagttgcaacatgcagatcaaaaattcatttccacaggcgaacacctacctatctgtagaataaatgactgcaaatcaaaaggaaagcaaggtggtgaattacttgaatatgataaagtaaaagaagtgtctctttccgctgagctatttgaagaactatttaatagaggaaaggtcggctctagagaactatcacgtgatgagttggaagtattgtataagaatgcttctgttatcgatgcacatgacacagtcgtcatctacgcacaggaattttaa

SEQ ID NO: 237106 - DNA, 1791 bp, Klebsiella pneumoniae
atgactgaacatgacttgaatgatattaatgctgaggttatatctgtttatccaaataacattaagattcttgtgaccaatctaaatgattttaaagatggccaaaatttaaaagttggttcatatatcaaggtgccatctgatgatgggaccatgatgcttattggcattattgaaaacttctcgattgaggctaaagagagtggtgaacggaagtatcttatacaagctaacccactaggtatcatcaaaaatgggaagtttgagcgtggtggtgattcaattgcattacctcctaaagaggctgcgccagcaacatatgatgacattagaagtatttacaaagattctgtagaaaaaaataagcaatttgagttttgctctctttcatataacgacaacattagaattccattagatggtaacaagttttttaataaacatattgccataataggatcgacaggttctggtaaatcgcatactgtctctaaagtaatacaaacggctataaatggcaagagtggagattttagtttaaataactcacatattattatttttgatattcactctgagtatcgttcagcttttcctgatgctaattttttagatgttaataatttacatttgccctattggttgctaaacagcgaggaattagaagagattctgttagataccggtgaaagagataactataatcagtcgtcggtatttaggatgttggtaactgcaaataagagaaaacataatccatctttatcgaaagttttttatgacagcccagtattctttgatatagatgaagttgaaaatgctttaaaaaacctgcgagatgagaccaaaaattcaaaagcaaatgatagatatatgatcattggtgagtctggtgaagcagataaaaagggggatagctccacaacccaagattgtggttgccaacttaatgacgctgatcgtattgataaatattttgagaaaaaatttaatttctacaacactaaaaactcgaatataacaaaagggttttatgctgatgggactttagataaatttatttctcgattttcagaaaaaatcaatcaggataggttatcatttcttttctctgagcaatctagaaaaaataaatttgaagatgttatcagcagtttgctaggagtaaaaacaacacctaatgataacaggaatgtgactgttatagatctaagcggaataccttttgaagtgttgagcattacagtctctttaatatctagactgatttttgaatatggctatgtctataaaaaaatgaaagagaccaatggtgaaaatactgacttccccattcttttagtttatgaagaggctcataaatacgttccaaatagtgagcttgttagatacagatcctctaagaagtcaattgaacgtattgctaaggaaggccgaaaatatggagttaccttacttcttgccagccaaaggccatccgaaatatctgagactatattctctcaatgtaataactttatagcgatgaggttaactaatcctgtagatcaaaattatgttaagagactgctccctgatacacttggagctattattgatactttaccttcccttaaggctggtgaggctttaattattggggagtcaattgttttgccttccatagtttctattgatctatgtccagaagataagcaaccatcttcaaatgacataagatattgggaggtttggaaacagcaatggcataatgtggatttctcaggtgtcaaagaccattggcttaaataa

SEQ ID NO: 237107 - DNA, 1260 bp, Klebsiella pneumoniae
atggacaatccacgcagtgctataagcgcaatcaaaggctatttctatcagtttgataagactattcttgaattattgaaacgctccgataacgatgtcatttgtattgagggggttgaagatattgaccttaaaaccgccgatgacaatacggctatacaatgtaaatattatgagagtacagaatataattcatctgtcatagcgtcacctattcgcctgatgttaaaggatttcgcagagagagtttttaataatagagaatcgtacaaatatacattgtatggatattattctaaagggcatgataaactaacccttccattgacagttgagtatttgaaagataaattcttgatatatcatgaatatgaaaaaaaagataatgataaaaaatgtgatgaaaaaagaattaagaaaacaattgaaactcatacggacttaggtcttactgatcagcatctatcagattttatcaatttattgactattgatatacacgcaccttcctatgataagcaaatagaagatgtattagatgccattaagaccatttattcatgctctgcatttgaggctgagttctattattataataacgcagtttcactcataaaaaaatattccacattgaaaggtgaggaaaacagaagaatcttgcctttagattttaaaaatcagatagataataaaagtattctattcgatatttggttctcaatattcaagtcagaaactatttattgtaagaaattaagagagaagtattttccatcggtaatgaatactagtaattttgaccgtatttttatcgttgaggataacggttatgaaattaatgaggtagttgagttaatagttgtcattttaaatagatggtctgccattagtataaaaagaaaagaagatgataggttttgtccatatgtttatattcatgggatgtcttcctctgatttattagagttgaagttggcattaagggcgtcaggatatccaccgatggatggatatgattttcatggggcaacttttaattgtgaatcattaatgagagatattaatgacatctcattttataaagttaggtttataaattctattaacgttatagatgacattttattaagatcaacaagaagaaaagaaatctatcaattctatataaatgaacctatttatgattatgagagcaaacgagataaagttgttaaaatacaggttaaatcattggaaatgtgcaagaggatattaaaatga

SEQ ID NO: 237108 - DNA, 708 bp, Klebsiella pneumoniae
atgagacaggaccagttcttgaacagatgtctacaaaaagagatatgtttaaggctcaatttgaagagttatctgaaaaaatacttaggactcttgaaaatgtctagagctcatataattttcaaaaaaaatattcaggaggcgaaacagttaaacgcattacataactatttgtcaaataacatacaagttccaatatcacatgatgatattctgcgtgcacaattagttaactgtgtaagcgcttttgataaactcattcatgatctaatacttgatggtttgaccgagatgtatgtaggcaatagaccgcaaactcctaaatttttaggtgaagtgttgccattaaatgtgtactttcagctggaaaatgcgacgatgcctccacccgaataccattttcgcgaagcaatgcgagcaaaacttaaaacaatttcttatcaggaaccttctaaggtcgcggaaggcttggcttatatatggaatgagagccaaaaatgggtaaaaatatctcaactcatgggttctacggatgatttagtaaaaaaacaacttaaacttatagcggtaagaagaaatgcaattgtgcatgaggctgatttagacccagtaactcatcaaaaacttagtattgactcgagaatggtcactgagaattcaaatttcctagaacgatgcggtgatgcaatagaacgtttggtatgttag

SEQ ID NO: 237109 - DNA, 1587 bp, Klebsiella pneumoniae
atgctgaagtggctacaaagaccatcccaaagccagccacctgcaccagacgctacgctgccggagggctggtttgcgccacaatccgcagaacgattactggcgacaccgttacgccagtcctgtttgcagcagttacggcaactgaccccgctgccggataccctgtttgatagctggatcctcacggcgattcatcgcttcgccgccctggtgcaactgctacccgcctcacaaagccatcaccattccactcccggcgggctgctggatcattcgctggaagttgcctgcaacgccatccggctgcgccagggttatctgctgccaccgaatgcgggtgcagaagaacaagcccgacaggcgagtgcatggacggtcgcagtggtctgcgcggcattgctgcacgatacgggaaaaatcgccgtggatatggagattcatcaacgtgatggcacccgctggcatccgtggcagggtaatctggcacagccttatcgctggcagtaccaaagccacggtcgcgactatcatctgcatccggcggctggcgaaatgctgattaatcagttgataccctcgccattactgggctggctggccggatacccggcggcttttgcgtccctgatttatcaactctccggacactacgaacgggcttgcgcactggcggaactggtgcagcaggccgataaagcctctgtcgcccgatacctcggtggcgatatcaagactgcgctggcgcagaaaccctcttccctgccccagctgcttctcaccgccttacggtcactagtgcagaacgattatcggctgaataatcccgaatgcggatccgatggctggctgacggaggatgcgctatggcttatcagcaaaactactgccgaccgggttcgcgcctggttgctccagcatggcgtatccagcgtgccggaaaacaataaccgcctgtttgacgagttgctggcgcaccagcttatcgttgccaacgaggataaagctatctggcgctgcgtcatccgttcagataagggctggtcgcccgttgaaccgctgacgctgctgcgcctgacaccatctgcaatctgggagccaggcgaacaacgccccaccagctttgccggtgatgtgacaccggtaagtgaagccgaacccgcccctgaacttagcacaccgactcaaccgctgccggaaatagcagacgacccgaggcttggtgacaataacaacttcctgcagtggctgaagaaccacaccagcccttcagccacggtgaatacccggaacggcaaggtacatatggtggaaaaccatcttttcttgatttcaccggggatctttaagatatacgcatctgaaaccactggagacaccggcgacggctggaagctggcacagcgaatgtttcaggagtcagggctggccctgcgctgtaatgatgacagttttatctggacctgcgaggttcgcgctccgcagaaaacggggcagttgaaagggtttctgatagaagatccggggctggtgtttggagagaaagtgccggttaataatccgtggctgaagttgctgcgcgaataa

SEQ ID NO: 237110 - DNA, 801 bp, Klebsiella pneumoniae
atgataataaaggatgaagtatttgactcaatgctaagctcaggagttctggatgatttcctagatttaattgaccctcaaaaatttgatgagttcagtcgcagtgtttttataactttaagaaatgcagtcaaatctatagagagtaatgcggataagtattatgaccagtcggaggagcaaatcagtacgactatttcactccttattgagaaagctggttttcaaaccaaaagtgaaccatcgaatagaggacatgttgatatttttgtagaaaaagatagattcaaatggctaattgaagccaaaatcggatacaataaccagaaaatattcgaaggacttctacaattgacctctcgttatttaactgatcagcggtccgcgtgtcttttattatacttcaaaaaagaaaacataaaaaataacttcgaaagctggaaagattatattcagaacaagaaatggaaagattatgcaaagatgcatgacatacttaatgattgtgaattaatgtatggtgaatcaattataaaaccggatccattttgtgttggatatagtttcttagcaggtgctaaaacaacagcaggtgagtctctagatatttacaacctaggtgccaacctgcatttccgcccagtagatagtagtgggagaaatggtgtcacattaagaaaaaaccaagcaaaactatatctagaacacctatatcatgataaagaaaatggtttaccaatagatgaaaaagaattatacaagaatctgaatgattattttgattttgataaaaaacaataa

SEQ ID NO: 237111 - DNA, 1077 bp, Klebsiella pneumoniae
atgtctcaggttgagtcgtgtgtatccagttcatctttaccaattgagcaattactggaagttattggaaccatttcagatactaactattcgcgttactatcttaaaaggtttgactttgatacaggcataggctggaaggagactcgttcaaatatccttgaacaattttcaggaaaacgcaaggcctcagaacgtgctacatatagtaacttagtcagtattactaaagcattaatgttcttaggtaaacattactgtgaaatttttccacttacagcaaatgaacattcagtcttagtggctaacgctaataaaattaaatacgatggtaaaccttactccgagtgcttcccactttttgtaagtccagaatatttaactgtatcctcactccctgttttgacacacatcgaatataagaagagtggtataattttcttcttttctacccctcgtagagtcagtgagcgcgttgaaaagcttgaaaaggttcagggtgtcttaagaaaagtttcttacagagaagatataaaaaaacaatttattgatactgtattcattcctaaagagcataacagaattgaatttaaaatatcgacagaaattggtaagcgcgatatagataatgaaatggctcgcttacaagatactttcgttgaaatattatctaagaatggcattagccttaaagattcaaactcaataaatctaaataaatctataagcactatttataataatagttcaataggccgagttgttgattgtgttttttatagcaaagataatggtatttctattcctcgtacatgtcgtaaagaagttgatgtatgtttacgtgaacaagaatatcatttagcaggctctgaaaaagaagacgttgagtgtgttgcagttactgtccgttgggaagaaattgatccaaaggtcaaacttaaaatcaaaacacagattagcctggagtcaatggctaactttaattatactgtatgcaagcggtttataatcgataatccgaaggggctgtcacattccatttcgttagtttctatagtggagaaaggtactgagtga

SEQ ID NO: 237112 - DNA, 240 bp, Klebsiella pneumoniae; identical to SEQ ID NO: 167025

SEQ ID NO: 237113 - DNA, 438 bp, Klebsiella pneumoniae
atgaaccagaatataccgaattatgccaaatattgccagagaggtttcgtgttgcaaaacactaaacaccgaagtatattaaacgctatgaaaaactttggtgaaaccatccgcgaccttcgagtcgcccaagaccttgggttgcgcgagactgcgatcaaggtaggcatttcccccgcctatctaagccgcattgagcgtggcaaggagcgtccgccaagaccagaggtaatcaaggagctggccaagatactggcggccgaccctgacgtgctgttccgcttgtcttcgtccacggacccggaagttgtcgactaccttcatgaccaacccgaggtcatgaatttgctccgctatgtcaaggaggcctgctttaccgaggatgagctcaagagcctcgttcaagcagccgaaagcatcaaggccaactctcattag

SEQ ID NO: 237114 - DNA, 207 bp, Klebsiella pneumoniae
atgagcaatgacgaggttctgaaaataaaggatgtcgccaccctacttaaggtcggtgagaagacagtctattccatggcccagaccggggaactacctgcttttaaggtccgaggccagtggcgattttcccgaaaggatatcgacgcatggatagaacaacagaaacatacaacaaaagatttcggtgagggtaatacaaaatga

SEQ ID NO: 237115 - DNA, 2001 bp, Klebsiella pneumoniae
atgagcaaaaagaacagcacacaagccgaaaacacgataccggctgggtatacgctcgactacgtttccggtaaacagatcaaggaaacgaagaaagagctagtacggcagcggatcgttcgcgccctaatccacgaatacggattctcgccggaagatatggagctagatttttccattggcggccgcaagaaggtggacgtagccatcttccatcatggcaaggaacacatcatcgagaatctggggcgcgctgtgctctgccgtcaggaaccgaacgtcggcaaaaatgccgtacgcatccgcgattttgaacaggccgctcaagatcttgatgaaattgaagctattatgcgcgaggttgaagccgttaagtatggtttgtggactaatggcttggagttcttctttgttgaaaaagagcaacagcgattcgaaacaaagtgcaacccaatcggcgactggcctatggcggaagagtctgttggcaccaaagagattatctctgatgctcacacgcgcgtcgctgacaatgagatgcttaaaatcacattccgtcgttgccataacttcatccatggcaacgaaggcatgccaaaggacgccgccttctggcagttcctctatctgattttttgcaaaatgcatgacgaaaaccttcggggagtccaacgtcagtcatggaagcggcagttctgggctggccctaaagagcagtttgaagttgagggccgaaaggccattcgtgctcgtattgagacgctctttaccgaggttaaaaagcagtataagaacatcttccggggcaatgaggaaatcaccctctccaaccgggcgttagcctttattgtttctgagttagccaaatacgattttacccgcacggacgttgatgccaagggcgtggcctaccaagagttagtgggcgtcaatctgcgcggcgaccgtggtcagtatttcactccccggggcgtagtcaagctagtcgtggaaatgctcgatcccaaggaaagtgagatggtgctagaccctgcttgcgggactggcggcttcttggtcgccactttgggacacatgctgaagaaattccgtgaggagcagaacacccagagcggaaatgaggacaccagcgagtttctgaacgtccacgagcggctgaaagagtatgctgcagccaatgtgttcggagccgactttgacccgttcctgattcgcgctgctcagatgaacatggtgctggcgggtgacggtcggggtcacatttacaacatcaactctctggagttcccactgggacatttgaccgatctgtcctccgctaaaagggagattccattggggtcagtggatatcatcgccaccaatcctccattcggctccgacatcccgatcaccgacaagcatattctggaacaatacgagttagcacatagctgggaatcagatggcgaaggaggtttccgcaatacggggtcattgaaaggcagtgtggccccggagattctctttattgagcgatgtatcaaatggctcaagccaggtacaggtcgtatgggtatcgttctgcccgatggtgttctcggtaacccagctgcagaatacatccgttggtggatcatgcgcgaaacccaagtgctcgcctccgtagacctgccggtggaagcttttatcgccgaggccaacgttaacatccttaccagcctgctattcctgcgtcgcaagagcgacgaagaaaagcacgccgaggctttgggcggcatcgatgagtatcccgtgttcatggctgtggctgacaaggttggcttcgaccgccgtggcaacaagctttacaagcgctccccggatggagaagaaatcgtcgagcccaagcagcatatcgagcgtatccgcatcggcgggcgtttcgtggaacggatcttgacccgcaatgaaaagatcgaagacaacgatctgccggtcattgctgagaagtaccgcgcatttctcatggagcatgattga

SEQ ID NO: 237116 - DNA, 2019 bp, Klebsiella pneumoniae; identical to SEQ ID NO: 167024

SEQ ID NO: 237117 - DNA, 1395 bp, Klebsiella pneumoniae
gtgagcagaaaatttcaagtaaaggcaattccaagctcctggttggaaaacaatggacgtcgtctagactgcggaccttacatgtctggcgcgatagaggcagctgaactaatgaaacagtttagtgcggagccgcttgagagtcttaccactgacatatttcatgctggacgggagggaaggcaatatgtattggatgctaaacatggtgttccctttatgggcagcacagatattttggcctttgatctatcctatcagccgctgctgtctaagagacaagtgagcaggaatcctcagttcactatacggaaaggttggacgctgattactcgctcaggaaccacaggtagaatggcttttgctcgtgagagcatggacggtatggcatgctctgaacacgttatgcgaatagttccagatgctaacaaagtaccggaaggctacatatttgcttatctatcatctcgatttggtattccattggtagtgtctggcacgtatggctcaataattcaaagcattgagccacaccatgtcagcaatttacctgtgccaagattgggagagatagaatctgtcgccgaccagttaatacagagagctggggctcttttgagtgcaagtcaatcaaagttgaacgaagctacccagctctatttcgatgctgttggattatcagatatttcgccaactgactggcattcttggggaagtgaccttggctttaccacctcagccaacgttaagtcattgagggcattgaatttcaatccccgttttgaccgtctttgttcccaaatcaaaaaaggctcatacaagttgcttggagatatatgctccgaggggacattacggcgaggcaacatcttcaagcggattgacgctgatcccgaacatgcttaccagttgattggtcaaaaacaaattttttggcttcgaccagaaggtcgttggatttcaaaagcttctgccagagatgaggttattgtcccggacgaaacgattctggtagcggctcaaggtacactaggagaaggagaattattctgtcgagcagagtttattactggagactctcttgatagagcatattctgagcattttttgcgagttattgctgacgagacaaaaatggagcgaggtgcactattcgcctttatgcgctcagaaatggcatttagaatgctgcggtcctcttcgacaggaagcaaacttcaagactttcattatgcagttttaccgtctctaccaataccgtatccagaacaagcagttcgtagaaggtgtcacgagctggtcattgaggcttaccgagtacgtgatgaagccataaggttggaagatgaagcacgttcccttgtcgagcgcatcattgaggagggaggtcgctaa

SEQ ID NO: 237118 - DNA, 4167 bp, Klebsiella pneumoniae
atggcgaaggtcatacccatcgggcaacccgcaaacgaatctgaacgccaggccatcggtttccttcgggatcatctgcccgatggctggttgatcttccacaacttcgagatgcgtcaaggggaggtggtgttcgaaatcgacatcgccatcctagcgcctcacgcggtgtatctggtggatgtcaaagggacgcggggcaacatcgatgtgtatggctccaagtggtatcccgaggggaggcaaaaatttcactctcctctggcaaagctgcgcaaccacgccaaggtgatgagcaccttactggctgatagcaataaaggaataatcgagttacgtaaagtgcatgtacatgcggttgtattacttacagcagatgatgcccaactgtatgatcctgctggcatcgatagcccggatgtgactgactacaagcgctgcttaaaattctttactgacaagagcaaaatcccgagccaccgtctttctgatattcgttcttatcactcacatattgataaagccattcaaggcagagccaaaccaaaatcagctccacctgtgtttggaagttggctggttatagaaaaacttggtggcacagaccgttacaccgagtatcgggcaaagcacaatttattgggtacgaaggcaggtcaggtccgcctaagagtttatcgcgcagacccctatttagaggaagccgcccgcaaagaagaactaaaaaaaatcagtaatgcttttgtggctgtccagcacatgagtgcccattcgaatgtattggctgttcgtgatctgattcaatctgacgatggtaatgaaattactttggtgaccgatgatatttcaggtcaagcgctgcgtcagcacttaaaaaagcctacttttgcgctcacaacagatcaaaaataccaagtgatcaaaggtgtgctttctgcattggatcacgcacatcaacatcaggtcattcatcgaaacctcacaccagatgcgattctcatcacgaaagggggtatagctcgcatcaccgatttcgactttgctcgggtaggtaaaaaccgatcgacgtcagaaacgattgctaaccaaattaccgaagatctcgattcggcttatcgcgctcccgaattagtgatatccgagcaaaagtctgagccgaaagaggcctctatcgcttctgatttattttctgcgggcttggtattttacgagctgctgactggtgagttgccttacgagaatattgatcaaatgatcgaagccgatggcaaattccccatcaaaccctcggagcacaaacctgatttatccaaggggattgacgcgtggttgcaaaccttttgtgagttcgatcctgaagatcgttttaccagtgctgctatagctaaaaggcaatttgaagagctgatattgcccgaaggtaaaaatgaacaaagtgaaaaaaaaccttatgcaccagcttttgacattcctgatgacctaaccaacctgcctgtcgattttgtattagctgagcgtttcagcgtgcaaaggaaactcggcagcggtggctttggggtggtctataaagtatttgatgctttaggcgatgtagttcgtgttatcaaacttgtgactaaagaccgtcgtagcgtttatgagcgcctgcgccgcgaatataagacactcaccagtctgccagatcatccacatgtcgttaaggttatttgggccgatcgaatggctgattcaaatcaaactccttatatcgtctttgagtatgtggaaggcttggacgtgtccgatctgatcgatactgaagccttggcgttggatgatgctgttcgtattgtacgcgaagcagccgaaggtttagcgcatctccataaacatggtatttatcatcaggacgttaaaccctctaatttgctatggactgataagggtgttcgtatcattgatttcaatgtcgcggtatccgaaagtgacgaggctcagggaggtggtggcactcgccgctacctgccgccggattatgattacaattccgagccggatgcttctggtcgggtagatcgcgacatctatgcgttgggtatcaccttctacgagtgcctgaccagcaagtatccgttcgacgatcccacgccgccgatcaaggctcaacccaaggaccccaagcagttcaaaggctgtgccgacctcagctcgtcattggtgaacattctggtgaagatgatcgcgccggagcgcaaggagcgcttcacttcagtcgatgagttcttgactgccatggctgaggtcaagcgtctgcgctcggtgctgaccaccggcgagattggagccggccccaaggtggtatctaggctgggcttcgagctgaccaagcccaatagcaacccctttgtcacccatctgctgaccctctacagccagagccaagtatccaacgcgggaacccgtggcctcgacgaagttggtaaggccacctacgtgccgacatatctggacgaaaagcttaagcccgccttgctcaaaggcgagtttaagctcgtgatcattagcggtaacgcaggtgatggcaagaccgcctttattcagcaggttgagtcctttgccgagagcaagggcgcgcagatgcaacgtggcgcaaatggagctgtgttccagatcaaggggcatacctacctgagtaactatgacggtagccaggatgaaggcgatgagcgaaacgatgctgtgttgcggaaattctttgctcccttcgcgggtaaggatgcctctagttggcccgagaatcagactcgcctaatagccattaacgaggggcgactagtcgattttttcctagagcatgaagaggaatatccgttgctcgccaggcagatccaacagggtttggtcggggccgttccggaaggcggtatagcgatcatcaaccttaatttgcgctcggtagttgctgaccccgaagaaagtcagtcttcgattttggagaggctgattgcccgcatgacacaacaggaatactggcaagcctgcgagaagtgtgacatcaagggcaagtgttttgcttaccataatgcccggactttccaggatccggttgccggtcccaaggtgatcgaacgtctgaagatgctctataccattactcaccttcgcgggaggttgcatatcactatgcgcgacctacggtcggcgttagccttcatgttagtgggcacccaagattgtgacggtattcaccagctttatcataccggtggtgaagaggcccaaaaccgcatcctggatggattctatttcaactcgtggcttggtggggaaaaaggctccaatgaccgacttattgctctgctgcgcgagatcgacattgctgaagtcagcaaccctgatctggaccgcgagttaggcttcctccatcccagggctaaggctatgagtcgtttttcgtttgcagaacgagctggatatgataatgaactggttgaagcgctgtttgacagtctgcctcgtgattactcatcgaaaaatcgtgcccgattgatctccagacatcggaattacctctcacatatgcgacgtcgccatttcttcgaacgaagggatatggggtggaaggagatgcttccatatgaaagcatcgatcccttcttggtcttcacgcagcgggcaggtacaaaaagcaacgatgaggtgaccgcaattctccgcgcaatcaaccgaggcgaaggtttaagcgacccagcgaggttaggtaaccagttggcactgcgtgttcgccaagtggataaaggtaccattcgcagttaccggcttttcgacggtatccatttttcgcttcgtaccgaacaggagaccgcgtctcatcctttcctcgagtgcctgtctcaggcgctggtcctcctttatgactccggcgaagggcacaaggccagcctgcgaatcaatctcgatatatatgaaatgctgatgcgtcttaacgacggttaccgaccaagtgtagaagagcaagaaggatttttgttgagtttgtccgtcttcaagaatttgttggcttctgtaccttacaacgaagtattgttaaccaaggctggccacaaattttacgagatccgtcgagaacaagatggacggctagtaatggaagcatctgaaaagggggccgaatacaatgtcaattaa

SEQ ID NO: 237119 - DNA, 1683 bp, Klebsiella pneumoniae
atgtcaattaaaggccgtgacaaagaatttcgaatcccgaaagtttcttatctcgattttaaacatattgagatggatcgcgtactcaccatgttgtttccacgattgaaatacgatggttatggtagtcgcagacctcctcgcggtggcgatctttcagttgaggagtttctcgaagatttccttgaacatcccgagtggtttgctggtttcgatcaaaaccctgacattgttcgagcctggattgaaacagatcttatggatctagtgaatagaggtaaaagcaaccaggctctagctgcaccacggcctttgcatggcaatacctataagtttcgtaacgcgaagcatacccgagattacggcgctgcagagcaaatctactggatgctcttctatgcccgcaaaggtaagggccaagcggcgcgagatgccttgaagcgtttcttcttcccggggatcgacctggtgacggaccgttacgatcccaacgcttccgtggatgtggaaacgcaggccatcttgcgattagaccaacaggttacgcaggatatgaaggattccaaggagcccgcacgtttccaacctctgtgtatcgggcaggccgatattttggcagacgatattctgcgtttactcgcctatgagccttatatcccgcgctcggtgttggttgactatctcaaaactttgatggctttccatctggcactatatcacctcaaactactgcaaatgctgcccaagctggtgaaacagcgctcaggtaacgatctctgcaccgccagggaatgcccgatcaacccgggtctcgacaatgctctggaaggttgcccttaccgcttggcgttgatagtagatatgggggacgtcaacaatccgcacatggttgagttagctcgaaaatccactgaccggctctatcgtcagatacctgcttttgtgcaggccaattttgtcgtcaagaaactcgatgaaatggcggaatacctgagcaaaaaaactggtaaattggctcctcccggaggcggtgtgttcactgttagtgatctgatatccctgctgaagcccgaacacgacaccgagcgtcaagcctacttcaaattccgcttggcgagcctaattgaagaatcggcctccaggaatgaggatttagacccagagatcagggacgtcaccgccatgggcttgggtgaattcgattccttcattgaaatactgatggcctatcgaggtaaatatcaccgccaatacatcactgagtgcctggattctcttctgctgaagaataaagaaagtgggcttttggctcaggcccggactaagggaagcccacgtcgatttgtgttaggaagcaagctgctcgaagtgctcctccaggtagctgtacttacccaagacggcgggcgttttgtgacccacgaggttcgcatcgaagaattgttagcctttttaaggaaccgctacggtctttacatcgaccagttaccagaaggaaccatagctaacagcagcatactagacaaacgtgccctgcgtcttaatctcgaagccttcaagcgccgccttcgtgaaactgggttctaccaggacttgtcggatgcttatgtaacccaaaaagtatcgccccgatatgcaattgaaagatttgatagaactgataagaatgggagacacacatga

SEQ ID NO: 237120 - DNA, 5454 bp, Klebsiella pneumoniae
atgagtagcgcgttcataaagcttccacaggataaattgaatgcggcgttggctggagtgctgtgtcctcgtatcgaagcgatcctgagtgatcgtggcccaggccactgtgtgcgggtcactgaccttgatgacgaagttatggagtcagtatgctgggaacttaggcgaatctggtctgacgggaacatatttatactcggcagtcatgaccaagaaggcatgcctttccgagtaacttccaccaagttggtggaactgcgtaatcctgacgcgaacggcgagctgcgccagcctttgctagtgttcataccgacctcgctccgtactagtgctgaggattcttttggcgtggcgacctttgaggaacttaccttcaccgatatctacgaggatctgatcgaatcgctgtttgaccggctcccggcaacgctggctagctatgttcgcgatcttttgggtattctcaccgaggaggaatggctgtttgcagacgatgtttctcgcgtgaggtatctacttaccgcgctcgaaaatgggattgatggcgaaacgcttggggccagtctgtatgaattggcgttgattccggacttcaagctctttgccgatccgggcatggtcattggaaaaattctccgtaatcttgttagcgtccgcagtttgataacctcgcacaagtcggttcgtggtcgtattgctgatcttgggctcagtgataaggcattggagtcgcgtctattcacctattttgaaaaacacgatgtccatgagtcagaatcctggacgccacccattgcgacagacaagagttggtggagcatttctttcgataaatggacgttcaaagaagagctatcactggacaaggttcttctgactgtgttggaaaccgacttgccggtcgttgcggatgatgagaccgacgatcaactcagtggcctcatcgggcaacaggttctggtaccgaatgaccgtcgtaaaatgaacgtggtgtttgaggttaatcctcaccccggtaaggtcagtgggcttgaccattttatggtgcaaatcatttcacagaatgacggcccggtaggaaagtctaaaaaggtaaaagtatggacgccgaaccgcctgcaatgtactaccagtctggctaaactcaataaaatcgaattcgaggaaggatggcatttcatccgtgtaatgccttggactgctgatggcgacccgattccgctggaagcggattccgcctccgagggtgctaagcgctcttacgagagcgagcctttctacgtcctgcccggtggcaacattgaagaagagcccccccaacgtgccattcctattgagcagagcctggaacatgcacttttccgactgcaattgacagccctgggcgatgaacgtgatcccgatgatatagctatcagtggtgtcgtctggtccgagggcggtcgtaccaagaagacctcccgcctagaaaccttgcacgcaaaattcggtcgtgagggggctgttcagattccgctatcacgtacgctcaaaatcattgagcaacgcatcttagcaaagcctaagcacccgtcaggctggcgaatgcagatcaacatggataccgctgagccgccctccgaggctggactcatgctgccctcttctgcagcgatggcatctttcctggctgcccgtgaagaattttttgcagcggtgcgtaaagacactgctgaactaatcatgcaggggctgttgtttcaggactctgaagaggaatgcctcgcgtatgctgaaagctatcttgacttgatcaggagtcttatccgccaggctgagatgacttctggtgtcgagcgccagcaacacctgcaatcgctaagaaacgtactggccgttgattcaatccatgtcatcctgaccgacttccgtggtcggcatcgtgaggctgttttagtctccccaacccatccgctccgagccttgtggctgaacagttgggtcactctaggtaaggattggatcgggaagatcaagtcaggtgggaaagaatacattcctcacgtccgttccgccctattagatggccttgtgccctctgcctatcctgttggcattcctgtagaagatggtcgtatcttcacgccggtggacaatctaaatgcgttttgggcgctatacgctccaacaaccgaggataattctcgtggcctgatggcggagatctgttcggcacttggcttggtcgagccttctacggcgggaactgatatttccggaaaggtcattgcggataagattgagcgctatctctctcagcatccttatgtgagagagctatcgctgaatatctttaaccccggatctggttcgttaatagctgaggctctgatagcgcttcaacagaaacgtgagtatgtcgatttgcgctacgacatacggctctttacctccgagcctgactcgccggttttgggtgaagcgcttgaatccatagctcgtcccggagcgacggtgaatgaggctgcagacgcgtttgcggcatcaactggcaatcatctgttttccaagctgaacttggccaagcacgcgctgaaggaattccatgcaaattccaaggattttccagcgcacatcagcgttcttttggatgtgttccccgccgaggagctttccatttccgagaggccgatgggggtgactccgttgtatgggttgatacagggttttgacaccgaatttgttgacgacgattcgggtaccttctggaataagcggccgattatagggcgctccttcggtgcgaacaaccacgctgcgtgtttcgacttgctgtcgtcgctgagccgtcacctctgttttgcaacctcagcggttgctacttctggcgctagtttcaaggccgtacccgttgtaacccttggcctcgatgtggcccaacgagaactgatctacgaggttcaccagatcagcgattgggtgttcactatcgaccgaaatatggggattgagtttttcgaccatggcggtcggaagaacagaccggattatctgattgactatgtgccaggagccagctcccaggcgacacataatctgatgatctcctcgcgctcgaacgatgagttggaggccatgctgaagccggtgctgcttgagcacgatttgtccgccgacggtgagcagtcggttcagatactcgcgaacctgcgctcgctttctggtcagcttgccctgaaactgatttccgcacgtacacaacaggcggaggctcttggtctggctctggcgaggctctatctcgaatatcaaggcgcgttaaacaatcagatcattgtgccattagacgcacacacggacctctaccgctcaagcggtgagtcagacgatgttaacgatgctatcagcctacaacgtaccgacttgggtttgtttgatttagatttaaacaccaggacgatcacctgcaatctggttgaggtgaagtgttattcgcaggttggtgcctttgcagctttcaaccaactgaaggaacggatctccgcccagataaatcagagtgagcgcatcctccagcgtcactttgacccggctctgaaaaaaccggatcggccggataggttgctcaagagccgggagttggctcagattcttaggttctatctggaacgctcactgcgttatgggatctttgaagagaccgccgcgcaggaagcgaaaggactactagaatccattgagcagggctactcgcttcaattcaggcggtgcgctttgattttcgactttgacaagtctgggacagaatctccggacaacgaggtaggcatcgaattccatcgcatcggaaaggatctcattcatgctttgctggagaactgccgcaagcctgtgtctgttgagagtgaggaagtactgacctctcctactctgagcgaacagttcattctgaatgtgccgaagctcgagactgccgctttcatcgcccctaatagagtccgctctacatcttggacggtggatgagctcttggtcgatgagccggagactccagtcacccagctaacacctcctgtctcagaggaaaccacggcgcttgttcaaaaggaagaacgggcgaaacccgtcgagcaagcacctaaacctaccaccatcgcgcccaaacaagaaaaagacgacgaacaattcgccgccgttgatgtggaactggaacaaggtgttcaactcgagcttgaagtgcagaagcatctgacacccgagcctcaagctgaagtcagctacgacatcatgctgggcgttaatggtgattcaccgcagtacggattgctcggagaggtttccggccgaaaaatcgcgctggacctcaatcatacccacacgatcagtctctttggggttcagggtggcggaaagagctacacccttggaacagccattgagatggcctccatgccgattcagcacatcaatgtgctgccaagcccgctcgccacagtcattttccattatagcccgacgcaggattatgcgccggagtttacctcgatgatcaatgccaactcggtagaggatgagatctgtatccttcgagagcgttacaaggccaacccggaagccctgaacgatgtcttgattctaacccctgccaacaaggtagacgagcgtagggccgagttcccggatatcgaggttaagccgattgctttttctgcctctgaactcaaggcggcacactggaaattcctaatgggagcgattggtagccagagcatgtatatgcgccaaatcaatctcatcatgagggggctgcgggataacctgaccttggattctctgcgagcaggtatcgataactctggtttatccgatcatctaaaggagctggcccagacgcgcctactatttgcaagcgaatatatcgatgataaccagcgtctccaggatctgattcgtccaggccggttgatcatcgtagatctgcgagatgaatacatcgaaaaggacgaggcgctcggtttgttcgtggtgatgctgcaggttttctcagaagcaacttaccaggggagcgccttcaataagctggtggttttcgatgaagctcacaaatatatcgaaaatgatgacttggtttctggccttgtcgaggttgtccgtgagatgcggcacaagggaacaagcattatggtcgcctctcaggaccctccatcagtcccgatctctctgatcgagttgtcttcacagatcatcatgcataaattcaactcacccgcatggttgaaacacatccagaaggcgaatgccgctcttggtgagctgacctccgacaagatgagccatcttggaaccggcgaagcctatgtatggtcgagcaaggcctcggacgactcattcacccggggcgctgtgaagatcaagtgccgtcctcgcattacccagcatggtggcagtaccaaaacggccgtgggtcggtag

SEQ ID NO: 237121 - DNA, 1296 bp, Klebsiella pneumoniae
gtggaaagattaacggttgcgctaaatggcatcattgttggtacgctggagaaaacagcgggcggtgaaatgtctttttactaccaaagagactggctggaaagagctggttctcgtgctatttctctttcgatgccgttacgggaagagcgttatcgtggcgaaatcgtttataacttttttgataatcttttgccagatagtgagcaaattcgtagccggattcaggcgcggttccatgcgcccacaaagcaacctttcgacttgttagcacgtattgggatggactgtgttggggctatacagctttggccttatgaaaccgatattccatctattcagagagtggatgccgaacccttaactgaaaacgaaatagaacatctgctgcagggatacaaagatgctccattgggtatgcaggcagaggtcgatgattttcgtatttcactggcgggtgcacaggaaaaaacagctctgctctggtggaataatcgatggtgtaggccacgcgggagcacaccgacaagccatatttttaaactacctattggctatatcgccaataacggaattgaccttcgcgagagcgttgaaaatgagtggctgtgttcaaaaatagcggctgagtttggttttcccgttgcggatacccgagttgcgtattttgggcaacaaaagatactgattgttgaacgtttcgatcggcgatgggctaaagatggtcagtggctgatgcgtttgccaacggaagacttttgtcaggcattgggtgtagctccggcgcttaagtatgaatctgatggtgggccaggaatcgccagaagcatggatttgttactgggttctcaacaaccgcttaaggacaggattttgtttttcagaagtcagatctttttctggatgttggcggcaattgatggccatgccaaaaacttcagtgtattccttgaaccaaacagcgcttaccgtatggccccgctttacgatgtaatgtctgcttaccctttgatgcacccgaaaggtattcctcccagaaaagctaaaatggcgatggcgctatccggacgtaatcgccattttcactggagtacaatcatgccccgtcattttctttccactgcgcgagaagtgagctttcccgttttgcaggttgagcaattgctggcggagatgaaacaacgaactgaatcggtgatctcaaaagtggaaacgatgttacctgcaggattcccagagcacataagcgaagctatttttgaaggattaaggcatcagtcagcgcgtattccgtag

SEQ ID NO: 237122 - DNA, 1083 bp, Klebsiella pneumoniae
atgagcccaggggctagggaaaagatcgataacggcgaatggcgtgtaatcggcttgtccgtgatggatacctcaaatggaagaatggttgccaatctcaaaacggttaccaagagtaatcaatctgagtacactcctgctctgttcgtagccttaagagatgagatttgcctctctcaacgattgatgtcaattaagattcgtgagtcattcgacaagcaaaggagcattctgaaccgaattgaaggaaaaattgattttctgactgatgtcaaattcgctgagttggctggtgagattaatcatttctttactcaatgtgatcatttacatacaagtgaggcggtaaaggcagagagagtgctcgaccatggtggccgtttagctgctaggttagcgggaataactgatgccttaatagatgactatttgggtagcgtacaattggttgttgggaatgaaacaatggattattccatgtacacatcgagagaatatactacgggggggtatcgttacgaaccagatgttacggaaatgacttatccggattttatcggtacgagagttaaaagcttccttggtgcgttaattgaaatgcttaacagtctcaatcttatctcagtgtgctttaaccaggagctctacatggggtatatggactcgctaacggcgctacgtgtaaaattacgggcactgcttaatagtttagtgttcggagttcctgttaaggaagggaagtttaaatgcaaaaactatcgtgcgctaatattcaccaaagatcgcaatggcgactgggttcaggataatgaggccgaaagactcgctcagtactacactgaattttcccataataatcttgcagcaagcatctacgagcggacctcagggtatgttaaacgagatgagaatttattcgctgccgtaaccgtagtgctcaattttattgaggatattgatctccttctcagtagaggtaccgagctcacggaaggaagtatcatggatactgagtccattaaattgctgtccgaaacaatatttccatctcgcacgaaccgattactaacgtcaacatcatga

SEQ ID NO: 237123 - DNA, 1152 bp, Klebsiella pneumoniae
atggctctactggaaccacatgaaataagtatgctaaatcatctggattggttactctcttgtgacctacttgtttgggatgagcttaaggctggtcggtgtgatgaagtaattaacctacataaagagataaataaaaacatagccctttatatttacttgaatcccggagattcaacgtcggctcaattggaaaatcaaaaagacgatatttcaaaaatactaatggattacctctacgcaaaaaaatcaaaagcctcgtgggaagtgatggcgattgaacagcacatcatgaaaaattactcagatctggttgctataattaatgataaaatcatcaccaattcaatcataggtattttagataaaatcacacatcatcactccattccgtggacaacaataatatctcgccaaattaaattttcgatggcattcgatacttactatagttggttatggggtaattatattaaagatgctttattttatcctagaaaacgtccgaaattagttgatacccacacatgggaagactggcttaaagttagagagaatgaaagttcacttgaggaaaaaatcccgcaggaagaagcaaaagttattatcgagaaatggaacaaaaccactaaaaataattatggactaagtggcattgtagctggttttttgagggatgcagatgaagaacctatttcaattaacaacgaattaattgataatgcttttatcattaacatcccaaaagaaattgatgagagtaggttcaattcggttatctgtgacataagaactttactcttcacacgacagaaaccgttgcatacaataaaagattatttaacccattacttacccaccagtgttcgtggtgaactttataaacgacaaatactggaacaaaggaatcaatttcttggctattttacagcgatgctctgcgatcgcatgtaccactacaggaaacaaatcaatgaaggcttagaaatacacccaaaaataacctcatataacactgctgctgtccatgctaatgaatacatgaaagattacggtatcatctatggtacggattcaattttaaaaatgagaaggaaattaatagttgatattatcccgcaattgcgtgaaaattttaaaaacttaaactaa

SEQ ID NO: 237124 - DNA, 1086 bp, Klebsiella pneumoniae
atgtttcgtgtagatataataaataagacactaatcaaactgaaaccaacaaacttctcggaacttgggctgaaggaacgttttgatattcaggaatggatcgaaaaaagcccgactattttaggtgaggaactacttgtcattggcaaagaggtcattcttgcctctggtaagcgccttgatttgctttgcgtaaataaatcggcagcacttgttgtggttgagttgaaacgggatgattctggctcgtccgttgaatggcaggcaataaagtatgcatcgtattgctcaagtctcttgcccggtgagatttttaagctatacgcgtcctatttaaacaagtcagaatttgatgcgactaaaaaaattgaggaatttattgatgctgacattgagttacttaacgcgaaacagcatattattttggcctcaaaagagtttaactctgaagtcatctccgcagtattatggttgcgagaatatggcatagatattcaatgcactcggattgctccatttatcgattctgatggtgagctatttatcaagccggaaacaattattccgttgccggaggctaaagattatattgaacgaaaagaagttaagcaaagaacaattgcttctaatcaagatgaatggactggtagttggttcgtgaatgtgggcgaatgcgaatatcgaacttgggacgataacagacaatttggctttattggagcaggtcaagggaaggtgtattcatctgcacttaatcgtcttgcagttggtgacaaaatttatgcttacatgaagggatgcggttacgtcggctttggggaagtgaccaaaccagcggttatgattcgcgatttcataactgattcgaatgttcctctactctctgcaggattgaaagcggaacacccaaacgcaaactctgacaatgaagagctttccgaatgggttgttggtgttcgttggatcaagtctcttccgagagaacaggcgaaaacatttcctggcatcttcgcgaaccaaaatatcgtctgtaaattgcggcatgggcagacattaaaatttgtgcaatctgaattcggtcagtaa

SEQ ID NO: 237125 - DNA, 846 bp, Klebsiella pneumoniae
atgcgtttctatgatttcactagctgggcaaaaaaaatgaaaacaaattacttcacacatagattgtttccttcggatggcgctgttatttgtgagccattaaaaactagttttgataatatgatcgctactaacagaaacactgcaacgctagccaatgagtatcatgtaattcagcatgtgtctggtgatgtatatacgtttataaaaacaaatagcagagacgtttttagaaaactagatacgagcagtaatatatgtgtagatctctcaaacatcttaaatcaacatgaaaaaatagcctttgcgtctttttttatattgaagggtgatgttatagggtttagtaatacgttgtactcccctcgtgttgggaagttggcagaaatatatgatactgcaatgtattcccgaaatgggaaccacaacataaattttgagccgataacaaacatagttaccgagcaagatgttatgaattatgcccatgttggtaaaataacgatgaaaatggaaaagtctcaaggcattattggtgggcttggtacgcttttctctgggaacgtaaggtatgacgatgtggattcgtttgagataaagataatccctaaacgggctaaagacataaaggatacctttgcaggtttgatgcaggctaagcctcaagaggttagctcagtcgctgtgtcagctaaagagcacattggtgacgttgcaacagatttgaatgttataatgtctaataccgtatatgattttgtaaatccaaatgacgctactactatcgaggttcagatggaaagaaattataacaacaatacaacattaagaagtttaggttactga

SEQ ID NO: 237126 - DNA, 438 bp, Klebsiella pneumoniae
gtgaagcttaagggtttttggttgagcgctatagttatagctgcatgtaatggcatgggctttttatttttatacctttcaaaaatctatttcttcccgatggtaacatttaaggataatttaggtaaccttggttcttccttggttacttattcgacagcaatgatggcgttgcttattgctatggttgttataatttttggcttggatggacctcgcttgcataactttaaaaaaagcggctatctccatgttacatattttatttatatgataacgtttttcgagctcggcttaaccatggctctttcgttactttgtttgtccaatatctcaagtattaaggtggcttcttattcattgacttttgcatttattacttttttgttgataggatgcttaggcattcaactcttaaatataaaaaagaatctttaa

SEQ ID NO: 237127 - DNA, 330 bp, Klebsiella pneumoniae
ttgcattacaacggcacgcagattagttatgccgctgattcagcaccgaaaaccgacagcggtgcgttctggaaaaaaatactggtcacgtatgctgacgagctggcggcccgttacgccgaactccgcgataaagatattttcagcgtgaattgcctctatgacattgccgccggactgtccgcgaaatatacccacgaacttgataaagcggaaatcaataaatggccgacgaaaccgtcgctaaccgtcacgagtcgcgatcagatattcggctggtttaacgaccgtctggcgtatctcgacaataaatttaattacacccgataa

SEQ ID NO: 237128 - DNA, 246 bp, Klebsiella pneumoniae
atgagcctgattattgtcagcaatgatttatcggaagaagtacacctggtgaaggtggagaacggcgcggccacggcaacggagcgactgagcgggaacagcgtatcagcggaggaaatggaaaccctgtttcccggattcgccgacgcaattaccgcggcccaggatactgccgaactactggggacgctgggatcactgaatgagagttttatctgggcgcaggtgtccggcgccctgcggtaa

SEQ ID NO: 237129 - DNA, 951 bp, Klebsiella pneumoniae
atgtcactgccgttcaaaccccatattatcgccctgctctgtagcgctggcttactcgcggcggcaggaacactctatgtgcaaagccgaaccccagcgacgatcgctgaaccgcctgcgcagcaagcgccagcgcccgcagcgtcgacgacacagccggtggccgccacttacacccaggcgcaaattgatcagtgggtcgcccctatcgcgctctacccggacagtctgctgtcgcaggtgttgatggcctccacttatcccgacaacgtcctgcaggcggtccagtggtcccaggataaccccgcgatgaaaggggatgcggccgtgcaggcggttgccagccagccgtgggaccctagcgtcaaatctcttgtcgctttccctgccctgctggcgatgatgggcgagaatccgccctgggtggaaaatcttggcaatgcgtttttggcccagccgcatgatgtgatggattcagtgcagcgcctgcgcgccattgcccaacaaaccgggacgctgaaatccacaccgcagcagaaagtgattgtcacccctgccgcaccggtttcagccagcagcagcacggcagcaaccgcaaccgcccacacagcggcgcctgcgcccacgcaggtcattaaaatagagccgaccaatccacaggtggtctatgttcccagctataacccctccaccgtctatggtacctggccgaacagcgcctatccgccggtctatctgccgccccctcccggggagcagtttaccgatagcttcgtcaaaggcttcgggtacagcctcggcgtggccaccacctgggcgctgttcagcagtatcgactgggatgatgatgaccatcaccatcacgatgacgactaccaccacggcgattactcgcataatggcgataacatcaatattaatgtaaataatttcaatcacataacaggataa

SEQ ID NO: 237130 - DNA, 1899 bp, Klebsiella pneumoniae
atggctatcgaaatcaaagtaccggacatcggggctgatgaagttgaaatcaccgagatcctggtcaaagttggcgacaaagtagaagctgaacagtcgctgatcaccgtagaaggcgacaaagcctctatggaagtcccgtctccgcaggctggcgtcgtgaaagagattaaagtctccgtcggcgacaaaaccgagactggcaaactgattatgattttcgattccgccgaaggtgcagccgccgctgcacctgcgcaggaagagaagaaagaagccgctccggccgccgctgctccagcggctgccgcggcagcgaaagaagttcacgtcccggatatcggcggcgatgaagtcgaagtcaccgagatcatggttaaagtgggcgacaccatcgccgctgagcaatccctgatcaccgtagaaggtgataaagcctctatggaagttccggcgccgttcgccggtaccgtcaaagagatcaaaatcaataccggcgataaagtttccaccggctccctgattatgatcttcgaagtggcgggcgctgcgcctgcagccgctccggcacaggctgccgcgccggctgctgcggctccggctgccgcagcaggcgtgaaagatgttaacgtcccggacatcggcggcgacgaagttgaagtcaccgaagtgatggttaaagtcggcgataaagtcgcggcggaacagtccctgatcaccgtagagggcgacaaagcctctatggaagttccggcgccgttcgcgggtaccgttaaagagatcaaaatcagcaccggcgataaagtcaaaaccggttccctgatcatggtcttcgaagtggaaggcgctgcgcctgccgccgctccggctcaggctgctgcaccggcaccagctgctgccccggctcaggccgctaagcctgccgctgcgccggctgcgaaagcagaaggtaaaagcgaattcgctgaaaacgatgcctacgttcacgcgaccccgctgattcgccgcctggcgcgcgagttcggtgttaacctggcgaaagtgaaaggcaccggccgtaaaggtcgtatcctgcgcgaagacgttcaggcttacgtgaaagaagcggttaaacgcgctgaatccgcaccggctgctgccgcaggcggcggtatcccgggcatgctgccgtggccgaaggttgacttcagcaagtttggcgaagtcgaagaagtggagctgggtcgtatccagaaaatctctggcgccaacctgagccgtaactgggtgatgattccgcacgttacccacttcgacaaaaccgatatcaccgatctggaagcgttccgcaagcagcagaatgccgaagctgagaagcgtaaactggacgtgaaattcactccagtggtcttcatcatgaaagcggttgccgctgcgcttgagcagatgccgcgcttcaacagctcgctctccgaagatggtcagcgcctgacgttgaagaaatacatcaacatcggtgtggcggtggataccccgaacggtctggtggttccggtcttcaaagacgtgaacaagaagagcatcaccgagctgtctcgtgaactgaccaccatctcgaagaaagcgcgcgatggcaaactgacggctggcgaaatgcagggcggttgcttcaccatctccagcatcggcggcctgggtaccacccacttcgcgccgattgttaacgcgccggaagtggccatcctcggcgtgtctaagtccgcgatggagccggtatggaatggtaaagagtttgtgccgcgcctgatgctgccgatctctctgtccttcgaccaccgcgtcatcgacggtgctgatggtgcccgcttcattaccatcattaacaacaccctgagcgacattcgccgcctggtgatgtaa

SEQ ID NO: 237131 - DNA, 252 bp, Klebsiella pneumoniae
atgaagccggaagcctatccagcagaaatgctgtcaaaatatcggaaactcactgagccgggttcagcgccggccaccacaacccaatccctctaccttgggaccattacggctaccgcgccgtcgcttttacccttggtatttcttcccgccttgagcgggttttttattttcagggtcgcgggaatcaccctcgacgctttgttggtaaatcagcccgacggccctgaacattttactgactacagatag

SEQ ID NO: 237132 - DNA, 342 bp, Klebsiella pneumoniae
gtgaaaatcttcaccatcgtttttatcgcattcgcatcctttggggctaccgccggtggcttcacatcatattgtggaccttacactttagtagcaagggaaggtgatgtaagcattatcaatggagagcgagtcacctctcagaaaataaaattattgggggaggacggcatcaagatagacatggggctgatgcctgccaaagacggcaacaactacggctttcagtacatccaccgtcctggtagtgaatctcgctttctgaacgtccagcttctgcaaaacagtatggatgccccgaaaatcatcgggtcgttcccctgcagaaaggtgcccagctaa

SEQ ID NO: 237133 - DNA, 240 bp, Klebsiella pneumoniae
atgacgaaaaatcgatataccagagagcaagctatcgaccaaatgaagctggagctttctccattcattgttgggacagacagggcatacgacactgatccaatcagttatagaatattcgcttctgctgatgatgatgtgcatatcgagcacggcgaatttggttataaagtctactcgaaaccagatgtcttgctgccccgtctcaaacggataaaagaattgctcaacgaccgttaa

SEQ ID NO: 237134 - DNA, 198 bp, Klebsiella pneumoniae
atggcaactggtgcgaagaacgcaaaatcacaaatgaccaccgtaagaatcccccacgaagtcatggaagacattgaacggctaagggaagagggcgagagcactgctggttttttagtcaccgcagctaagggcgagatcaaacgccgccagcgtaaacagagtaaacaatcagccggcgaggagcctaagttatga

SEQ ID NO: 237135 - DNA, 189 bp, Klebsiella pneumoniae
atgaaagatcttatcacacacccgcaagggcggaataactacatctggcgttttctcgcactgagcgccatcgggcgcaacgtcattcacatcaccgctaccactgagcgcgaagcccgtgagcaatcaccggctggctgcgtgatggtattcgctggccgtctgcctgtggaggatagccatgcgtga

SEQ ID NO: 237136 - DNA, 195 bp, Klebsiella pneumoniae
atgcgtgagccaatctgtctggagcaggccgaatataaatcagcgctggccgcttcactctttgaaaccattctggaaaaagcctgtgctgagtgttcggaaaccctgctgaaccatatctcactggcatgtgaccttaatcaggaaattcaccgggcattaatcgccgagctgggtatgggaggagcgaaatga

SEQ ID NO: 237137 - DNA, 216 bp, Klebsiella pneumoniae; identical to SEQ ID NO: 141201

SEQ ID NO: 237138 - DNA, 192 bp, Klebsiella pneumoniae; identical to SEQ ID NO: 20383

SEQ ID NO: 237139 - DNA, 249 bp, Klebsiella pneumoniae
atgaaaatgcctgacaaaatattttcggcggcctcgtactgcacgtcaggcggccttatatgcacagggctcgcaaggacctatgactggtttcatggccttgactggaattttattgccctggccagtggcgtgataatcggtgtagctacctacctgaccaatctctactttaagcgccgctggacgaagatgtatcagcagtccctcgatcgtggttatggtggtccgccaccgcaggatgaatag

SEQ ID NO: 237140 - DNA, 228 bp, Klebsiella pneumoniae
atgaacctttacgcattcaacccactgaaacaaaatgataagcaagaggtgattacccccgtagcctttaatttggtcttatcgctacctgaacagctactgaaaaggctggataaggtcggctatgaactggttaagcgttacggtattgcagggtgtagtgataagcagcgacatcacatcgctatagtccatttgctcaaaaaacatacattgcgattgcgatga

SEQ ID NO: 237141 - DNA, 1308 bp, Klebsiella pneumoniae
atggctaagattggatttttatcattagggtgcccgaaaaacctcgtggactcagagcgtatcctgaccgaactgcgcaccgaaggttatgacgtcgtaccgacctacgacaacgccgatatggtgatcgttaacacctgcggctttattgatagcgctgtgcaggaatcgctggaagcgatcggcgaagcgttgaaagagaacggcaaggtaatcgtcaccggctgtctcggcgcgaaagaggatcagatccgcgaagtgcatccgaaggtgctggagatcaccggtccgcacagctatgagcaggtgctggagcatgtccatcattatacgccgaagccgaagcacaacccgttcctgagcctggtgccggaacagggggttaagctgacgccgcgccactacgcctacttaaaaatttctgaaggctgcaaccatcgctgcaccttctgcatcatcccgtccatgcgtggcgatctggtgagccgtccgattggcgaagtgctggccgaagccaaacgcctcgctgacgccggcgtgaaagagctgctggtgatttcgcaggacacctctgcctacggcgtcgacgtcaagcaccgcaccggcttccacaacggtatgccggtgaagaccagcatggtcagtctgtgcgaagagctggcgaagctcggcatctgggtgcgcctgcactatgtctatccgtacccgcacgttgacgatgtgatcccgctgatggcggaaggcaagattctgccgtacctcgatattccgctgcagcacgccagcccgcgtattctgaagctgatgaagcgtccaggttctgcggaccgtcagctggcgcgcattaagcagtggcgtgaaatttgcccggatctgaccctgcgctccacttttattgtgggcttcccgggcgaaacggaagaagatttccagatgctgctcgacttcctgaaagaggcgcgtctcgaccgcgtcggctgcttcaagtacagcccggttgaaggcgctaccgccaacgagctggcggaccaggtgccggaagaggtgaaagaagagcgctggaaccgctttatgcagctgcagcagcagatctctgccgagcgtctgcaggagaaagtggggcgcgaaatcctggtgctggtagatgaagttgatgaagaaggcgccattggccgcagcatggccgacgctccggaaatcgacggcgcggtgtacctgaacggcgaaacccgcgttaagccgggcgacgtggtgcgggtgaaagtcgagcacgccgacgaatacgacctgtggggtacccgggtctag

SEQ ID NO: 237142 - DNA, 519 bp, Klebsiella pneumoniae
atgaacttcacccaatatttcttttataacggaaaacataatcggacagaaactaaatattcaaaagatgtacaaagtaagttattgtctccaatatcttatgttgcagattccatagatgaactgaaaaaatccttaaaacgctcgggaatttatgacacaaaagttagacaatcttttcctaaatttataaaggaggtagaatttcatcttaagggcaaaccttatcgttttttttatactcagaatgctaagatgaaattaccagcactgggagtatgttatcgatatcatgaaacgagctactggggcagtgtactacttttatcagtggatcttatagtcgaacagaaacattcctgcacaaataacagacgcgattattactttggtttttggaaaaaagttaatggtgaaactggatacgagtttatgattcattttgaagatactagagctttcaaagcccgaggaaatgcaatgcctagacagtcaagcactcggaaaattggcacataa

SEQ ID NO: 237143 - DNA, 1068 bp, Klebsiella pneumoniae
atgcgtggcgtgtatcaggcgacgtatctcaatacatttgcacagcgtctgcataactctggtgaaggagtcttagatccaggaaaggcatttgatttaattgtgggaaccagtacgggaggcatagttgcctgtgcgctagctgcgggggtctcacttgaaaaggttcttgcactttatcaagtgcatggcggaaaaatattccctcggcaacgattacgtgcactacctcgagtggggaagtatgtccgtggcctattttctggtcttgcgtctggcgaccaggctctgcgagcagtcctttctgattcattcggtaccgaaactatggggcaggtctatattcgtcgtggaattggtttagccatcactacagtggatctgaataggcatgctgccacagtttttaaaacccctcatatgagtcgtcttaatggacgtgacaacgatcgactattagtcgatgcctgtatggcgactagcgccgcccctatcctgagatcaatagctcgtctaactgaacctggcggtggagccactgttgattatgttgatggcggtctctgggcaaataatccgggggctgtcggcatgatagaagctcatgaaatccttcagcagagaggagagattgaacgtccgattcatttatttatgctcggtacgcttccattgcaaggaggtgaagaacttaagagcgcagataaattacatcgaggtgttttggggtggggagcagggattaaggccatcacagtaagtatgaattcacaggcagttgcgtacgactacttggctcggaaaatcgcagaattgcgaggatatggaagttttgcatatcgactcccagcacaatgcccatcaggagaactccagaaatatttggaaaatatggacgatgcacgtcctagggtgcttaatgcgcttgcccgacaagccgtctcagatgttgattacgcttgggctacggcagaatcagtaagtaaaatgggcgcgtttcgaactgcattggcaagttcgtccaattatagttgtcataaatccgaggaacaccatgaccattattga

SEQ ID NO: 237144 - DNA, 1065 bp, Klebsiella pneumoniae
atgaccattattgattgtaataaagagatgagagggtatcactcagaagaggtaaacctctcgaatgcagagcaggcagaaatgcgcggccgccgcgacaatggtcgaacaaggctccgaaacggattgacaaaggctggtcatcctttgccgaaggagttcagttctcaaggctcttatgcgatgcgaacaatggtccaggatgatgcatgtgactacgatattgatgatggcgcgtatttcgataaagaagaccttaagaactctgaaggcgattatcttagtgcgctagatgttcgtaagcgggttcggaaagcattgaaagacgaccgattggcatatgatgcggttgtcaaaaccaattgtgtgcgtcaaatgtatcccgatggatatcacattgatatccccatttatcgtacgacctgttctaaagatatttgggataatgacatcatagagtatgaattagcaagtggcgacgaatggaccaaatcagatgcacgtaaggtaacgagttggtacaacgatgcgattggtaatgaactgaaagcgggggaatctgataccagtcagatacgcaggatcaccaaacttactaagaaaatggctaggagccgtaatacctggaaaaaaaagacaaccagtggcatttgtatttcgaagttagttgtagacaatttcgttgcgcgctcaaatcgtgatgatgatgctttgcgtgatacctggaaggcaatcaaattgcagttagaagtcagtcaacgtattacccacccggtgtttacggacaaaaatcttgctgaggaaggagacgaatgcgttatttttttccgggaatgtttgggtgaggtgctggaaacattaaaggtgctcgacgagcatgactgcacaagtaagaaggctggcgacgcttgggatgaggtgtttaatacaacttattttagcgcccagtgtaccacggataacactacatctaaatcgctgctacggcctgcagttgcggccactgctagcctgtctttccctagttatcccgtacaacctaacaaatcatcggggtttgcctga

SEQ ID NO: 237145 - DNA, 1767 bp, Klebsiella pneumoniae
atgaagtgggctatagacgatcccgtgcgtttcctgagggagaaggatgaactcacacatcttgaaaccgagacgggttggctaagcacggcttggcgtatatctgaagagggctcgatcaccgttgatatcgacatgtttatccatgggcgattgtttgctggggaaatgacatatccggacgcgtttccggattctccgccctacatacgtccgcgagataaatcagagcgatggactaaccatcaatatggcgtgggtggttcactgtgcttgcagtggcgggcagataactggcatagtaatgtgactggtgcagatatggtacgcagtgcgcacgagttgctgagtacagaacagcatcctgaattacctcattctgttccctctgcgcatcgcttgacggaggggcaaaaccttaatttcgtatttcgacgttatgtccctacctccgaagtcgaaaacatatttactatgctcccacttcagtctagaacccgaatatcatcttcaactgtgtataacgaagggtcggcggtaatgttcacagccagagtcgctgacgaacaggatgagcttcgaaatgttaccgatatccctcaagggctcatcgattttgttagtattttgtcgttgtcctatgagggctgggtctttagaagcgactactttagccagaggcaatccttagaatctgtagaagcattaatccagatattgatgatggccggttttaacaccgatgacattctggttaaggaaggggataagttcaaggctaggacgatcatattattaggcaaggaatggtcatcactgcgagtattcctgttagattctggggagcaaccagtgctgcgggagcatcgagttgttagatctccgaactcaaccttaagactttcggaagaatcacagaagttgagtaagatccgcgtaggaattgttggactgggatccgtaggtagcaaaattgcaatttcacttgctcgttcaggtgtcagacaattcttattagtcgatgacgactatctcacgcctggcaacttggtgcgtcatgagttggggtgggcccatgtgggagctcataaggcacgggccgtaagcaatactttagcgcttatagcggctggtgtgaaagtggatgtaaagactatgcgtcttgcggggcaggaatcggcggtgacagcagcggctgcactaaaggatctgtctaattgcgacttgttgatcgatgctacagctaatccagaagtttttttgctgttagctgcgactgcccagcgaaatggaataccgatgtgctggggggagatattcgcaggtggttacggaggcatgatcgctcgagcacgtcctaaacacgacccaaatccattagctgtgcgtgacgcttaccattcttatctctcaaccctccctgaagcaccatttaagaatatggctagctatgatgggagtgatgaacaaccacttatagcatacgacagcgatgtgggctttattactactgcactgacacggttggctgtggatactgctctatgcagagagccaagcgaatttccgtactctttgtacttgctgggtatgcgacgtgaatggattttcgaggagccatttgacacacggccagtcgaaataagtggagaaggctgggaacgcgacgaaaatgctgtgagagatgaagatagggtcgcagttgcaaaggcattggtaaatatgtttcaaggaaaacaaagtgctaacactgatcctacctcctaa

SEQ ID NO: 237146 - DNA, 228 bp, Klebsiella pneumoniae; identical to SEQ ID NO: 192712

SEQ ID NO: 237147 - DNA, 4572 bp, Klebsiella pneumoniae
atgagcaaaactgttaattgcaaatacaaagagaatcttgacatcattaaaactggaattttatctctcaaagcgacggggagagatggatttgaagggctccttcgtattgctctaacaaatttgactgggataccattcagattagcagccagtgggttacaaggaggggtagacggagattctgtcatgccaggtgatcccgtttgtttcgaagccaaacgatactcaggagacattaatagaaatgatgtcttggcgaagatagtggatctagcacgcaataaagatgcagctgaccggttgtggattctaggtgcgacgattgagatcaatacacagcttgcatctaccatacaggaagatggtgatcaaaatgctgtatctaccttcattttggattggacagccactccactaccgcttcttgccatcacagtgatcgccgcaggtgatatagccattgatttcatctgcaagaattaccaaggcagaacaaatcagaaaaagctaaccaaagttgaccttgcttcagcttttacgttcatcaaacatcacccagaattcgaaaatctccttcaaaaactcaaatcaaacctaaatatttcgaaactggcgttaaagcgtgcgatcgatttgaacatggagtggcgaaaagaaacatttagttccaagagtcgggctcgagaacgtcttggacaaggcttggcagttttaaagcagccattccaccatttaatgcgctacgagctaagaaaccatatcctaagtgaaattcaaacgggcaaagaagtcattttattaggtgatgaggggcacggaaaatcatggcttgcagcacaaatatgctcaaatgcagaaggtttatcgctcttcatcagtgcagagcaacttgaaggtgtatctgtagaaaatcttgatgattttttgatccatcttctaattaaacaaactagcgaagtagctaacgaagcacttaaacataggtggaggcatcgtcttaagacttggaagataacaccacctcttgcttcgttgttagttattgttgatggcctaaaccaacgtcaaaactttcgctgggatcgactacttaacggtattcaatccagattagccgaaatcggcggccacatgatagtgaccgttagaccacaattctggagaaaagaaatcctccgtggtttagcgttcaagccggcaaccgttgaaattcctgaatggtcgtcattagaacgcgatgaactcctaaagtgcaatggaattgctctttcttggttagaccaacaaacattgcaagcactcaagaacccgagactacttagcgtagccatctcaactcttccgcataaggaggcaatcgcatggaaaggattgacgactgataggttactaatggaacaccttcgcacttcacaactcgagaaatatgaagatgaaagcttcttagatttgaccaagcgtctcagcgaacatgcaacgaaggtgctagaacgagtgcaattatcggcaaatataccacctcataattttcagactgataccagggcagttattgaaacgagatttttccgatcacttccaggcccaaacgatctatatgaactacgtgaggagggtttgactctcgcactcggcttcacgttagttgaccaactttggcaaacactatcgatgaaaagggatttagaggaacgtgtactccagattgtcgaacctatcaatgcaatggatcgaaccgctgatgttctttttgcgtctctgttaatctgcactctcgatgatgttcggttcgatacagaaatctactcggttctattacatgcgttttccgatctgcaaaatctttctgatcgtcgtttcgaggaattcgttgaaatcgttaagcatcagcctcaaacttttttcgaggtactaaaagaattctgccttgaaaaagagcagcggctcaataaagactggtttacccacgccgcattaaaggtagcgcaatctaaagagggatggcaaacagcagaaaatgctatccatcattggcttggctgttacaacaaggatccaattatacaagtcaatcactattacagggagaattcccctgagtacgaaaataaacttgaggaaaagaaagcagaaatcaaaaagaccttgtcatctttatctacttatgaaaagcaaatacttgctcggatgactgaagtctctagtgcgactgaggagctttttacgctggcacttcggctactcgctggccattctcttgtgagctttgccgatagctttgttgccatgggattggcatttgcattagataaaaatatttattctgcacggaaagcatttcagcaactaactacttttaatcgaatagaccgtgatgaaactagaaatgctttcctaaaagcaattgagccattgtacgcacaagatacctccgaaggaggccaatggactgtcgttcgaatgctctatgcaacagggaaagaaaaggatgcagtgacagctgatcgattagctaaaaatcttcggaaaaattggcataacttcgaatcaacatctcaaaataagtggcgccaactggaaactgccaatccaaattcaaaggtaccagtagatatggatgaaggaactcagcagttcagagagcttgatcccgataaaatgtttcaatcaatgtattttggaagtgaggaccgatgcttcaacgattttcttcctgtagcctgtcgattttctccagatattgccatcaaaaagactagaaatattcttgagggcatggttacaagatcaggcctaccacttcggcagatcatattgaactgcctgcaacacattcctctaatgtatccagatctcgcagaaaatattctcagtagagcgagggaaagcgatgcatttgggatattgccagaaaaggatatatcagtttgcaggaaattcgtgttctactacgccgccgtacatatttctgctggtaaacagcttgagtatatgacaagtaaggttccaggaccaaattacttactgtcagtaatccccagtttgaaacatcaaccgacagcagaaatagtttcagcggtacaagaagctttacgaaacgataatgaagatgaagcatacggtgctctggtagctgcacgttatgggaatacccaggtaaatgatgagctcgaagagctcattttaaaatgttcttacggggaatcttcaaatcttcgcgctatagcttttgaattggcaacgcacaaagatctaaacaaggttcgacaagcacattgttacagcaattggtgtgcctcctcttcagacgaaaatgtatacgaggattggtatggttcaattctgttgattgaagcatgtgctcaaggtgaaatgtcaattgactgccttctaagtcggatcagctacaaaacttggtttgcaactttgagtagactcaatactgattttaccaaaatattggtagataactttgtgaaacaacttcgtaaaggaatcacagcaacaggaaagataacacctcccctcgcagatttgaatctctcgagaactgacccggtcccattccctcttatatcactcgaagaaagtactcgggatagcgttcacatccctagatctaaaagtctggaggaagtactagatatcaatgataatttcgatgataaacaaagcagactaaatgcagccgcagacgtttttttccaagaactgaaaggaagtaaagcaaagctcttggttcaagaaattactatcgatattatccaagacctcgttgctaaagtgcctacattgctggatgagctgaccaatattgtagttcaggcggagagcactcaattaatttggctaaaaaacttggcttttattgtggcaaatataatttcagccaagtctcctgagcttgccgtgaaactactaaaccgggcctcaagaacacaaggttttctaacattatttgtggataccgacctaacccttgaacatcaagctatttggggaagcagtgcatctaaaccgatggaaactctatggcgccaaaggcttctgggttcaaaaaataatgcaattcttgctcaggaagtacttgcagcagaacgttttggagcttcttcttttattaattcacttgtcttcgaattaatctcgagtgacgatagtttggaccgcgcatatgccatatcaattgcgggctattcaatctactctactgaattcaatgatattataagtaaatatattgataataaaggcatttgtggcaatgctgccaaatattctctaagagaataccaaaaggctcaatgggctcagacatggattacaagcatgtggtctgctccaactccagaggagttctggcgttgccttataattgccacaacctccatggatgcgcgagtgcaagcagtaccacaacccaacagtcgatggcatcaatacgcgcctgtgtttcacagggctaggaaagcagccattaaggaacgaaacaaggaacgaaataaaaaacttcttggacaagaggctcctgagctaatctttacttcctttaaccatgaaattttgtag

SEQ ID NO: 237148 - DNA, 249 bp, Klebsiella pneumoniae
atgaaaatgcctgacaaaatattttcggcggcctcgtactgcacgtcaggcggccttatatgcacagggctggcaaggacctatgactggtttcatggccttgactggaattttattgccctggccagcggcgtgataattggtgtagcgacttacctgaccaatctctactttaagcgccgctggacgaagatgtatcagcagtccctcgatcgtggttatggtggcccgccaccgcaggatgaatag

SEQ ID NO: 237149 - DNA, 213 bp, Klebsiella pneumoniae
atgtctaacaaaatgactggtttagtaaaatggtttaatgagtccaaaggatttggctttattaccccggataatggtagcaaggatgtgtttgttcacttctctgccatccagagcggcggctttaagacccttaatgaagggcaaaaagtcgagtttacgattgaaaacgggcagaaaggtccatctgcagggaatgtcttcgcgatttaa

SEQ ID NO: 237150 - DNA, 270 bp, Klebsiella pneumoniae
atgaacaaggaaatggaaccatcgctgcagtatgcctgcaaacgcattctagagctggagcagctgctgctggtggatgtaccagaaactgtatggcccgctgaagtaacgatggttttctctgaagtcgaaaacgccggtgaattgccggcgcatcaccaacgccgactgcatcatcatatcaaccgtatgtggttggagaaaatgccggtatcgtcaattatcgccgcgactcgttcgttggcctgcgccatggggaaatacgcgtga

SEQ ID NO: 237151 - DNA, 252 bp, Klebsiella pneumoniae
atgagtgaagtcacagtgaagttgacgaacaaagcgatcgcaatcattgcggactacatccaacgcgccagtaagaacgagcagctgcaggacgcaaagaatcgtctggataaaaaaaaagcgatgctctctgaagacgaaaactgcgatcaggagctgttgatggctgcattcgtaccagcgatgacaaatcatacccgtgatggtttttttgaagctattgcggttgctttggaaggagcgcaggcatga

SEQ ID NO: 237152 - DNA, 201 bp, Klebsiella pneumoniae
atgactatcgagaaaactcatatcggtattgtgattaccaaagacggaccgaaacgtaaaaagctgcacgcgacggaaagtatgtgggtggtgggaaaaaacgagttttaccacaaagataccgggcgccggcactttgccgagaatacgcgccgtcggcttttgctggaaacgattgagaaaatcgggagcaaattatga

SEQ ID NO: 237153 - DNA, 537 bp, Klebsiella pneumoniae
gtggcaaagaaaaacgaaagctccttactacagctagatgttgatagcgtcctttactccaataaaacagtggacgttaccagcattaaatgggtgaaaaagccaccaccagggcgatcgccgatgtggctccagactgctatcactccctatgaatctgggtcaccattgccagggatgaagttcgttttacaatggcgtcctgctgatgaatacggtgattatcctaaaattcaaatggctgccctatattttgggcgtagagtttttggtgtggattcgtacccatatgacaggcatacgaaccgtgtggaagtgttacacccagactacgcagaaagcattcttggcccacactatcacctttactttgaatcagcgttgccgtatgaaataggtcttatcattcgagataagattgcccccagtgacgtattagggcattggagttttttctgctctaaactaaatgtgacatgcataggaacccttcctttgccaacccaagaagattctggacaaattcaattgctatga

SEQ ID NO: 237154 - DNA, 759 bp, Klebsiella pneumoniae
atgatgtgctcaacgataatttccaggctcggatatgaatgccttcctataggcgaagagtccttgcgaataatcagtccgtttccctactgcgatgatggggagcacgttggtgcgttcgttcagcaaatcaatggaatttacaaagtcactgaccgatgtgatgccctcatgaacatggaggcgcgggggatttcccttaatcaaagtcggctggattcacttcgccaacttctttctcgcgagggtgctgagcttaatgaaagaggtgaaatccttaagtgggcacaaaacgaaaatgaacttggcaaggtcacatcagacgttatccgtgctggaatccttgcttcagcaatgtctatcgattggtattcacctatccagtccaaacgttttgaagcagatgttattgattttctgtctaaaagctcactttctagcctaatagcgttgcgagaggaggttagtggcatgagcggtcacaatatcgtagttcctgtgactatcaaaactgcaacgccgaaatacatatttacctcaagtatcaaagagggtggatcttggaatagtgcctactcattgcttggcaagttaatggatctttaccaggcaaacaacaccatcaacaatcgatatgtcgttgtcgatgatgaatccatcggacatcaaatgcagcagctgattttgcttttcaatgacgtaagtaatgttctccctttcgtaagcagaagcgtatggctacctaagttagccgcctaa

SEQ ID NO: 237155 - DNA, 738 bp, Klebsiella pneumoniae
atggatacattaaagaatttaaacatagcaggtaaaaattatagtttgtgtgccaagacagttacagataatagccctaccccaacgacaccgagccctattgaatcagaattaagaattgcatttggaatttcatctgactggactcgtagagcatcattaatgagacctatcgattataatagtagaataatgcgtaactcatcaaagacaccatctgtaggagagatgataagatttggtttatcttggtctgggatgaatgcacttttctgtagaaactcaataatgaatttatttacaacttcagtgccagcttcagaattaaaaagattcaaacttttatataacagctgtaacattgatcttgttaaaatgagctcgcgccttaccaaccttcacaatatacttagcaccaccacgacgtcttacgtaccggggcatgctcccggaacacgattgccaattttacaagtgctatatagtaagtacactccaatccagtatcaaacgatgtcgactggtaatgtcataaatcagtgcttaatatcagggaattattcttctttagatatgccgacgcttgtatacttgatgagaaactggtcagttcatggaggcgttttaggaagcaattttagaagtgtgcctagatttaacttatatatagatactattaatgaagcgctgtctgatattcatttggagatatccaaagaacttcttactaaactttaa

SEQ ID NO: 237156 - DNA, 195 bp, Klebsiella pneumoniae
atgacaactaaaaaatttattgaactggaggtcggggatattatcgtccccgttccgggagtggaaataaccgtggcgtctgcgcccgtcctgaccaaaacagatgatggtgaaaattacacactgaaaggggtgcgggatggcaatgaggtgggagttgctggattttatgactcggtaatgcaagttaaatga

SEQ ID NO: 237157 - DNA, 1335 bp, Klebsiella pneumoniae
atggagattatgcccggaatcagcatctctcagcttcctggttctggtctgaaaatgctgattgccggtagcgataatattctgattaggtccgatgggacggggaagcttatcggccaggaggcgctgcagggagggataaattacggcttctgggctgaaggtgtaaccagtcccaggctggagggtgtggacgtcgggaattttaaagggttcggggcgtatttttcgaactgcacaagacctgcatgcattcggtcaacagttcacgacattactggcggctatgttgaaactgcctgtggtatttattttacaaattgcattgaaccgtactcagatcgcaacctggtcactgatgtgggcgctaacggaatcaagttccgcgccgacactctcgggaaaacggtgaggggaaaatctgtcggagatcgggtataccgcgccggatatattggtatcgcgaacagcaaatgtgctcaccatgttgtggaggactattactgcgaggactgtggcgataatggcgcagatatgaacggatgttatgacacccagtttaaaaacggaacatcggttaactgccttgatggcgcttatgtcggtgaaaataacctcaacctgtgcaaaattatcaaccaggtatccatcaattgcagacgttctgcggttggctctatgggggcagcgactaatgtgttactggataatttaaccggagacggctgcggaagcggcgtgtactgctcgggatttaccgtttttaaaattcgtggtggtcaaattattaactcggttaaacgcgcatatctcgataaccatgacgggctgacgaaacagagcaccgggcatggcattcatattcagtctgacctgaccggtctgccagcctgtactaacccggatattcagggtgtgacgttcctgaataatgcagggtatgacctcgcgctgggtgatgcgggtgttatcgggtctctacagtttatgagcaatacatttctggataatgccggggacgggaaaatttattacgggtcagcaacattaggtgacccaataattggtaataacattggatatatcacgtcacgcactcaggcatacaacctggctggcgatggctctaccgtcgagtttaccctgtctcttccgcaggaggttactgatgcaaattaccgtattgtctctgtcgtacctgactggctaacgactgtcagatatctggacaacgtaaagggaacatcgtatttcggcatcacgtttggcagtgcgccaccggctggaacgcgtcgcgtaaatatttcgtttgaacgtctgcgcccggcgcattga

SEQ ID NO: 237158 - DNA, 180 bp, Klebsiella pneumoniae
atgaacgtgagtactgagattttgaaactctggcaatccaggggcgaaaatgagcgcaccggatccgatgcggagagggttgcagatattgcctgggagcagggattacaacttcaccgcaaccggcaggaacattaccagcgagtgatgtacctcataggccatcgcaatatcggctaa

SEQ ID NO: 237159 - DNA, 1338 bp, Klebsiella pneumoniae
atgggtactgtaatttctcttgaagtgtcaggaatggagctagattggagtaagaactcgctgggtatagatcatggaggcctgtttcaaagtgccgatcatcacgtcaaaccactaaatgaagatcaaatagaggaaggagaggacttcgacactcctgatggcatcctctgtcgtactgtgttgcgtaagcctttggggcaagttgcctaccgattggaattgttgggtttcacccttgaaaatatacgctatgagtatgaactcatggctaaagattcaattgaataccaagaggaatttaacgaatcctgtccggaatatgcaaagccaattagtaacatgatgagctttgatgaattcgttaacttcatcaagagcgtaaatattagcgaactaaacgatgattatattagcttaaaagatagggtaaaagaacgcgagcttatcatgggccgatttaataatgatgaattattaaacaggataccccaatacgacaatacctttgataatgcatggtctgaaaagtctgcttttggggctttagttagcatactacatccatactcagtgatgcgacttttggccgaaaatccaaataatcataatgaattcgtcacttgggattacggagatctagtttctgctggttatgcgaatataaaagatattcaggtaaatgctcgcagacgtgacaagttcctgattgccaccgagggaagcaccgactccaacgtcatcaaatacgcattgcacctcttacggcctgatatagaagatttttttcactttatcgacatgagtgaagggtacccgttcactggttcaggaaatctggttaagttcgctgctgggctcgtaaaaatcgacattcaaaacttgattgttttcgtgttagataatgattgcgaagggattgaagcatatgacaaaatccgcaaactcgcattgcctcacaatattagctgcatgcatcttcctgatcttcctcatttcaatcaatttccagctattggtcctcacggcgttacctatgaaaacatcaatggccgggctgtagcgattgaatgctatctggatctaagattttctgattatgatgaagcgaaaatccggtggtcaaattacaaaaaggaaagtgatgcttatcaaggagcgctggaaaataaagactattacacgaaaaaattcatgaaactaaaaccaggaagtaaggattttagcaattatgattttgccaaactcgctattgtcttggatgaattaataaaagcgtgctcaaaaatctcatcagagattagaaaaaatgaagtagatgttcaatatccagactaa

SEQ ID NO: 237160 - DNA, 903 bp, Klebsiella pneumoniae
atggccaaattttcagtcaaaaaaactgaccgggaaatagcaaaacggcaggccgctaacgtaatgaaaattttgcaggctgatgtttttcgctcagttggcacagtgagaaattatcaggcagccctgacgcggattgccctgtatttcagaataaatggcggagtaaacctacaggatgttacgcctgaaatggccacggtttatttccatcaaagggctgctgctgttggtcagaaaagcttggatatggaacgtcaggctctacaggcaatgatgattcatctgacgcaggaattaccctccggagaagttcttgagatagtgcattctttgaaagagaaaaaattatcatctagatcatatacatcagaacagatttaccttatttcatcacatcagtccgataaaaatggtctggcaacactgattgcctacaatgcgggattacgcagccacgaattatttacgatcagtgagttacagcaacgccaaccgaatatcaggcctgtttctgctaaaaaatttatgggacgttctgggcaggcgtacacggtgcagggaaaaggtgggctaattcgggaaattaggttatccactgatttggccgaaaacctggagacaacacgattaccagaaccgataaaggtcactgaccgtggtgtccactatgaccaattttatgccatcgcagcagggcaatcttggagcagatcattcagcacagccagtaccagaaccttgggttggtccgcgggtagccatgggacgcgacatagttatgcgcaggaacgaatggaagaactgcagagtctcggatgccattatgctgaggcacttgagattgtcagtcaggaactggggcatttcagacccgaaataaccgaggtctatctcaggtag

SEQ ID NO: 237161 - DNA, 1272 bp, Klebsiella pneumoniae
atgttactgacggatgcttacattaaaaaacaactcagagagttaaatgctcggaagctgagtggagacgttatcgaaaaagatagtcgtctatcagatggcagtggattatacctgttgattaaatcaaatggttctgcttattggcgactgcgttaccgatttaatggagaagatcggctgacatctcttggtgagtataaatatatccctttggcattagcacgtgaaaaacgagaagaggtcaaaagaagtattgccagaggaattgatccaagagggaagaaagatgaaggaccttttttaacattccgtgaagtcgctatgcaatggcatgagagtaatcgccaatggtcaaaggaacatagtagacgcatccttaaaagtctactggatgaggtttttccagtatttggtgaagataatattaagttccttaaaacgcaggatcttctaaaacctgttaagcaagttcaagattcagggcgtttagagttggcttcgcgtatttatcaacgtattaattcagttatgactttggctgttgataatggattgttggaatttaaccccattgcgcacaaatcgggggctctgataaaaagaaaagcggagcatcgtgctgcactggaattagagaacataccagagctccttaaacgcatagaaaaatttaaaggcagaagattaactcagttagcgatgacttttcttttacatactttcgtgcgctcaagtgagctgcgttttgcacgctggaaggaatttgacttagaaaattcattatggactatcccatcagtcagggaggaaattatgggggtaaagtattcttatcgtggttctaagatgaaaacaccccacattgtacccttgagtcatcaagcatgctcaattattcaggaaataaaaaaaattacaggtgaaagaatatttgtatttaccagtgatcatttccctaaaaagccaatgagtgagaatactattaatcatgccttacaatcgatgggatacgataccaaaaaagatctgtgttctcatgggttcaggactatggcatgtagtgcccttattgagtccgggaaatggagtcgagatgcaatagaaagacaaatgagccatcaagaaagaaataatgttcgtgctgcatacattcacaaagcagaacttattcccgaaaggcaaaaaatgatgcaatggtggtcagattatctaatgcagttgcagtatgggtttcatcatccatatgattttgagaataatagtaaataa

SEQ ID NO: 237162 - DNA, 186 bp, Klebsiella pneumoniae
atggataagttgcttacgtttgatgaagtaattaacaggactggatactcccggccaagaatctatgaattaattaaaatgggggtattcccaagaaaaataaaaataggctcaagaaaagtagctttcattgaaagtgaaattaactcctggatccaagaaaaaatcagtacatctacaaagtaa

SEQ ID NO: 237163 - DNA, 1059 bp, Klebsiella pneumoniae
atgaacgatgaaaacatcagtagcaatgcgaaaaaaatttccagcgttaatggaatgccattaagtaaagggtcagacggttataacagacagcaatgttatgttatgaaaaatcaccttccagaccaaacattatgcagcatctatggtcccagcgggtcttataaaagctttttggcagtatcatgggcatgtcacattgcaactggagttaattgggctggaaataaagtaaatcagggggctgttgtctatatagtaggggaaggaggaattggtgtatgtcgtcgggttaaagcttgggaaaatatatatcaaaaagaggttgataatctttggttagttaataggcctgtgtttccggtgagaaggtcggagattagtacacttgttgagttggttaaatatattgagggtatgagtcatctccctgttcgactaatcattttcgacacccttgcgcgttgttttggtggaaaggatgaaaatgacgccagagatatgggggcatttattgaaggctgtgactcattaaaaaataaaacatctgcaacagtccttgtggtacatcattcaggaaaggatgagtctaagggggccagagggtcaagctcatttagagccgcacttgatgttgagtttaatgttaaaagagaggccgaagagcaagcattcattctatcttgtacgaagatgaaagatgcagaagagccgaaatctaacgcttatgaattgcaacagtcagagttatttgtcgatactgatggtgagtcagtcacttctctggctgttattgatagtgcgagaagaccaaagtatttatttcctgaattatctgaggtttctaacctaactctaaatcataaaattctttggggaataattaaaaatcgtttggcaaatggtgaaaaatgcacaaaaaaaaacattcgtgatgatttgaaaagtcaggggattgatattaaacattttacgcgatggttgaaaaaacttgttgctgatggagcactagtggacaacggtgaagaaatcttgctgccctctctacctgaagagtaa

SEQ ID NO: 237164 - DNA, 2997 bp, Klebsiella pneumoniae
atgaataaaaaagctcagctacaaagactaattgataaatacgaaaatgatattgattattatcgttctgcaagatacaacgaaacccaactaagaacggattttttggatcaactatttcttattctcggttgggacataacgaacgcagcaggaaaacccacaaacgaacgcgaagtgcttgtagaggaaggtttaaaagctcgagcaggcgaaaatactaaaaagccggattacacgtttagactcttctctgagcgtaagtttttccttgaagctaaaaagcctagtgttgatgtatcaacttctatagaacctgctttacaagttagacgatatgggttcacagccaaactgaaaatttctgtgttgtcgaacttcgagtatacggcaatttatgactgttctaatcaggttaaagaaactgattcagtagcaaactctagaatcaagttgtatcactttactgaactcgtagataagtttgatgaaattaaaaagcttatcgggcgcgaaagtgtttacactggtcattttgacaatgaatggtcagaaattgaaaataagatactgagattcagcgttgatgatcttttcctcaaacaaattaacgattggcgtttacttcttgcgaatgaatttttgcagatcaaaaacgaacttccagaagaaaaattaaacgaccttgcacaaaattacattaacagtattgttttccttcgtgtctgtgaagacagggacttggaagaatacgaaactctttatcacttttcacaagataaagactttcaatctttagtcaaaaaattaaagtcctcagacaaaaaatataattcaggattattctcgctagaatatattgatgaattattaagcaatgttaactcttgcatttggagtatcatagaacaattatacttcccacaaagcacatactctttctctgttttctcttctgatattttaggtaatatatatgaaatatttctgagtgagaaagttcgtgttgatgagttcggaaatgttaagattcaaccgaaagaggaacatatcgatagagacgttgttactactccaactcacattgtaaaagaaatcattagaaatactgtagtagaatattgcaaaggaaagtcagatattgagatattgaattcaaaatttgctgatatcgcttgtggttcaggtgcttttattattgaagtattccaagtcatccaagatattcttgttgattattatatacaaaatgataaatctaaacttcaacaattatctgaacatacatacaaacttaaattcgaagtaaaaaaagaaattctatataaatgtatatatgggattgataaagattataatgcaacaaaagcttgcacctttggtttattgctaaagcttcttgaaggcgaaactaaagaaaccattggtaaaggcatgcctattttacctgcactggatatgaacattctattcgggaatagcttgatagatagtggagacaaagttaaacaagaagatattctttcagttaatccatttgatttgcctaaccaccaatttgacgtgattgttggaaaccctccttatatggcaactgagcatatgaaacagttaacgccaaatgaattagatatttacaagaggaaatataaatctgcttttaagcaattcgataaatactttttatttattgagcgttcaatgcaagttcttaaagaacacggctatttaggctatattcttccgtctaagttcataaaggttggtgcaggcaaaaaccttcgcaagattttatcagataataaatatttgtctaaatttatttcttttggatctcatcaagtattcaagaataaaacaacttacacttgtttgttatttttaaataaagaaaatcaggatagcttttctttttatgaagtaaaagactttaagaaatggttaactcgtgaagataagtctctattatcaagcacatatcaaactagttctcttgattctgacacttgggttctagaaaagaaaacaaatgacattttgaagctaatgttttcaaaatctgagcagctaggcgacattgtaggaaaaaacaatgttgcaaatggtattcagacaagtgcaaataaatattatattcataaagaaatcaaatctgaaaatggttttatttattttgaatatgatggagttgaataccacattgaaaaagaattgactcgcccttacttcgaaacaaatcgttcgggtgacgatagtttctatacttataaagacgttgagcctaattcatttgtcgtttatccatacaaaaaagtgggcgaaagaatccagtttattgaatatgatgaactaaaacgtcaatatcctaagttatttgagttcctgcatgttgtaaaaatccatttgaatgacaagaaacgctctattaagcctgagccaaatggaccaaatgagtggtacagatacggacgtagccaagcattagagaactgtgatgttgatcaaaaactgattgtcggtgttctatctaatgggtataagtacagcattgacaatcacagaacttttgtttcttctggcggtactgcaggttatagcattatcaacgtccctaatgacgttaaatactgtatctactatatccaagcaatccttacatcaaaatatcttgagtggtttgcttcaatatatggtgagatttttagaggtggatttgttgctcgtgggacaaaggttcaaacaagaatgcctattcctgctattgattttgatgatccaaaacagaaagaaatacatgataagatcagtttaaaacaactgtctttgaataaattgtatagccaaactcaaaaatcaggtgatagagataaaatcatattcgaaaggcaatttgaacaagaaaaaatccaaatggatgatttgattaagaatcttttcaacttgggggatttagactcagagattccgacagtagaagacctatacaaaagcctataa

SEQ ID NO: 237165 - DNA, 1626 bp, Klebsiella pneumoniae
atgaaatttaaagcagatcaaacctcacaaaaacttagaggtggctattacaccccacaaaatctagctgattatgtaactaagtgggtattaagtaagaatcctaaaaccatacttgagccgagttgtggtgatggtgtgtttattcaggctatcgctaataatggttatgactctaacattgagttgtcttgctttgaattgttcgacacagaagcatctaaggctctcgatcgctgtaaactgaacaatttttctaatgcaacgattatagagggggattttcttgtctgggctaatgaatgtcttaagagaaatgagccgatatttgatggagttttaggtaatcctccgttcatccgttatcagttccttgaaagagatttccaagaacaagctcaattggtcttcgaacatctagaactaaaatttacaaagcacactaatgcttgggttccattcctactttcttcattagcccttcttaaacaaggtggaagaatagggatggtcataccatctgagattagtcatgttatgcacgctcaatcattgagaagctacttaggtcacgtttgctctaaaattgtcatcattgatcctaaagagatttggtttgaagacacattacagggggccgttattctcctagcagagaaaaagcaatatccaaatgaagaatcgcaaggtgtaggtattgtcagtgttagtggttttgaattccttcaagaggatccaaacgttctgtttaatgatacgacaggaataaatggtgaaacagttgaaggtaaatggactaaagcaacacttgatattgacgagcttcagctaattaaacgggtaattgctcatccagatgttcgtaaattcaaagatatagctaaagtcgatgtaggtattgtgactggtgctaacgattattttcttgttgataatgaaacagttaagtcatataagttagagcgttttgctcaccctatgtttggcagaagccaacattgccccggcattatttatgatgagaagcagcacattgaaaaccagctgaagggtttaccaaccaatttcttatacatagatgaagagtttgaagatctttctaaaagtgttaaaaattacatagagttaggtgaagcagaagaatatcacaagcgttataagtgccgtatacgtaagccttggttcaaggtcccatctgtatatagcgcagagattggaatgttaaagcgttgccacgatgcgccacgcttgattcataacaaagttagagcatataccactgatacggcatatagagtctcttcaacagttactagtgctgagaacttagtatgtagttttttgaaccctctaacggttattacagccgaactcgaaggacgcttttacggcggtggcgttcttgaacttgttccatccgagatagaaaaactatatatccctatcgttgaaggattagaatataacgttgaagaactcaacctattgattaaagatggtcaaatagagagggtaatccaacaacaaggttcactaatcttaggcaagcttggtttttctcaagaagaaaatgaaaaacttgtagaaatatggaaaaaacttagagatagaaggctacgtaagtag

SEQ ID NO: 237166 - DNA, 915 bp, Klebsiella pneumoniae
atgtacagaaaaactttaattattactttttgtattccattattttcatatgcagatgaccctggaggttttgttaatagacaactagcgaaagatcctgctttagactatgcagtaggggatgtccatggacctgtaaaagaaatcattgagagggctgatggggcaggagaaaaaaggatgattcgatatgatccggataaaaatatttactatataaaaacacccagtgaggcgatttatatctcatctggttatccaaatcctcttcctgtaagagttgatatcgacaaagcgtataagcactcctcaccatcaagcagtccgatgaagattgattattatttatatgaccgagataaatatgggaatataaaaacaattagatcttatctttatgatgaggataataaagaggcaatgtataaaacaaacttattatatagaaagctagtatcaggggatatcgaggcttcatatgataaaccgtctcctatcttgggggaaataaaaaggtattataggaatggatttttaataaaggaagtgtttatgaattctaaggggatggatgtttcaaatttccgttcaaaaaatataccgatggaaactgttgagtatgaatatgaatttgggaggaataagaaaaacccattatttgttttgaagagaagatatattgataatggcaagatgacacataaaagttggcagaggtattcagaaagtggtaatcttttaaagaccttttcctctttctttaacaaccctgaagttggagatggtgttgagtatgttaattataaatttgacaaattctctaactggattgaaagagagaaatgtgttgttgaaggccagtggggtaagcactcatcatgtactctagaacaaaggataattaattattattga

SEQ ID NO: 237167 - DNA, 468 bp, Klebsiella pneumoniae
atgagccggttaaccgccattatcagcgccattgtgatctgcctagttgtttgcctcggctggctggccagtcactaccacgacaacgcgatcgagttcaaaaggcagcgcgataaagtgactgagcagctcagcctggcgaacgacaccattgctgacatgcaggtaaggcagcgtgacgtcgcagcgctcgatgccaaatacacgaaggaattagccgatgaaaaagctaaaaatgatgctctgcagcgtaagcttgataatggtggtcgggtgctcgtcaaaggcaagtgtccagtgtcagccgcaacccaaaccaccggcgcccccagcatgggcgatgatgccaccgtcgaactctctgcagttgctggacgaaacgttctcggtatccggtccggaatcctcagcgaccaaacagccctgagggcgctgcaggaatacatcaccatgcaatgtctgaagtga

SEQ ID NO: 237168 - DNA, 1053 bp, Klebsiella pneumoniae
atggcagagctgagatttagcaagggcgagataaacaaggccggtgatatcttaagagcccaattcaagggaaaagaagattttagaaagatcatctgggctttggacgtactaaacaatttgagggagatgtatgtgcatccgctaaatgcatttcagacaaccctgagaagaaaaatgaaggttgctgatgctggagccatagcatctcagagattgaaacgtattccctcaattataggtaaattgaagcgaagccctaaaatgcagcttgccagaatgcaggacttgggtggattaagggctgtggtgtccagcatagatgctgttcgtgagttagaaaaaagttatttaaataactcatacaataggtttaaacactcattgacatctcataaggattatattgatgagccaaaagagtctggttatcggggtattcatttagtttataaatatcagggtgctacaaacccgaaccataacgggctgcttttggaaatacaaataagaaccagaatgcagcatgcatgggcaacggcggtagagaccatggggacgtttattggtcagtcaataaaatctagtgaagcggatgatgcttggaacgattatttttctgtcgtggcaagtgctttcgcgttgatggaggggtgtaatccagtacctcaatatagccacctttccaagcaagaaaccttcacattggtgaatgaacttactgaaaagctttctgttgttgataaattgctagcttttagagtggctgttgatgatataacaaaaaatggtggtagttatcatcttcttgtcctcgatacaaagtctcaaagcgtacaaattaaaagttttgggattagaagaattaatgaggcaacgacagagtatttagagtgggaaaagaaagcagagaaaaatcagtacatgcaggttgttttagtatcaactgaaaacgtaagcaaccttaaaactgcttatccgagttatttcttggatgcagaagaatttgttaggattattaaaataattcaagaagaatgcccaaggtcatag

SEQ ID NO: 237169 - DNA, 552 bp, Klebsiella pneumoniae
atgatcagaaaaaaaactgaagtaatatttaatttttctgtaaatgaaaaaaaactcaaagatatcatgagttcttatcttgggttagaagtcattgttgaatattatgaccataggattgatactttcaatagagaagtttcgcactggtttaaacctacatttggtacgagtagtttttcaaccgcaataattaattttgtgaagaaagaatatcctgagattgatgcagaaagtattgtagtaaatcctattcctgatgaactgccctttgataatggggactataacatcttaggtttgcttcaaatagcaggactaacgatctgtgattggaaaaaaatcgcagaaaacgttaagatcgataccctttcagcatggcatggaactgaggatgagattgttttacacttttcacgtgaggttcccggcgagattatgaagtacgtgaaaaatttacatggatggacatcttatacggggatcaccgttagtgcattggatgagtgcatcgtcgaaaaatatggacttttatcgtatatcaataattag

SEQ ID NO: 237170 - DNA, 801 bp, Klebsiella pneumoniae
atgagactgatttacacactaactggactgaataaccccttactccctgtgtactcacaaacagcggcagagaaagcgatctcagaactatccccatcagtatggacaccagtgaagacagagtttctaaaaatggggtctggtgcaaaagtagtagctatctctaaccgattagatggcggacttttcaagtcactggagaccctcgaaccatccacaaagctgaatggttctgttttgcaggggcttaatttctccggtgcatccggcatggctggtgatacggcggtggttatggacgcaaacagcaatacttttgcattcatctatcagctgccaggtggggcgcttccggctacgccacaggacagagcggttatcgcaacccaggaaagcacacctcatggcgtcggcattcgtacaacgtcagcaggttcattcccgatttttctgaatggagggatcgaggccgatctggcatttactcctaacaatatggggcaatctttattctgcgctgtagttatgtgctctaacaaggctgctggatcctatgcaattgcataccagcggtcagatcagtctgccgtgaccagccgacaagtgacgggctatacaatcccagcgtatagcccgtctcaaaaaatgagtattggcggagcaggcaatggttcagtgtctccgttaacatccgttttgtcagaatgtttggttttccccggcaaatatgcatatgggaccagcgctctggatgtcatcatggcatatctgatggagaggattggaaaaatcacggcctag

SEQ ID NO: 237171 - DNA, 801 bp, Klebsiella pneumoniae
atgcgccttctttacactgacacagggttaaataacccgttgcttcccgtttattctttgacagctgcggaaatagcactggcaaatttaaatcccaccatctggtcacctgcaacggttgattttatcaagccaggggtcgggcaaaaagtttccgcactcgcaaacagaattgatggaggtaaattcaattctcaggctagcctggaacccacgacaaaatataatgggtcaactctgcagggtattaatttttcaggtgctgcgggtcttttcggggatacgccagtggcactgaatgggacaataaatacgtttgcttttatttatcagctaccatcaggtgcattaccatcaacccctacagacagaatagtcatcgcaacccaggaaacaacccctcatggggttggtattcgcactacttcatctggtaatttccccgtgttttttaacggtggcacacagccagatgttcctttcaccccatcaaatatggggtctggtttgttttgcgccgtggttatgtgcgcagatgcctcagctggaaaatatgcgatagcatatcaaaggtctgaccagacaacggtaacaaccagacaggtaactggctatacgatacctgcatacaccacgtctcaaaaaatgaatttaggcggtgctggagatggggctatttcacccctgacgtctgtgctgtcagacgcaatagtgatacctggtttgtattcctacgggaccagtgcccaggatgtcatttttgcatacctgatggagagaattgggaaaataacaggctaa

SEQ ID NO: 237172 - DNA, 276 bp, Klebsiella pneumoniae
atgctgtggattccccttcgccagcggcgacgggcggtgggtggtcagggtattcatgcaggcgccatggtcgatccgatctccggtcatattggcgtcgtgccaggcgccctggcccatcgccgagccccccggcatgatgcgtggcgtcactttcgccggaagacggacttcgccgcgctgattaaaaacgcgcaccatatcgccgtttttaatcccgcgtttttccgcgtcaagcggattgatccatacttcctggcgacaggccgcttgtaa

SEQ ID NO: 237173 - DNA, 288 bp, Klebsiella pneumoniae
atgattgatgcgccggcgaatcgaacgcccgcgcaggcaggcgcggacctgatggtcgccgtagcggtcgtcgccggtgttatccgtttcgacgtaaaccacttcatcatcacgcacgtgcagccgcagggcgcagcggctgccgcagttaaccgagcaggcgccccagacaatgcgggttgtgtcgcctgtagcctgctgaactgccgccgcggcgcggcgcagcgtaaagggcagggtcagcccgccggcggccagcgccagggagccgagggctgtagattttag

SEQ ID NO: 237174 - DNA, 276 bp, Klebsiella pneumoniae
gtgcgtcgccatcacatgtatgaccagacctttcagcgcgccttcaaacgtgccgtagaacaagcaggcatcacgaagcccgccacaccgcacaccctccgccactcgttcgcgacggccttgctccgcagcggttacgacattcgaaccgtgcaggatctgctcggccattccgacgtctctacgacgatgatttacacgcatgtgctgaaagttggcggtgccggagtgcgctcaccgcttgatgcgctgccgcccctcactagtgagaggtag

SEQ ID NO: 237175 - DNA, 582 bp, Klebsiella pneumoniae; identical to SEQ ID NO: 230752

SEQ ID NO: 237176 - DNA, 1356 bp, Klebsiella pneumoniae
atgaaacgcgtgcgcttttcgccgcgcagctcctttgctcgcacactgctcctgatcgtcaccttgctgttcgtcagcctggtgacgacctatctggtggtactgaatttcgcgatcctgccgagtctccagcagtttaataaagtgttagcctacgaagtgcgtatgctgatgaccgacaaactgcagctggaggatggcacccagctggtggtgcccccggcgtttcgtcgtgaaatttatcgcgagctggggatttcgctctattccaatgaagcggcggaagacgcaggcctgcgctgggcgcagcattatgaattcttaagtcagcagatggcccatcagcttggtggccccacagaggtgcgggtagaggtcaataaaagctcccctgtggtgtggctgaagacctggctgtcgcccaatatctgggtgcgggtgccgctgaccgagatccatcagggcgacttctcgccgctgttccgctataccctggcgatcatgctgctggcgataggcggcgcctggctgtttattcgtattcagaaccgcccgttggtggatctggagcacgcggcgctgcaggtcgggcgcggcattattccgccgccgctgcgcgagtatggcgcctccgaagtgcgttcggtgacgcgcgcctttaaccatatggcggcgggcgtgaagcagctggctgatgaccgtacgctgctgatggccggggtcagtcatgatttacgaaccccgctgacccgcattcgtctggccaccgagatgatgggcgagcaggacggctatctcgcggagtcgatcaacaaagatatcgaagagtgcaacgccatcatcgagcagtttatcgactatctgcgcaccgggcaggagatgccgatggagctggcggatctgaatgcggtgctgggggaagtgatcgctgcggagagcggctatgagcgggaaatcgccaccgccctgcaggccggcgaaattccggtacgtatgcacccgctgtctatcaagcgcgcgctggcgaatatggtggtcaacgcggcccgctatggcaatggctggatcaaggtcagcagcggcagcgaagcgagccgggcctggttccaggtagaagatgacggaccggggattaaacctgagcagcgggagcacctgtttcagccgtttgtacgcggcgacagcgcccgcagcaccagcggcaccgggctggggttggcgattgttcagcgtattatcgacaatcacaacggccggctggagattggctccagcgaacgcggcgggttactgatccgcgcctggctgccggtgcaccggatgctggcgccgatgaaacccgccagggagagctga

SEQ ID NO: 237177 - DNA, 378 bp, Klebsiella pneumoniae
atggaagtacaagcaggaacttttaatcccgccgatttcagctggcagggactgaccatgacgccggccgctgccgcgcatatccgcgatctgatgcgcaagcagccggataagaaagggctgcggctgggcattaaaaccagcggctgcgccggttttggctatgtgctcgaaatgattgccgagccggcgcccgacgatctgctctttgaatctgacggggcgaagctgtttgcgccgctgcaggcgatgccgttcatcgacggcaccgagttggattatgtccgggaaggtttaaatgaaatctttaaatttcataacccgaaagcgcagcatgagtgcggctgcggcgaaagttttggggtgcaggcggagtaa

SEQ ID NO: 237178 - DNA, 801 bp, Klebsiella pneumoniae
atggctttcagaaactggcggcttggaatgcatatccaacaggatagcattgccattgtcgcgctattgcatgaacgttcacactgggcgctgcgccgctggtggcgtatcccattgccgccggggctggtacgtcagggaatggtggcggacgtcagcgcactcggttcgcggctggccgcctggcggcgggagctaccggcgcagcatcaggttagtatcgcctttcccgcggtgcgcacactgcaaaagcgtcttccgtatccccagttcgccctgcgggagcgggaacaggcgacgtgggtagccagcgccatgagccagcagctggcaatgcctgtctccgcgctatgtattgattatgcccccacctcgcgggatgacggctggcaggttacggcggcgcagcggctggatatcaatgttctgcgggagctggcagggcggctgcggctgcgggtggcggccatcgtaccggatgccagtgcgctcggcgcctttttcccctggatgactgcggcagaccagggcctggcgtggcgggatgaaaagcactggctgtgggcgacccgtgaggcctggggcagtgacgcctgcgctgatgtcgggtccttaagccagctggcggggcagcttcaggttccgctgcgcctgtgtattgacgcgggcgatgaggccagtcgctttgatgtctggcaagtgattcaccgtcggcagcccccgctgccagccgatggcgatcgttacgccattgcccttgggctggcgctgggaggcgggcggcatgacgcatgtcgttaa

SEQ ID NO: 237179 - DNA, 2559 bp, Klebsiella pneumoniae
gtgaagttcgtaaagtatctattgatccttgcagtctgttgcgtactgctgggagcaggctcgatttttggcctctacaaatacatagagccgcaactccccgacgtcgcaaccctgaaggatgtgcgtttgcagatcccgatgcaggtctatagcgccgacggtgagcttattgcgcagtacggcgaaaagcgccgtatccctgtgacgttgcagcaaattccccccgagctggtgaaagcgtttatcgccaccgaagacagccgcttctatgagcaccacggcgtcgatccggtaggtattttccgcgccgccagcgtggcgatgttttcaggccacgcctcccagggcgccagcaccatcacccagcagttagcgcgtaacttctttctcagccccgagaagacgttgatgcgtaagattaaagaggcctttctggccatccgcatcgagcagttgctgaataaagatgaaatccttgagctgtatctgaacaagatctacctcggctaccgcgcctatggcgtcggcgccgcggcgcaggtctattttggtaaacctatcgaccagctgaccctgagtgagatggcggtgattgccggtctgccgaaagcgccttccacttttaacccgctctattcgatggatcgcgcgaccgcccgtcgcaacgtggtgctgtcgcgtatgctgagcgaagggtacatcacccaggcacaatacgatgaggcgcgcagcgaacccatcgacgccagctatcacgcgccgaaaatcgccttctccgccccttacctgagtgaaatggtgcgccaggagatggtgaatcgctacggcgagcaggcctacgaagacggttatcgggtctataccaccattacccgcaaaaaccagcaggcggcccagcaggcggtacgcaataacgtgctggattacgatatgcgtcacggctaccgcggcccggccagcgtactgtggaaggtcggtgaaacgccgtgggagacgaagaagatcgtcgattcgctgaagcgtcagtctggctacggtccgcttttcccggcggtggtcacctccgcgaatgcccaggaggctgtcgcgctgttggctaacggcgactccgtttcgctgacgatggagggcgtgcgctgggcccgtcgctttatctctgatacgcagcaaggggcgaccccgcgtaaagtcaacgacgttgtgcaggccggacagcagatctgggtacgcaaggtgggtgacagctggtggctgtcccagctcccggacgtcaactcagcgctggtctccattaacccgcaaaacggcgcgattattgcccttgtcggcgggtttgactttaaccagagcaaattcaaccgcgccacccaggcgctgcgccaggtcggctccaacattaaaccgttcctctataccgccgcgatggataaaggcttaacgctggcaagtatgctcaacgatgtgccgatctcgcgctgggatgcgggcgcaggttccgactggcggccgaagaactcgccgccgcagtatgccggtccgattcgtttacgccagggcctggggcagtcgaaaaacgtggtgatggtgcgcgctatgcgcgccatgggcgtagactacgccgccgagtatctgcagcgctttggcttcccggcgcagaacattgtccacacggaatcgttggcgctgggctcagcctcctttacgcccctgcaggtcgctcgcggttattcggtgatggccaacggcggcttcctggtcaatcctttctttatcagtaagattgagaacgatcagggcggggtcatcttcgaggagcgtccgaaaattgcctgtccgcagtgtgatttaccggtaatttacggcgatacgccaaaatccaacgtgctggaaaacaaggatgtggaagatgtcgccacctccgcagaaccgcagaatggcaacgtgccgccgcagccgcagctggagcaggccaaccagtcgctggtcgcgcagagcggcgcacaggaatacgcgccgcatgtgattaacacaccgctggccttcctgatcaagagcgcgctgaacagcaacatctttggcgagccgggctggatgggcaccggctggcgcgccggacgcgatctgcagcggcatgacatcggtgggaaaaccgggaccaccaacagctcgaaggacgcctggttctcaggctacggaccgggcgtggtgacctcggtttggatcggctttgacgatcatcgtcgcgatcttggccggaccaccgcctccggagcgattaaagatcagatctctggctatgaaggcggtgccaaaagcgcccagccggcctgggacagctttatgaagagcgtgctggaaggcgttccggaagaaccgttaactccgccgccgggtatcgtcacggtgaatatcgaccgtagcaccggtcagttggcgaacgggggcaatagccgggcggagtactttattgaaggaacccagcccacccagcaggcagtccgtgaggtgggcaccaccctgactgacggcggcggtgaaacccacgaattgttctga

SEQ ID NO: 237180 - DNA, 429 bp, Klebsiella pneumoniae
atgcactttgatatcgcctggcaggaggtcgataccgttctgctggatatggacggcacgctcctggacctcgccttcgacaactacttctggcaaacgctggtgcctgaaacctggggggccgcccgcggcctcaatttgcaggaggcgaaagacgccatgcgccaggagtatcacgccgtgcagcatacgctaaactggtactgtctggattactggagcgagcgcctgggtttggatatttgtgcgatgaccagcgaacaaggtccgcgcgccacgctgcgcgaggataccgtgccgttccttgatgcgctcaaggcctgcggtaagcgacgcattctgttgaccaatgcccatccccacaatctggcggtgaagctcaaacacaccggcctggacgcgggtgatgctgccaacttactgatttag

SEQ ID NO: 237181 - DNA, 135 bp, Klebsiella pneumoniae
atgtgggtaatgatgaagcttaaacgtactgggcaggagatgtatttccagtgttacgacagcagggaaacggctgaaatggcgattaaggttatgaattccgtcgccagtagctgggaattctatatcagttaa

SEQ ID NO: 237182 - DNA, 285 bp, Klebsiella pneumoniae
atgaacgcataccgcgcatacgacgctatcgaagaacggaaatgggctgaacagtcgctcaccgaagagaagcaaaagtggattgacgatcgggcgcaggaaattatcgacgccctgccgaaagaaccgtcaggcctgttccgcttctctgtgccaatggacaaaagtccatacgaaggcctccgcagcgatgcagctggcgaggcatataacgatctaatttcggcagtagcttacgcccaggcggaatacgactgggatcaccgcaccggctgcccgttttaa

SEQ ID NO: 237183 - DNA, 750 bp, Klebsiella pneumoniae
atgaccaaatcaaccataaccagagagcgcgcacagcaaattttcctgggcaacggaccagagccgagcgcatcagaagaacgagagctggcccgcatggcgctggccgcaatggacagcgagccggattgtaatgagcgaaagcttttctgttcaaccgatacagcgaggatgaggaaggtagtttctgcctcagacgggtccgggacaacaccgctctatcaccgcgccgccatgctccaggctggaaccctcaccaatgaggataccaaacaagcatggactggcatccctgatatcgataacgccatcaacatgctcgaccgcatcgatacactggaaagttgcgatgatgaccgtattgaggctgttaagaccgttttgcgcggactggctggcaactctccggtaattccggatagttcagcggacatgcttcggcgttggttgacctttggtcgcggtatgcaaaatgcaggaagccagcttcctcacaacctgattgcggaaactgagtccatgcttgcagccgccccgcagtctcccggcagtgaccctgccaccgtaccgggtaaatggatttcggtaagcgagcggatgccggaaaatgatggggcatatctttgctgggataatcgttacgtaactacctacgcattcatatttggtgcttggcaggcaaaccaattcattgccaagaatataacccactggatgccgctgccggctgggccgcaggaggtgaggtga

SEQ ID NO: 237184 - DNA, 621 bp, Klebsiella pneumoniae
atgaccggcgccaagtggggacacatggcgcaaacactgcaatttgagaagagttatcaaaacgtactgattcccgcagagccgggaaccagcgaatacctgcaacttatcccggtagggcaactgctttgcggtgagttccgcaagcccaggaattacgcattccacaagaagttcttcaagcttctgactctcgggtatcactactggacgccttccggtggcctcattgagcccgctgagcgcaccctcatatccgggtttatcgacttcctctcatccgacttcgatcagcgcgctgcgctccagaacgccgcggagatgtatctctcctctgtcggtatttctcgttcccgcgatatggcgcttctgaaacacttcgagtccttccgcgagtgggcaaccattcaggctggcttttacgacgaataccagatgcctgacggcagccgtcgtcgtgtcgcaaagtcgatctccttcgccagcatggacgacagccagtttaacggcgtctacaaatcagtgctgaatgtgctctggaactacattctgcgtcgcaagttccactcgccagctgaggctgaaaacgccgccagtcagctgctgagctttgcggggtga

SEQ ID NO: 237185 - DNA, 270 bp, Klebsiella pneumoniae; identical to SEQ ID NO: 235366

SEQ ID NO: 237186 - DNA, 438 bp, Klebsiella pneumoniae
atgagcatgaagttgcaccttggtgttatcgacatcccctatgaaagcgaatcagtaactacgggggatgttgctgagtttcttgaagataaatacggaatcatggcccactttttctggctgtatggtccgattatcgcagagctaatggctgaaagtattgccgggcaactggaaaatatcattgctggcgcaccgccatcaaaggacccattcgcagaggcgatgagcaaagttcatgacctttttgttaattttcttgatgacgaggaaatgaacggcatgcctggcgtccctactctcagggctctgatgggcatctcgaagcgctttaaagacaaaaaaggtcagccgcgtccttcgttcattgacaccggaacctatcaggcagcgatgcgcgcatgggtaagtggggtgccgaatgccttccctgagtga

SEQ ID NO: 237187 - DNA, 687 bp, Klebsiella pneumoniae
atgattaaaatgaaaacttcaattatgcttgtttttttatcagtttcgttgtgcacaggaagttcttttgcagcttcttttgattgtaataaatcaaaaaattttgccgaaaaaacaatttgttctgacaagaaattatcagaagatgatgaggttctagctaaggtctataacctagcaaagaaagttgcacataataagaatgggttcgataggctgacaaaagatttatgggactcaagggatttgtgcactaactacaaatgcattaatgattggtatgatactgtatttgttgcgtatgattctgttataaaaacaaatgcaagcgatgaagttttgaataatattcagaaaaaatatgacgagtcagtaacgcagaagccttccataagcaacggagctaaaaacaaaaaagaagctaaagattatagtttatacgactcaaaagatagagccgcgccagttgaacataacgcaatattatacaaagacactccagaggcattcgagtttatagatacacttgttgggtttgtcagacaaagctcttacaaatgtgactctgttagctctttcatacccttggtttcatcgaatggctttacgctcgcatgtaataaattcagctacaaatatgaaattaaaaataacggcggaaatgtctctgtttctgtagataattag

SEQ ID NO: 237188 - DNA, 801 bp, Klebsiella pneumoniae
atgagcacaatttatattccaaaactgggcgacattgttattcctggtagccacccgaaaaaagggcattttatgctgcccgacttgcctgtcactaccggactgaagggtatgcatgttcagggcggtaatgccgcgctgagcatcaggaatctggctgacagctccactccgctgaccatggtaggcacaccgacaatttccccgacctttggcgctgtgtgtaacttcagcaactgttttgatacaggcagggtatctaccaggaaccagacccatatcgtgatctgtaagccggtaaaaccgacagcgtccaccgaggagcaacaggcgttcatgatgggtaactacaattacactggatcaccgatcgtctaccggggggatggccttgctttcatgttttcgtcgcagagtttgtatggtgcctttgttgaagacaacaatgccaccccgaccaacatgattaataacttcacgaccaattatgacgtgacgaaatgggcggcatttgtgtcactgattgatggcgataataacattgccagaatcggtgggcggcagggaggtgctcttgcatggcaaggttcacgtacgctaaccaacaggactgcatacactggcagaaccatcaggatagggtcgcatcatgctggagcagcgtatccggcaggagcggatattactatgggcatggagctgatttttgaagcagcgctaacgcaggccgaagtagcatctgttatcgacagtatcagtgcgtatctgaatgcggcatggggcattaacgatttgggttaa

SEQ ID NO: 237189 - DNA, 1683 bp, Klebsiella pneumoniae; identical to SEQ ID NO: 236515

SEQ ID NO: 237190 - DNA, 165 bp, Klebsiella pneumoniae
atgagtcgtccatcgctatcggcaaacttttcagattcagggttcagaaccaacaaaggcccggtcgaagagcgggcctttactctgatggtgagcaatgatggcgaacgtcctttccctctctccgggccgttgctgcgcaatgttcatatcgatgccagttag

SEQ ID NO: 237191 - DNA, 1218 bp, Klebsiella pneumoniae
atgaaatgtaaggcaagtagatgtaccggccaaaggatccaaactgcgtcagtccctgacacgatgctgaccacagggataacggcgttgttttcactaacctgcgcgctggcagtagccaatgtttattcagcacagcctttactcgactcgatggcggtcagcctgaaggtgtcgccaggcatgattggcagcgtcatcaccgctacgcaggcgggctatgccattggcctgctgttcctggttccgctcggggactggttgaaccgtaaatacgtggtgatgagtcaactgttgctttcagtagcggcgttagtcgcggcagggttatcccccaatatagcaactctgcttggcgccatgctgatcgtcggcctgatggccgtggtggtgcaggtgctggtggcctgggtggcagtactggcgacgccgcagaaacgaggccaggcggtgggtaccctgaccagcggcattgtttcaggtatcctgttatctcggtttatctcaggcgcgatagccgatatcgccggctggcgagccgtgtatctcacggctgcctgtctgatgttggtgattgccgggatcgtctggaaaatcatgccttcccccccgcagcagccgcagccgcaaaagccgacttacctttccttattgaagtccgtgtttcagctgtacctcaccgagccgcaactgagaaagcgcgggatcctggcgctatttatcttcgccgctttcagcatgctatggacgaccatggtcatgccgctcaccgccctttccctctcgcacacccagacggggatgtttggcttagccggcttcgctggcatgctggccgccgccagagcgggcaagtgggctgaccagggatgggctcagcgcactaccggcctggcgctggcgctgctgaccatctcatggcttcctatcggctatgccgaaacctctctgctctggctgatagctggcgtcattgcgctggactttgcggtacaggccgttcatgtctccagccagagcctgatcattgccgccaggcctgcagcggcaagccgcctggttggggcttacatgtgtttttattcgctgggcagcgcgacaggggctatcgttgccacacagctttattcccactggggatggcaggcggtctgccttgcgggggccgcggtcagcgcgtgtgcatttctgatctggtcaggatcgcgtcaatcatga

SEQ ID NO: 237192 - DNA, 1086 bp, Klebsiella pneumoniae
atggcgcaacgcggaatcccctgtctatggatgcgcggcggcacctctaaagcggcctgttttctggccgacgatctgcctgccgatccggtgcgacgtgatgcggtgctgctggcggtgatgggctcgcctgatccccggcaaattgacgggatcggcggcgccgatccgctgaccagcaaagtggcgattatccgccgctccgcacgacctgacgccgatgtggactatctatttgcccaggtgaacgtggcggcggctaccgtggattatggccaaaactgcggcaatattctcgccgccgttggccctttcgccatcgagcgcggtctggttcgctacgatgcgccgctcactcgggtgcgtatttttatggagaacacggggcaactggcggtggcagagatcccctgcgatgccgacggggtcaactacgtcggcgagagccgtatcgatggcgtgccgggcagcgccagcccgatcctgctccattttcttgatgtcgccggctccagctgcggggcgctgctgccgaccggccgggttcgtgaccgttttgacggcgtcgaggtgacctgcatcgataacggaatgccggtgatcctgctgcgcgcttgcgacctcggttgcaccggctatgagacgcgcgaacagctggataatgacgacgcgcttaaacgtcgcctggagtcgattcgcctgcaggccgggccgctgatgcagcttggcgacgtcagccagcgcacggtgcccaagatgaccctgatcgccgagccgcgacacggcggcgccatcagcagccgcacctttatcccccaccgctgccacgcgtcgatcggcgtatttggcgcggtgagcgtggccagcgcttgtctgctccccggctctgtcgcgcagggcctggcgcaggtagcgccaggcgatacgccgctgctcagcgtcgagcatccgacaggcgaatttagcgtgacgcttcagcttgatgctgacggcgccctggctggctgcggcctgttacgcacagcgcgactgctgtttgctggcgaggtttttattccggcccgcgtctggccgcgtgaggagtga

SEQ ID NO: 237193 - DNA, 3357 bp, Klebsiella pneumoniae
atggcagacgtcgcatctttagcggtcgggctgcacctgaacgcagccagttttaaatcccagctgctgggagcgtatggcgatgcggagaaccagtcacgacggtttaaccgtaatgcccaggcggacgcgaaaaagacggaggacgcctataagaaggtcggtctgtcgatatccgggatggccagccggctggcggggctggcaggagccggtctttccatcggtacgatcgtcaccacgtccagacaatatggacaggcattatcagacctgcaggccatcaccggtgcgactgctgctgaaatgaaagcgctggatctggctgcgcaggaaatgggacgcacgacagagtacagcgccagccaggccgccgaggcgctaaagctgatggcgtcggctaaaccggagcttttaaaaacgtccgatggactgcagaaggctacgaacagcgcgcttatcctggcgcaggccgccggcacaacgctgcccgatgcgaccagaacgctggcgctctccttaaaccagtacggggcgagcgcgcaggaggcggatcgttatatcaacgtgctggccgccggcgcgaagtacgggtcgtcggagattgtggatacagcggccgccattaaaaatggtggcgtcgcagccgcacaggccggcgttggttttgagcagctgaatgccgcgattcaggtgctggcagagcgtgaaattaaaggcggtgaagccggcacggcgctgcgtaacgtcatcctgaatctggaaaagggcacggacaagagtctcaagccgtccgtggttggtctcagccaggcgctgaccactctttccgggaaaaatctctccacggcccaggccgtaaaactgtttggcgtggagaacctgaatgcggcgtctatcctggtccagaaccgttcaaggcttgatgagctgaccgcttccctgaccggtaccaaaacggcgcatgagcaggcatccatcagggttaacaacctgaacggcgatttgctgggtctgagcagtgcgtttgaagggatggtcattaagatcggccagagcagtaacgggccactccgcagcgggattcaggttgccacggaggcactgaacagcctggcagacaatttcaacaccgtctccagcgtggcgctttacagtctgatccccgtgctatccacgaaactgaccgcagggctgcgggagaatatcgcggcctggcgggaaagccaggcggcggtaaaagcgcgggcgcaggctgatgcggatattgcccgcaaaacgctggattcgacagcggccatcctgaaacagaacgacgccgagtttggccactaccggcagatggagcggacggctaaacagtacgggatgaatatcagttaccaggatgagtttacccgcctcattcgacaggaaactgagcaaaccaatctggccagccaggcgaaactgaaactggcagcggcaaaccggcaattgtcgatatcagcccgcgcggcctctgttgcggtgggcctggcaagaggcgccctggcttttgttggtggtccggttggcgcggcgacgctggctggatctgcattactgtatttccatcaacaggcaaaagaagcccggcaatcggccattgatttaaaagatgccgtagtggaaaccagtgaagcgctgatgcgcctctcgcttaaccagttaaatgtgaagcagttcgacctggaggataagtacgaaaaccaggtcgtgcagcgtaaccagctgatgaaagagattcaggatgccgacagtcgtatcgacagcctgaaagggtttgaccccttcggccagctggaaggggtgacaaaaggccaggcgcgtgcacgggcggatctcgaaagcgttaacgagggactccgcaaaactgaggaaaacattaagcgtgtcagtgatgcaaaaacactggctcagctgggtttatcgggaaaaataacctcccttacggacgatctgaaaggggcgttaagcacgccccctaaagagaccggagagggaaatccctggggcggcgatggcggtaccggcacggggaaaggcagtaagtcccaggtcgaccagttcaaaacgctgcggcagcaaattgaagaagcccatgcgtccagtctggccagaattaacctgcaggaaaaggacagcaacagggagctgcaggaagcggcgaagaaaaatggcgccagtgatgctgacctgcagcgcgcgctgttaatgaacgcagagaattaccagaaacagcgactggatctggccgcgcagtattcccccgcccaggaaactctgcgaaaagagcaggaagccagccgggacctggctgagcttttcaaagcccgccttcttgatgaaaaagagtaccaggccgcacgaataacgctggccagagataccgcgaaagagctgctgcaggcaaaggctgacgaaatcgcggcgcctaaactggatatcgccggtgaggttgatccactggtagcactccgcaatcagttaacgcagcggcaggctttgctgctgtcgtactatcagagcagcgcgatcagcaaagaacagtacgaaatgctgatgaagaaggcgacgaaggattctgcagattcgcaatatcagacgtcgctggagttatatcgatcacagggcgaattccagagcctggccgtcgggttatttgaaacggcccatgagcgctctagcaacttcctgacgagcatgttgacgcggacgagaagctttaaggagaacatggctgacctgttttcctcgctcacgcagtcggtcataaaaaacctcgttgatatggccgctcaggctcttgttaccagcactatcatgcaaaccatcatgggtgtggtgggagctggagtgagtattgcaggtggtgtttctggagcggctgatgtcggcgcaggaactgcgattcagaatgcgggtaataactttaactttcaaataccgggttatgccaaaggcggtgtcttcgattctccttcattaagtgcctacagcaaccaggtctacgactctccgcagttcttcgctttcgcaaaaggggccggcgtatttggcgaggccgggccggaggccatcatgccgctgacgcgtgccggtgatggttcgctgggtgtacgcgcggtgggtggtggtcagaacgccggcgtgtcggaagggccaaaagtctatatcacgattgaaggcggaaacacctcaacgcaggcaccgtctggttttgagcagtttggccagcagattggctcgtttgtggagaaaaaatacagggagctgatggcgcaggatatgcgccctggcgggatggtctggaatgcagttaaagggcaacgttga

SEQ ID NO: 237194 - DNA, 339 bp, Klebsiella pneumoniae
atgagcctgaaaccgggtgatatgaactgtcgcattgcaattagctacgttcagtcctgtcgtgggccgctgggcgaaccgctaccggaaaagcaggttgaatcgggaaaagcgtgggcaaaacgggagctggtatcggggcgaaaagtccgcacgctggatcagcagcaggtggtggaaacctgcctgttcacggtctatccgggcgtgctggttgatattgactggaaaatcacgacgaaaaatctggtttataccgtccggaatatcgaccgcaaaacagaccggatcattatcacgggggaggctgacgggcggcatgatagagctggcgattaa

SEQ ID NO: 237195 - DNA, 318 bp, Klebsiella pneumoniae; identical to SEQ ID NO: 180577

SEQ ID NO: 237196 - DNA, 423 bp, Klebsiella pneumoniae; identical to SEQ ID NO: 199877

SEQ ID NO: 237197 - DNA, 432 bp, Klebsiella pneumoniae; identical to SEQ ID NO: 180584

SEQ ID NO: 237198 - DNA, 492 bp, Klebsiella pneumoniae
atgaattatggactggtgagcaagcaagacgcgcgcctgtatgccgaagccgtttgcgatgtgatcgggcatggcaaggcgaatgcagctgttttgctgtgtgtcgaaacggccgcagccgagacattgctcggcgattacaaagacccgacgccgaccagcgccggaaccggattaacccaggttgatctcggtaccttcgaatggctccgcgataagtacaaaaacagccgttatgccccggtactgctgaatcagtttggtatcgacctgagccgaacagtttatgcggaactgaggacctcgccgctgatggcgatgctgttttgccgcctgcgctatctggcggtttcagagtcgattccggcgactcgcgaggcccgcgcagcgtactggaaaaaatattacaacacctcggcaggcaaaggcacgccgcaggattacatcgataaatgccagcgcgctggcgttgatgcgctattcacgcagtga

SEQ ID NO: 237199 - DNA, 1062 bp, Klebsiella pneumoniae
atgaaaaacactgtgaaaataaacagtgctgaacttgtgcatgcagattcacttgagtacatcaaaaccctgccggacaacagcttagacgccatcatcaccgacccaccgtattaccgcgtaaaggcaaatgcctgggataaccaatggcccagcgtaacggattatttagcctggctggatgagtttttcgccgagttctggcgagtgcttaagccagcagggtcgttatatgtgttctgcgggccgaaattatcatcggacactgagctgttgttacgtgaccgtttcaacgtgctgaaccatatcgtttgggccaaacccagcgggcgctggaatggcgcgcgtaaagaaggtttccgatcttattttccggccagtgagcatattttcttcgcagagcattacggcgcggaaggctttgctaaaggccaggctgggtatgcgacaaagtgccaggagttgaaaggccaggtcttcgaaccgcttatcgcttatttccgggatgctcgccagcgacttggtatttccgctgccgaaatcaacgcggcaaccggcacgaaaatgtgtagccactggtttagcgccagccaatggcaattgcccaatgaacggcagtacctggcgctgcaggcgctgtttaaccgtaaggccgcagagcagggaataacgggattgtcagagccgcatgcggcgctgcaggaggaatacggcactttaacggcgctatattccgaactggttatgcagtattccgaactgcgacagcagtatgagaatttgcggcgccctttccatgtgacaaaagatgttccacacaccaacgtgtggacgtatccaccggttccgtactatccgggcaaacacccatgcgaaaaaccgctgcagatgatgctcgacatcatttcggcttgtacgcgccctggcgatgtgatcgccgacttttttatggggtcgggtgcaacgataaaagccgcgctgcagttaggacgcggagccatcggcgtagagctggaagaggagcgatttttacagacggtctccgagatagaaaaacaataa

SEQ ID NO: 237200 - DNA, 231 bp, Klebsiella pneumoniae; identical to SEQ ID NO: 206989

SEQ ID NO: 237201 - DNA, 222 bp, Klebsiella pneumoniae
gtgaactatcaaggcaacgaaaaaatgagacaggacgcggctgagatttctaacgagctgtatgaactttggcaaaaagtgaagcgtttccagcgtgagtacagcttcaacagcgagaacattacagacagactggcgggccgactgattggaacaatggaacccaagctggccgaccttaacagctttatggccgatgtcgattaccagtttgaagattaa

SEQ ID NO: 237202 - DNA, 906 bp, Klebsiella pneumoniae
atgttaattcgatctcgcacgctcaccgggctgctgtttatcacgctggcgggcacctcagccgccggggccgcgccattggcctcttctactcaccagacggagcaggataaagcccgccaggaggcgctggcgccgcagcaacaggattttcagtcttcacaacagcgcgtggcgccgcagggtatcccttttcctgaggaaacgcattgcaaattgatcaaccgggtcgatatcgactccgataaccaggcgctcacccggaaattactggcgaaaaccgcacggcaggcgcagggacgctgtctgggtagcgaaggcattcgcctgctggcctataccttgcaaaatgagctgatcgcgcaaggctacatcacctcgctgattgatgtgccctcccagtcgctggagcacggcatactcaggttcacgctgcactatggcaaagtgggcgctatcgactatgccgacggctcggacaccacccgcctgtggaattccctacccacctcttccggtactatcctgcgcttaagcgaccttgagcaagggatggccaacctgcagcgtctgcccggcgccaccgcgcacatgaaactgctgccgggccagcacgagggagaaagcgatatccagatcgcccgcagcctggcgaaaaaatggcagcttggcgcctggcttgacgacgccggcagcaaagccagcggacgctaccaggccggcggggccctctatctctatgacctgaccaccctcaacgatatcctgtacctttccggcggaggcgatattgaattcaatcagcataacgacggcaaccacaacggcagcctgtattactccattccctttggctactggacactaagcgctgagagatcccctcataatttccccaaaacgtaa

SEQ ID NO: 237203 - DNA, 675 bp, Klebsiella pneumoniae
atgtacgattttgactggagttcgatcgttccctccatgccctatctgctggcagggctggtgatcaccctgaagattacggtgatcgccatcgtggtcggcattgtctggggcaccctgctggcggttatgcgcctgtccagctttctgccgctggcctggtttgctaaatcctacgtcaacgtattccgctcaatcccactggtgatggtcctgctgtggttctacctgattgtcccgggcttcctgcagaacgtgctgggactgtcgccgaaaacggatattcgcctgatctcggcgatggtggcgttttcgatgttcgaagccgcctactattcagagattatccgcgccggcattcagagcatctcccgcggccagtccagcgccgcgctggcgttggggatgacccactggcagtcaatgcggctggtgatcctgccgcaggccttccgcgccatggtgccgctgctgctaacccaggggatcgtcctgttccaggatacctcgctggtgtatgtattgagtctcgccgacttcttccgtaccgcctccaccattggcgagcgtgacggaacccaggtcgaaatgatcctgttcgcgggcggcgtctattttgtgattagcctcagcgcctcgctgttggtcagctggttgaagaaaaggactgtgtaa

SEQ ID NO: 237204 - DNA, 1539 bp, Klebsiella pneumoniae
atggtatttgcctctcttcttgaacgccagcgcatacgtctgttgctggcgctgttgtttggagccagcggaacgctggctttttcaccttatgacttctggccagcggctatcgtttcgctgatcggtctgcaggcgttaaccctcaaccgacgcccgctgcaaagcgccgggatcggctatttctggggactcgggctgttcggcacgggtatcaactgggtctatgtcagcatcgctcagtttggcggaatgcccggcccggttaacgtcttcctcgtcgttctgctggcggcctatctctcgctctacaccggcctgtttgccggcctgctcgcccgtctgtggcctaaaactaactggatacggatggctatcgctgcccctgtcgtctggcaaatcaccgagttcctgcgcggctgggtgctgaccggctttccgtggctacagttcggctacagccagattgacggcccgctgaaaggcctcgcgccggtgatgggcgtcgaggcgattaacttcctgctgatggtagtcagcggcctgctggccctggccctcgtccagcgcaactggaagccgctggcgattgccgcgctgctgttcgccctgccgttcccgctgcgctatatccagtggtatcagctgctgccggcgcgcgcgacccaggtctcgctggtgcaaggcgatatcccacaggccatgaaatgggacgaaaagcagctggtcaataccctgaaaacctacctggcgctgacccagccgcatatcggccactcgcagctgattatctggcctgaatcggcgatcccggacctggagatcaaccagcagcagttcctcagcatgatggacgatctgctgcgcgcaaaagacagctcgctgatcaccggcattgtcgatgcgcgtctcaacaagcagaaccgttacgatacctacaacaccatcattactctcggcaaagataacccgtaccgctacgactcgaccaaccgctacaacaagaaccatctggtgccgttcggcgagtttgtaccgctggagtcgattctgcgtccgctggcgccgttctttgacctgccgatgtcctccttcagccgcggcccctacgtgcagccgcagctgatggcgcataacctgaagctgaccgcggccatctgctacgagataatcctcggggaacaggtgcgggataacttccggccggacaccgacttcctgctgaccatctccaacgacgcctggttcggcaagtccatcggcccgtggcaacacttccagatggcgcgaatgcgcgccctggagctggcccgcccgctgctgcgcagcaccaacaacggcattactgcggtgatcggcccgcgcggcgagatccagaagatgatcccgcagtttacccgcgaggtgttgaccaccaccgtgacccccaccagcggcttaaccccttacgcccgcaccggcaactggccgctatgggcgctgacggcgctgtttggtttcgccgcgctgctgatgagcctgcgccagcgtcgccgataa

SEQ ID NO: 237205 - DNA, 759 bp, Klebsiella pneumoniae
atgggaacagctatattcatggtgttgatggtttgtggctactggtatacaagccgcgatctatctactcgctttaaaattaaacgttcattcggctgggatgtttattttctcgtggcactttatggctgcatattcgtattgcaaggggtcatagcgacaggtattctttggctttttttacttttcctctcagtggctaataacgcgttaaacatcacaacccaaaaatatacagattggcaaattgagtttatgaattggagctttttaggaatacaagctccggtcattattatgttagcatttgccatactattttgcttgtatcgctcaaactgggcgaaaagtgcgaggttaaatggtgaagatagaaaaaaattgtataaacaactcgctcgggcaagtggcattgagcaattgctttaccaatgtatggaggaaggagaattagctctcataacgttaagatctagaagaatttatataggaatggtacacaccgccacacttgaatatgaaaaaataacaaatattgttttgattccaatgttgagtggatatcgtaacgaaaaaacaatggaactctgtattgaacataattatagcaaatggtattccgagcataatatcactcttgactcgcaacccaaaagtgccttggatttcaggagagtaattctagttgatcaaattgaaacaatttcactttttgatcctgctactgcaagcatgttctcaaagttagatcatggctaa

SEQ ID NO: 237206 - DNA, 1452 bp, Klebsiella pneumoniae
atgaagcaaaaaatacatagtgacagaatacactcactttatgaatcactagtccaacggagctctaatttagaaaatacatttaatacaataattagtgaaggaattaaagcatttggtttagaaattggcattataagtaaaatagaatacgacaagtatataattattaatattgtagggtacaatgatatccatccaggtatggtgttcgacctcgcggatacttattgccaaagtgtagtaacagagcagagaataataagtgtaaatgatgccgggcataacccatctctaaaaaaccatcctgtttatttatctatgtcacttgaatcatatatcgcagccccaatttttgtaagaaataacatttggggaacaattaatttctcatcaagaaagatcaaattcgaaaatttcactagtgaagaccatgaattcataggccttatggctgaaggggtcgcatctcttttagaaatagaaattttaaccaaagaaaaagaagagattattaaatctttaattgaatccaatcaaattcttgaaaaaatttttgataactcctctataggtatggcgattgtttcagaagaaggacggtggataaaagtaaaccagtcgttgactaatatgcttggctatacaaaagagcacttgttatcaatcgactttcaaatgattactcacgaagatgatctcgatactgatttgaagttattagattcgttgaaaaagggagatataccatcctatcaattagaaaaaagatatatcacaatcaataacgaacatatttggtgtcttttaagtgtctccatgattaaagatgaaaacaataacgcaatttattacatttcacaaatacaaagtatagatgaacgaaaaaaaatggagctagatataatcaatcagcgagaagcactcaagatcgcaaataaagaattagaaaaaatggcggcatatgactcgttaacagatatatacaaccgcaggaaattcatgagcctatttaatgaaattaaagtagactcagagaagtatcagtcgcctttatcgctcgctgttatcgatatagattactttaaatcatataatgatgacttcgggcatcaggaaggagatctggcgcttaaaatcgtagctaccagcttaactaattcgttgactgaaaagggaattcttgcaagatttggtggagaagaattcattgttcttttaccaaacacaactgaatctgaatgcgtagcaaaatgtgaagtactacgaaaatgcgtccaaggcattttaacattgaaaagaacaattaccatcagtatcggggccgtcagtatctatcctaacgaaggctgtaataattcattcgatgaattattcaaaattgctgatacaaaattatatgatgcaaaaaaatctggtagaaaccgtgttaaaaaccacagaattgattga

SEQ ID NO: 237207 - DNA, 765 bp, Klebsiella pneumoniae
atgaatctttcactgaaaaataaagttgcgctggtcaccggtgccgcgtccggtattggctttgcaactgcacgagcttatgccgaagcgggcgctgccgttgtgttagcggatattaattcagagctggtaaataaggccgcaaatgatttgatttcccgtggttttgaagctaaatcgtttacctgtaatgcggcaaaccttgatgaagtcgaagcgatggttcagttcactgtttcaacttacgtccatctggatatcgcttttaataatgccggtgtacagaataaacttgttgaaatcgcggacgccaccgtggaggactttgatcgcgttaatgccgtgaacctccggggcgtgtggggatgcatgaagtatgaacttcagcagatgcgcaagcaggaaagtggtgtcatcgttaactgttcttctatcggcggaattgtgggcggagcagaacgtgcaaactaccacgccgcgaagcacggtgtgcttggcctgaccaagagtgccgcacttgaatacgccggccggaacatccgtgtgaatgcagtttgtccgggtcttatctggacgccaatggtcgatgcgatggtcgcttcgggccagaaggaagctctggaagccatggtgaaagccgttccgttgcagcgtcatggtaatccggaagaaatcgccgatgcggtcctctggttgtccagtgatgcgtcgtcctacgtaacaggtcagtcaatttcgattgatggtggcctgaccatgcgctaa

SEQ ID NO: 237208 - DNA, 1023 bp, Klebsiella pneumoniae
atgtccttaattaagatttctcttttgtgtgcttcaatgctgatggcaggctctgttttggctgcacaaaaaatcccttcaactgttgcggagggcgtcaatgttttggggtcgcaaaaagtgacgtttaaaaatggcagcatcaccatggcgggcaatttatattttccgcctgattatgacagcgccaggaaatatccggcgatcgtagtctctcatccctggggcggtgtgaaagaacagacgtccgggctttatgcgcaacaactggcaaagcgcggatttattactctggcttacgatgcctcgcattatggtgaaagcggaggattaccgcgtgacctggaaaatccgtccgatcgcgtacaggatatccgcagcgccgtaggctatcttgccagcctgccgcaggttgatgccagccgcattggtaccttggggatctgtgccggtggaggctatacgctgcacgaagcgcagaatgatttacgcgtcagggctgttgccggtgtcgtcacttacgacattggcgatgcgacccgcaacggtattgaaggcctgccggttacggcaagcgacagaacgaagttaatgcaaagcgtggatgaacaactgaacaaagaggccagcggtgcaccggtgctggttcagcagttgctgccttcccgggataagttaaatgccagtacgcctaactttgtccgggaggcgaccaattattacctgacgccgagaggcgcgcatccgaatgccaataaccgttatgtcgtcacgagcaccggactccatatggcctactatccactggagcatatggatttgatttccccccgtccggtgctgttaattgccggagaaaaagctgaaacaagaaaattcagccagcaagcctatgacagagcgaaagagccgaaggagctggttattattcctggcgcttcacattttgatttatatgacaagccaaaatttgttaaccctgccttaaataaactggcagagttctttagcaaaaacctttaa

SEQ ID NO: 237209 - DNA, 759 bp, Klebsiella pneumoniae
gtgcgtcttgtactgcgcagtacacgaagtgttgcgctcacgatggcgggtcagcatctcgtcgatcgtctggtaccggagtttgatcagatcacgaatgagctggaatcgctcaatgacttacgcgacaaacctactggaacactgcgcattaccgccattgactacgtgatacgctcggttctgtggccccggttaaccccttttctgaaacagtatccggacattaccgttgagcttatcagcgagtatgaaagcgttgatattgcggcccggggatatgatgccggcgtccggtttggggccgatctggcccaggatatgatttccgttcgcatcagtacagatgttaagaatgcggttgttggttcagcagagtattttacgcgccacccgatcccgcaacatccgaccgaactgagccagcacagcggggtacgtttacgtatgtccacgtacggtgggttgtatgactgggagtttgttgagggcaagcgtgagttcagcgtcaaaatcaacgggccggtaatatgtaataacgtttacgacatactggaggcagtcagacggggtttcggtctggcttatctaccgctggatatggtacagccattgcttgacagcggagaactggtttctgtgctccaggagtggtgccctctctggccagggctgcacctttactacccaaaccggcgacagcattccagagccatgagcctgatggtggaggcgctccgctttcatgctaatgactga

SEQ ID NO: 237210 - DNA, 900 bp, Klebsiella pneumoniae
atgtcaggcgaaatattccgggatcttatcgcatttattaccatcgcccggcacagaagctttaccagagcggccgctgagcttggcgtttcgcaatcagcattaagccataccattcgcaatctggaagagcggatcgggctgcgtctgttgataagaaccacacgcagcgtttccccgacggaggccggaaaaaggttgctggaacgcgtgtcgcccaggctggacacaattgccagtgagctgacctccatcagggatttgagccgcaccattgcgggcacggtgagaatgactgtctccgattttgcctataagacttttgtatggccacgcctcagcgaaacgctgcgccattatccggacgtcaggcttgagctctctcttgatacagcgctgaccgatattattacggagagatttgatgccggtatcagggacggtgattcgcttggcaaaaatatggcatctgtgcgtatcagcccggatttacgttattcagcagttgcctctcccggttatgttcaggataaaggactgccgccttcacccggtgctttggctcagtattcctgtattaatacccgctttacgcctgggggaagcacaacgccatggatactgaaggaaaatgaaatcgggcagattttccggcctgcgggccatctggtctttaattcatattatgctgcgatggatgcggcgctggcgggttacggaattgcctttttaccggagatactcagccagccatggctggatgcaggaaaacttctgccgatcctgcctgaatggtgggcagaacgaccgggtttttatatttactatccgggtgaacgtcagctgttgcctgcgctctccatgattgttgaaacgctgcgatatgagccgccagtataa

SEQ ID NO: 237211 - DNA, 1689 bp, Klebsiella pneumoniae
atgaacatacgttatccggtacggaaagccgacggacgggactataagaactatgacgagctgctgaccgatatccgcaaaaatgcccacggttggtgggtacttggcgtgaatcgttactggcacggggggatccacatcgggacgtcatcgtctccggcctcggtactgaatcaggacacgccggaaaaatccgtgccgctccagttcatgatggacggcgaggtggtggcatggcgggttaaccacgattacgcgaatatcgagtgttatcaggaacgccccctccgccagtccggcacctttgtgctggtcaggtctgtgtacaagcccgacgagcaggatgaatcctcctggctgacgctgtaccagctttacatgcacatcgcgccattgtcagaatttccgaaacgcccgctttaccgggtcacgcagaaaggccacggcgtgcggatgcgtaaacattcccgccatgatgacagccgcgaaatcgcgccggacgtgctggcaaacaaacacggccacgccagaacgctcgttcagggcaacacgcttgccgtactgcaacagaaatcgtttttactggaacgacggccggagccgtttgctctggtgcagcgtcttcaggatggtaaacccgccggagaacttttctgggtctcgatgcgcccggaatatctggagcctgacggcgaatgttacgtgtgtctgcctgactggatgcacagtgcgctgaatcacggcgtgtttgatgatgtggtggtgccgcctgtgccgctgaaagtgatggtgaaagcaggggatgcggtcggattcctcggcgctcaggatctggctgacgaagataactatccgcagattattaccacggactataaagcccatatcgagctgctgagccttgatgagcatgtgccggatgtggtggcaaacgtgaaggggattaaaacgggcaaacagttcattaagctgaagctgaaacgcccgctgtacctgcgaaacggggagggcgaggaaagtacctttgagcagatgagcgccattacccgagctgatgccgggaaaattattccgcgtgatgccgcgtacccgtttacggataaaaccggggtcacgtactttcagatccgcccgcatacgtggatgcaccaggacgatgtggagcagctcagccagcatgatttagccgggctaaactttcactgtattgatgcagaacacacaaccgactttacccgcacgctggatgaacgctggctgattgacgccctgaaaagcatcagttcgcactttgatggtgaaaaagggccacaaagttcacaggccaaaatgttttatgacagcctgatccgtaatgctgaaaacagaagaccgcccagcccgtatcccgataaatctcaggatgaattactgttcggtgcattgcataccaaccagatgaacatcccggaatatgcgcgacgcctgatagtgaaacacgacagcgactggcacagtacccgcgatgatacacgctggtcatcggtatttaaggtcagggatgaaagcccggttgtgaagatggccaacgggggatttctggatgcgacgcgctggatggataaggttccgccgttcgccagtcagcggtcagtatggcatttccatccccttgaattcttggaagcgattaacccaaaaggaaattga

SEQ ID NO: 237212 - DNA, 372 bp, Klebsiella pneumoniae; identical to SEQ ID NO: 127361

SEQ ID NO: 237213 - DNA, 813 bp, Klebsiella pneumoniae; identical to SEQ ID NO: 127360

SEQ ID NO: 237214 - DNA, 918 bp, Klebsiella pneumoniae
gtgatagaattataccttttagatcgaaacataattgatctaatgaataggcacaacaagtcctatgacatcccagatgccaaaagaattagcatgcttaacaaactaaaggaacttgatgtcaaaggtaataagttttcccccttactatcactaatagaaggtaaaacttataaggaacaagatagtgatggaaagcttaaagtcataaaaacaccaaacaaaaaaataagagagttaatattaaatgaaagtaatattgtaaaatcatttattaaaaatgccgaaagtgattataattacttaacacgaattgcaaacaaactctctaaaatattatatgaatccgagactgatagactaataaatgaaaaaatagaattccttaacaaactacaagaaagcataggtgaaatacgaagggtagaacagcgagacaaagcatataatgaatttaaggatatagtttctcactttgaagagttcaaaggtcaacctatgaccgtagttgctttaatgtatattttcgggagtcaaagggcagctaaaatactaaaatttcaaaataaaaacttttttgcttataacccaatcgcagatttcaatcattacaaaaccatttgccaacttaaatttgatgataatgccaatgggaaaataaacgttcattttctctcgcttgattctgatattgaattcattcaaaaacttatccatcctaatatgtcaaaagtaagcaccttaacaaattacacaaatttattagcaacgaaatggaatataaataaagagcttgtaatgaatgaaatacctgaaacgaaaggggagattaacaaccaagcattgttttactcatgctttaaagacttttatgggcacgatattcaaatacctttaccatcaggcgataaagggtaa

SEQ ID NO: 237215 - DNA, 159 bp, Klebsiella pneumoniae
gtgaattttatcgtggaaaagtacggcctggtgcgtactgaccgtcacggcttcagcgtgacagagcagtctccgttcatcggcagcatcgatatgctccgcgcccggaagactaaggataatttaccgctgctggaagaccagaacccagtacgatga

SEQ ID NO: 237216 - DNA, 1629 bp, Klebsiella pneumoniae; identical to SEQ ID NO: 112242

SEQ ID NO: 237217 - DNA, 336 bp, Klebsiella pneumoniae
atgtcgactactgaatttttgaaaacgctggattatgaccagctgcagttctgccgggataagtgcgacgaaatgctgcgcgctatccaggaagaacaaaagaaggtcgcctgggcggtaactgatggttcgttcaactatggctggtaccgaactgaggactacctgaaagcggttgaatgtttggcgcgcgaagcagagaaccgctggaaagaagagacggaagaagacaaaagcaatccgcaaacacgcaattggttgaatttttctatcagggggcagcggctgccggcgtctgagtacgaggcgttatttgccgatggccagtgggggtga

SEQ ID NO: 237218 - DNA, 771 bp, Klebsiella pneumoniae
atgaacgcactatctgttttctcatttcaggaaaaccaccccgttcgggtggttctggttaatggcgaaccgtggtttgtggccaacgatatttgccttgctttaaatatccagaatgtcacgcaagccatttcccgcttagatgatgatgaacgatctatgtttaacataggccgtcaaggtgacgctaacatcgtctcggaatctggtttgtatacgctcatcctccgctgccgcgatgcggtgaagcagggaacgacggcttggcgtttccgcaagtgggtcaccaacgaggttctaccagcaattcggaaaagtggtgaatacaactacgttgagccaatgccaaaaagcgccggtgaaccattggactggcggcaaaaggaagaattacgcggcctgataaacgatatagcccaaagttttcagtacaggaacgcgtggatcagtggcgtctggctggcgcttcgtcgcgcctgcaggaacccttcacctaacccgattacggtcgacgatctcccggctatcattgccgaattgcgccggatattagcggcggcagaaacagcgctgggtaatatgcgagcttacgaacgggagctgctgcgcaaagtcgttcgcggtggccatcagagtatgtcgtgcggggagttgccaattaccgatatcaatacggaaatggagaaggtgctgccagcgcatttcgagctggccatcaataaactggaggccttatccacaaaattagaggctcctgccgtctcttcctga

SEQ ID NO: 237219 - DNA, 579 bp, Klebsiella pneumoniae
atgaggggatctctcagggcccagcacccgggcatcaccctcatgaccaatgaaagcccgtatgagtcgctggtcgccgatatgcgggcaggtaatatcgattttattatcggcgccctgcgccaggatgaagatctcccggacctctgtagcgaagcgttattcgaagaggatatgttgattttactgcgtaataaccacccgctgctgcgccatccggacccgcgcagccagctggcgacagcgcaatgggtgctgccgcgcgccaacgcgccggcgcgcaatttgctggataaggcgtttgtcaccctggggctgccgctgccccagccgacggtggagaccggggatgcggcgatggtgcgaggattgctgcagggctccgacatgctggcggcggtctccgccagccagatgcgttttgaaactgacaatgggctgctcagcgtgttgccggttcccctgcccgataccacccggcgtatcgggctgacgtttcgcgccggcagcctgccctccccggcgacgcaggcgctgttgcgttttatttatcagcaggttcaggacggggccgtttaa

SEQ ID NO: 237220 - DNA, 1488 bp, Klebsiella pneumoniae
atggttacgttttggggaaattatgaggggatctctcagagcttagcattccacaagcttgcaaagactggtgctcaattctacatgctcgggcctcacattcagaaaatctctggtttggatgactatgagtaccacttcatcccatccgactacagcactgtcgcagtcgacattcaaaatttcaatctggagatgcgttccgaagagcgaaaggaaaaattgcttgagttggtcacaactctagactctcctactttaatctactgtcaggccccccctagtgcgaacagggtcgccgagtatttaattcaagaagccgggttgaagccagtgccagaaacgcaggaaatagctgcatgggtctccaagcactaccaccctgaatggaacgttgccaaggcattatctctgggtatcgggattcaccatggaggagtgccgcgtgcattgcaacagtacatcgttaagttgttcaatgatggcatcatcaagcgaattatctgtacatctacgatgatcgaaggcgtcaacacatcggcagagaacgtgatcatttacgaccgccgcctaaatacttcaaagttcgactacttcacttacaagaatatttccggtcgggcgggccgtatgaataagtacttcattggtaaagtcttcatgctcgaagcacctccccttgagcagggtctcaccgttgaatatcccatcggccatcaggatgaaaactccccgataggactcatcatgcaactggagaacgaataccttactgatatttcacgtggtaggcttcaagatgcatacgccaacccgatactatcgccgtcaaccctgatagaaaatcgacacgttccgattgagcggcaagtcgaggtcgcagaaatgatcattcgtgacctaccggatggcagcaagcttcttgactggaaaggcatccctgagacgaatcagctcaattacctatgtgaactagtctacagtctggaaggcggtaatctgatggactatgggatatcatctagcttgcaattaatgtggcacatcaatgagctccgaactcagaaaaatctgcctgcttacctaagagacgcggtggagaatcgacgagaggaacacactcccagtgaagcgatcaatctacgcctgaaattcatcagaaatatggtgtgtttccgattgcctcgggacatcatggccgtaagtaacattcaggccgacgtgctggcgaaaatagggatcgagccgggtgattttagcttctttgctgagcagcttgaaaatatgttcctcgacccactactcaccgcgttggatgaatacggaattcccacacagatctcgactcagatcaagaacctcatcttgccatcggaacatctgaacgacctactggcgaaacttcgggctctggctcccagagtagagagcctccaactgacaggttttgagaaaagcttaatgagctgggctgtgtccgaaatgtag

SEQ ID NO: 237221 - DNA, 351 bp, Klebsiella pneumoniae; identical to SEQ ID NO: 222423

SEQ ID NO: 237222 - DNA, 273 bp, Klebsiella pneumoniae; identical to SEQ ID NO: 222424

SEQ ID NO: 237223 - DNA, 486 bp, Klebsiella pneumoniae; identical to SEQ ID NO: 136569

SEQ ID NO: 237224 - DNA, 150 bp, Klebsiella pneumoniae
atgactatagccatagccataataactgctagctttcttcacaacaccgttcaatatgcaaccttttacttgaatgccagtattttcaaatctcttaatacttacctctatttctttaactgtattcagttcaaaacgggcaacaagtaa

SEQ ID NO: 237225 - DNA, 276 bp, Klebsiella pneumoniae; identical to SEQ ID NO: 5786

SEQ ID NO: 237226 - DNA, 162 bp, Klebsiella pneumoniae; identical to SEQ ID NO: 196661

SEQ ID NO: 237227 - DNA, 489 bp, Klebsiella pneumoniae
gtgggtacgacgcgattttttaatcagaacgtcaacccgaatgaaaattggccctggtcgcaatgggtgtacaccggcgaaaacaaaacgatccgcgtcggcaaagcggacggttcagacgtcggcgcgaccggcggcagcgataccgtcacgcttcagcaggccaacctgcccgccgtgcagattgacgtgagcggcgaaaccagcgagcagggagagcagaagcttaagaccacgcgcggcggtgttcacaatcatggtggcgtggccggtaaggatgacccgtgggaaattggcggtgatgtgcgtcagctctttaacccgaaagagctgggtctgaccgatgatgccggagagcacgaccacgaagtcacggtaccggagcacaaacacacgaccagcggcaaaaccgccaacctcggcgagggtgaatcgttcagcgtggtggaagcccacaccctgctgatgtgctggagccgcgttgcctga

SEQ ID NO: 237228 - DNA, 183 bp, Klebsiella pneumoniae
atgatcgccccgcccaccgctttaaattttgcgggcatcgcggctacatcactcagaatttcatcccatttgctgcttatggtctgcttgatcacagcccaggctactgacacccctgacgtgatggcatcccacagtgctttaaacttcggccccagcgtttcccagttctgccagatatag

SEQ ID NO: 237229 - DNA, 165 bp, Klebsiella pneumoniae
gtgttccactttgaaacccaggctcaaattatcatccaggcgctgccggggcagagtgcgcaggatattgcgcaggaggtagcgcgacagattgatgagcgcgagcgtcgtatgagggctaaggcccgcagcaatttcagtgatcaagggggatacgattcatga

SEQ ID NO: 237230 - DNA, 771 bp, Klebsiella pneumoniae
atgagcaaaggaaccattatcggtctgtgcgatatcactggcgtcatggctgagccatgggtcgaagcaggttatcgtgccgttctggtggacccgcagcaccctgagacctcgatcgacggtcctgttgagcgcatatcggcaaccatccttgaggcgatgccgcggctatctcagatcatccgctctgagaacgtcgtcatcgtcatcggcttcccaccatgcacggacgtggctgtttccgggtcccgctggttcgagtccaagcgcgccaaagacccgcatttccagggcaaggccgcgctggtcgctgagcaatgccggatggttggcttggcggctggctgcccgtgggcattcgaaaacccggtgagcgtgttcagtagcatcttcggctcggccgattacacgttccatccgtaccagttcactgggctgtgcgcggatgacaactacacgaagcagacatgcctctggacgggtaacggtttcaaggcgccggcagagaatatgcacccgatggttgaagcggctatcgacgccgtgaagctggcctgcggccgcatgatgccgaagaaaaaggcgatcgaggccatatccggaacgtcctttgccggattggtgactgactggtatccggacaaccgcattcacgaatgcccacccagcgacgagcgcgccaacattcgcagcgcaacgcctcttggatttgcaagggcggttttcctttcgaatgcaccccatctcaacaagaagcgggaggcagcatga

SEQ ID NO: 237231 - DNA, 972 bp, Klebsiella pneumoniae
atgagtatagcaactgctgtttccgctatcaacgtgcctttctacggttctgatctgtatgttgtaagtgttgataatgaggcatacaccccgatgcgtcctatcatcgatggcatggggttaacataccaagggcaggccgataagctgaaatcacgctttgccaaaggggtcagggaaatcatgatccctacaaaaggtggtgagcaaacaatgctttgcctggctctgcgtaaacttaacggctggcttcagactatcagccccaacaaagtccgtcctgaaattcgcgataacgtcattcgctaccaggaagagtgcgacgacgttctttacgagtactggacgaaaggcgaggttaagaacccgcgcaaggctaaaaagtcactacccggcaaaatcacccctgagcagcaggaagccattaagcaactggtaatgactcgcggcaaggcgctgccgaaagagaatcaggccaaagcgatgatcaccatgtggtcttcactgaaatctcactttggttgcagctacaaagaaatcaacgacgaccagtttaccgaggcgctttctatcgctgcgcgtgtgcctcttgagggtgaattccttggcaagcaggaaacactgccagcgccgaagtttgacgttaacattccgcttcaatggtggatcgataacaacccgttggttcgcagtggcaacctgtcatttgggaagtctctaacagccccgtcctttgacgtgacgatggagatgctttgtggtgacaactcgacatctgcggccattcgcctgattaacgttctggaagaggccggctttgatgtgtcggcgccgaaggctgaaattgtggcgatgcgcaaacatctgggtaatgtcgagtacggtatgaaggctatcgcagatgcttgccgccgggcggggaataaaaccatctcgttccgtggcggaaaggctgaatatgtgattggctaa

SEQ ID NO: 237232 - DNA, 789 bp, Klebsiella pneumoniae
atgaaaaaatttatagtcatttcagcatttattctttttgccttatcttcgcccgccatatcaaagcagataacatcccacttaaaaatggttgatggataccttgatggtacgctgacggcaaatgatgacgagccaatatggtacggggattatgagtttgacttccttgaaggaatgcacttcacttgcaagatggtgtcactacatacctctggagcagacccaataaatctaacatcagttagctatcgatgtcagaatggattctctgtcgttatagagaaaaagctatcagaaaaatatgccaccattaaaactgaaagtataaatttcaaaactggcgagaccatagatcgcggagagataaaggtaacatcctctgttccgttaaccatgattgaacacagcaactataacagcaaaatgtttgataaaaggataatggacagggagaggtggcttaaagataacaccatggatgtttttgatgcttgtaacataattatgtcatcacatatgcttgcatatcagcttgttaatgctggcgcaccaaatagcaacgaaggaaaaaaacaaatgtctgaagcgttatcaaaattatatccaaaaaatggagacgcgatgacgcaggcaatcatagattttcactcaaaagataaagatccatttggaatgccgcttacttttggactgaaaggtagacttatccagatgtgtagggcagagcctgaaaattacataccagagttcggcccgttagtaatgtccggcaagatatttcgatag

SEQ ID NO: 237233 - DNA, 174 bp, Klebsiella pneumoniae
atgggtatgcaatgtcttctcgccaaagtaatggagcgcggtatcttccgcgtgccggcgcgccgcaagcgcaaggtcgaagttaaaccatcagatattcccacctttcactatacggctcacctggcagatgtccgctggctgcgccacgctgccagaaggaaaattgcatga

SEQ ID NO: 237234 - DNA, 669 bp, Klebsiella pneumoniae
atgagcatttatcaacgcattaacggcgcagactggcgcaacatctgggttgttggcgatctgcatgggtgccatacgctgctgatgaatgagctggaaagggtcagttttgacccatcgcgtgacctgctgatctcggtaggtgaccttatcgatcgcggggcggaaaacgtcgaatgccttgagctaatcacaatgccctggttcatggctgttcgcggaaaccatgagcagatgatgctcgacggactatcctcctccgggaacgtgaatcactggctcgccaacggtggcggatggttctttaaccttgactacgacaaagaacgcctggctatcgcgttggcccatttggttgctggtttgccactcatcatcgaggtagtgaccgagggtaagaaggttgtgatatgccatgcggactacccgcataaccaatatgcgtatgacaagcccgtcaatgcagaacaggttatctggaatcgtgagcgagtgagcgcagctcaggatgggattgtgaatgaaatatccggtgcagacctgtttatttttggtcacaccccggcacgtcagccaagccagtacgccaatcagatgtatatcgacactggggctgtattctgcggccgcctgaccttggtgcagatccagggtggtgatcatgcgtaa

SEQ ID NO: 237235 - DNA, 177 bp, Klebsiella pneumoniae
atgcaacaagaagcattaggaatggtagaaaccaaaggcttaaccgcagccatagaggccgctgacgcaatggttaagtcggccaacgttttattagttggctatgaaaggatcggttcaggcctggtgctgatgaatcccctaatgatttttatcaaaatcattaagttaaggtag

SEQ ID NO: 237236 - DNA, 267 bp, Klebsiella pneumoniae
atgtttacgcggaaccagtacgccgccctgtttcatgatgtaggtggcaaaacacccagcatcggctgccgccagcacggcatccagacgcgggttatccagtaccggcgcaccggcttttttatcgccctgctgtcgcgcggcctggcctgccagcaaacgcagctcgcggtatgcctgacgccccggaataccgaaaaagcggaattgctggacgcgatgcagcgaagcccaggcattgacatgttcggcattgtcccgcagtga

SEQ ID NO: 237237 - DNA, 228 bp, Klebsiella pneumoniae
atgggacggcatggcgttaacgtcagccagaatgaccagatcgggattaaaacgctgctgctcgcgcgccattttggcatggctaatcagccggtcctgctccatttcacgctggacaggatcgcgggattcattgaagaaatagcgttcccagacctcatcgctcatcgcctcacggcgcagctgctcctgctcgttgtcgctggcgtagagagcgatcaggtttga

SEQ ID NO: 237238 - DNA, 201 bp, Klebsiella pneumoniae; identical to SEQ ID NO: 136974

SEQ ID NO: 237239 - DNA, 2115 bp, Klebsiella pneumoniae
atgaatattacagaaaaaaccgtgtgggaaggttcggtttaccagctttcccgcgcagacaaagtggaaggcgggacgaaaggcgctgcaaatatccaggcccggcaacttgcaaaccgtacgcagttcctgaaggtgctgattgagggtatttccgattacagggagtacacgttctttgaaaccgaagaggatccagacggcaccattgcgggattagctggcacaccacaaggtaagctgtttcgcgtcgccctgggcgagggtgaggcgctggcatttcgttatttcctgaatgatggtggcgttgccagggctgttacgggtttgctcggtcagggatcgattatcaacagcgtccgcttcttcccgtcactccctctggctgagaacgatttatctgcgggaaatattccagagggtggcaattgctgggtgataaaccatagcgactcatcccttgcagatgagtacgcgaatgtttctggcgcactacagcagactggccgaaaaatgctgtctcaggaagctgttgaagccgctcttcaattaattgctaagctaacctcaagcggctttgtggatgacaactttttccctttattcgtcgatggcgccggtagtgttccggcgtggtgggatgacggtttcgccgtttcaagagtcgctatgtctctgtaccagatgatttatacggacgtccgcgcgcgtctgggggattcagtgaatgccggggttagtggtgtgaataacaccttcttcccactggttgtagatggcgacaataatatccccttgttctgggataacggttttaacgtgtccatgatttctgaggggtttcagcagaaagtatgggcttacatcaacgccataattgaaaaggccctgaatcagcgtatcccgctggttgatccctccttcgttccgggaataactgacgctgccgattctgtcccgttctggttccaggacggcgagtttgacgcgacgggtatcgggccaaacatcaggggcatttttgcacggtggtatcaacggcggatgtacaccgccgcttataacattccgctgcataccgacgggcgcacgctatggcgctggaaagcgaagaaagcgcagcttaaagcgggtctggctgtccgcccccactttatgttgacaggcgacagctggacgcagaataacgaactggcggccgctatcgctggactgctgcacgcggattacggcgatgcgggtttaggctggcgtactgttaactacggtgctgcacgagacggttcgaatattttccgctctgccggatgggatttgtacgactcctcaccgaccagcggagcgccgctttatggctgcggtattgatggccagtcaattaatacgacgacaaacaccgcttatttcaacgtgacgaatgtacgctgcactgactgccgaatttactatcaggatcttaacgggaaatttcagtacggctacgacgttggcggggtcacgcagtggactgaggttgtctgcgggaataccggtgcgacaaaatcggtgttgctgacgggtatgactgatgaggtcaggacgatttacgtcaaaaccgacggcaacgccgggcgcgtagctattcatggtttctatctgtggcgcagcggcgtggcaggatgcgtgatgagcaaagcagggaacgcggggattctggccgatcagttcctgctgttctcagacaaaatcgcggagtacctgagcacaatgcagccagacgtcatttgcatcgtgatcgggaacaacgattaccgaatttcagaatcgacagccacattccgtaccgcactgcaaaagtatatggccgcctgccgcgctgtgctccctgacgtgggatttatcctcatggcaccaccccgcacgaacggaacggcggcaacgccactcgttgatttccgcgatgtgatgtacgacctctcgcagacgttaaatgtcgagtttttcagtatctatgaccttttcgacacctgggcggaaatgaacggtctgggctgttttctcgacaacctgcaccccaatgcagtgggcggcaacctgattgcctcggcgttgaataatgcactgattaaaggctga

SEQ ID NO: 237240 - DNA, 1002 bp, Klebsiella pneumoniae
gtggaagtggaagaactttccagcaaattcaccgttgagccgtcggtacagcagacgctggaagaccagatacagcagtccgctgcatttctgacgctgattaacatcaccccggtggatgagcagtcaggccagctactggggctgggtgttggcagcaccattgccggaaccacggataccaccaccaaagagcgagaaccaactgacccgacggtgatggcggacgtggaatacaaatgcgagcagaccaactttgacacggtgctgacctacgcaaagctggacctgtgggcaaaattccaggatttccaggtgcggatccgtaacgccatcgtgaagcgccaggctctggaccgcatcatgatcgggttcaacggcgtgaagcgtgccaaaacctctgaccgcgaagccaacccgatgctgcaggacgtaaataagggctggctgcaaaaaatccgcgaagatgcgccggatcatgtcatgggcagcgaaaccaaagaaggcgtgaccaccaaaggcgccgtgaaggttggtaagggtggcgattatgccaacctggacgccgtggtgatggatgcggtcaacgagctgatcgacccggtgtatcaggatgatgatgatctggtggtggtctgtggccgtgagctgctgtctgacaagtatttcccgctggttaacaaagaccaggagaacacggagaagctggccgctgatctgatcatcagccagaaacgcatgggtggcctgcaggctgtacgcgcgccgtatttccctgcgaatgcactgctgatcacccgcctggataacctgtccatttactggcaggaagatacccgccgtcgttctgttatcgataacccgaaacgtgaccggatcgagaatttcgagtccgtcaatgaagcgtatgtggttgaggattaccgctgcgcggcgctggtcgaaaacatccagatgggggatttcagcgcgccagctgtaccggaaggcgagggggcataa

SEQ ID NO: 237241 - DNA, 990 bp, Klebsiella pneumoniae
gtggaagtggaagaactttccagcaaattcaccgttgagccgtcggtgcagcagacgctggaagaccagatccagcagtccacggcatttctgaccatggttaacgtgattggtgtggcggagcagtcaggccagcttctgggcctgggcgtcggcagcaccattgccgggaccactgacacgaccacgaaggagcgcgagccaaccgatcccactgagatggttgatgttgagtacaaatgcgaacagaccaactttgatacggtgctgacctacgcaaaactggatatgtgggcgaaattccaggattttcaggtacgcatccgtaacgccatcgtgaaacgtcaggcgctggaccgcatcatgattgggtttaatggcgtgaagcgtgccaaaacctcagaccgtgccgccaatccgttgctgcaggacgttaacaaaggctggctgcagaaggtccgcgaagatgccccggattgcgtgatgggcagcaccacggcagaagatggcactaccaccgcagacccggtgaaggtaggcaagggcggtaaatatgccaacctggatgcgctggtgatggatgctgtcaatgagctgattgaccctattttccaggatgacgccgaactggtcgtgatctgtggtcgtgagctgttgtccgacaagtatttcccgctggtcaataaggaccaggcaaacacggaggcgctggctgctgatctgattatcagccagaaacgcatgggcggtctgcaggccgttcgcgccccgtcattcccggctaatgccgtactgatcacccgcctggataacctgtccatctactggcaggaagatacccgccgccgttcggtcattgataacccgaaacgcgatcgtattgaaaacttcgaatccgtcaatgaggcgtatgtggtggaggattaccgctgcgtggcactggtggaaaacatcaccatcggcgacttcagcgccggtgccggagagtaa

SEQ ID NO: 237242 - DNA, 858 bp, Klebsiella pneumoniae
gtgaactatggagcctcgcgggatggttcaaatatctttcgctctgccggctgggatttatatgacgcctcgccaacgagcggcgccccgctttatggttgcggcattgacggccagtccatcaacaccaccacgaacacggcctattttaacgtgactaatgtccgctgcactgattgccgtatttattatcaggacctgaacggtaagtttcagtacggctacgatgttggcggggtcactcagtggactgaggttgtctgcgggaataccggcgcgacaaaatcggtgttgctgacaggcatggctgacgaggtcagaaccatctatgtcaaaaccgatggcaacacggggcgtgtcgccattcacggattttatctgtggcgcagcggcgttgccggttgcgtgatgagtaaggccggtaatgccgggattcttgccgatcagtttttgctgttctccgacaaaatctcggaatacctcagtaccattcagcctgacgtgatcgctatcgtcattggcaacaacgactatcgcatttcgaccggaacccagacatttcgcactgcgctgcaaacctatatggccgcctgtcgcgctgtactgcctgacgtgggtttcatactcatggctcccccgagaaccaacggcaccgcggtaacgccgctcgttgatttccgtgacgtaatgtacgacctctctcagacgctgaactgtgagtttttcagtatttatgacctgttcgacacctggacggaaatgaacgggcttggctgcttcattgataacctgcacccgagcgccgttggcggaaacatgatcgcttcatcccttaataacgcgctgattaaaggctaa

SEQ ID NO: 237243 - DNA, 219 bp, Klebsiella pneumoniae
atgaacgcctgttgctgctcggtggccgccgtcggttttaccggcttacagatcacgatatgggtctggttcctggtagacaccctgcctgtatcgaaacagttactgaaattacacacagcgccaaaggtcggggaaattgtcggtgtgcctaccatggtcagcggagtggcgctgtcagccagattcctgatgctcagcgcggcattaccgccctga

SEQ ID NO: 237244 - DNA, 228 bp, Klebsiella pneumoniae
atgaactgggagcggctgcagcgtggtgtggcgtcattctctctccagctggcagaaggccgcgcggatctctatacggaaatgcccgttaaggttagcggctttaaacagcccattgatgatgcggaatggaccatcacaacattgatgcacacggtgaacccggatagcgggtttacaaccagtatcgaactggaagtgaagattgatgatttagaaatgagctga

SEQ ID NO: 237245 - DNA, 942 bp, Klebsiella pneumoniae
atgtttcgtcttgatataaatggtttgcgcttcattgctgttgcgatggtcgtactttttcatttcaaaataggatatttttatggcggctacgcaggggtagatgttttttttgtcatatccggttttttgatgagtgaaatttgcaagaataaagttggaacaaaagaatgggttattgacttctataaaaaaagatttaaaaggatttatccagcgcttgcaatatgcgttttattttcttttctcttagccatcacatcgactcctccgtcgatgttaaaagggttattctatcaagttatatctgcgttaacatttacatcaaacctatattatttgaaagcaacatctggttattttactgatgctgcggatagttttgtttttttacacacatggtcattgtcagtcgagtggcaattttacttagtttttccactcttgcttttcttggcaagcaaagtgacgagaaaatttggtcaagttatattttatttaattttagtattgatatctttttccatttgtattctacttactaaatataatcagatatattccttttatcttctgccaagcagggcttgggaattactaatcggggtgttggcctcaactgtcaatattaaaaatagagctccaagaatcacagaggcagtttgtcttttcgttttaattgctttcactgcggttgtgaaggaaagtagtaattggcctgggttcgaaaccctcattccaacattggcaacagcttttttattacatgctaatgtagggaatgaaaaaactctgttgagagctaaacctttacagtttattggctcttgttcttattcaatatatcttttccattggccagttgtattttggtattatttgaataatatcgaattcaatttttttaatcagcaaataaaagttttactttctttaaattag

SEQ ID NO: 237246 - DNA, 606 bp, Klebsiella pneumoniae
atgattttgataaaaatcattaggggattcatcagggcgaagcatcaacgcactatcgtctttatttcccatgaccttgatgaagccatgcgaattggcgatcgtatcgccattatgcaaaatggcgaagtggtccaggtcggcactccggatgaaatattaaataatccggccaatgattatgtgcgcaccttcttccgcggcgtggatattagccaggtattcagcgcgaaagatattgcccgccgcagcccggttggcctgattcgtaaaacgcctggttttggcccccgttcggcgctgaaattattacaggatgaagaccgggaatatggctatgtcatagagcgcggtaatcgctttgtcgggattgtctcgattgattctctgaaaacagccctcagcgccgggcaggggatcgaggcggcgctgattgaagccccgctggcggtggaagcgcaaaccccgctcagcgatctgctctcccacgtcggccacgctccgtgcgccgtgccggtagtggatgaagaacaacaatatattggcatcatttccaaaaggatgttgctccaggctttagatcgcgagggggtgaatcatggctga

SEQ ID NO: 237247 - DNA, 2394 bp, Klebsiella pneumoniae
gtgacaactgaaaaacaaatctcccgtttgacgtggttgcttcagcctccgggaaagatcaatggaaagaatgtcctgcaacatatcgaccgccttaacgccattgaagcactggcgctaccggaaggcgtggataaaacagttcatcagaaccggctgctgaaactggcgcgggaaggccgcaaaatgagcagccgggatttagctgatttttcccctgctcgtcgatacgcaacgatggtctgtgtactgactgaggccagagccacaatcattgatgaaattatagaactgcatgaacgcatactgggcagtatgttcagccgggcaaaacgtcagcaggccgaacgccttcagaaaacgggcaagctgatacagcagaaattacggcagtatgtttccgttggacaggctatcttggatgcacgcaacgcaggcgaagatcctctgtctgctgttgaacagatattaccgtgggaagattttgccgccagcttggaggaaacccggctccttgcacgtaaggataatttcgaaccgcttcatcttattaccgaaaaattcagcacgctgcgcaaatattcgtcccggttgttatcggccctgcaactgagggccactccggccgccttatctcttaatgatgccctcgatactatccgtgaaatgtatcgtaagcagctaagaaaggttccctcatcagcgtcactggatttcatccctgagagctggaaaaagatggtgatcaccccctcaggtattgaccggcaatactatgaaatttgcgcaatgaacgagctgaagggggcgctgcgggccggtgatatctggatccggggttcccggcgctacaaaaacttcgatgactatcttatgccaggagataatttcgaaaagttattaaataataatcagttaaatatacctgtcgaaacagattgcgaagcttaccttaaggcaaggctgacgctgctggcctcccgcctggaggaagttaacgcaatggccgttaccggggatcttcccgatgtggatatttcagataaaggtctaaagatcaccccgctggataacagcgttccttccacaatatcaccactggccgacctgatttacaacatgttgccacacccaaaaattacagaaatactggatgaagttgagagatggacagccttctcgcgacattttacccatctgaagaacccgcttacccgcccgcaggataaccgtttgctgcttaccaccatcctggcggacggcatcaatctggggctgaccaaaatggcagagtcctgtccgggaaccacgcgggcttcgctggaaaacatgcaggcatggtatatccgcgatgaaacgtactctgctgcactggctgaactggttaatgcccagaagtcacgtccgctggcggcattatggggagacggttcaacctcatcttctgacggtcagaattttcgggttggcagccatggccgctatgccggtcaggtcaacctgaagtacggtcaggagccgggggtgcagttttatacgcacatttctgaccaatacagtccgttttacaccaaagtgatcagccgtgttcgtgattccacccacgtacttgatggcctgctgtatcacgaaagtgatcttgaaatcacggaacattacaccgatacggcaggtttcacggagcatgtttttgcgctgatgcatctgctggggttcgcttttgcacccaggatccgggatcttcatgacaagcggttgtttattcaggggaaggctgataaatatccggctctacagtcaattatttccacaactcaactgaatatcaaagagatagaaacccactggaatgaaattctgaggctggcgacctcaataaagcagggaactgtgaccgcttctctgatgctgaaaaagctggccagttatccgaaacagaatgggcttgccaaggcactgagggaaatcggccgcattgagcgaacactgtttatgctggactggtttcgcgatccttcactgcgtcgcagagttcaggcaggtctgaacaaaggggaagcccggaatgcccttgccagagccgttttcatgcatcgtctgggcgaaataagggatcgaggtctggaaaaccagagttaccgggccagtggactgacgctgatcaccgccgcgatcacattgtggaataccgtatatatagagaacgccgttaacctgctgaagaggaaggggctacatctcaatgagcaattgctgtcacacttgtctccgttgggctgggagcacattaatctgacgggagattatatctggagaaacaataaaaaactggcagaagggaagtatcgacctttgcggccggttgatatcagccagtacaaaaaacaaccttaa

SEQ ID NO: 237248 - DNA, 1755 bp, Klebsiella pneumoniae
atgacccccgcagacctcgatccccgcaggcaggcattactgctgtattttcagggataccgcgtagcccgcattgctgaaatgctgggcgaaaaagttgcaaccgttcacagctggaaaaagcgcgacaagtggggcgaatatggcccactcgatcagatgcagctcaccactgccgcccgctattgccagctcatcatgaaggagcacaaggaagggaaagactttaaagaaatagacctgctggcccgccagtcagaacgacacgcccgcatcggtaaatttaacaacggtggtaatgaggcagaccttaaccccaacgtgcaaaaccgcaaccgcggcccccgcaaacaacctgaaaaaaaccagttcagcgacgaacagatcgaaaagctggaagagattttccgcaacggaatgtttgaatatcagcgccactggtgggaagcaggaattaagcaccgcatccgcaacgtgcttaaatcgcgccagatcggcgctacgtattatttcgcgcgtgaagcgctgatggacgccctgatgacagggcgaaaccagattttcctgtcagccagtaaagcccaggcgcatgtatttaagcagtacatcatcgagtttgccaaagaagtcgacgtggaattaaaaggcgatcccatggtgctgccaaacggcgccacgctgtattttctcggaaccaacgcccgcaccgcgcagagctaccacggcaacctgtatcttgatgagtatttctggatcccgaaatttcaggagctacgtaaagtcgcctccggcatggcgctgcataagaaatggcgccagacctatttctcaacgccttccagcctgacgcacagcgcttacccgttctggtccggcgccctgttcaatcgcgggcgggcaaaagctgatcgcgttgatatcgacctgacccactcagcccttgctgccggtctgctttgcgctgacggtcagttcagacagatcgtgacggtggaggacgccgtgcgcggtggctgcaacctgttcgacctcgaccagctgcgcctggagtacagccccgacgagtaccagaacctgctaatgtgtgagttcatcgacgatctcgcctccgttttcccactggctgacctgcaggcctgcatggtggacagctgggaagtctgggaagactttcaggcgctggccctgcgtccgttcggctggcgcgaagtctggatcggctatgacccggcgaaaggtacccagaacggtgacagcgctggctgcgtagtcattgccccgccgacggtgcccggcggtaagttccgcatccttgagcgccatcagtggcgcggaatggacttccgcgcccaggcagaggccatccgcaaactgactcagcagtataacgtgacctacatcggcattgactccaccggcgtcggtcacggtgtttatgaaaacgtaaaaggctttttccctgccgtgcgggagtttgtctataaccccaacgtcaaaaacgccctggtgctcaaggcatacgacattatcagccaccgccgtctggagtttgacgccgggcataccgacattgcgcagtcatttatggctatccgccgcgccaccaccgccagcggcaaccgtccgacctatgaagccagccgcagcgaagaagccagccacgccgatctggcctgggcaacgatgcacgcgctatttaatgaaccgctgcagggcgaagccgccaataccagcaacattgtggagattttttaa

SEQ ID NO: 237249 - DNA, 147 bp, Klebsiella pneumoniae; identical to SEQ ID NO: 188311

SEQ ID NO: 237250 - DNA, 201 bp, Klebsiella pneumoniae
atgttgaataaccaaccatcaatcgcatcgcttctcgttaagcaaagtccatcaccgcatttcgggcatggctggatcatggggaaggatggcaagcgctggcatccgtgccgctcgcaggatgcgctgctggctgaactgcgtactactaaacaggggaaaccatggctattgaaggcgattctgcgactgttccactaa

SEQ ID NO: 237251 - DNA, 294 bp, Klebsiella pneumoniae
atggcaagaaagaaaatttgggcatacgccatcgataacaaagaggaatacattaaaaataaagaaacaaataaagagcgattattctttatttgggaggttattaagatgcgaaaagaaaaccctaaagagctttctttgctaacctttatgagcacacaatctaacaaggataaacgagcagaattaacaccagttaaaaaaacaaaaaccgcctttttcagatataaatctgattcaacaacatttaccgaaagccatgattctgattcagaatacatatctcatgaatga

SEQ ID NO: 237252 - DNA, 1065 bp, Klebsiella pneumoniae
atgaaaaagaaaacccgttttgcctttaacgcctacctgcagcagctggcacgcctgaacaatgtggaagtggaagaactttccagcaaattcaccgttgagccgtcggtacagcagacgctggaagaccagatacagcagtccgctgcatttctgacgctgattaacatcaccccggtggatgagcagtcaggccagctactggggctgggtgttggcagcaccattgccggaaccacggataccaccaccaaagagcgagaaccaactgacccgacggtgatggcggacgtggaatacaaatgcgagcagaccaactttgacacggtgctgacctacgcaaagctggacctgtgggcaaaattccaggatttccaggtgcggatccgtaacgccatcgtgaagcgccaggctctggaccgcatcatgatcgggttcaacggcgtgaagcgtgccaaaacctctgaccgcgaagccaacccgatgctgcaggacgtaaataagggctggctgcaaaaaatccgcgaagatgcgccggatcatgtcatgggcagcgaaaccaaagaaggcgtgaccaccaaaggcgccgtgaaggttggtaagggtggcgattatgccaacctggacgccgtggtgatggatgcggtcaacgagctgatcgacccggtgtatcaggatgatgatgatctggtggtggtctgtggccgtgagctgctgtctgacaagtatttcccgctggttaacaaagaccaggagaacacggagaagctggccgctgatctgatcatcagccagaaacgcatgggtggcctgcaggctgtacgcgcgccgtatttccctgcgaatgcactgctgatcacccgcctggataacctgtccatttactggcaggaagatacccgccgtcgttctgttatcgataacccgaaacgtgaccggatcgagaatttcgagtccgtcaatgaagcgtatgtggttgaggattaccgctgcgcggcgctggtcgaaaacatccagatgggggatttcagcgcgccagctgtaccggaaggcgagggggcataa

SEQ ID NO: 237253 - DNA, 429 bp, Klebsiella pneumoniae
atgctgcagtttagcgccaacgccagaagtaaccccctggcaggccgcaagcaaaaccctgaaaacctcttttccgccgcagaagaaacgctgatcgagtgggaagaagtccaggacgaaaaaccctccctgttttcccgcgttgccgcgatgttcaccaaaaaagaacagaacgatgaagcgcgtttttctgacgtgcatcgcgcggtggagctgattgctactgaacagcaaaacctgagcgaacgtactgatcactccctgtctgcgcaggatgcgcgcattgctgagctggaagcctccctgcaggaacagcagaccgcttttgctgaactggagcagcggctgagtcaggaagacagccgcaaagattatcgccagcgcgcgccgggcggaaacgcaccggcaggcacactgaccaattgctga

SEQ ID NO: 237254 - DNA, 639 bp, Klebsiella pneumoniae
atgaccggcaacggtttaccacttgctgttttcccctgcccctgccggataaacagcagattaccgtccttaactgaggcaatcgcgccatactgccgcgccagcttcattaaaaagctggcgtcgctttcgttggtctggtccaggtgttccagcgccatcgcagcaacatcatttcctatagcgactttaaggctgtgccgcgcggcaatgtctttcaccacatcgcccaccgtcgttttgtgccaggacttctcacgccggacattcagcgtttccctgaaatcagcactacgggcacggattgtcagcctgtccgggctgccgctatgctctatttcgtcaacggtaaacttaccttttgagtacagcggctcgcctttccatcccagcgccagagaaatcactgcgccacgacgcggcataattaccaggccgtcggcgtcgtccagctccagatcaagctggtcagcttcaaatccgcggttgtcggtcagtgtcatacccagcagacgtttatccagcgtctgcgtggcatctttgccttcaatcacgatccgaaaggccggggtcttgcttccgaggttgagtaaatcagccatctcgctcactgcagcaaccctcctaccgtggatctga

SEQ ID NO: 237255 - DNA, 318 bp, Klebsiella pneumoniae
atgcgaaatgatttcattccagtgatcaattatataatcgttatcagatgtgacattattgtctacaagaaatgccgtatctacgccatcagttacattatccatctgaaaattttcagaaacaaggagttgcttgctgacattttctctaagtatcaattcattgcaatatttgaatgcaaacattgcaatgcgtttgaagtcactatttttgaatggtccgacgctgtgtcctaccaaataaattggtttttttgcaagcaaagaacaaaatatgtgttcaaattgtgcagagccatacaagtctacaaaaaatga

SEQ ID NO: 237256 - DNA, 1734 bp, Klebsiella pneumoniae
gtgaacaaaaaagccatggccgcggcggtcagcatgatcctcgccggtagcgcgcacgccgcgcagcaggagcgtccaaacgtcatcgtgattatcgccgatgatatgggctactcggacatcagcccctttggcggcgagatccccacccccaacctgcaggcgatggccgagcagggaatgcgcatgagccagtattacacctcgccgatgtcggccccggcgcgctcaatgctgctcaccggcaacagtaaccagcaggctgggatgggcggcatgtggtggtacgacagcaccattggcaaggagggctacgagctgcggttgaccgaccgcgtcaccaccatggccgagcgctttaaagacgcggggtataacaccctgatggccggtaaatggcacctcggttttgttcccggcgccacgccgaaagatcgcggctttaatcacgccttcgcctttatgggcggcggcaccagccactttaacgacgcgataccgctggggaccgttgaagccttccacacctactacacccgcgacggcgagcgcgtctccctaccggatgatttttactccagcgaagcctacgcccgccagatgaacagctggattaaagcgacgccgaaggaacagccggtcttcgcctggctggccttcaccgcccctcatgatcccctgcaggcgcctgacgagtggattaagcgcttcaaaggccagtatgagcagggttacgccgaggtctatcgccagcgcatcgcccgcctgaaagcgctgggaattatccatgacgataccccgctgccgcatctggagctggataaagagtgggaagcgctaacgccagagcagcagaaatatacggcgaaagtgatgcaggtgtatgcggcgatgatcgccaatatggacgcgcaaatcggcaccctgatggagacgctgaaacaaaccgggcgcgataaaaataccctgctggtctttttaaccgataacggcgccaacccggcgcagggtttctactacgaatctaccccggaattctggaagcagttcgataacagctatgacaacgtcggccgcaaaggatcatttgtctcctacggcccgcactgggccaacgtcagcaacgccccctacgccaattatcacaaaaccaccagcgcccagggcggcatcaataccgactttatgatctccggtcccgggatcacccgccacggtaaaatcgacgcctcgacgatggcggtgtatgacgtggcgccgacgctatatgaattcgccggcatcgatccgaacaagtcgctggcgaaaaagccggtgttgccgatgatcggcgtcagctttaagcgctatctcaccggcgaagtacaggagccgccgcgcggcaactacggggttgaactgcatcatcaggcggcctgggtcgatggcgaatggaagctgcgacggctggtgccgcgcggcctcaccgccggcgacgcgccgtggcagctatttaatctgcacgacgacccgctggagacgcatgatgtcgcggccgaacatcccgatcgggtcaaagccatgagcgaggcctacgaggcatttgctaagcgcaccatggttaccaaagcgcagggcaaaatgatcgactacgtcggtatcgatagcaaaaccgggcgctatctggcggtcgaccccgtcaccatgaagccggtgcctgcgccgcaggcgatccctgtgagcgagatccattaa

SEQ ID NO: 237257 - DNA, 618 bp, Klebsiella pneumoniae
atgctttttggtactgcaccacatctgtggtttttgtccgctttgatccaatgtttattgattaaatattttttaaacatttttcttaataaatgcagtgtatcaaagggaattgtatttagtatatcattactatgttttttagttttttattactactgtaaatattattttaatgatgccccctatataaaaacgatagtttgcgtattcgttttttatatatatggtgcaataacccgtacttctgctattttaagcaaggaaaggagtctaatattaattgtcatagggctcattttacaattagcggaggcaatatcagcttggaagcatttgtcaatgtcacctactattgatttcaattttggtacattattgttctcaatagggatgtttaatttatttttagcaatcaacaaaaaaagtcctagtgtcgcaaatttaggtaaagattcgctaggcgtataccttattcattactttatcatcatatgtattaatgactttatcattaatcacaatatgcagaatgatattttaaaaatattatgcgtttttggtttgtcttatgcgtttactataattgtaaaaaaattagctatcttaaaatattag

SEQ ID NO: 237258 - DNA, 1080 bp, Klebsiella pneumoniae
atgacggaagaacaatccagacaagaaataattgttttgcatgatacagacgggcgaccatattacaaggctcttgatgcaagtgataagtataatgttgtatattacgaatcatcagtttttagattgtttttacgtgaattgtataaatttaaaaaagcagatgttaaaaaacttatccgaaatcttttctttagatgcagagttccgtggataaaggataaggttataatattgggcatggctccttatgattttcgtatttcatactatgctattctatgtaaaaaaaattatgtcatcgaacatacatcttggccatactgggggcaaaataatgtgcccagaacctatggcataatgactattttttttaaaaagctatggagaaaaatattgaattcaagtttcataaatattgtttgtgttagtggttctgcttttaaaacaataaatcaatttagaaaaaacaacaattgctccactataataccgcatgtgatcgatattccttctttaaaaaacaagcctatgagaaaagataaaactcttatttttataggtaagttaataccagaaaaaggcatagataaaattctttcattcgcggaagaaaatcctagttataaagtaactatcattggtgatggtcctttgaagaataaggtgttgcaatctgcgaagatttttccaaatatcaggtacttgggttttattcggaatcgccatgaaatatataatcatttgcatgaatcaactttcttttatttaccatcgatcaagactcatcgttgggaagagctttttggtatatctataattgaggcgatgagctgcggttgtatatgtttttgtagtaatcatgtaggaccaaggcaaattattcatgataaagttaatgggtttcttttagaagaaaatcatacatcccgcgatatcatcaatttgattaataatagcgatttagaaatgatcagtgaaaatgctattatagaagtgaaaaagtatagtctagaaacggttcagggactatgggataattttatagaaagagtaactagagaaaggagtatcaagtga

SEQ ID NO: 237259 - DNA, 1158 bp, Klebsiella pneumoniae
gtgaaattaattcagtttactcgtattttggatcaatcctctgggattggtagggtggctagtgaattaaatactacgttaaaaaaaaatggtcatgatgtaataaattattgtatttataaaaatgagaaacaggattttgggaagggaaaagtaattgttattcctgttgtttataaaatcgaaaaatatctaggtaaatggttaggtaaagcaatttcagttttcctttttgatataataacatcaattttatctttagcacatagaaaggatgttaaactctacaacggttgtgggtataataatggcatacaggtcggtcactcttgtcatcttcaggctcttaaaactaaagttaataatggatcttttagttggataattaaccctttgcactatacttgtattttaagagagttcattgttttcaaaatattaaagcgacaatttttagtagcaatatcgcaaaaggttaagcacgaatttattactaactactccttcccttcagaacgtattaaagttatacccaacggtgtagatgttagtaaatttaagcctgaacagttgaatagagatttgaaacaaaggcttggaataccatttgataaaaaaatatttatttttgttgggaatgagtttcaaaggaagggacttaaaattatactgaatggtatagcccattgtgataaaaaaagtttagagaatattactttgcttattatcagtagagataatccagatgaatatataaaacaggctaaaaaaataggaatttatgatatttgtattttcttgggtgaaattaaagacgttagcccatattttaacatatctgattttgctttcttgatgagtgactacgagccttttgggttggttggcatagaggcaatggcttctggtaatatacttttaagtactggtgtcgatggcattgcagattatcttattgatggagaaaatggctacattactcctcgaacctctgaacatgttacacatgttgttacccaatgtcttaatcttgaagtagatgtaaagaacaacatgttgattaatgcttataatacagctcagtcttatgcttgggataaaattgccttagaatattctgaagtcattagcaaatataaaaaagagtattgcaaatga

SEQ ID NO: 237260 - DNA, 1314 bp, Klebsiella pneumoniae
atgataaaaaaaatgtttttaccactttttaccggtggactgctaggaaaatttgctggggtttttagagaattattgatggcgtggtgttttggtactggtcctgaaacttcatctttcagaattactcagacagttttgttatcacctattaatttgttttcatcggatattatttcaggagggttaattcctaagtatcgtgcattggtagataatgataatgtctctgctaaaagtctctttggagctgtgttagttatcaatataacattagcactagttttaaccctgttttttttgtttttttcaacagacataactcattttttcttaagcgaaggagagaactattttgatgttcttcattcgtttatatatggggctgcattttctgttattccttatgtttattcaaatatatgctcttctattctcgtggtacataaagagctatcccccttttcacatagggcaagtattcaggctgtatttttatcaattggcattcttttgagtttctatttgaaggattacaactatttcgtttatgcgtttcccttatcatatatctttatgtctatatggattacatttatccttgttaagataaatgcaatcccaaagtttgataatgtgctcattactatattgaatttttttaacagtgtaaaatttttattattggtgcctgctttatatcaaatctattggctggttgaaaaacatataggcagtcaaatttcgctgactatgatttcaacatatgaatatgctaaattttatacagaaacatttatcagtctcatcagtgttcctcttggctatgcaatacttgcctcgagtcatgatgagacaatcaaagcaagaaaaacaatattatactataatttttttgtgttgttcgtttcatatgttttgttttttttaggctggttttttattaaattagtatatcagcatggttcctttacgagtactgacaccagtcatgtatatgagcaattaaaaatactttccttaagccttttttttcaagccaacttttatttaaatttaaaaatactctcagttaaagggcgttattcaataatctttttatcagtgtttctttctgtgtcgagcggaatgttgtcgttatttttcctccgtgatatgttaggtgtttacatagttgcggttagtttttttattttaaattttgtaggttccatgacattgatgatgattgagcgtaattttgagcgacatatgctttttgttttcctgggtgtctgttttttagcgctttattactttaagggattccactaa

SEQ ID NO: 237261 - DNA, 1584 bp, Klebsiella pneumoniae
atgcagactgcacaaaaagtcattacggcctatcgtcacaaacgcattattgtctgcctgctggtagccctggcgaccctgggcgccacattagccatccgatttatttcgcagcgcagcgtaaatgaagattatattcgcacggccgccagccaacgggtagcggcgctcaatgacatcttgcgcccgctaagcgcgcagcgagccaccctgctccctctggtgggcaaaccctgccctgatatccatctgacgctgcgcaaaatggcggcctcattgcaaaccattcgttccgtcgccctcgtcacgtcaggtatcgtttactgttccagtatttttggcccgcgacaggcggacttacatcgcctgcagcccgcacttcctgcgccccgccctctgctgctcttctcgaacgacagctccttgctcaaaggctcgccggtactgatccaatggtatccagccgcggagaacggcctggacggcgtgatgctggtggtgaatattgagctgttgggaaccttaattcttaatgaaaaatcggccctgatcagcgacgtcagcctgcaggttggcgatcgttattttagcagccgccatgggcttctcgaaaaagcgcatgtcccgcagggcacggtgatttatcgccagcgctctacggagtttccgtttactgtcaatattaacggccctggcgcctcggcgattgcgcttgaggagctgcccggcgagctgccgctggcgctgatttttagcctgctaatgaccggcatcgcctggctggccaccgccggcagaatgagtttctcgcgggaaataagccttggcatttcggcccgggagtttgccctctggtgccagccgctgcaggatgcgcgcagcggcctctgctgcggggtggagatcctgctgcgctggaataatccccgccgtgggacgatttcgccggaggtatttatccccatcgccgaaggcaataatctgattatccctctcacccgctatgtgattgccgaaaccgctcgccgcctggacgcttttcctcgcgaccgccattttcacatcgcgattaatgtcgccgcgcgccatttcgctaacggactcctgctgcgcgacctgcacaattactggttcagcgtggatccggtgcagcagctggtggtcgagctaaccgaacgcgatgtcctgcaggatggcgaccagcatatggccgaacatctgcactttaagggcgtacagctggcgatcgatgattttggtaccggcaatacttcgctctcatggctggaaaagctgcgcccggatgttttgaagatcgaccgctcgttcaccagctcggtcggcatagatagcgtgaacgcgacggtgacagatattattatcgccctcgccaaccgcctgcatattgttaccgttgccgaaggggtggagacgctggagcaggaaagctacctgcgtagccacggcgtcgatgtgctgcaggggttttattatgcgcggccgatgccggtggaggcgttcccggcgtggctggccagcagggaggagagtgagagtgagggtgagagcgagacgacagaataa

SEQ ID NO: 237262 - DNA, 1725 bp, Klebsiella pneumoniae
ttgtcacagtccacactagctaagcgtctcgcccgaagagtcttcgagacatactcgagtaacatttactctgaagacatagcacctcaagataaagagcgtgatattaaaatcacgtctcgttgcattgctgctctagctgttgaggtttttggcgaaccaagttccagccttgaagctgcccatagtgtttgtgatggtgcaactgataatggcattgacgctgtatatgttaaccatcaattacaaaaattggttgttgtacaatcaaaatacgatcagaatgcttcgggctcaattacagtggctgattttgtaaggttcaaagaatcttgcacagaattaatggatgaaaaatatcatctctttaatgaacatctgcagaaatctgcaaatgacattagcgaggcgataactaatttcgattataaaatattgtttgtttatgcctacactgggaaaaaagatttaagcgatgatattaatagaagaatccaagactgggagaaagatataaatgaaagcatggctgccgaatctctagaggacagagaaacattcatcgtcaatgtaatacctttctgcttagaagatatggttcaatatttgagaaaacaatctatccataatgtgactctcgataatgttgagctattgcaatatgggattgtttctgaaccttacgaagctatttttggaattatatccggaatacaattagctgaatggtgggaccaatattcagataaattactagaaaaaaacatcaggggagtcctaggaaataaaacagatgtcaatacttccatcaaagaaacgattaacaccgcacctgataaattttggtattttaataatggcgtaacaatcctagttgaagatttcaagaaaaaggaaagatcaagagtagcaacaattcgcgatgtcggtcagttctcatttgctaatgctagcattattaatggtgcccaaacattaagtaccataggtttaaacgccagcgccttacccgaaggttatcttgaaagtatcaaggttcctgttagattcataaagattagcaatgatcaagcctttgccggcttagttacacgagcaaataaccatcaaaaccgtgttactggcagagactttgcctcccaagacgaagagcagatacgtatacaaaatgaagtttttgtagaaagaaactataagtacaatatccatagacaggaatattcagatacgagtgtttcaaccgtcattgaccttgatgaagccctatccgctatcgtatgctttttaaaagatgaaagattgctagccactttgaaatccaacagaggtcgattctatgaaaacttgtcaagcggcatttatagacaagtatttaatccgtctgtaagtggtgtttttgtaattaatgttgtcaacctttatagaagtattcatggtgaactgcaaaacactttaccaagcaccacaggcaagataaattctattttaacgcatggaaattacgtaatcactgcaatcataatgaattctaaagaattaaaaaaagacaccaaggatgtaatgaacttcgacttaagtaacgttaaagatgagataataaaaattgccacatgcatgcatgattatattgcagctcaccataaagattgttacatagccagattcttccaaaataaagataaaattggcgaaatcacatcacaaactgaaaacccttactattaa

SEQ ID NO: 237263 - DNA, 1146 bp, Klebsiella pneumoniae
gtgggagccggtaatctggccatcccgctggtgaaacagctgacggccaaggtaaaagcgcgagatcccgaggctgcgcgctacgttcactggggcgctaccagccaggacgccatcgacaccggactggtgctccagctgcgcggggcgctggatgccgctgagactctgcttgagcagctgttggcggccctggctctccaggcggatcgttatcgcgataccgtgatgccgggacggacctggatgcagcatgcgctgccggtgacctttggcctgaagctggcgggcaccctcgacgcgctcctgcgctggcagcagcggctgcgcgagatgcgtccgcggctactggtgctgcagttcggcggcgccgcgggcactctggacgcgctaaaagagaaagggccggcggttggcctggcgctggcgcagatcctcggtctgtcgctgccggatactccgtggcacagccagcgcgatcggctgctggaggcgggcgcctggtttgccggcgtctgcggcacgctggggaaattcgctaacgacttttccctgctgatgcagaccgaagtggctgaggtgggcgagccggtggcggaaggtcgcggcggttcgtcgacgatgccgcataagcgcaatccggtggcctgcgcggcgatcctgaccgccgcccagcgtacgccggggctgatggcgacgctctacgccagccaactccagcagcatgagcgggcgctgggcggctggcaggcggagtgggagaccctgccggagctaattaccctggtgggcggggcgttggcgcaaagcgaggcgctggtgcgcgacatgcaggttttcccgcagaaaatgcgcgccgatctcgatatcacccatgggctgattatggctgaggcggtgactctggcgctggcggaattcattggcaaagccgaggcgcatcatcatatcgaggcgctgtgccgccaggcgctggaccgtcactgcccgctggtcgatctgctcgcggctgacccacaggtcagtcagtatctctctcgtgaacgcttaaccacgctgctggacccggcaacggcgaccggcagcgccgaacgctttgtgcgccaggtgctggcgcgttatcaggagcaacgtgatgaatcttga

SEQ ID NO: 237264 - DNA, 450 bp, Klebsiella pneumoniae
atgaggctcaattcagaattaaacaatactgatatcgatgaagatgaaatggaacgatattataactttttaaagagcaaatttaataacattgtttatatgaaaatattatctgaccctataatgttaaatgagcataaatttataattaacaaaaaaaatgaaacgattattaaggctataaaagagattgaatcatttaaaggccagctggcaaaagaaactgaaaaaaaagaattatttgaatcaacaataaaagaaatgaaacaggaaatatttaagctaaaagaatcaatcgataatacaaaacatcttaataattctttgctaacgcaattagataatgaaaaaaacagagctaattcattcaatgaaaaaattaatgaattaaaactcaaggattatgaaagcatgaactttctagagcgttttaaacgacttttcaggtaa

SEQ ID NO: 237265 - DNA, 1167 bp, Klebsiella pneumoniae
atgtcagtgattatttcaggaaaatatcataacgacgataaaagaacaaaaccacatcggaaaatagtttttttccttgttttatcagtttttggattaagagtagcagggaatcttacgttttgtgatattacaattttaattactctcttgtttattctactaaaaggatataaattttcagtaagtgagttaatagttcctttggttttcgtttttttatcttctattggtatcatatttgttgcaagaggtgatttggtcgagtatgtcaaagatcttttacaaataagcttttatctaattagtgctgctactctttcaaagtatgccttaactaattttaggcaaaataatatttttgattccattatttatgctggaattgttgtatctttactcggtgtcttacaatatttattaattttctttttcaatattaatatttttacttttattagctctatgggaggaagagaccagtgggttgagaattatatccgggtatcatcaattactcagcactataatcatttgcctcttgtccttttccctccgctggctatttctttgtatagaagaaaataccgatatgctactttaatcaccttgggtattttagcttcaggttcaaggtccggtatagcagccagcttagtattgatatatataagctttttcataaatcgtaatattatcaccctggtgctaacatcgataatagccttttgtggttttagttattttatttacggcactgatttttttgagaaaaggctggcttttgttgctagtggaactgttgatggttcaactcaatatcgcctcgacctttggcaacgagcttgggatttggtacttaattatcctttattcggtgtcggtatgggacaagaatcatggatgttaaaagttgataaccttgaaagcagtctaatgcagatattggttaattttggtttctttggtttagctttatttttactttccataacatttgtttttatcaagtctttgcgaaattattcattactgggcattgccatggtactactatatattcaattgatattccaaccctttttgtttgtttctgttgtggggccgtgcgtgatgacatactctttttttatttataatcttgcaaagattgagaaaaataaatga

SEQ ID NO: 237266 - DNA, 1020 bp, Klebsiella pneumoniae
atgactattgttgttaatacgaggaatcttttagggcatactactggtgttcaacgttatactagttcaattttagactattggagtgaaagtgattatgaacgtattgaaccaagcgatagtttgaattgtagtggtatgaaagggcatttatgggaacaattaaatataccaagaaaaataaataaaaataatattttgtggtctccggcaaatactggaccggttgcagtgaagaatcaaatcattacgatacacgatacggtaccttttgatcatcccgaatggatgagccgcaagtttacagcttggtataaatttatgcagccgatcattgcgaggaaagcattacatataataacagtttcgcatttttcaaaagagaggataattgaaaactttaatatagcagaagagaaagtttctgttatctataatggtattaatcttcgaagtgtcgatgaaaccccaataaatgataaatggaagtttaaaaattatgttttgactgtaggttccgttgagccacgaaaaaatattcaaaggctaatttccgcttttttagaagctaaaaaggagcttgatccttcattaaaattggttattgttggtaaaagaggaaatgataatatcttcaataattccaatcaagaacagctaaagaatgttcaagattcagttatttttaccggacatatagatgatgatgaactagcacaaatctatagaaatgcaaaaggattttgttatccatctatttacgaaggatttggtttgcctcctcttgaagcactagcttatggaatacctgttttaactagcaatactacctcaatgaaagagttatttacaaacaaggcaattttggtagatcccttttctatcgagagcattaaaggtgggataattaacttacttaaacttgataataccgtcacgcttaaggggagagaatttgctcaaactttaacatgggaaaaagcttcaagagaaacgtttcagttacttagttcattttaa

SEQ ID NO: 237267 - DNA, 1032 bp, Klebsiella pneumoniae
atgaaacttttgataaagtatgcagcagttgtttcttcaattacaatcagtcaagcctatgcaaatgagttttattatggtgtagcagagcatctcttcaggagggattatacttatagcgaacaggcaatattgaagtcaaaagaaatatgtgcaagtgtaatgcgaattgatgcaccttgggaagatgttgaaaaaaaaaaggggatttataacattccaaaaaaatgggacgatgtaattaataagatggtatctgtgggtattaaaccgcttttaattattgattatggtaatagcctttatgggaatggaaagcctgttacagaagaatatacaaaagcgtatgcggcatatgcttattatttagctcgtcatttcaaaggcagagttaatctttatgaaatttggaatgaatgggataccactacgggtggtatgcctaaaggtaatgtcgcagattatcaaaaattggtaaaaatgacgtatcctcgtataaagtctgtggataagaaaatcacagttattacgggttccttctctcatgcagcgttagatgttgccgttggtgaatctaaacgaaattttttagctgattatatgtctcctgaaatggcaagctatactgatgctatagcaattcatccatatgttgcatatagaaaaaaaccatacaatgagtatagtaagtatatagatcaaataaagtatgcaaaatcactattaatgaatgtagcaggttataaagagaaacaactcttcattaccgaaatgggatggacaacttttgacccaagattttcagtttcagatgatgaccaagcaaaatatattttaaatgcaatcaaggatgcaaaagaaataggtttaaatggagtaattatctattctttaaaagatggtggaaaaaattatttcaacagcgaagaaggatttggtatatttgattataaatggaacgcaaaaaaaaccgccagcaatcttatcgacttgtgtaaaggaaaatcaaatgctattaaggaagggttatga

SEQ ID NO: 237268 - DNA, 918 bp, Klebsiella pneumoniae
atgccattagcaatcgaacagttagacttatcttctcatgatattatactttcaagcagtcatgcagttgcaaagggcgttttaacaggacctgaccagttacacatcagttatgtgcattccccaatacgctatgcttgggatctacagcatcaatatctaagagaatctgggttaaaccgaggtataaagggattattcgccaaatggatattacacaaaatcagattatgggatactcgcactgcaaacggtgtggatttttttattgctaactcaaaattcatttctcggagaataaaaaaagtctacgggagggaagccgatgttatttatcctcctgttgatgtggaacgttttaagttaaaacgagagaaacaggatttttatcttacagcatcaaggttagtaccatataagagaatagatcttatagttgaggctttctccaaaatgccggaaaagaaactggtagttattggagatggccctgaaatgtcaaagataagaaaaatagctggagctaatatcgaaattcttggctttcagcctaatgacgttatggaagaatatatgatggatgcaaaagcttttgtttttgcagcagaagaagattttggaattacaccagtagaagcacaagcgtgtggtaccccggttattgcatttggaaaagggggggtacttgaaactattaaaaatttggggcaggaagaaccaacaggtctttttttctatgaacaaaatattgattcgttaatttctgctattaatgaatttgaatcaatatctcatatcatattacctgaggcgtgtagacgtaatgcagaaaagttttctgtagagagatttagaaccgaaattcagcaatatgtattaaacaaatatcgtcagaagttcgatattaatagccagtaa

SEQ ID NO: 237269 - DNA, 720 bp, Klebsiella pneumoniae
atgtctgttaccacagaaaacgcccctgttcaggggcaaaccacgctgcaggaaaacagcgcgggcgagggcgtttacgcctcgctgtttgaaaaaattaatctcaccccggcgtctcgcctcggggatatcaacgactttctggacgatgccgcgctctccgaggcgccggcggcggaacgtctcaccgcggcgatgcaggtgtttatggaacgcatccgtcagtccggccagcgggtggaaaagctcgacaaaacgctgatcgaccaccatatcgccgagctggatttccagataagccgtcagctggacgcggtgatgcaccatcaggagtttcagcaggtcgaatccctgtggcgcggcctcaaacagctggtggacaacaccgactatcggcagaacgtcaaaacggagatcctcgacgtcgccaaagacgatctgcgccaggactttgaggacgcgccggagcttatccagagcggcctctactggcacacctataccgcggagtatgacactcccggcggcgagccgatcggctcggtgatctcggcctatgagttcgacgccagcccgcaggatgtggcgctgctgcgcaatatctcccgcgtctctgcggccgcccatatgccgtttatcggcgcagtcggcccggccttcttcctgaaagagaccatggaagaggtggctgccattaaggtgatgctgccaacttactga

SEQ ID NO: 237270 - DNA, 492 bp, Klebsiella pneumoniae
atggctgatacgttccagaatgaagtccccagggcgcgcattaatctcaaattatctcttcataccggcggcgcgcaaaagaaggtcgaactgccgctgaagctgcttaccattggcgattttagtcatgggaaggaaaaccggcctttatcggaaagagaaaaaatcaacgtcaataaaaataattttaacagcgtactttcggaatttagcccggaagttaacctctcggtgccgaatacgctggccggcaatggcgaagaggagaatgtcagactgcgttttaccgacatcaaagattttgaaccggagcaggttgcccggcaaattccgcaactccgtgccatgctggcgatgcgtaatttattacgcgatctcaaatccaatctgcttgataacgccactttcagaaaagagcttgaggcaatcctgaaagatccggcgctgtcccaggaattacgcgacgaaatgagtgcgcttgccccgaaataa

SEQ ID NO: 237271 - DNA, 1011 bp, Klebsiella pneumoniae
atgcaattattaaataggcaacaagagttaaatattgctaaatctagtgcgattgggaatgtaagaataatcgataacgcaatttcgcagccaaaacctataaaaccgaataaagccttggttatattaataggttttatactcggtgtggtgatttctattggtatcgtattgctgcgagtcttaattcgtaggggaatagaaagcccagaacaattagaagacattggcatcaatgtttatgcaagtattcctgtcgcagaaacgtatgctcagaaaaccgaccaaaataaaaaatggcttggaaaaggcttgaaggatatacacagtttcttggctgtggaaaacccagctgacattgctattgaggcaatccgtggtttgagaactagtttgcattttgcgatgatggaagcgcgaaacaatatattgatgatttctggcgctagcccaaatgcaggtaaaacatttgttagcacaaatcttgcggctatcattacgcaaacaggtaagaaagttttatttattgatacagacatgcgaaaagggtacacccataaactttttaacactaataatgaacacggtttatcagatatcttatctggaaaatctgttattgaaaaatcggtgaaaaaagtgacttctggtcaatttgattatatatcccgaggtctagttccaccaaatcctgcggaattactaatgcatcaacgctttgctgatctgatgaaatgggcaagtgaaaattatgatttggttgttttagatacaccaccaattttggctgttacagatgcggcgatcattggtaattacgttggcacaacattgttagtagcaagatttgaagaaaatacagttaaagaaattgaagtaagttataagagatttgagcaaagtggtgtattggttaaaggttgtatacttaatggtgtagtaaaaaaagctagcagctattatggttatggatataaccattatggatactcatataacagcgataaataa

SEQ ID NO: 237272 - DNA, 501 bp, Klebsiella pneumoniae
atgacaaaaatagagatgatgaactcattaggagcttctcagcaagaaaagatgatgaaccaaatagtgttggacgatcatttgttgaaccaaatatcaatgacggtagaacctctaacggaatcaatgatgattctttcggaatcagtcagcacagcattaaatcagacgcaacagacactaaccagagtgaacaactcattagaagcaacaacaaccactttaaactcagcgaaaaatataatagaccaacaagccataaagttagaaggacaacacaaaaaactgcacaaatactcaacagagttaaaaaacaatacaataaagaatcaatcaaaacttataataaaagtggcctcaatagttggcgcaataaatctgatagcggttctatcagtaggatacttgatcgcgcagaaacagccacaacagccacgaatcaatttagactcaaaagcggtagcagtttcaatagtagagcagctaagatcgaagaaatga

SEQ ID NO: 237273 - DNA, 954 bp, Klebsiella pneumoniae
atgaataatggctcgttactgctgaatggcgatgtcatggatcgcatgatgaagattgctgatgttatgtcccagggtatttctactgtgcccaaacatcttcaaggtaagccatcagactgcctcgccattgtcatgcaagccgcgcgatggggtatggacccctacgtagtcggtcagaaaacacacgttataaatggcactctaggatatgaagctcagttagttagcgcggtactgactgccaccggcgcaatacgggggcgattccattatgaatatcgtggcgaaaaggatctgatggagtgccgtgttggcgcagtcattagcggagagaaagacattacatggaatgaatggctctgcgtttcggaagtaacaatcaaaaactcgcccctgtggaaaagtaacccaaagcagcaaattggctacttgcaagtgaaatactgggctcgtgcctacacaccatgggcgattttgggggtctacacccctgatgagttggaggaacgcgttgagcgcgaaataaatccaacccagcgaatgactgttgatgagatcaccagagaaacaggcatccttgccaccgcgcaggaatcagcaactaatgttgacgcagttgcagacgacctacgcgaccgcattgataccgcaagctctgttgaccaggccaaagccattcgtgcagacatcgaatcacagaaagctctgcttggtaccgccctgtataccgaactgaagaataaggcggtgaagcgctactaccttgttgatgcaaagaacaaagttgaggcagccataaattcactccctaaccccggggatccggaagcagaagcattattcgcgaaggcagaaagcaccttgacctcatcgcgccgccacctcggtgatgaactgtatgaccagttccgcatcaccctggacgacatgaaaccggaatacgtgggctaa

SEQ ID NO: 237274 - DNA, 378 bp, Klebsiella pneumoniae
atgaacttaaatactcttaagtatctgattaaaaacgcagaagaaatcattatcgagtctgcagaggataatcgtctaaatgcagaaaatgttattggcgtagctaatcaagttgtcggagagaaaagcaccgaaaacctctcagtaaaacagcgcttcctgtttgaaaaggctatccttcccttgatcgaaaatgtcccatgtcaaggttggttcgatgagttcgatggtgataatggctccaattttgactgcccaaatatgattgaagaaggacgactaacccattgctatcaagaacagagcatgctctgcgagagttgtgaagaagaggaaaactaccgagcagcaaaaaaatctgattacatgagagattga

SEQ ID NO: 237275 - DNA, 495 bp, Klebsiella pneumoniae
atgagcaaagagagcgggttgatggaggttttcatatcacggcctaattggctacctgaagaattaaaagatgctttaggcaaatttgacgacacactcccagatttaatgatgtacggcaatacaattgggattagtcaaccatgcttacaaacaccctttgatgatattgttgagctaatgactcgatgtgaatgtgtaattatattcgccttaccccagatatacataactgctggctccattaaagaaaataaagttaataacgttgttttacctactgaatggaatcagatagagacagccatcgctctatcattaaaaaagccaacccttgtcttactccacaaagatgtacaagccagaggcttattagaacgaggggctgccaatgtttttattcacactgtcgacacatcaaaaaacgactggattgatagtgtcaaacctatactggagcacttaaaagagaaagcttatagagcaaaaaaatga

SEQ ID NO: 237276 - DNA, 483 bp, Klebsiella pneumoniae
atggagatacttgagcgtttatacgcgagcagtggttcggaggtaatacatgacacgctggaaattaccgcagggcaggaaacataccggctgactcaggggtacgacgatataattgtgatgcttgaagatggtcagttagcgacgttcgaagcttgcgcgattgatatcgcacttcctgcacgtaataccgatggtacacaggatttgaaatttgccatcagcaatattgacggcgtggtatctggggcgatcgataaagttctggataaacagaaatcagcaaagctcactttcaggcgttatatctccagggatttatcagcgctggccacagcgccctacacgcttgatattaaaaacggctcatggactccggcagcggttcagatcactgccgggtacatgaacattctggatacggcgtggccccgtaatcgttacaacctcgttgatcatcctggtctgcgctacctgtactga

SEQ ID NO: 237277 - DNA, 381 bp, Klebsiella pneumoniae
atgtttcaacctgacaaatatctttcagtcaaatggctgaaaggaggccgagcttaccctgagcttgactgtttcggcattgtgaatgaaatccgcgcagaccttgggttgcccctctggcctgatttcgcaggggtgacaaaagactgcggcggcctggaccgcgaggcaagaaagctgatgcgctcccttgagcgctgcgaaccctgcgagggggcaggagtggcctgttactccggctctgtcgtgacacacgttggtattgttgttttgttggataaccagctacaggttgcagagtgcaatccggctacgaacgtcacatttctgccacttaaccgatttgttacccggttttaccgcgtggagttctggcgatga

SEQ ID NO: 237278 - DNA, 3087 bp, Klebsiella pneumoniae
atgactatacgattttatccttcgcgtcttcctggcgaaccgctggagcagcgtgaacatggtgaaatgaccctgcatgactggctgagaaaaaacgttcccagctacacgcctgacagaacgcatccaattgcgattgaagttaacggacggcccgtgcccgctcctgattggtcgttatgttttttacgcccagatagtgatgttcgcatttacccggtgccgtatggttccgggcttgaaattgctgcctgggcagcggtggctgtcgctgtagcatctgctgcatacagcatcatcatgatgtcccagttggggaaaattggtgcatcgaccgccaacggcgatcaacttgacctctctccggcaaaagcaaacaccgcaaaactcggtagcccgattcgggaggtatttggccgttgtagggtgttccctgattacctggtccagcccgtcagccggtttgacccggctgatccgcagatttaccgcactgaaatgtttttatccgtggcatatggtgtctacgctgatttccgcaacacagtgaaaatcggtaacacgccgctttcctcattcggggatgatgccagcataacgatttatcctcctggggcggatgtgagcggtgaccgcagggcggacaactggtttaactcgacagaagtcggtggcaccaactccggtaccgccggtctcgaccttgcctcaacggggccggggagggtgagtatcagcgctgcggcggttgccgtttctggtgatgccgttacgttgattggacagatggcagacgacgattcaggaaacgacacgtccgtccctgagtcgtggaaaccgggtacagtaattaccatcgtggcacctgacaccttcactgtcagcaatgacggaggacgaacggctatccacggtgatttctcggagctgaacccggttgtaggtcagcctgtgagcctgcactggacgaactacgattacgatctgtttgtatcgtcgttcacgcctggctctccggcagttcccggcgtcggcggttctgcggcgtcacttaccgcttcggcagcgccgaccacgtatgatttcagcgcatcccctgtttcgttcactctgacctggtccgggcatagctatgtgatttcactgtcggcgaattatctcacgatggctgcgttgctcgataccatctccgaccagcttaccgggtcgggacttatcgcgcaggatgacggtgggcgcgtacagattattgagaaaaccagcccgtggatcgggcacagcatcggctatacagtgctaccctcggcagtattcggggatgctcctgtaaccgttgcgggtgtggcatcgaccggcgggagcccggaaatattacccactatcacgctggcatgggggagcgcttctggaaccgcgttttcaggtattcccgacggtacccagcgtattgcgttgagtgcgaaaggggaccagtacacgataactgacattgacggcctgacgattaccgtcagcaggatgaaggaggatgtttccggcaatctggtgattgatgccggctggccgggattcacctcccgaacgctgctggacgccagtgttacaggtttaaatgactcatcggactggatggggccatttttgtgctgcccggagggagaggttacgactgaagtcgaactgaactttacatacccgaatggcctggtagatatcgggagtaaagacgggaaaattcactggcacgatgtctggataactattcagtatcgtcttaccgggaccagcacatggcaatctgttttcatcagacacggcaataacacagtcaacatgatcggctacaccgaaaggattgtattcccggtgccgggcaactatgagattcgtgtcaaacgtgatacgccggtatggggcggaacgacgcgggactccgtgcagtggcaatctctgaaagccaaattgcctgcacgaccaacccgttaccagaacatcaccactatggcgattaccttgcgaacggggccccggctggcttcacagtccgatcgccgcgtcagtgcggttatcaacaggctctatgacggcagtccgtcacgcagtatttccggcgggttttactatctcgcccgcagtctggggtattccgacagccagatcgatatcgcgaccattaaccaactggaggcaacatactggacgccacgcggtgagtattttgattatgtggccgacagcgacagcacgtcggcaaaggacattttcgaccgtatcaccgaagcgggtatgggttacttccttctttcagacggtaagatttctgctggccgggaagggattaagagctgggccgggatgatcaccccacaggaaatgactgaggaaatgcagaccactttccgcgcgttgacagatgatgattttgacggcgtagacgttaaatatattaatccgctgacctgggcagaggaaactgtgcagtgccggacgacggataatccggtaccgcgaaaaattgagtcgtatagcgtagacatggtgatgagcgcagacagggcataccgcattggtatgcgccgcctgatgaaacatctccaccaacgcagaacctactcgacgtccacggagatggacgcgtggtgttatcagtttggtgatcgtcttgtgctggccgatgatattccgacttcagggactatcagttgtctggttgaacaaatggaatatgattcagagaaaatcactctgtttgtgactgagcctctcaaccacagctatgagaacccacgatgttggattcgttttcaggacggcagggcgtcgcgactgctggtaccgacgttaatcgacgattacacgctcaccgtaccctacaacgccgatcttgagcctgaatcgtggatttttgacgatccgagcgttgagccgccgagactgctgttttgtgaaagtgagcagcgcgcgcgacatggtttagttgctgaaatcgcgccctcggataatggcacttttcaggtcactgccccggaatataaagacattttctatatctacgacgacgccacataccccggcgacgtcgcttaa

SEQ ID NO: 237279 - DNA, 1386 bp, Klebsiella pneumoniae
atgagtcagtctcaatataatgatgaactcagggccatccgctatattcagcttcgtggcctggacatctcgagcgttcacgaaacaataaacagtgatatagagagccttaaggtgcaactgtctgggctcattagcggttctgaacttgatgaatctgtgcataaggcgctcaaagagcttcatttgcgagaaatgaccccctctgatgccgccatacattctactaccttgcagactatccatagcgaagcttctcagcgtgtctctggtgacatcggtctggccaacatacttgccacagatgatctggctgttgtagatgcccggatccagaatcacattaaagagtttaatgaccgctacgcgcttgacgcttgggattatgctattgcctgcggttgcgggatcatagcatccatgctggatttactatgcgtcagagccccgccaaagcctaccgtgagctatacagcagaagttgatggtattttcaataaacaggtgcagaaggcctttaatgccatattaccggaggatgtcagtaaaaaactatccgacatgttccgaataggggcaccagacagttcggttaccagtgatttagtggacgcaagcggtagcgttttgtcgccaacaaatcatcgcttacgtgctttgtcgcatgatcccatactgggcattattttcggcataaaggatatgctgaacgggacgtgtacggtggttcaggatggtcaaatagtggtttatccctctaagaaaggcgtaacggacgaaaccaatattttcagactcattgccagaatgtttggacaccttgcatcggatgtaaatgccccctcagcaaacggaaaccgtggcatgggtctaccggccccctttatggggctacttcgtatgctcgaaggcatccctgtagggagttctaattttggaaaacaaatcgagtacatgtatgtcaacgggtatgacttccgtcagtttatcgtgacgagtattccgatgaccataatggaaattttgatgcgggttttctatgtagcgaaacaggtatcgctgggtaaaggagcttttggagagaccttaatggatacgatgccaatgcggctaaatccacgcttcaggatgatgcttgccttgggttacggaacttccagtgctgttaatgcaggtaaaatgtatatcaccggtaatattcttaatgccaattacgcgtcctggatgggattagcctggaatggttttcactcacttaagtggtccttatatcagcgtcatttgaagctatgggacggcattgagaagactgaactggaaaggcttcagaacaacataaacaaaattgaagcattgactactagggcgagaaacttgcccgtctag

SEQ ID NO: 237280 - DNA, 498 bp, Klebsiella pneumoniae
gtggacgctactgaatctgaagagctcgaaaaaattcgccagaaggcaatgaatgaagtaaagggcgctcttcaggcgcttgaaaataactttccggggattactgagggcgttgcagcattagcgggttcaggcgtcggcgctgcggcttcctttggtgctctttatactcttggaacaacgggcgtttcagcagcaggtataacctccgggcttgcgaccgcaggctctatcgtcggcggtggcatggtggcaggaatcggggttctggccgcgcctgtagcaatcttaggaattggcggatacgcggtattcaaacacagaaaaaatgcgaaactaacagccgcacttagtcaggccattcaaaagctctacgatgttcaggaaagattaatgtcgaacgctgagtattttaaggcagaaattgctggcatcaaggcgacgatcgatatgctttctaaaaaagcccccaaaggtagcctagtcgcggtgaggtaa

SEQ ID NO: 237281 - DNA, 657 bp, Klebsiella pneumoniae
atgcttgaaaactacgtctgcaaaatctatgtgagtaaagatcctagctttagtaaaaatctcgaagcaactgcatttggcttcaatgataaggaacagctaaaagtcctcaccgcagcccatgttgttactgatgctctcggaaaggagtaccccagtagcaatacccaaaaactttatgtcatattccataatcatctcggaccagtgaatactgtgcccgttcctgtcgatttcattcttaataactgtaatgacagtaacaactttaaagacaattatccgtttgtagatagtgctgaaatgaagttaccagctaatatcaaacagcctgtatcccagtattttaaagcgcgtaatcccaaagagaatatgcatacattcggtgtaggatatccactgggtcagactgtactttcaactgtctttggcaaaattcaaagtatttttatcgaagattgtgaaaatcaccgtggccagcattacacatctcgttttgtaatttcacataacaacaggcaaggatgctcaggtgggccctatatcatatccgacggggacgagtattatgtaatcggtagcctgattggtgaaatgtttggcaaaaaagaacattcatgtccaaccctgtctgttcaatcatctgctgatttttag

SEQ ID NO: 237282 - DNA, 1158 bp, Klebsiella pneumoniae
atgagcaagatttttaaatcggtagtaacggttgccggtcgaaaaaaaatagctgccgcaatcgttagcgggaataaggttgttttttctcaaatgtcggtgggtgatggcagaggcactgcaataattcccgatgaaaataagaattcattgattaacgagtgtttcagaacccagcttaacagcctgaagttgtccgataccgaaaatatcattatcgcggagatgattattccgccagaggtgggtgggtttaccatcagggaggcagcgctgtttgacgatgccggtatttgcatggcggttgccaatgtgccggagacctataaaccagcacttaccgaaggttcggggcgctttaccattctgagaatctggctggcggtcagcagcaccgaagccgttgagctggttgttgacccgggaattgtgctggcaaccgtggaggacgtgattaacgccggtaacgagattaaagactatgtcgacgaacaattgggcgagcacgcagggtcaagagatcacccggacgccacgctggacgaaaaagggtttacccgactcagcaacgccattgacggcgaagaccaggacagagccgctacgccactggctgtcaggctggcggttgaatcagccatccgttctgcgtgggagctggacaaccctgttggcacggtgaagttttacgcgcagaacgtcaaccctaacgagcgctatccgtggacagaatgggtttataccggcgaaaacaaaacgatccgcatcggtaaagctgacggctcggacgtcggcactatcggcggcagtgataacgtcacgctccggcgcgataacctgcccgctgtgcagattgacgtgagcggcgagaccagcgaacagcccgagcaaacgctgaccacaaaacccgccggtaaacacaaacatggcggagtgccgagcagggagaacccgtgggagattggcggtgatatcagccagcgctttaacccggcaaacctgggcgataccgacgaggaaccggaccatgagcatgatattgatatcccaccgcatcaccatgacgtcaccggtaaaaccgacaacctcggcgagggtaaatcgttcagcgtggtggaagcgcacaccctgctgatgtgctggagccgcgtagcctga

SEQ ID NO: 237283 - DNA, 2580 bp, Klebsiella pneumoniae
atgaccagaattccagaatcctcatcgtgggaagaagatattgagcttatttccagaagcgagcgcgtttctggaggtctggacggcgttgcaaaccggccactgaaaagcctggctaaccgtacgcgttatctcaaggagcaggctgaagagtcaggaaagcttgtcgctgaaaaggttagtgcggtaaaaacctttacggagggggcgacgctggaatcccccagggaagaaattctgtacggaaactatcgacttgtctggaccggggagttccctaaaaccgtgccgatagcgtcatctccggcaacgaccggaggtgtgagggcggggggctgggcgtatacatcagatgcagccattagacaaaatctggcggctgatagcggcgctaaactcgtaggcggcctgaactacgtcacgccggaaatgtctggttttgtgactggtgcgggtaatgatgacgatgatactgctgctatccagtgggcgctgaaccagaacgcggcacaggttgtcctggactcgacgaaaacctacaacattcagcctggtgtcattcagtacaccgggaaaatcaatgttgacgccgggacggctaaaatagtttgtgatggcgtagccgttgatattattgacggcggcgggtcggtgtggcgaggcggtaacttactcagcaaaacaataccgtgggcggttatttataatgacgactggacgataaaagagcaggggcggctgggttatggtcggatgccatttcaggacgccactgacgttgattcaggatacctttatcaggacgtctgctgtgcgattgtattccgctcatcggatgcaaccgcacaggatggattgacggttaccggcgtcagggggagttatgcctcggtcattgccgcagggtttattaatactctgtttgatgactgcgtaattcgcggcgggtgcaatatgggggctatcagcatcatcaaccatacccgcgataaagtcatgtttgggtatgttcatgaaaccagtgcaacgaatctgaatgatttcaagtgggcgcgtgggaaaaaccataccattaccaactgcacgctgttcgaaggccgtgcgatgggcctcaacattacgggtacggacggaatttacgtcagcggctgtaattttattgataacgcagaatcgggtgttaaattcgggcagtacattgtgcgtgactggactgataccgatatctgttcaactaatatcaacgtcaccgactgtctgggcgcaggtcagtggtatgacggctttgatgtgcagaatgcgtatggttcaggctcaacaacgtacctcgaccagcatctcaccgcgaccaactgccggggggttggcaatcgcagaaccggcatagtgggccagggcggctataaccggtttatcagttgccatacagaacgtaatggctctcacggactcattgcaaaagaaggtcggcagcagctggttgataagtgcgtgagcgtcgggaatgggttggtgacaggtggcgttgacctgaccattattggcattggctcaataatgcagaactgccaggcgggtaatgccgtcagcgatgcgcatcagacagtgatgataaaccatcaggttggggagcaggctggcgaactgtatgtgggtaattacggtaagaacgttaacaacctggtttataactccggcaaggtcaactttgatacccagattgatgtaacccgaaccctgaaagcgaccatcaccgaccaggtgtcagaggttcgcggacaaaaacgcggcaccttgtcgttgcgccctgttgcccgttatgttcgtggcgggcgtgttgattctgaagccggggcgatggctgcatgggagcatccgtattcgggcgcgtacctgcgtttctacaccgacgacatgtcacagttgtcatcttcgcctttcgtggtgtcttacaatcacggtaaaaatgcggccaaccctaacgggtacgcagataactccggcatcggtggggtgaaggtcagttattacccgacatcgttccgtattgatgtgtatgctgccggtgcgccaacctcctctacgggcggagcgtccatcggtgcggggggtatttcgcctaccattgataaccagtcggcgctgggtgcgacatcgctgcgctggaagcaactttatgcggcaaacagcacaataaatacgtctgacgccaatcacaagacggtacctgttaacccgtctgaagccgaaatggcggcattttatgagatagcatcccttccgtgggcatggcagtggctggagaaataccagatagagggcgatgaagccaggttgcattcgggtccaactgtgcaggcagccattgaagtgatgggtaaacacggcctgaactggacggattattcggcattctgctacgactcatggcaggaagaaaccgacagcgaaggaaatatcattccggctggcggcgtttattctttcaggaaagaagagctgcttctgtggatgctccgggcgaccgtcgaaaaacaaaagttatttgaaaaaagattatctgccttagaagcaaaataa

SEQ ID NO: 237284 - DNA, 660 bp, Klebsiella pneumoniae
atgcgtaaattaaaagctgtttggacgtggggttatcatatgaatttaaaatttttcggcataattatcctttctgctttgatgttcgttttaggttttttcctcggtggctttaattgggggtgggctgataagaatcatgccggtgaggtggctttgtggagtatgctgggtgggtggttatctgcaattgcaactctacttgccgtgttagtctcattgtacatggcgtatcaagctactcagaatgagaatgaaaaaatcagggttactcatggaataagtgtggatgttactcatggtaagggggtgaattgtaatctcattattcagaatatgagaaatatgacggtgaatattactggtgtttttttctctctgggaggaacatcagcccgatgctctttagataaagttataggccatcgtgatataacgctatcatataaaggtgaaatgaaaagcgttaaatttacaatcgactcaggggttgcttggtggtcgacatatgcgttatttgatatgaataaaaacatagattttaaaaaaggtaagctatttataacaaccaacctcaacacatatgaatttgatttgccaaaggcatacttaaaagcttttgaggacgcctattctcgttatcaggcaacaataaagtaa

SEQ ID NO: 237285 - DNA, 834 bp, Klebsiella pneumoniae
atgaaattaaagaaactattagaattagatttcatggttaaattcaaatccacattggaaacagaatttgaaaaagagctatttatagcaagccttcgaaattatgcctctcatggtaaccctctgagatttcacaactttgcatatactatgagagagttaattttacatgttatagctcgaaaagctcctgaagaaaaagttatcggtgcaccatggtatgtacgtatagatcctaatagaaaagtaacaaggaaacagcagttaaaatattgtgcccaaaaaaacataccagatagttttctaggcgttatcaatactacatttattgatgattccatatcagatttcttagctgagtttgttaaccttaataaatacacacatataacagaaaaatattttaaaccatcccccaagcagttttttgaaaacgcacgggatgtagtttccatcgctcagcactgtttagatttgatggccgatactgctaaggaagtaatctgtatcctagaaaatgaaatcgatagctcagttagggatttggcgaacgagagtttgccagatgaagtgactattttagctcctcgagtttacactgagtatgtacaaattgaagatgtgtatgcctctgatattgatgatgaattcatatacataggtgttgacggttcagtatttgttacacaagaatatggtcccaaagatgacctatgcgaaattaacactgattatccatttagcctttccatgcagtgcagtttgcgcaatccagctcaactaactataacttcgaaggaaatagaagtagatacttcctcttggtacgagtaa

SEQ ID NO: 237286 - DNA, 294 bp, Klebsiella pneumoniae; identical to SEQ ID NO: 136254

SEQ ID NO: 237287 - DNA, 336 bp, Klebsiella pneumoniae
atgctgatcaacgctattggtacctactccgccagccagccgctggaatcaatggccatcacccgccgcgacccggggccgcaggatgtacagatcgccatcgcttactgcggcgtctgccactccgatctccaccaggcgcgatcggaatgggcgggaacgctgtatccctgcgtgccggggcatgaaattgtgggtcgggtgaccgcggtcggcaacgccgtctcgcgctacgccgtcggcgatctggtgggcgtcggctgtatggtcgatagctgtcaacagtgcgaagagtgcgctgagggctggaaaactactgcgaccacatggtgctga

SEQ ID NO: 237288 - DNA, 765 bp, Klebsiella pneumoniae
atgatcgacaagctcggcaccgacaaaatgccgttcttcttcaccatgaaggggcgcaccgacgcgatgctggagaaagtctcgctgtttaagccgcactttaccgaccgctttatgcagaagctcggccacgtcttcccggcgcatttaccggagcggatgaaaacctggcgtgataaatatgaacatcatctgctgctgaagatggctggcgacggcatcgaagaagcgcagcgttggttgacggagtacttccagcaggccgagggggatttcttcgcctgtacgccggaggaaggcagcaaggcgttcctccatcgctttgccgccgccggcgcggcgatccgctatcaggcggtgcatgccgacgaagtcgaagatattctggcgctggatatcgccctgcgccgtaacgataccgagtggttcgaacatctgccgccggagatcgacacccagctggtgcataagctctactatggccactttatgtgccatgtgttccatcaagattacatcgtcaggaaaggggtcgacgcacacgcgctgaaggaaaaaatgctggagttactgaaagcgcgcggcgcccagtatccggcggagcataacgtgggtcatctgtatgaggccccggagagcctgcagcagttctatcgccagaacgatcccaccaacagcatgaacccggggattggtaaaaccagcaagcagaaatactggggtgaagcggccccgacgccagcctctccggcggatccgcaataa

SEQ ID NO: 237289 - DNA, 3762 bp, Klebsiella pneumoniae
atgcgcgtcaccgcaactcatctagtccagtggtcagacaagcgtgaagcacaaggaatgcttccaatcctggtaaggcggcttatatctgttacatcacgtattacagccattaccatgccaggtggtgattcggtgaatgttcctggctgggatggtgttgtcgatgttgcgcaaggaaatccctgggttccagatgggctcagctactgggagctaggcacctcaaaagatccggcatccaaagccaacagcgattttgagaaacgtctggaacagatttcatctgctcaaaaatcacaagcaacctttgtttttgtaactcctcgtcgctggccaggcaaaagtacttggcaggaacaggcaaggaaaaaaaatgcctgggcggatgtactagtttgggatgcagatgatctggaagcatggctggaaacctctccagcgaccagtttatggctaggcatgcagcttgatattgccggtcatggcattgaagcagtagaaaactactgggagcactggaaaaatcaatcctgccccgcaattactgcacctgcgctatttcatggtagagagcagtcaaagcttacgttacaaaacaatattaatcagcatgacccgttgataactgtaatggctgacagtcagtccgaagcagttgctttcgtttgcgcattgttgattgaagaaggccatttcttacgtgctgcctgtataacttcagaacaaggatggcagttcattgatgctaatcccggcattgaattggtggtcattaccaataaccagttgagcaagagacgagccccacgcgaaggtatgagcttaatagtaccgatggcatttggagaccaggccttcaatctcatgggaattgggtgccaagcaatagatcagaaaatagtggaacttagacgtccacaacctgaagagtttgaaaaatccctttgcgagcttgggatcgcatcctctgatgccgcacggtatacccactcactgggaaggtcatggacggtttttcgtcgatggcatgcgcaaaatcctgtgttcaaaaaaccagattggattgaaggtgccaacgccaaaaatttattgctacttaccctcgtgggtgcttggaatagcgactccgaaggggacagggcttgtgttgagcagattgccaaccgcacctacgaagacattgaaaatgagctattaagtttagctgcgcttgatgatgcaccagtcgtaaaaataggttctctctggaaagcgaaagcgccaatggagctattacatctaatggcccccaaactaacgaacaccattctggcaagattctttcaggtagctcgagctgtatttgaacaaccagatcctgtgctggaactggaagaggacaaacgatggatggcctcaatctatggcaaagttcgcgaacaatccggtgttgttttggaggcaatggcggaatcaattgccaaactcggctatttttcagacaattttcagcatgttgttattggcaattctgtacgaggctttattactcaactcctggaagatgccaatgaagaacgttggctctccgtttcattctttcttcgagcgctagcagaagcggctcctgatgagtttctgaacgccgttcaaaacagtttgcatagccctgataaaccagtcactcgcctgattaaggaaacaacatcatcaggtatatcaggccgctgctggcatgccagcctactttgggctttggaattgctggcatggtatcccgccagactcggacgagttgcgagtatccttgcggaactatcaaatatagaaataaaggggaattggggtaatacaccatttaataccctggtttccttttttcgctcttggtatccacaaacagccgcgtccgtcgatataagactccgagcgctcagaaatgtcgtcgacaaatatcccgaagtagcctggaaacttttgttggccctactacccaaccgacatgatatggtttcacccaatgcaaaacctcgctggcgtgacgatgatgcgggtactaacgagagcatcacctatggtgagattcaacgattcatactacctgttgctgatttattgttagagaaagctcaggacaatgcccaacatatcgctgatcttgtcccgaaaataaatgatatggataccaatttcagagaaaaggtaatagaactggtaggtaaagctacaactttacccgatgatcagcgagaaacagttcgcactgccgtcagacaatttctgaactgggaaaactcttttaaccaagacggtgataaacacgatcgatattcagctgatgtgttgagaccattttttgacaagctagctgcggatgatctggtagtcaggcattcatggattttctccaatggatggattgaactcccagacgggcatgaagaagatcatgaaaaagcgaacaagacaagaaatgcattgcgcaccttcgcccttcgagaaatattccaagcattgggttggtctggtattcatagactagctaaacgttgtggagatccgcgacttgttggctgggagcttattaaagaaccattcgaacgtgaagaaatggcggaatggctgtgtcaatggtatctggaggcatcacagggttcatcgttatatgattcactgaccagcggtgtacttcatgcgctacctcaagcagaactccttgatttcctcgatacatgcttatctcaactcgagcaaaaatccgcctcttccgaaaagatggctggtttcatggtaaatgctccgcaaggaatgagcttgtggcaacttattgaaaatcaatatcaaatgcttctcgatcatttctggttgaatgttcgaccgtcttatttgcagtcgaataaggagcaattgctcttttgcatcgaaaaactacttgccgcaggaaggccgcgaacagctataaatgctatgggagatcgttctagcgacttaccaggggagtcgctaatcctgattctaaaaggcatcgctgctggccaagaagaagatgccgaattcccgcgttcatggcacatttctcgtatattcaaggcgcttactgacgcaggatacaatcctgcagaaatggtaagtctggagttcatttactatccactacttaaaagagacgaatatggcgcaccatatttaatggctgaaatactgggtaatccggatttttttatagagctcatctgtctcgcttacaaacctcataatacagcacgcgaacctttacctgagcatctacaaacagcagctcgaacagccagtagtctactccacgaagaacacggcgttcccggtatggaccacaatggagaaataaatagtgaattatttttctcatggatcaacagagttcgagagttggcaaaagaaaacgatcgggaggttgtcacggacctgactatgggagcctggttttctgactggcctttaaataaaaatgttgaatgttggccacacccaatcattgccgatttattggatcaggatgaatgcaaagacattaggcgaggtttcaaaaccggagttcataacactcgaggtgtcactacccgtatgctatatgacggtggaacgcaagaacgacaggtttcggaaaaattcagatatttagcgaaccattggaaggatactaaacctaacgttgccatcatgatcgaagctcttgcaaaatcttacgagtatgaagcgcagatgcatgatgaagatggtttatggaatcaagaatcatga

SEQ ID NO: 237290 - DNA, 762 bp, Klebsiella pneumoniae
atgagctattacgtttctgccgtctccgatcgggcacgcaataactggccgaaaatatttgaacaacttggcattttcattccaccaaatcatcggcatggcccgtgtccctgttgtgggggtaaggatcgcttcaggatggatgatctggaggggcgcggcacatggttctgcaatcagtgcggcgcaggtgacggactggatctggtttcccgcttcttcggttgcgcactggttgcggccgccgaaatggtgcaggacatggatcctgtaccgctggttccgccagccagggaaaaatcacaggctttgaatatggaatcgcgtattaagacactgcttcgtcattgcgaatccggagaagcgccgtatctgacaacgcgaggctggcgacgagcccagtggcttctgactgagcgtagtagccggacaatctgcggcgtacatttcggggcgggtacgctggtattgctaattcgaaatacaggcgcgcagctgacaggtgcgcagttcattcatcctggagggaaaaagtacctgctgcccggtagccatctgaaggattgtttttgcccgctacatcaggcgagccgcaacggtagaccggaaccctggacattggacaacaaaccaccggaaggcatcatcattaccgaaggatatgcaaccgcgcttgcggtcttatgccttcatcattttccggtcattgctgacctgtcggcacacaacctgaaaaatgtggccatcgctttccgggcgtag

SEQ ID NO: 237291 - DNA, 564 bp, Klebsiella pneumoniae
atggaacacttaaccattcctcctgcggtcgctcgtaatgagcttgcgttaaaattttcggctcacccaacagttttggtgatgctcaatcgtatgaagaattcacagattgttgttttgtgctcacttcttcggggtgaccgtttgacttctgctggaaacaatatcacggctgattttgaagtgactcgactcccagcgatcattgagattcttgagaagaaatacttcattcctgttcagcactgtaatgttattacgacatcggttacagcgcggagtgcaacaactcaaacattctatgtaatggacaaggacactatctctcagattctttctgagcctgaagccgtttttcaggagaagcggagagccttggttaaaaccgaagccttgaaagctcagaaaaaactagatggcttaattaagaaacatggcggagtcaccgaaaccttactgtatctcactcatcatgcttacaaggataaaatgttaagtaatgaagagtggagggagctggatgagaagttcattgagatactgaatgaactaaacgctgcgtag

SEQ ID NO: 237292 - DNA, 900 bp, Klebsiella pneumoniae; identical to SEQ ID NO: 110970

SEQ ID NO: 237293 - DNA, 666 bp, Klebsiella pneumoniae
atggggttagttttgaattacaagataaatggaataattatacgttcagaaaatgctgccaaaccatatactatgccatctaattatctctgcaactatattgaaagctctattaaaagtggcagggcccttgattttggatgtgggaagcttaggtattcagaacaattggtaaataaatttgagactgtaacatttttggattccagaaaacaacttgaaagagtgcaaattatcaggggtgtacaaactacaatcccagagtatgtggctaataactataaaaatgctaatgctgttccttttgaaagtatagataaaataacgaaccattatgattttatactttgcgcaaacgtgctttctgcaattccatgtaaatccactatttacaaagttatcagtgcgattagagatttattaaagagtgatggggaggcaatgattgttaatcaatacaaaagctcttattttaagaagtatgagagtggaattaaacatttgcatggatatatataccaaaactctcgcaacgcttcctattatggtttgttggatgaaaatattgtaagtaaaatttgtttagataacaacttggtaataattaagtcatggagaaaagcaggcagttcatatgtggttgttggtaaaaataaacatatttag

SEQ ID NO: 237294 - DNA, 2424 bp, Klebsiella pneumoniae
atgcgtgacgtcctccccttaaagcctagttatccaagaaagtttgacatgctcgtcattgatgaggcgcacaatatagctccagtgggtagagctaactatgcaatggaaagccagcgtactaggtttattcgttcgataagcccacacttccaacaccgtttgtttttgacagcgactccgcataatggctataccgagtctttcacttcgttgcttgagttgctggatgatcaacgttttgccagaaatgtacttccagatgagaagttgttgaatcaggtgatgatacgtcgcctcaaaagtgatctggtcgattcagagggcaatccactttacgctcaacgtaagctcaaagccttatccgtcgaatattcggttcaagagcgttctatccacaaaaaattggatgaatattgccatagccgggagcaaggagcagagaaagccagcaatacttttgggacgacctttgtcaaccagctccttaaaaaaagacttttttcatcaccagcagcctttgcatctactcttgaaaggcacatatcaactttgacgcatggcaaacggcctaatgataaaaatgccatggctgatcgtatccttcataaagcaatccttcgtctagaagaagattacgctgacgatgaagagatagagaatgcccaatctgaagcggtggaagaagcaacacattacacccaaccgctgacgaatgaacagaaacaaatacttgatgtattgcgtcaatgggcgcaagtagctaagaatcaggtagactctaaagctagggcaatacttgattggattaatacgaatcttaaaacaaataatcagtggaatgagtaccgggtaattctgtttactgaatatcgaacgacacatcaatggatgcatgagattctggccagccacggacttgctggtgagcgcttagctgttttacatggcagcatgccgcaagaagaacgagaaaaagttaaagccgctttccagacatcaccaaaggcttctgctgttcgcatactcctcgcaactgatgccgcctcagaaggtatcgacttgcaaaactattgtaactaccttatccatttagaaattccatataaccccaatgtaatggaacaacgtaatggtcgtatagaccgccacggacaacgccaaaaagaagttgtaatttggcacccggttgatggtgtggataaggtgaatactcgtatcggcggtcacggtgacgatatcctacgagcattacgcaaacttgaatcaatgcgggctgacatgggtagtgtcaatccagtcatcgcacctcaaatgtcaggactgattgaaggcactatcaaagattttgatacacgtctggctgaagccagaattgcaaagacgaaacgttttattagtgttgagcgcgaactaaaagagagaattgcgaagctacatgatcgactcctttcagccagacaggagcttcatctcacacctgagcatatacaaatagccgtcaatacagctctcatgttagctggtcgtacaactcttgaaccttttgaattacacgatgctccctcaggttctgtattcaggatacctgctctctcaggtacatgggcacgttgtcttgaagggcttcgtcatccccatacacaggagattcgtcctgtcacttttgatcacagtgtggcgaaaggacgtgatgatgtcgtactcgtccatttaaatcacctgttagtgcagatgtgtctacgtctattacgagcagaaatatgggcgcgcgatgatataaaaaaattacatcgagttacggtgcgctcagtaccagacatgttacttgaaagccctgcggtcgctgttgtttcacgattggtgattactgggggtaatcaccatcgacttcatgaagaattgacaatagctggtggctatcttggcgacaaaagctttaggcgcgaggatggtgttaacaaactacagcaatggtttgagcaggcgaaacctctgactactgaattttcgcttttggatgcctttcgcatgcgttttgaacgtgcaaaaaacagtattcttcagtctgttgaagctagatcaaaagatcgcctgcaatatctgactaatacccttcagacccgtaaagagcgtgaattgtctgatatcaataacatactcaatgaacttgaaattactatcaaaactgagttagctaaagatcaacaacctatgcagttttcattgttttcagaagatgaacgcgctcaagtcaagcgtgataatgcagcgctggaagcccgcctcgctcgcattcccgctgagcgtgaacaggaagtacaaacaattgaacttcgctataccaacattgatgatcgcacattccctgtcgccgtcatttttctcgtcccagaatctactattcaaggaggcgcagcatga

SEQ ID NO: 237295 - DNA, 141 bp, Klebsiella pneumoniae
atgggtattaaaaatatatttttgcaagttaaaaatttattcaaatttaaaacttttattctgccacgcattgcgattagcgaacgcttacgcgtcttggtgctttgcactcgcgatctcgcaatgcgtggcagagcttag

SEQ ID NO: 237296 - DNA, 621 bp, Klebsiella pneumoniae
atgtctgttatagcactggtccgtcagcggattaaccgcatgagacgaggtataccgttttctatcagtgggttctacccgctgggaagtcgcgcatctgtacagcaggctatgagtcgtctggcaaaagaaggcatgattgttcgcgtagatcgaggattttacgcgcgaccgaaaccactcaagaatattccttccatcaagatcgtaaccagtgctgaaaaggtagtagctgcatgggctaaagagcgtggctataaaattaccatccaggggctggaggctgcttatcggctgggtatgcagacgcaagctccggttaagcgtatttactggtcgaatggtccaaccagagagtttaaggttggcaacgagactgtgattgttcagcacaagtcagaaagtaaactgaagtggctgaatcggcctgaaggggagttgttacgtgggttgctgagcctgagtggaaagtatgcccgtctggaagcaatcaaaaatgcttttaaccgtcttaatatctcttcccgggaagctcgctcagccattgctaagaaattagtgagtgaaccagctcttcagggatggcgtactcagcttgaactctttcggcaggctatctga

SEQ ID NO: 237297 - DNA, 1089 bp, Klebsiella pneumoniae
atgagcaacatctttgaactctataaaactgaagaagggcggggccaacttcaggaaatattcacttatgctgcacagaagcacccattgagtctgggggcgagctttctggaaaaggatctctgggttacagagatcctacgtcttctgtttgatgaaggttttcttcatccatacacagtcgcttttaaaggtggaacctcattaagcaagtgctggaatgtgattgagcgcttttctgaagatatcgatttatcgattcattgggcggaacttgctggtcattcagaagaacaggaacaagaggcctggaaagcaagtactcgtagtagaagtcagaatcaacgctttcgtgaacaacagcaaacaagactcgaagaatggaccgcggagttagtggaaaaacttaatcagcgtttccagtcttatggtatttccggcctggaggctcgtttagaggcggaaagtaggggagaaaaggtcgatatattctttcctcgtgttcacgctgatgctgcggcttaccagcgagatcatatcttattggagttcggtggtcgtaatcggggaaaaccgacggatacaataacggtaagcagttatttatccggaataaaagagctgggtgagctggagttgccatctgcaacagtccaggcatataacccaggttatattctttgggaaaaaattaccgcactgcatcagttttgtacccaagaaaaagagctaaatgcagaacgtctatcccgccactggtacgatgttgattgcctgttacagcatcagtttgccgatctttatgatacaaaagaagcaatgcataacgtgattgaaatgaagcagcagcgctggacctttcctggtgtggattatacgttggttgctaaaggtgagctacgtctggtccctgaagatgctgggcgccttgctgctatcgctgaagatcatcgaattgctattgagggtggaatgttttttaaggagcctgacgggtttgataaaatcattgaacgtcttcagcaggttcaggatgaatttaatcgtgctatgaaaaaggtaatgggacctgatacgtttaattgctaa

SEQ ID NO: 237298 - DNA, 1269 bp, Klebsiella pneumoniae
atgtcaccagctattatcactttgttgattttggttgttgcaataataatctttattagcgatcgcttgcctatgggattggtggcttttatggtcccgatggcattgtatttttttggggttattggtgtcaaagatatctttgcgtcaattgttaatgaaaatgttatccttatcattgccatgtgcgtgttgggcgcggcctttttcaaaacagggctagcatggcaatccagtaaaattttattgaagtatgcaaagacggagagaagccttagcgttttaatttttatgattagcggcgttatgtcggcatttgtttctaatagtggcactgttgctgtgcttattcccattgttttaggtatcgccgggactagtcaaatcaaacccattaaactactcatgcccttggtgtttggcgcgacaattggtgcagatatatcaattatcggttcgcctggaaacctgattgctaaaaatacaattgaaacttttagtaaagggaacttatcggtaccattttttgagtatgccaaaattggcatcccattgatgatagcgtgtgcattgttacttttcttctttggttccaggttaattccggatcgtgatgggcatgagcaatctgatgtacaaatggattatagccacattcctgagtggcacaagcttttaaccttgattgttttcgtattagcaattttgggaatggttgcaacagactatgttaaatttcttccacctattcatatcattgcttgctgcgccgctatcgttttggtattgaccggtgtattaaatcaaaaagaaacgtttaattcctttgagacattaactgtttttatgcttgcattcatgatgccacttggtgccgctttaaattcaactggagcaggtgagatgatagcaagagcggtaatttctgtaacagggaactctggcgtcatagtcatcatggcttcactatggatactgacctgggctctcactcaggtgatgagtaatactgctgcttgtacgttgttatgtcctgttggatggacaattgcacaatctatcggtgctgatccacgggctgtcgttattgccatttttattgccagtagcgtagcagtgtgtacacccatggccattccagccaattcgatgattatcggtcctggtaatgtgaagtttaaggattttttaaagccaggcttagcgataagtttcgtctgttttatcgttagcatgattttgttacctgttttttatccgttctattaa

SEQ ID NO: 237299 - DNA, 567 bp, Klebsiella pneumoniae
gtgactccgacagcgactctgactcggacagcgattcggactctgacagtgactccgattcggacagcgactcggattctgacagcgattcggattctgacagcgactcggattctgacagcgattctgactctgacagtgactccgattcggacagcgactctgactccgacagcgactcggactctgacagcgattccgactctgacagcgattcggattccgacagtgactcggattctgacagcgattcggactcggacagcgactcggactctgacagtgattccgactctgacagcgactcggattctgacagtgactcggattctgacagcgactcggatgctgacagcgattcggactctgacagtgactccgattcggacagcgactctgactccgacagcgactctgactctgacagtgattccgactctgacagcgattcggattccgacagcgactcggattctgacagcgattctgactctgacagtgactccgattcggataccgaaccgcaggcaaataatgatacccatacggcggctatcgataccgtag

SEQ ID NO: 237300 - DNA, 198 bp, Klebsiella pneumoniae; identical to SEQ ID NO: 167554

SEQ ID NO: 237301 - DNA, 162 bp, Klebsiella pneumoniae; identical to SEQ ID NO: 196661

SEQ ID NO: 237302 - DNA, 942 bp, Klebsiella pneumoniae
gtgaataaaactatttggcagcaagagaaattgccaccactagagttttgtaatattaaacgagcctctgaaatattgaagtgcaccgttgatgatttaatgcatttgggtgctattggtgcgattgagctttgtataatgtttgataacattccttcatctttgcttgtaaggggattctcgacagaatgggagggagacaaaaaaaagattctcagtgcatttaactccatagagggtaaaacaaaagactatcttttttttgataaaacggactttttttctaaattcaaaatagaaaaagaaaacattactacattcagtttcaatgcaggccgcagtgagatggccgtcttattgttagggatggcccatggtttgtgggcgttgacttatcaagatataaatatattgaaagtaaagcaaaagcacgttattaagactctatatcctgaaagacatttgtcttttcaagataataatgaattatattgcgtgttatatggaaaagatctttttcattccgaatggaataatagggtggcttacggatttgaaagtgtaaatgttaatgtaaatgacttgcttatatctcgcaggacaattgataaaatttacgaaactatgattaaaggttcgcaattacctagttttgttaatggtgggttgagcgggtcatatttaaacaacgctcatgcaagaggtgaaattaaactaacgggattatttgaagatgtttttcaagagaatataaacttagaagatagtttactggttactggcttgatgctaaacgctatgaaaaaagctgatacaccttccaaaagatggactcaggatgctctaaagaatgagattcttgataaagataaaagaatgagtgcgagattattggattcgtatttttcacttgcaaataaatcatttaaatcagatggttag

SEQ ID NO: 237303 - DNA, 579 bp, Klebsiella pneumoniae; identical to SEQ ID NO: 97732

SEQ ID NO: 237304 - DNA, 816 bp, Klebsiella pneumoniae
gtgctaagtgatacaaaaagcggggttataaaccccgcctcccgtcagaataacagcagcctttgtcgggcaggttactttgcctctttgggcttcttgcgctgccgctgctgtaattcgttacgcgcaacgctgatgatctgctggatttcctcaccggctctcatgccgatttcttcaacacgcgccagcgcatcaagggaagatagcagtaaagcttcctcgttgccttcagtctgcctgcgggcgatttcgctacgtgctgacgttactaaaaagccggcagttgattcgccgcttaattttaccgcctctatctcatccaaaacatcatgtggtatgcgaatcgatatttgccgggacttatcattgctggtgtttgttgccatgtgggtgcctgttaaatgggattgtgattcagtatacacaaaaataaatcacattaaacacttgttgtgtgattcagtttggtataatttaaatcacaccttatccacaggtagcaaacagataaggcacaaaacggcgaagcccggcagtggtggaacactaaccgggcctctgaccaccagcgttatcacaagtaacgaggtagctatgtcaaatcgtaccacaccccttacggggcgggcatctatcagcccgactttattcacctggcgctttctggcgctcaatcgccacgacaaaaaggccaaaccttgccgcctgtccgttgatgctgcaactgagcgcgaagcccggagtatccttgctccgcacttcattctttcgttggccgctcgtctgccagttcaggaggtgcaaaatgcataa

SEQ ID NO: 237305 - DNA, 234 bp, Klebsiella pneumoniae; identical to SEQ ID NO: 97735

SEQ ID NO: 237306 - DNA, 213 bp, Klebsiella pneumoniae; identical to SEQ ID NO: 97736

SEQ ID NO: 237307 - DNA, 189 bp, Klebsiella pneumoniae; identical to SEQ ID NO: 97737

SEQ ID NO: 237308 - DNA, 345 bp, Klebsiella pneumoniae
atgaaaagaaataaaaccggatgcaattccggcggctctgctcatcctgaaatccgtatcggcgaccgctggaaagacagccatgggtcaattattaccatcgcagaacatcagttaaatcgggtgatcttttaccgtgaaggttatcactccccgtgtatgtgtactcaggacaggctgcatcgtgagtttactctggtggaaaaatcccgactcactgacaaaaccgatatggcgcgggtaatggaggctcagggcgtcgaaaaaatcagcatcatcaacgagatcattagtcgcgctgatacgttgcacattgattcacagaaggaagggactgcgctatga

SEQ ID NO: 237309 - DNA, 642 bp, Klebsiella pneumoniae
atgaacgatgtattagctatttacggaatatcttcgctggaaaacataatttatgcagaagctacgccagaaggtatcaacatgccggtgcttaacagtgaggatacgaatcaatccttcctgatggtggactatcccacggctattcgtttgcttgatgaggggcgttatgacgacgaattcccgacagggctgcaatttgtcgccggggtgctggacggtgatcttaagcgctactacatcctatcgaatgctcagaaagcgattgtctatcgctggctggtggtgttcctgttcatcatggagcagcaggagaaaaacagactggcgggtattaccggcgatgacggaagcgcgggtcgggcggtggtttattccggtgcgcatggtgatctctacgtttccccattaacagaacgtatttttctggccaataacgtcgaagctgtagcaattcaaaattatggggttgaaacgggtcttggtatagctgttcgcatgtatgaagggatgatggaaatatcacccgaaggctgcatgtacctgtcatcggaggggcgtgaagaactggcaagactttacgacagctttatcaaaacgctgaagactgacggcctgccggccacaccagtgatgcattaa

SEQ ID NO: 237310 - DNA, 2139 bp, Klebsiella pneumoniae
gtgaaaaatgcaccaaacgttaaaagcctgccaaaggataaatttgttgaggctgttatttttgccggggccgatgcttactcccacgcgaaaggctgggaagaaggcatgggtaagcagattgcccgtgactcaacgccgccagtctggctggggccaaagcaactggctgaactggcgaacctgcgcattattgacaaaggacgacgctgtgcacgcgtctatctggccggggatattgaaccgctcgtgattaatgccatcggcgaaaaactggcactggctggcatacaggatgcgaaattatacaaaggtattcctgatcagcagccggaggactggcgggagtatttagcgcgagtgcgtgagcaggcagaacatagcgaaagtctggttacggaggttaaccggatgaaccgaaaacgcgcaccggcggatgagcttgccccgtgtgttgagtcccgcgcgggcggtctgtattgggtcacaccgaaaatcgacaggcagtctggagaggtgatccgtccgggccagtggttgtgcggagaagtcgaagtgctgggaactggtgaaggtgacggtattgattttgtgatactgcgctggaaacccaccggaaaccggccggaacgcacggaagcgatcccggctggtgatatcggcaaccgcgaaggttgggcacgtctgagcaaccggggattgcgtgttaccgccaagccgcaactgcgggccattctcgcagaccatctgacggacagtgataccggtgaactgtggaacgttgccacgctgtcaggatggcagcacggcgtatacatcatgcctgacggtgaaatcattggtggcagtgataaacgcgtggtttttcatggtcgaagtgcgacggcatccggttacaccgtatcgggtaccgcgcaaagctggcgcgaatccgtggccgcgctggtggaaggcaatgattccatgatgctgggcgttgctgctgctctggctgcaccactggtggggctggtgggcgcggatggtttcggggtgcatttctttcagcaatccagcgcaggtaaaacaacaacagcgaatattgccagtagtctttatggcaaccccgatatgttgcggctcacctggtacggtacggcgttgggtattgctaacgaagcacaggctcaccatgacgggttactggcgctggatgaggttggtcagggagcagaccctaaatcagttgccacatccgcttatacgctctttaacgggtctggaaaactgcagggagctagagaaggcggaaaccgggagttaaagcgctggcgaactgttgcagtgagtaccggtgaaatggatatcgaaaccttcctgctcagtaatggcatgaagcccaaagcagggcaactggtacgcttgctaaatgtgccgctggagaaatccaccgcatttcatggtttgccttctggtaaggctcacgctgatgcattacgcgatgcctggacagttaaccatggtgccgccggccgtgaatgggtgcgatggcttgctgaccaccagcaggaggctcaggaggccgcagtcacagcacgtgaacgctggcgcgggttaatcccggaaagctatggtgaacaggttcaccgggttgcggaacgctttgctgtgatggaagctgcgctattactgtctggccatattactggctgggatccgcagcgttgccgggatgcgattcagcataacttcaatgcatgggtgaaagagttcggtaccggaaacaaagaacaccagcagattattgagcaggcggaagagtttctcaacgcttatggcatgagccggtttgccccactgaattatgatccgcgagatttaccgatcacagagctgatggggtatcgggacagcggagaacgttttgacgatcctatgctgttttatgtactgcccgcgccgtttaaaaaacatgtcgctggtggccacaacaaagacgccactgcgaaaatactccatgaagccggaatgctcaaaaaacccaccagtggtaaaaactggcagataagaacgccacggcttaaacatctcaacaacgccagaccgtggacgtacgttttactttttgccccagaatcagaggaaacagaaacggagtaa

SEQ ID NO: 237311 - DNA, 165 bp, Klebsiella pneumoniae
atgagtcagattatatttatcgtaataatttcaggagctttcctgtgttactcctatgccttcgataaaaaaggattcagcctggagcctcaggctcgtgctgcggcgtggtttggctttgtcgtttttggtctcgttttgcttgggcgcttagttggaaattaa

SEQ ID NO: 237312 - DNA, 2475 bp, Klebsiella pneumoniae
atgcgtcaggaatgcattcaggcagtacaacaggcagcgcagcgcactctgagcgctcgtgaaattcagaatattgaagaccgtatctacagaaacatgcgatcactggcgcgtaacgaccctgcgtcgtggcggatgctgtccgaggccgaacgtctgcgtcgggcagggcaacttgccgccgacgagttaaagcaagaggcggcgttaaagaaacgtcgtgttgcgttaactatcactgcccgccagcgccttgattcatttattaataattacaaagggaaagacggaaagctggaggcactgaatcgcactatagcttttcacgctgatggcaaagcaaatttcctgtctgttgaatcccgcgggaaggctacgcgagattatgcgctcagccagctgcaggaagcctttgaagctgttgaccctcgatttttcggcctgttcgaagatgaaaaaggcgttcgtgatctggtttatgaaattcgggggaaaagtacggggaatgctaaagcccaggcaggggcaaaagcctggaaggatgttactgaattgctccttcgtcggtttaacgatgcgggtggcgacatcgggcatctggatgactggggcatgcctcagcatcattcaatggaaaaagttggcaaggtttctaaggataagtgggtcagcgatatcattgggaaacttgaccgaaagtattacaccaaaagcgacgggcaactgatgtccgatgcggagctgacggcgtttctgggtgaggcatacgagactatcgctactggtggtttaaataagctcagcgatacaggtttgcgtatttccggggcgagagccaaccggggaaatgcttcccggcagatccatttcaaagatggtgaggcgtaccttgagtaccagcgccagtatggcgaccgctcgctgtggaaaataatggtgcatcatctggaaagcatcagcaaagatattgcgctggtagaaacttacgggccgaacccggatcacgtattccgttctattctcgacgaagtcacatcagaaacggcaactgctaatcctcagcgcgccgggcgtgtaaagcgcctggctaacagcactgaaaatctttacaacttcatttccgggaaaacacaaccgatagcgaatccgcatatcgccagatggtctgacaatatccgtaactggctggtggccagccgtcttggctccgccctgctcgcatccttctctgatctcggcactatgtacctgtcagcaaaggtcactaatctgccaatgaaccagctattccgtaaccagctggaggcgatggacccgacgaatcgtacagagctggcacgtgctcgccgggccggactggcgatggaatcattgcttggcagtgtaaaccgatgggcgatggataacatggggccgtctgtttcgcgctggtcggcaacggcggtaatgcgcgccagtggcctgactgcatggtctgatgcgcacaagcgtgcgtatggcgtcacgatgatgggcagtatcggggatgtggtgaggcgaacgccagatcttcgcagtctcgatgacaatgattttcgtattctgaaaagcaagggggtgacagagcaagactttgctatctggaagctggccgatcaggaagactgggggaacggtaacaccactatgctgacgccggaaagtatcatgcgcattcctgatgcagcattacagcatattggcccccctgagcgtgtcagatttgaggctatgcgccgtctgctcggtgcagtgtcggaagaagttgatatggccgtgattactcccggtgcgcgtgagcagatggttaccggttcaggtattcagcgaggtacatggaaaggtgagctaacccgcagcgtgttcctgtttaagtctttcccgatctcggtggtgatgcgccactggtcacgtgcaatgggtatgccttccgctggtggtcgggccgcatacattgcaacttttattgccagcacaactatcctcggagcgttgtcacagcagttgaacgatatggcatctgggcgtaacccgcgggatatggttggagagggggcggggaaattctggcttggtgcattgcttaaaggtggcgggcttgggctgtatggtgattttctattatccgatcatactcgctatggtggcggcgctctggcgtcaatgcttggcccggtcgctggtctggttgatgatgtggttaaactggggcagggaataccgctcaacgccgtagagggcaaaccagaacaaacggggggtgatttggtgaaacttggtaaagggctgatacccggcgctaacttgtggtatgcaaaagcggctcttgatcatatgatttttaaccagttgcaggaatatttttccccgggttatcttcgtaagatggaacagcgttcccgcaaagagtttaaccaaacatactggtggcgaccacaggatccgttgcctaattag

SEQ ID NO: 237313 - DNA, 1809 bp, Klebsiella pneumoniae
atgagttatttcggattaaatcagtcgaatcaaaaccaactgtcagaaacagcggcatccagccccattggtttaaaaagtgatgtcggttttttcgataatgctgtgggtgccggtgtatcaggtttgtattcgggccttgtggccaaaccggatcagttactttgggcggggatggataaagttgtttcccctctgtcccggtttattaatgaaaatacacccgtacgggattcttctgaagaatacattgccgagcagagaaggctggcaacacagcaggttaagcgtctgactcccgatgccggtacaaccggaaccgcgggtcagattctgtttggtctatttgatatgggtggtcaggctgtcgccggtaccgcaatcgggggcccgctgggcggtgcggcggctgttacctcgcttcagggcttttctgagtttgagcgtctgaggtcggaaggcgtggatttatcaacggctcaggatatcgcgttgattcacggtataacgaccggcgccggtacgctgatccccatgagtatcggtctgcgtgctggtggcgcgctggcggaaggtgttggcgcgcagatatccagaacgggcgagaatgcgttactcaatgccggtgctgccgtagcgcgtgctgcacctgacgtagcgtatgctgcgggttctaaccttgcatttggtatggcgctacgcggaatgacggcagaaactctgcgcaactccggttacgatgatatggccagtcagtacgatgtttttgatcgccaggcgatggcgattgatgcagtgctcggcgttgcgttcggcggtcttggccgctttgttaactcccgcggcgagaatgtccgtgcgccggagttttccccgtctgatgtcgatgcggcgctggcggctaatgcagcccaccatgcagaaattgatattgctcccggaataccggtcaatgttctgtcacgggatgcgcatgctcaggcattacagcaggcaatgcgcaatgtcagcgaaggtaatcccgtcgatgtggccagcattgtcgacccggcagcattcagcgaaatacccgggcgccgcagcctgattgcgcagtctctggatgaggtgcttttcaatgcggaggaaggaaccgccgcgcgtgcggcagatacgcgccggcttgaagaacaggccgcgcagttgctacctcgcggcgaacgtcaggtttaccagtctgaagtggctaacagccagcgcctcatcgataacctgactgagcagcgcaatcagatcctatccgaggaacctgcggggaatggcaaagcgctggcacgtgcgagagccgacaagcagggtcggctgcgagacttcgaccagagaattacagaggcgcagaggcgtcttgagttttcgcgtaatacgctggcgccccatgagcccggcggacaattctatgaggcgcgcgctgaactttcccgcagacggcaggcagaaagcgatctgaatgcgcaggcgctctcatattacaaaacggccgaagtgcgtagcgctgatgaagctgcgccacccgataccgctactcatgtccgtaatagcgaccaccagcgcacacagagcgaaagcgaaacgggcgacattgatgtgaaagccgcagaggaatcgctgaccaccgcccccgacatgatgatcaccacgctggacgatgaaggtaatcctcagtctcgccctgctcgtgaattgcttgacgaggcgaatcgtgaaaatgaacaggctatacaggattcaggcctttttgatgtcgcagtcgcatgtttcttaaggggataa

SEQ ID NO: 237314 - DNA, 2553 bp, Klebsiella pneumoniae
atgagaatccctacaggtaactttggaaacgtcctacctcaggcgcagcccacccgagtcgatgttggtaataccggtgctgtcggggacgctgtagcccagctagggagagcgggacttggtgtcgctgaggatatccagcaacggcaggagcaggataaccagaacgcattgcaggcgctgagtaccgctggtggggctcaggttaataaactgctgtatgacccggaaaccggcatgatagcaacccgtaaagggattaacgccgttggtgcggccaacgacacgctgaaagaatgggacgcctggagagataagcaactctcgttacttccaccagcagcccgccagcgcggtaaaatcctcctgacggcccaacgagtacagatggagcgaaccagctttgtatacgagcagggagagcgagagcgcgcgttgcaggaaacgtacaacgcatcgaataacgccagcgttcagagagaaagtctgttttacggtgacaagatcagtacccagcttgaggccggttcccgcaatcagggtattgatgagtacggtaaagcgcagggatggcccgaagaaaaaatagcgttcgagaaaacgctgtggcagcagaaagccgcttctggtgcatttgatctgttcgtcagccagcagaaacaatccatgatggggccgggtggcgctctcccgactacaggtacaccagaccttagccagctggcatcggccaatatgtacgttgaaagccggggacagcagttccgcgccgatggctcgcctctggtttccggtgccggtgctgtcggcatcgcgcaggtgatggagaaaactggcccggaagccgcaaaatatgccggggtggaatggagccgcgagcgctggcttaacgacccacagtataacctgcagatcggtaacgcgtatttcgagcatctgggaagcaaatacagcaacaacccagtacttacggttgcggcctataatgccgggccgggaatggttgatgactggattaacggcaccaataagacaggtaagaacgaaagcctgacgaaaattggcgatccgcgaaaaggcgagatatccgatgccgggtttacatccgctattccgctgaaagaaacccgcgaacatgtacagaaagttttgggtgcagccgccagcattccaccgggcgcgacaattggttccatatcccggatgccgttctggaataaaatgtcaccgcaggatcagagcagcgccattgataagatgtcagcgctgtacgacatgcgggcatccgccggccgcgtcgccctgcaaagcaaaatgcaggatgatcttgcgcttctggaagcgggcaaaaacgtttccccgataacgccggaagcgtgggcctccaccctgcccgtacaggcgacaccggcagagcgcatgcatctggagcaaacctaccgccattatcagcaggcaatgagccttcagccagtctatcagtccatcgtacagggaacgccccagcaggggctggccgcagtgcaggcattgcagccacaagaatccgcccctgattttaaataccagcaggagctgtacgccactgcacaggctaagctgactcaggtactgaaagcccgcgaagcggatcccggcggctggcttgtgcaaaatgacgaaacgacccaaaaagcattctcagcctattcagctaaccctgagctactgggtgattatgtgaaaaatgtcataatccaaaaacaacgctttggcattaaaagcgatgcagttttacccaaagcgcaggcggaggctttatctcaggctctgttgcagtcaacaccggaaaaccagtcaagactattggacaccattcataaaggtaccggcggtggcgcgccttacatggccacgctcaagcaaatagcgataaatgctccctctgcggcggtcgctggcatcctgatggataagccttcgtcgttaattgctcaggaaaactggatcaatcctgatatcacgatttcaccttcgcaagcgtcaaaaactattctcgcgggttctgctgcacgaaaagggactaaagatgcaaaagggatgacgatgcctaaagaaaacgacatgcgccttgagttctccagtgctgtgcagaatgcattcgccggtgatgctcagggagccgcaatggcatatgaggtggcaaaggattactacgcgggaataatggcccagaagggggattactccggtgttctggatgatgatgtctggaagcaggccgttaatgtgtcaactggcggtgttcatgactataacggcatggggtatgttctgctgccgtggggtatgtcgccagagcagtttgataaacaggtcgatcaggcgtggcaaacacaggtcactggtgcgggaatcaaagcaccgccagggcagtatggcctgcaaagttacggtgacagccagtatctggttaagctcggtgcagggtatctgcttaaatctgatggctctccggtaatactggatctgactcagcagcgtcagcgctttatcgagggcataccgcaatga

SEQ ID NO: 237315 - DNA, 300 bp, Klebsiella pneumoniae
atgcctgttgtcgtgtcttatcgttatgactggttccgtataatcgaggacatttcacgagagggcctgacactcagtgatattgcgaaagaactggatgtatcaaaaacagcggtaattggctggaagcaaggagccgaacctcgttactttgctggtgatgctcttatctctttgtggtgccacattaagcaaagacggaaggaagacctgccgactcaaatcctgtcgcgaaagttcattcataactacacatcccggcgttacgcaaacacgcaaaaacatgtggacaccgcatag

SEQ ID NO: 237316 - DNA, 498 bp, Klebsiella pneumoniae
atgaatgaaatcaaatcagaagtttactcatgggctgctgagaccagccaagagcatgttgctattgagatctgtaaggcgtggtttgtcagtggagaatgttcagagtacataaaactctacccaatggatgatgcttacggccaggctgactggcgggccataaataacaaccggcaaaaactgttccggtggtttgatgggcagtctgccagagcagtcgcaagaacaaggttacttcgaaacgctattttgacggcattacctgctgaacgaagggccagagtttccggggataaaactacttacctgctgattatcctgaccaaagaagtttccagaattatcactgcggctttattgcaagagcgtgacatgtcacaacagattaattccctgcgtaaagtgctcgatagccttgaaagcagcttaaatggcgttgacaaaacgcgcgcgcgcgcgagtacaaagagggctgaaacacgtcaactcccatag

SEQ ID NO: 237317 - DNA, 447 bp, Klebsiella pneumoniae
atgcgataccggtttggtggtaaggaaaaaacgctggttattgggccctatcctgaaatctcactaacagaagcgagggcaaaacagtcagaagcgaaaatgaagatgctggccggcgtagatccggcagaacagaagcaggccataaagaagaaagagaaagaagagcttgctgatacctttggtgacatcttcagggaatggcacccccataaatcaaaggtatggtcgaagggatatgctgacgagatgatgagcatgttcacggatgacatactaccgatcatcggacatctgaaaatggatgacgttgaaccgatggttcttctgaaggtgataaggctttttgaagacaggggcgcaatggagcgcgctgataaagcgagacgcagatgcggggaggttttcagttatgaagtggtcaacaaaaactggccaccgcgttag

SEQ ID NO: 237318 - DNA, 864 bp, Klebsiella pneumoniae
ttgctagctctgttaatcattcctattctggttagcggttacataatgataactgctaaccaatatcattatttccgtttgtatcgtcatgaaggccaacttctttatatgaaggttgcggctcttgggacttactgtttagtagcctccgcagttattgcagcatgcattaaatatttttatcctgattttcaccttgtttttgacatgttaaaaacatttaaagtgacatcgaaacaagaaacagacagaatttacatgtggttaattctcctgtctgcaacctctattagtttctcattgtgttatgtcactataatatggataaaggattttttgtgtggttgcgtttataagcgcaatgtttatgacgagataatgcaggcaatgagagccagggtattacgtaaaacatactcacaaggctctttagatttacttttgctggatgcaattgaatcagaccccaaaaggccaatgctgatcaccctttcatcaaacaaggtgtatgttggcgtaataaatggttcaggtgaaccaactgagaatcagggaccgcaccagcatatttcatttgtaccattgatgtcaggatacaggaataaagaaaatttatcagttacattcactaatgcatatcctggagagatacaggttaagcgaaatgctgctgttatgggcgttagtaaaaagaaagtgcaaggtctggaaattatggtatccattgatgagataagctacatatcatggtttgattttcaggtataccaggccaccaataacaaggttgaaagcagggggcacgttattggcgttacaagaaatggaagaaatatttatcgcaaagctagaagtaaagaataa

SEQ ID NO: 237319 - DNA, 180 bp, Klebsiella pneumoniae
atgaaaaaagaagaccatgggtttatctcggttaccaactcaatcaacgaggtaaaaaacctgttcgtgggtaatgcaatcccgaaagagggtgaggttcttgagctggtggtcatcaaaagcgaaaccaccgatgactcatgtgcattggtgctcaaattgcgcacagttcaaaaataa

SEQ ID NO: 237320 - DNA, 741 bp, Klebsiella pneumoniae
atgcatcaaactttagccaacgcaacgtttcaggtcattgcaggtgattctcgtggtagtgggttcagcttcatgcgagaagatttggtcgtaactaatttgcatgttgtcgccacatgttgtgacttacaggcaatacgtcaaattggacctgtcacccttcaaaccgaagcaaatgagcatattggcgctcaaatattgctcatcgatggtgacaatgactttgcgattatgcggttgcaatccccgcttcctgcggggagaacagtacttcaaccatccgcgggatttaatccaacacgaggaaaaaagttaatctttgccgggtatccgcacgggattcctcaattgcttacgaatgaaggaatcatttccgcacctctggatagtgggcgttttgctctcgatggaatggttaatggtggaaactcaggcgggcccattattgaccgggaaacaggaaaggctataggcattgttactcagcgtcgatatgttttgccgcctgatgcgcagcaactctctaatgaagttgcccagcttcgcggctatttagcgcaggcagcgcagcaaatgtcagtggaagtcatgggggttaacttcgcacaaatggcagatatgttcagtcgctcactgcaaatggttaatcaaatgatgaatcttaatgccaatcctggcattgggactggtttctcgttagaaccaatcgtaaatgcagttaattcacttcctcaaaattga

SEQ ID NO: 237321 - DNA, 210 bp, Klebsiella pneumoniae
atgcaagacctgaagattgaataccgcgatggcaagctggtagaactgagcattgatagtgtgagctttaaaaccgtcaccgcgatcaccttcaaccatgaagccggcgagacgctgccaaccgtcagcctgaccttcccgctcggagtcggcgaacggctggtgcccgccaccctctcccgcgaaaacctgcgaatcattgagaagtga

SEQ ID NO: 237322 - DNA, 369 bp, Klebsiella pneumoniae
atgaaaaaatacagtacaggaaacccaattttaaatctttcacgcacccttcaggatggcattaacggagactgcgatccacaaatcaagataattaggcgcaatagcgagacagcacaacctcattcccgcatgcggatccttatcgaattagatggcaaggttgtctgggcagttcccgatgaaaacagcgccggaacgacagtaagttgtcgtgagtttttcgaagatggcacaatagaaaaaatcatttccgctctgaactgggctgaacgagcagccatagcaagcaggaaattctaccggaataacgatggggcatttttcgaagaaattccggcagaaaatatcacttacgcttcggaatga

SEQ ID NO: 237323 - DNA, 381 bp, Klebsiella pneumoniae
atgttcatccctgataaataccgttcagtcacctggctgaagggcggtcgcgtatatccgcagctcgactgcttcggcattgtgaacgagatacgccgggatttgggcttgcctctctggcctgattttgccggggtcacgaaagacgacggcggcctcgaccgggaggcgcgtcaaatgatgcttaccctggagcgctgcgacccctgcgaaggggctggcgtggcttgctattccggctcagccgtcacccatgtggggattgtcgtcagtattgatggcctgctgcatgtggcggaatgcaatccaggctctaacgtaacgtttcttccgttagcgcggtttaagcggcgatttgtcaaagtggagttctggcaatga

SEQ ID NO: 237324 - DNA, 1791 bp, Klebsiella pneumoniae
atgaccacatataaaaccggtaaccagctgggttctgcagctgtgaaggatttatttgataacgctgagaacctggatcattttgaaaacgatcgcagtaatgagacgtgggaaaaccggtttggggtgccgggtaaaacccggtatgggatggagcaggaacatgatcggcagatttctagccaggaagctcgtttccagcagttcctcttgtcatccggctacgtgttcctgggtgattaccaggatggcccgttccagttcagcgcccgcaatcagtacatccggtacaacaatcagtattaccggctgaacgctgccacgaacgtcggattcaccacgactggtacgacagcggccagttttgcaaacgacgtcagccatttcgttttgatagatggggatacgctgcgacaggagttggcatcaggtggagagggggctggcgatgccctgttagcggtaaaacagccattccccggatcggtgctacgaactcagcatgataaaaatgcggaatttgttagcctggacgatgctggtggtgatcgtgattcgtttgacccagagtcactggaattgttggtaaaggcgattgctagccagttgcgtattccgtacctgggcgcacaacaatttgcgttaccaaatcaaactctgaaggttttcaattatctggatgggtttaaagaccggggcgccgttgtatcattcatgaatacggcgtctcctgatgcatcagagccggatacgcaggttctggggctggcgaatgccgccgcactgggtaaatacgcagaccgtgaccaggtttgtgtattcgcacagatggaggggcaaccaccgctactcacgtcaacgagcacagtatttaccgccaattctgtatcatcaccagattttgctggtattgccgctaaattacgtaaaaaacaaataatcgacgttgttgatgctgcaaaccctacactgttatacagcgggatgattattgcattcaattcatccacaaatacaattctggtagacacggcctggtatgtaaaagggggtaacggaattaccgtaggaactcctgctaacaactcacaaataaaaattgtccccagtacaaaaatatggggtgcaaacgttaacgtgatgctaaaacccagttcagatgccataacatatgcaggatttgaattaggtctatacaataacaaaaatacgttccctaccggatatggctatgatgcctactcagggggtacatatccagcggagaatggttttcaggcacgcggaaaactttattgtggattccgtaattactccgctggagaatttgggtttattggaggcgggcacacttacggatattacgataccggtagccaacgcggattgttcacatggaataatgtctatggggtcaatataaaatccccaacatcatatgcgttcatagtacaggattctgccaacggatttataactggaatggatgcgaatggtgcatggcaggggatgaaggaatattcaactacaacctcaattggcagtactgtatccagttacgctactataacctacgccaccccggcagttagtggtgatgccatagtattaccatcacccaatgcctataaaaaattaactgttaaaaatttgagtttatctaatgacctgaaactaaccgggtcgtttgagtttggtggcagtggaatcacagtcgccgctaaatgcgccgtcaccctccatgcagccgatggggttcgctggtacgtcatttcaaaatacatcccatag

SEQ ID NO: 237325 - DNA, 276 bp, Klebsiella pneumoniae
atgtctattaatattttaaaaaaagttgagcgtcatattacatacgtagggtttggttcgccctacgcatcaaccattgatgtgagtatgaccattgatattttatctgtggttatagtaagtaaagatgaaaaattagccagtatttcacattcgataaaattcgacgtagataagaatgtctatattgaacaagtggagaattttaaatttaaagatgaaggcgagctgacatcagaggctgaaggtttcctggtgaaattctatggagagtaa

SEQ ID NO: 237326 - DNA, 1245 bp, Klebsiella pneumoniae
atgaagcactttaaactcaatgcaatcgctgggttgatgataaaaacattcctatttcttatcatcatactaccatccggaacggtaggtaatttgaacgtaaaaatgttatctatgcttttacttattataagtgtttcacttagtataattaacaagggtgtagcaaataaaaatagcatcaaactatttattgtatttattttaagtatgagctttgttttaataaactacgcaagctcatcaaatatagctatttatcgtggctacgctactacggaaggtctactttttacaagttacttcctctcaacaatagttcttctaatctcaattttagaaggtattatatcaaaaaaagaaattataaaaacaatattttattcttgtgtattatactctataattaagatagtactaataacgctatctgccatcggtgttatttcgatatatgtcatatctgatttcatatatcagagctatggtataaaaccgatgttactccctatcaccgacacaataactcgctttcaactagctaatgattatatagtttgctttgcattgtattttattttatacagaggtgaaatattagattttttaaataaaaagctgagaacggcattcacaatcatattaatatgtggcgtattaatatcattttcaagatacatgatattattgttagttattggggctatcgttaaaatagtaggcatcagaaaaatatcacctaagggggtgcttgcatcagcagccatattcgccatatctttatctgtatatatttcaaatgccgatagcattaatgatacaatatctttaagattcgcatcagatgctaacgatgcatctgatgcaacaagatcaattcaagtcgaatgcctatcgcgagcatttaatagtagtcctttgtttgggcatggtgggcttggggatttttcatcaacatgtcctggccctgatggagcagagttttcatacgaagtacaatatttaggttttttatatcgatttggtatcattcaaacaatcatgatagcattagtttattttttgcaatataaactatccgcacctgataggttgctcaggaaatataatattccagctgtaattgcattcctgtgctggatgaccattggtttctttaacccttatttaattagtgggtatgcttccgtgataactgtcctttgtgtatgcttcaccggggaaaaaagaaaaaatgctttataa

SEQ ID NO: 237327 - DNA, 1227 bp, Klebsiella pneumoniae
atgaaaaaaacaatgattcttctagtaacgtcgctttcatgctcaggggtggttttttcgcaagatgctggtattgggttgatggggaggatctcaaaccatgtaagtaaggataccttcacatcagggctatacgcatctaaagacacctatggtatgcgggccagcgcagttgcgttagcagttagggcaaaccctgataagccgtttgattaccctataaacggattcgcatggactaaatctctatcaggatatggcaatcgtgattctgtggggatttatgctgacaatacatcaaatctctaccacagctgggaggtgattgcaaatccatcctataccccaacatcatttacatcaagccaggttgacgattcaaaaataaaaccgggcatgttaattgatacagatcatagtccaaaatggtctgcatttgttgtagctgtgcaagggaaaaaagttataacgaacggatgggtaaacaatgaaaatggtaaaatcgggaccccacctaatggaattggattaaagataaatccaacatctaaaatatggggggctaattttaatttattttttgctgaaaatggaagggcaaaatctggagttgtgcaagaaaatggtgtaataaataatgtaattagtgatcctaatgaaataaacggtattgacacagtgattctacctgcatctaaatatggtgggacagcagcatttttagctaggtcagcatcgtcagggaatatgcagcaatggagtataggatttgcatcgcagggggcaaaacttgctaatttctatagttataatgtaaacaatagaaataaaaccgaagctggtttcatggaaaactctaccgccaaaagcgggatggtatttaatgggaaaaatacagatagttccattacgtggatttctaatgggaaagtcgcagcaaaaatatccccagatggtagttacgaaaaaattgtatataaaacaaggcttgttaccacgtcgtataatattacagacgattactcaaaatacatagtaaacgcaaaaaatgatgtgaaaataaacctaccagcagtaaaaaatgaagccgaagggttaaccatccagatagtaaacttctccggtaataaaatagatattgagccatctaatgatgttgttgtatcagggcagttagggaaaaacataaccgctagcatagtaaacggtaagtggatggtttattag

SEQ ID NO: 237328 - DNA, 891 bp, Klebsiella pneumoniae
atggcttatactctaaatgaattcaatcacaccacaaataaatctgaatcgatatcttttataaaaagaagaatattgagaatatatccgatatatctaataatattaattcctataattttattttacttcattaaagtgtttttcaaggtaacttccgcatctttttattctgttataggtagcatccttttaataccagacataacaaatgatagtaattatcatatgttgcttactcctgcatggacattagtgtatgaaatgttcttttatttaagtttagccttggtgatatctctttcaggcagtaaaaggatttgtataatcacatactcaacgatattaatattaacaatattaatagttaatttctttgatttgcagggtgcacgactcggttgggtaagtttttggtatatgattggcgatcctatttttttggattttgttcttggttttttactgtataaaatacaaagcacgggatttaatataaatataccaatgtttataatgtttcctttgctgatagtaatcaccattatcgctgtgtatttagagaaaatgggattggctcgcattgtttgtttcggtttgacttcattcgttatagtttctatttttacacttagcaatgcaatgaaaaaaagcaataataaacaactactttttcttggtgcggcttcatattcaatttatataatacatccattattattccccctccataaaatatttcgtgatcatttcgttgaaatagctaaaaacgaagtcagtgacttgttatttgcaataaccgctattgttttggggtgttttttctatagatacatagagataaaaattaacaacataattaaatctaaattatttataaaaagcaattaa

SEQ ID NO: 237329 - DNA, 723 bp, Klebsiella pneumoniae
atgaaagaacgcggaatgatttttaacggggagatggtgcgcgccatcctcgacggtcggaagacgcagacccggcggcctatcaaatggaaacagactcggttcactgaaattggtgagcgcgaagacggtagcaaatggccgtggagcgaagatgcagagcatacttgcgacttctggcacccatgcccgttcggcgccgtcggtgaccgcatctgggtgcgtgaaacatggggcgttgtcagtcacgcctttagtgacgatggcttgatgattgactgggttcctgatcgtccatcgactgccatccacgaaatgccgtttggcaatggctattactctggctacgccatttatgcagctgatggtgattttacctggggtgatgacgatggttatgaagatggccgttcgtgctggaaaccttccattcatatgccgagagcagccagccgcattctgctggaaatcaccgacgtgcgcgttgagcggttgaacgctatcagcgaagaggatgcggaggcggaaggaatcgacatggaggcactttatgactctcaggactgttacgactgcattgcaaaccacaatatgaccggaaggccaacggtaacaggcgcattcaagtacctgtgggaatccatctacggcgaggagggctggaaatccaacccctgggtttgggttatcgagttcaagcgcatcgaaggcggtgcagcatga

SEQ ID NO: 237330 - DNA, 504 bp, Klebsiella pneumoniae
atgacgccatcaatgaggaataaactgattggcgtgatcgccggcggcggtggcgccatagccattgcctctgcgctcatcactggcccaaccgggaacgatggtcttgaaggtgtgcgatacaacccttatcaggatgtggtaggcgtctggactgtctgctatggccatactggcaaagacatcatgctcggcaagaagtacaccgaggctgaatgccgtgcgcttctcagtaaagacctgaacgccgtcgcccgccagattaacccatacatccagaagccgatccccgaaacaatgcgtggggcgctttactcattcgcctataacgtcggcgctgggaacttccagacctccactctgctgcgcaaaattaaccagggcgaccagaaaggtgcatgtgaccagttgcgccgctggacttatgccaagggaaagcagtggaaaggcctggtaactcgccgcgagattgagcgcgaagtttgtctatgggggcaaaaatga

SEQ ID NO: 237331 - DNA, 498 bp, Klebsiella pneumoniae
atgacagaactttctctgttcaataaacctgtgcgcgttgaccgtgacggcatgatctgcctgaccgatatgtggaaggcaagcgggaaaagcgacgctgaatccccttatcactaccttcgtaacaagcagacaaaggaatttttagcggagctggagaaaaaccacgaatctgtggtttttactgttcgcggtgttcatgggggaacctatggcggaaagtttgtagcttatgattacgcagcatggctaaatccgggatttaagtatgcggcgtacaaggttctggatgattatttcactgggcagttacagcgtaaaagcgatctggttgctgacctgaatttgacactgcttgagtttgacaacaaaaaggatttcgccagccactgcggcagtgggctgaatggatggaagcatgaaaagccattgctcattgctcggattaaatcattaaccgatcaacttcaaatcagcatccctggcttgcagccatga

SEQ ID NO: 237332 - DNA, 255 bp, Klebsiella pneumoniae
atgaataaccgaatcgttgagtgcgcctccagagcggggcgcgacttctcggagttcatgaaaggcgagaagaacatgatggaggcgttgcgatcttctgaggagttcaccgagcagttacgcattcacggctgcgttaatcaccacttcgtcaatttcatgatgatgaaagcgatcgtaaaggtgtttgatgatttacgccgagaggagttgcgggaagagcgacgacgcaaacgtgaagagaagaagaaatga

SEQ ID NO: 237333 - DNA, 1359 bp, Klebsiella pneumoniae
atgccaaataactaccatcagtacattgaagacgttagcgatgatatcaaaacatgccttgaagggatgggatgtcagcccatactttttgtcggctcaggattaactaaaagatatatttcggggcctaactgggaggaattgctccaacagctcgcaactaaatgccctaatattgataaaaaatttgcttattacaagcaaaaataccccgaactgattgatataggaagtgtattctctgacgcatacaatgaatgggcatggggtgatggcgaaaaagagttcccagaagaattatttgaagcgggtaacgaaccaagtatttactttaaacacaaaatagccagtacctttagcctgttactacaagaaaatgaaatagtagacaatggcgagatagaacttttaaggcaaatccaccctcattcaataataacaacaaattatgataacctccttgaatctatataccctgagttcactcctataataggtcaaaaaatcctatatgctaatcatggaagcattggggaaatacttaaaatacatggctgttgttccaacccaaaaagtataataataaaccgtgatgattatgatgattttataaagaaaaagaaatacttaagcgcgaagctgcttacttttttcgcggagcacccacttctattcataggctatagcgctgaagacgacaacataaaaaatatattatctgatattgatgagttactttcagaaaatggagaggtaatacctaacatttatatacttgaatggactgaaaagcaaaatgaaaatgaataccctcgtcgagaacgattaattcaagtatcagcaaccaaaagcattcgaattaagagtatagttgcaaatgattttgcttgggtcttttcagcatttggagcgaacagagctctcgataacattaatccaaagctattacgtgcccttttagctcgcacttatgatcttgtgcgaacggacatacctagaaacccagtgcaagttgactaccgagtcttatcaaatattagcgaatcggaaggtgaattagcgaaactctatggtatagccacatcctcggatggcatggcattcaatgctaactatccatttaccttaacaactcttgggcagtcacttggatttaagggatggcatgatgcgaataaattattagagattgttaaaaacatcactgatgtagacattaagacttttgataataaataccattatgcaatcatgaatggtggcgaagttcaatctcatagatattcaaactaccttcgtgaacttcttgaaaaggttagagatggggaagcattcgagttgggtgttaaagctccataa

SEQ ID NO: 237334 - DNA, 291 bp, Klebsiella pneumoniae
atggcgattaaatgtcctttttgccagtccatttcacatggtcgttccagcctgtacgaatcgaacacggtaaagaaaacgtactatcagtgccagaatctggaatgctcctgcacttttacggcgcttgaggcagtgcataccatcatcactcgtccgcagaaagaaggagaatcgctcgactcgccggatcagcattatcagcaggagccagcagacaagctcccccggacactgaaccgctatggttcgtcatctaaactttccagccgtcagcaagttccggcctga

SEQ ID NO: 237335 - DNA, 753 bp, Klebsiella pneumoniae
atgactatcccagaacaaagcaataaccaaactcctgacatatctatccctgcagcgacgttaaaggcgcttgagaaagtgaatgccaccaaatctgcatggcttgaagcacgtcgtcagcagaaagcggcagcggataatattgcgacaatccgccagcgccgcgctgaaatggaagccacgacgaacgtccttaatgaggagtggcgcacgctatttcgtgaaagtcagggcgtagtctcaaaggaaatgaaaaaactgcgcacggaaattgccctgggacgagaaacgcttgaggattttgatgaactgctggcagcccaggaaagcgaaaatgcatttttaccgcagaaggctgcgcaactggccggacagtatatccacgctcacgaaaaccttctgagtattcgcgcaaaacaaatctgggaagattttatgcaggcgcatggtaaggcgctaatccagacgctgagcctgctcaaatccacaatggggcgggaagccagtgctgttaccggggtggtgcattccgtaaacgatccggacacacttctgcaaggctttatccgcaaacatatcaccgaaccggcactctctaacgacgcgatgccggaacaggatccggtgtttaaactggcgggcgttgccccggattatgcggcccgtctggatttcagtaaacagccctctccggcagctattcataaaatgaaggttcgtcaggaacgtactgagaaggagaaatcagtatga

SEQ ID NO: 237336 - DNA, 261 bp, Klebsiella pneumoniae
atgcacaatatttctgtttctgcgccagctccggctgcgccattatttcctgttccgaaccagcatgagcgatttttacgcctgcctgaggtgatgcacttgtgcgggttgtctcgctcgaccatttacgacttgatcagccgcgatgcgtttccgaagcagatcccgcttggcggtaaaaatgtcgcctgggcacagtctgaggtcagcgcatggatggcggaccgtatcagcgcccgtgggcggggatgtgatgcatga

SEQ ID NO: 237337 - DNA, 558 bp, Klebsiella pneumoniae
atgatgatacctgaatacattaaataccttttttctggcttgcttactgtcatcatttccaggtatagtttttccgctgtcgcaaaatcggcagccggaattggcgttccgcgaaactcaatggcgacaccagacgcgccaggcgtcttttttttcgtcgtagctcaggcacacccattttccgggctgtggtgtttatgtgtacaccgtggttcatccgagataatggcagtccgggcggggcagccttcgggctggccggtatccattgaggccggttacgccaaccccgttcgggctgccaccagtgaaattggcgtttccggtggtagcaataaccgctactcaatggaggctgccatcatggctacaaccctcaccccgtcatacccgcaatatgtctttgtgttcgccgcaatccgccgtgctgacactcaaccccgcatctgtatgcttcgcactgtggcctgcgatgagcgttctgcacgcctttcgttggtccatgattatgtgctctccctttctgcacgcctgcctgcctggaaggtgacactatga

SEQ ID NO: 237338 - DNA, 222 bp, Klebsiella pneumoniae
atgaaccagtttgagatctcctacgacgatgttgtaaggctgaaacatttacgcaatgtgggtgagtatgtcactggcatggctgccctgcaggactgttacgaaaagccagcaggtgctcaatgcgaacaactggtttcactcatctatctgatgacagagcagctggatggcgtggtgcaacgctgccatgacgacctgatgaatgcggagatggcctga

SEQ ID NO: 237339 - DNA, 324 bp, Klebsiella pneumoniae
atgcaatcctgtgaatctcgtctggcacttcgtgccgctctgtatcgccgtgccgtagcctgtgcctggctggctatcagcagtcagcaggaaagtttttccggcctgacactcgctgaacttgaagatgccatcgcccgcgagctggaagggttctatctgcgccagcatgggcagcaaagagggctggaaattgcctgcgcgttgctttcggatctgatggagtcggggccgcttaaagcctgtccggttctttcactgctcggaatgacggtcatgaatgaactttgttcccgtcacctcaacaaatcagcgctgcactaa

SEQ ID NO: 237340 - DNA, 417 bp, Klebsiella pneumoniae
atgaaaaaattactcggcggtgccatgctgttagccgcaggtatgttctcaatatctgtttatgccaatcctgataattcctgcgacggtgaacaaaccatctttgatgcttatacctccaagggtggcaagcacgtgggtgtgtgttacgtgtacggtaatattcgttatgtgtatgggaaggatgataatcctgaaattttaattaatcttccacgtgaaaaggttgagttcagtatgtctggaaatggtgatcaaagtgtcactattcccaatggtgagtatcgatatgtgataggtgaatatttacgtggcggaccatttatccaggtctggaaagggaataagtttattaccgagatcaagttaaatggcgacacctttgaaaataatattgaacaatatattaacaattaa

SEQ ID NO: 237341 - DNA, 477 bp, Klebsiella pneumoniae
atggaaaatattaatacgttaaaagctaaaatcgatacaaaggtaacgaagtttgtattgctgtctgttgtaactggtggcatttaccccatgatgtggttatatctgaaccagccaaagttaacagagcacatgaagaatgagtttgttgccagggattatcccctttggctggctattgttactggatttggatggctattgactgatataagttattctgtaagtgaaagtgaaacggtgttggatcatattgccacactgctttctgttgcttcaactgtaatgattatcgtctgggcttttaaagctaaaacagctttacaggcttatgcattaaatgaatttaaattcgaattaaagatgaatctgttctatacctttatttttagcatatactatattgtttattgcatcaacgatatggaatcagagttgcagaaacacaacattatttatagtaaacaaatttcctga

SEQ ID NO: 237342 - DNA, 1437 bp, Klebsiella pneumoniae
atgtggctattcgatattataaaggatggtacactggtcgataacaggtcttattttgtaaataacggaatatttactaataaatctctgggggaatcaattagtcttaaaactaaaacaaaaggccagtggactaacactaaaaatgatgagtctaccatttggtattttttaaattcagtttcgcatgatgtagaaaataaacttaataataatcttgaaaatgcactcatcctcttcaacgatcgagagtatgaacataataccgatgatggttttattactgtaaatggtactgattccagaaattttacgttaaacacaggtaatcttattggatttgtaaaacgtggcgaatattccctgaaagttggttctcgttttggcaatgccttccttcggtacatcatagcggacgctgacggttttctggagatggaaaatattggtggcgaaaatcacactgaaggatatgagtggctcctggcatatctttggaacatcaagttgaagaaggcttaccgactgggtatccctaaaacctatattactaaaaaagaacgaaattcacggatacgtgggacaatcgatacaattgactacttcagaaataatacctcaggaaaatatttatgtacctaccgcgaacacagttacgacagtcctgcaacttcgttgttcatcaaagcctatgagacgattgaacatcaatcattctgtaagcatacgaggaatatctacaatgctttcatcactgctaatctgggggtgagaaggtctcgtcaggagatcttgagaactccatattttactaacccattttataacgactataacatactgatagatttatctaagaaaatcatcaatcaggaaggttctgattttggataccaacaagaatcaagtgctttcttttttgatatatcgatgcttttcgaatatttcatccgaaaactcctaaaacgaagtgggataaggatgctaagtaaattcgatctaaattatgaaattccgaccggagctttcggaagctatgtacgcaaaattgaacccgacctagtttttgagaatgatggtggcatgtacgtttttgatgtgaagtataaaacctttgatccgcagtttggggttaaacgtgaagatatttttcaactacatacttacatagggcagtatgggaatggaggccttataaaaggatgcggctttatttatccaatatctgaaaacaggtggaatgcacttaatatggataaaacgcatggggtgatttctgatgagattcatcagcagggaaaagatattcctttttatttgcttttcttgaaaatccctaataactctgcccctgaattttacaagagaatgagcgaagaatgtcatatgttcattgagaacataaacacgaaggtactaaaaaatgagaatagataa

SEQ ID NO: 237343 - DNA, 1641 bp, Klebsiella pneumoniae
atgaaaagcagactaaaaaatttatacaagcatttgattgaaaaccataagcatgaacttaaaggttggcatgatgcttatcgtgagttttatgagcaggtcggacaaattcgcgaacgtataaaatcaggaaaggaattatctccaagtgatgagattttcctaaagcaactcctctttgaaagaagtaatggaattgcttctcgcggtcagtcggttctaagcaacgaaaactttgacggttttattaaaaacaaggacttcattgctatattacaacaattcatcctgaatcccaacagagaggaactgaaaaagtttgagtgcacatggtcagaacatgggaagtctaataatcctgttcttatcaatcgcgtagcggcagcctgcacgcttgaagtttccacaactgttgattccgctaagttcaatcaggtatttagctggcttacacacgaagggataattcctgcatacccagcagaaaataatcaggactggttttcaaaaaatgtattcctgatgaaaattataaaaaatgagttcaacgatgaacttcgcaataatgaaactgatgagttttatctcagccaatttgtctgggttctgtacgagaatctctctaatccattcagtctgaaaaagcaaatcgttaagtacgggcctcctggaacgggaaagacataccaggctcgtcaacaaacatcgcttctttttgatatctggaaagaagagtttgcgccaaatagcagcctcacacattcaagtcagattgagttgattcaatttcacccttcttttagttatgaagacttcatggaaggtttgcgcccagttctggataacaatggtaaagcacagctgacgttgattaatggtgtttttaaggaattttgccggaatgcaggaaagtgggaaatagatattgaacgcctcgaccttaacagggattgggaatcaatcacgatcggtgaactccgtccatatcaaaataaattatcaggtgatcattgggaatacatcttcgaaatatctgacttttcgaagctgatagcagatgcagtgcctccgttcttttttataatagatgaagtgaaccgagccgagttatcacgtgtttttggtgagcttatgtattgcctggagtatcgaggaattaaaggaagcgtcaaaacccaatatgctaatctaaataaccaacaaacaggcatgcttcataccgcacaaggttaccaattttttattccaacaaatatctacctgataggtacgatgaatacgattgatcgtagtattgagagttttgactttgcactcagacgtagatttcgttgggaagaagttacgccagatactagacttttaagataccatcttagccagttctgtaaagcttggactcctctggcagataacctcgaacgactgaatacccagattacgaaggagcctttactgggggctgattaccaaattggacatgcctatttaatgaatctgaagtatgccaggagccttacagttacagaagtgagatctcgtatctgggatgactgtatccgacctttacttcaagaataccttcgtggcagcaatgaatcagaactcatcgattcttttgcaaaagcatttggaatttaa

SEQ ID NO: 237344 - DNA, 831 bp, Klebsiella pneumoniae
atgaataacatttttgcgaaagtaaaaggacctcgtaagaaacctttttttaaattggtatcagactacactttgtttgacgctttagacttatctactcttagcctcattccatataaccctgaccataatcttgatgaagattcatggtttaaaattgaaaattttagtcagcaatcattctgcttatcatgcatcaaggatgaatttgattctaaggacttcgacgatctaacaaaacaatatttcacgaagatttcatacatattctctcatcagaatgaagacttttattttcagaaaataaccccatccctatttatcaagagaaaaacaattgcttttggtgaatcagcagaaatagaagaaaatgaaggacgattgattgttaaccatatacctgatgctgtatacttaaaggaaagaaatatattgttattcagaaatctcgccacaatttcaagtatatttaaaggtatcgatattctgtacaaagaagccacggaagaagaagttaagtcgtttttaagtgaatccttcattgtactttcaactgactatgatgtagaaaaggtatcaaagccaaaccgaaagagaattgcattagctatggatactcttgcagcgatgccagtggaagacagaggtgagatgctgaattacattaatgattattgtgctgaaaaacttaaatatgacactactgagagtaaattcgaagtatcatcagaagaagagttaaaatatttgctgtacggtatcgaacaaagattttacactaccagatttggtaatgaaaagagattagccaactcaatacaaagattataa

SEQ ID NO: 237345 - DNA, 1422 bp, Klebsiella pneumoniae; identical to SEQ ID NO: 230956

SEQ ID NO: 237346 - DNA, 945 bp, Klebsiella pneumoniae
atgtattttccgctactcagagcaaaaagaaatgaactattggctcttcgagagtcaattggtataactgtcaataataaaattatcattccaataattgaagctgttaattcaacaactggtgatttatttagatgtctaaatgaactgaaagataaaaaatccaacccagtaattatcgtcaatcctcaggttggtttcttttcaaaaaaccaaaggaaattgaatatcttaattgatgaaatcattgaaattaatcctaaagtttgtttagcctattggctgacagagggtacaaccctcgatcaattagatagttttttcaaaaaatttcctgaacaaaacctcgctattatacatgcggcaagtagcaaagatgttgagggattactcacacttcttgaggaaagtgaaaattttaaatggaatttttttgcaaacgagaaaactggcagaaagtatagaagtcacttcagtgaatacaataatgttctgcttgaagattcatttaataaattagaccgaaatgctgattatgaagaagaagaattctttagtgacagcgtctatatttatcaggacgagggatatgttggggtcggtgattacaccattctgggcacaaaatattctgagaatggtgggccagccattactgcagcaattcatctaacttacgaagaagaagaagatgagatttggatcaaacatttcttgtctgaaccgcgagaaaaggttgaggaggatggacctaccttggtctctgaagccttacctaaactagttgaatttattgaagaaaacgaagcggcgctagcattctccaatgcatgtagagaattcaaagaaatacatgaatctggagagcgaaccagtctaggaaagataaagaaaatttcgatcaaacaccacattgagctcatgaatcatattatctctagataa

SEQ ID NO: 237347 - DNA, 873 bp, Klebsiella pneumoniae
atgagcaaattagatttcaaagtgctgagtgaggttttctctaagaactttatcaatcttttgattgatgaccctattcgtgccatttggaaactaaaaacactcactataaaatttgacataagtcataatgataatggcatcgaaataaaatcgttgttagatagcatttataataaattattgtcagactatagatctgaatatgtatataaaaatgcaatagctgaaaaaattgtaaaaggaaagcataaactttctgaaacctgtttttatgatactgagttcagagttaatggctctattgcggatgttattatctctaatggcacaacttctgcttatgaaataaaaactgaatatgattcacttatgcgtctagttagtcaacttagtgattattctaaagcttttgataaagtttatgttgtgatccctgaacacaaatttgaaagttggtctgaacacattgaaccaggatatggcattgtcacgttaagcaagaactacacacttaaatataaaagagaagcttccagcaacatccaacagtttgataagaatatcattttttcctgtttaagaagagatgaatatatagatattttcagaacgggaactaatactacagttctaaaaatcaaacctattgatttgaaaaaagcatgtaaggattacttccttactttaagtaatgaagaggcacataaccatttcaacgaatgcctaaaaagaagaaatctcgaaagagaaatattttctctttctggatgcattcccaaatcattaacatctgttttattaacaacatctttatccaaaaaaagaaaagagttgctagttgatgccttgatagggagtcatttacattaa

SEQ ID NO: 237348 - DNA, 1230 bp, Klebsiella pneumoniae
atggtgccaaagcttcgttttaaaaattttgtgttgccatggaaaaccactactatcaatggcaaagttgatattattagtggttttccttttgaaggtaaacatatcactgataacgcttctggaactcgtttgatgaggggagttaatgttagcgaaggcattgtaaggcatactaaagatatagatagatattatccactgtcagctgaaaatcatcttcgatacatgttgaaatctggcgacattgttatagggatggacggttcaaaagttggtagaaatagcgcgcgcattaacaataacgatgttggttcattgttggtgcaacgagttgcgaggatacgagatattggaatacttaatacaagttatttatttcaacttcttaattctacctatttttacaattatgttgatagggttaaaacgagttctggtattcctcatatcagtttgaaacagataaatgagtttcaaattggtatgccatcaatggaagaacaaatcagaatagccgattttctgtcttcagttgacgaaaaaatcacattactgaacaaacagtacaacctgctgtgtcagtacaaaaaaggcatgatgcagaatatttttagtcaagagttgcgattcaaagatgataatggaaaaccatttactaaatggaatactctcaagcttaaagatgttgctatacgtgtaaccagaaaaaataaagaaaataacaatacaatattgaccatttcaggaagagatggtttggtagatcaaatgacttattttaataagcaaatcgcatctaaaaatgtgacaggttattatttgatcagggagggagagtttgcgtacaacaaaagttactctcaaggttatccgatgggagcaataaaaatgctttctaactatgaaaaaggtgttgtttctactttatatatctgtttcaaattaaatgatgagcaatcttgtgacttttatcaacattactttgagagcggtttacagaatcgagctattgaaaaggtagctcaagaaggggctcgcaatcacggtttattgaatattggtgttaacgacttttttgatattgaacttcaagtacctagccttgcagaacaaaataaaatagcccattttctctctgcaattgaggacaagatcgcaatcaaaagagcagagttagatatgttaaaaaaatggaagcaaggcctactccagcagatgttagtatag

SEQ ID NO: 237349 - DNA, 468 bp, Klebsiella pneumoniae
atgagtgactgctggcaaccgggtattaccatcaacggtgataaagaacaggttgtacgccccactcaagcggttctgtcagtccagacgggagatatagtcattagcctgattcacggtaaggccgctatcgtcagccctgagcatgcggggcgtctgctcagcaataactatgtcagggtcgaagttgacagccggaaggttattcctgcgtggtttgtctggcacttcaatgaaagcagggaaagccgccgccagcaagctatggcaacgcaagggtcaacgtttgtattacgtttgtctcttactgaggtacgtcagtttactgcaacgctgcctccccttaataagcagaaggcaatcggtggactctatttggcaactattgaaaaacgccattaccaggagcgcctggccgcactaaacgaacaacagatcctgagccagctcagtgatatgattcagtaa

SEQ ID NO: 237350 - DNA, 657 bp, Klebsiella pneumoniae
atggatgaaatctctgacccggccctggtgctactggcgctgagcccgtctgcccctgctgcttttttatcacccgccgatcgcgacagcatcgaacaacagcagcagcagttactgcgccagaaccaacagcagcgtgacgcgctggagcgcgccatcccgttcccggatgtctcccgtccgggagagccggccccggtgaaaggcccctgttttaccattcataccatcgtcctggacggtgtcacgctgatgacgtcccgtcagcagcaaaaattactggcccccttgcagaatcaatgcctcgatatggcgcgtatcacccggctcactaatgagatttctgactggtacatcagccggggttacatcaccagccgtgcttttctgacggagcaggatttacgttctggcgaactgcatctggtggtgctggaagggcgtctgcaggccatccggatggagagcggcagtccccgtgaactggcgatgaccttcccgggtctggaaggtaatatcctgaacctgcgggatatcgagcaggggatggagcagattaaccgtaaggctaagtactgcagaatctgtaaatccgggctctacagtacggaaccgaggttcataggctgtctccccaaacctgaggacgaaaactag

SEQ ID NO: 237351 - DNA, 636 bp, Klebsiella pneumoniae
atgaaaaagacttcctcagcattacctccagaaggatccctcgccgatcttgcccacttttcgtggtgtgcgctggtgggcttacgtctggtacagcaggacggtcaggcactgacgcctttgaccattcacacgtttttagtccgctggctcgctgatgcgcaaaaacagcggcgcttcccgcgctctgtggcaccggatatcgataccctgctacgactcggacgccagcaaggtcccgccgccgggttactaaagcggcaggaataccttcaccagtcctgtacggagccgctggcacagcaatcggatttgttccggttgacacatgcgattgaatacctcagggcacagggctgggtgaacgcggtggtctctgatgaagaatgggaacccgagtcgttgtacgccgaatatgccgacgtatctgcgctgctggtgagaaaatctgaactgcagcgccattttaccgaacagggccggcagtccgcacccgtggattttatcgtggctggtgacagtcgcgttgtcggcgatatcctgtctgtgcgggaactgcgttacgtcattcgggaacaacacgaagacgggtgtttgctgtcactgttgccatcagcagacatatccggtgagtga

SEQ ID NO: 237352 - DNA, 534 bp, Klebsiella pneumoniae
atgctggcagcagcacaccagccactattcgtatgtttttacaacaggctgttgaccattatccacggctggcggcattcagttttacgctggtgctaccgtaccgtgacaacatggctgattatcgtgcgcttattctgcgttttcacactgaagtctggcagcgtattggcgaatattcgtggcaatgccagcaggctcatcagagttcaccaccgacgctgttacgctggatatgggcttcaaccagtgccaccacagtgcaggatggtgttgctgctgaatcttgatactctgggaactatacgcgacgtacaacttattgaaagtgcccggctggcgataagcgagatactcagggatgcatggctgacggttacttgcatggaacgcagtggtgttacgaacatcacgccgattatcatcaaccgcactggcaggggcgatttcactacgccatttaaccagcttacctcgcgggttaatgcaatgataacacccgtaacgatggcacgaaccagtgtaacacgttaa

SEQ ID NO: 237353 - DNA, 450 bp, Klebsiella pneumoniae
atgcacatactgaaatgctacctggcaaatgatgcttctggtcgcttcgtcacggcggataataccgcaagaacgccggacggcgtatggacctgtgcatcctgtagctgtgtcctgtacctgctgacggggttcggtgagcccccatggtttgagcacgacaagcagacggtcgctgaacatgtgctgatgaacttcgttcaccaggacccggaggtcaaagccgaagcccgacgccggagactgcgccgcctcattggtgggctggaggtgccggtggtatcgcttgcctggtactgcgcgtggtgtggcagccattatcagggtgtgaagtattgcgccaactgcctgaccggtatttacagcatcgaagaggcgaactggcggatgaattactgcggcaacacactcccgggaataaaccctgtgctcaccttctgtatcagatag

SEQ ID NO: 237354 - DNA, 243 bp, Klebsiella pneumoniae
atgatgacaccgacgacgaataacactcattccagcaccactgtactgctatcggcagaagacccgcttatcgatatggctttcatcacgacgtacaccggcatgaccgacaagtggttctaccagctgattagcgacggaaaattcccaaaaccgattaaattagggcgtagttcccgctggtacaaaagcgatgtggaaacctggatgcagcagcgtatagcggcctcacgcggaacctga

SEQ ID NO: 237355 - DNA, 570 bp, Klebsiella pneumoniae
atgagttacacctacgacccttactggcaacaacgtatcgccgataccttcaattgtgcactgaacgcctatacccgcgtactggccctgcgcgttgacctccggctgccggatgcaccagccgccactgacgccgccgtgatatcccgttttaccgattccctgaaagcccgtattaacgcgtattttcaccgccagcgtcgtgaagaaaaacgtatctggccgaccacgctgcgttttatctgggcgcgggagttcggtgaaatcaaagggaaaaaacattaccacgtagtgctgctggtgaaccgtgatacatggtgcggcccgggtgactacaacgacccggaaacgtttgccgggatgattaaacaggcctggtgcagcgccctgcaggtagatgctgaggctcacgcggtcctggcccgctttccgaaaagcccagcatcctggctggagcgtggaaacaacgcgcagctgcaacaggcactggcgcaggccgcctatcttgtcaaacgcgaaaccaaggtgaccagtgacggtgagcgtaacttcggctgcagccggggctga

SEQ ID NO: 237356 - DNA, 813 bp, Klebsiella pneumoniae
atgttagttgacgttgaacaagcaccagcgatcgcactggcgctgctggaagagaaacttcataactggcggtattccacccacccaatatggccctcaacctggcctgtttttcatcgccttatccagcgtcatgacgagatggcggcggtgtatagggaaatagcgtccagcagctttaccaggcaacagctctggatactgcttgagcagatcatccatgcgggtagctttggcaccgatgaacgttttgcaaaactgcgggccgatcatcaggagcttacggctctgaatgacgatatcagcaccatgagcatgcaactggctgaactgctggaacgacgcgcagagctatgcgagaacggccactttggatgtgaacacatgctaaaactcacggagtttatcgacgatgccggagagggaaacggttattaccagtcatttctgaagccagaattgcagcggcttaacagctacgatctccgctactggcctgacattgccgggattattcgttcactgggtatggaggaggtggaggtaacatttaaagatgaagcatcggaggcaattatcaacgcccgcaggccttcgctaacggatttcttcagggaattattcaataacatcagtatgcaaaaaaccggggactgctacggcttaccacggagttttaaactctcagacgcggcactggcgacgatttgtaatatcacccgtgatttgccacctgatgacctcattgacgcggcttatgttaagcgtacccgccatcgactgaaggcgcagggatttagcgcagtatggtga

SEQ ID NO: 237357 - DNA, 720 bp, Klebsiella pneumoniae
atggacgaaaaacagttgcaggctctggctaacgaactggccaaaaatctcaaaacccctgacgatctcagccagttcgatcgtctgctgaagaaaatcagcgttgaggcggcactcaacgccgaaatgtcccaccatctgggctacgataaaaatcagcccaaatcgtgggccaactcccgcaatggctattccacaaagaccgttaccaccggcgacggccctctggaactacgtgctccgcgcgatagggacggctccttcgaaccacaactggtgaagaaaaaccagacccggatcaccgggatggatgaccaaatcctgtcactgtatgccaaagggatgaccacccgcgagatagcggctgcgttcaaagagctgtatgacgcggatgtctcaccggcgctggtctcgaaggtcaccgacgccgttatggaacagattaccgaatggcaaaatcgcccactggatgcagtctatcccattgtttatcttgactgtattgtgttgaaggtccggcaggacagtcgcgtcatcaataaatcggtgttcctggcgctgggcatcaacatcgaaggccagaaagaacttctgggtatgtggttagcgcagcccggtacgcgttttgtctgtactctgcctacttctttctgctacagcactcagcggctgtggcgacgaaaagtcaaaagccgaaagcgagtttatccgggactgtaa

SEQ ID NO: 237358 - DNA, 186 bp, Klebsiella pneumoniae
atgccaccattaaccactgaaaccgcccttaatattctgatcgactggctgcaggacaacatcatcttcgataacaatgaagacaacacagattcagcggcgctgttgccatggattgaacaggcgctcagggatgttcgcgatcttcgtcatcttcagcttctgcaacaggccggtacagattag

SEQ ID NO: 237359 - DNA, 1416 bp, Klebsiella pneumoniae
atgagtaatcttcctactacagtaaatacaaccgcagtaacgactggtgttgataacttcacaacatcattaactacctacctcaccgatttgaatcttccggcaaatggcgttttagtcggcaatgatcagagatacactgtaatcgataacttcccaaaggttattggcggtattgacaatgtaaggcgtgcagattctttatatctatcaaagtttattgcagcgtgcggcgctggcctttttgatgcagcactcaattttttatggaatgaaacagtagtaaatttaagatggaaggtttcccttaacgatatagactatttttatgacagtattgtcactgacacaaaaagaagagataaacttaaaactatagatgatttagttaatatagaggagtgggaacttgttaagggttgccacttaacaggattactttcggatataggttttaaacatcttgattatataagagacatgaggaactgggctagcgcagcacatcctaaccaaagtcagctaacaggattcatgctcatctcgtggcttgaaacctgcatcaaagaagtgattgcgaaagaaccagaaccctctgcattacaaataaagagagtactatctaacatcagaggagctatcttagatggcgatgacttagcccatataaaatccgcgatggaaagcctgcctcaagatgttgttgattctttcttaagaactatatttgggatgtatactaatgacaacgcagctgtacaggttaagaataatataaaaggaattgcaaaaaaatgttgggatctttcgtcagaaactacgaagtatagttgtggtataagatatcaatcctttgcagctaacggtgagagagccaggaaagatgcggctaacgagtttttaactactgtatcaggtcttccatatcttccatctgactctttagctgttgaaatatcaatcagagtgacgaatctataccaagcccattttggatggaataatttccataatgaaccagctcatgcatcttctttggctgcatatatctcatctgctggaaatgttcctgattcagttcgattcgaatatgttaagactatagttttatgttatttaggcaacagctatggagtgtctaacatggccatttcttactatgaagaaatgattggtaagttcggtgaggctgagttaaaagagttcgttaaaataatttatgataaagacgtaatatctaggcttgcaactcaaacatgtgcttctcgatataaacatatagcatcacattttgttagcagaactaccaatcaaataacctcgcaagctcttaatgcgatcataacatcgactgacccccagttaccgaacctatcgaaagcaacggcctacgataagcttattcgctcatactaa

SEQ ID NO: 237360 - DNA, 1458 bp, Klebsiella pneumoniae
atgtggtcagatgaattacaacaacccacgttagttcgccagcaggcgtttttcgccggcgcctggcgtgatgcggacaatcagcaaacccttgatgtgattaatccagccagcggtgagcggctggcaactattccggcgctgggcgctcccgaaacaaccagggcgatagaatatgccgaacaggcgcgccataagtgggcgaaaacgcccaatgcggagcgtgctgcgctgctggaaacctggtatcagttgattatggcgaatgccgacactctggcgcgcatcatgaccgcagaacaagggaaaccgctggcggaagcgaaaggtgaagtggtctacggcgcaagctttgtgaaatggtttgccgaagaagcgcgccgtattagcggtgaaaccattccagcgcctaccgcggatcgtcgtatcctggtacttaagcagcctgtgggcgtcgcagcggccattaccccctggaatttccctattgcgatgatcacccgcaaagtcgcgccggcactggccgcgggttgcccggttatcgtcaaaccttctgaactgactccgctttgcgcactggctttaatggctttggctgagcaggccggtattcctgacggcgttttacaagtgctgaccggattaccggcagggattggcgcgacgctaaccgccagccctgtggttcgtaaaatttcctttacgggttccacccgggtcgggcagttactgatggtgcagagcgccgacagcgtaaaacgcctgagcctggagttgggcggcaacgcgccctttatcgtctttgacgacgccgatctcgagctggcgattgccggaatcatgagcagtaaattccgtaatgccgggcaaacatgcgtctgcgcgaaccggatatttgttcagcgtggtatttatcaacgtttcagcgagcgcttgcaggaagcggttggacaactgcaggtgggggaaggcaccgtggctggcgtaaccctcgggccgctgattaaccgcgccgccgtagagaaagtgaaccgccatattgatgatgcgttaagccagggcgcgacattattagcgggagggattacggcgggggatagccagtttgtgcagccaacgattctgggtaacgtcagcgaagaaatgctgatttcccgggaggaaacgtttggcccggttgctccgctttttatatttgatgatgaatcacaagttatttctatggcaaataatacgccttatggattaggcgcctatttctttactgaaaatatgcgtcgtgcctggcgggtagccgaagcgcttgaattcgggatggtgggttacaatacgggagttatttccatggaggtggcgcctttcggtggtattaaactttcaggtattggtcgcgagggcgcccgttgtggtattgacgaatatttagaaagcaaagcctttcacatcggcggattgtaa

SEQ ID NO: 237361 - DNA, 1476 bp, Klebsiella pneumoniae
atgatgctgagttttgatcctgataaagttagtgtgcccaccggtaattatattgatggccagtcttgtcagactcgcggtgaaactctggcgatcaaacggccttctgatggtcaggtttatgcagagttaaatgaagctcaggccggcgatgtcgacagagccgtgcaggttgcgcaccgggctgccagagagagcggctgggcaacctgttcgccccgggaacgtgggcgggttttgcggcgttgggcatcgcttatcgaacaggatgcacaccagctcgggcagctggaagcgctgggttccacccggccgatcgccgatgttatcaaccatgaaattccctttaccgcggaagccatccgcttctatgccgaatgcgccgacaaatatagcggcgatctgtttcccacccagagcagcagcctgggaatgttgctgaccgaaccttttggcgtgatcggcgcgataacgccgtggaatttccctttgtccatggcctcatggaagtgcggcccggcgctggcggcgggtaacgccgtcgtgctgaagccttcggagctgacgccgttctctactgttcgtatggcggagctggcggtacaggccggtttgccggcagggatactgaatatcgtacaaggcaggggagaggtcgccggtagcgcgctggttcgccacccgctggtgcgtaaggtgtcatttacgggttccactcaaacaggggcgcagatcatgagcgatgccgcccaatttggcatgaagcccgtcacgctggagttaggcggcaagagcccgcaggtcgtgtttgatgatgccggcgatattgatgaactggccgcgcggatattgcgagggtttaccgccaatggcgggcaagcgtgcgttgccggtacccgtctgattgtccagcgcggcatcgcggacgcgctgacagagaagctcatcgcattgtgccggaccttccgcccggggctgacctgggacgaaaacacgcgttatgccccgatgattgatgcccgccagggtaacaaagtggccgccgtcgtggcggcggcgaaagcggctggcgcagaggttctggtgggtggggagcgttttgccgataccggcgacggttggttctggcagccgactttgctgacgggaatggcggcggataacccggcgattcaaaccgaaattttcggtccggtgctgaccatccagcgtttcgatgaagaagaagaggcgctgcgcatggcggctcacgatacctacggcctgtgcgccggagtccatacccttaacttaccgcgggcgctgcgcgcggttcggcagctggcggcaggcaccgtttgggtgaaccgctatggacgttcgggcgatttcattattcccaccggtggattcctcgggtccggtatcggaaaagatcttggccggcaggctttccaggcctgccagcagcagaaaagcgttttgattgatttctaa

SEQ ID NO: 237362 - DNA, 669 bp, Klebsiella pneumoniae
atgaccgtgtttaaaccgaaatttgtcacctttgattgctacggcacgttaatcaaattcgatatggcgccgtctgccgcacggcatttcagcgaccgtgtgagcgaggccgatatgcccgctttcacgacggatttttctcgttatcgctttgatgaagtgcttggcgcctggaaaccctattttgatgttgtcagcaatgcgctgcagcgtacctgtaagaaatggggtatcgcctggaaacccgccgacagcgatgccatctacaccgattgcgcgtcctgggggccgcatccggacgtcccggaaggtctggctaaagttgcgcagcatgttccattggtactgttgagcaactcaatggatgatctgattactcaccatattccgcgcctcggcgcccctatccatatggcgatcacggcggaagaaaccggcgcctacaaaccgcaaatgcgcggctttgaatacatgctcaacaagttaggctgcggtccggatgaaatcctgcacgtctcttccagcctgcgttacgacctgatgacctgccatgacatgggcattacgcacaaagtcttcgttaaccgtgggcatgatgcgccgaacccgttctatggctacagcgaaattagcggtatcgatcagttgcccgccgttctcgggctgtaa

SEQ ID NO: 237363 - DNA, 1278 bp, Klebsiella pneumoniae
atgaaactcgaatcgttctggcaggccagcgcgccgaaatttaccggcgcggccagcgaaccattgcccacccgcgctgatgtcgttgtcatcggcgggggatttaccggtatctcagcggccctgagtctggccaagaccggggtggatgtggtggtgcttgagcggggcgaggtgatgagtcaggcctcggggcgtaacggcggccactgtaatacgggcgttgcgcaaaactttgccgcgctggcgggcagccgcggtatcgaagaggccagccgtttttatcgcgcctacgatgatgccgtgagttatgtgagccaactgatcgatgaagagcagatcgcctgcgacttccgcttgtgcgggaagttgaaactggctagtaaaccaggacactttgccgggttgcgtgaggcctgggagctgatgcggcggagcgtggaccccgacattcagctattgagtaaagatgaggtgcgtaacgagataggcagcgatgattttcatggcggattgttgcagttacgcggcgggcaaatgcacatggggaaatttggtatcgggctggcggaagccgccgcacggtccggcgctaaaatttaccccggtcatagcgtaaccggtatgacccgtttacacgggcatcgctaccggattaccacgtctcgtggggaaatcaccgccgaaaaagtgctgatggcgaccgggtgttctaatgaaggccctttcccctggtttcaacggcgcattgtgccggtgggcagttttattgtcgcgaccgagccgttgccgcactcgctgctcgaggagttactgccttatgaccgcacctatgtgacgtcactcaatatcggcaattattttcgcacaaccgcagaccgccgcctgatattcggcgggagggcgcgtttcgccatcagcaatccaacatccgatagccggagcggcgaggtgctgagagcaagcatggcgaaactgttccctgctctggcggatgcgcccatcgaatattgctggggcggcatggtggatatgaccgccgaccgtctgccgcgggcgggggaacaggatggcgtgttttatgcgctgggttatagcggccatggcacgcaaatgtcggtgtggatgggcagggtgatggccgatgtgatagcagaaaaacagccggacaatccctggcagcgagaagcctggcccgcgttgcccggttatttcggtaaaccctggtttttgcccgtggcgggcttgtactacaaggctatggaccgcttttcctga

SEQ ID NO: 237364 - DNA, 1605 bp, Klebsiella pneumoniae
atgggtaaatttgataaaaaacagcaaagcgtcgacagtcgtgttgtccaggcgattaacgacgcttcgctgtcacggcgcagtttgatcaagttgttatcggctggcgcggtaatgagtactggaatattaggttttccctcgctaagcctggccgcggaaaagccgacgcaagggggaaaattgcgtgcggccgtttccaatgcctcggcaacggatacgctggacccggcgaaaggcagcaacagcgctgattacatccgtcagttcatgttttatagcggcctgaccgaactggataaaagcatggcggttaacaacgcgctggccgagtccattgattccagcgatggcatcacctggcagattaaactgcgcaatggcgtgctcttccatgatggcaaaccgctgaccgcggatgatgtggtatggtccctcagccgtcacaaagacccggccgttgcctctaatgccttcaaactcgccgagcagttcagcgtcattaaagccgtgaatccccaggaagtgcaactggtgctcagcgcggccaacttcgatttgcccgcgatgctggcgaccagcccgtttttgattttgcagcaaaataccaaagattttaccaaaggtgtcggtaccgggccgtttgtctgtaaatcctttacgccaggcgtcagctcggtgggtacccgtaacccgcactactggaaacccgggctgccctatctggatgaagtggagttgctgggcgttaccgaccaggctgcgcgcgtaaatgcgctgatgtccggcgatttggacatcgtttccaccctgtcggcgagcgatgcgaagcgccttggcaataacgataaatttggtgttctggagagcaaatccggcgaatacaccaacctgattattcgcaccgataagcaacccggcaaccatcctgatttcgtgctggcgatgaaatacctgcaaccccgtgaaatgatggtgaaaaccgttcttcagggttatggcaccgtaggcaatgatacccctgttcctccctggcaccctctgtataacagcagtttagcgcctcgcccgatggatctcgacaaagcgaaatttcacctgaaaaaagcggggatggccggcagcagcgtcgagatcatcacgacgccgaatattgaaggggcggttgaaggcggccagttgattcagcagattgctgccggcgccgggcttaaagtcaacgtacgccgcgtgccctacgatggctactgggccagccactggatgaaagaccccattggttatggctctatcaacccccgtccaacgctggacatgctgttttcccagttttatctgtctacggccagcaacaacgaatcgggatggaaaaatccgcagttcgatcagctggtggtggccgctcgcggcgagcgcgaccaggcaaaacgcaaacagatgtatggcgatatgcagcacctgatttatgaccattgcggcacgttggttcccatttttgtcagctctatggatggatacagcaagaaggtgaagggcgtggaaccctggccgtcgggcatgatgatgggttatcgcttccatgagtttgcctggctttccgcatag

SEQ ID NO: 237365 - DNA, 951 bp, Klebsiella pneumoniae
atgaatcgctttatgttgcaacttatcgtccgacgtattggtgcggggctactcacgttgctgattgtctccgcggtggtgtttttcatcaccagcctgttacctggcgatgctgcgcaattgctgcttggacaaaacgccacagccgaaaccgtggcggccctgcgcgaacagctggggctggatcgtccgctggcggtgcgttattgcctgtggctgtggggcatgctgcatggcgatttcggcatctcatttgccaaccatttaccggttgcccacctggtggcgcaacgtatccccgcgacttttgaactggccgcgaccaccacggtggtgtcggttcctgtcgctctggtcatcggcatactctccgcgatgtaccgcgatacctggctggatcgcgctctggtgatgggggccatgacctgcgtgtcggtgccggagttcctggtggcgaccattgcggtactgattttcgccgtgaaactgcactgggtatcagcgatgtcgttaggcggcggcgaagggtttttaaattacctgaaaacctacgccttgccggtgctgacgctctgttttgttctggtggcgcaaatggcgcgtatgacccgggccgccattgtcgagcaactggagagtccgtggctggaaatggcgttattaaaaggcgtctctccactacgcgccgtacttcgccatgctttgcccaatgcggtcggcccgattgccaatgcggtctcgttgagcctgtcttacctgtttggcggcgtgatcatcattgaaacgatttttagctaccccggcatggccagccagttggtcgatgccgtgagtaaccgcgacctgccgttggtgcaactctgcgtgatgctgtttgccgcctgttatctggcgctgttactgattgccgacgtgataactatcgcctttaacccgaaatggaggggatga

SEQ ID NO: 237366 - DNA, 852 bp, Klebsiella pneumoniae
atgaaccgcatactattaccctggcgtttcttgatggcgctctcgtggtccggacggattgggctgctgatgtccttattctggatcctgatggcgttgttcggcggatacattgccccgcatagcggaatggatatcggtgccgggccgattctgggcggttttagcgcggaaaactggctgggaaccgattatctggggagggatatgctaagccgaatcctgcttggggcgcgtttctccattggcctggcgctgacggccgcggtgctggcaagcctggtcggcacctttttagcgttactggcggcgctcgccgggcgctggctggaggagatcctcgggcgtattaacgatgccctattagtcctgccgggaaaagtcctgtcgctgatgattgtcgccgtttttggttcatcgctgcccatgctggtggtcaccgccgtttttacctactggcctggcgcctatcgtattgcgttttccatggcgggcagtttgcgcacgatggattatgtccgcgcctcgagtttgcgcggagaaagtcggtggtacattgcgttgcacgatattttacctggcatggtacatgccatgctgacagattttggcctgcgttttgtctacatcgtcctgttgctgagcggcctgagttttctggggttaggcgtgcagccgcctgatgccgactggggaacgctggtgcgggaaaatctgcaggggttgttcaatggttctcccgccgtcctgatgccggcgctggcgattgccagcctgaccatcggcgctaacttatttatcgatagcctgcgccatgtcgggacgctgcaactggcggaggagggggtatga

SEQ ID NO: 237367 - DNA, 1665 bp, Klebsiella pneumoniae
atgagcatcatgttgcacagtaacctgccagccatcgccgttgaaaatcttaaagtaacggcgaaaaacgataagggcgaagccataactctcgtctccgacattcagttcaccgtgcaacggggcgaggttctggcgctgattggcgagtctggatctggtaaaaccaccattgcgatggcgctgatgggatatgcccgtcatggttgccagatagccgatgggcggatccatgttgccgatgaagatgtgatgcgcctgacgccccatgaattacagcgctttcgcggcaagaaggtggcgtatattgcgcagagcgcggcggcgtcattcaaccccgggatcaagataatcgaccaggtgatagaaagcgtggtgatccacggcgttctttcccggcgcgaggcgcgcgccaaagccgtggcgctgtttcgcgaactggcattgcccgctgcggaaacgattggcgaccgttatccgcaccaggtctcgggcgggcaattacaacgtctgatgacggccatggcgctgattggcgatccggaagtgattatccttgatgagccaacaaccgcactggatgtgaccacgcaggtggaagtactcaaagcgtttcgccgtgtggtgactgagcgggggatgacggctatttatgtcagccacgatctggcggtggtggcgcagatggcggataaaatcctcgtgctgctgaaagggcaaattgccgaatatggcacaacccagcaattactgagttcgcctgtttcagattatacccgcgatctgatggcggcggctcgccaggctgagcgcccgagtagctggagtccggcgcaggcggagattcaccctttgctggaagtacgcaacctggcggttggctacggcaccaagaacccggaaggcgtacccgccattcgtatcctggaggagatcaatctgcaagtctggcaaggtcaggcgatcggtattattggcgaatccggctccgggaaaaccacgctggctcatgcgatagccgggctgaaccccgcttaccatggtcacattctgtttggcgatcattatatcaacaacgccatgcagcagcgcgcgccggatgagctgcggcgcattcagtatgtttttcagatggcggatacggcgctcaatcccaaccacaccgtcgcgcaaatccttgcgcgtccgctggcgttgttccaccagttgcggggcgaacagcagcaacagcgggtgaaagcgttactggatttagtgcggcttcctcactcagtgatgcagcgtaaacccggcgcgttatctggtggtcagaagcaacgcgtcaacctggcacgggcgctggcggctgaacccgaactgattatttgcgatgaagtgacctcggcgctggatacggtggtggcggccgccgtgctggatctcatttgtgaattacgccgtaagctggggctgacggtgttgtttatcagtcatgatatgcatgcggtgcgagcggtgtgcgatgacattgtagtgatgaaacaagggcggattgtgacgcaactggcccgcgatgattacgataaaccctcttctgtactctatttcgagcgcctcaaacgcgcggttccggaactgcggcaggggtggcttgatgaacacgaagatgtattaaaagcggaataa

SEQ ID NO: 237368 - DNA, 1332 bp, Klebsiella pneumoniae
atgcctgcaccgttacgttatgttcaggacagcactgattttcccgactctgcggatgtggtgattgtcggcgcgggtatcgccggctctgccgcaacctgggagttggctaaacaaggtctgcgcgtggttttgctggaaaaagggctggtcggggctgagcagtcgagccgtaactggggctggtgccgccagcaaaaccgtgatgaacgggaattgccgttatccatttacgccttacagcgctggaacgagctggagcgtgaaaccggcgaagaactggggtttcgccgctccgggctggtgtacgccactcaggatcagagtgaaattgatgcctgggaaaaatgggggcagattgccaaacagtatggcgttgagagccatatcctgacggccagcgcggcaaaagcgatgacgcccggcagctccaccgcctggctgggcggggtctcctcgccaacggatggttatgcggaacccgcctgggccgctcctggtctggtgcgggcggcaacggctcgcggcgcaatgcttttccagcagtgcgcggtgcgcggccttgatattagcggcggggttatcagcggtgtgtggaccgaacgtgggctgattaaaacctcccgggtgattgtgtcagccggagcctggacttccatgttctgccgccgtcatggcattgatttaccgatgggcaatgtgatcggtaccgccttccgcaccagaccgattgagcaggcgattacggttcccttttataccgggagttttgcctgccgcccgcagcttgatggcagctacaccgttgcggtatcaggccggggaaggctggaacccggcgcgcaagggattcgctacgcgcgccagttctggccgacattcaaatcgcgtcgcaaaaatctgacgatctccgcggggatcgcgcccttcttccgggggccggaatctttgcgcagctggtcgtttgacagcgtatcgccttttgagcaggtacgaattctggatccgttgccggatcgcgaaatggtgcaggccgggcttacagcgatgcgcagagaatacaaagcgctggaaaatttgcaggttgctcaggcctggggcggaatgatcgacagtacgcctgatgcgatcccggtgatctcgcgggtggataagctgcctggcctggtcgtttcggcgggatatagcgggcatgggttcgggatcggtcccggagccgggcggctggccgcggatctggcaacggaggcgacgcctgtggtcgatccggcgccattccgctactcgcggctggtcgacggcagcaacctgaacagccctggcatgatgtaa

SEQ ID NO: 237369 - DNA, 849 bp, Klebsiella pneumoniae
atgagcgtgacattacgcccaatgcaggaaaccgatgttgctgagggattcgctcttagccaacaaatgaaatggccgcaccggcgggaagactggctgcaggcgtggcgccacgggaaaggtgtggtggcgctggacggcgagtcggtgatcggcaccgcgctgtgctggtcctggggagaagagctggccatgatcgggctggtgattgtggatgaacggatgcaggggcgtgggataggcaagacgctgatgtcatgggcattggcgcagcttgaaggctacaatattcgcctgcatgccaccgaaatgggcaaaggcctgtatgaaaaatacggctttgtctccacggggacgatccaccaacaccagaacccctctttgccggtattgcaggcaaaagcagtgcctcacggctggcaaatccgcccggcgcaagaggccgatctgccggttctggtcgccatggatcacgctgcgaacggtatgacgagaccgcagctatttgccgacttactggcttcaggccgcgccgaagtattagtcgataaagagggagcggttcaggccgttgccgtggaacgagcatttggccgtggatacgccatcggcccggtgctgggttatgcggaagaaaacgtgcgcgagctggtctcccaccagcttgcccgcctggcaggccagtttgtgcgtatggattgcgacgccgccttgccgttcagcgcctggcttagcgagtgcgggctggcggtggtggacgcgccggtcttaatggtgcgcggcgctccctggcagcccgcctccggcggccctgtcgcgtttgggctgatgacgcaggcgatgggctga

SEQ ID NO: 237370 - DNA, 927 bp, Klebsiella pneumoniae
atgaagattgtctatcgatccgagaccgcccgaggggagcagtgggccgcctggctttcgcagcacgcgccggatatccagttccacctgtggccggataccggcgatgacaatccggtggattttttggtcgcctggcagccgccagaggggctgaatcgccatttcccgcacctgaaggcgcttttttccgtgggcgccggcgccgatcaattcgattacggggcgctgccggcggatttacccgtagtcaggatgattgagcctgggctgacccagggcatggtggaatatatcactttcgccgcgctggcattacaccggggaatgccgcgttatttacatcagcaacaacaccagcagtggctggcgcatcccagcatgcgggccggcgcccgccgggttggcgtgatggggttgggggaactggggacggctgcgttgcgtcagttgcaggcgctggggtttgagtgcggaggctggagccggacgccgcatgtgattgcgggcgtcgcctgctggcacggtccgcaacaactggctgagtttctggcgcgcacggatattctgatttgcctgctgcctttaaccgatgcgacgcggggtttgctcaatgcggaactgttcgacgcgttacccaaaggggcgatgcttattcaggccgggcgcggcccgcaactccatccgcaccatttgctggctgcgctggagagtggacaagtgcaggcggcgatactggatgtgacggaccctgaaccgctgccccccgagcatccattgtggcgacacccaagtgtatggatcacgccgcatatcgccagccagacgcaaggcgacagcgcggtcagcgcactgctggagaacatccggcgctggcagcgcggtgaacccatgcacggcgttattgaacgaaaccgaggatattga

SEQ ID NO: 237371 - DNA, 1125 bp, Klebsiella pneumoniae
atggatgtaacgcacctgacggcgctgcgcagagagctgcacagcaacccggagctggggtttaaagaacatcagacggcggaacgagtggccaggcatttaagcgaacttggtcttgaagttcaccggggcgtgggaaaaaccggcgtcgtgggggtgctgcggcgcggcgcgagcgggcgtagtatcgggctgcgggccgatatggatgcgctgccgatggcggatcagggcgagcaaccctggcgcagtaacgtcgataacgtctgccatgcctgcggccatgacggccacaccgtcatgctgctgggcgcggcagaacgcctggcgcgtgatcccggtgtgaatggcaccgtctgttttatctttcaaccggcggaagaggggctggcaggcgcgcaggcgatgattgacgacggcctgtttacccgttttccctgcgatgaagtctatgccttacataactggccggaactccccgtcggcgccgcgagtacccgttcggggccgattatggccgcggcggatcgctttgatattacgctttccggccccgggggccatgccgctcaaccgcacttaacccacgataccttgctggcgaccagtgaactggtcgtgcaattgaataccatcgtctcccgcgtcgtcgatccgtgcgagccgggcttactgagcgtgacgcggattcagggcggcagttctcacaatatgattccgtcccgggccgcgataacggggaccgtgcggacattcagcgccacggcgcaggatgcgatagagcgccagctgcgcctgatggcgaaccatattagcgcggcccacgggctggaagcggcggtggattaccaccgctattatcccgctacggtcaacgcgccggaacaggctcaggcggcgctggcggcggcgcgcgccgcggggcttgatgcgcaagaagcgccggcgcctgcgctgacgtcggaagattttgccttcatgctgcgcgcccgtccgggagcctatctgtggctgggatcggggccggggcgccctttgcaccattcggcatacgactttaacgatgaggtgatcccgctgggcatccgctggttttgtgaagtcgcccgcgctcgtcttagttag

SEQ ID NO: 237372 - DNA, 1323 bp, Klebsiella pneumoniae
atgcaaaatgtaatggctgaacaacagcaagacgcctggcaggataacgcaaactttctcgatacccgcgcaacttatgttccgcgtggcgtagtcacggcgcaccagctagtgattgagcgcgcgaaaggcagcgaagtgtgggatgtggaaggtaatcgttatcttgattttgttggcgggattggcgtgctgaatgtaggccataaccacccggaggtggtcagcgcggtagcacagcaattggggatggtttctcatgcctgtttccaggtggtgggttacccgggctatatcgaactggcaaagcgcctgagccagttggttggcggcgatgaacactttaagagcgtcttttttaccagtggcgcggaagcggtggaaaatgcggtaaaaatcgcccgggccgcgaccggacgcagcgggattatcgcttttgatggcgcctttcatggccgtacattgctgggttgtacgctgaccggcatgagccagccgtaccgccagaactttggtccgttcccgtccgatatttaccgcttgccgtttccgaatccgtaccatggcgtcactgaggcggattgcctgagggcgttggaaacgctgtttgccgcgcagattttgccggaacacgttgcggcgattatcatcgagccggtgcagggcgatggcggttttctgccggccggcgccagttttatgcaggcgctgcgtaagatcacggcgcaacatggcattctgctgatttgcgacgaagtgcagaccggctttggtcgtaccggttccctgtttgcattccagcaaatggggatagtgccggatctggtgaccgtcgccaaaagcctcggcggcggcttgccgatttccggagtcgtggggaaagcggaactgatggaagcgccgttgcccggcggactgggcggaacctatggcgggaatgcgctggcctgcgctgccgccctggcggtgctggacttaatggaacaaggccatcttttggctcgctccgtggagttgggggagaagctgcatcgtcgactgcaacaactggcggaaaaatatatctgcattggcgaggtgcgcggtctgggctttatgcaggcggcggaaattattgatgtggaaagcggaaagccagatgcggaactgactcagaaaattctggattgcgcctgtcaggaagggctgttgctgattaaatgcggcctgcaccgcaacaccattcgttttctggcgccgctggttaccagtgattcgcaactggaagaggcgttgcatatctttgatattgcactggcgcgggcaacgggtcgactgggttaa

SEQ ID NO: 237373 - DNA, 507 bp, Klebsiella pneumoniae
atgaacggcttattaaaactcgaccgcatcgacattaatattctggtgcaactgcaaaaagatggccgtatcagcaatgtccaccttgccgatgccgtagggctttcacccagcccatgtttgcagcgggtgaaacgccttgaatcggccggatttattaccggctacgaagcccatattaacctacccaaaatcaccgattcggtcacggtgtttactgaagtcacgttgtccgggcatcgcagagaagattttgtgaagttcgaaaacgccattcgggatgttgaagagttgatggaatgtcacttgattacgggcggttatgattacctgttgcggtttatcacccgcagtattgagcactatcaggatgtgattgagcacatgctggatgcccgcatcggcattgataaatatttcagttacatcgtgattaaatcccctattttgaaaagcggcgcgccgttacgcacgctgctttcccgccatacgcagatagaatgctag

SEQ ID NO: 237374 - DNA, 264 bp, Klebsiella pneumoniae
atgggcgcgcgctggcccggtaacgtgcgtgaattacgcaacgaagcggagcgattcgttctgggcagaggcgtggtcaacggcacgtcggacggcgcgccggcttccctgacgcagacggtggaaaattttgagcgcagcgttatcgcgacggagctggagcgccacgacaacaacctttcccgcaccgcagaagcgttacaggtggcgaaaagcacgctgtcggacaaaatgaaaaagtatggtctgaaagccggctcatga

SEQ ID NO: 237375 - DNA, 294 bp, Klebsiella pneumoniae
gtggcgcacgtattcggtgaacgcacgctggccacgctggagcgtcttccgggcctgctgtcggcctttgaggtcgtggtatggatgacggatggctggccgctttatgaatcacgcctgaagggaaagctgcacgtaatcagcaagcgatatacgcagcgaattgagcggcataacctgaatctgaggcagcatctggcaaggctgggacggaagtcgctgtcgttctcaaaatcggtggagctgcatgacaaagtcatcgggcattatctgaacataaaacactatcagtaa

SEQ ID NO: 237376 - DNA, 444 bp, Klebsiella pneumoniae
atgaaaacgatgttacgcattgcctgtcttgctgcacctgtaatgttgaatgtggcgcaggcgtccacactgcaaccgggtaacctaatcattggctctgacctgacttatccgccttataatttccttaagcaggacaaaccggcgggttttgatactgagtttattgagttaattgcctccccgttaaagctgaaaccggtcgttaaagacacgcgtttcgccagcctgatccttggcttaaaaagcaataagttcgatgttatcgcttcaacactctatgtcacgccggagcgcgcgcagcaggtggattttctgccttatatgaaaaccggcggctctttattggtgatagccggctcggctttccagccgcagaacccgaagacctgtgcggcaaacgggtggcatcaattaaaggcggagcctggattgcccgcctga

SEQ ID NO: 237377 - DNA, 1233 bp, Klebsiella pneumoniae
atgaagatgggcgaatttccacacagcaccagcgcccggcaaggtgggccgattcccacgcggcagcggcgcccggcaaggtgggccgattcccacacagcaccggcgcccggcaaggtgggcggatttccacacggcagcggcgcccggcaaggtgggtggatttccacacggcaacggcgcgcggcaaggtgggccgattcccacacagcaccggcgcccggcaaggtgggcggatttccacacggcagcggcgcccggcaaggtgggtggatttccacacggcaacggcgcgcggcaaggtgggccgattcccacacagcaccggcgcccggcaaggtgggcggatttccacacggcagcggcgcccggcaaggtgggtggatttccacacggcaacggcgcgcggcaaggtgggccgattcccacacagcaccggcgcccggcaaggtgggcggatttccacacggcagcggcgcccggcaaggtgggtggatttccacacggcaacggcgcgcggcaaggtgggccgattcccacacagcaccggcgcccggcaaggtgggcggatttccacacggcagcggcgcccggcaaggtgggcggattcccacacgacagcggcgcccggcaagatgggcggatttccacacggcagcggcgcccggcaaggtgggcggattcccacacgacagcggcgcccggcaagatgggcggatttccacacggcagcggcgcccggcaaggtgggcggattcccacacgacagcggcgcccggcaagatgggcggatttccacacggcagcggcgcccggcaaggtgggcggattcccacacgacagcggcgcccggcaagatgggcggatttccacacggcagcggcgcccggcaaggtgggccgattcccacacgacagcggcgcccggcaaggtgggccgattcccacgcggcagcctcgcccggcaaggtgggccgattcccacgcggcagcctcgcccggcaaggtgggccgattcccatatcgacatgtatgtagcttgtgttatccgtggattgtgcagctcagcgggtcgctggtcgtatggcggagtgtcccccgtaaccggccgcgtgcggccgctaacgcgcagtacggcgccgcgacccgaaggcgggccgccgttcccgcgcgcaggcgcgcggcgcccactacgcacccccgtgggggacgtgcggcagttgcgtggcggtga

SEQ ID NO: 237378 - DNA, 192 bp, Klebsiella pneumoniae
atgaaagtagcggtaattaattacagtggcagtgttcgtaaaaccttaatttcatcctacctgttagctccgcgcctgactggtgcaaagttctatgcggtagagactatcaaccagtctgcttccgatctgggtattgaaaatgtgaccagttttaaaggtgacgacttctcacgtttgattgaggggtaa

SEQ ID NO: 237379 - DNA, 924 bp, Klebsiella pneumoniae
atggacgattatcgttttaatatgatgattagcgcaattaaaaagccatgtgtcttgagattaaagctaattaaaaacaaagaagttggaaaatcactttttgtctttgaaggtgaagacgactatgatttttatcatcatgccttagtaatttccggatttgacaaaagttatactcatataaatggggctgggaaggatcaatcgatttccctgtataaagaactagataaagaagacagtgaatatttagttaatacatactttttcgttgatcaggattattctagttattgctattgcaataataatatattcactctcccattttatgccattgagaatccgctttccaatgacaaagtcattaaacatttccttgtatcaactttcaagcttgatgaacgccataaaaaaataattgatagtgccatggaaaattatgctaaagctaaggctagcttctacaaagagataaaagaaatctcagtgcaattatatatgtcaagagtccttgggttaggtgttgaattcccgacaaacaatgaaatttttgataaaattgaaaaagacaaagtaacacttaaaatcaaagaaatagattccatttcagaaagattacataacctatctgaagatgaaaaaaaataccatgaagttataaaagctttagatgatgataaactcactagaggtaaatacgtctaccattttgttagtgagtggttgatgcgaataaaaaaatacattaactcaagaatagaaaatttaaacaatgagcacaaatcaaataatgacaaccctccagccaatgataaaaaattgtctaagcaacaatatgatcataccgatctgtcaatagcaaggctcgtcccggcatgtatgaaagttactcaactagaaagttttcttaaaaatatttaa

SEQ ID NO: 237380 - DNA, 1437 bp, Klebsiella pneumoniae
atgaatgttgaactaaaaaaatttcaaattaacaaactttatggttataaagatatacagttaatttttaatgaaaaaagcactattattatagctgagaacggtgcaggaaaaaccacattaatcaatgcattaaaatcaactctaaaaggtgagcttgatgagctaaggaaaataaaatgcgaaagtattgatattgaattcactgatacaaaattttctttaaacatagcagaattgagttattctgactttctcaacaatgccttgctaccctctagatttcaagaaataaccatgaaattgagctctagtcaaatagaagactccttggcttacttaacacataagggtattagagatgcaagacaaacatcatggtataaaaaaatgtaccattcaacaccatataattttggtgatatagatgctgttttatctgaggttaaagctttgctaaaaagttattattcctcgtttgataaaccagaaccattctcaattaacaagcccgaaagatcaaaaacaattcaagcaattgaagaaataaaacaaaaaacaaaaaacattgaaataatctacttaccaacctatagacgtattgaaaagtcaactttacgggataaattcacaagagatgagaatgaaaaacttgtagttagagatggcgaagtaatcagtgttagagaagaatctgatttaggctctaatatagagtttggtttatttgatgttgaatcaaagttgaaggaattaagctcatccatagaacgaagatcgagtttaggctatagaacattaagtgctacaataatagaagatatgatgacaggtaaagcaaatgctccaacaaaacctaagcttccatctgtatcagaattgtcacgatttttaggtcgagtcgttaacaaagataaagagagtaataaaagaattattcaggaagttacaagcataatggaaaataaggaggtattagcatctaacaatatgttgagttattttttatcaaaattgaaagctgtcattgactcgactaaagaacttgaattaaaaattgaaagctttgtcactatttgtaataaatacctacaattatctgatgattccaaatcacttaactttgatattgaaactttacaggttatagttaaagacctacatacaaataacactattgaattagaagacctctcatctggagaaaaacaaataatttcccttatggctcatatgtatttagaccatacaaagaaaaaaattgttttgatcgatgaaccagaattatcgctctcactggagtggcaagaacatgttctagttgatattgtaaatagtccatcagttactcaaatccttgcaataacacactctcctttcgtttttaataacgaactaaaatcccaagtcaaatcattaaaagttattaagcactga

SEQ ID NO: 237381 - DNA, 123 bp, Klebsiella pneumoniae
atggagttgatatatctgaatacgcgctacataaattactttctgatagtaatgtcaaaatctatcttgatgcatttgatgaagttaaacctgaatttagacttgaacttgttgatgaaataa

SEQ ID NO: 237382 - DNA, 261 bp, Klebsiella pneumoniae
atgcctgttaacacctcagccatactacaaaatcagcgcctgactgcattcagccagaatgaccttgaatgcctggaacatctgcgtaacgtcggccaccttgtcagcgagctgatgcaggtgcaggactgcacctccctgcgtcgtgacccgacccagcagttacagctcacctccgtgatttacctcatgaccgcccagctcgacggcgtggtcgaacgctgtaatcaccgctggttcaccggggagggcaacgtatga

SEQ ID NO: 237383 - DNA, 600 bp, Klebsiella pneumoniae
atgatgcccgttcagcaaacagcccctttttctggcttgcatctgttgtgtgtttcctggtacagttttgccgttgtcgcaaaatcggcaaccgggcgtgagaacccgagcaatccatcggcgataccagacgcgccatgcgtctttttttgtgtcgcaatcaacgccacagagcaccagataatggtgtggtgtgcgcacattcgtgcaggtgtgactctccgtctcctgtccgtattcgcacattatgccgccatgtcaatggtagctcaggcggggcagccctcgggctggccggtattcgatggagccggtattctcacccccgtctgggctatcgccactgagcgtgagaactccggcgatagcaattatcagctatccatcggaggttgccttatggctacgatcctcaccccgtcacacccgcagtttgtctttgtgtttgccgctgttcgtcgcgcagaccgtaagccacgcatttgcatgctccgcaccgttgccggtgacgagcgtaccgcacgtcgttcccttgtccgcgaatacgtcctttctcttgccgcccgtctgccgcttgcggaggcatcacatgcctactga

SEQ ID NO: 237384 - DNA, 267 bp, Klebsiella pneumoniae
atgcacaccgctttttcttccccgtcttctgctcctgccgcgccgctgatgccagtctctgatgccgttcacgagcgttttatccgtctgcccgaagtgatgcatctgtgcgggctgtcccgctccacgatttacgacctcatcagccgggaggctttcccgaaacaaatctccctcggcggaaaaaacgtggcgtgggcgcagtcggaaatcactacatggatggccgaccgtatcgccgaacgcaaccggggctatgacgcgtga

SEQ ID NO: 237385 - DNA, 1128 bp, Klebsiella pneumoniae
gtgtttgcgggaaaaaaatcggcccagatccgcgaaattttaatcagcgagtcagcttgggaagaaatgacctgcttattcgcaccttccctaaaggctggccacgatactgacggaataccacttacagactggatattagggaacattcgctcattctttctttacctgacaaaagacaaggtagacgccattaacagcggaaagtatgtagacgtaacgtctgagctaaacgccgcgatgcaggataatgtcccaatcttcttgctaaatggcaactacataatcaatgattccatcacggttggcataacatcaggattaattggtgccgggcctaaaaatgtaaccatagataacagaggcagcaatcatgccttcattttccctgttggttatgatcggggtacaaaggatttcctgggcttcagcataggaagctcttcaggaaaagcgaaagataaatatgcgttttattttagcgaggctggcggtggcaaattagattattccgttggctggcgctttgtgggcatagagcttaacggcaaggggatgggcggtggatggtatcttcaggactgcttcagggtaactgtacgtgattgcggggcatcctcgctttcaaacccattctatttatccgggagtgttgttcagcttactgtagataactttgttaataatggcgacaatcagcccaagactgatactggaagctatggcgtttacatggccacaaagaagtattctgatggtaatggcgtcaaaatgcctgagggtatcaattttataaactgcaagtttgtcaggcaggaagttggcgcacacgctcttggcctttatgtgcagtttgttaatactgaatttgattactcttctaagtttggtgggttctacgcaggcggtgataaagtagatttcataaactgctacgttgcgcccacagcaaccagaagcaatgactttgtaggctttatggtgcaggctcacgcccccaaaacaccggagcccgtactggtagctaattgcacagttaatatgcaagaaaataaaacaggaggctataaatcctatggtgtagttttatctgtaagcgtcgtctcagcaccgtctggcagatcctga

SEQ ID NO: 237386 - DNA, 195 bp, Klebsiella pneumoniae
atggctacgaccctcaccccgtcacacccgcagtttgtctttgtgtttgccgccgttcgtcgtgcagaccgtcagccccgtatctgtatgctccgcgccgttgccggtgacgagcacgccgcacgcctttccctcgttcgcgattacgtcctctcgtttgccgggcgtctgccggtggcggaggtgcgcgcatga

SEQ ID NO: 237387 - DNA, 267 bp, Klebsiella pneumoniae
atgcacaccgctttttcttccccgtcttctgcccctgccgcgccgctgatgccggtctctgatgccgttcacgagcgttttatccgcctgcccgaagtgatgcatctgtgcgggctgtcccgctccacgatttacgacctcatcagccgcgaggctttcccgaagcaaatctccctcggcggaaaaaacgtggcgtgggcgcagtcggaaatcaccgggtggatggccgaccgtatcgccgaacgcaaccggggctatgacgcatga

SEQ ID NO: 237388 - DNA, 138 bp, Klebsiella pneumoniae; identical to SEQ ID NO: 159883

SEQ ID NO: 237389 - DNA, 246 bp, Klebsiella pneumoniae; identical to SEQ ID NO: 97292

SEQ ID NO: 237390 - DNA, 135 bp, Klebsiella pneumoniae
atgtgggtgatgatgaagcttaaacgcactggagaagaggtgtttttccagtattacgacagcagggaagccgcagaaatagcgatgaatgttatgaactccgtcgccagtagctgggaattctatatcaaataa

SEQ ID NO: 237391 - DNA, 1122 bp, Klebsiella pneumoniae
atgacatatcaattacatgtcggacgctgtgaagaagttctcaagacgctgccggataactcagtcgatgccatcgttacagatcctccatatgggctgagcttcatgaaccaaaaatgggattacgacgtcccgaccgtcgaccagtggcgggaatgtctgcgcgttctcaaacctggtggacacctgctggcatttggtggatcacggacctatcaccgacttgttgttaacgctgaggatgccggcttcgaaatcagggatcaaatcctatggatttacggtagcggcttccctaagtcacataaccttgatggtgattttgatggctggggaacggcgctgaagcctgcgcatgaaccgatcgtaatggctcgaaagccattcaagcaaaccgtgtccgccaacatgaacgagcacggtaccggagcaattaacatcgacgcctgccggataccgaccgatgaggcgcttaatggaggcactggcggcctgctttcgcatcagcgtgacggtacccaaccggttgccgactacgagcaggcaccggaaggacgctggccggccaacattattcacgacggcagcgaagaggtgatcgcctgcttccctgctaatgctggagctgcagcaccagtaaccggcaacgaaccttctgcagcatcaacaggtcaggtacttggaatgcgcaagcgtgtggccaccgtccaccatggcgataagggaagcgcagcacgattcttctattgcgcgaaggtcaaaccgaaggagcgcgacgaaggcctcgagcgattcatagcgacatcagccagcgatatgaccggcggacgcaaagagggaagcgtcggcattaacgacccgcgggccggtgcagggcgtacaaatggcgctaagaacaaccaccctaccgttaagccgatcgctctcatgagctatctctgccgactaataacccctccaggtggaaccgtgcttgatccgtggatgggaagcgggagtactggccgggctgccattgaggagggttttaacttcatcggaatcgacctgaacccggattacgtaaccattgcttccgcgcggatcgcttactccttcaaaaaatcgacggaggcagcatga

SEQ ID NO: 237392 - DNA, 141 bp, Klebsiella pneumoniae
atggacgataagcaagagtgcatgttttgcaatgggcatggcgttgtcgaagagtggagtgagtcgctcaacgactggaaagatgaaacctgccaagaatgcggtggcactggctttgaagatgatccggaggggctatga

SEQ ID NO: 237393 - DNA, 432 bp, Klebsiella pneumoniae
gtgagcatccaaaaagatggcatccgccttcataaatctaatttctccgccatagggcaacagattcagccaatgctggaatctggtgactgctatcggcttatcctcaagccttggcgagacaagcgatccattccgcaaaattctcttatgtggatgtggaacagcgatgtggcaactgcagtaaaccaacattcgactgaaaaacttaacgaggaagacctacaccagttcctgaaggacatgttctgccctgccaagccagtaaccgtttttggtgaaaccaagatggtgaagtccaccaagctcctcgacaccgaagagatgaccttttacctgcgccgcattgaagtctggtgcgcagaaagaggtatcaaactacgcattcctgctaattccgaataccacgaaaaaggacatgatcatgtttga

SEQ ID NO: 237394 - DNA, 585 bp, Klebsiella pneumoniae
atgtttgactatgaggtatggaaagaaacggctgtttctcgtaattatgaggtttcttcgaagggtagattcagatcggttgatcgtgtcattgaaaccattggcggctattcaaaaggattatcagggatgccgatcaagccttttaaggtgcagccgacagggtatctccaggtaaaaatctgcgggaaaaaatatttagcccatcggctggttgcgctggcattttgtgaagggttcgcaaatggcctcgtggtaaaccacaaaaatggagatcgagcagataacagagctgaaaaccttgagtgggtaactagctcagaaaatataaaacacgcctatagagagctgggcgtaataccggaacagctagggaaatatggcgaagacaataacgcaagtaaggtagttatagccacctgcaaaatcaccggaaaagaaatcagatatggcgctgcaatggacgccgttcgagacggttttgatagtagctgcattagccgttgctgcaacgggaagtcagtaagccacaaaggatattactggcgctttgaggaggcttcgcatgcacagtctgctcgctaa

SEQ ID NO: 237395 - DNA, 618 bp, Klebsiella pneumoniae
atggctgaagattattttcatattgcacctaaaatagtaccgaaatggagtttatttccggctttaaaagtaggagatacaatcaagacaggcgactttaatccattttttaactttttcctttcttcaaatttgcccacggagaacgtgaatgtcgatggagaggtgagcccatggtcctggatgcagtttctggctgggataagatatggaacaatgaataccagcatgggtgtacaagacattgcgaccagaggtcattaccttgccatgcatttttgtaagtatacccgggagttaatatgggagtctgttcgagccacacactatccagacaagccctctcgtcaaaagtgcatttgggtgtgctgcggtgccgataatctggagtactggaaaccccaccttagcaataaaaaagatgatttacttgtttaccgcgtagaactggatggggttacgcatgaggcgagcgatgaacacttaatgaaggatgatatgccttatgaagaagctctcctgatggcacaccgctactggaaaggtgaaatcgcaaatccgttggcaaaagagaccctttttgaagggaggatgaagattctggagttgatccattaa

SEQ ID NO: 237396 - DNA, 633 bp, Klebsiella pneumoniae
atggcgcggctagaccggccagtcgaaagcagagaacacagactctgttgccgcgcacctctctctgtgaaacctactgtgaggtttgttatggctaaagaccctgatatcgattttttacatcaatgtttcagttataacccaaaaactggaattattacctggaaacctagaccaaggattcatttttcaaccgaaagggtattcaatacttggcactctagattttgcgggaaagaagcaggttgcttgaacatcaatggatatttagagattggtattcaaggtaggcttatgaaggctcatcgtatagcttgggcgctatcttacagagcctatccagagggcttcattgaccacatcaatggtgtcagaaacgataatcgcctaattaatttaagggatgtcgacagggttggtaatggaaggaattcggcaaggcataaaaataatatctctggcgtttgcggggtacattggcgcttaagggataatcgttgggttgcttcgattaaccatgcgggtgggcagattcacctcggatattatgagagcctgattgatgctgttgctgcaagaaagtcagcagaatttaagtatggctaccatgaaaatcatgggcgagcccaataa

SEQ ID NO: 237397 - DNA, 201 bp, Klebsiella pneumoniae
atgcaccgaggcgtgagctctattaccagtcgtctggacaacatcaagccgaacgatgacggtgaaacgttcacccttaccctgagccgggaagatgttgatgcgtttcaggagctgaaagccaagctggcggagctggagcccaaaactgacgagtccaatgaagaccagcaagagctggatttggcgggtaatcagtaa

SEQ ID NO: 237398 - DNA, 1626 bp, Klebsiella pneumoniae; identical to SEQ ID NO: 25091

SEQ ID NO: 237399 - DNA, 813 bp, Klebsiella pneumoniae
atgcaacaaacattaaactttgatctatcagaacaacccatcccagtgcttttgcgtggggataagtgggattctgtttggtcagaactgactgataacgaggatttgaacttcgttgatgccagtagaggaaccagtctgtcatcgttgatcacgtcatcggttgagtccattcacacggccttaattgatgggtggaccatgatgatcggctattccagtggtaaagattctgaaacggtcttgcacctgttcctgatggccctgatccgggctgtaaggagtggggcgaccatcagccagcaccacttcatcttgcacactgacacactgatcgaaagcccagaggtaaggtggctggcggatcagaaactggccgagctggagcgtttcattgcgaaggaaaaccttcctctgaccatcgttctagcaaagcctgggatctcgcagagttggacgggccgaatccttactgggagggggttgcctacgttttccaactccacggcccgccagtgtagccaggatttaaaaatcacctctgccaaaagagcgaaggcagcttatatgcgagagcttcccaaagaggttcgacagaaagtctgccttttgctgggcagtcgtgatgctgaaagcactattcgtgcggccaacattgcaaaacagcgaggaagctcagatcgcgtcattaagacgaaagatgggggtgagctgtatgtggtgaaaaactggttggcgagtgatgtctgggagttcttactatccgctggcatgggctcagcatatcctctgccaagtgtgggcggacaataa

SEQ ID NO: 237400 - DNA, 372 bp, Klebsiella pneumoniae; identical to SEQ ID NO: 16551

SEQ ID NO: 237401 - DNA, 345 bp, Klebsiella pneumoniae
atgagtgacaaagacattgaatctgaaattcaggataaaggcttaaccgcgccgcgcgttacgccagggaaaatcgaaagcgttattgccgaagaggttttcttcactccagctgatgccgtcaaaggcaagggtggtcaggttgctgatagttctcctatcaatctgcttaccatctgcgtgctcattctgaagaacggcttcactgtaaccggtgaaagcgcctgcgccagcccggaaaacttcgaccctgagattggacgtaagattgcccgtgaaaatgcggtaaataaaatctggatgctggaaggttacctgctaaagcagagactgagcgaaaaataa

SEQ ID NO: 237402 - DNA, 1338 bp, Klebsiella pneumoniae
atgaagctggcaattcacaacgaggtcgcggtaagcaatgacgaagttcggcaattagatcgcgcctatgtgtttcattcatggtcgatgcagggcaatctcaacccgctggtcatcgccggggcgcaaggctgcgagctatgggattatgaggggaacacctggctcgatttcagcagccagctggtgaacgtcaacattggctatcagcacccccgggtattggcggccatgaagtcgcagctggagaccctggtcaccatcgcgcccgccaccgccaaccttgcccgcggcgaagcggcgaagcgcatcgtcgatctggcgccggcgggcttcagtaaggtgttcttcactaacgccggggcggatgccaatgagaacgcgattcgcatggcgcggctctataccgggcgcgacaaggtgctgtcggcctatcgttcctatcatggcaacaccggcagcgcgatcgccgctaccggcgactggcgccgggtgccgaatgagttctcccgcggccacgttcacttcttcaacccctacctttaccgcagcgagttcaacgccgcgactgaggaagaggagtgccagcgcgcgctggcgcatctgcggcggatcattgaatgcgaggggccgacggccatcgcggcgatcctgctggagtccatccccggcaccgccgggatcctcgtgccgccggcaggctatatgcagggcgtgcgcgccctggccgacgagtttggcatcgtgctgatcctcgatgaggtgatggccggctttggccgcaccggcagctggttcgccttcgagcaggatggcgtggtgccggatctggtgacctttgccaagggggttaacgccggctacgtgccggcgggcggggtgctgattagcgagccgattgcccgctactttgacgaccacttctttgccggggggctgacctactccggccatccgctggcgatggcggcgattgtcgccaccatcgacgcgatgaaagaggagaatgtggttgagaacgcggcctctatcggcaacgaggtgctgcgccccggtctcgaggcgctggcggagaagcacgccattatcggcgaggtgcgcggtcgcggcctgttccaggcgctggagctggtgagcagccgtgaacaaaaaacgccgctgaccgccgccgacatggctgcgatcaaaggggccctgaccgaagccgggctgctggcctttgtggtggagaaccgcattcacgtggtgccgccgtgcaccattactgctgagcaggtggcgcaagggctggcgatttttgatgcggtcttcgctcgctttgccagtctggcgaagtag

SEQ ID NO: 237403 - DNA, 309 bp, Klebsiella pneumoniae; identical to SEQ ID NO: 150634

SEQ ID NO: 237404 - DNA, 138 bp, Klebsiella pneumoniae; identical to SEQ ID NO: 227476

SEQ ID NO: 237405 - DNA, 318 bp, Klebsiella pneumoniae
ttgccggtcgcgctcgtccaccacgatcaggtcgatgaccgtgtgatcaatctgcacttgttccagtggcgcggtcacggcgggaggctcaccaccgacaccttgcaggctgcgggacgcatcctgaccttcccggcggcgagtggccttgagcggatcgaggccggcgatccgcagagccacggtgttgcgcgccggcgcccgcagcttttgcgctttgcaagcctgcgcgacctcgcggtggaacgctgccaggctacgcttctgcttggtcaggaagcgcttttgcagcaactcgcggatgatgcgctcaactga

SEQ ID NO: 237406 - DNA, 309 bp, Klebsiella pneumoniae
gtgcgcgactacctgctgcgcggattgctacggccggtcgcgtacaccacgggcggctacggcttgttcgatgacaccgcgttgcaacggctgcgctttgtacgggctgccttcgaagcgggtatcggcctggacgcactggcgcggctgtgccgggcgctggatgctgcggacggtgacggtgcgtctgcgcagcttgccgtgttgcggcaactcgtcgagcgtcggcgcgaagcgttggccgatctggaggtgcagttggccgccatgccaaccgaaccggcacagcacgcggagagtctgccatga

SEQ ID NO: 237407 - DNA, 651 bp, Klebsiella pneumoniae; identical to SEQ ID NO: 150876

SEQ ID NO: 237408 - DNA, 435 bp, Klebsiella pneumoniae
atggaaaacaatttggagaacctgaccattggcgttttcgccaggacggccggggtcaatgtggagaccatccggttctatcagcgcaagggcttgctcccggaaccggacaagccttacggcagcattcgccgctatggcgagacggatgtaacgcgggtgcgcttcgtgaaatcagcccagcggttgggcttcagcctggatgagatcgccgagctgctgcggctggaggatggcacccattgcgaggaagccagcagcctggccgagcacaagctcaaggacgtgcgcgagaggatggctgacctggcgcgcatggaggccgtgctgtctgatttggtgtgcgcctgccatgcgcggaaggggaacgtttcctgcccgctgattgcgtcactgcaagggaagaaagaaccgcgcagtgcggacgcggtgtag

SEQ ID NO: 237409 - DNA, 435 bp, Klebsiella pneumoniae
atggaaaataatttggaaaacctgaccattggcgtttttgccaaggcggccggggtcaacgtggagacaatccgcttctatcagcgcaagggcctgttgcgggaaccggacaagccttacggcagcatccgccgctatggggaggcggacgtggttcgggtgaaattcgtgaaatcggcacagcggctggggttcagtctggacgagattgccgagctgttgcggctcgacgatggcacccactgcgaggaggccagcagcctggccgaacacaagcttcaggacgtgcgcgaaaaaatgaccgacctggcgcgcatggaaaccgtgctatccgaacttgtgttcgcctgccatgcgcggcaagggaacgtttcttgcccgctgattgcttcgctgcaaggggagaaagagccgcgtggtgccgacgcggtgtag

SEQ ID NO: 237410 - DNA, 186 bp, Klebsiella pneumoniae; identical to SEQ ID NO: 150912

SEQ ID NO: 237411 - DNA, 324 bp, Klebsiella pneumoniae
atggacgcactgcccaacggttgcaggatcaagtgcctgacctgtgtggatgatttcacaaaggagtgtctgacgatcaccgctgctttcggtatttcaggtgttcaggtcacgcgtattctggacagaatcgcactatttcggggctacccggcgacaataagaaccgatcagggcccggaatttacctgccgcgcgctcgatcaatgggcctttgagcatggtgtggaactacggcttatccagccgggcaagccgacgcagaacggatttattgagggtttcaacggacgattcagagatgaatgcctgaatgagcactag

SEQ ID NO: 237412 - DNA, 222 bp, Klebsiella pneumoniae
atgagcctgctggagcaggggcggctgagcgaactggacgcgatcggcaatgacgagctgtcggcgatggccggcaaatcgacgcacgaaattaagacctgggtggccgcttttgccgcgctatccgcttttggccgctggcgcagtgaaggccgctattaccggccgatccccgagtggatcgccggattcggctcgctgagcgccaccaccgagatttga

SEQ ID NO: 237413 - DNA, 705 bp, Klebsiella pneumoniae
atggacagatatccgcgttccgattcaatagtgcagggccgtaccggcctgcagacttacatggcgcaggtgtacggctggatgacggtcggcctgctgctgacggcgtttatcgcgtggtttgcagcgaatactccggcggtgatgatgttcgtcttttcgagcaaaatcactttcttcgggctgattattgcccagctggcgctggtgtttgtgctgtcgggaatggtgcagcggctgagcgccgggatggccaccacgctgtttatgctctattcggcgctgaccggactgacgctatcgagcatttttatcgcctatacctattcatcgatcgccagcacctttgtggtcaccggcgggatgtttggggcgatgagcctgtatggttacaccacgaagcgcgatctgagcggcttcggcagcatgctgtttatggggctgattggcatcgtgctggcgtcgctggtcaacctgtggctgaagagcgaggcgctgatgtgggccgtgacctatattggggtggtgctgtttgtcggtctgacggcgtatgacacccagaagctgaaaaacatcggcgagcagattgatacccgcgacagcgccacgctgcgtaaatactcgatcctcggcgccttaacgctgtatctggacttcatcaacctgttcctgatgctgctgcgtattatgggcaaccgccgctaa

SEQ ID NO: 237414 - DNA, 453 bp, Klebsiella pneumoniae
atgacgcaaacccgtatcgtggtcagcccggcgcgctttagcgtcagtgaggaatatccctggctggcggaacgcgatgaagacggcgcggtggtcaccttcaccggtaaagtgcgtaaccacaacctcggcgacagcgtgaaggcgctgaccctcgagcactatccggggatgactgaaaaatcgctggcggaaattgtcgagctggcgcgcgagcgctggccgctgggccgggtgacggttatccatcgcattggcgaaatgtggccgggggaagagattgtgtttgtcggcgtcaccagcgctcaccgcggcagcgccttcgcagccggcgagtttattatggattacctgaaaacccgcgcgccgttctggaagcgtgaagcgacgccggatggcgaacgctgggtcgacgcccgcgacagcgatcgtcaggcggcagagcgctggtag

SEQ ID NO: 237415 - DNA, 489 bp, Klebsiella pneumoniae
atgtcacaactgacccatattaacgccgcgggtgaagcccatatggtcgatgtctccggcaaagcggaaacggtgcgcgaagcgcgcgccgaggcttacgttgaaatgcaggcgacgaccctggcgatgattatcgacggcagccaccataaaggcgacgtgtttgccaccgcgcgtatcgccgggatccaggcggccaaacgcacctgggagctgatcccgctgtgtcatccgctgatgctcagcaaagtggaagtcaatctgcaggcgcagccggaacataaccgggtgcgcattgaatcgctctgccgactcaccggtaaaaccggcgttgagatggaagcattgaccgccgcctcggttgccgcgctgaccatttacgatatgtgcaaagcggtgcagaaggatatggtgattggcccagtgcgcctgctggcgaaaagcggcggcaagtccggcgattttaaggtgggtgaatgccatgattaa

SEQ ID NO: 237416 - DNA, 513 bp, Klebsiella pneumoniae
atgagccaggctagcgctgagtttattccgacccgtattgctattcttaccgtttccagccgtcgcggcgaagaggacgacacttccggtcactggctgcgcgaggcggcgcaggaggcggggcaccaagtcgtcgagaaggcgatcgtcaaagagaatcgctacgccatccgcgctcaggtatcggcgtggatagccagcgataacgtgcaggtggtgctgatcaccggcggcaccggttttaccgacggcgatcaggcgccggaagcgctgctgccgctgtttgatcgtgaggtcgaaggctttggcgaagtgttccgcatgctgtcgttcgaagagatcggcacctcgacgttgcagtcccgggccgtggccggcgtcgccaatcgcacgctgattttcgccatgccgggctcaaccaaagcctgccgtacggcgtgggacaacatcatcgccccgcagcttgatgcccgcacccgtccctgtaacttcattccacacctgaagaaataa

SEQ ID NO: 237417 - DNA, 1023 bp, Klebsiella pneumoniae
atgaccgcgtctcccgtatttggaaaggtgtatatggcctcacagcttaccgatgcattcgcgcgtaagttttattacctgcgtctgtcgattaccgatgtgtgcaacttccgttgcacctactgcctgccgaacggttataagcccggcgccgtcaataacaatggctttctcagcgtagacgaagtacgccgggttacgcgcgctttctctgcgctgggcaccgaaaaagttcgcctcaccggtggggaaccctccctgcgccgcgacttcaccgagatcattgccgccgtgcgtgaaaacccggcgatccgtcagattgcggtcactaccaacggttaccgcctggcgcgcgatgtcgaacgctggcgcgctgccggcctgacggcgattaacgtcagcgttgatagcctcgacgcccgccagttccatgccatcaccggccaggacaagttccaccaggtgatggacggcattgacgccgccttcgccgccggctttgacaaggtgaaggtgaataccgtgctgatgcgtgatgttaaccatcaccagctcgataccttcctcgcctggatccaaccccgtcgtatccagctgcgctttattgagctgatggaaaccggtgaaggcagcgacctgttccgccgtcaccatctctccggcatggtgctgcgcgatgaactgctgcgccgcggctggatccatcagatccgccagcgcagcgatggcccggcgcaggtcttttgtcacccggactacgccggcgagatcggtctcatcatgccgtatgaaaaagacttctgcgccacctgcaatcggctgcgcgtctcgtccgttggcaaactgcacctgtgcctgtttggcgaaggcggcgtcgacctgcgcgacctgatggccgaagaccagcagcaggccgcgctggaggcgcggatcgccgaagccttaacccataaaaagcagacccatttcctgcatcagggcaacaccggtattacgcagaacctgtcctatattggcggttaa

SEQ ID NO: 237418 - DNA, 906 bp, Klebsiella pneumoniae
atgcgcaatcgtacattcgctgacctcgatcgggtggtagcgctcggcggcgggcatggtttgggccgggtgatgtcctccctctcctcgctcggttcacggctgaccggcattgtcaccaccaccgataacgggggttccaccgggcggatccgtcgttcggaaggtggcattgcctggggcgatatgcgcaattgcatcaatcagttaattgccgagccgagcgtagcatcggcaatgtttgagtatcgttttggcggtaacggcgagctttccgggcataacctcggaaatttgatgttaaaggcgctggatcacctgagcgtgcggccgttagaggcgatcaatttgatcagaaacctgctgaaagtggacgctttcctgatcccgatgtcagaacaaccggtggatttgatggcgctcgatcatgaaggccatgaagtttatggcgaagtgaatattgatcagcttgataatgtgccgcaggagctgatgctcaccccgccggtaccggccacccgcgaggcggtggaggctattgccgaagccgatttgatcctcattgggccgggcagtttttacaccagcctgctgccgatcctgttgctcgacgagatggcccaggcgttgcgccgcaccccggcgccgatggtttttatcgataacctcggcaaagagcatagcccggccgcgaggctgtcgctggcggagcgcatcgcgattatggagtgctatgtaggcaaacgggtggtggatgcggtgatcgccggtccaaaagccgatatcagcggcatcgacgaccggttggtgatccagacgccgctggaggccagcgacgttccctatcgtcatgaccgggcgctgctccgcggggcgctggagaaagcgatccagctgccgggctga

SEQ ID NO: 237419 - DNA, 1641 bp, Klebsiella pneumoniae
atgtcgttattgcctctgcgtcggccggtggtcagccgcacgacttatctgattctctttgcttgctatatcggtatctgtctcaacctggctttttatcgccaggttttcccgttactgccggtaaatagcctgcataactggctggtattcctcagtatgccgatcgtggccattagcgtgatgaatatcctcaccactctcgcctcgttcctgaagctggaccggctggtgattagcctgttcattctgctcagcgcctcggcgcaatacttcatctggaactttggcgtggtgatcgaccgcagcatgatcaccaatatcctcgacaccactccggcggaaagctttgctctactctccggcgaaatgattgccgtcctcggcctttccggggttttggcggtattcgtcgcctggtgggtgaaaatccgtaagcccgccacccggtggcgcggcgcggcgatgcgcctgctcaatatcgccgtttcggcgctgctgattattctggtggccgcgctgttctacaaagattacgcctcggtgttccgtaacaacaaagagctggtgaaatccctgagcccttccaacagcattgtggccgtgaactcctggtatgctcatcatcggatggacaacctgccgctggtgaagattggcgaagatgccacgcagaaagcggtgatgcataacgctccccgtaagaacctgacgatcgtcgtgctcggcgagacttcgcgagcggataacttctcactgggcggctatttgcgcgacaccaacccgttgatgcggcaggacggcgtgatctattttccgcataccacttcctgcggcacggcaaccgcagtttccgtgccgtgcatgttctccaatatgccgcgcgcgcattatgacgaagagctggcgcaccatcaggaaggcgtcctggatattctacagcgcgcagggatccaggtactgtggaacgataacgacggcggctgcaaaggcgcctgcgaccgggtaccacaccagaacgtcaccgacctgaagctcaccggacagtgcatcgatggcgagtgctacgatgacgtcctgttccataatctcgacagctatatcgataacctgcaacaggatggcattattgtgctgcataccatcggcagccacggtccgacgtactacaatcgctatccagcggcgtttcgcaaattcacgccgacctgcgacaccaatgagatccagggctgtacccgggagcagttgaccaatacctatgacaacaccatcctttatgtcgactatgtcgttgataaagcgataaaactactgcaatctaaacaggataaatttaccactagtctggtttatttgtccgaccacggcgaatcgctgggagaagatggcgtctatttgcatggtctgccgtattccatcgcgccggatacgcagaaacatgtgccgatggcgctgtggctctccgccgactaccagcagcgctacggcatttccgcgcactgtctgcagcagcgggcgcaaaaagagaattactcgcaggataatctgttctccaccctgctcggcctgctcggcgtcagcacccgcgagtaccaggcggcagatgatatcttaacgccatgtagagaggctggttga

SEQ ID NO: 237420 - DNA, 672 bp, Klebsiella pneumoniae; identical to SEQ ID NO: 212415

SEQ ID NO: 237421 - DNA, 699 bp, Klebsiella pneumoniae
ttgattcacaacttagttcataagggacaaactcaagactatgctgcctaccataatagaatagcaagtagcatttttttggcactactaatctcccctccccttaatcgtacagacgaagtataccatgcattattaaccaaagaaaaaataacaaatattattgaaactgagttctacaatgacttagacgcttttagcgagaggcaaattgaatcgatatcaaacgttttcagatttatttatagcttaaattataactctgccatacagatgcatacctctttgcagcctcatagacaaaacaatgttataaatgaagatgatgtccgggattatcttgatgtagtatcagcaatatctcacataccaaatctgataggcttgcctcattattcaaaaaaaataaacaaataccttccaacagctttgacaattagagatggaagaagacgaaatacttcattccaagaagagttgaaaaaacacataagggataattccacgcttgcatcattgctttatgaatataataacataatagcctataaagtatccgatgaaacgatagtatcagcaacctcagaaaaaattacaacagttaacggcactaaagagaacaataaccatattgtaagggaatttgatttaagggttatatcaactgataaagcagaggcggaactaaatgctaaatga

SEQ ID NO: 237422 - DNA, 261 bp, Klebsiella pneumoniae; identical to SEQ ID NO: 230755

SEQ ID NO: 237423 - DNA, 144 bp, Klebsiella pneumoniae
atgatctacggcacgctaaccgaggagctgtcgaatacggtgcatgccctggcgctgcacacctacacgattaaagaatgggaagcattacaggatacggtatttgcttcgccgccgtgccgcggcgcagggagtatcgcttag

SEQ ID NO: 237424 - DNA, 1122 bp, Klebsiella pneumoniae
atgctgccggtcgccgccctgttcgccgataaccggcagcccgaacgggtgatggacgttgccgccgccccgggatcgaaaaccacccaaattgcagcccgaatgggcaacgcgggcggcattctcgccaatgaattctccgccagccgggtgaaggtgctgcatgccaacatcagccgctgcggcatcagcaacgtcgctctgacccacttcgacggccgggtttttggcgcggccttgcccgaaaccttcgatgccatcctgcttgacgccccctgctccggcgaaggggttgtacgtaaagacgccgacgcgctgaaaaactggtcgccggagagcaacctcgacatcgccgccactcagcgcgagcttatcgacagcgccttccatgctctgcgccctggcgggacgctggtgtattccacctgcaccctgaatcgtgaagaaaatcaatcggtcattgagtggctgctgtcccgctatccgcaggcggtggagatcctgccgctgggagagttgtttcccggcgcagccgacgccttaaccgcggaaggttttctgcacgtttttccgcaaatttacgattgcgaaggcttctttgtcgcgaggttgcgcaaaactgcggcgatcgatccgctcccggcgccaggctataaggtcggtaaattcccgtttacgccgctgaaagaccgggaggccgccgcggtaactgccgccgccagggctgttggcctggagtgggacgcaggccatacgctgtggcagcgggataaagagctgtggctgtttccgctggctttggagcccctgttcggcaaggtgcgcttttctcgcatcggcgtgcgcctggcggagctgcacaataaggggtaccgctggcagcatgaggcggttatcgcctttgccgcgccgcagcgcgccttcgagctgtcgcaggaggaagcggaggaatggtatcgcgggcgcgacgtctatccgcaaaccgcgcctgggcaggatgaaaccattgtgaccttccagggcgtcccgctgggcctggcgaagcgcgtcggctcccgactgaagaacagctatccgcgcgaactggtgcgcgatggaaaactttttgccggcaaggtgtga

SEQ ID NO: 237425 - DNA, 654 bp, Klebsiella pneumoniae
atgtatcaacgtattaacggcagcgactggcgtaatatctggctgatgggcgatctgcatggctgctttgcgctgctgatgaatcgcctgcgtcagctgcgttttgatccctgggccgatctgctgatctcggtgggcgatctgatcgatcgcgggccgcagagcgccgattgtcttggcctgttgcgctgtcgctggttcaggaccgttcgggggaatcatgagcagatggcgctggaggcgctggagagcggagatatgcggctctggcagatgaacggtggcgactggtacgtcaagggcgatgcgcggcagcgggccgacgtcgatcggctgctggcgcactgtcggcggctaccgttgattattgaagtggaatgcgggaaagcgcggcatgtgatcgcccacgccgattacccggcgccggtctatcgctggcagcagccggtggatccccaacgggtactatggagccgccatcgtctgagtgaacacctggcggggcgccatggcgctattgccggcgcagaccatttctggtttggccatacgccgcttcaggcgcgttatgaccacgataatcaacactatattgatactggcgctgtgtttggtgggatgctgacgctggtggcgctgcagtcggcaggctaa

SEQ ID NO: 237426 - DNA, 390 bp, Klebsiella pneumoniae
atgcaagaaaagatacactggatcaccaacctgcgcggcatcgcctgcatgatggtggtgatgatccacagcaccagctggtatatcactcacccccatgcgattaccctgctgcaatgggatatcgccaatctgctcaattccgcctcccgcgtcagcgtgccgctgttttttatgatctcgggctacctcttttttggggaacgcagcgcccagccgcgccatttctggcggattggcctgtgcattgcgttctatagcgcgctatctctgctgtatatcacgctgtttacccatatcaacgtcgagctgtcgttaaagaatttgctacctgtggtttttctttgctatcaccgtcatctacctgctctcgccgctgcttcaggttaa

SEQ ID NO: 237427 - DNA, 948 bp, Klebsiella pneumoniae
atgacgatttccctttatacctcccggacaagcgcccctaacaccgcagcggcgaccagcgtatcctcgctggagcagtcaggctcctcaaaaacgaaattttctaaaaccagaacggatatttatcagaccgttaccgacagcatcattgcagcgctggaagccggtgtaaaaccgtggtcctgcccgtggctgcgtgtatccggcatgtctggactgccatccaattacgccactggcacggcttacagcggaatgaatatcatgttgctgtggtgcagcgcatctaaacagggtttcagcgattcccgctggatgacttacaaacaggcacaggcagcaggtggacaggttcgcaagggtgaacatggcacaacagccattttctatacgaccctggaaaaggaaaacgacgccggagaggttgaacaaattccgatgctgaaaactttcaccgtgtttaacgttcagcaaatcgacggtttgcccctgacaactgaaacagtcagcccggaagctacatttaacccgttgccgcaggctgagaacctgttacggaagagtggcgcaaacatcatcgagaaaggacaaaacgcctttttcagcccatcaactgatgaagtctggttaccggagcgccatttgttttcggatgcggctaacttctacgctaccggtctgcatgagctggttcactggagcgggggtaaaaaacgcctgaaccgtgaaatgaaagggaagtttggcagtgcggattatgcagaggaagaacttgtcgcggagctgggaagtgcctttctgatggctgatcttggcattgagggagaggtacaacatgaaagctatattgcttcctggctgaaagcgctgaaaaacgacaagcgttatattttcaaagcggtcagcgccgcctctaaagcgcattcttatctgatggataaactctga

SEQ ID NO: 237428 - DNA, 1566 bp, Klebsiella pneumoniae; identical to SEQ ID NO: 27070

SEQ ID NO: 237429 - DNA, 264 bp, Klebsiella pneumoniae
atggtgcttgcatcattttttaatttgagttgccgcaggtacgaagcctgcggctttatttacttgaaggttatcaaattatcatgggttatttggttttcgtccccctccacggctaatttttccacctttcttgcctgcctcagatgcgcgctgaggatcgtttttgaagttaccgccactgttttgaccacctttgcgaccagcctcagaagcccgcttgcggtcttctgcaaagtttcccgaaccaccacgatgttgtga

SEQ ID NO: 237430 - DNA, 1110 bp, Klebsiella pneumoniae
atgatgaaagtactttgtggcgcggtgctctcggcgctgctgctggcggcgggccaggtgggcgccgcctgccagtggcccgcctgggagcagtttaaacaagcgtacgtcagccccgagggacgggtgattgaccccagcgatgcgcgcaaaatctccacctccgaagggcagagctatggcctgtttttcgccctggcggccaacgatcgcgcagggttcgacaaactgctgacctggacgcagaacaacctggcggaaggcgatctgaaacaacatttgccgggctggctgtggggcaaaaaggacgatgagcagtggaccctgctggacagcaactcggcgtccgactcggatctgtggatagcctgggcgctgctggaggcggggcgcctgtggcaacagccgcagtacaccgagaccggaaaagccctgctggcgcggattgtcgctgaagagacggtggcggtgccgggcctcggcacgatgctgctgccgggaaaagtcggttttgccgatgacagcggctggcggtttaaccccagctatcttccgccgcagctggccacctactttgtgcgttttggcgcgccgtggcccgctctgcgcgacagtaacctgcgcctgctgctggagaccgcgccgaaaggctttaccccggactgggtacgctatgagaaagggaaaggctggcagctgaaaaccgaaaagccgccgatcggcagctatgacgcgattcgcgtctacctgtgggtgggcatgctccataatggcgataagcagaaagcgcgtctgctgcaacgcttcgcgccgatggcggcgcagaccacggagcagggggcacccccggagaaagtgaatatcgccaccggcaaaaccagcggtcaggggccagtgggcttctccgcggcaatgctgccgtttttacaggacgacgaggcccggtcggtgcaacgccagcgcgtcgccgataactatcccggcgcggatgcctactacagcgcagttctgacgctgttcggccagggttgggatcaacaccgttttcgtttcacggcgagtggcgaattacaacctgactggaaccaggaatgcgcaagctctcactaa

SEQ ID NO: 237431 - DNA, 588 bp, Klebsiella pneumoniae
gtggatcgcctcgccgaaagaacagaagatgatcccctgctcggccagcttttctcggtaggtagtcgccaccgacaccgagtcaaatatcgcgtccaccgccacctcgcgcccttcgcgtaccggcacgcccagctggttaaaggcttcttccacctcgctggtcagaaaggtattggccccggtctgctgcaccgcgccaggctcggaggcgcaggtctcatcgcagttgccgcaggagggcgcggaatagtagctgtaatcctgataattcagcttatcgtaatgcgctttcagccagtgcggctcctccatttccagccacgcccggtaggcattcagacgaaactccaacatccactgcggctcattgcggcgagccgagatagcccgaacgacttcttcattaatgcctttggccagctcatcggtttgcaggcgagtaaaaaagccctctttgtagttgagcgggccgccggtccaggttttgacatcgtcagttgcttcagtattacgcgacatagttactccgcctgcaccccaaaactttcgccgcagccgcactcatgctgcgctttcgggttatga

SEQ ID NO: 237432 - DNA, 1179 bp, Klebsiella pneumoniae; identical to SEQ ID NO: 137369

SEQ ID NO: 237433 - DNA, 1866 bp, Klebsiella pneumoniae
atgtcattagaccttaatgttagtactctgaaaaataccgtaacattcgtagtggataaaaacagcatagcgcaggcaaaaaaagctgctgatgatctacataaatattttcagaagatacaagaccccaaaatcaggtttcaggctcaaaaacaacgccgccagaaagctcgccaaatggtggatgatgcaaagtttaacacttcgcctaaaaacacctctgatatgaaacaacaacggattgcagagaaagcagctaaagcgcaagctagggaagcggctaaaattgccaaacgtaacgaagtcgccgatcttaaatttcgtagtgctaacatgcagatgaaaggcattgccgggaaatatggcctagatgcagcggcacagcataaatttgctctgtttgccaaacaacaaaccgaattattcaggacagggcagcagaccgctgccagaatgaatcatgagatccgagaacagttaactctactcagacgttcggcagcagcccagcaacgccttaccactggtgctcaggctcaatcaagagcagtgcgcagcacgaataaacgtatggattataaaggggctatatcggcagctaaagagagaggacttaatctaataggcggcggtcctggcttaatagcttccaccgcagcggcagcagcgggagcggggcttatgtatcgtatcaagcaaaagggagatgaaaatctcaacctgatcagaatgagcgagcgagttaaaactaatcccaatgcgataaaaacgatggtggcatggggacagcaacacggggttgactccgctaacgtggataaggccacggacaatatgaaagatgtgcgtgaacgtctcgctatgacggttaacgatgctcagatgaaaaatggtgaatggaagggcggggatggtggtattacagccatcatgaacaaatttggatggagtaaggagcagatttccaagttccaggattccccactcgattttatccaggcaaccgtaaatgaaggtcaacgtcgagggatgaaacaggctcagattggtacgcttatagagagtttaggtgatgacctgatgcactacactgatatgtttctgaataatggtgcagagtataacaagacgctgcaacagcttgttgatagtggtcagacactcaatgatgagcagattaaacaaactctagcatatggtgatctaaacgtagccatgggtaatctgatgaatggtattgataacagcttattcactggctttatgaaaggcttcgctgatggtggtgatgaattagtgagaaacacgcaggtaatcacccagacaacggagatactgggtactgagttggggaatctgactaaaaatattaccgggtttgtcggggagatttcgggggttgtttctgatttgaatagtgctcttcgttcccgtttccctgaatggtttagcgatagtagcaaaccagctacgcaagccttgtatgatggagcaacaggaagtgctgatagtgccgccggatggattcaggaacatacaggatggaatcctcaaacagtagggcaatcggtgaaggattggctgggttttggtactcctcaagccggaaccgctgcaagcaactacggtctgaatggcgacactctacgtaatagtgctatgtcactcaatagcggcaatgcgccagcctacaatctgagccctgtatttaatctacaggtgaatccacaggtggggttaactctgcaaagcgatgtatcacggttgagtgactatatcgactggtctgcaaaagcgagtgcagattcattcactcgttccctcacgctacaaataaatagcggtcaatcatctacaggtggctaa

SEQ ID NO: 237434 - DNA, 201 bp, Klebsiella pneumoniae
atgcttctaatgaacgaaccacaaaaacataaaatccagaaaatgcaggatgagtttaagggactaaatctagagcagaaaacatttattgctaaatcgttagatgtctctatagatgaggtggacgctcttattactaaaatgtcagagcctcagaaaatctctatgcaagaccggattaatcaacgaattaataaataa

SEQ ID NO: 237435 - DNA, 639 bp, Klebsiella pneumoniae
atgacaacatacaatgatcaattcattaaaatgcctatgcgcattcttagcattagccatatcaacggaattaaattctctgataactcaaaaacattatattgctacttaaaaggatttgataaagcgtttccatcatattctaaaataggcgaggtttttggtatatccgcacgagcggcagaggaacgagttaaaaaattagttgagcttggccttgttataaaaacacgtcgcttttcatcttctaacctctacgaggtgttagaaatccctgggcaggaagagtctaacgaagtagggcagactccagatattccagaaattgtagatagttttttctttgatgatacagaagaagatacgacgattgataattttgaagatgtacaaccatcaccgccacctaaaatacaagcgaattctccattcgagtttaagagtccacgtgatgaaacgaaggattggttttatctaaaacattatcagggtgcagaacggtttaccacctttacagattttgatctcccgtatttggcactattcaaggcacagggctcactcactaatccttatgcgttggattatctccagcttagaacagatcaaatacaacaacagttagcgaggaatacatga

SEQ ID NO: 237436 - DNA, 666 bp, Klebsiella pneumoniae
atgactcaaccagaagcagtattttttgactgtgacggcacgctggtcgacagcgaggtgatttgctcccgcgcctacgttcacatgtttcaggaattcggcattacgctggacctcgccgagatttttaagcgcttcaaaggtgtgaagctgtacgaaattatcgacaccatcaacgctgagtatggcgttaatctgcaaaaggccaccctggagccgatttaccgggccgaggtcgctcgcctgttcgatagcgagctggaggtgattcccggagcccaggcgctgctggatgcggtaagcgtcccgatgtgcgtggtttccaatggcccggtcagtaagatgcagcactcgctcggacgcaccggcctgctgcgccatttcactgaccgcttgtacagcggctacgatattcagcgctggaagcccgacccggcgctgatgtttcatgcggcagaggccatgcaggtaaaagccgaaaactgtattctggtggatgactccagcgccggcgctcagtcggggattgccgccggcatggaagtgttttatttctgcgccgatccgcacaaccagccgatcgatcatcccaaagtgacgacctttaccgatctggcagagctgccggcattgtggcaggcgcgcggctgggatatcacgcgttaa

SEQ ID NO: 237437 - DNA, 216 bp, Klebsiella pneumoniae
atgaaaacaaaggggtctaaaatggatgaaaaatttattgattcaaaaattatgaccggagaacgcctattggttataagttctcaagtgctcattgttttaaaaagtgagctttcctccaggggattaaagcccacttcgagtaatttgcgcatcgtgatggaaattattgataaatctttacctgactcactcagcgacttttttatcgaataa

SEQ ID NO: 237438 - DNA, 180 bp, Klebsiella pneumoniae
atgacaaaagaagaaaaagtaatgagcatcctcaagcttgcagttgaaactcacactgcttatcaaacggcggctatgacatccgccaagggatttactaggtctgaagacccgatgggcgatatagagaagatgtacgataaatttgaagcgttattcgataaaaaagtcgctgagtga

SEQ ID NO: 237439 - DNA, 507 bp, Klebsiella pneumoniae
atgatgagcactttcgacaaacatgacctcggcggctttatcggtaaacatctggtctatacctacgacaacggctggaactacgagatttacgtcaaaaatggccacaccctcgactaccgtattcacagcggcatcgtcggcaatcgctgggtgaaagatcaggaagcgtacattgtgcgggtgggggaaagtatctacaaaatctcctggaccgaaccgaccggcaccgacgtcagcctgatcgtcaacctgggcgacaaactgttccacggcactattttcttcccgcgctggatcatgaataacccggaaaaaactatctgcttccagaacgaccatattccgctgatgaattcgtatcgcgatgccggcccggcctacccgacggaagtgattgacgagttcgccactatcaccttcattcgcgactgtggcgcggataatgacgaggtcattaattgcccggcgagcgaattgcctgcggattttcctgcaaatttgtaa

SEQ ID NO: 237440 - DNA, 534 bp, Klebsiella pneumoniae
atgaacaatattgaagcccccaaaatatccttattcaatactgatgaatccatcaaagaaaccttatctaaagaatattcaaacatccaatcccataagttaaacggaagggtttttttcaaagatgaattcattggttaccggaaaaaccatgatacaaaatacgatatccccggggatcttcacgaatccgacataataataattgacacactcccccctaaagacagaacttacacctcaaaaactgttagattgcggtttgatagtttacctcatgacatagatataatgccagtggatattaaactgataaacgaccattttaattcaaaccaaaagaaaaggattgtaatagttttttgcgaacaattttcggaggaagagtacaaaatttactttccagaaaataaagaaagcgatcacttcatcagccatacattttatatcggcgaaataatcgaccaatatttagagaaggttcgagatacaagacagctcaatcgcaaccagatccaattctcgattgcataa

SEQ ID NO: 237441 - DNA, 201 bp, Klebsiella pneumoniae
atgaaagtcagggcgttgcaaaacgacacggttgatcagctctgctggcgtcattacggcaaaaccgcaggtgtcacggagaaggtgctcgaagccaatccgggactgagcaaccagatatttttgaatgccgggcaggagatcgaaatgcccgtgataaccagcgaggtggaacgggtaaccgtccagttatgggaatga

SEQ ID NO: 237442 - DNA, 567 bp, Klebsiella pneumoniae
atgaagaacatcatcaaaaaatgttcgattgcggtgattgtggctctgggcatttcgctggcgcccgggagcgtcagaacgtcgaaagaagggcagcagaaaattgcaggttgggaagactgccgcagcacgccttattactgcacggcgggtgctctgaccattggtatcggctccacgggcggcgtagaaaaccgcgaatacagcaaccaggaaatagcgcgacgctggatcaatgatctgcaacgggcagaaaactgtattaataacaattttcacggcgccgacatgcctcagctcacctttgaggccatgactgatgccgccctgaatctgggctgcaccgggctgatgtggttcaccgataaaaacggacgcaagcagaggaccacgatctggaagcatgcccaggccagacaatggccgcagatgtgcaacaggctgactgatttcgtcaatgtgggcggtaagcgctccgccggcctggttaaccggcgcaatgattttaaagcctggtgcctgctgggccctgatgaatcccctaatgattttggtaaaaatcattaa

SEQ ID NO: 237443 - DNA, 900 bp, Klebsiella pneumoniae
atggaagatgatttcatttcaagaacaccaaacggactatttgcggaagcaacggtcagagatgttaatttcattttccatattgaaggtaaaggagatagcaaagatactacaaaacttccagattatatctattatgattcaattatatcaaacttttttgatgggaaatatgagataaaagttgaaggaggtaaaacagcactccaatccatggtggggagtttatctgcattatcagatggggattctcatatcgtatttatggatagagatcatgacgaaatgatatcaagtggtttaagaagtgatgatttcgttttttataccatggggtatagttatgaaaatgatttttggacaagtaaaatactgaaaaaggttttaacttctcttttggcggaaaacccaaaggttgatttatttattatcgattggaaaaaattagaaaaaaaaatagcctttattcataaatttaacctgctctcaaaagtgaatggtcaacaaatcttcaaatttaaagggctgtgtggtattgtttttgaatacgtaaatggaaattttgttgttgattctggctgtatttttcggttaaagaatatatggaatgggtttggagtacgttttacaccacaaacaagaaaggttaataagttgcttaaaaataaattctactcacatcctgggtatttaattcagggacatgcgtatgaattttatgcactggaagcaatccatcaattaaataattcctgtcaattgtttgagcaaaatgcaaagaatttttctatttataaaaatattgccttttctcattttcgttcatctccacgttgtttcatgtcagctttagccattgagtattacgaagcgctgttttccaaaattcagcaaggctaa

SEQ ID NO: 237444 - DNA, 603 bp, Klebsiella pneumoniae
atgactagcagcctgttaccgccgggttcgtccgcgctggagcgcaggctggcgcaagcctgttctggcatcagtgatttgaacgtgccgctgcgtgacctgtggaacccgtggaaatgcccggcaaagttcctgccttatctggcctgggctttctcagttgaccgctgggaggaaaactggacagaaaccgctaagcggcaggcggtcagcgatgcgttctggatccatcagcgaaaagggacggtagcggcggttaagcgagtgatcgaggggctgggttactcaatgacccttgaggagtggtggaaagttgccgaccccgccgggacgtttcgccttgagatcgatcttaaccatatcggtataaccgaaccgatgatttatgaactggaaagaattatcggtgatgcaaaaccggtgagtcgtcatatttcacagcttacattatcagctaatactaccgggccggtaattgcaggggcggtaacagtcgatggtgagatgattaatgtttacccggaaggttacaaacccggtagtgatttattatatgacggcattgcacattacgacggtaattattactacagcgagaattaa

SEQ ID NO: 237445 - DNA, 264 bp, Klebsiella pneumoniae
atgaatatcgttcgcacgctgctgcatggcattggcgtaagcatcagtagccacccgtgcagcatcctgctgattaccttcatcctgcagtgctttaatctggttgtaggttgccagtgtcagaaagtggtactggtcgttaagtttggtaatggctgcaaccgggtcagcagcaatgtcgttgaaatcacccaccagcttttcagtggcgatgcctgtggcttcactgatttcaaccacggcagttgttactcgttccaatga

SEQ ID NO: 237446 - DNA, 1077 bp, Klebsiella pneumoniae
atgaaaatgggaaaagaagccaaaataaaaatatataaaatagtctcttatatacttatatcaagtatagctggagtggtgctttttataacaaaccacccttgcattttcattgttttcagcatcgctcatataataacaatactatctatactctggcatttcaattggctgaagttaaatgaaaaaaacctattcgtacaacccttatttatttcttccattcttgtcccattacaaatgttcgttttatatggtctttgggcctggagcggacataacattgatttctcatcacatggctttaataatttcttagatatatccaaattaccattgtttattttggcatcatcagtcccacttgccgccatcataaacaacattcatcgcacgatacaaactgaaaatcaaatagaaaaagcacaatcgcaactagacttagctactgagaaaaacaaattagattcatactattctcatttaaaaaactattctgatattttcaaaacgctaccatcattccaattaacccgcacgccattagatgaaaaagatagcaaaaggatcgaaatatatataaatcacccatataaattatataaaaaaattttcccaaaatcatctctgaactatggttataattcactcccagaccaagtacagagtgaaaaatacatcaacctctatcataacctaagcaggaaaatcaataaattgtcaaataaaaaaaacaccattagtgaacaaatgactacattagaacatattgagtcaagtatcatattattgtgccgtgaacttggtatcagctatcacagagaatctcatttattcttaattgaggatcccctatcaaattacgaaataaaaacttctttttctgatgaaaaagaagtaaaagaaatgattcgtggtttaagaaatatacttattgaactttttagtttactggatctaccagaagggcatttcatgggaggaccgcacgtaggtgataacattcctagatatgcaactgaacccaactaccttctttttgaagatattttaccttctattcaaaggatccgttag

SEQ ID NO: 237447 - DNA, 633 bp, Klebsiella pneumoniae
atgatacaagtgaaggctggcgaaaataccggaggtaaagaagcgatccataggcttatggctgcctacaatttcaagtccagacaacagctttgcgatcatctgggcgcatcaaaaagcactatggcaaacagatacttaagagatagcttcccagcggaatgggtaattcagtgtgctcttgaaacgggagtttctttgctgtggctaacaactgggcagggtgaaccaggttcaaatattgacacagaaaaaaacatcaatttcgtgaactctggcaaagtaaagcacctttctgacctcatttctcccgaaattgacaaagtcattttaactgggggtacattggttgaagcaggaaaagcaatcgttgacagcagcctgctcccctcaaactccagcaacctacttttggtaaatactactggggactcttacttggttgaccgcaatcaaacaccaccagttaatggtatgtggctggttgatattgatgggataaagagcatcgttaagctcactcgccttccaggcaaccggctagttgttcatcaggatgatgcctcatttgaatgcagcctggacgaccttgaggtgctaggcaaagccttgaaaatcataaagagcctttga

SEQ ID NO: 237448 - DNA, 1224 bp, Klebsiella pneumoniae
atggtggtagcggatagtcaaccaggccatatcgatcaaataaagcagaccaatgcgggcgccgtgtatcgcctgattgatcagctcggcccggtatcgcgtatcgacctttcccgatttgcgcaactggcgccggccagcatcaccaaaatcgtccgcgaaatgctggaagcgcatctggttcaggagaccgagatccaggagcccggcagccgcggccgcccggcggtggggctgatggtggagaccgaggcatggcactatctggcggtgcgcatcagccgcggtgagatccatctttcgctgcgtgatttaagcagtcagctggtggtggaggatcagctggagctggcgctcaccgacagcacgccgtttctgacgcgcgttatcgaccatattgatcgcttctttattcgccatcaaaagaagctggaacgccttacctccatcgccatgacgatgcccggtattatcgataccgaaaatggcattattcatcgcatgccgttttatgaggatgttaaagatgtcccgctcggcgaagcgctggccaatcataccggggtgccagtctatattcagcatgacatcagcgcctggactatggcggaatctttgtttggcgcctcgcgcggcgcccgggacgtcattcaggtggtcatcgatcataacgtcggcgccggggtgatcaccgatgggcgcctgctgcacgccggcagcagcagcctggtggagattggccatacccaggtcgatccctacggcaaacgctgttactgcggcaaccatggttgcctggagacgattgccagcgtagaaagcgtgctggagctggcgcagatgcgcatggcgcagtcgatgagctcgctgctgcaccagcgtccgctgagcgtggagtggctttgtcaggcggcgctgcagggcgatttgttagcccgggacatcatcagcggcgtgggtaatcacgttgggcggattctggcgatcatggtcaatctgtttaatccgcagaaaattctgattggctcgccgttcaatctggcggcagaaattctttttccggcaatttccagctgtattcggcaacaatctctcccagcctatagccggcatattaccgttgaaagtactcagttctccaaccgcggaacgatggctggcgcggcgctggtcaaagatgcgctctataacggatccttactcatacgactgttacagggttaa

SEQ ID NO: 237449 - DNA, 1386 bp, Klebsiella pneumoniae
atggccaacttcaacacgctgatcaaacgtaagcaatatatctggctgggactcattctggcgggcggcgcggcagccgtcggaggcgggctgtatctgtcagatctgaacatgagctctgatgaggaagccccggctcagggcgaacccgcaccggatatgaccggggtggtcgacagcagcttcaacagtaaggtggagcagcacgcgacaacagaaatgcaggcgactgccgctgatctcaacaagcgttttgactccctgcagggggaagtggacctactgagtaaggcgcgaagcgctgaccagatacgtatcgacaaactcagcagtgacaatgaagccatgcagaatcagctgaaggcgctgggcgtgaaaccggctgtctctggtggcgagcccgcgccgactcctccgtcaccgccacccggtccggaaggggagccgcagccagccagttatccgccgcaaaccggcgccgcggtaccgcctccgacggcattctatccggggaatggtatgacaccgccgccgcaggtcagctaccagtctgtaccggtaccaaaccagatacagcgtaaaacgttcagttatgacaaaggaaagaaagcgaagtcattgccgtacattccgtcggggagctttgcaaaaagcatgcttatcgagggggcagatgccaacgcgtctgttaccgggaatgaatccactgtaccgatgcagctgcgtatcaccggtcgcgtggaaatgccaaacagcaaaacctatgacctgaccggctgctttgtggggcttgaagcctggggtgatgtatcgagtgagcgcgccattgtccgtacccgtaatatcagctgtatcaaaggtgataaaaccatcgatcagcccattaacggccacgtttcctttatggggaaaaacggggttaagggagaggtggtgatgcgtaacggaaaaatcctcggctgggcatggggggccggttttgttgacgggattggccagggcatggaacgcgcttcacagccggcagttggcctgggggcaaccgcatctgttggcgccggtgatgttctgaaaatgggtgtcggcggtggtgcatctaaagctgcgcagacgctgagcgagtactacatcaaaagggctgagcagtatcacccggtcattccgattggtgccggtaacgaagtgactgtcgtgttccaggatggatttcagctgaaaaccatcgaagagctggaagcggaaaagaacgggcaacagcaggctcagaatcaggaggcggagccggcaccgcaggctgatgcacatcatcagtcaggcggcggtatgaacggattggcactgttgcaaatagtcggtggtgataaacttatcatccccttttgctga

SEQ ID NO: 237450 - DNA, 534 bp, Klebsiella pneumoniae
atgacttcacgaaattacctgctgctgacccccggcccgttaaccacctcccgtacggtgaaagaggcgatgttgttcgatagctgcacctgggatgatgattacaatctcggcgtggtacagaccattcgacagcagctggtgcagttggctaccccggccgacggttatacggcggtgctactgcagggtagcggcagctacgcggtcgaagcggtgctcggcagcgtcatcggcgaacagggcaaagtgctaatcgtcagcaatggcgcctatggcgcgcgtatgattgagatggcgcagctgatgggcatcgcctgccacccttacgactgtggcgaagtctcccgtccggacgcggccgcgatcgaacagatcctgcagaacgacccggcgatcacccatatcgcgatggtacacagcgaaaccaccaccggtatgctgaatccgatcgcagaggtggccgaactggcgaaacggtacgataaacgctatatcgtcgatgcgggtgatgctgccaacttactgatttag

SEQ ID NO: 237451 - DNA, 720 bp, Klebsiella pneumoniae
atgaaatcaccctctggcgagatgccgcaatacctgatgattaaggcgcagctgcaggcgcgtattcaaaacggcgccctcaaaagcggcgacaagctgccttccgagcgcgagctgtgcgcgctgttcaacacgacgcggattacggtgcgtgagagcctggcgcagctggaggccagcggcgtgatttaccgcgccgaccgccgcggctggtttgtgacgccggagcgtctgtggctggatccgacgcaaaataccaacttccacaagctgtgtctcgaacaggggcgcgaaccgaaaacggtgctgcttgatggccgcctggctgccgtgccgctggatgtaatggcgcctctggcgctgcagcccttcgatcaggtctatttgctgacccggctgcgctatgccgacggccggccggtgtgctactgcgaaaaccactgtctgcccgcgcgggtgcctgagctgctgcgccacgatctcaacggcagtctgaccgagatttatcaaactcactacgacctgatctataccagtatgcatctgtcgttttatcccacctcaatgccgccgcaggccgccgaggcgctgggggtgatggaggggcgcccggcgctgctgttgcgcaggctgaattacgatcagcacgggcgtattctcgattacgatattgaatactggcggcatgatagcctgcggatcgaagtcgatacccattga

SEQ ID NO: 237452 - DNA, 1014 bp, Klebsiella pneumoniae
atgaaactctcccgacttgctctgctgtccctgttcgcgctgaccagctctccggtttgggcggacggcgtcgtcacggtttactccgccgacggcctgcatgacggcgataacagctggtatcagagccagttcgctgccttcaccaaagcgacgggcatcaaagtgcagtatgtggaaggcggctccggcgctatcgtcgagcgtctggccaaggagcgcaccaatccgcaggctgatgtgctggtcacggtgccgccgtttatccagcgcgccgcgaaagagcaattgctggcaacctttaccccgcagggaagcgcgcagatccccggcgctaacgaccgctacgcgccgctggtgaataactatctgaccttcatctataacagccagttgctgaaaagcgcgccggccagctggcaggatctgctggatagccgctacaagaacaagttgcagtactccacgccgggtcaggcgggcgacggtaccgcggtgatgctgcaggcgttccatagcctcggcggtaaagacgccggttttgcgtatctgggtaagctgcaggccaataacgttggcccatcggcctcgaccggtaagctgacggcgctggtcaacaaaggcgagctgtacgtcgccaacggcgatctgcagatgaacctgtcgcagatggcgcgtaacccgaacgttaaaattttctggccggcggatgacaaaggcgagcgcagcgcgctggcgctgccctacaccatcgggctggtacagaacggaccgaacagcgaaaacggcaaaaagctgatcaatttcctgctggataaaccggcgcaatccagcgtcagcgcgcgctcctggggcctgccggtacgcagcgatgtagcgccggatgatgctaactttaaggcggcgaaagcggcgctcgacggcgtgaagagctgggagccgaactgggatgatgtcgcggtatcgctgtcggctgacattgcccgctggcataaagtgaccgatagcgagtaa

SEQ ID NO: 237453 - DNA, 195 bp, Klebsiella pneumoniae
atgaaaaaactggcgttgtctctctctttagcgctggccctttccagcgtttccacggtctttgccgccatcccgcaaaaaattcgtatcggtaccgatccgacttatgctcccttcgaatcgaagaatgcgcagggagaattggtcggttttgatatcgatctggcaaaagagctgtgtaagcgtattaggtaa

SEQ ID NO: 237454 - DNA, 561 bp, Klebsiella pneumoniae
atggcaacaacaaaaatcatcacccaggcagaggcatttaggctgataagctggcttgagagtcataacaaacagctattcgcagatgtggcgatcactatggcctcgttatgtttgcgtataggggatgcgctctccttaaaattctcagattttgtagagggagacacattaaaaataacagagagtaaaacagggaagcagaaggagatcgtcgtccctgcaaaagtgtgggagatagtgcagaggagaaaagccacttttccacgtgactcctatctattcacctctcattcaaaccgtgcaagtgggctgaagcccgtgagccgtgagcaagtgaaccgggagctaaaacaagcggctgagaatgtagggattagaggaacggtagggtgtcactcgtttagaaagtttgccgctacgcaggtatttgaacagagcaacggcaacctggctttagcaatgcgtaccctcaaccattcagatccaaaagtcacaatgaattatttgaaaatcgacgttaagagcgtaggcgctgcacttgctaacatttgggagtga

SEQ ID NO: 237455 - DNA, 210 bp, Klebsiella pneumoniae
atgaaacctttgattgtgctaacgctggcgctgctgccagccctggcgaatgccggacagattacgatgaccaatccacaggaggagcaaacggagaacggtaaaacactatgtgtgtatgagaacaccaattacctgttcacatacgttacgagcgctcagagttgcccgtatgcaaaaacattcaacacagaggattcagaaaattga

SEQ ID NO: 237456 - DNA, 1077 bp, Klebsiella pneumoniae
atgccagaaacacaacaagaaatattacgtcttagccgtgatgttgaatctggccgcgcagtatatatgcaattacttaataggcaacaagagttaagtatttctaaatcaagcgctattggcaacgtccgtataattgacaatgctgtaacagaaattaaaccagttaagccgaagaaaatactaatagttctgattggtatagtgtttggtggaatagtatctattgggctagttttattacgtgtattcttgcgtaaaggtatcgaaagcccagaacaattagaagaagttggatgtaacgtgtatgcaagcataccagttgctgaagcttacactaaaatcactgagcaatcaaagaaatggtctcgcaaagaaaacaaaataaatcaagggtttttagccgttgataatccagctgacttggccattgaagcaatcagaggattaagaaccagccttcattttgcaatgatggaatcgagaaataacgttcttatgatctcaggtgcgagtccgaatgcaggtaaaacctttgttagttcaaatttatctgctgttattgcacagacaggaaagaaagttatctttattgatactgatatgaggaaaggatatacgcacaaattatttaatgtcagtaatgataatggattgtctgatatactttcaggtaaaatctcaatagagaaaagtattaaaaaaatatcttcagctggatttgactatattagtcgaggcatggctcctcctaatccagctgagcttttaatgcataagagatttgcggaactaataaattgggcaagcgaaaactatgacattgtagttttggatactccaccgattctcgcagtaacagatcctgctgtaattggacactatgcaggtacaactttacttgttgcccgttttgaactgaatacagttaaagaaatagaggtaagtattaagagatttgaaaatactggcattcaagtaaaaggttgcatattgaacggtgttgtgaagaaagctagcagttattatggctatggctatagtcattatggatactcatataaagataataactaa

SEQ ID NO: 237457 - DNA, 795 bp, Klebsiella pneumoniae
atgagtttacgccaggcctgcaggacgttatcgctgagcaggacggtgtatttttatcagcccgatacccggcgtgatgaacccgtgatccacgcgctgactgaactggcagaacgctatccgcgctacggttttaagaagctgttccagctgctgcgcaggcagggcaatacctggaaccataaacgtgttcaccggatttattgcctgctgaaactgaattttcgtcgcaagggaaagcagcggctgccagtgcgtaatccagcaccactggcgacgccgcaagcgttaaaccagagctggtccatcgattttatgcacgacgcgttggtctgcggcaggcgcttccggaccttcaatgtggtggatgattttaaccgtgaagcactggcgatagaaatcgacctgaatatcccggctcagcgagtcatccgagtgctggacagaatcgtggcaaaccgcggctacccgctgaaaatgcggatggacaacgggccagaactggtctcgctggtgctggcacaatgggccgaagagcatggcgtgcagctcgaatttatcaagccgggtaagcctacacaaaatgcttttatcgaacggttcaaccggacataccggacagaaatcctggatttttacctgttcagaacactgaatgaagcacgggagattaccgagcgctggctgatggaatataacaacgagcggcctcatgaatccctgaataacctgacgccggaagagtatcggctgatggctgaaaaaccggaacactcaaaaagtgcatggaactga

SEQ ID NO: 237458 - DNA, 957 bp, Klebsiella pneumoniae
atggcctggatcaccgcctggcgcatcgaccgctatgccagaggctcgatgctgaaaacgcccttctatcagcgcgccacgaataccgacgcgctgcctgccgcgcgtaaggcggcagaagagattcgtgataaagaacaggagaaggtgctcagggctcgccagaaccagatagcaaaccagcctcctgacaggatggatgagctggttctgcagccgggcgtgaaggattttgacccaaagatggatcaaacccagctgttcgacgcggcgaaggagttcggaaaagattaccacgacggttaccgtatcccggataacctggcgcagctggtgctggataccgtgctgcagccggtgattttcattctgaataccgatgatgaagcgcaggaataccggcgcatgaagcgtgacggagaagcccgggtggccgtcctctttcccgatgccggggaggccagcaacgcggagcagcctgccggactggtgagggcgctgtttgatgatcaggtgcatgactcacgcgcctggtttatgtatgccgcgctcggcacgcgcgagatgtggaccggttacttccgctaccggatgatttacttcagcgagcgctgcagtaaaccgctctcgccgctggtgctcgccggagacctggtgggttttgcgaccgtgaccgcgggcgtcgtgctcagtttccggcaaaagcgcctgaccggcaagctggccgggctggctgcgacaggcgccgtgcgctcgctggaggtggcggtgctggaccagataaccggggaagcgctgccggagctgcccggaggggagcagttgcgggcatttacccacgagccgggaaccgttgtcgcacagcaaaaggtgcggaaagcggaagatcagctggcgcgggggcaagccgcgctgccggccagctggctggaggacgttctgacgacaacggtctga

SEQ ID NO: 237459 - DNA, 258 bp, Klebsiella pneumoniae
atgaaaatctcaacctcaaaatggttcttgatattcatttacttgattatttcctttcctgtttgtgtcttcgtaggtgttgttataactcattttttgatagaaattgttttatttttgattttcggtcaacctttttatttatatgcaattgatttcatgaaaatcctaaagggaagtattgtcggaggtcttatcggagcaattggctgttggtggatttattaccagggctacaagaaaaatcgtaataggtag

SEQ ID NO: 237460 - DNA, 246 bp, Klebsiella pneumoniae
atgatgaaagtaccaacatggcaattagtattgttatttttttattcctgtacagctgttcccgccactatgttcatgctgagtctggtatttcagtggatccttgtacctggatttgatgttgatttctttggctatgaacaagtgtatgttgccctcaaaatggcagttataggtttttttgtggggatatgcctatggctttcctattatttgccctatagaaagcgaatgttaaataagtaa

SEQ ID NO: 237461 - DNA, 219 bp, Klebsiella pneumoniae
atgattaatgttctcttttttatcttctctgtggtggcggggattatcatggctgaactggcttatttgtccttacttattgttgattatgtcatacagggttgcttcagtttttcttcctctgaagctctgcataatctgaaagtaggttttggtggtggctgcattattggtgcagggatcgttttatgtcgtctttttaagattaaaggattttag

SEQ ID NO: 237462 - DNA, 1044 bp, Klebsiella pneumoniae
gtggcgcaggcggtaacggcggcgatgcagggtctggcgggtggcaacctggcgcaggcggcgagtggcgcagtgagtccgtatgtggcggaaatcattcacagccagacgacggacagcgcgacgggtaaggtgaatgtggaagccaatgcgatggcgcatgcggtgtggggagcgatagcggcggcatcgggaaataacagcgcgctggcgggagccgcaggcgcagtgagcggcgagctgctggggcgctggatagcggcggaatattatccggatgttaagacagaagagctgtcggatgagcagaagtcgacgataagcgcgctgagtacgctggcggcgggactgatgggtgggctcagcggaggcagcagcgcggatgcggtggcgggtgcgcaggccgggaagaacgcggtggagaataacttactgagcggcagtgaagatgcgcaggcggcatggttgcgccagcacggcatcgatatggcgagttgttccgataacccaggcgggctggcatgtcagaaagcgataaatgagcgtaatgcggtaggacttgcgctggcatcgggtagtgtggccctgttaccaggtagtgctcaggcaatgtggggactgggagcaagtgcgaatgccggtatcagttatctggcagatggctcgatagagccggcaaacgcagccattgcaggctgggtaaacgtgatcagcatggggaatggcctggcgggtaccgtgggctggaatgccgcaggtggtgcgctgggcaactggatagatgacaaagatccactgtctggtgcgcttatcaatggtgccggttcgggtattggctatagcattggtaaaggactctcatggggcgtgaatgccggggcaaactggtggaaaggaggccgggatccgaagtttaacgctgaattgaggcagtttactgaaattaagggggattttggtatttcgaaggaaatgactccgagccgcgttcctgggcttttggtgattttggtgattttggtgattcattcttctcggaaataa

SEQ ID NO: 237463 - DNA, 231 bp, Klebsiella pneumoniae
atgatgaatttccgatgtagatctttcattgtgttactttatctatgttttgctatttttagcatgttgttaatcatcacaatttcattcagtttgcttggttactggatcggtggaggggaaaatatactctcgttttttattggtaaattatttacatattttaaagtatctctttctggaatattaataggttttattctgtggtttttttactatcggaatatttaa

SEQ ID NO: 237464 - DNA, 8067 bp, Klebsiella pneumoniae
atgctgatggtggtggcggaaacgacccgctctcatcgggctggcgtatcgccgcaatccggcgccgacgcgcgaaccgggtcgacgttaatctcctccctggcgccgctggcttttagctttctgctcgctttttcctgtctcactccggctcaggcggcgattgtcgccgataaccatgcgcccggcggccagcaaccgcagatcgccaatagcgccaatggcacgccgcaggtcaatattcagactccgagcggcgcaggcgtttcacgcaacgtctacagccagtttgacgtcgatgggcgcggcgtggtgctgaataacagccgtgctaacacttcaacccaactggccgggatggtcgccgggaacccgaatctggcgaaaggggaagccagagtgatcctcaacgaggtgaatacccgcgatccgagccggctgaatggctatatcgaggttgccggacaaaaagcgcaggtggttatcgctaaccctgccggaattagctgcgacggctgcgggttcatcaatgccaaccgcgcaacgctgacgacaggccaggtacagtacggtaacgggcagattagcggttatgatgttaatcgcggcgaaattctcgtacagggcggcggccttgatgcgagctcggtagacagtaccgacctgctcgcccgcgcggtgaaaatcaacgccggggtttgggcgcaggagctaaaggtcaccgcagggcgtaatcagatcgatgcggcgcacagccggacgacggcaaaatcagccgacggcagtgcgctgcctgcggtggcgatagacgtcagcgcgctgggcgggatgtacgcccataaaattcgtcttgtcggtaccgagcgcggcgtaggcgttcacaatgccggcaatatcggcgcggcggcgggggacgtagcaatcagcgctgatggcgcgctcagcaaccgcggcgtgattcagtccgcgcagaatctgcaactgtccgttaagggcgatcttcacaaccagggccagctgtacgccggaaaagatagcgtggtgacggccagcgcgacgctaaccaatgacggcatgatcgccgcgcaaggcgatacgcggattgccgccaacgctttgcgtagcgcgcaaaacagtacgctcgccgccggattaaatagcgatggttctaccgccagcagcggcgcgctgacgctgaatagccagagctcgctggcgctgaatggccgcaatatggcggcagggacgctgacggcgcagggcaggacggtggatcttgataacagtcgaacctcgggggcgcggatcgtggtcagcgccgcgtccggcgatatcaccacccgagatgcggtggtggcggccagcgaaaaactccagttggccgccagcggcaaactcaacaaccacagtggcctgttgacggccagcaagcttgagctgaaagctgtggcgctggataaccaacagggcgtaatccagcagacgggcgaggacgatctacgccttgattttcgcgcgggattggataaccgcggcggtgagattgccagcaacagccatgctttgacgctcagcaccagccagttgctcaatcaaaacggaacgctgctgcataccggcagcggcggcatgtctattaccagcgaaggcgcgctggacaacggcgaaggcactattgccgctaacggcaatatcgttttgcactccgataacattaataatcgcagcggtaaaatcagcacgacgcagggcaatgctcagctcactacgcgtcacgagctggaaaattcgcaagggaatatcgttgctggcggcagcctttctctacaagtggccagccttcggaaccagcaggggcaattgattgcggcgcagggcgacctggccatgagcgctaaagaagggctggataaccgcgaaggcgtgcttaccgcaaatggcaatatcaagcttgacgccgacaatctgaccaaccatggcggaaaaatcagcgcggcgcagggcgacgttcagctcactgcgcgccatggggtgaataactcgcaggggaatatcatcgccagcggcgacatccggctacaggctgaaaatcttaataatcgtcacgggcagataggcacggcgcagcggggcagcgtcaacctgacgacgagcggtttgctggataatcagcagggcacaattaccgcctttgatgccttgggtattcagagcgccaccgttgataaccggcagggagaactgcagtccggcggtaatctcaatatcaccatccacaaccgggggctggataaccgacaggggcagatcgtctccgccgccgctctggaaatagcaggcgtcaacctggcgctggctaatacgggcgggacgttacttgccgcgagcaaacttagcctcgatgccgattccctcagcggcgatggcgaggtgctctctcagggcgatatgtcgcttacgttgcgtcaggcatttcataacgccgggagggtcatcgccaacggcaacctgcagtggaatctctccggactggggctgattaatcagggggttatcagcgccggccgggcgctcaatctctatgcggcaaagctggataaccgtcaggaaggcgaaatcagcgcgggcgagaaccatttgacggtcaacggcgagctggtcaatcgggggctgattgacggtggcttaacccatattgtcgccacgacgttaaccaatatcggcagcgggcgcctgtacggcgacgccgtcgcgctgcaggcggcaacgctgactaacgtcgcggagaacggcgtggcggcgacgattgccgcacgggcatcgctggcaatgggcgccggcacgctcaataaccaggatcacgcgctgatctacagcgacggtacgctcgccattggcggccagcttgccgaagacggttcgctcagcggccgggcgggagtgtttaataaccacagcgcaacgcttgagtccgccggcgatatggtgctcgatatccaacaaatcaataactacaacgaccatctggtgacgaaagatgtgatggtcgagcagtcatggcgccatgaagcggcgctgaaaggatcggtacagcgcttcgactggtcgctggtcgataccagttataaaaacaaatacggcgttcacgacgccatcatgccggacggtagccgcggcgatgagttctatgaataccagtaccagcgtaccgttgtggaaacgcaggtggtggaaagcgatcctggcaaaatcctctccggcgcccggctcatcatcaacagcgataagctgaataactacgatagccagattatcgccggaggagcgctcggtggcgtgattggcgaactaaacaacgtcgccacgaccggcaaacgggtgaccaccgacgtcggtacccagacccgttggtatgagaaaaagaccagccgcccgtttggcggcaccaaaaccagccaggggaaaaaaagcagcgaatatgaaccgacgccgacggttcagaccatcgatttgcaaaccatgaagtggcagggcaatacccaaattgatggccatagcggcgtgattaatccgcgcgatcgcgccgatgaaacaggcgaactacccgccggacggctggtggaagtgacgccggttaacgctgacggaacggttattcgcgtcgtcacgccggatacccggcttcctgtcagcagcctgtatcagatcgacccgcaggctaaagcaggctatctggtggaaaccgatccgcgttttaccaacggtaaagcgtggctcgccagcgactacatgcaaaatcagctgggcgttgatcaggcgatgaagcggcttggcgacggctattacgaacagcggctggtgcgtgagcagatcgttaaactgagcggcgggcgctacctgcagggctacagtaacgatgaagagcagtaccgggcgctgatggacgcgggcgtcgccttcgccaaacagtacaacctgacggtcggggtggcgctgacgccagcgcagatggcgctgctgaccagcgatatggtctggctggtcgccagagaggtcacgctaacggatggctccgtgcagcaggtgctggtgccgcaggtttacgcgcgggttaaagcgggcgatctcgatggcagcggcgcgttgctcggcggtgaaaacgtggcgttcagcgtgagccgtgatgtgaccaacagcggccacatccacagccgcggcgcgacccagctaaccgcggaaaacattcataacagcggctatatcggcggcaaccagctcacgctaaacgcgcgtactgatatcaacaatattggcggaacgctgcagggcggcgatagccttatcgcgcaagccgggcgtgatatcaacagcgccagcaccctcggcggcggcccgggtaacatcagcctcgatcggccggcggggatttatgtccagaatgaaaacggccaactggggctgcaggcgttacataacattaatctgacggcaagcatggtgagtaacagcgcggcgggcagccagacgcagattatcgccggcaacgatctcaacctgcagacgctcgccaccacccatagcgaaagcggaagctgggggaaaggcaacgatcgttccttgacccagcgtagcgatatcggcacgcaaattaacggcggcgcggtggcgctgtccgccggccacgatataaatgcccgcgccgccagcgtgatggcgaccagcagcctgacggttgccgccggcaatgatattaacctcagcagcggcgagtcctcatggcacctgacggaaaacagccatcaaagcagcagcggcctgctggctcgccgctcgctcaccactcacgatgaagtgtgggcgcagaacgccatcggcagcaattttagcggtgacagtattgtgatgcaggccgggcgcgacctgctggtgtccggcagcagtgttgccggcacccaggacgtcaaccttgtggcggggcgtaacctgaccatcaccaccgccgaggaaagtcgccaggaaaaccatctacgaaaagagaaacatagcggcttttccggcaccggcggtgtcggcttcagcgtcggcagttcgtcgctgaaagccaccgatgtaacgacggcgctgagtagcgccgccagtaccgtcggaagctcacagggcaacctgagcctgagcgccggtaatgtattgacggttcagggatctgacctggtggccggcaacaatatggcgttgaccggtaaaaccgtgaatattctggcagcggaaaaccagagcacccagacccataccgtggagcagaaaaccagcggcctgacgctggcgttatccgggatggtgggcagcgccattaataccgcggtttccagcgccaaccaggccagcaccgagagcaatggccgtctcgccgcgctgagcgggctgcagtcggcattatcgggcgtacaggcgtatcaggcatcgcagatgcagactgcggattccagtccggagagcatgataggggtcaacctctcctggggtagccagtcctcgaaatccactcagcgacaaacgcagaacaccagccgcggcagcagcctgatggccggcaacaatctcagcattatcgccacggagacggatatcaacgttgagggcagccagctgcaggccggcggcagcgcgttgctcaatgccgcgcgcgatgtgaatttattctctgcggagaacgccagcaccctgagcggtaaaaacgagagccatgggagttcgtttggcgtcggtattaacttcggtcagggcgcgaacgggctgacggtcagcgccagcgccaacgccgcgaagggccacgagaagggcaacagcctgacgcataacgaaacgaccctcagcgccggtgagcgggtgactatcgtcagcggtcgcgatacgacgctgaccggggcgcaggtgagcggccatcaggtgacaatggacgtcgggcgtaacctgacactgagcagcgagcaggacagcgataactacgattcgaagcagcgtagcggcagtgcgggggcgagcggcagcatgggcggcggttcggggtctcttaacctgagccagagcaaaatgcacagcacctgggcgtcggtggaggcgcagacggggatttttgccggcgagggcggttttgatgtgaaggtgggcgggcatacgcagctgaacggcagcgtgctggcgagcacggcggcggcggagctgaaccggctggataccgggacgctgggtttccgggatattaaaaactatgccgagtacagcgtggagcagcagagcgcgggagtgagcacgagcggtagcgtggcagggcagttcctcgggaatgcggccagcggtctgctgatgggggcgaacgggagcggcagcgacagttcgctgacgcgggcggcggtgagcgagggcagtatcgttatccgcgacggcgcgaatcagcagcaggacgtgacggggttaagccgggatgcggcgcatgcgaaccagacgctgagtccgatatttgataaggagaaagagcagaaccggctggcgacagcgcagaagataggtgaaatcgggcgccaggtgagtgatgtgctggtgacgcagggcaagctgaacgcgcaggcggcgcagagcgacccggcggcgcgggcgaagctggtagcgggagggaatggcagcccgagcgaggagcaaatcagcgcgcaggtgagccggacggcgacggcggactacgatacgggcggaaagtaccagaaggtggcgcaggcggtaacggcggcgatgcaggggctggcgggtggcaacctggcgcaggcggcgagcggggcagtgagtccgtatgtggcggaaatcattcacagccagacgacggacagcgcgacgggtaaggtgaatgtggaagccaatgcgatggcgcacgcggtgtggggagcgatagcggcggcatcgggaaataacagcgcgctggcgggagccgcgggcgcggtgagcggcgagctgctggggcgctggatagcggcggaatactatccggatgttaagacagaagagctgtcggatgagcagaagtcgacgataagcgcgctgagtacgctggcggcgggactggtgggggggcttagcggaggcagcagcgcggatgcggtggcgggtgcgcaggccgggaagaacgcggttgagaataattaccttagtagtacagaagccagacagcttgataaagagctatccgactgcaaagcgtccggtaatgactgcaagtcagttgttgagaaatatatcgaaatcagtaacaaaaatagcaaagaactggttgatgcatgttctggtggtggcattgcttgcgtgacatgggaagaacttcttcaaggggcgactaatgtagccaatgacgcgaatgcctcacagttccggctggatgagaaactgaaagatcctgaggctgcggcgctggtgaactaccttaatggcactgatttgaaattcttacaagaaaatatcacatcaggcgatagattgctgtccgtcatcaccgatccgacatcatggccagtgctggtcatgggcgggaaagcgattatcacaaataccgtgaccaatggaaaagaactgttaattgctgctggggcatcagtggctgggagtgcagctattcagtatggtgtacatggcgaagtgaaactgtcggatgtgattggtgccggagtgattggtgctattacagcaggaaaaggttataacccaacggtgacatggaatgcggctggtgggtattaccaggcagagcttaaaggtgatgaccccttcttaggggcactcttgagtaaagtaggtgctgcaacaggttatgctgctggtaatatacttaaagttccggccgataagatatttaatccggtatcgaaacaatatgaatggattcctacaggtgtctggacgataacaaaaccagcgccacaaaactctctaccttcgatcttaggtaatacagggaatgcagctgcttccggagcatttacagagggtatgaatgaagttctgaaaaacaatgaggtgcaacaatga

SEQ ID NO: 237465 - DNA, 624 bp, Klebsiella pneumoniae
atgaaaagccatgaatatattgttataagtggttttaacaggagtaaggtaggtaaaataattggttcattagcttctctgatatcagggtttttggtttttgttattttaacttaccttgaaaataattcttatattgaggcgaaatctgtaatgaccccaacggtctcttcgcttattagtgcaggtacaatgtatctaattctctactggatttttgactcaaggttatggaagtggaagttaatatcaaaaataataaatgtcccggacctgtcgggagagtgggattgtgaagggcgcggcgaaaacaaggaaggagacgttttttcatggcatgctaaaattaatatattccagtcatgggataaagttcatatacggttgcaaacctcacagtcaggttccgacagcatagctgcctccattatatatgatggagaaataggttatcggttagtttacaactacaggaatgatccgagaataaacgaaaaagagttaagtccgcatatgggatttgcagaattaatttttgataaaagcctgacaactgctgatggcgagtattttaatggcagaggtcggaatacctttgggacaatgaagctaaggaagttataa

SEQ ID NO: 237466 - DNA, 1128 bp, Klebsiella pneumoniae
atggccgataacttttcatcacgaatcgaacgtttaagaacgcgaagaagagggataaatgaaatatttgcaatggacagcgggcttgaaagcagagagatcttactgaataaatctctacaacaagaaacatgggaaagcagggcttccgggaaatcagctacgaaatatgcattaggtgccatgcaggaagttgatccagtttatactagggttagcatcgaaacagggaaaaggatagaaaaccaactatctaaccggttggaaaaaaaggaaattacagcatcctttcgtttgcagggttctgtaccgcttaacatccatattaaaggcgttagcgatgtagatattcttactattgatgaacagctattcgttttttcaaacgaaggaagcaaagcaaatagttatgttttatccaagaaacaagctgtagatgtactccagatcctacgggaagaaattgaagatagcctcagggctgctttcccggctgcaaaggttcacactgaaaactctaaagcagtaaaaataactggcggctctttagccagagatgtggatgtagtcccggctgtttggtggaataatgccagatatcaagatacaggcaatgaagttgacagaggtgtggcaattttaaataaaaaggataaccagcggatttataacacgccgttccttcatattaattatattgagagccgctgcaacacaacgctaggcggcttaaggaaatcaataagattacttaaaaatatcaaagcagatgcgcatgaggaaagcatagaaataaacctcagtagttttgatattgcatctattatgtatcatgctgatattggcaacctcttaagaggtcacttctatgaacttgcaatattaagcgaaacacagcgctggcttgactggttatggcataattttgacgaagcaaagaaactggaggtccctgatggaaccaggaagatatttgacacagacgaaaaaaaaggtgagctgctaaagttatctctgcaagtcgatacattattgacagccgttcataatgaaatgaattctatttttcataaagattcaatcgatgagggaatgagagaatatttgagtaattcaaaagttgattag

SEQ ID NO: 237467 - DNA, 981 bp, Klebsiella pneumoniae
atgtccttattacaaaagggattattagaaaaggcattagaccttgccatttctgaatcattcttcaatgcaacgtcgcctgatggtataaagaatactttaaaagctggctatgatattaatgctgttcataataacggtgacaatgccctttttagctgcagaaccctggaagccatggattgcctgctaagttatggaattaatatacaccatatcaacggacatgggcaaaatgcgctctttcatcaaaaaaatccagaaatactgaagaaactgattggactgggtttagacacctcgcatacggatactaatggctacacatgcatttttgaacattacaggaatgctgaaggactgacagaattaattaatgctggttgtgatataaatcacatcgataaaaaaggaagaaatattctcttcctgcccctctccccggaagttttatccgtagcaatagatgctggatgcaatgtcaatcaaattgatcattcagggaaagggtttattgacaatgtatatgattatgaattacatgatatcattctctcgcatattgatagatttgacagaagaacgctgcatgtagatttttgtaatctcgactcagccttttttttgtattacctttctgaacatggattcaaaatagaacttaataaagaccatttcaccattaacagttacattggtgattataaagaaatcttatccatacttgatttcatcagtgaaattcatgatattcacttctataaatacaaaggcggtcctctctataaggatatcgacaagcgaattgtaaagtggatgataagaaataagctcttggttgatttatcaaaaataaataaacacaaggattacgaagaaattaattcatacaaaatccgtcgcgaacagaaagaaatctccaagcatttaaaacctgctaaaagtatatctgtaacagttaaaaatggcggaagattgtga

SEQ ID NO: 237468 - DNA, 276 bp, Klebsiella pneumoniae
atgaataatgcaatcagagtaccggaagataaagattttgtatgtgcatttgtgacttcaccggatagcttgtatgaggctattgaaacctatcgtaattatgtagatccagtcgaagagatagagtttgaacacgtccttctttatttgttgtgttctatactggtggagggtgctacagatgttaccattaatgatgaagtacgaatgtgtattgagcaccttgtcaatgaaaaaaatattatcagaaagaataacgcaggtaaaaaggtgtaa

SEQ ID NO: 237469 - DNA, 663 bp, Klebsiella pneumoniae
atgaaagaacgcggaatgatttttaacggggagatggtgcgggccattctcgacggtcggaagacgcagacgcggcggattatgaaacctcaaccagaaccatgcccccgtggtggacattggtggccaagcaacgtgttcaaaacaatgcttcatgtcgaagatgaaatgcagaacggcaaaggtggctggggtgggcttgttggagatgcttgcccgttcggagacgtcggcgatcgcatctgggtgcgagaaacatgggcagaggctggagccagcgcaccggacctcaaactttatcgtgcgaattatcctgagcatgttccgtcgatttatgaaaatgtgccgccggctgaagaaattcgctggactccatccatccacatgccgcgctgggccagccgcattctgctggaaatcaccggcgtgcgggtcgagcggctgaacgctatcagcgaagaggatgcgcgagcagaaggcattattgacggtggctgtcttaattgcggggaacctgagccatgcggatgcgccaatccagagcctgacgctaccgatgcttttgcctacctgtggcaatcgatctacgggcaggaaaactggaatgctaacccctgggtttgggttatcgagttcaagcgcgttgaaggcggtgcatcatga

SEQ ID NO: 237470 - DNA, 501 bp, Klebsiella pneumoniae
atgaaggatttactcaaaagcaccatagatgcattatctattatgcatataaatattagaaaatcatcattttctctatctgatgaatataatagccttaacttcaatagcttagataagaaaacccagtcatttcgcagaattaataaaatcgaagccattgagcttgtacacgatgacgagtctgttgctaatgagctattttactcgtatcactactccgtaggtttgagattcatcgaaaatacagaaacagaacatcacgacgatgaagcaggtagtgttatattctcaatagaggctacttttgaagctatttatcgctccaaacgtactcttactaaggaagaactagaggagtttggtaagcagaatgttggttttaatgtgtggccattctggagggagtatgtacaaagtagcacctcgaggatgggtataaattcaattactgttccattttttaaattcaacaggtcggatatgccttcattagaataa

SEQ ID NO: 237471 - DNA, 582 bp, Klebsiella pneumoniae
atgagaaacaacaacatatgtccagtgtgtggtgcaggtcatctcacagttgagatggattatgatgatgttacttataagggagtgacaaaaaacctcccagccagattttctgtatgcgatgaatgcggctctgaaagcgctacgccagtcgaccttagggaaaataaaaggattttcaatgagtttaaaaagagtgttgaaggcctagtaacaggtagagaattaaagagaattagaactgaagtttggtgcataactcaggaacaagcagcctcaatatttggagggggacctaaagccttttcaaaatatgagtctgatgatgttatccaatctgaagcaatggataagttaattcgattggctgctgatatcccagaggcacttttaaagctcagggaattgtctggcgagacagtcgtagagaaaactgtaacagtatctaaatatttacctatttggcgttctgaagatacttctcgattcgaaagtgatgagcttgaacacaaaccaaattcaaggcatgaagtggcttttaaaaatattataataagaactgtctcaaaacaggtggcataa

SEQ ID NO: 237472 - DNA, 237 bp, Klebsiella pneumoniae
atggcgaaattaaccgattatcagctcaacactcttcgtgctattagcgaaggtcaagtgatgctccgtggtcgattcgatcgctactggtgggaatccaccgacacattatgctcggctgtagcgaggcgtttgaagtcaaaaggtctgatcaagaccgtttacctcaaccctgttcgggaccgtgtagagctaaccgctgctggattccaggccattgaaggagccaaccaatga

SEQ ID NO: 237473 - DNA, 2007 bp, Klebsiella pneumoniae
atgaaaaaagaaagagttgtagtaaatgatagaggtattaaaaatcgattaaaatctgtaaaaccatttaatgctatttccgagtatatatggaatgggttcgatgcaagggctaactgtattgaaatcacatggagctgtaatgaactcggctcattagattacttatcaattaaagataatggtaacggcatacctgaaaatcagctggatttaaaattcaaaccttttctatcatctgaaaagaaagctaatagtgatttaaaatataccaacttagtccatggtaaaaatggtttagggaggttaacattctatacatttgcacatagagcaacttggaatacgacatttttaaatactgataatttgctgtacgattactcaatcacagtcaattcaaatagcttaaataactactcaaaaaaagattccatcttatccaattcagagaaaacaggcacaaccgtttcgttttcaaatattgtagaaatctctgatttttatatagaaaatacactaacccctttcattgaaaaggaattctcttggtttttgtatttattcaaaaatttaggatataccttaaagattggaagtagatttatacagcctgaaaacataataaaagaccaagaagcatttgatattaaaatagatgagtttgagtttcatgttgaatatgtaagatggtcttcaaaattaaactcacaatcatcaagattttatttttccgaaagcaatggtaattattgccattctgagacaacgcaattaaataacaaatctgattctttttatcatagcgtatacgtaaatagcatatattttgacaacttcactcctaataataaacaggatgatttattttcaaacactacaaactcagatgtatataaaaaattaaccagtgaacttaatgcttatttacgtgcaaaacggaaacctttcttgacagaatacgctaaagtacttgttgaaacgtatgaagagaaaggaatattcccaaaatttaattataataataaatgggagaagatgaaagctgacgatttacgtgaggcgattcaagaactgtaccaaattgaacctaggttttttagagatttaaataaaccacaacaaaaaatcctagttagaatgttatcattaataatagatggaggtgaagttgaaagtttctttgatattattgacagcgttatatccctctcaacagaagagaaagaaaagtttgctgaacagttgaaagtcactcatttatcttccattttaaaaaccattgaattattaacggatagatataaagctgtcatagagttcgaaaagcttgtctttgatcctgacatgtacgcaggcgaagtccctcacttacagagaatgatggaaagaaactactggttgttgggtgagcaataccaactagtaaccgcagaggaacctgatttcaatgaagctgtaaaacgccacgcatacattttacgtggagagaatattcgtaaacataaaataggacacgcctctgaacaaaaagagatggatttatttatgatccgtcaaagaatgaacgaaaataaaatagaacatattgttgtagaacttaagcatcctgtaaacataaggttaggaaaaaaagaaatagaccaagtatatgaatattaccaagttatcagaagtgaaagtctctttaatgcaagtaatatgctctggaaattttacttaatagggaacaaatatgatagcactggatacatagagcatattatggatgtttataaaggaaaaggggattatggcctagtgtataaaggtgagtatgaggtctacgtaaggacgtggtccgaagttttttctgagtttaaattaaaacatgacttcctgaaccagaaactacaaattgaaaaagaaaaaattcaggttgatctttatatgaacgctgaggaaatcgtaaataaaacgcattcatcggactccccagcagaattctcatggcataaaacaaactaa

SEQ ID NO: 237474 - DNA, 918 bp, Klebsiella pneumoniae
atgtttaatttattaattactagtgatgaagatggttggaaaaatgaacgtcacataatgaatcgtgatagggtgattgtcgaatatactgcatcagaaattgtggaacgttatagaaagctaactcaagagagcatttgtgagttaaagaaattcccatgtctttttgtggtggaaagcgaatctattccctctcgtattggatatataacaaatatcaggttgagagacaaagagtgcgtgatagagtttaaaattgatagaagctttccagagctaccaataggaactatcgaatcaatcaggaaagagatagacttgggtagatgggagttatcacgaacacattggtcgattaaagatgaatcattattcgatattttgcttgataggaatttaataactcaaaagcaaattgatgtttctcatttttcacaagtctctcaaatgcaaaaaatacctgatcccacaaatttagatactattatatataactgccgtcaagtttttatagtccacggccatgatgatattatgagacttcaggtagaagagtttcttaagtctctttatattgaacctatagtattaagtcagcagccaagcactgggaaaacgataatagaaaaaatagaatattattcgaacgtcggttttggggtggtgttgtatacagagtgtgatactggagcaaaaagaggatctcttgtatataaatacagagccaggcagaatgtcgtctttgagcatggttttctaataggtaagttaacaagaaatagagttgcagccttggtaaaaggtgatgtagaaactcctaacgacattagcggtgttgtgtatattaatattgatgatgctgaacattggaaacaagaactaaaaaaagaaatgcgagccgttggatataatgtttaa

SEQ ID NO: 237475 - DNA, 2397 bp, Klebsiella pneumoniae
atgcgtaaaatatcgtattaccaacacaattccaccgagataattgacttactatcaaattgcttttcaaataataatttaattccaataattggttccggcttcactgtcggctgccaaacaaaagccagaaaaagggttccatcaggcgtccagttttcagctaaaatggtcgaaatgattgcggaagaaaataatctaacaccagaaaaaaaagataagttaaaacaaaagaaatttagtgagattagtgattttttcttcaatgatgaatgggttaataaagaaagaagaaataaatatctcattgagagctttgatggagtagagctggatagtcaaaaaaaaggatttatacgagatattaaatggccatacatttacactctaaacgcggatgatgcaatagaaaactgttcagaatataaggtagcactcccttatgacgctcatttatcttttgaatcgaaaaatcacccaactttatataaaatccatggcgatattcaacatgaaatgagacatgaggttagcagacttatatttaaaaggtcagactacttaacttcattagaatcgaaccgaagaatgttggagctactacaactagactttaaagaaaaaaacataatctatattggatgtagtctgacggatgaaattgacttagcattcgcaatcgcacaacactcacaatccgaaagaaaacaaactcaaaacataatattcctgaatgaaaaacttgataaaattgatgaacaagaatatatcaacatgggaattaacaatataatattgtttgatgaaggtaaatacgaacaaatatacactttaattaatgcatcttatcaacaatcagctaaaagttctcctgagctcgaagaatttagtcattcaattaaaatgcttccaaactccccagaagaaaacagagattactttttaactggcatatcccacattaataatggagagcattatagcagtcagatcatcccatatttttacggaaaaagaaccaaggaagatgacataacaaaatctctgcaagagaaagatattgtaataattaaaggtgctagggtatctggacgcactttactttgttacaacgtattaagaaacattaaagatagaagaattttcgtcataaattcaaacaacaagttaaatagccactctttaaataaacttatcggtcaagagaactctatagttttttttgattccaatgtcctggattctgaactattaaaaaaaataaaacaacaaacaaaattctttaagagcaaaaaaataacaatcttattgtgttccgatcttaacaatagcgatgaggaattttttttagatgttggtgattctaccgttgtttacaccttatcaaataaactatcaaaaccagaagtttcaaaaataaatgaaggcgctataaaagtacgacttccaactttcacaaacggcaagtatcttcttgataaaatatttaacgtttatcaagtgcttggtgaggataattacttaaaaaaaatcaccccgagtcaagaattatatacaagcttatgtgttatcgccacaaaatatagtattacagggcaggaaataattaccggaggtcttaatctaaatcaaacaaaagaagtttgtaagaattactcaccctaccttgaaatagaaaggataaagaacgaagaaaaatatgatcatacaagtttcaagataacatcttacgcatcaagctgggttgtggctttattaagagagttctaccgcagtaaaggcaaagattggtgtgttgatacacttattaatttcttaaaaaatacgtacctgcgtgataaggctctagccacttcgattagaaaatttgacaatttaaatcatatatttacagagggacacaaaggtgcagcagatataattatcgatatttataaccgtcttcaagatattgaaggtcaagaacctgatttttacgttcaaaaggccaaggcgtactacaatatatatcacggaagtaatttacttgatgaaataaaaaatagaattagagagctaaatacagcattaacatgggcgcagtcatccaaaaacatcacagcagaacgaaacattgttcatatcattgcattactatggattcaaaaaatgaatcttctcgacatcgagtcaataacagagaattatttttctcaatcattatcctgtattataaaagcagtagacaatgttggcaacaacagttatagcgatacactattaagtagcaaaagcaagtcagcaataaatctcaagcaatatattgataagattgaaaattctaatggtaagctatccttcttacttaaatataaactagaatgggatggactgaagtcaaagacatacttccgttaa

SEQ ID NO: 237476 - DNA, 999 bp, Klebsiella pneumoniae
atggcgactattaaggatgtagcccgactcgcaggagtctccgtcgctaccgtctcccgcgtcatcaacaactctcccaaagccagcgaagcttcgcgtcagtccgtgggcgcggcgatggaaaccctgaactatcaccccaacgcgaacgcccgggcgctggcccagcagtcaacggaaaccgtcggtctggtggtgggcgatgtctccgaccccttcttcggcgcaatggtcaaagccgtcgaacaggtggcctaccgcaccggcaactttttgctgattggcaatggctaccacaacgtgcagaaggagcgccaggcgatagagcagctaatccgccatcgctgcgcggcgttggtggtgcacgccaaaatgatccccgatgaggaactggcggggttaatgaaacagatccccggcatggtgctgatcaaccgcatcctgcccggatatgaaacccgctgcgtggcgctggacgaccgctacggcgcctggctggcgacccgccatttgatccagcaggggcacacgcgtatcggctatctgtgctcaaaccacgatatctccgatgcggaagatcggctgcaggggtactacgcggcgctggaggagagcggcctgccgtgcaacgaccggctggtcacgtttgccgagccggatgaaagcggcggcgaacaggcgatgaccgaactgcttggccgcggtcgccactttagcgccgtcgcctgctataacgactcgatggccgccggcgcgatgggggtgctgaatgacaacggcatcgacgttccacgggagatttcgctgattggcttcgacgatgtcctgatttcgcgctatgtccgcccacggttgactaccgtccgctatccgatcgttacgatggcgacccaggcggccgagctggctttagccctggcggagcagcggccggcgccggagatcacccatctgttcagcccgacgctggtccgtcgtcactcggtggtcgccccgtag

SEQ ID NO: 237477 - DNA, 645 bp, Klebsiella pneumoniae
atggattaccgaattgggatcactggcgctcagggcagtggaaaaacaaccctggcaaagtttatcgacgagcattacgggattccgtatgtggatgctggcgtcggcgcactgatgacaaggcttggagtcaacgtaggcgatccaatgccgctctttgagcgtctgcaggtgcagatggaagttgcccgccatattgagctggtaacacgcggagcggaaggctttgtaatagaccgtacgcctgctgatgtgatggcttatacgctcgatttggtcggccagaccaatgaccaacgatgtattgatctggcgctggaaattgagcgtttttgccacaagaccgcgttgtccaattttaatgccattgcggggctgcgcccgggcgtgaatttgagagcacaagattatgaacgtgcccagagaggttcgcttgatcgcctttatgtcgctcgtatcgactcgttgatgtgtggcgagctgacaaaaattaactctctggccaaatccggagatctgcaggttttcgtcctgtcggaaacctgcatttccgttgacgcaagagcacgctcgatcatgcgagtaatcgaccgccatgtggaacgtatagagagccgtatctcaaatcgcgtcaccttccactga

SEQ ID NO: 237478 - DNA, 1167 bp, Klebsiella pneumoniae
atgactttttggaatgattcttaccaaggcgaattaaataatataactaattggataaatgtaaatttaattaataagtcaaacatcccaagtaatttagatgctattgacgatgagcaattcccggatgccattttagtccatgcatgggtgtattttagtttcctgttcaacaatagaagggaatccctcaataagtacactcgatttaatcaaaaacatttgcaagaaagggccatacctagtttagatgaactaaaatcgaatagattgtatttcttaagtaatttattaagagttgtatatgaatattacttctggactcaggattcggacagccgacctgtatttgtcgacacaagagtccttgaaagattagaccgactatcaaccgcaactgattataatgtacagttcatatggatagagcgttcaatgcctgccgccctgacaatgagtatattagtatcggatgaatttgatacgttaagaaagatggccaatgatgtcagcgggtatgaggataaatttacaaatcagatagactctggaactcagaaagcggatgaaaaaatagaaaaaatatctgctagccttgctgagttaattgataaggctgaaaattctcaaagggacatcaaaacgtatgttgataagcttgatgaatataaaagtgagttcaactttgtcttattgagtaaagccttttcaaaattattacaaacaaaacaagaagagtaccgaaaaaatcacaataccgtcgctttcttttcagcattattggttgttatccctgtaggggctttactaaaccatattttggagttgtataaagttgagtttaattttagcgcgcttgcatattacttgccaatactatcgctagagttgttaatgttctatttcatgcgcctttattatattgaaggtaaggctattaaagctcaactcttacaaatagaacagaggcttagtctatgtgagtttatacatgattacgtggagacaaaaaacaattcaggctctgaaaaggaatcatggtcgttatttgaaaagctaattttcagccctatacaagtttcttctgaaaatataccttccttactagatggtgcgtcatcgattgcagagttggcaggaaaaattctatctaaagaagcaaaataa

SEQ ID NO: 237479 - DNA, 276 bp, Klebsiella pneumoniae
atgtatcaacgtattaacggcagcgactcgcgtaatatctggctgatgggcgatctgcatggctgctttgcgctgctgatgaatcgcctgcgtcagctgcgctttgatccctgggccgatctgctgatctcggtgggcgatctgatcgatcgcgggccgcagagcgccgattgtcttggcctgttgcgctgtcgctggttcaggaccgttcgggggaatcatgagcagatggcgctggaggcgctggagagcggagatatcggctctggcagatga

SEQ ID NO: 237480 - DNA, 522 bp, Klebsiella pneumoniae; identical to SEQ ID NO: 226285

SEQ ID NO: 237481 - DNA, 204 bp, Klebsiella pneumoniae
atgaccaaacaggaatggattttacgactacggcgctgtacatcgaaggaaaccctggaaagggtaatagaaaaaaataaatattctctgtcagatgatgagcttgagcatttcaatgctgcggttgatcaccggctggcggaaatggcaatggggaagttttatgacaaaatacctgcaggcgtctggaaatatgttaaataa

SEQ ID NO: 237482 - DNA, 1080 bp, Klebsiella pneumoniae
atgcgttatattaaagaacttgaaggactccgcgggctaatggctctttgggttgtttttggacatagtcttgcggccctgccacttattaatacgcatttgcctccaaccgcgttaaattcgtatgccgtcgatgtttttattatactcagtggttttgtcattttttttatgatagataataaaaagcaaccctatcttcaatatatcacacaacggttttttaggattttcccgttatatatattggtccttattgttagtataatactaatcggttttacgagagatgtttttttactttatcccgaagcgcatgcaacgacgcgtcgtattgcacttattgatgaatatttagaatatccggctgctcactttttggcgcatataacccttttacaaggacttattcctggttttttattgaaagacagcgcttatactattgttggccaagcttggagtatttcagttgaatggcagttttatattttggctccttttctgttttttttggcatcccacctccggtctcccaggaacattattgttttgtttttaattgcagtgtttatgcttgtatttggcttttatttgagtggggggtttttaggtaataattttgctccatttttaattggttttttaagtttctttgtctacaaaaatagcgaaaaaattgctttttctcagctgcaatacgttattattttagcaattattctgtttgcattttttttaagaaaagacgccatgccatatattatatggtgtatcgttttaggctttatcatgatttatcataaaacaaatcagaataatttcgtagtaagattcttagataataaatttgtgctttttcttggtaaaatatcatattcaatttatttggttcacatggtggttttagtttttgttctacatctccgttaccttccaaatataaatggtattgaggcctatttttttgttatttctgttacatttttaaccacaatctttctttcaagtataacatattattttgtagagcagccatttattaaagtgggcaagaagttaagtaataaatttaagtga

SEQ ID NO: 237483 - DNA, 1461 bp, Klebsiella pneumoniae
atgaagccttcaaaaaagaataaagatgttggcgttgtaagtggtactatttggtctatactggataatgctacttcacaaataataacattcgttatatttataattctggcaaggtttttaaatgcagaaatatatggcgttcttgccatatcagtgctagtaatacaatttttccggaacgtaatttttgatagtatatcaacgtctatcgtccggaaggaaaaacctaataaagttgattacaatactgctttttggtcgtgtgttttattttcgctacctgcttttttaattgttcttgctattgctccattgatccagactttaatgggtattaaagaccttgcctttgtaataagatggactgctttaactatactactaacaggggttgcccgtacctttgaaatatggttaacacataatttaatgttcaagcaattagcaataagatctattatttccattatcataggtggtttaataggaatttatttagcgtacaaaggttacggtgtaataagtctaatggctcagcaggtcgtcactattttggtttcacttatagtgttggtctttacaacgccttggaaaccaggtatttcggtttcacgagcttcattcaaggaaatgtttaattatgggaagcatgtttctctcggaggagtaactaattttgcaaaccagaatagtgatatattctttattagttattttttaggtgcaactcctgctggtttatattctgtagggaaaaaactagttaacacttttaccacagttttgtcttctgcttttatgcgagtttctcttcctgctttcgctcgtgttaaatctgatggggataaactaagaaaccattatttaaatgcaacttatttcactatcttacttacagcaccggttttttttggcctttctgctgttagttatgatgtaacatttttggtttttggtgaaaagtggattgatgctgctccgattatgagtatagtaagcttcgtaggttgtttagtctctataggctattacaaccataatataatgtttgcttgtgataagcctcaatggcaatcaagactgactctttgttatgcaataaccaatattatcttctttatcatttttgttagatttgggattattgcaacggcaattgctttcactttaagaacagtacttatgtatcccttatcagtgtggtgtgcgattactcttattaatgttaagtggacaacctatatacgttccataatatatccactaatatctgcatcgataatgcttttttgtgttttgttatttaataaatattttaattacgaaccaagttggttgatgcttattgttaaagtagtaataggagcgttaatatatggcgctagcattctactatttcttcctcagtctgataaaagtcgagttgcggacttctatcaatttattagaaatcgttaa

SEQ ID NO: 237484 - DNA, 606 bp, Klebsiella pneumoniae
atgcattttgccaactcaaatgattgtatttggggaactggtattaatgggaaaatcagtgattctcatcttaaattcaatgatttagatgtaagagctgttcgtggaccattgactcaagaatttttgaataagagagatatttcagttccttctgtttttggtgatccaggattattactacctgttttcttttctaaggatttattattatccgactctaatgtaaaggctaacgattttattgttataccccatatgaatgaggattttacaatttacgataaatttaaaaataacatctgttcacccaagcaaggtgcactatcttttactaaagaaatcgttaatagtaagtttgttgtatcctgttctcttcacggtcttataatagctgaagcttatggtattcccgctgtttttcttcaaaatgaaagtggagagtctcgttttaaatatgacgattattactttggcactggcagggatagctaccctattgcaaaaaccgtggatcaggctcttaatttatcccctgctaaaacaatcgaccactcttcaataactaaatctttgatgcaaagtttcccctatgacttatggtaa

SEQ ID NO: 237485 - DNA, 948 bp, Klebsiella pneumoniae
atgtatcttcgattacatgccgagcaatggactatgaacaactcaccagtgctaaaacttcaagagatggcaagctcaaactcaactgacatcgaagatttgctatcgcgagcaaaaatgatttcagtgaagttgggcttgaaagatatatctgactggattgaatatgaacttaattcttactctgacattgcatatcttcctgcctacagaatatttaatgacatccccattagaatattaaatcaagatagtaaagagtgggttccgtgtcaaattattagcggatttaattctgaaacttataaaaaattaactactatctatattactaacacagtgtcagagatatctcgatattcaaaaagtgaagattggcttttttgtgacattccaaaagacgctcgcgagtttttgcaaagatatattttaattagttcgcgcatagcgtggtgtatcagcccttcaattttaaccaaaatcctttcaaatatccgctcccgcattcttgactggtctttattgctggaaagtaaagggattttaggtgaaggtttattattctcacaagtagagaaaagagaggcggcaacaatgactgttaacaatattaataactttaacggcaacgtgcataatgctggtgctattggtgctggcaataccggagatattcaccaacagaacagtattacttcaggtgattttaactcccttgcgcgtcagctaaaagagcaggggcttgatgatgctgatgtcaaagagttggagcagcttgttaaacagactgctaaaccgacttcaaaagatgaggttgaaaagggctttgggtcttggattggtaagattacgggaaaggctttcactggagggcttaaaatcgctggtgcagccgctcctgctttactaactaatgcgctttgccactactttaacattcctgtctga

SEQ ID NO: 237486 - DNA, 186 bp, Klebsiella pneumoniae
atgaatcaactcttcaatgaatatggtcagaaagtacgagcaaacatagctctcaaccttcaccctttttatttggggaaactggaaaggttggcaagccgaatcggtagcgggattaagtcagaagagcagcgcctaatactggcaattggtgagatgctacgaaacgtggagactgaacaatga

SEQ ID NO: 237487 - DNA, 801 bp, Klebsiella pneumoniae
gtgacgcggcagacggatcacgcggatatcgtgggcaaagtatttgccgccgaactgcgcgccgagaccaaggttctgcgcctccagcagcagctcctgctccatctgcacgtcgcggaacgcctggccgtgctcgttaccttcggtcggcaggccatcgtagtatttggtggacgccagcttcacggtcttcagcgtcgcttccgccgaggtaccgccgatcacgaaggcgatatggtacggtggacaggcggcagtaccgagggtgcgcatcttctcgacgaggtaatttttcagcttcgccggggtgatcagcgctttggtttcctggtacagataggttttgttcgccgagccgccgcccttggcgatgcagaggaatttgtactcatcgccatcggtagcatagagatcgatctgcgccggcaggttggtgccagtgttaacctctttatacatatccagcggcgcgttctgcgagtagcgcaggttgtcctggatataggtgttgtacaccccctgcgccagggcggcttcatcgccgccgccggtccacacgcgctggccttttttacccatgatgatcgcggtgccggtgtcctggcaggtgggcagaatacctttggcggcgatatccgagttgcgcaggaactgcagcgcgacgtatttatcgttttcgctggcttccggatcgttaaggatatccgccacctgctgctgatgcgcagggcgaagcataaaggaggcgtcgtggaaagcatgctgcgccagaagggtcagcgcctgagggtcaacttttag

SEQ ID NO: 237488 - DNA, 474 bp, Klebsiella pneumoniae
atgcataaatcagaagctgaaaaaatagattctattctggatgaacatcaacagatatatcgcagacataaccaaataaataacatcctggcgtattgtgcgtgtattgcatggattccctgtattattgctgcgttcggcgttgatggtatatatctgaaaatcctgtttgcggtccttgcctgctgtggtgcggtatgcttttttattttcttcttcaccctcctgccggaatcactcatggtcctcagccgtcagagcctgcttcagcttatgcgtctgactgaagacgtaccagatgtgagacaggaactgcttaaccgtttgttgtccggtaaaaaactgactggtcgggatgaacaggatatccggcgtctctggcaggagaaagtggatgcaatgcaggagtctgccacccgtcagcgtgaacaggatactattcggaagtttactgaagggaataaatccgaatga

SEQ ID NO: 237489 - DNA, 621 bp, Klebsiella pneumoniae
atgagccagtttttttatatccatccggataacccgcaggcgcggttgattaaccaggcggtggagattgtgcgtaagggcggggtaatcgtttatcctaccgactccggctacgcgctgggctgcaaaattgaagacaagggcgcgatggagcggatctgccgcattcgtcagctgccggacggccacaactttaccctgatgtgccgcgatctgtccgagctgtcaacttacgcttttgtggataatgtggcgtttcgcctgatgaaaaacaacacgccgggcaactatacctttatccttaaggggaccaaagaggtgccgcgtcggctgttgcaagagaagcgtaaaaccatcggcatgcgcgtcccgtctaaccccatcgctcaggcgttgctcgagaccttaggcgagccgatgctctccacgtcgctgatgctgcccggcagcgactttaccgaatccgacccggaagagatcaaagatcgtctggagaaagtggtggacctcatcattcacggcggtttccttgggcagcagccgaccacggttatcgatctcactgaagacaccccggtggtgctgcgcgaaggcgtcggcgacgtgaggccgtttctctaa

SEQ ID NO: 237490 - DNA, 897 bp, Klebsiella pneumoniae
atgaaactcccgccgctgaatgcgttgcgctgctttgaggcggcggcacggctgctcagcctgaagctggccgccagtgagctttgcgtcacgcccagcgccgtcagccagcagattgcccgccttgaggagacgctgaatgtcccgctatttatccgtactccgcgacggttacagttaacggcggtgggagagatctacctgcgggccgttcagccggcgtttcatcagatagccgccgccacccagcgtctgcaggtgcccccgggaccagaaaaggtggctatcagctgtaccagcggcttcgccattcagtggctgctgccgcggctggctgattttgaacgacgctatccgcagatagagatccagatcggcaccaccaaccggctagtggatttgctgagtgaagggatcgattttgccgtgcgtcatggtgtcggcggctggccggaactgcaggcttaccgcctgctggatgacgacctgatgccggtctgtagcccgcaactgattgctccgcgccggacgctcaccgatgcgagcgatctactgcagtatccgctgctgcacgatgaacatcgtgaagactgggcgctgtggtgtgaggccgtggggctggcgccgcacttcgcgcggcgtgggccggtgttcactgattccaacggcgtgacggaggcggcgttcgccggtatggggatggcattgctgcgacgctcattcatagcgcctgcgctgacgcaggggcggctggttaatcctctggcgcagcccatcgcctgtccgctggcctatcatctggtttaccacgagaccgcgctgctggcgcctgccaaccgctgttttcgcgactggctgcttggccagcgcccggccgttgctgaggagcgcgcgtag

SEQ ID NO: 237491 - DNA, 1608 bp, Klebsiella pneumoniae
atgaagataaaactctctatttataaaacaaaaaggtttagcgatgatattgatcaggttttgaatttggacagggtcaaaagacctgttgaattcgatatggaggatgcacgagcatatctatatgtaaaggagtacatggacccaaaacctcctgaatggaccaccttttttatgggccaaaatcctggcatagaacctgatttcttcggtatgaatagtagcacaggagcagtattagttattgaagctaacaattccagatatcttattccctttggaaccggtcatcacttaatcaatgatggcagcattgtcaaaggatttgggcttaaaacaactcttaatagtatagaacataagaaaattcgcagtttagataaaggcagtcacaacgaaacgaacctgttaactcgcagtcagagcagtaaagaagtcgatatatacaacctaaaaatagattctgagatggatattctcacaactctcacaggcacttcgacagaagatattttaggaagtaaaattactggcaaagatgcgtttgtgatcatgccggatattgaattgaaggctattccagcactgttgaccaaaatagactctatttacttattacctcttcctgaagaattcgaatgggttaacaatatcaaggaggctgatgaacaagaagttgagatattggattcgcttttgattgatcggataaaggaaaaagacttcaatgatttatggcttggagagccagaaatagtagactgggaaaatcaaataggctattgctttgataagagacaaaggttcattcatgaaaccttatcaatataccatgtttgtgattattttgatggtaagaaaactgaagtaactgttgatgaactcaaaaaaagttacctgcatgttttgaatgccgattttgaatcgataaaaaaatggtctttatataggtgcctttatgccgagataaaagaaggtgatcagaactatattcttcgagactctatatggtatgttgcagataggaattttgtatcgactattgatgatgaaatgaaaaaaataattcattatgaggagtcggataaattccctgtatattcatataaacgagaagaggattataataaaaaactttgccacgatgataattcctttacacacatggatcagaaattcattcatcatggtggtggtaaaagtaagattgaattttgtgatcttatcagaggtcaatcagattttatccatgtaaaatattatactggttcgcaaagtatgagccatcttttttcacaaggatttataggttctgaactttttataagtgactctgaatttcgaggcaaacttaatgagaaactacctgctcatataaaattagccgatcatataaatagaccagatgctaaaaaatataaactagttttcgccatagcttctaataaaaatcttcccgaagatttacctttgttttctaaaataaacttgaaaaatttccacaagagtattaccaattttgggtatgaggttaggatctgcaaaattgctgtggacccagatatttataaaaagaagctatgtaaaccacaaaagaacaagctttaa

SEQ ID NO: 237492 - DNA, 636 bp, Klebsiella pneumoniae
atgaaaaaatttaatttcgctgctctgcttccggggtttttagcactcaataattctgtatgggcaaatgattcctccactggtgcaagtgatttgcccggtatgactcttaatgagcatgatttagttatagctccacttaacacggaagtacctttctacattgccgggcatcgtagtcatagctcccatcgaagccatagttctcatagatcttcgtctggtggtgggtactatggtggaagcactccttattatcccaagacatacagttcaccaagctcatcaggctcatccacttcaggtacaaattcgtcatcgtcttcttcatctgttcgttcacttcgttctaatgacaccgatgcctctacgaccacaaactctgctggaatgaatggaactactcgtgcaagtagtgggctggcttctgatactgagaagcgtaagcgtttgatcatgcgagtgcagttcgcattactggataaagggttttataacggcaatatagacggaagtatggggcctgagacacgaactgctatcaaaaattacagagttgcatatgggcttcctactccagtaagagaaacattagatgctcagttattgaactctttgaatatactggctcgttaa

SEQ ID NO: 237493 - DNA, 1470 bp, Klebsiella pneumoniae
gtgaccttttctaaatcttttccggacaattttctttggggtggtgctacagcggcaaaccagctggaaggtgcgcatgatgtagatggcaaaggcttatcagcctctgatgtctttatctttgatattaatgcaccgaaagagacatggctggatcagtgggccgggatgacgcacgcacaggtggctgaagctcagaacccggccagcaaaaaatactatcctaagcgcaaaggtaatgacttctatcaccattacgaagaggacatcgcgctctttgccgaaatgggatttaaatgcttccgtatgtcgattgcctggacgcgtctctttccgcgaggtgacgagtccgagccgaatgaagcaggtctggccttctacgatcgggtgttcgatacgttacgtcgccataacattgagccggttgtctccctttcacactacgaaatgcctctgaccctggtcactgaatatggtggctggccaaatcggaaggtaattgatttttacctgcagttcgccacgactgtctttaagcgctatcgccataaagtgaagtactggatgacgtttaatgaaattaactgcgtcaagcatcatccgtacgtcagcgtgggggttattgaagaggatcatccggctcttgaacaggctaagtatcagggcgcgcatcatcagttcgtagcaagtgctctcgccactaaagcctgccacgagattattccggaatctaaagtgggttgcatgatcagctatcagatcctgtatccacatacctgccaccctgacgatattcaggcctgcgaagatgctcaacgtgtttccctgttcttcagcgacgtacaggctcgcggtgcttatcccgcctggacagaaagaatgtttgctacaaaaggtgtggtgttacaaaaagaacgcggcgacgatgaaatattgcgtcaataccctgtcgatttcgtatccttcagttattacatgtcaagcaccgtgagtgcacatcccgaaaaattggaaggtgtcaaagggaatctgatcaccggagggattcgcaatccgtatctgcctgaaagtgattggggatggcagattgacccgaaaggtctgagactggcgctgaaccagttatatgaccgctatcagaagcccctttttgtagcagaaaacggtctgggggccgtagatgttcctggcagtgatggtatcattcaggatgactaccgtatcgattacctacgactgcatattgaacaaatgcatgaagccattgctgacggtgtcgatctgtttggttatacgtggtgggggccaattgatatggtcagcgcaagtacatcacaaatgtccaagcgctatggttttattcatgttgatcaggatgatatgggcaacggaacgctcaaacgtactcgtaagaaaagttttggctggtataaaaaagtgatcgcctcgaacggtcatgatttgagttaa

SEQ ID NO: 237494 - DNA, 1902 bp, Klebsiella pneumoniae
gtggattatcaacataccgcgcgcaggattattgcgcttcttggtggcgatgcaaacatcaattctgtttttcattgcattacacgcctgcgatttaacctgaaagataacgacaaacccgatcgtgagtcgctgatgcaactcgacggcgttatgggcgttaacctttccggcgaccagttccaggtcataattggtaataaggttacgcaggttctcagggctatacaggacgaaatccctcgtcttaaggctgaggataaaacggatgaaaaggttgaggaaaagcgccgaaatcccgtatccctggccttcgaagtcatttcaggcatattttcccccattataccggcgattgccggagccggtattcttaagggcgttttatcccttttcgttactttcggttgggtaactgccactaatcaaacctatcagatcatgacggccatcagcgatggtgttttctactttatgccgatggtgctggccttcagcgccggtctgaaatttggtgcgaatccttatctctctgttgcacttgcggcagtgttgtttcacccggcactgacttcgttactgaaatcaggcgaccctgttgcctttgccggattaacagtttcacccgtttcttatgctaactcggtcatcccaattttattttcagtctggctgctgagttatgttgaacgattctttaatagaatcattcccgcctctatacgaatgatgttttcccctctgctgagcctgatgattgtggcaccggtgatgcttattttcattggcccagccggaatttttatcggcaactcgctttcaggcggaataatctggcttgttgagaatatggggccgctggccgggattgtggttggaggaacgctttcgttgatgatcattaccggtatgcactatgtgctcgtacccatcatgatcaataacatcactcgcctgggtttcgaccctatcaagcctctcatctttgtcgcgaactttggacaggcaggcgctgctttcggggtgttcctgcgctcccgcaacaaaaagacccgcactctggcactgtcgacctctttcagtgccctgatgggcgtatctgaacccgcaatgtacggtatcaatatccgtttcaaaaaacccttcgcggcagcactgattggcggagccacaggtggatgcctggcaatgacaatgggcgtaaaagcctatgcatatgcattaagtggattgtccggtttaccggcgctggctggtgagggattcggctgggcactggccagtattggtctggccttcgctgtagctgcgctggtgaccgttgcgttgggctttgaggagaaatccgaaattcagccagattcaacaagtaaaactgagccatcatcagctcagactaatgaagtgcgtgcgggaatcagccctgtacacgctaccgcaggcgaacaactttatgccccggccgagggaaagcttattcctctttctgaggtgagtgatcctgtgtttgccgatgaagtattcggtaaaggaatcgctattgtcccggtcaatggtcagttggtgtcaccggtaaacggccgggtaggttcggtatttgccaccaatcacgccattacgctggagagcgaatcgggggctgaagttttaatccatattggcatcgatactgtgaagctgaacggaaaaggctttatacggcatgttgaagacgatcaggttgtgaaagtgggtgagccgcttattagcttcgatctggatgctttacgtgcagacaacatcgactccagcatcatcatcattgtgactaacaccgagtggtatgacgacatcagccttatttcacaaaatgaagtggaaccacgtgaggcttttctaaaactgacagcggcagctgtgtaa

SEQ ID NO: 237495 - DNA, 834 bp, Klebsiella pneumoniae
atgattatcaaacagatcctgaacaataacgtcgtcagcgtttccgatatcagcggagctgagtttatcctgacgggacgcggcctgggctttaatgccagagtaggcgacattgttgaagagaagaacgttgagaaaaccttcagcctggcagaaggttccatctctgatcgcttcaaagtattactgaatgaagtgccggtagacgttattcagttgacagatgatatcgtcacgctggcaagaaactcgcttggatatatgctgagcgactctttgtacgtctcgctggccgatcacttaaactttgcacttaagcggtatgctgaggggcttgagattcagaatcccctggaatgggaggtccgccatttataccgtaaggaatatctgattggacgtcaggcgctggcgctgattgcctcacacaccggtcagcttttgccggatgcggaagcctgcagcatcacgctgcatatcgtgaatgcatccatgaatatgccggatggacaggtcatggagatgactcggctgatttttcagatccagaatatcgtaaagtactggtttgcaataagtattgatgaacagagcctcaactatcagcgttttgttacccatctgaagttttttgcccagcgggttatggcgggtgagatccttaataatgacgatgcggaactgtttgaacagatgccgaaacgttatgaaaaaatcctgggttgtgttcaggccatcagtgaatttgtggccaagaattacaaccatacgatgagcagttcagagaagttatacctcacggttcatattggtaacgtgttgaaccgtaagtaa

SEQ ID NO: 237496 - DNA, 942 bp, Klebsiella pneumoniae
atgttgtccaccctgaatgttgtactgcctgtctttgcccttatcctggttggctggttagctcgcaagttcagaatcttaggcgaaaatgccctgagtgaactgaaccgctttgttgtctatctggcattgcctgctttgctttttgatatcatcgcaaatgcaaaatggagtgatctcgctcagcctgcatttatcagtactttctcgataggaatgatgttggtgtttttcctgaccatatttattcagttaagacgaacccgccatcttgcagatgctgctatcgacgccctgaacgccagttatgctaatacggggtttattggttttcctctcatcctcgtttttttaggccatgaagctctggcgcccacacttattgccaccattctgacggtatctgtactgtttggcatcgggatcatcattatcgaaactggccttcagggggaagtaaagcggcgtatcatcatcggacgtgtagcgaaatctctgattaaaaacccgctgttaatgtctccggctattgccatttgtattccggtatcaggattaactatccctggctctgtgaacgttttcctgaaattacttgggggagcagcttcgccctgtgcacttatcgctctgggattatttcttgccggtcagtcagataaaagaaagaacaatgaacatgctacggtaacgatgctggtcgtgcttaaattactgattcagcctgcgctgacatggttgtttgcgacaaaggtttttaatctttcacctttgctggttcacaccgccgtgctactggccgcgctaccaaccggaaccggaccgtttatgctggcggagttttatcgtcgtgaggcatcgacaacgtcgaaatgtgtcctgatctcaacagtggtctccatgtttactctatctgcttatttgtacctcattggccagtag

SEQ ID NO: 237497 - DNA, 885 bp, Klebsiella pneumoniae
atgtccgatttcagacagttgaactattttctgactctggctgaatgtcttaactatggcaaggcagcaaaagcgctgaacatttcacagccaccactgagccggcagattgcctcactggaggagaagctcggagtaaagttatttaaccggcatcattacggtgtctcactgactgaagccggaaaaatgttttacacagatactagggcagtcgtcagcgcgtatgaacttgcctgtcgtaatgtccaaaaaatggctgccggagagaaggggcagctgtcagtcggttttatgatgcacgctgcgtattcaaccataccggagctcacaaggcgcgtagtcactgattttcctgatctgcaactaaccttgcaggaagttactcctggtgcactggtaagcgcagttcttgacggtgattatgatgtcggattggtatttaacccaggcccggctcgttttctagaaagtcttccccttcatcgagaaaaactctgtctgatagtaaatagcaagcatcgtttaggcgtaaagaagtccattaatgcatctgagttgcagagcgagccgttgattgctacccctcacgccgttgcccccgtgttgcgtgaaacgattgacctttttctacgtcagcagggcgttgctccctgttaccgtctggaaacacagctacagcaaaccattgtaagtctggttgccgaagggttaggaatagctcttgttccagaatcggttaaaaaacttaattacgaagggattgaatatcttgaactggaacagagtccaacgatagaacaagtacttatttggcataaagataacagtaatccggcgctggctctctttaaacaactagcaaaagcattaactgaatcttga

SEQ ID NO: 237498 - DNA, 144 bp, Klebsiella pneumoniae
atgaacataatcgtgcagtttattcttgagctggcgggagtagatttctgtaatatgtactcccgcgtgctgcctgtcacagacccgttcagtgtgttaattctgcagtcatatgcactctattgccgctgtatgcttcagtga

SEQ ID NO: 237499 - DNA, 210 bp, Klebsiella pneumoniae
atgaaagccattaataaagtttttatcatcactgctctttcactggtttcgttaaccagctttgcacagtctgtcaccgcaacaggcagtacgctcgatgaagcccatgcaaagatcgcagcaaaagcaaaagaagccggagcagaatattccatcactgaagcatacagcggcaatagagtgcatatgactgcagaattaacacactga

SEQ ID NO: 237500 - DNA, 333 bp, Klebsiella pneumoniae
atgtcagtcaagagtgttaataaagagacgttttcacaggaagtactgaacaacaaccttcctgttttggtggatttctgggcgccatggtgtccaccctgtgtctcagtcgcaccaaccatcgaacaactttcaggtgagcatgaaacccggctgaaagttgtgaaggtcaatatcgatgaaaatgccgaactggccagtatctatggtattcgctcgataccctccttcaaagtatttaataaaggggagatcgttctggaatttggtggtgctttgcccaaaaaacagatagaagaaaaaatgaatgattacttaactactgaaaaatag

SEQ ID NO: 237501 - DNA, 906 bp, Klebsiella pneumoniae
atggatatcaaagcattacgttattttttgcaagtcgcagagaccctcagttttaatcgcgcctctgaacggctcaacatatcacagcccgtagtgacacgtgttatcgcccaactcgaacatgagattggcactaggctttttgacagaaccacccgccgcgtttcattgacacccgcaggaactgttctgcttaatgaagttcggccgcttatcgcacatgttgagtctgtccagcagacggttcgtcatgttgtggctgaacaaagcggtaaattcacggtgggatatactactctggctatgcagacggtcactcctgatttactgcgacttttcagcgagaagtatcctgaaattgagttggacgtcagggaaatgaccacccatgctcaggtcgaagcgctgctgtcagccgaaattgatgtaggcttcgtattaacgccggttgaagatgaggcgctgacagtcattccgctgcataaagagcgactcagattagcggtatccagccgtcacccgcaagccgctctggcaggaaaaaataaaccgcttccgttggctgcttttgcaaatgaggagtttattatcccctgcaaagagcagttccctgccgtttatgatgaaattatccggctttgtgaggaggcaggatttcgtccccgcctgcgttcatgtggagaaaaccagacgtgtgtcggactggcacgagctggtcttggcgtagtattcgtctctggcagaacagaggatattccttcagaagggttagaatttgttgaaatagcagcaccggtacctgaattggaaattgcagttgtctggcggacacgtgatccctccgtactattacagccattcagggagttggcagaaataaccatagaaaacggaagcatagattga

SEQ ID NO: 237502 - DNA, 699 bp, Klebsiella pneumoniae
atgaaatcattaatgccccgaatctcagtagatgtctggtctgattatgtctgtccgtggtgctggatcgctaaaaaacgatttgaaaagggtcttgaagagtttgaatattctaaacaggtcgatgttcgtcatcacagctatcgtattgcgagtgaccacccccctattccattcagatcggctttgtatcagaagtttggtggtgagcatggcgcagagttaatgatgaaccagattgaaagcacggggaaatcagagggattgatctataactttgacactatgctttttggcgatacacgtgaagcgcatacccttgcagctgctgcgcgtgaggcagggctcggaacacagatgtcagaaaagttgttctctgcggccacaactgaagggcgttctatttttgacagggatgtattgattgctctggcaattgaagccggtatgacacagtctcaggctgaaagtgcccttgaaaaccctgtattcagggactctgttgatgacgatgaggcaaaggctcgtgcgataggtgcaagtggcgtacctctatttgtgatcaataataaatatgcaatcagtggcgcacagccagccgcgaattttttgagcgccttgagacaagtctgggaagaaaccaaagatgagtccatgttcatggaggggatggtctgcggaatagatggttgtaaataa

SEQ ID NO: 237503 - DNA, 1110 bp, Klebsiella pneumoniae
atgaagacgttatttaccccttacaacctcggtggcgttgagctgaaaaatcgcgtggttatggcacctatgacacgtactcgcacgttgaatgacatcgctgatgacgtagttgccttgtattacgcgcagcgtgcttcagccggattgctgatcactgaagggctgcctgtttccgaagaaggtcgcgggtatctctatacgcctggtctctataatgatgcgcatgttgagggatggcgtaaggtaacggatgctgtccatgcgaaaggtggccgaattttcgcgcagctgtggcatgtggggcgtatgtctcatacctcactacaacctggtcatattgcccccgtctcttcaggcaccattcctgcgactaatacaacagtatttgcctgggacgaaagtggtaaacccggcccggttgccccaagcattccgcgtgcactcgaaacgcatgaagtgaagcgcgttacccgcgattttgtgaagtcagcacaactggcggtggaagccgggtttgatggcgttgaaatcatggcggctaacggtttcatctttgaccagttcctgagcagtgagctgaatacccgtaccgatgagtatggtggttcggtagaaaatcgtcagcgcttcctgctggagaccattgatgccgtttccgatgcaattggcggcaacaaagtcgcagtacgactctctccgttcggtcgcatctatgatcttgccccctatgccggggaagaagaaacctggtcagaaatggcgaaggctcttagccagcgctccctggcctacgtgcacctctatttccagccgacctacgtcaccgcaccgcaagccgctgagaaatttaaagctgatttccgtgaatcatttggtgggacgatcattgcagcaggtggattcagccgtgatattgcagaagaacgcctgaataacaacgaagttgacctggttgcgtttggtgtgccatttatcgccaacccggatctggttgaaagaatgaaaaataactggccgctggcggaaagcgatcgcacgacctattacggtgtaagcggctctccggaaaagggctataccgattacccggtatacagcgaaaaataa

SEQ ID NO: 237504 - DNA, 795 bp, Klebsiella pneumoniae
atgcaagatacacagtttacgaatcataaagtcctgatcattggtggcaccagtgggatcggtcttgaaacagcaaagatggttttagagcagggcggaaaggctgtcattgtaggtagccgtgctgaaaaagcagaagccgcacgccaggaactcgtggctatttcgggtgaggagaatgcattcgctctgactgctgacttatccagtatggaaagtgttgcaaagcttatcgctgccctgaaaaaggatcacagcgatattgatatgctggtcaattccgccggcatttactatccaaaaagtttccttgagcattcagtcgtggattacaacaacttcctcgatctgaaccgggcattcttctttattacacagcatgttgctgcatcacttgtagatcagaagaaagctggatctattgtgaatgttactgcagtcgctgcacgccaggcagtagaaaccatcaccgcttcagcttactccatggccaaaacgggtctggatactctgacacgccacgccgcagcagagctggctgagcacggtatccgtgtcaatgcagtaagccctggtattgttgaaacccgaattttcgaacgttttattccgggtgaacaactggatggtgcgctggccagtttcaataacttccatccgctggggcggaacggtacaccgcgtgatgttgcggaaactattgttttcctgctttcagataaagcttcgtgggtaaccggggcagtctgggatgtggatggcggtgtaatggcagcccggaaactcggcaattaa

SEQ ID NO: 237505 - DNA, 336 bp, Klebsiella pneumoniae; identical to SEQ ID NO: 193008

SEQ ID NO: 237506 - DNA, 552 bp, Klebsiella pneumoniae; identical to SEQ ID NO: 193009

SEQ ID NO: 237507 - DNA, 561 bp, Klebsiella pneumoniae
atgtctatggatacccgacaatcattaatcaattctgcagagtttatgctgcgttccagaggttatgccgccttcagttacgctgatctggaaaaaatggtcggtatcagaaaggccagtattcaccattatttcccaaaaaaagaagatcttggtgtggaaattgttgaaacctacatcaatcgttcggctgtggatttcgaaaaaatcgatcatgactttccaaatgcttttggtcggctctgtgctttcgctgcattgtttcgggctgcaatggctgatggtatgttaccgctatgcggggcactggcagctgaaatggcagccctgccggagaccatgcaaagccttacgcggaaatactttaccctgcaactgcagtggcttgagaaaaccatagaggaaggtactgcggctggtgaattcgcggcaacaggcacaccccggcagaaagcgtttcagattttaagtctccttgaaggcagcagctttgtccgctgggcaatgaatgacggcacagatctggagccggctgctattggtgctattgttttccattaa

SEQ ID NO: 237508 - DNA, 1077 bp, Klebsiella pneumoniae
atgattaatgccggaataaatattaatcatactgacatgtttagcaggaatgcgcttttctatgcaacttgtccagaaaccctgtgtgtgttgactgaaaacgggattgatatcaaccatacggacacgctgggcaggaatgcgcttttctacaccagtgacgctgaatcagttcagttactggtaaaaaatggtatcagcataaaccaccctgaacttgaagataaaaatgcgcttttctttgcgatcaacgaaagctcagccagagaactcatcgacagtggtattgatattaaccacactgacagctatggaagaaatgcgcttttctacgtctgtgaggctgacgttaagcgtctgctgattaagaaaggtatcaatgttaaccaaagggatatatatggtcataattccattaacattaccggcatagatgctaacttactggatgtttatttcgctgcgggccttgatcctgacatacaggatcgaaatgggaacagcttaatttttcacccttataaaaaaccaattacagacattttaatcaacaatggctgcgatataaaccgtgttaataataatggagaaaccgtctttgaatacatacagaccatgttgttcagcaactatcaacttgaccagtgtctcagcgtgcttacaccttacattaaccttattaaagcaagaccattaattttcaatcgccttacttatggctgcattgagctaattaaatttttgcaaagccagaatatcgattacaaaattaatgaccgttgcgttgttagatacgccaacaaagatattaaaaattttattactgaagcgcagaaagttattgatctcagcaatataaccctttgctcatggtatgacaccccgctggtcatcgtaaaaaacaaggagatcattaaatggttcataagaaacaatgtaaatgtaaatattaatgacattgaagatcaggacattctcactgaaattcttgcctaccttgcactaagggaacataaaacgcttaaaaccgtaattaaaccggatataaaacgcaccgcctgtaaaagaaggctgtga

SEQ ID NO: 237509 - DNA, 1422 bp, Klebsiella pneumoniae
atgcctgtaacgaagtgtgaaccagaaaccacccgcaaagcaagccgtaaatctgtaaaaacgcaggaaactgcactgtctgccctgctggcgcagacggaggaagtgagcgtgccgctggattcactgattaaatcaccgctgaatgtgcgcacggtgccgtattctgcggagtccgtcagtgaactggctgattccattaagggagtcggcctgctgcagaatctggttgttcatgccctgccaggtgaccgttacggtgtcgccgcaggtggtcgccgactggcagcactcaacatgctggcagagcgtgacatcattccggctgactggcctgtccgcgtaaaaattattccgcaggagctggcgactgccgcatcaatgaccgagaacggtcatcgtcgggatatgcaccctgccgaacagattgccggattccgcgcaatggcgcaggaaggcaaaacacctgcacacatcggtgatttgctgggctattcaccccgccacgttcagcgaatgctgaaactggctgaccttgcgcctgtcatcctcgatgcgctggcagaagaccgcatcaccaccgaacactgtcaggcgctggcgctggagaacgacaccgcgcgtcaggtgcaggtgtttgaagccgcctgtcagtcgggatggggcggtaaaccggaagtacagaccattcgtcgtctggtgaccgaaagtgaagtggcggtggctgggaacagtaaattccgcttcgtgggggctgatgccttctcgccagatgaactgcgcactgacctgttcagcgacgacgagggtggctatgtggactgcgtggcgctcgatgccgccctgctggaaaaactccaggctgttgctgaacaccttcgggaagccgaaggctggggatggtgcgccggacgcatggagcctgtcggtgagtgccgtgaggatgccggaacataccgctgtctgccggagccggaagcggtgctgacggaggcggaagaagaacgtctgaacgaactgatgacgcgttacgacgcgctggaaaaccagtgtgaggaatctgacctgctggaagcagaaatgaagctgatgcgctgcatggcgaaggtcagggcgtggacgccggagatgcgtgccggaagcggtgtggtggtgtcctggcgttatggcaacgtgtgtgtccagcgtggtgtgcagttgcgcagcgaggatgatgcggctgacgacgctgaccgcacggaacaggtgcaggagaaagcgcccgtggaggaaatcagtctgccactgctgacgaaaatgtcttccgaacgcacgctggcagtccaggcagcactgatgcagcaaccggacaaatctctggcactgctggcatggacgctctgccctgatgaatcccctaatgatttttatcaaaatcattaa

SEQ ID NO: 237510 - DNA, 441 bp, Klebsiella pneumoniae
atgaaaaaacacaattacccaacactgacaaactaccttgccaaaaccaaaaagaatacagatctctatagattatataacccacaattttctgtattcggaaaaccagtaagtgaagagcaggatttttacttttgttacttctccagacatatgattactcagagaaatatcttaaccctcttttctattcatacctttctctcttacaacgtaagcaagaaagagacaattaaatcatttgttcattttctcagaaacgcaaaccatggcaccttcaacaatgcattccagtttcgcgggtgcaatatcatttatcaaaataagaaaggcgaagttaaagagatctcatggttttcgttctcgcggatctacgacgatatcgtaaaaataaaagagtatagaacaaacaacaacacttacaacaaaatcgcagcttaa

SEQ ID NO: 237511 - DNA, 948 bp, Klebsiella pneumoniae
atgagtatccataaagaatacggtttcttatactgccagactaaaaaagatgtccaggaatgcattaccgcaggtttcgatattaactcgctcatacattcgggtcgaaatgtactgttccgtaacagccacattagtgcggttcaagccatgattgaagaaggaatgaatttagaccatacagatcactacggaaacaatgcgctatttaccaatgaatcacctaaaatactcagcctcttaattaattccggaatcaatattcaccatacaaataacaatggggaaaattgtcttttcagtcaaaattttgacagggtgaacgcagaactccttattaatgcaggcgttgacattaatcacacagataataatggacaaacccttctttataagaccttcaatattttttactttgattactgggttaataaaggttgtgctcttaatcacagggataagtatggcagcacggttctggatttgtctgaccgtaaaggttacatatatgattgtatcgcaatggcccttactcgtcattttgataaaattgacactccccctaaatttttcaaacacttatcgattgagtccttacccttgttggcgttactgcataaaaaaggcattcatttcacgatagatcaatactgtacattttcactttacgtgagagaaatgaaggcattttttatcgaattaaaagcctatacagatatcgaccaagtccaattctataatatgaataataagcacattggcagctatacggggaacgagatagtaaaatggtttattcgcaatggtatcagaatagatcaggacatactgagacagcgctccgactccgataaggttttttcttatatcgcaggaagagagaaaaaagacctgctaaaaggaatgaagccagagttcccccgtacacctgtgcgaaaaagactctaa

SEQ ID NO: 237512 - DNA, 1248 bp, Klebsiella pneumoniae
atgaaaggcatgcagaaaataaaaaggggtaaacaattcacaggtgtggttctctatagcctgaagtcaggttctcaccacaaattcacgccttatgtcatcggtggcaacatgacgggcagcactgctgctgagcttataagtgaatttaaaagcacccagctgctgcgccccgatgtcgccaaacctgtatggcataattcgcttcgcctgccaaagggtgagagtctgtcaaccagacagtgggcggcattcgctgacgattatatgacccggatgggattcactgacacacatcttcgctgttatatccttcacgacgatgccgacgggcagcatatccatatcattgcaagtcgcattaacatggtcggtggaaagctgtacctggggaaaaatgaaaatctcgtcagcacccgaattatcagcgaactggagcgaatacacggactcactgaaacaacacctgcaaccagtagtcgccctcaggctaaaagaaaaccctcacgcaatgagctgatgatggcagaacgaacagcaactccctgccctaagtcacagttgcaggccctgatcgacaatgcattaacccgccgccccgatttactaacatttgtccgtttactgggacaggaaggcgtgagctgcaaacccaatatcgccacaacgggtaaaatgaatggtttttcatttcagtaccagggcatagcctttaaagcctctcaattgggtaaaaaatatggctggtcttccctgcaagcactggttgattttacgccggaacatctgattttactgaaagaagcacggcagccaacaaaacctaaaactgcgtcagtgccagtgccagtgccagtgccagtgccagtgccagtgccagtgccagtgccatcatgcgagtctgaagaacaggctgcaaaccgggaaacgattctggagaaaatccttcagcttgaagaaaaaatgcgtcaggaaagacaacaggaaacagtgagtgtcattcaactcaggagcaaactgcataatacagctcgtcagataccccgccagcgtcgtctgtattcgtggcttggattgctcggccatattgtggcgcttctcaggcgcaggggcatgtctctgttacatgccactgcacatcctttccaccaaatcctgcatctccatcttctaacacactgtcattccacaacaacaaattccattaaagaacaattagttaaaaacaaccaccatcctgcgccataa

SEQ ID NO: 237513 - DNA, 210 bp, Klebsiella pneumoniae
atgagcgataaaattattcacctgactgacgacagttttgacacggacgtactcaaggctgacgggctgaccctcgtcgatttctgggcagagtggtgtggtccgtgcaaaatgatcgccccgattctggatgagatcgctgaagagtatcagggcaaactgaccgtagctaagctgaacactgagagatcccctcataatttcccctaa

SEQ ID NO: 237514 - DNA, 900 bp, Klebsiella pneumoniae
atgaataacgcgctttataatcagatacgcatctttcagagcattgcgcgcgagggcaatatctcggccgccgcgcgcaagctcgaaatcacgccgccgtcggtcagcaatgcgctcaggctgctggaggagcatattggccaccccctttttgtgcgcactacccggcgtatcgagctgacggaaaccgggcaacagctgctggagcagaccgccgcggcggtggagacactggaaaagtcgctggaaatcatccgcgaccagaatcaggagccctccggggcagtgagaataaccctctcgcgctttgcctacctgcttattctcaaaccggcgatggcggcattttgtcagcaatatccggggatccagctggaaatatcggtctatgacggtaccgtcaatattattgaagaacgtttcgaccttgggatccgctttggcgatattctcgaaggcggcgtggtcgcccgcccgttaatgaagccgtttcgtgaagggctatacgcctcctctgcctatcttgccgaatatggcgtgcccgcgatgcctgccgatctccatcatcaccggctgattggctatcgctttattaccaacaaccgcatcctgccgctgatcctcaatgaccacggcgagcagctcaccgtcgagatgcccggacagttaatcagcaatgatattgacgtcatggccgacggtattcgccacggactggggattggccgtttatttgaacctatcctgcaattacagcccgatcgtgagcagtttattcccgtgatggaggactactggaaaacctatccgccggtttatctctattacccaaaaaacgcaggcagaacgaaaagggtgaaagccctgattgatttcctgataatgcatgccgcggaataa

SEQ ID NO: 237515 - DNA, 318 bp, Klebsiella pneumoniae
atgggcagacgcttcatagtctgtatattcgcgctggtggcgttttcggccagtgctgcgcatggtgttcacggtggccataacgggcagtcggtgagcgctggcgccgacggcggcaacggttcgaacggcggcgatatcgataattcctcgggtcgggcagggtgccctggcggcaccgatcccgataagcacggtcatttttatctccctggcaccagcgaaccctgcaatcctgggccccaggatgcagaaaaagtcgggtcttcccctgtctcttatacacatctgacgctgccgacgatatgcagtgtgtag

SEQ ID NO: 237516 - DNA, 1227 bp, Klebsiella pneumoniae
atgcttactcgctacttttcgccccagcgtaaaacctggttaaccagcctgagcgtggggatcatcgtcgcgctgttggctgggagcattcagtttatggtgatctaccataaccgggccgagcgtttcgacgccattatcaacaatgttaatacctatctgaaaagctattttcacgacctgcgccagaccattgacggcctgcagccgctggtggaccagccctgcgagaatattgactccgggcttacctcccacgccgcgttcagccccaacgtccgcgctttcctgctggtcaaaaacggcatcgccttttgctcatcggctacgggagccatgaatacgcccctcagccagctgatcccggccatcgatatcagcaaacccgttgctatggcgattttaccaggcacgccgatgatgccgaagagcgcggcgctggcgctgtgggtaggtaaacccggcgatcaaaacagcggcattttcgtgtcgattaacgctaatctcacaccgtatatcctctattccgcgcggcaaaacgatttcagcggcattgcgctggccatcgatcacaccgctatctccaccttcagtaatcggctggtggatccgcaaacgctgcataacgcgccgatccgccaggcacagatcgagggcttaccgctgaaggtctatctgtatgccaacagctggctggcggaaaatacgcagtttgctctgctgctcggggtcgtctgcggcctgctggcggggctgctctgctattacgtgctgacgatcaaatcggatccgcgaaaatccattctgctggggatcaaaaataaccagttctacatcgtttatcagccggtggttaatgctcagactctacgtatcagcggcgtggaggtcctaatgcgctggcgccatccggtggttggtgaaattccgcccgacgtttttattaacctggccgaaacccagcagatgatcgtgccgctaacccatcacctgctcgcgctgatcgccagcgacgctgcggtgttgaagcgtattctgccgcgcggcgtgaagctggggctgaatatttcccctgctcatctgcaggccgacagcttccgcgacgatatgctgcgcttcgccgccgcgctgccagccgaccactttcacgtggtgctggaggtaaccgagcgggcgatgattgataaagaaaaatcgatggctaacttcgcctggctccaccgctag

SEQ ID NO: 237517 - DNA, 915 bp, Klebsiella pneumoniae
atgaaagcccagaaaccggggttacacccgcgtaaccgccaccatcaacgctacgacctgcccgcgctctgccaggcccatcctgacctgcagggctacattacgctcaatccgctgggtgagcagaccattgattttgccaatccgcaggcggtgaaggcgttgaataaagcgctgctggcgcatttctacgcggtcaaacactgggacattcctgacggctttctctgtccgccggtgcctgggcgggccgactatattcatcatctggcggatctgctggccggggatagcggcgaggtgccgaaggatgccacgatccttgatattggcaccggcgccaacctcatctatcccctgatcggcgctcacgagtatggctggcgctttaccggcagtgaaatcaacccgcaggcgttcgccagcgcgcaggcgattatcaatggcaacccgggcttgacccggcagatccgcctgcgccggcaaaaagagagccaggctatctttcacggcgtgatccataaaaacgagacctacgacgccacgctgtgtaatccgccgttccatgactccgcagagagcgcccgggcggggggcgagcgcaagcgccgcaacctcggactcggcgccgaaagcggcctcaattttggcggtcagcagcaggagctgtggtgcgaagggggcgaagtagcctttatctcgcagatgatccgcgaaagccaggccttcgcccgccaggtgaaatggtttacctcgctggtgtcgcgcggcgataatctgccgccgctctaccgcctgctgaccgaggtcggcgcagtgaaagtggtgaaaaaggagatggcccaggggcaaaagcaaagtcgctttatcgcctggagctttatggacgacgccaaacgccgtcgtccattctaa

SEQ ID NO: 237518 - DNA, 1629 bp, Klebsiella pneumoniae
atgccgtcaccgatgatttatcaggatctcaccactgccgcgctgctcggccatgcggcgcagtatcacagcgagaccgagattgtctcggtgagtactggcggtgagaaggagcgcagctgctggggggaggtggccagccgtgctcagcggctggcatcggcgctggcgtcgctggggctgccgccgggcgcccgctgcgccacgctggcatggaacaaccgccgccatctggagatctattttgccgtcgcctccggcggctgggtgacgcacaccgtcaatccgcgcctgtcggttgaccatctgcgatatatcctcaacgacgctgccgacgaagtgctgttttttgaccagacctttttgccgctggtagcacagctgctgccacagctgccgacggtgaaacacgtcgtgctgatggagtcccgcagcgaaggggcgctcagccagctgccctcattgctgttttatgacgatctgttgcagcaggggatggcagactatcgctggccgcagctcaatgaactgactccggcttcgctctgctacacctcgggaaccaccggccggccgaaaggggtgttgaatacccatcgttcgctggtcctgcacgccctgagcggcaaccagccggacgccgccggcatatcggcgaaggacagcctgttgccggtggtgccgatgttccatgtcaacgcgtgggggacgccgtttatcgccgccatggtcggcgcgcggctggtgctgccggggccgcacctcgatggcgacagcctgctgcagctgctggccgccgagaaggtgacggtggggtttggcgtgccggtgatctgggccggcttgctggcggcgatgcgccggacagaggtccggctgcctgaatttaaacgtgcgctggtcggcggctccgcgctgccgccgtcgatggccgaggcctttcagcgtgattacggcattgcgctgacccacgcctggggaatgaccgaaacatcgcccatcggcaccatcaacacaccgttgagcaaacatgacgcgctcccggcacaggaacagcaaaagcagcgcgccggtcaggggcggcccattttcggcatcgaactgcaggtggtggacgtggatggcgaaccgttgccccgggatggtcaaagccagggttatctgcaggtcagagggcactgggtggtagagcaatactatggtcaggacgcgagcgccctgaccgcggcaggctggtttgataccggtgatatcggtacgctcgacgccaatggttatctggtgatcagcgatcgggcaaaggatattatcaagtccggtggcgagtggatctccaccgttgagctggagaatatcgccatcgcgcatccgggggtgcgcagcgcggcggccatcgccgcccgccatccgcgctgggacgagcggccggtgctgctgtgcgtccgtgcggaagggggcgaagtggaggagaccgatctgctgagctggtttgagaagcgggtgcctaaatggcagatcccggaccgggtgatatttgtcgatgcgctgccggtcagcgccacgggtaaggtgctcaaaaatcagctgcgccaggcctacggagagattttaatgagtgagggaaaatga

SEQ ID NO: 237519 - DNA, 771 bp, Klebsiella pneumoniae
gtggatcacaatattggcccccagcgtgccctgcagccgctgattcgcatagccgatcgcctggcgcagaaagctttccgcactatcggcctcaagacgggtgaccgacagccccgggccaaagacctcctgctggcagaacccgggatcatcgtcggtattcgccacaatcaacggcagcgcgtcaccgcgggctatctccagcggctgacgggcgcgcaggcgaaagtcggtcagccggttttcagcgccggggtagtagtccgggcgggtattcgcggcgatcagtcggtacagctgattcagcaaggccgtcgcaggctcccagccttgctgcaggatcagcacctggctggccacgcagttaaacccgccgttgttcatcttctgcgtcgccagctgctgcgcctgaaaagcgatgtccgcctcgctccacggcccgggtacgataatggtggggctgacgccgcccagctccgaggtcacccgacgcgggttcagcggcgtcccggcggcccgacgctggcgagccgcctcaccctcgccccagacgatgacgtcatgggtctcgcgggagccggtgatatggatctcatcgacagcgggatgggtggtcagccacgctcccgcccgggcgtcgccggtgacgatgcggagcgcatccatggcaatcagcggcgccagggcctgggccagcagatcgtgcagataatcattcaccggattgagcttcagcaggcagacctgattctcaataaacagcttgtgtag

SEQ ID NO: 237520 - DNA, 294 bp, Klebsiella pneumoniae
atgccgacggcgccaacgctgacgaacagcacccgccagccgaaaccgtccatgatccagaacagcagcggcgcaaagcaggccagcccgagatactcccccacggtgtacaccgccgtggccttcgcccgctcctgctgtgggaaccaggcgctgaccacccggctgttgaccggaaagcacggcgcttcgctaatgccgagcccgaagcggcacagcagcagcgtcttcagccccaccgccatgccatggaacagggtaaacagcgaccacagggtcagtgacaaaaagtag

SEQ ID NO: 237521 - DNA, 168 bp, Klebsiella pneumoniae
atgagcaaaatgcatttttatcatatcttaatatgcttaattagcattaaacaaaaatgcattttgctttcagtcggatacggtcagctgctgcatcactttgctggcaaaaaaggtcagcggcggctgcaggttcgccagatactgggcgtggatcagccacagtga

SEQ ID NO: 237522 - DNA, 1098 bp, Klebsiella pneumoniae
atggtccaggccgccgaagccgatatcgtaagcccagccgtcgccgccgatcagccagacggatttctccaccagtgcgtcggcatcggtcagcagctcttcagctcccgccacgccggccagcgcctgacgcagggctgccacctgttcgcggcgaacttccggcgtcgcctcggcgtgcagcgccgcgttcagctctaccggcagtttgtcggcgaattcgctcagcaggcgcatcacgcgctggcgatgctggtcgacggtcaagcggaagccgagcccgaattcggcgttatcctcaaacagcgagttggcccacgccgggccgcggccgttggcgtcggtagtgtacggtgtcgagggcaggttgccgccgtaaatggaggagcagccggtggcgttggcaatcagcattcggtcgccgtacagctgggtcagcagtttgatatacggcgtttcgccacagcccgagcaggcgccggagtattcaaacagcgggctgatcagctgcgaggtgcgaatatcaatgcgctcaagtttgctgcggtcgatttccggcaggttgaggaagtactcgtaattgaccttctcctcttccacatgctccaggcgggacatcatattgatggccttgatctccgggttctggcggtcttttgccgggcacacttcgacgcacaggttgcagccggtgcagtcttccggggcgacctgcagaacgtatttctgcccgcgcatatcgcgggatttcacatccagcgaatgcaggctggcaggggcgttctccatctcttccggggcgaccactttggcgcggatcgccgagtgcgggcaggcggcgacgcagtggttgcactgagtacacagcgcttccttccagatggggatctcttcggcgatgttgcgtttctcccagcgggtggtgcccatgggccaggtgccgtccggcggcagagcggagaccggcagcgcatcgccgaggccggccagcatcgcggcggtgaccgttttgacgaaatccggcgcggcgtcggagaccaccggcgggcggttcggactgctggcgttcactggctggagcggtacttccgccagtga

SEQ ID NO: 237523 - DNA, 1356 bp, Klebsiella pneumoniae
atgtcttttgattccctaggcctgaatcccgatatcctgcgcgctgtcgctgagcagggctacgttgagccgacccctatccagcagcaggcgatcccggcggtactgcagggccgtgacctgatggccagcgcccagaccggcaccggtaaaacggcgggctttaccctgccgctgctgcagcgcctgatccagaatgagccgcacgcaaagggccgtcgtccggtgcgcgcgctgatcctgaccccgacccgtgagctggcggcgcaggtgggcgagaacgtccgcgattacagtaaatacctgaatattcgctcgctggtggtctttggcggcgtgagcatcaacccgcagatgatgaagctgcgcggcggcgtcgacatcctcgtcgccaccccgggccgtctgctggatcttgaacatcagaacgccgtcagtcttgataaagttgaaatcctcgtgctggacgaagcggaccgtatgctggatatgggctttatccatgacatccgtcgcgtactggccaaactgccggcgcgtcgacagaacctgctgttctcggcgaccttctccgacgagatcaagggcctggccgagaaactgctgcacaacccgctggaagtggaagtggcgcgtcgtaacaccgcgtccgagcagatcacccagcacgtccatttcgttgacaagaaccgcaagcgtgaactgctgtcgcagcttatcggcgaaggcaactggcagcaggtgctggtgtttacccgtaccaagcatggcgccaaccacctcgcggaacagctcaacaaagacggcatccgcagcgcggcgatccatggcaacaagagccagggagcgcgtacccgcgcgctggccgactttaaatccggcggcattcgcgtgctggtggcgaccgatatcgccgcccgcggtctggatatcgaagagctgccgcacgtggtgaactacgagctgccgaacgtaccggaagattacgtccaccgtatcggccgtaccggtcgcgcggcggccaccggcgaagccttatcattggtgtgcgtggatgagcataagctgctgcgcgatatcgagcgcctgctgaaaaaagagatcccgcgcatcgcgattgccggctatgagccggatccgtccattaaagccgaacctatccagaacggtcgccagcagcgcggcggcggtcgtgggcaaggtcagggacgcggcggccagggtcagggacgcagcggacagccgcgcagccagaataatgccccgcgccgtcaggacggcgaggcgccgaaagcgcgcactcaggacggcaaaccgccgcgccgccgtcgcccgcgtaaaccggctggcgaataa

SEQ ID NO: 237524 - DNA, 405 bp, Klebsiella pneumoniae
atgctcaaccagggcaccctccgcctgtcgctgacgtttaacccgctgcacgcccggcagaaagccgccagcggcgaattaccgacggacagctacagcttcggctttaccgcggggaccctcggcaacgtccatttcgttaccatcccggctaacgcccgcgctgtcgctggcgccaaagtagtggccaatttcctgctctcccctgaggcgcaattacgcaaggccgatgccgccgtctggggcgatccgagcgtactggatccgcagcgtctgcctgacggccagcgccagacgctggcggcagccctgccgcaggatctgccgccggtgcttgccgagcctcacgcggcatgggttgacgcgctggagcaggaatggctgcgccgctacggtacccactga

SEQ ID NO: 237525 - DNA, 684 bp, Klebsiella pneumoniae
gtgagaggaaagacgctgctggtgctggccgggctgctcggcgcgggcctgttgggataccgcaatctgccgccgcacctgaatccgctggcgccgctggcgctggacgatcccccaggctggctgacgtcgtttaagctgcgcaggctgacggcagaccagtgcgcctccctgctggcggaagccaatcgccggcggcttatcgccagccggccggtggccgacagcgagggaagctgccctctgcgtaacgtggtgcgggtggcgaattttggctcggtgcagctgagcagtagttttctcgccagctgcccgctggcgctgagcagtgcgctgtacatcgagcagcaggcgaagccgctgacccggcagctgatggcgagcgatctgcgtcagatcgatcatctcggcagctttgcctgccgcaatatttaccatcgtcaacaggcgcggcgcagtgaacacgccacggcggacgcgctggacgtcagcggtttccgtctggcggacggtagacgcgttagcgtcctgcagggctggcggagcgagacttcgcgcccctggctggcggtgctgttgagcagcagttgccattacttcggtaacgcgctggggccagagtacaacgcggctcacgccaaccattttcatttcggcatgcgcgggcagggcttctgcttttga

SEQ ID NO: 237526 - DNA, 564 bp, Klebsiella pneumoniae
atgcatcgtcttcatccctatcctgatgtgcaggtgatgtttcgccgcctgctgatcgccaccctgattggccttctcgccgccctggcggtggcgctgtttcgccacgctatggtggtgctggaaacgctgttgctcagtaatgacagtgggagcctggtcaacgccgcacagtcgctgccggcgtggcgtcggctggttacccccgcgctgggcggcctgacggcgggaaccttactctggctctggcaacgacgcagcgtcgcgcgtccgcatgccgccaccgattatatggaagccctggagaccggcgacggctgtttcgatacgccggcaagcctggtgaaatcgctggcgtcattgctggtcgtggtgaccggcagcgcgattggccgggaaggcgccatgatcctgctggccgcgctggcggcctcgctgtttgcccgtcgcttcacgccgcagagtgaatggaagctatgggtcgcctggcacgctgatgctggcctcgcttgggccggtggtgatctcggcggtgatcgccctgctgttgacgcagtttcttaa

SEQ ID NO: 237527 - DNA, 999 bp, Klebsiella pneumoniae
atgtcgactaaaccgtttgtttatcaggatccgtttccgctggcgcacgacgatacggaatactatctgctcagcaaagagcacgtctccgtcgctgaatttgacggccagcaggtcctgaaagtagagccgcaggcgctgaccctgctcgctcagcaggccttccacgacgccgcctttatgctgcgcgtctcccatcagcaacaggtcgcctcgattttgctcgacccggaagccagcgataacgataaatatgtcgccctgcagttcctgcgcaactcggaaattgccgccaagggcgtgctgccgacctgccaggataccggcaccgccatcattatggggaaaaaaggccagcgcgtctggaccggcggcggcgatgaagccgctctggcgcagggcgtttacaacacctataccgaagataacctgcgctactcacagaacgcgccgctggatatgtataaagaggttaacaccggcaccaacctgccggcgcagatcgatctctatagcgtcgacggtgaagaatataagttcctgtgcatggcgaaaggcggcggttccgccaacaaaacctatctgtaccaggaaaccaaggccctgatcaccccggcgaagctgaaaaactacctcgttgagaagatgcgcactctcggcaccggcgcctgcccgccgtaccacatcgcgtttgtgatcggcggcacctcggcggaagcgacgctgaagaccgtcaaactggcctcgacccgctattacgacggtctgccgaccgaaggtaacgaacacggtcaggcgttccgcgacgtgcagctggagcaggagttgctgcaggaagcgcagaacctcggcctcggcgcgcagttcggcgggaaatacctcctgcccgatcggcatgggcgtctcctgctccgccgaccgcaacatcaaggcgaaaatcaaccgcgacggtatctggatcgagaagctggagagcaatccgggaaaatatatccctga

SEQ ID NO: 237528 - DNA, 795 bp, Klebsiella pneumoniae
atgagcagtaacttcagacatcatttattgagtctgtcgttactggttggcatagcggccccctgggccgcttttgctcaggcgccaatcagtagtgtcggctcaggctcggtcgaagaccgcgtcactcaactcgagcgtatttccaatgctcacagccagcttttaacccaactccagcaacaactctctgataaccagactgacattgattctctccgcgggcagatccaggagaaccagtaccagctgaatcagatcgttgagcgccagaaacagattctgctgcagatagatagtctgagcagcggtggcggcgcagcatcaggtgcgcaggctccgtcgtcttctggcgatcagagcgcggctgccaccagcgcagcgccagcggccacctcaggcgccccggcgatgaccggcgatgcgaacaccgattataatgccgctattgccctggtgaaggatgcctcacgccaggatgacgcgatggtggcgtttcaaaacttcgtcaaaaagtacccggattcaacctaccagccaaacgctaactactggctcgggcagttgaactacaataaggggagaaaagacgacgcggcgttttacttcgcttcggtggtgaagaactacccgaaatcgccaaaagcgcctgacgcgatgtttaaagtcggcgtgatcatgcaggacaaaggtgataccgcgaaagcgaaagcggtttaccagcaggtgatcaataaattccccggcaccgacggtgcgaaacaagcgcaaaaacgacttaatgctcttggttga

SEQ ID NO: 237529 - DNA, 999 bp, Klebsiella pneumoniae
atggtacatgtttatggaccccatattttccatactgacaatgaaacagtgtggaactatgtcaacaagcatgcagagatgatgccctatgtgaaccgggttaaagcgacagttaatggtcaggtattttccctgcctattaatttgcatactatcaatcagtttttctcaaaaacttgttcgcctgatgaggccagagcgctcattgctgagaaaggggacagcactattgctgatccacaaacttttgaagagcaagcgttacgctttattggtaaagagttatatgaggccttttttaaaggatatacgattaaacagtgggggatgcaaccctcggaactgcccgcatctattcttaaacgtcttcctgttcgttttaactatgatgataattattttaaccacaaatttcagggcatgccgaaatgtggttatacgcagatgattaagtcaattctcaatcatgagaatatcaaggttgacttacagcgggaatttatcgttgacgagcgaactcattacgatcacgtattctatagcggtccattagatgcgttttatggctaccaatatggccgtctgggctatcgaacattagattttaaaaagtttatctatcagggtgattaccagggatgcgcagtgatgaactactgttctgtggatgtgccctatactcgcatcactgaacataaatatttttctccctgggaacaacacgacggctctgtttgttataaagagtatagccgtgcttgtgaagaaaatgatattccttactatcctattcgccagatgggagagatggcccttcttgaaaaatatttgtcattggccgagaatgaaaccaacatcacttttgtcggtcgtcttggaacctaccgttacctcgacatggatgtgaccatcgccgaagcattgaaaacggcagaagtctatttaaattcactcactgaaaatcagccaatgcctgtgtttacggtttctgtacgatga

SEQ ID NO: 237530 - DNA, 441 bp, Klebsiella pneumoniae
gtgatcattgagacgctgcagatcaccattggttctgacgtccattatctgtgccagggctacgagggtattacggcaacgacggagaacggcgataccgtaacgtttaccgcctgtgcgatagacattgctctgccggcgcgcaatgcggacggcacgcaggacctcaaatttgccctgtgcaatatcgacggtgttgtgtccacggcgatccgcaatgccctggctaacagattgcctgcatcgctgacgtaccggcgttatatctccacggatttagcggcccctgcggaagtgccgtatacgctgaaaatcaagtctggctcctggacggcgacagaagtgcagattaccgcgggttatatgaatatccttgataccgcctggccgcgttaccgctacacgctccctgcattccccggactgcgttatatcagctaa

SEQ ID NO: 237531 - DNA, 363 bp, Klebsiella pneumoniae
gtgacaacgttcaccgttacggagccgctggactggtcttacgaaaatccccgcgcgctgatccgctatcaggatggctctgcatccgggctgatggtggcaagcagggtgggtgattttcagctgtcagtcccgcacctgagcgagtttgatgatccgatgaaggttgacctgtcgtcggcaaccattgagccgatccgcctggtgttctgcggctcaacgcgccatgtctacgacgccattgtagaggagatcgctccgcagtcagacggaacctgtcaggtcaccgctaaagaatacctcgaatcgttctaccagtacgacgacgccacatacggcactgttgcaaatagtcggtggtga

SEQ ID NO: 237532 - DNA, 948 bp, Klebsiella pneumoniae
atgacaatttccctgcataatccccggacaagcgcccctaacaccgcagcggcgaccagcatatccccgctggacccgtcaggctcctcaaaaacgaaattttctaaaaccagaacggatatttatcagatcgttaccgacagcatcattgcagcgctagaagccggtgtgaaaccttggtcatgcccgtggcagcgtgtatccggcatgtctggtctgccatcgaattatgccaccagcatagcctacagcggtatgaatatcatgttgctatggtgcagtgcatcaaaacagggtttcagcgattcacgctggatgacctacaaacaggcgcaggcagcaggtggacaggttcgcacacgtgaacgtggcacaacagccattttctacaccaccctggagaaggaaaacgccgccggagaagttgaacatattccgatgctgaaaacctttaccgtgtttaacgttcagcaaatcgacggcctggccctgacaactgaaactgtcagcccggaagcaacctttgacccggtgccgcaggttgagaacctgttacggaagagtggcgcaaacatcatcgagaaaggacaaaacgcctttttcagcccatcaacagatgaagtctggctaccggagcgccatctgttttcagatgcggctaatttctacgctacaggtctgcatgagctgattcactggagtggtggcaaaaaacgtctgaaccgtgaaatgaaagggaagtttggcagtgcggattatgcagaggaagaactgatagcagagctgggaagtgcctttctgatggctgatcttggcattgagggagaggtacaacatgaaagctatattgcttcctggctgaaagagctgaaaaacgacaagcgttatattttcaaagcggtcagcgcagcctctaaagcacatcgttatttgatggacaaaatctga

SEQ ID NO: 237533 - DNA, 846 bp, Klebsiella pneumoniae
atggctaacgaacttgtgattacagccagctctcttgctgagcgaggcattgacggcgctacctggagcgccctcaaaaacagtatttaccctggcgccaaagacgaatcagtaatgatggcgctggactactgccgggccagaaaccttgatccgcttcttaagcccgttcatctggtgccaatgagcgttaaggactcgaagtcgggtaaaagcgagtggcgcgatgtagttatgccgggcatcgggctttatcggattcaggccgatcgctccggtgattacgctggcgcaaaagaaccagagttcggcccggacgtcactctgacgcttaccggtattgaggtgaccgtacctcaatggtgcaagtacacggtcagcaagcgcatgccgagcggggaaatcgtcgaattcagcgcgaaagaatactgggttgagaactatgccaccgccggccgcgacactaccgcgccaaacgcaatgtggaaaaagcgcccttatggccagctggcgaagtgtgccgaggctcaggctctgcgtaaggcatggcctgaaattggccagcagcccactgccgaagagatggaaggtaaaacgctggaagtggatgcgcgtgacgtaacgccgcgcagcactacagaggcgctccccctggtggccagtgaggaaacgctgcaggcaattaccgacctcctgacgtccctgaataaggactgggggcaggacttcctgcctctgtgcagcaacatcttcaagcgtgacattttccaggcatcacagctcaccgaagaagaagcgcagaaaggctttagcttcctccagaaaaaagcgcaggtggcagcatga

SEQ ID NO: 237534 - DNA, 426 bp, Klebsiella pneumoniae
atgactatcacactacaggcagtaaacgagctcatcgcctcccttgagagcgcaggcgagctgtcgatcaaagagacaaaggttatggcgctggcgaaagcgtttaagcagctggctgcggagaatgtggcgctgaaaaaatcagcgccggcaccgttcagtaagctgatgatggaagcgcttgatacttatcattcgaaagctgacgacgtgcctgagttggccatgctgagcgcatacgtaaaactgcgcgatgggctaaaaacccccgccaccgatcgcatcgtagccggctttaaggctgatgggggggaggagtttgcagcgcatcttcgcgctaatgataacggggcatcagtttgcaaaatgattgcgctcggagctgatgatttcgccaagcagctgcgcgaggaggccgacaaatga

SEQ ID NO: 237535 - DNA, 729 bp, Klebsiella pneumoniae
atgatctaccttcacaacgcagattgcttcgacgtattcccgaaaatcgccagcggtaccgttgacctggtatgtgccgatattccctacggtaccactcagtgccgctgggattctgttctcgacctgccgctgatgtgggagcaactgtaccgtatcgcgaagcccagcgccgctattgtgctgttttccgctcagccgttcaccagcgtgctgattaacagcaatctgcgggactggcggtcggagtggatttgggagaagccacacgctacaggtttcctgaatgcgaaaaaacaacctcttcgtgcacatgaaaatattgaggttttttacagaaagcagccgacatacaacccacagatgacgcatgggcacgccagaaaaactgcaacaagaggcacgccgaatactgatgtctatggcgaggcgttgaaaaaagtcacttacgattcaacaagccgctatccgcgagatgtgcagaaattctctagcgataagcaaaagcaatctcttcattcaacacagaagccgctggcattagtgcaatacctgattgaaacctacagcaacccgggagatacggtgctcgacttcactatgggtagcggtactgccggcgtcgcctgccagcagaccgagcgcaacttcattggcatcgagaaggatgccgccatttaccgcaccgcatgcgagcgcatggggattaagcaggagcgtgcagcatga

SEQ ID NO: 237536 - DNA, 207 bp, Klebsiella pneumoniae
atgagcaaccatttaaagccttgtccattctgcggtagcaacgacgtcgaagcattcgcacaggatgaggacgattgcccgcatcgttctgcgattgttcgatgccactcatgcgatgcacagtccgcgcagatggttggcagcacaaaaattgaaatggcaattcgagcctggaataagcgcgtggaggccaatcatgacaactga

SEQ ID NO: 237537 - DNA, 450 bp, Klebsiella pneumoniae
atggctgcactaaaaccggaagtgagagcctttatcattcaagagcttgcatgctttgatacgccatcacaaatcgtcgagtccgtacaaaaagaatttaaggttcaggtgacgcgccagcaagtagcgtcgcatgacccaacaaaggccgcaggtaaagggctcgctaagaagtgggtggaccttttcaacgaactccgcgaccgcttcctcaacgaaatttccgatattccgatcgccaataaagcctatcgtctccgtgcgcttgaccggatgatgaccaaggccgagagcatgcgaaacatggcgttggctgcgtcgctgatggagcaggcagccaaagagtgcggcgatgcatacacgaataagcagaaggttgaacactcaggcgcccttgccgtgagctcagttgcatctgtcatggacgagataggagatgaagacctgtaa

SEQ ID NO: 237538 - DNA, 534 bp, Klebsiella pneumoniae
atggtaaaccaaaaacaaggaatcaacatggataagttcgacagagaattacagctgcttatacttaaggccgctgtggatgcataccccaaaacaacttcacatgagcaatttcgtaagcatatagaattttactctgaagaacactcgcaaaaagtcctggcaaatataagttaccttgttgagcatggcttaattaggatgttttcccacaatcacttggcaacaacaagcgtggcgcttggagggatgctcgccacaaaagatggaattgatttcttacttcaggatggcggactaggtgcgattttgaaagttcaaaccatcaaattgcatcgagaaacacttacagccattgaggattttatctctctggcaaacattcccgaatctgagaaggagagtatcgtttcaaagcttcggcagcttccggcaaacgccatagaacatttgacgaaggaattagtggtgaaaggggctctgagcctgccggtagcacttccactaattcaaaaattcctccatctggggtaa

SEQ ID NO: 237539 - DNA, 396 bp, Klebsiella pneumoniae
atgacgcaagacgaatttatccggcttgttaccggcaagccgtgggctaaccgctcctgcagttttggctcgatggattgttgggcgctggttgttctgtattaccggcatgtgctgggaattgagttgcaccatattccagcgtatgaagccggggctgacttcattacttgccatgagcaggaggtggagcattggagaacgataccagcagcggtgtcgggttgcattgcggttttctatcgtggtgaagtcccggcgcatattggcgtaatgacaagccccgttaagtgcctgcattcccgtggggagtttggtttcgtgcgcagcgacaacccgctggcgcttcttaaagtatacagccgcgtggagtatatggtgcatggttcgatatga

SEQ ID NO: 237540 - DNA, 1113 bp, Klebsiella pneumoniae
atgcataccttttctctgcaaacgcgcctctacagcggcccgggcagcctggccgcgctgcagcgctttagccatcagcacatctggatcgtctgcgacggcttcctggcgcgctcgccgctgcttgaccgactgcgcgccgcgctgcccgccagcaaccgcgtcagcgtgttcagcgatattacaccggatccgaccatttacaccgtggcgaaagggatagcgcagatgcaggccctgcgtccgcaggtggtgatcggcttcggcggcggctcggcgatggatgccgccaaggctatcgtctggttcagccagcagggcggtctgcctgtcgacacctgcgtggcgatccccaccaccagcggtaccggttcggaagtgaccagcgcctgcgtcatcagcgacccggaaaaagggatcaagtacccgctgttccatgaggcgctctgtcccgacatggcgatcatcgacccgacgctggtggttagcgtaccgcccaccatcacagcccataccgggctggacgcgctgacccacgccctggaggcatgggtctcgccgcaggccaccgattttaccgatgcgctggcggaaaaggccgccaggctggtgtttcgcgccctgcccgttgcgattcgtcagggcgactgcattgcgacccgcagcaaaatgcacaatgcatcaaccctcgccggtatggcctttagccaggctggccttgggctcaatcatgcgatcgcccatcagcttggcggccagtttcacctcccccatggcctggccaatgcgctgctgctgaccgcggtgatccgcttcaatgccggcgagccgcgagcggctaagcgctatgcacgcctggccagggcctgccgcttctgcccgcccgaagctggcgaacaggaggctttccaggcgctgcttaccgcggtggaaacgctgaaacagcagtgcgccattcccaccctcaagggcgcgctgcaggaaaagtatccccttttcttatcgcgaattcccgccatggtgccggccgcgctggccgacgccaccctgcgcaccaacccgcgtccggtcgatggcgcggccatcgcgcaactgctggagagcctgcaatga

SEQ ID NO: 237541 - DNA, 441 bp, Klebsiella pneumoniae; identical to SEQ ID NO: 135540

SEQ ID NO: 237542 - DNA, 162 bp, Klebsiella pneumoniae
atgattaatattcgattcgaaccagagttataccaacaactattggcagaggccaaacgaaccgggacgagtattccggcgcttgtctgccaacttctaaaaaccatcctaaacaatgaggaactaaatgaacgaaaaagaaccaccatttctggcaattga

SEQ ID NO: 237543 - DNA, 705 bp, Klebsiella pneumoniae
atggatagcatcactactcttattgttgaagacgaacctatgctggcggagatcttggtggataacattaaacagtttccccagttcgacgtcattggtattgcggataagcttgagagcgccaggaaacagctcagactgtatcaaccgcagctgatcctgctggataattttttacccgacggcaaaggtatcgatctgatccgccatgcagtcagtacacattacaagggaaggattatctttattactgcggataatcacatggaaaccatcagcgaagcgctgcgtcttggggtgtttgattacctgattaagccggtgcactatcagcgcctgcagcacacgctggagcgctttgcccgctatcgtagctcgctgcgctccagtgaacaggccagccagctccatgtcgacgcgctgtttaatattcaggcccgggaacaaacggaacccgccagcgcaccactgcgcgggatcgatgaaagcacctttcagcgcgtgctccagttgtttgccgacccgacggtggtgcataccgccgactcgctggcccgtatcctcggcagcagcaaaaccaccgctcgccgttatctggaacaaggagtaaagaacgactttctggaagcggaaatcagctacggcaaggttggccgacctgagcgtatctatcacggcaagcagacctatcctgagcagagataa

SEQ ID NO: 237544 - DNA, 1134 bp, Klebsiella pneumoniae
atgtttgatttactcctgcgccgcgcgcgcctcgtcgacgataccctgactgatatcgccattcaggacgggaaaatcgcggcgctgggcgagattagcgcgccctcccgtaaaaccattgagctgaacggcaaggtttacgtcagcgctggctggattgactctcacgttcactgctacccgaattcaccgatttatcacgatgagccggatagcgtcggcatcgccaccggcgtcaccaccgtgatcgatgccggcagcaccggcgccgacgacgtcgatgacttctatcaactgacccgtaaagcggcgacggaagtttatgcgctgctcaacatctcccgcgtcgggctgattgcgcagaatgagctggccaatatggccaatatcgacgccgccgcggtgaagcaggcggtgcagcgtcatcccgactttatcgtcggcctgaaggcgcggatgagcagcagcgtggtgggcgaaaacggcattacgccgctggcgcgcgccaaggccattcagcaggaaaacgatgatctgccgctgatggtgcacatcggcaataacccgccgaacctcgatgaaatcgccgatctgctgagcagcggcgacatcattacccactgctataacggcaagccgaaccgcattctgaatcctgccggcgagctgcgcagctctattactcgcgctctgcagcgcggcgtgcgtctcgatgtcggccatggcaccgccagcttcagctttgaggtggcgcggcgggcgattgcgctgggcattctgccgcacaccattagctccgatatttactgccgcaaccggatcgacggcccggtgcgctcgctggcgctggtgatgtcgaaattcctcgccatcggcatgacgctgccgcaggtgattgactgcgtgaccgtcagcgccgccgaagggctgcgcctgtcgcgtaaagggcggctggaagtgggcttcgacgccgatttaacgctatttcgcctggagcaccggcccacgctgctggtggatgccgaaaaagagagcctgcaggctgacaacattctggtgccgctggccgcgatccgcgcgggcaaaggctatctgaccgaacaagggagcgcggaacatgccttcgatttttga

SEQ ID NO: 237545 - DNA, 948 bp, Klebsiella pneumoniae
atgcgttacattagaaaacacattgcaaattttgatttcaatattgtatccattatatatttgctgattgcttgcattgtaatcatgaagttcccattattacttcaagataaaaccttcttagtttgtggattattcctctcggtagcattcattttttgtgcctataacaacaaaaaaaaaatcgtcaataaaatgattgagcacagcatcattaaatggattggaacagtattgattttttcaatttgtatgtggtatgcaaaacataaaattaattttgattacgatattcaaccggaatacttaatatactcatcttatggttatgctttcgcaatggccattcctctatctctatccatttatggccttagcattttcatatacttatactttggaagaattactgcttatcaatgcttttacgcggcaattttgaccctccctttttctgcaatgctaagagagacgattaaaaaaaaccaagaggttgatttcaaagttattatgttgttagttttcgggttagctttcggtatcgtaaccatgttcaaagcaatgcaaaaaacaaataaaaaatcaacttcatccaataaaaggaatctattatacattgcaaaaacaatggcacaagatattaatagagcaaaactaattttaatgatatggtttaaaaaaatacttatatgttcgaatagctacttaagagttgcagatctattatcgacagcaattgcattattattcattggtgttttttcaataaagataataccagagcatcagaagtcttttcttttacttgatgctttttctaagacagattgcaatacaaaaaaagattcattttcatacatcaggaaatcgaaaaacgaatgctacagaattaattctaaaggaatagaagttatcgaaatgatatcatttacctcatcagctgactaa

SEQ ID NO: 237546 - DNA, 201 bp, Klebsiella pneumoniae; identical to SEQ ID NO: 98866

SEQ ID NO: 237547 - DNA, 258 bp, Klebsiella pneumoniae; identical to SEQ ID NO: 98862

SEQ ID NO: 237548 - DNA, 207 bp, Klebsiella pneumoniae
atggtatttaaacaagctgttgctatagaggcctgttacaccatgttgggccagctgctcgccaacgggcataacacgatatgctcccaggatttccacatcggaaggatcccacaaaatgatatgataataactttcatcaaaaacatcgttatctcggtcgttaccagttccggcaccaatatcgcgataacagcgttcgcgtaa

SEQ ID NO: 237549 - DNA, 219 bp, Klebsiella pneumoniae
atggaaagtaatgaaaggagttttgtggagcgattttttatatatttatataaaaaaagaagatttaattattattttatgttcttcatggtgttctctaatgttatagcagtgatttatgaagaatattctttcaacttactatcgttttttattatgctaatctggggtataacgcttctcgctgaaagcttcagcgagaaggataatcaagagtaa

SEQ ID NO: 237550 - DNA, 153 bp, Klebsiella pneumoniae
atgattgactatgtcatcccgcaaaccgatatggtgcggatcattggcggcgattatgccggcttaatttgcgtcgggaaaggagggctaaccggaccggaagatattattagcatcattgttgaccgaatttatcaggaagcacagcaataa

SEQ ID NO: 237551 - DNA, 225 bp, Klebsiella pneumoniae
atgaacaatattaaaataataacactatttcatccttatgagaaaacaccattcatgatctgtattgtaaacaaagtggaagataccgaacatggaataaaacttactcttgaaaatggtaatgacatttgtgttaataattatagccattatctgttatctgagtctgtaagtcgttgcgaaaatgacaggataaagaatatttatattcgtatagtttcataa

SEQ ID NO: 237552 - DNA, 459 bp, Klebsiella pneumoniae
atgcgtaaagccttctggctattattcgcgctggcgctgccggcgctggcgcaggatccggtgctacccgccgtgacggcgatccatacggcgcccaccctcggtgagctgccgccgccggagtcgctgcgaccgtgctgcgcttttggttacgacctgcacgtgcgcgcggcgggcattccgatcccgatgtaccagatcggtaatgtgttgactctgggtacgctgggtaagcaccattacaacgacagcgcgttcggtgcggtgaaaaatctgctggggctcagcgaggagcagaacgggcttatctatacccgccgcggcgggtttattgatatcgcccatgtgcgcgatacggcggacaacaccttttatctgttcaatcgtattgcgccgacgctgggcaggcggggcggatcttctacagtgaagaactgggcgtgcgccgcgtgcagctga

SEQ ID NO: 237553 - DNA, 834 bp, Klebsiella pneumoniae
atggctgtaaaagcaaagcgcttccgcatcggtgtggaaggggcaacgacagacgggcgcaatattgagcgtgcctggctggaacagatggcggcgagctatgacccgcaggtgtataccgcgttgattaatctggagcacatcaagggttacacccctgatagcccattccgccgtttcgggaccgtagataagctggaggcagaggaaattgcagacggcccgctgaaagggaaactggccctgtatgcgtggatcaccccgtcagaggacctggtggcgtatacccgtaatctgcaaaagctgtttacctcgatggaagtcaataccagttttgctgataccggcaaagcctacctggttggcctggcggcgacggatgatcccgcaagcctcggtactgaaatgctgcagtttagcgccaacgccagaagtaaccccctggcaggccgcaagcaaaaccctgaaaacctctttaccgccgccgaagaaacgctgatcgagtgggaagaagtccaggacgataaaccctccctgttttcccgcgttgcagcgatgttcaccaaaaaagaacagaacgatgaagcgcgtttttctgacgtgcatcgcgcggttgagctgattgctactgaacagcaaaacctgagcgaacgcactgatcactccctgtctgcgcaggatgcgcgcattgctgagctggaagcctccctgcaggaacagcagaccgcttttgctgaactggagcagcggctgagccaggaagacagccgcaaagattatcgccagcgcgcgccgggcggagacgcactggcaggcacactgaccaattgctga

SEQ ID NO: 237554 - DNA, 1002 bp, Klebsiella pneumoniae
gtggaagtggaagaactttccagcaaattcaccgttgagccgtcggtacagcagacgctggaagaccagatacagcagtccgctgcatttctgacgctgattaacatcaccccggtggatgagcagtcaggccagctactggggctgggtgttggcagcaccattgccggaaccacggacacgaccacgaaggagcgcgagccaaccgatcccactgagatggttgatgttgaatacaaatgcgagcagaccaactttgacacggtgctgacctacgcaaagctggacctgtgggcaaaattccaggatttccaggtgcggatccgtaacgccatcgtgaagcgccaggctctggaccgcatcatgattgggtttaatggcgtgaagcgtgccaaaacctctgaccgcgaagccaacccgatgctgcaggacgtaaataagggctggctgcaaaaaatccgcgaagatgcgccggatcatgtcatgggcagcgaaaccaaagaaggcgtgaccaccaaaggcgccgtgaaggttggtaagggtggcgattatgccaacctggacgccgtggtgatggatgcggtcaacgagctgatcgacccggtgtatcaggatgatgatgatctggtggtggtctgtggccgtgagctgctgtctgacaagtatttcccgctggttaacaaagaccaggagaacacggagaagctggccgctgatctgatcatcagccagaaacgcatgggtggcctgcaggctgtacgcgcgccgtatttccctgcgaatgcactgctgatcacccgcctggataacctgtccatttactggcaggaagatacccgccgtcgttctgttatcgataacccgaaacgtgaccggatcgagaatttcgagtccgtcaatgaagcgtatgtggttgaggattaccgctgcgcggcgctggtcgaaaacatccagatgggggatttcagcgcgccagctgtaccggaaggcgagggggcataa

SEQ ID NO: 237555 - DNA, 570 bp, Klebsiella pneumoniae
ttgctgcaggacgttaacaaaggctggctgcagaaggtccgcgaagatgccccggattgcgtgatgggcagcaccacggcagaagatggcactaccaccgcagacccggtgaaggtaggcaagggcggtaaatatgccaacctggatgcgctggtgatggatgctgtcaatgagctgattgaccctattttccaggatgacgccgaactggtcgtgatctgtggtcgtgagctgttgtccgacaagtatttcccgctggtcaataaggaccaggcaaacacggaggcgctggctgctgatctgattatcagccagaaacgcatgggcggtctgcaggccgttcgcgccccgtcattcccggctaatgccgtactgatcacccgcctggataacctgtccatctactggcaggaagatacccgccgccgttcggtcattgataacccgaaacgcgatcgtattgaaaacttcgaatccgtcaatgaggcgtatgtggtggaggattaccgctgcgtggcactggtggaaaacatcaccatcggcgacttcagcgccggtgccggagagtaa

SEQ ID NO: 237556 - DNA, 1029 bp, Klebsiella pneumoniae
atgcagacattacagaccaccagcctgcgggtgagtgaaaatcagctttttattctcgaccagcaggccttgccgcaggaaaaacgctggctggcggcggataacgttgcgctgctggtggaccatattcataccctgcgggtgcgcggcgcgccgctgattggcctgtccgccagcctgctgctggccctgctggcccagcgcggcctgaaccgggatgcactccagcaggcgctggagacgctgcgcgcggcgcggccgacggcggtcaacctgatgaataatctggatcgcatgatgcaggcgctggcccgggaggattacccgcaggcgctggaagcggaagccttgcgtctggtcgaagaagataaacagctgtgcgaccacatcgctgaggcgggcagtgcgctggtgaagcccggcagtcgactgctgacccactgcaacaccggtggcctggcgaccgccggggtagggaccgccctcggcgttatcgcgctggcgcaccggcagggaaaagtgaccaacgtatgggttgatgaaacccggccgctgctgcagggcggtcgtttaaccgcctgggagctgggcgagctgggcgtgccctatcagctgatcgccgattcaatggccgccagcctgatggcgcaggggcaggtggatgcggtgtgggtcggcgccgaccgtatcgccgccaacggcgacgtggcgaataaaatcggcacctattctctggcggttttggcccattatcaccagatcccgttttacgtcgcggccccgcagaccaccctcgaccgctattgcccgaacggggcggccattcccattgagcagcgcgccgcggccgaagtgaccggagtggcgggcagctttggcgcggtacagtgggcgccgacgggggctgccgtttacaatccggcgttcgacgtcacgcctgctgggctgataagcggctgggtgctggacagcggggtggtcaccccggcgcaggtcgccgccggggcgtttgcgccggacaacggataa

SEQ ID NO: 237557 - DNA, 1239 bp, Klebsiella pneumoniae
atgaaaattattaacgctcgcctgcgccgccaggaggcgctgtttacccttgacctgcaggacgggatgattcaccgcatcaccgcccaggccgcgatgcagactgccgacgcaggggatatcgacgcccggggccggctggcgatcccgcccttcgtcgagccgcatatccatcttgacgccaccctcaccgcgggcgagccggagtggaaccgcagcggcaccctgtttgaaggcatcacccgctggagccagcgcaaagcgagtattaccccggaggacacccgccagcgggccatgaaaaccatcggcatgctgcgcgatttcggcgtccagcacgtccgcacccatgtggatgtcaccgacccgtcgctggcggccctgcaggcgctgctggcggtgaaacaagaggccgccgatctcatcgatctgcagattgtcgcctttccgcaggagggaatcgaatcgtatcccaacggccgggagctgatgacgcgcgccatcgagatgggcgccgacgtggtgggcggcattccgcactatgagaacacccgcgacaaaggggtcagctcggtgatgtttttgatggacctcgcccagcgttacggccgcctggtggatgtccactgcgatgaaatcgacgatccgcagtcgcgtttcctcgaagtgctggcggaagaggcgcgggtgcgcggcatgggggcgcaggtcaccgccagccacacctgcgcgatgggctcttatgataacgcctactgctcaaagctgtttcgcctgctgaaagcctcaggcatcaacttcatctcctgcccgaccgaaagcattcatctgcagggccggtttgacagctggccgaaacggcgcggcgtcacccgggtggcggagctggatcgcgccggcatcaatgtctgctttgcccaggactcgattcaggatccgtggtacccgctggggaacggcaatatcctgcgcattctggatgccggactgcacatctgccatatgctcggctatgacgatctgcagcgctgtctcgactttgtcaccgacaacagcgcccgggcgctgtgtctgggcgataactacggcctcgccgaaggccgcccggcgaacctgctgctcctcgatgcggaaaacgactacgaggccgtccgtcgtcaggcacgggtgctgacctccattcgccacggcaaggtgattttgcagcgtgaggtggagcacatccgctacccggcatag

SEQ ID NO: 237558 - DNA, 459 bp, Klebsiella pneumoniae; identical to SEQ ID NO: 237552

SEQ ID NO: 237559 - DNA, 192 bp, Klebsiella pneumoniae
atgacgaaacaacagaaaacagcgctgaacatggctaaattcatccagaatcagtctctgctcctgctggagaagcttaacgagcttgatctcgatgtcgaggccgacctttgtgagaaactccacgatgatgcggagcatcttttccgtacactgtcctcgagactggatgcattacaggatggttactga

SEQ ID NO: 237560 - DNA, 1488 bp, Klebsiella pneumoniae; identical to SEQ ID NO: 237220

SEQ ID NO: 237561 - DNA, 162 bp, Klebsiella pneumoniae
atgtttatgctgatgatgaaaaacatcatcaatatatctgaccacgctcagcgggctggccaggtgccagcccgctctctttacagcaccttgctgaggaacgcggcggtgcgcgggttggtcggcgcgctaaagatctgccccggcttgccctcttcctga

SEQ ID NO: 237562 - DNA, 594 bp, Klebsiella pneumoniae
gtgcgcggcgccgtgccgccgacggtgtttattccggtggcagagaaaatcggtcttattaatgcccttggcgaatgggtgctgaaaaccgcctgtgccgaagcggccagctgggcgacgccgctgaaggtctcggtcaacgtttcaccaattcagttgatgaatacatcgctgaccgacaccattatcgaggtgctgcatcagaccggcctcgatccgcgacgtcttgatctggagatcaccgagtcggacgtattcaatgagaacacccgttcgctggaaattctcagccagctgcgcgagcagggcattcagatctccatcgatgactttggtaccggctattcttccctgtcccgtttaagctacttcccgttcgataaaattaaaatcgaccgctcgtttgtcatcaatattccggaacaaaaagacgatctggatatcgtccgcctgattatcagcatgggaaagagcctgcatatgcgcattgtggcggaaggtgtagagaccgaagagcagttggcttcgctgcaggcgctgggctgtgacctggttcagggatatttaatcggcaaaccgagtccgctgcgctaa

SEQ ID NO: 237563 - DNA, 1362 bp, Klebsiella pneumoniae
ttgggtattataattcataataaacttaactccaaaagcgacactctaaatatacaaaaaaaccatgattttttactttgctacagaaaatccataacccctgatgcatctttaatcaactattccgtcagtgagcgagaggtatttcaggataatggtaggttttatattcttaaagattcaatcacaacaagaggtgatggtggtacattaaataaaaggaagaatttaggctatactgtatattaccatccagaaacaacagactttattggcgtaattgattacgatatagagttggcatcaagctcaaatagtgaggaggaaatatatagtgacaatgaggaactcatagctaatggatatgtgaaaatacgtcctccaaaagtgagaggtaaacttggagtatggacatgggacataaacaaatttaacaatgaaaaggaaaatattgttataagaaaaacaaacaatgggtatcaagttagaaagagaacatttattgaagaaaaagatgtatttaaaaaggctggttccatctatacaaaggtaaagactgagggaaattcaaggagcattctagattattcaacgaatgatggaacaaatcagttatccagcattcttggtcaccctgatgtattcagcaatcctaagaatgtaaattatttgaaatatattttcagcttggtgcctgaaaataattatatcgcacttgacttttttgctggttctggatcatcgctgcaagctatatgtgaactaaatattgatgatggtggaataagaaaatttattggaatacagatagatgaaaaatgtaaatcagactcaactgcttttgatcttggttataaaaatatatttgaagtaaccaaaaaaagaatcatcaaagcgggagaaaagttaaaaaatgaaaatccaaactataatggagatcttggtttcaaaattttcgaaactgttgatgattttcgagcaaaagatgagtctgaacttacgctgtctaatcttagcttctttgacgatgctgtattgacacctgaacagtatgacactctactaactacatggtgtgtatatgatggcagtttgcttacaacgccaattgaagatattgatcttgatggctacaaagcgcacttgtgcgatggtcgtctgtatatgattgcgcctaatttcaccagtgtagcactgaaagctttacttcaaaagctggattcagacaaagactttgcacctaacaaagtcgtgttttatggcagaaacttcgaaagtgcgaaacagatggaacttaatgaagcactaaaaagttatgctaataaaaaatctattgatttagatttggtggtaaggaactaa

SEQ ID NO: 237564 - DNA, 615 bp, Klebsiella pneumoniae
ttgactgataaaaccgcatccgtttccccggaaaacaccacctcagcgctcagccatctggcgttctgcgccctggtggcgctggggctggcacgccaggacggtatcgccggcacgccctatgccgaaaacctgttcctgatccgctggctggccaccgcccaaaagcaaaaacgcttccccaggagcgtggcgattgacatccagtggttactcgaacgtggtcgcaaacacggcccggccggccacctgcgccagcatcttgagtacctctttcgctcctgcagcggcaatctggccgctcagtccgacctgttccgtctcacctacgcctctgaaaccctgaaagaccagggctgggacaattatgtgctggacgcacacgagtggaaatccggcgtcgtgccgacaccgtcacagcataacgggttctatgtcgaaaaaacggcgctgaatgccgcttttgcccaggacggtcgccatctgcactccgtcacgtttcgggtggtcggtgacgccgaccggtttatgcatgtgttggccgagtacggtctgtgtacgcgccggcagggcagcacgtcagcctgccacaccatcgcgcttgaaccggcgtaa

SEQ ID NO: 237565 - DNA, 615 bp, Klebsiella pneumoniae
ttgactgataaaaccgcatccgtttccccggaaaacaccacctcagcgctcagccacctggcgttctgcgctctggcggcgctggggctggcgcgccaggacggtaacgccggcacgccctatgccgaaaacctgttcctgatccgctggctggccacagcccagaagcaaaaacgcttccccaggagcgtcgcgattgacatccagtggttactcgaacgtggccgcaaatacggcccggccggcaaactgcgtcagcatcttgactacctctggcgctcctgcagcggcaatctggccgcacaatccgatctgttccggctcacctacgcctctgaaaccctgaaagaccagggctgggacaattatgtgctggacgcacacgagtggaaatccggcgtcgtgccgacaccgtcacagcataacgggttctatgtcgaaaaaacggcactgaacgtcgcttttgcccaggacggtcgccatctgcaccccgtcacgtttcgggtggtcggtgacgccgaccggtttatgcatgtgatggccgagtacggactgtgtacgcgccggcagggcagcacgtcagcctgccacaccatcgcgcttgaaccggcgtaa

SEQ ID NO: 237566 - DNA, 552 bp, Klebsiella pneumoniae
atgctgatgcagctggcggaggaccgccgccgcctgaaaggtatccagtccaccgtgaagaaagcccaaatcaaggtggaactgctgccccgttattccgcctgggtggagggtgtgctggctgctgatggtgcccggcaggatgacgtggtgatgtttgtgatgctctggcgtatcgatgccggtgattatgccggtgcgctggatgcagggcgtcatgcgctgcggcacggatgggtgatgcccatcggaaaccgtaacgtccagacggtgctggcagaggaaatggcagacgctgcgcaggccgctctgctggcaggtgaatctttcgatgccgggttgttactgcagacactggagctgacagacggccaggatatgccagaccagtcacgggcacgcctgcataaagcgattggcgctgtactgaccgaaaccagcccggcctccgccctgaatcacatcaatcatgcgctgcagcttgatccacgctgtggcgtcaaaaaagaaaaacagcagctggagcgcagattgcgcaatgacagccgttaa

SEQ ID NO: 237567 - DNA, 684 bp, Klebsiella pneumoniae
  misc_feature (295)..(304): n is a, c, g, or t
atgaacagtcttttaacgctggcgaaggacttagagcagaaatcgaaagtgcagcagcagactaccggcgagatgctgaaagccgcattcagcgagcacgagaagtctgtcagagcggaactgaacgaaagcgagaagagaatcagcgccgccatccacgaccacgaccggatgctgtcctcagccatgagccagcgtacgaaagggatgctgcgcatggtcagccagacgtggctgaccatcgtcctggtctccgtgctgctgatagcctcaagtgcgggcattctatggtggnnnnnnnnnngacgcgggacggttcggagaggattcgagctggatgatactggcggggaaatagcacatgacggaactggaaaaacagttgctgagcgcattagagcagctacagcaggactactcgaaaaggctggacgagtgggagagcgccttcgcggaatggcggacgatgtgtggtcttatgcaacgggagaacgcagcgctgagcgagcgcgtcacggacttgagcacgcaggtgctgagtttaagcgagcagctgcgccggttgtcgtaaggctgaacgacatcgaggcacaccgggagcaggagcgcgcagcgcagcaccagaaagcgctggagctggaacgatcgcagcgtcagcaggagtatgacggtccgtcgctgtga

SEQ ID NO: 237568 - DNA, 339 bp, Klebsiella pneumoniae; identical to SEQ ID NO: 97280

SEQ ID NO: 237569 - DNA, 483 bp, Klebsiella pneumoniae
gtggtggcctcttacgtcggggaaaacgcgctgtttgaacagctggtgctgagcggcgagctggcggtagaactcaccccgcagggaacgctggcggaaaaaatccgcgccggcggcgctggcatccccggcttttacaccgccaccgggtatggcaccccggtcgccgaaggcaaagaggtgcgccagttcgacggaagacactacatccttgaagaggcgatccgcggcgatttcgcgctggtcaaaggctggaaagccgactggtacggcaacgtggtctatcgccacaccgcgcagaatttcaacccgctgatggccaccgccgggcgcattacggtagtggaggtggaagagattgtgccgccgggcgaactgcccccctccgccatccatactccggggatctatgtcgaccggctgatcgtcgggcaattcgaaaaacgtattgaacagcgcaccctgcgcgccggagggcactga

SEQ ID NO: 237570 - DNA, 402 bp, Klebsiella pneumoniae
gtgatagaagaactcaccgatttacttatccaggatggcgccgtcaccaataaggaagactttattcgtgatgtctggttacgcgaggagctaggctctaccggctttgaaaaccatatcgctattccacatggtaaatcttccggtgtttcccgtaccgcattagccatcggacgcacgcaacatgccattccctgggagaccatggatggcagcgatgtccgctgtgttattttatttgcggtttgcctggtggatcaaaatgccacccatattcgcctgttggcacaagtgtctgggtcactggcggatgaagacattatcgctaaattacttgttgaatctgatccacataaaatcattgcgcttttcaattcagaaactgaaaacgccgatgcttaa

SEQ ID NO: 237571 - DNA, 240 bp, Klebsiella pneumoniae
atggcgccggtggtggcctggttaagggaaaatcagccggatgccattcataacccggaactgcgggaaaagttgctttcctttgaagtcgatattttgcgcaatgatatctgtgatatcagcctgaatctgcaactgacagagcgtgtgatagtcagcgctgacggtgacgtgtccagcgtcgaagcgatgccggaaccggacgaaccggacgaaaggtgggcagtgagccgtggctga

SEQ ID NO: 237572 - DNA, 189 bp, Klebsiella pneumoniae
gtggtgccgccgacgccgtcgtggggcaatatgatggatgccgctaacagcctgatcgatttccagcgccgcccctggctgtggatgccgccgggcatcgccatctttatcaccgtgatcgccatcaacgtgctgggcgatggcctgcgcgacgccatggatcccaatatgaaaccgaggctgaaatga

SEQ ID NO: 237573 - DNA, 138 bp, Klebsiella pneumoniae
atgcacgtcaaatcccatgtcggccagcctgacggcgatggcggcagccatcgtggttttccctacaccacctttgcccatcagcataatcaggccgtgttcactgcgagcgatatcatcgaccaggccagagagtga

SEQ ID NO: 237574 - DNA, 186 bp, Klebsiella pneumoniae
atgctgcccgatagccggacagaccagggccaggcagagcagcttggcgtgaagttcttccccgcgatgatgctggttaacccgaaaagtggccaggttaagcctctcagttacggctttatcagtcaggacgacctggcgaaacagttcctctatgtctccagcgactttaaaccgaatttctaa

SEQ ID NO: 237575 - DNA, 213 bp, Klebsiella pneumoniae
atgacgatgaacaagttaattccactgatcgtattgagttgtctgctgcccctggcggcaaatgccagaaccatcaccgccaccggcgataccctggaccatgcggagagcaaaatccgccagcaggccgcccgcgagggcgcgactacctatcgcatcactgaagcgcgaatgggcaacaaagtgcatatcacggcgaaaatcgcggactaa

SEQ ID NO: 237576 - DNA, 612 bp, Klebsiella pneumoniae
atggataaaaatacgggatttacttcgctaattgatacattaaagcaaaacaaagacgtcatagcagacgcttgtgatgcaggccttgaagctgccgaatcaatacctttcgtaggttgggcgttaaaaatatggaatgtaaaaaatacataccaagaaagaaagttgtacagaaatacgaaagcgttttgggaagcctcggttataaaagatcctgaggcgttacgcaccaaatttgccactcaagaagccgctgaagagtttacagacaccttagttcaggtgctaattgactcagagaagccttacaaagcaaccatggtatccaatgtaacgaatgctttggcgttgggcagactaactcacaaagaagctaacgatatgattttaatcatactaaatgcttcagtcccagcattaaagtacttgcctaaattccatcagaggctgcatggtgggagatacattgcaacagccgcactggaggaaatcgatgaagacggggcgcatagcatgctgaactccatggggctaatctatcgattggctgatcaaactgccttatctaaggtgggaagagacattgcccgaatcgcatatcacggtctttga

SEQ ID NO: 237577 - DNA, 597 bp, Klebsiella pneumoniae
atggcgcaattgcacttagtaaaacagtctcaaggtatcctgatccccgcgacgccggagaccagcgaatttctgcattcaaaatgcaagctcggatccgttctggaagccgattataagcttgtccgtaatccggcgtttcaccgccgttactttgctttactcaatctcggttttgaatattgggaacctaccggcggggcgatttcgtctaatgagcgcaggcttatcaaaggttacgccaaataccttgctgcatatggcgggagtgaatcggctttacttgatgccgccgggcaatatctcgaccgaatagccgagaagcgatctggctatatcagtatttgcaaatcttttgatgcttaccgggcgtgggtcatcgttgaagccggccactatgacgctatacagctgccggacggcacgctgaaaaaacaccctcgcagcatttctttcgcaagcatggacgaatgcgagttccagaaactgtacaaagcatcgctcgatgttctctggcggtggatcctctctcgttctttcaacagcctgcaggaagctgagaacgccgccaaccagcttttaagcttcgcggggtga

SEQ ID NO: 237578 - DNA, 750 bp, Klebsiella pneumoniae
atgacagatatggacaacaaaggtgcagtcattcccaatgtcattgaaataatccgccgcatcaaggaaggttctactcaaccatttctatgcaaatgtgatgatgggcaaatgtatgttttaaaagcaaaaccgtccatgcccccaaaaaaccttcttgctgaatttattgctgggtgtttggcctatgacatagggctatcactacccgactttaagattgttttcgtcccagaggagttgattgagtatgctccagaacttcaaaatgaaatcctgcctggtcttgccttcgcctcaagatacatagaaggtgcactcgcacttacttttacccagtctagaaatgatgccatcataccgacaaatgaacaaaaactaatatatgcctttgataaatgggtactaaatgctgaccgcactcttacagacaaaggaggaaacgtcaacatcctttatgacgttggcaatgataagtattatctaattgaccataacctatcatttgataaaaatgctgtttcggaagattttacggtgcatgtttatggcccggggaaccggaagtgggagtacgatttagttgatcgcctcgagtacagacagaaggtagcggactgtcactgtaagctcccagcaatcattcagaagatcccggaggaatggattgttgacgatgaatttttacctttcgtacaaaaaacgttagagaaaggcgatagcgatgaattttggagcgacatagcatga

SEQ ID NO: 237579 - DNA, 828 bp, Klebsiella pneumoniae
atgagtacaccatgcctttacagcattgttcggtacgcaccttatgcggaaactgaagagttcgcaaacataggtgtggtcatgtgcgcgccaaaagaaaacttttttgatttccagatcacaaagcgcaacgattctcgcgtaagaagtttttttcatgatgactgtatcttcccgatagcaaaagacaccattcaaagagagttacagtttgctaaagcccaggcaactcagattagtggacaccatcaacttgctcaattttttaggtattttacagcgaaaaaggagtcaatattccagtttagttctattcgtgtgattcttagtgagaaccctaaatctgagatggatcgaatttacaataaatatgtaaaccactcagattatacaaaagaacgccgtgaagatgtactggctagggaactgaaacgcagcattgacagaatagatggtctaaaaaatacgtttaagaatgaatctattgaaggttcgtatgctaagttcaccatgcctttggttgccaaaaaaggcaatgaaattcaatgtgctataaaaccactcgcatttactcaaaccgagccgggtaaaatgatggaacatagtgatacttgggtaatgagggttacccgtgcggctgaagagaacttattagatattgatgatgtgctattcactcttgaagtacctgaaaccccaacatcagggcaacgaaaagtgatagatacgattaaaaaaacaatggactctaagaaaataaatcatacagcagcatcaaatcatatagacactattgaatttgcgaaaaaaatattgttccaaaaataa

SEQ ID NO: 237580 - DNA, 870 bp, Klebsiella pneumoniae
atgaaatttggtgttgttgttgtattatttaatccaagtgatgagaatattaaacatcttgagtatctagcaaaaaatgatatcacgttagctgttgtagataactctccagttagtaaaaaaatagagatgggaaatatatcctacatttataatcaaaacaagggagggattgcaggtgctttgaataaaggaatcaacgcgttaatagcacgtggatgcgaatttttctatacatttgatcaggattcgatctttgatatatcttattttaataagatgaacgattttagatatcaggaaaatgctgaaattatatgccctgatttttacgatgttaactctaaaacccatggcatgtttatccagttaggtcgctggggatacagtgatgtaagaggaaagaaaacagcaagttttgccataacttcaggtatgggaatatctaaaaatgcatgggataccattggtgagtttaacgagttgtattttattgatcatgtcgatactgagtattgtttacgtgcagctaataaggggatcgatatttatgtaaattattctgtttgtattgatcatgaaattggcaagagagaaaaacataactttttaggtttgacattaaaacctaataatcataactttataaggaagtattatattgttagaaatggtacacattgtgcttttaaaatgtacaaacaatttccatcatttttcaaacttaattttttaagagttagccatgaacttgtgtgtgttattttatatgaggataataaatttaaaaaggttcattatatgattcgtgggcttaaagatgctatctttggtaatttgggtgacatcaaagaaatatacaagatttag

SEQ ID NO: 237581 - DNA, 1164 bp, Klebsiella pneumoniae
atgaatgaagttaataagtcacaaaataagaagcattggcatattataatatatgtatcaacggctttttttgctatatatggagggttgtcattaatttatttagcaacaaataaatatttatttcaaggatatggtctatttacaaacgaccagccttatttgtatatgcttgttgttagtttattttcattgttttttgttttttttgcttttatctcgtctactaaaagtattgtcaaagactttaggcttttaatccccaatgcattgaaaaatataatattcatattttacgtcttggtttttatatatgcctgtattgattatgttaaccgttacagtttattttctcttagtttgaatattgctaatattaacgcatcaatgtcccaactcggatatgatgttgctcactctgatggtaaattgagctatactctgatctcgctttttccttttcttttattattttatagttatgataaaaataaaaggataaaaatattttctttttttctattttcaatttcactatttattttatttatatctggacgaaaagagcaattgcttgctgcgattttagcacttgtgtttagattcaaaatcacgaggaatataaaagtaattacttttgcaggactccctttactgatatttcttgtatattttatgaattcagtaaggggggggttatcatcggaaagcttcttttatgttttatttcaatcacaggaaagttatccactcgctcttggtgcatatttatttgtaaatccgttagatgtaccgcttgatacgttgtttaattcaacgatgccttatactatatttgttaacatgccaacaattacaggcgtcatcaatcaacaattatttaaaacacacgaatatggccctgtctattcggtattgggtttttcatattattatttccctatttcattttttattctgtttttcattattagagcattgtctctgaaagttaatacgttattatcatggggaggtgaatatactccttttgtcgttttttattgtattaagttatttatttttttaagaaatggttatctcaatttttttacttgggatattatattttcattggcaatgttttcattgtgtttattttttaaatataaggaaggaaagtaa

SEQ ID NO: 237582 - DNA, 939 bp, Klebsiella pneumoniae
atgactgtttctgttgtaattcctactataggaagggatagtgtttattctgcgttaaaatcagtgttttctcagacatataaagtctctgagataataatatgttatgacggagataatttttctgaattccaaaatggcttagatacgtttttagaattacaaaccgataattataatgtttcttcaataaacgttggtcctttttcaggtggaaatgttgcacgtcaaaaaggggtcacatattcctcatcagaatatattgcgttattagatgatgatgatatttggttgcctgatcatatagacgactatatgaaatttatccatagcaaccgaaacaaaatgatcctatgttcttgttgcgcattgattaacggagatgattttaagaactctgtactccctactaggttaattaatcctggggaattaatttcagactatttatttaaagtaaatggcattaaaatagactgtggatttatccaatcctcattacttcttttctctagagaacttgctataaaaataccatttaatcaacaattaaaatttcaccaagatatcgattggttattaagagttgaacaaagtgaagaaaaatttgagttctatcagtcacctgaaaagacagttgtatacaactctactccgttgagtgtctctaaaaaaatccagcctaataaatcttgtgagtgggctgtaaacacatttaatccaaataagaaaagatgtcttggagactttattttgactcagtcttatcattacgccagacagaacgggacttttaaagatgagattttattaatcttgaaatcatttaaatatggaaagcctggtatttactcgttaattagagtgctgttaaaaattctaagagtagattgctttttagctaatataaaacatgccgcaacaactaagaaaacataa

SEQ ID NO: 237583 - DNA, 294 bp, Klebsiella pneumoniae
atgaataggaatgaaaaatatcatgcgcagtacgccccgctgcgcagagcgtcaaatgttattgctgttacacctgcggctatgaagattgagcagagagctatagaacgggaaaagaaaggccagtaccgtatggcggctcgtctctggctcgaatgcatggatgcagctatgggggaggtagagcgcgcccgtatcgctgtccgcaggcaacaatgcatcagccatggtaacgggcttcgccgtggcgaatacgcgggtatctgtgcaaaaagtggggtgatttatgactaa

SEQ ID NO: 237584 - DNA, 249 bp, Klebsiella pneumoniae
atgaaaggtgcatttggcaagaaggaacttctgtcggtggtgccactgtcatggagcacgatttgccgacttgaagcggaaggcgaattcccgaagcgttggtatatcaccgatcgtcgctgcgcttggaccaaggaagaagtggagcagtggttagataaacgcaaggctgacagcccggttgaatacacgggaaaaaagccgccggtcgatcagcgccagtatcgaccggtgagtaatgcggcatga

SEQ ID NO: 237585 - DNA, 882 bp, Klebsiella pneumoniae
atgagtaacgacatcacaatcacctcgcaacctggcgccaccgtaggcaccgcagcggcaatcttcagcccggaagggatcaatcaactggtgcgattcgcagagctgatggcccaaagcaaagccaccgtaccggcgcaccttgctggcaaaccttcagactgccttgcggtaacaatgcaggctgcgcagtggggtatgaaccctttcgcggtagctcagaaaacgcatgtagttaacggcacgctgggctatgaagcgcaactggtaaacgccgttgtctcatcctcaaacctgctggctactcgcctgaactatcgctgggacggggattggtcaaaggtcaacggtaagtcggataaatcacccgacctgacggtaaccgtgtgggcaacgctaaagggagagacagatcctcgcacgttgacaatcagtatgcagcaggcaggcgttcgtaactcaccgctatgggaacaggacccgcgccagcaactggcttatctgtgcgttaagcgttgggctcgccttcatgctcctgacgttctcctgggggtatacacgcctgacgagctgcaggaaaccacgccgcgcgttgagcgagacatcacgccgccatccagcacagcggccggaatgaacagcctaatcaacgctaagcctgatcagcaacatgaagagcggccccgtaaatctgatggtcgtgaccctgatgaaatgctgacggcattcactgacgcagcaatgaactacaacaccatcgctgatctggataaggcgtacaaatacgttgccaaaaatctggctaacgatgatgagcgcctgtctaaagcaaccgacgtctacaccatccgccgcgatgagttgaacgaagtaccgatgtaa

SEQ ID NO: 237586 - DNA, 822 bp, Klebsiella pneumoniae
atgaatccaggaatctattacgacatcagcaacgaagactaccacgcaggtgacggcgtgagtaagtctcagctggatatggtcgccaaaaacccggcgctcctgaaatgggttaaagcggcgccagaggatgaagaaaaaaaatcagcactggacatgggtgcggccctgcactgcctgctgctggagccggatgagttcgataaacgcttcattgtggcgccacagttcaaccgtcgtacaaatcagggaaaagccgatgaagaggcgtttctgaaggatgtagccggaatgggaatgacggtgatggacgcggagcagggccggaaacttcagttgatgcgtgaaagcgcgatggctcacccggcggcgcgctggatgctggaggcaccagggcgctgtgaagcatcgatgtactggaatgacgacgagacgggcgaactgtgccggatccgccctgataagtggctcaacgagcacaacgtgatcgtcgatgtgaagaaagtcgctgatatggagcgctttgcacggcacatcgaggaatttcggtaccacgtacagaacgccatgtactgcgaaggtgcgcaaaaaattaccggggaagctcatgggttcttcttcctggccgtcagcgaaagcatcgactgcggccgctacccggtccgcgttttcgagttggacgcgccagacgttgataccggaatgacgctgttccgccgggatctgaatacctatcaccagtgccgcctgacagatgagtggggcggcgtggaaataattaaacgccctgagtgggcacgcaaacaggatatgtacttatga

SEQ ID NO: 237587 - DNA, 228 bp, Klebsiella pneumoniae
atgagcaaacaaacaggtggacaggcatttccgcgccaacagtgggaatacgacggtcaaaacaacgtcctgcaatatcaggaagaaggcatgacgttgcgcgattatttcgcagcgaaggccatgcagtcattggtatccctgcaggatgggaatcacccagatgctggagctgatcaggcatatgtgtgggccgacgcaatgctgaaagcgcgggagggagcatga

SEQ ID NO: 237588 - DNA, 303 bp, Klebsiella pneumoniae
atgaacattcagcaattcaacaacctgaaaaaaatcgtcgctcagttcggcggtgattaccagatgtcgtcgaatttgtacgaccgccacgttgagctgattgatgcagtcatcggcgccgacatggatgagacgttcgagcgagcactgcttcgcgccggggtacgcaaagagatcctcgacgctgctcgcgaaagctgtgagttcgaagaggtcatgtcgacatttaagcgcgagttgaccggcatcgttgcccgcctggatatggcagacaggatcgacagtgcgaggacagcagcatga

SEQ ID NO: 237589 - DNA, 978 bp, Klebsiella pneumoniae
atgagcgaatcaaaagaactggttctggtaacactgccggcagcggcagatcttgaagaggcattcatcagcgatgagtacatagatcgcctgattactgatatccgccagaaagcgacatcggtagtcggtgatgtaaatacggttaaaggccgcggtgtttatatcagcatggcatcaacagttcgccgtaccaaaacggttattgacgacgccggtaaagcactggttgctgaaatgaaaaagcgccctgcgctggtcgatgcaagccgaaaaaaggtacgcgatgcgctggatgaactggctgtagacattcgccgcccagccactgaatgggaagaagcaaaagcacgtgtagaagctgaagagttagcaaaaaaagaggcggaagcactagcggccagactggacgtcgatcatgaaatggccctgctgatgaatgacgctttcgaccgcgaacaggctgagaagaaggcggaagcagaacgccagcgcattgctcacgaagaagagattaagcgccaggcagaagaaaaagcgaagcgtgaagcggcagaacaagcacagcgtgaaatcgacgccgccgcgtccagagagcgtgaagcgcttttagcgaaggaacgcgctgaacgtgagaagaaggaagccgctgaaaaggcagagcgtgaccgcattgcagctgagcagaaagcagaggctgacaaacaagccgctatcgatgccgagcgccgaaaggcgcaggaagaagccgatcgcatccgtcgtgaaaccgaagcaaaagaagccgctctcctggctgaacagaagcgcattgcagaagaagaggcgcgccgcgctgctgatgttgagcatcgccgaagcatcaatgcaacagcggttcaggctcttatcgaccaggggatccctgaggactgggcaaaatcctgcgtcgtcgctatagctcgcgggaaagttccggcgacaaccatcaaatactga

SEQ ID NO: 237590 - DNA, 144 bp, Klebsiella pneumoniae
atgcagtggcagatcatcaacggttggtactgcgtcaccgcatgcgggctgatgagctggaagtttcgctcactgcatgaggcgttcgactgggcatacgtcaataaactggcggtgaaaacggaaatggggatggggaaatga

SEQ ID NO: 237591 - DNA, 588 bp, Klebsiella pneumoniae
atgaaaagcatccatgacattcgccgggaaaatctcaaggacttaattaccactgacttcggtggcgttcagtcgcggctgtcggagcgcatgggtattcagtcaaatctggtcaaccgctgggtgaatggcaaaaaggtcattggcgacgcatcagcgcgcaaaatagagactgcggcccggcgccagactaactggctcgacgttgaccataaactctctaccctggacgacgtggatgatgttgccttcagtgatgtccgcgaaatcgtcgtgcataatctcaagcagtggatgagcaacaaccaggagctttcttctcagcagcgcctggcggatgcatccggagtcagtcagccatccattaaccgcatcctgcgcaatgaggtatcggcaaacgttgcgcacctcgaagccattgcgacggcgttcggccggaaaacctatgagctgctgcttccccaggatggccgggctgctatcaaatatgaccacgagcaattcgctttgttacctcagggtgaaaaagagaagatcgaaagtttcattgattttgtgatagagcagcacacaaaaagcaagtcataa

SEQ ID NO: 237592 - DNA, 231 bp, Klebsiella pneumoniae
atgagcgaagaaattaagttcgatttcaaacagcactggcttgatctgaccccggacgaacgtacagctttcgctaacgacgccggaacgacgagccactacattcaaacccaccttaccggaaagcgtaagatgcctggtaagcgtttgatggatgggctttttaaagcgtgcaaatcccgtcagtggattaaaaataagacagaactagcagtatttttctactcctga

SEQ ID NO: 237593 - DNA, 204 bp, Klebsiella pneumoniae
atgaaacgaattactcagcgagaggcacttgattttggcctcactcgcttctacaccggcaaaaaatgcattcatgggcacgacagcgagcgctatacgctcagcggtcagtgtgtccagtgcaaccacgagcgcgcccggcgccaggctcagctgcgctcggaaaaattaaaagctacacgaaaggcccgggaggcggtatga

SEQ ID NO: 237594 - DNA, 441 bp, Klebsiella pneumoniae
atgactgatatcaccgaactggcgcagagcaaagcgctgcacaaaaagcttaatcgccgtctgaatgatgcctttggttttcaaagaacgtcaggtgggaagcacaccacaatcagcctaagcattgaagagtgtaaatctgtcatcgcagcctttgatgagcgtctcgtgctggtagaggcgctggagaaggcgcagcagcgtattgccgaactggaagacgcagagcaaaaactatgtgtcgctaacgtgacgcttgatgctcgcgcggaattggctgagcgccggctggcagagatggagtcccgcaccgtcaccgtaaagctgccagattatcggaatacttacaaagggactttcgctgatgaagttgaacatcaagtacgccgggcgcttgatttgttctctgccgacgctggcatcaagtgggaggctgattga

SEQ ID NO: 237595 - DNA, 273 bp, Klebsiella pneumoniae
atgaaaaattatcttagcgatttagccagcttgctgcagggcattgcaggcatcatttcagacggcgaaaaagtgcagaaagagtgccctaaacatttgaaggcaacgctgcttgaagcggcccacgcactggatggtcaatcagtcagggttaattacccgccaaccggtaagcctgaaatcgtaaatgctcgtggcaagcatcggcagttaactttgcgggaaagaatcgcaatccgaattctgggcggaagaacggagattaggccatga

SEQ ID NO: 237596 - DNA, 312 bp, Klebsiella pneumoniae
atgactgaatacctgagcgcagaagaacaggaagcgctggcggaagaggcggccaaaaagcagaagctgcgccgcgataacgagctcaacgacctgcgccttatctgcgatacagaacacggtcgccgctttatctggcggctgctggagcaggctggcgtgtggcgttccacatataccggcgagtcgctctcagcagcgttcgctgaaggaaaacgtaacacagggctgatggtcttctctgacgtgatggaggcatgccctgatcagtatctggtaatggctaacgaggccagagaggaaaaacgatga

SEQ ID NO: 237597 - DNA, 681 bp, Klebsiella pneumoniae
atgaacctatttgagcgcctgatgtatcgccgcttgtgcgatgagcagcctggtgatggcggcgaggcacctgctgcatctgaaccatcaccgactccggcgccggccgaaccggcgcaagagccagcggcagaggcaccgcctgcagatcctgataaaccggagtcatctggcgataagccagagcagggatccgataaagacaaaaagcccgaaactcaggctcctgagaaatacgagcttacggcaccagaaggcactgagctggattcgaaagccgttgagctcttcgaaccggtagcccgcgaactggacctgacgaatgagcaggcgcagaagctggcaggtctgtggccgaaactgcaggaacaaatgcagcagcgccaggctgaatcctggggtgctcaggtagaaaaatgggccgcagataccaaagccgataaagagatcggcggcgacaagttaaccggggcagtaggtcatgcgcaaaaggcgctggataccttcgcctctaaagagttccgtgaatttctggataccaccgggctgggaaaccatccggagatggtccgggcattcgcaaaggtaggcaagttgatgagtgaagacagtttcgtcactggccagagtagcggctcgccgaagaacgagctggtcgaagcgttttatccaaaaaaatag

SEQ ID NO: 237598 - DNA, 279 bp, Klebsiella pneumoniae
atgcctaagtataaagtcgctaagcggtcatttatcaatggccgcctgcatgagccgggtgacatcgttaacttcaatggtgagccaggtagcaacctggtttcactggatgccagcctgagcgaaaaggtttttacgcccagcgccgaagaactaaccgaactggaagaactccgcagacagtatgaagagatgttcggcgaagtgccgcatttcaataccaaagcggaaaccttgaaggcaaaaattgccgaacggcgtaaagaactcggggtgtaa

SEQ ID NO: 237599 - DNA, 612 bp, Klebsiella pneumoniae
atggcatcagtgatcaatatctgcaacatcgcgctggcgcgtatcggcaacagccggacgatgaacagcctcaccgaaaagaccaaagaggcatacacctgcaatcttttttacggaccagtgcgcgatgccgtgctggcagacaacgactggaactttgctatgtccagggtgctgctggcagacctgggcgacccggcgccgggctggttgttccgctaccagtacccgacggattgcgcgcgcatatcggctattctgccgcggggatacttcgggcctcatcacgcgctgcggcataagcctattttcgaagtaggcagcaatgaagacgggacgtcgcgggtgattcacgccaacgagtcgcaggccatgctgctgtatgttcgcagtatcaccgatccgatgatgtttgatgccctgtttgccgatgcgttgtcttggcgcctggcggctgaaatagcgatgccgatttcctctaatgccagtctcgggcaacaggcgatggccaactaccagcaggtgctggcggcggcaatgcagcgctcccttgatgagtcgcatgagccagagcaacctatgtctgacctcgccagcgtgaggatctgctga

SEQ ID NO: 237600 - DNA, 2481 bp, Klebsiella pneumoniae
atggcctattcactgattcagccatcactcgccggcggcgagatttcaccatccctgtacggtcgtgtcgatctggagaaataccagacatccctgcgccgctgccgcaacttcattgtgcgacagttcggcggcctggataaccgcccggggttccggtatctcggcagtgccaaatatgccgaccgcacagcgcggctgatcccgtttcagttcagtgtgtcgcagacgtatgcgctggagttgggcgattactatttccgggtctggtcgaatggcgcgttggttactgatgacggcggtagcccgatcgaggtggcgacgccctggcctatcggtatcttgtctgaactgaagttcacgcagtctgctgacgtgatgactgtctgccacaataattaccctccgatggagatccgccgctacggtcaggcagactggagaaccgcaacggtaagtaccgcaagcggcccgttccaggatatcaacacggatgacgatgtcaccgtctacgccagcggcagaaccggcacggtgacgctgacggcgtccagcagcatattcaaaagttggcatgtcgggaaactgttctacatggagcagaaagcggttgacagtgtcggccgatgggagactgataaagatatcagcgtcggagacgaatgtcgctaccaggaaaactattatcgttgcgttgatggcggagcgaatggcaccaccggcactgtggcgccgacgcataccacgggagattcatgggatggctgggggtatggcggccgcaacggcgtactttggcgttaccttcatagcggcttcggcgtctgccgtatcactgctgtagctcctgatgggctgacggctaccgccgacgttgtgccccgccaggacggggaaatagagcttcccgctcaggtggtcaccagcactttcgccacatacaaatgggctcattttgcctggaatgataacgacggctacccgggcaccgtaacctactaccagcagcggcttattttcgccggcagcaccggtttcccgcaaaccatctggtgcagccgtaccggcgattatcacaatttctaccgctccaacccaaaagttgacgatgacgcgatcacctacaactacgccgggcgccagctgaacaaaattctgcacctgctcgatgtcggtcagttaatcgtactgaccagcggcggcgagtttaaggtcaccggcgacagcaacggaaacatcaccggcaccggcggttttgcgatgtccggtcagtcattcaacggcagcagcgacctggcgccgattaacgtaggcagcgtggcgctgtacgtccagcagaagggatccattatccgggacctgttctattccttcgaccaggatagcttccagtctagtgacctcacgctgctcgcgaaccatcttttcaacggatacaccattacagactgggcgctgtccgtgcagccgttcagcgttgcctggtgtgccaggagtgacggcctgttgatggggctaacctatctgcgggaacagcaggtatatgcgtggcatccgcacccgctgacgaatggctatgtcgagtcgctctgcagcatcagcgagggtcaggaggatgcggtttatgcgctgatccgccgtacgattaacggcgcaaccgttcgctacgttgagcgcctggcgacccggcagtttactgaccaggccgatgcgttctttgtcgactctggcttgtcgtacgacggcggaaacactgacgcatcacgaacgatgacgatcggcagcgccggcggctggacgtatcaggatgaaatgacgctgacctgcagcgcggcgtattttgattcctccagcctcgactaccagatccacattccgtacaccgaggacggcaccagcaaatccatgcggctggatatcaccgaagtggtttcgtcgacagttgcgaaggtgctggttaaccgtgatgtgccggaggcgcttcgcggcactgcgcaagctacctggtcggttgcgccgaaggtgatctccgggctctctcatctggagggacagaccgttagcattctggcagatggaaacgttgagccgcaacaggctgttgctggcggctctgtgacgcttgagaatcattcctctgtggtgcatgtcggcctgccgctgtctgcgctgatcgaaactctggacgtgaacgtagcgagccaggctacgctgctggacaagaccaagctgattaaccaactctgcgtgatgataaaccagggccgctcggtaactgcgggcaccgatgaggatcacctgctggagtatccgcagcgcgaatgggagttctacgacgaccctattggcctgcgcaccggcgttatcgatatgaatctcgatgcggactggtcgcgtaatggtcgggtggttatcaggcatgatgacccgctgccgttgggcgtgctcgccattatcccacgcgtgacggtagggggctga

SEQ ID NO: 237601 - DNA, 471 bp, Klebsiella pneumoniae
atgcgcaaggttgagatagttccggtgaccgaagagcaaattgccgccatgctgccccatgtccgccaggctgaccgggacgaattcatggctgcagctgggatgcagccggcggaagtcatcgtgcgtgcgatgaaatcggcttcagtttcagctgcaggcctgattaacggtcatgtggtgaccatcttcggcatatctccggcatcaatcatcaccggccggggcattccgtggctgttaagtaccgacctgatggagcagcagcctgttactttccttcgccattgccgcccggttttgcgtgacatgtcacgaggatatcgcttccttgaaaattacgttgatgcgcgaaaccacgcagctaaagcctggcttcactggttgggttttcgcctggaggaccctgcgccgtatggcctgatgggcttgccttttcatcgattcacaatggagaacaaaaatgtgtga

SEQ ID NO: 237602 - DNA, 558 bp, Klebsiella pneumoniae
atgtgtgaaccgaccactgcagttttagccgttaccgccgtagctggcgcgctgagtgcttatagccaggtccagaccggcaaagcaaacgccgccatcgcaaatgccaacgccgatgcacaggagcaggccgggcgtgacgcagttaacaccggaaacgaccaagcgtaccagcagcgtatgcaggcgaagcaggtagcggggaagcagactgttgctctggcttccggcggcgccgaccttaccagcggtaacgcgctggatctgactaccgagacggcgcaattcgggcaacttgatgcactgacgacgatcaataacgcccagcggcaggcagcaggcttgcagttccaggctggtgttagtagggcgcaggggaaactcgacaggcagagtgcaaatctcggtgcggcaaccacgttactgaacaccgtctctcagggttatggtgcctataaaacaatgggtggaaccagtcttggtaactctctgacgaagaaagcatccaccggcgggtatggcaccgcgtgggataaataccgcacaggatcgttataa

SEQ ID NO: 237603 - DNA, 2745 bp, Klebsiella pneumoniae
atgccaacagtaccgcaataccagcgccagagccagacgcaggccgccccggttatgaccacaaatttgcgcgtgccggagaaccctctggttcagggcattcagcaagcagccggcaccgccgtaaacatgatggtggaggagaagcgtaaggctgatgtggcgctcagccaggatgcgctactgcaacttaatgaatttggcgacgaccagatcaataaccctcagaacgggctgatcaccaagcagggtaaagctgcgctgggccagggtgacgtggtcatgcagaacatgcagcaaaaggcccaggacctgctcggcacactgccagatggcgaggcgcgtcagcagctggcgctacagttccggcagtcgctgcagtcctaccagaaccaggcgcgccgctatgaggtgaaccagtttcagcagtttcaggatcaggcgtttacttctgggaactccctggccgtaactcagtccaccggtctttataacgataacccggccttcgtgggtcttgccaaacagcgttttgatgccattgatcagtatgctgatgctcatggcatgcctgatgaatggcgcgtgcagcagaaaacgcagctgaaggagcagatggggcaatcggcctgggtcggaaacattgctcaaaaatacagtgaactacttcaaacaaacggcgaaccaggagatcttgatggtgttggccgcgttgtggctcacggtaactctggcgcagccaggggcctgaggaataacaaccccggtaatattgaagcaggttcaaacccctgggaggggcagacggggagtgatggccgttttgctacttttgcgacgcccgagcatgggatccgcgcgctgggtaaaaacctgctgtcgtaccagcgccagggatacgacaccgtgagcgagatcgttaatcgttgggcaccggccagcgatggcaataacaccgatgcttatatcaaggcgctgtgcagcgctcttggtgtgggagctgatgacccgcttgatgtgtccaaccctaaaacccttgcagctttgtgtgccggtattgttaagcatgaaaatggcagtgtcccatacagtgctgaccagcttgaaactggcgtgtcggctgcgctcgggttaactaaccttgattcaccaaagcgctatacgggaaatgccgcttttgatgctatgagccctcaaatgcaaatgcaggcattgaggcaggctaacgagcttaataaccagtaccgtcagcagtatgctgaacaacttagctctgtagtgaaggatgcatattcagctcttgatgaggggcttagaccggctcaattaccttctgaggctgattttatcagggctaatggccctcgcgttggggcgttgaaatggcaagatatgcaggcgcagatacaatatggcggcgtaattggtgcagctaaggaccttacccctgaaggacgacaggacattcttgagcgacttcgcccacaggatccaaatgctcctggctttgcagctaaccagcaacgatgggagaaaatgcagagcaaatttaagcaaatggatacagagtggcaggcacaacaggggcgcaaccgcttagtttcatccttgcaaaataacttccccttagatcctaacgacaaaaataaccaggcagccgtggaccattactttgctcaggatattgcgccttcgttttcgatatctgatccgcagagcatcaatgcgctggccaccgtcacaactaaaagcggcatgataccaacgcaggtcaaaactatgcttaacagcggagcaacctcaagagatcctacactggttgttcctatggcaaaattctacggccagttattcgataataacccggcggccgcggcaacccttgataagggaacgatggcattttatgggaaggtttacgattattcccgcgctggagttccggaggataaggctgtggacatggcatatagccaggtattccagcaggatgaccggatgaaacagatgctttccactgccatgcgagacaaaaaatatgtcgccgcacggacaactgctgcacaaaacaacgctagcagcctgacctcatttggttcgtggtctccagacattaccgatccaggcaaatcaaatgcggcctatcaacgtgattaccagacaatctacgatgcaaactttgcacagactggcggcgatgcagaccaggctgagaaaatgaccaacgccatgatcagaaccacatggggcgtttctactattaatggtagtgcagaggttatgaaatatgccccagaagcgctttatggggtgaacagtggatccggtaactggatagaaggtcaatggtatcaggagaaaaacgagcttaaagctaaagcttttggtggtgctcgtagcgatactgatttggttatcgttcctgatggtgtcacgccaagagataaaagctatgcggtcatggtgagacagaaaaatcaggacggttacgatgatgtccatccatattacggtgaaaatggtctcccagttcgttttaaaccagatcagcagacttcaccgatgtacaaacagaccatgcagtatcagcagcagagagtcgatgaggccagagagaagagagaaggcaacccgttgccacagttcagcaacaacgaagggtatacgccgccagatctgactaagccctttggctatggttcagctaataaccttccaagcaatatttacgcagggggcaaataa

SEQ ID NO: 237604 - DNA, 522 bp, Klebsiella pneumoniae
atgcaagactgcgtatcagaaaagccaaacgtcaacttgctccagcaagctgatgaagaagacagatcttccgaagagctagcggaagaaattgaaggggagttggtcgagaatcctgctgtgctcgagcgactcctcgaaagaccacagatcaagatgctcatcagccagagctcatttcgtggccctatcccgccacctgcaatgctgcgcgaatataacgaaatagtgaaagatggcgcagaacggatcatgacaagaagtgagaaagagcaagctcatcgtcatggcctacaaaataaaacagtaacaggtaacattgataaagataagcgtggccaatggatggcattcattatcacagttcttatattagttatagctactatttttgcatggaaaggtaatactgtctttgcaggaacactaataactattgacctaattggcctagcatccgtatttattatgggaagaaccagtagcccacaaagaaaaccgaaaaatgatgaagaagactaa

SEQ ID NO: 237605 - DNA, 681 bp, Klebsiella pneumoniae
atgaacaccaaaccttccattttcaatttcgaatcagactcagctattcgcgccattatgatcgatggcaatccttggttttttgcatccgatgtttgccgcgcgattggcatcgcaaaccatcgtgatgcagttcgcaaacttgatgatgacgagaagggcgtcggctcaaccgacacccttggtggtgagcaagaatcagttatcatctccgagtccggcctctacactcttatcctccgctgccgcgatgcggtgacgcctggcaccatcccctaccgtttccgcaaatgggtaaccagcgaagtgcttccgcagatccgccgcaccgggcgttacgttcgcgatgagctgtcgccggcggataaagctcagaaggtggtggccagtttcatgcctgccatcctggaagcgatgaagtcggaagaaaagcagacctatcactacccgcttaagccgaactaccgtgatcatattcacagtccggaaggtgtgctcggtctggttgagcactcaatgctgatggatatgctacgcaagatggatgccgacgggcatgatgtcgctggggccgcggcggagttaacgactatgttctgctacatagctggcgtcagtaagtgcctgcgtgaaattgagacgcacgctcagtatgtgatgtctcaagccaagggattctga

SEQ ID NO: 237606 - DNA, 261 bp, Klebsiella pneumoniae
atgccgcagcagtaccatcatcccctagaagatgggttcacggagagaattcacacgccagcaggcgttcgctccctggtcgagagatcgcacttaatggatttgttacgggaacttgaaaaagatgggcacgatgttagcggcgctgctgctgagttgatcgccctggtgaactatgtaaccagctcccagttgtcgatgcgggacctgcagacccacctcgactactgcgccctgcagttgaggcagcaactgaaatag

SEQ ID NO: 237607 - DNA, 303 bp, Klebsiella pneumoniae
atgaatatgagtattggtgccaagcttaagcttatgcgtgaaagtgagcggctgaccagtcgcccggaagtggcaaggatgctcggaattggtaacgatgcattatggcgttatgaagaaaacaaaaccgtaccaagcactgaagtgataacaaacatcttgaatcacccacgtttcgagaaatatgccctgtggtttatcacaggaaagattgctcctgagtccggtcagatcgcaccggttctcgcacactttgggcaagacgaaataacctctcagccctcagaccagaaaattggctga

SEQ ID NO: 237608 - DNA, 471 bp, Klebsiella pneumoniae
atgagctatctgggaagcaaagcggccagcggtgtttataaaaaaatcattgccgaaatgccgccgcatgatacctacattgaaatgcacttgggcggcggcgctgtgatgctgcgcaagctaccagcgctgcataattgggggatcgatattgacccggaaatcgtcgaggcgtttaatcagggcaaccctgattttctggatagactggcggacaccctgtttattgatgctggcgatgccgtcgagttcttgtgttgtttcgattacgtctctgccggccgcgtcttaatttattctgatccgccttatctccatgaaaagcgcagcagctccgcgggctatcagcatgaaaacacagttggcgatcattgccgtctgctgcattgcttttgctcgatgcctgaaaatgtgagtgtaatcgtatcgggcaatcccccttcggttcatgacaacgccttaccgggctag

SEQ ID NO: 237609 - DNA, 759 bp, Klebsiella pneumoniae
atgaaaagtgagaggtttaaaattacagaatgggtggcggtaataactttggcaattggtttgtactgttatttgtataattatgcttattggaaatactttggaataaattcttatgattacttctcatatattgatgggcttcagcgatccgttcccttgctcgtttttacgcttgtaacagttaattctattttgtttttcttttttttcttattgtatttgataaagagaaaggcattgggtgtcttcaggtttctaaaaaatatatataaagatgtgagttcaagttactacctagcttggtctgttttattgttgtttttttatactttgtctagttttttagtgatgccaattcttaatattgaaggcttgtcatatgagcaaaagaactttattgtaggtgcgttgcatgcaatttttgttgcgtttttttcttcagcgatatcattgttttcttttgttaggagtattgaaaggaaaaaaaagataaaacatgctatttttttgttttttatgtccccgataccatttcaaatagttatgtcaatactttacatacctattatgaatgcatatagagatgagaatacagttaaagcacaagttataacaaaaaatggtgatctgcgttcatcgcataaaatgctagctttaacaaaagactttgtatttatcattgatgataaaaatgtagtggtaagaaaaattagtgatgttgaatatatattttatggagtcgacaaggttaagtag

SEQ ID NO: 237610 - DNA, 261 bp, Klebsiella pneumoniae
gtgtttttaggtcgcttttttttgctgcgcctggcgcaatgcggcctctgtatttttcttctggtactacgcaactgcggctgcgtagttatccgcgcgctgctctgtctcaacccgcagctgttcgcaccagcgccgcacttcctcttccggcatcagagtcatatctttcgcggtagtgacttttgccccccccatgtcagcgcggtttcgtcatcaatcgaggtgcgcatgccgcgcgcggtacgcgtgaaagcttga

SEQ ID NO: 237611 - DNA, 459 bp, Klebsiella pneumoniae
atgaagaaaatttgtattgacttacagggttcgccaatccttggaatgctacctcagcaaggcgattttgcttcggtacgcgacgaatttgatgcctccaataggtatgatcaggccttgaattttgatgacataagcgttgtcaccttggtatctgagggtaagattattggcttttgctcttatttttttcatgcatttaatcttaatgaaaatgaaagaattatgactacaactattgatagcgttttcattattgaaagtgagcggaagaaaagtctctcgaaaatattagcacgctatgtggcatgcgaactgctggagtttgaaagttcagatgaaccctgtggatgtcatctaacgcatgaatctactagcaatatcgtctctcaagagggcgggcgattcgttggtgatttgtatcgaattttctcggccctaaaaacaataaaggtatag

SEQ ID NO: 237612 - DNA, 639 bp, Klebsiella pneumoniae
atgagcaacgatccgtcgtttcatcagcttgatgaagtgtttgcggccattctggaaggggcgtccgtacaaggccgcctgcgcatggccagaggtatggccacgatgctgcgccagagccagagccggcgcatcgggaagcaggaagatccggacggcacgaaatatgaaggccgccgccgcaaggtactacgcgcgcgtgcaggcatcaaattcatttggcaggggcaggaaagaaacctgcgcaactggcgcacgacccgcagccagcgggggcgcatggtgagcggttttgacgtggagcgcggggcgcagcggtcattctatcgcgaggatattgagcgttatctcgatatcaacctgagcgaaacgcgccacaataccactacggccgagccgatgttccgacgcctgagaaccgcgcgcttcctgaagtcacgcgccacggctgatggcgttgaagtgggctattccggcgttgctgcgcgtatcgccagagcacaccaggaagggctacgcgatcggattaatgacggcggcgcgatggcggactatccgcgccgcgagctgctgggcctgagcaaagatgaccgcacggccattttccgccacgtgatcaactcgctggaggggcgctga

SEQ ID NO: 237613 - DNA, 234 bp, Klebsiella pneumoniae
atggctggagaaatgaatcaactgacagaaaaagaacagattgtattatcgctgatgaatttgctggggctggatacgaatctgacagcgcaggcaatggagtttattggcgacagcgttctcaattatcagcttctcatcagatactttagtgccagcgagttaacagaaaattcagcaaaattaacagaggcaacagataaagcaatgaacgcaaaggtgctctttgaatag

SEQ ID NO: 237614 - DNA, 1158 bp, Klebsiella pneumoniae
atgagtaaaatattcaaatccatgataacagttgcaggcagcaagaaaatttctgacgctatagttaacggggatagggttattttcgctcaaatgtccgtaggtgatggcggtggtaatgcaacaactcccgatgaaaaccagacctctttggttaacgagtgcttccggactcagcttaacagcctgaagctgtcagataccgaaaatatcattatcgcagagatgataatcccgccagaagtgggtggatttaccatcagagaggccgcgctgtttgatgatgccggtgtgtgcatggcggttgccaacgtcccggaaacctataaacccgctctggcagaaggttcagggcgctttactatcctccgcatctggctggcggtcagcagcaccgaagcggtagagcttgtcgtcgatccgggaattgtgctggcgacagtcgaagatgtgattaacgctggtaatgaaatcaaagattacaccgatgagcagctgagcgaacatgcaggctcacgaaatcaccctgacgccaccctgaacgaaaagggatttacccggctgagtaatgccattaacagcaacgaccaggataaagccgccaccccgctggcggtcaggctggctattgaagcggccatcaccgccgcctgggagatggacaaccccgtcggcacagtgaagttctacgcgcagaatgtcgatcctaatgaacgctatccggggactgaatgggcgtataccggggagaagaaaaccattcgtgtcggcagcgctaacggttcagatattggcacaactggcggtagtgataccgtcaccattcaggaagccaacctcccggcagtgcagattaacgttagtggcgaaatcagcgaccacccggaacaaaccctgaaaacggaacctgccggcaaacacaagcatggtggagttccaagccggaaaaacccgtgggagattggcggcgacattagccagcaatttaaccccgccaacctgggcgaaaccgacgaagtggacgatcatgaccacgaggtgaccatcccggagcaagagcacaccttcagcggtaaaacagacaatctgggtagcggtaccgctctaagcgttgttgaatctcacatcctgctgatgtgctgggcgcgggtggcgtga

SEQ ID NO: 237615 - DNA, 516 bp, Klebsiella pneumoniae
gtggctattccgaaaaaactccggctgttcaccgtttttgtggatggtgtgaaccatatcggcaaggttcccagcgtgacgctgccaaaagtgacgcgcaagaccgaagactatcagggtggcggcatggtgggcgcggtggctgtcgatctgggactggattcaggggcgctcgatgcgtcaatggttgttggcggtgtggtcgaagagctgatcctgaaatacggtggtgatatcgacgaaatgcgcctgcgctttgtcggcgagatttacagcggcggtaccagctcactgctggaagttgagatgcgcgggcgtatcaccgaaatcgatccaggtgatgccaagcagggtgatgacaccaaccacacttacgccatcaaaaacacctactacaagctgtcggtggacgataagccattgctggaaatcgacctgctgaacttcatctacaagcggaacggtcagaatctctatccggatcgcattatgtcggcgctgggcctcggcagctga

SEQ ID NO: 237616 - DNA, 1182 bp, Klebsiella pneumoniae
atgaccgacaactttttccacggggcgcgcgtcagggaaaataccgacctccagaccgcgatcaatgacattgattcaacggtcattggtctggtcgcggtagccgaagacgccgaccccgccaccttcccacttaacactccggtgcttgtgacgcgggttatcagcgtactcggcaaagcaggtaaaaccggttcgctctacaaatcgctgaaagctatttccgaccaggtcagcacccgcgtgatcgtagtgcgcgttgccgaagctgaggccggtgaaggcaagccaacgcagtcgcagttgattatcggcggcacgcaggcggacggcagttacacgggtatgtttgcctttctgacggcggagcagaaaaccggctatcgtccgcgcattctcggcattccggagtacgacaccgccgaagtgaccgcccagctgcgggttatcgcgaagcagctgcgggcgttctcatacagctactgcgacggctgcgacaccattgcggaggcgaaaacctaccgcgagacgtttgcggaacgcgaaggcatgctgatctggccgaacttcatcgcctataacccgctgaccggtgtgaatgaagaattcccggccgtggcttatgcgctgggtctgcgggcgctaatcgacaacgagcagggctggcataaatcactgtctaacgtgccggtcaaaaacgtgctggggattgcgaaggacgtgttctgggcgttgcaggcggaagactctgacgccaacgagctgaacgccaacgagatcaccacgctcattaagcgcgatggcttccgcttctggggcaaccgcaccaccgacaccgaagaattcattttcgaggtatacacgcgaaccgcgcagattctggcagacagcatcgcggaagcgcagttcaccaccgtggataccccgctgacccctgcgaacgtgaaagacgtggtgagcgggattaacgccaaacttcaggcgctggtcacggcgggcaagctgattggtgcggcctgctggtatgacgtcgttgataatccggtaacgggcatacgtcagggtaaagctgtcgtgcgttacaactacagccctgtgccaccgctggaagatctgacgatgatccagacgttcaccgatcagtattacgaatccgcttttgcatcgctgggaggtgaatag

SEQ ID NO: 237617 - DNA, 321 bp, Klebsiella pneumoniae
atgcattgcgtcaagcgctgttttacccgcgccattcaagccaccatccacactttgcggttcgtcgacaataataattggacgtgtagcacgtatcagatcgattggtttatccagatcgtcaacggtcgttttttcactggactgatagagcttattgacgtcttttttattaattgcaccaaccgtcattaccatgatctgcataacagagctggttgcaaaatttcgcacatccgcaggtttagacgagtcatacagatagtattcgtatggaattcccgcatagaggcttttaaaatgttcttcagtgatttgtag

SEQ ID NO: 237618 - DNA, 165 bp, Klebsiella pneumoniae; identical to SEQ ID NO: 231180

SEQ ID NO: 237619 - DNA, 399 bp, Klebsiella pneumoniae; identical to SEQ ID NO: 234110

SEQ ID NO: 237620 - DNA, 741 bp, Klebsiella pneumoniae
atgaatataacggattttctaaaaggctacagaaaccatccaatattatttgttggagcaggtttcagcatgagatacttatcaatttcttatagctggccggcactcttagagaaaattagtattgacctgacaaactctaatgaactatataaagatcttgtcagagaaaacagtaataaagatggtattatagaccttccaaaagtggcaacgcaattagagcaaatatttgatgcaacacttaaagcagataggaatggaaagttcaaaaatatcaatgacttatactacaactcggaagatacctcctcaaatattagcagatttaaaatctatctttcacagttagtgaatatcacagatttaaaattaggagttcaagatgaaatatctgaattagtaaaagcctccaaaaatattgcctctgtgattacaacaaactatgataattttatcgaaagtgcaattggttataaccctgtaattgggaatgatatacttttaagcaatccttatggttctgtttataaaattcacggatgcgttagcaaaccagaatccataataataactggtgatgactatgttcattttgataaaaaatatgagttgattcgtgctcaactcctatccttatttatacataacccgattatatttatggggtatagaataggtgaccctaatattaaaaaaagtattaaaaacaatattttcatacataccacctcgttctaa

SEQ ID NO: 237621 - DNA, 804 bp, Klebsiella pneumoniae
atggctgcgatagaatcgtttaactgtgaacggcagaaattgtggggcatgaatatcctgacaaatgctcacaatctgaaggctggggacgaggtttacggaattgaagtcgacacgaatgtagatggtgtgctggatggggccggaaactattgcggggtttacattgcgggcgctggtgatttatccgggtcgtctgggtctgacggcgttcgtgttcagcgattgcgagatggcgtagccaagtggcagtacggccagcgcatttttgattccgtgaccgggctgggaatatatgacgcaagcaactactcaatattcgcatcgggtaacgcccctattgcccggcggcgcgatacgcaatctggtgtatggtcgtttatccactcggtttctgcatcagttataccctggggagtggatgattatggcgatacgtattcccggcggctgtatttgggtacgggcaacggaaaagcaaaaaacagggtaaacctcgacggtggtgtgaaattccataccacatcctcagctgtcgcgtgggggccaataagtgccggcgggtattctgaaaaagatgtgacgacactgtttggtatttctattgctgactggacgaactacacactggacgtgacgccagtcggatacgccgggtcaatgcctgttgtggctgttcaggtttatatcaacagcgcgaaaacgcaggcgtacgttcgaatcatcaacatcagcggcgtggctttgtccgagtgtaatgtaggactaaatgccaaactatgcggccactcatcaacaaactaa

SEQ ID NO: 237622 - DNA, 294 bp, Klebsiella pneumoniae; identical to SEQ ID NO: 190812

SEQ ID NO: 237623 - DNA, 126 bp, Klebsiella pneumoniae
atgaattattttatactacatctactgagcaatcaggtggaggaagtcatggcggtggcacgacagtggttaaagatagaatattataccaatgtagatgacttctttaatacaatcaaaaaataa

SEQ ID NO: 237624 - DNA, 708 bp, Klebsiella pneumoniae
atgaaatccgatcagcacaacactatcctcatcgtcggcgcctcgcgcggccttggccatgctatggcgacgacgttcctgcagcacggctgggaggtcatcggcaccgtgcgcgatttatcatcccacacgccgctccacgacctggccaagacgcatcccctgcggctacgcctggcgacgctcgacatccgcgatgaagcccagctggccgcgctgcaggcgacgcttcccccggcaagcctcgatatgctgtttgtcaatgctggcaccaccaatcgtgacccatcgcagaccattggcgacgtctccaccgaggagttttaccaggtgatgctcacaaacgccctggcgccgatgcgggttatcgagcgcctgcagcaggcagttaaaccgcaggggctgctcggcgtgatgtcctccggccaggggagtctgaccaataaccttaccggccagcgggaactctatcgcgggagtaaagctgcgctgaatatgttcatgcgcagcttcgccgctcgcccctcctcggcctcccatccgctggtggtgatggccccgggatggatccgcaccgagctcggcggggcagatgccccgctgaccatcgaagagacgatcccacgcctggtgaacgtcctgctcgacaaacggcaacgtccgggactggagtatctcgattaccagggccgtaccgtgccctggtga

SEQ ID NO: 237625 - DNA, 207 bp, Klebsiella pneumoniae
atggatctgcataatgtgctgctcggccaggcgctgttgctcaagctcttgctggggttcttttccttcaacaagccaggcaccatactttttcgccagctcattggccgtcaccagtttcatctcaggccagatgcccaactggatgaacttctctttcttccctttttcaacgtagtaacggaaataaaaaactttgctgcctga

SEQ ID NO: 237626 - DNA, 225 bp, Klebsiella pneumoniae
atgatttttctcaaattagcacaaaaagtggtggttcagcaccagagtgcatacggttgggactctgaaacagtctacgagcctgtgtttgtagccgcagaccacattatcagtatgtttttcgccgggctgacagtcctgaaaatgacctccggagagcgcattgaagtgaaagaaaccccggaagaaatcaccgccatgatcgctgcaggagccgccaaatga

SEQ ID NO: 237627 - DNA, 204 bp, Klebsiella pneumoniae
atgagcatgagcaacagaaaagccagagcgctcctgtccagaggtgggaaacactggtacctgcggaaatgggtgagggtaagcaatcgccgctcagtcgtcctggtgcattcctgtaggcacgtaatgggtcgtaaggataaaaactccgctgctcagaaccgctggaaaaaccacacacaccgcacggagcgtgcagcatga

SEQ ID NO: 237628 - DNA, 150 bp, Klebsiella pneumoniae
atgaaaatacgtatcgttttacaagaattaatggaagacggcgttttaacaacatactcaaacggtcatgttgagatgctgccatacctaatagatgaaaatggagaggagtacgttgagatgttccccaatgatgttgaacaacattaa

SEQ ID NO: 237629 - DNA, 780 bp, Klebsiella pneumoniae
atggggcgaaaggcgatagattacacaggcaaaaagtatggaatgctcactggtttaaaaaataccgggcagaaatttcataagggatttgtgtgggagtggttatgcgattgcggaaacacgcatcaagcacttccccagcatgtcacttcaggttcgactaaaagttgcggatgctaccgaaaggaaaaatccgtgattaaagctagagagacctatgggtacttaaccgccattaaaaagactgaagaaaaatacttcaattcttacaagtggttatttgtctgcgtctgtggaaaatttttatccctttccccgtcccatgttatgggggatcagaaaagctgcggatgtatgcaacattccaatcctcacaaaactcatggcatgacaagctctcctgaataccgatcttggcaggagatgaaggccagatgtggcggtaaggacgatgtttccatcaaacattatgttggccgtggaatagatttttgcgagacatggaatagcttcgatagattttatgaagatatggggcctagaccagcaggaacatcccttgagcgcatcgacaacgatcttggttactctgcggcaaactgtcgctgggcgactcaaagcgagcagatggcgaatacaaggcggactatcagggtttttgttgacggggtggaatattgtctcaagcatgcctgcgctttaaggggtattaattatgacaaagtcaggtcaagaattagaaaaggaatgcaagctcaagaggctcttgatatggggtga

SEQ ID NO: 237630 - DNA, 654 bp, Klebsiella pneumoniae
atgataaaaaagttttttcttctcgcgctttcgctttctttgtcagggtgtgccttatctcctaacgaggcgataaactaccagaaagaacatgattttgagaatgtaacatttcagacaaaatctaatgaaaggctgtctgtgtttaatttaagatataaattcaagaacacaacaggaatggaacttccaaatcaaaacacctatgaatgtcaaagagatgcattatgttattatggaaagtatgctagtgcttatgactctctaatggaaaagtaccaagaagaaaaagataaacagaataaaatattcgctaagcagaaagaagctgagtgtcaggctagtaaggagtgtatggccaagcgtgagattgatgccgcgtcttacactttaaataatgtctactattctctaatggcccgatacccataccagcaggctgactctgacgccggggtaaggcatatgtgccgggtggctggagcggctcaaagggaaggcgtgacccttgagtttatgaaacagcacattagcttaacagaaggaattgggccggaaatgagataccaaataatccaggttgctgaggcctgctggaaaatgagcaagtacggcgttccggacggtaccacgcagatcaagtcgatgtactag

SEQ ID NO: 237631 - DNA, 234 bp, Klebsiella pneumoniae
atgaaactttccatcgtttacaccccatcgttaaaaaacataaaaactggactgtcactgattcgtgtcggcatgtcgcttctcatcggtaagggagcagtgattgagcacgaaatgaaatcatcagaccttacagatgcgatcctgaaagatttgcggaaacagcaaatgaacggtgaaatcgacctcacaatgagcgagctcagggagtctctttctcgcatcctggtgtag

SEQ ID NO: 237632 - DNA, 4404 bp, Klebsiella pneumoniae
atgacaatcaccgaaacgcaaaaaactgctcaattagcagcagatgccgccgttagtgccgcagaagccaaacaatacatgctggaggctgagcaaggatatcaggatactagtgctgccgcccagcaagcccaggatgcagctggatcagctcttttatccaagcagagcgcggctacatcagaagaaaattcactgcaatatgcaacagaggcgggagttgcaagagatgaggctgtaacagcagcatctaatgcctctgaatatgcactgaacaagttcacattctataaaacgccgagcgatcctgatggcaccattgcagggctggcagcaactactgatggccagtcgttctgggtagcccagggcccagatgcgctttccgctgcatggcagtatcaaaacaaagcaggcgtggccgtattgcaggcgaagcagccgggtacagcggccataacagggacaatccgcgagtttccgacgctggcggctgcgcaggcggatgcagacgccgggaacattcctgttgggtcaacagcttattatagaatcgatgatgatagggagttggctgctgagatcagcaacaacaatggagtgatggaagaaactggtagaagcattccatcaaagaaattagttgatgatattagcaaatatgttgctgataacgacatgctatctccaggtctcaatatttataattatcgtaaatcaattgatggcaaataccttaatgaacagggtgttataagtgacaacccggaatatttcctttctgattacatgatggtaagtcctgcaatgcaggtggcatcaaattacaacttgagatttgtacactttttcgatgatcagaataacctactaagctatttaacttttgtcacgcagttcacaacaccatcaaacgctcgttatatacgtatcactggaggaattgactccaaaacccttttgcaaatagaggcagggccattaaaaaccgcgtttaaatattatcgtgaatatatttctgaaactctccctgatggaacgccagtttcagcaaaaaaaataatgggagtaactcccgggaaaaacctattcaacaaggcaacagcaacgcagggatacgccattaatgaaaatggaaatctaatcgttgccgagacttactttgtatctgactacattaaagttgcatcaggcacaacgctgcggccatctcagccaggaagatatattaacttttatgacgccaataaaaaatggctgtcgtctctccagagtcaaaacggggcttttacagtgcctgcctcggcggcatatcttcgcatttcggtactgcttgcgagaattgattacttccagcttgagattggtagcaacatgacggcatatgcgcctttttcattaacggcagcaacttcacttgacggtgaggggttaaagtacccggttaatgagccagatatctatagtattggcctgttcaatgctggaaagaatatttataacccctatacactgaccgctggttatatcgatgagaatggttttgttgttccagttggaacgacatataaattttctgactatcttccagttaaagcatcaacggggtatgtaggaaataaaaacatgcgctttataaacatttatgatgcgaataaagcgtttatttcgactcttaccagcacgacaacattcacaacgccatctaatgcggcatatgtccgggtgacacttgctttagcaaatatttctggatttcagttagaagaaggaagcgcagcatcaagttacgaggcttttagttactccattaaaagcacgcttccgcatggtgagccagtcaatattgatacacatgtggatgtggcggccataacagggacaatccgcgagtttccgacgctggcggctgcgcaggcggatgcagacgccgggaacattcctgttgggtcaacagcttattatagaatcgatgatgatagggagttggctgctgagatcagcaacaacaatggagtgatggaagaaactggtagaagcattccatcaaagaaattagttgatgatattagcaaatatgttgctgataacgacatgctatctccaggtctcaatatttataattatcgtaaatcaattgatggcaaataccttaatgaacagggtgttataagtgacaacccggaatatttcctttctgattacatgatggtaagtcctgcaatgcaggtggcatcaaattacaacttgagatttgtacactttttcgatgatcagaataacctactaagctatttaacttttgtcacgcagttcacaacaccatcaaacgctcgttatatacgtatcactggaggaattgactccaaaacccttttgcaaatagaggcagggccattaaaaaccgcgtttaaatattatcgtgaatatatttctgaaactctccctgatggaacgccagtttcagcaaaaaaaataatgggagtaactcccgggaaaaacctattcaacaaggcaacagcaacgcagggatacgccattaatgaaaatggaaatctaatcgttgccgagacttactttgtatctgactacattaaagttgcatcaggcacaacgctgcggccatctcagccaggaagatatattaacttttatgacgccaataaaaaatggctgtcgtctctccagagtcaaaacggggcttttacagtgcctgcctcggcggcatatcttcgcatttcggtactgcttgcgagaattgattacttccagcttgagattggtagcaacatgacggcatatgcgcctttttcattaacggcagcaacttcacttgacggtgaggggttaaagtacccggttaatgagccagatatctatagtattggcctgttcaatgctggaaagaatatttataacccctatacactgaccgctggttatatcgatgagaatggttttgttgttccagttggaacgacatataaattttctgactatcttccagttaaagcatcaacggggtatgtaggaaataaaaacatgcgctttataaacatttatgatgcgaataaagcgtttatttcgactcttaccagcacgacaacattcacaacgccatctaatgcggcatatgtccgggtgacacttgctttagcaaatatttctggatttcagttagaagaaggaagcgcagcatcaagttacgaggcttttagttactccattaaaagcacgcttccgcatggtgagccagtcaatattgatgcatcggtgagtgcgactactccagattatttcggacttgagagattgagagagacgcatcagcgacttaataaattgagctttggcgcaaccgggctaacggcaagattgacgtgggcgatgattggcgatagttataccagagatacctcacgctacccacttcgcagcgctcgccggctctggtccatttatcagagcggcgcgacgaacgtttcaagcggaccgattgggtggggatatctgtctttcggtggcgctgatactaccaactcgaaaaacggcagcataatcaacccaaatgcggttacttcaaacgggttcgtagggacttattacggtggcgattctcctgacatttctgtaatgcaaagctctacagcaggagcaaccctgtcctggggtgaggatttcaggcttggacgcactcatacccttcttgcggagggtggaagtggcgtcatcagttaccttgcgactggaatgagtacggcgacacagattgacttatcagcgttagctcctgggattcaagccattccgctaaacgatatccctaccacaaatagcggtacgttcaccattactgttatttctgggacagtgaagctctacggcatgaacatagtagatgcatccgctgcgggagttgtttgccacaaactgggtgcaagtggatcgtcatctgcagactgggtagcccgcgatgctactcgctggaaaacatcatttgcaacgctaggcggagacctaacatccatcatgctggggacaaatgatcagggcgctggcatgcctccttctacgtttaaaagcaatataattgagatggttgatagggttcgggcagcgagaccaaccactgatgtacttctggtctgccctcaggaaaaccagagaacaaacaatgcatacccaatgtcagactacgcaaaagcaatgtatgagattgcattgaatgatcgagattgtgggttcctgtggttgcaaaatgactttggcgttaagccagccgattacgcgtatggcagttccaggccatggatgatcgcagatggcattcacccagatcccgattctggtggttatgctattgttgcagcgctaatgcgtgcgctggggctacctgccgtctga

SEQ ID NO: 237633 - DNA, 987 bp, Klebsiella pneumoniae
atgcacgataaggcttttacttttcagacgcttcgcccggataccattatcgatgggttattcgatctgggtatgcgggtggactccggtctcaccccgctaaacagctatgagaaccgcgtttatcagttccaggacgaagagcgccatcgctatgtggtaaagttctatcgtcctgagcgctggtccgcagaacagatccttgaagaacaccagtttgcgcttcagcttgtagaagatgaagtgcccgttgctgcgccgctcttatttaatgacagcacgcttcatcagcatcagggattctactttgccgttttcccaagccttggcggtcgtcagttcgaagcggataaccttgatcagatggaatgggttggccgctatctggggcgcctgcaccagactggccgcaaacagcgctttactgcccgcccggaaattggcgtgcaggagtacctgctggaaccgcgtcaggtgtttgagcaggcgacgctgatcccctctggcctgaaggccgatttcctgaaggcgaccgataaactcattgctgccgtcatggagcaatggcacggccgcgggaacacgttgcgcctgcacggtgactgccatgccggtaatatcctctggcgcgaccgaccactgtttgtcgacttagacgatgcgcgtaccggcccggcgattcaggatctgtggatgctgctcaacggcgataaggctgaacagcgtatgcagctggagactattgtcgaggcctatgaggaattcagcccctttaacagcgatgaaatcgcgctgattgaacctttacgcgctatgcgactggtttattatctggcgtggttgctcagacgctgggacgatcccgctttcccggtcaatttcccctggttaaccggggaggattactggtgggggcagacgtcgacttttcttgagcaggtgaaggttctacaggaacccccgcttcagttaacgccaatgtattaa

SEQ ID NO: 237634 - DNA, 1137 bp, Klebsiella pneumoniae
atgccctctccggaaagtcctttagataatctgtttgtttcggtttatcgcgcgtttattattgcccagtgccatctttgtcagggcgatctgggaaaagccgggtggtatgcagagaaaacgttgcgccaggctgaatgttataccggtacccagtcgaccagtggcgcgacgctggcgccgctgctggcggagatagcctatgaatgtcagaggggtgactcgcccgagcatctgttagccgaccggctcgaattcatcgaccgattcagtccacccgacgcgctgagtcgttgctatacctatctcgcgcgtcaggccttagataacgatatgccgtatgaggccgagcgattgctggagcatgcgcagcgtcttgcggtgtctcgcggctggcaacggctccaggccatgttgttagccgagcaggtgagggtgcgactgcagcgcggcaatttcaccggcgcagagcaactgcagcgacagcttgaacaaatggccgccagcttcagaatggatgccgaacatccctgccaacgcgccatcgttatgtctgcatcccttagccgcagccggcttcttctcgccagaggccaggcaccgcaagcctgcgttttactggctgagatggtctccgatcaggaaagccggggggacaggttaaccgcagcgcgtctacgtacgctctggtcattggccttgtggaacagtggcaaaactgccgctgcgcgcacgacatttcagccagtcgtgcagctggctgaacaacagcatctcacgggcctctttcttgaagctggcgataccttgcaacctttgcttatcggtatgaatgaatcctcttcggcttggactgagaaaaggggagtgcagggatcctgggcagacaagcgcgggcctgtagacggaacaccgtttaatagtggaagccccgatattcctggcgagctcagcgagcgtgagtttcagatattacagctgattgctgaaggtcagatgaacaaagaaatcgctcgctccctcgctatttctgccgagacggtcaaatggcacatcaaaaacatctacgcgaagcttaaagtgaatagccgcactcaagcgatgagccgggcgctggagatgaaattactggattaa

SEQ ID NO: 237635 - DNA, 699 bp, Klebsiella pneumoniae
atgcaggtggtcttgcaggaaatggcggcggcagagaacgatctgctggagacgcgcacgacgccgcggggcctgctgcgggtagatgccgcgacgccggtgatgctgcattttctcatgccgctggtgaagccatttcgcgaacgctacccggaaatgacgctgtcgctcgtctcgtctgagacgtttatcaatctgattgaacggaaagtggatgtggccattcgggccgggaccttaacggattccagcctgcgcgcccgaccgctgtttaccagctatcgtaagatcgtcgcctcgcccgactatgtcgcgcgctacggtatgccgcagcatccatccgatctgaaacagcatcactgcctcggcttcaccgagccggtatcgctgaatacctggccggtctcctgttgcgatggccagctgttagagatcgaagcggcggtgtcatccaatagcggcgaaacgctcaagcagctgtgcctgaccggcaacggtattgcctgcctgtcggattacatggtggataaagagattgccagcggagagtttgtcgagctactggccgataagcgcttaccggtggaaatgcctttcagtgccgtctattacagcgaccgggcggtcagcactcgcatcagggcatttattgattttctgagcgaccacgtaaaacagctcccgaaggagctgtcgtaa

SEQ ID NO: 237636 - DNA, 2745 bp, Klebsiella pneumoniae
atgctggacaagaatgtagcagttagtgttttaaacactcaagccctggccagagcgaaaattaacgccgagaattttaaaaatggcatagataaaaagcttaaatatggcgagtcaaaatgtgcccgctatgttaaaaaagcattaatcgctggaggggcatctgcaaaaaattcaggaattgaatcagctaaaaattatggcccatggctgcttgaaaataactttaaagttgtgggtggcgctacaacagtgtgtactggcggtgtattcacaatttctggtcagcaagtgggggatgttgtcgtaatccaggcagcaccacaccatgtgcatggtcatatggcgatgtttaatggtacacactgggtatctgattttgtccaggaaagggggttctatcctgcccagatatatcgtgatcaaaacataccctatacactttatcgttatggcgataataccacatcagagcagaacgccacggctacccaaaaaggaaaaattaaaattgtctggccgatcccttctaataaccggggaagtgagttcaataatcaggaagagatcctctctcatgtcgggggggaatccaccgggcagtatatgattggccgtagcgggatgtggcatggcgggatccatatcacggaagcaacgaccccgtggtgtgctctgagtggcaagtctcctcttgaagcattagatttcccagttccctttaaaggtgagcaggctgtgcgatgcatggctgatggagaagtcgttgcttatcgtgtctgcaaggattatctgacgattgcatgggaatccggcccactgagcttttccggttcgtttgttctggttaaacactttattcaaccgggggagaaggaatccagcgggctgtatttctataccctgtatatgcacctggctccctattcagcctatagtgtcaatcaggcggaaaccaagtggacagtccaggatacgctttctgcctacgatccagaatgggtcatgaccgccagtaccaacaataaaagtatcagtgaaagctatcgcaagggtacgatcccaaaaggatctattgttgagtgggataaaacagacagcagcctccataccgttgcatttaataagcgagagtatggccttgttacttttgttagcctctcagaacaggcgttgaaaaagggcaagaaaacatccctgaaaccagggcagcaatactggatgcttgtggacaaaaacaacctgtctcctggcactgatggggtggtacagccttcctggtggcagaaactcatgccgccagcaaaagaagcgatgaaatttgaccaggtagtatgcccgactccctttgttatcagtgcaggtgaccctgttggtcacatgggatattaccaggcacctaaggatggcggatatgaagcgcgataccaggttcatatcgaatgcacgagtatggatgataatctggaaacgttcctgaccaaccctgagcaggtgggagaaaagaacccactctggctgaagtacgctccgggcctagcgttgtacaaaaaagatgttgcaacaggaacattcacaaaggatacaaaggtaacaaccagggcggggatccttccactgagtcaaatgcaaacagaagtcgataagtcgaccaaacaggaatactggcaactgcgaccagaaaatgcttacgtccctaaaggccaggcggaacctcaacttttgtcgcagtatgatctggcaaagctgggcttcagaactgaaaccgcagaaccagccagctttgattacctggatggaaaaaaccagcccactggattcttccgtaacctcatcgattcgctctaccaggccgcgatagatgatacacgaaccagtcatgctctcgtgaagcataattaccagcgcctgctggataaaattgacagcggaagcgaccgctattctccaatggagtactggagagcacttcacaatcccgactatcgtgacgttattcagaaaacaattgtaaaacatccaagcgactggtacttcaaaaaaggcgatgctatctggcaaccattcctcaatgcgctgaaaaaagatgccccggagtggaagaaatatagcgaagattttatcgataaaatggcatggatgcaggatgttacatccgaaaaactagggccttcattgtggcatatgcaccccttaaaatttttagcctctctaattcagactaatgtaaatattagaatacttcgtttacgtgcatttctacgaatgatccgcattggtgaggggaccattcaggaagacggatacagaacgatgtttactggtgcaaaatttacagattttagtaaacaccccaataccagacatgaagctaatggtgttgtttcgactgctgctggagcttatcaatttttatacgggacatggagaaatctgcaacgtagatattctttctcagatttcagtcagagtaatcaagacctcggttgtatagcgctcattgcaggtcgaaaagcattagacgcagtaatgcaggacaagattagcgaagcaatacatttatgtcgtattgagtgggccagtttacctggttcaccacatggtcaaccaactgcaaataaaaaaatgatcatggaaaaatatgaagtctacttagctgaagaaaagctaggtaaaacaagtttacacgccacttcagaagaaatgacgaaatttattgaagataattatccggagtatttatga

SEQ ID NO: 237637 - DNA, 498 bp, Klebsiella pneumoniae; identical to SEQ ID NO: 233982

SEQ ID NO: 237638 - DNA, 717 bp, Klebsiella pneumoniae; identical to SEQ ID NO: 206061

SEQ ID NO: 237639 - DNA, 210 bp, Klebsiella pneumoniae
gtggagctgcagctggatgacggccattacacgatcagggaagcggcctacgtgatccgtctggacggtaccacctgcctgcagctgacggatgccggcggcatacgccggataaaagagggcgatcccctgcaggtggccagctggtatcaggcctgttttgatgcaggcctgccggtcaccgtccaggtgaatgagagccgggactga

SEQ ID NO: 237640 - DNA, 552 bp, Klebsiella pneumoniae
atgctgattggctacgcgcgggtatctaccggcgatcaaaacctcgatttacagaaaaacgcgctggttcgcgcagaatgtgaactgattttcgaagacaccgccagcggtaagaatgctaaaaggcccggattaaggaaagctattcgccgtcttcgacctggtgatgtgctggtggtctggaagctcgatcgcctcggtcgcagcgtacgcgacctcattactttggtatctgaactgcaggagcgggggattcattttcgcagcctgaccgattcgatcgacacttcgacacccgccggccgcttcttctttcatgttatgagcgcccttgcggagatggagagggaattgatagtggagagaacgcgcgcgggtttagccgcggcgagagagcagggccgcatcggtggccgccgccggataatgaccactgaagttgtggagcgttgctggcgcatgctggagaacagcgcaacccggcagcaggttgcagatgtggtcggggtaggggtgaagactatctataaatatttgccagtaacgggatga

SEQ ID NO: 237641 - DNA, 135 bp, Klebsiella pneumoniae
atggtaaaggtcggtattaacggttttggccggatcggacgcaatgtactgcgcgcagcactgaataatccggatattcaaattgtggcaatcaacgatttccactgtgtgttgtattcatctgtaaaagtataa

SEQ ID NO: 237642 - DNA, 840 bp, Klebsiella pneumoniae; identical to SEQ ID NO: 236602

SEQ ID NO: 237643 - DNA, 852 bp, Klebsiella pneumoniae; identical to SEQ ID NO: 236601

SEQ ID NO: 237644 - DNA, 405 bp, Klebsiella pneumoniae
atgattaaccaagtcaccatttaccataatcccttaattgtacgcaccgctaaaacggcctcagggcgtttccgacgggaaaccggtaaaacaggcaacaaaccacccgaaaacccgccagaaacgcgcaggctctgtttttacggcatgcatgagtatgcacgcaagtgcatagcgcgaaaattcacgccattcagccagggtaagtcctgtttccggcgttcttcctatccgaaaacggtgaacggggacgcaatttattgcgtggccgtgaagcgttgccggcgcagccggaaaaccggttttcagcacactcaggaatggggttcgtcgacggccggcaatgacgttatggcaagtcgccggacgactcaccacacgattcaccggcgattcgactcgtga

SEQ ID NO: 237645 - DNA, 603 bp, Klebsiella pneumoniae
atgaaaaatgaacttaatcaaattcaatggttacgtgctattgcagcaatactagttgttataacacattttactggcaagccatattcagttaaacttttagatcatgagttctcaagcggagctataggcgttgatattttcttcattatatctggtttcataatgatgtatgtttcggatttaaaaaaacaataccctataaaatttatattgaatagattcataagaattttacctgtgcattatttttttctttttattctcattattatcttccttattaagccagatatgataaatagtagtgtttctaaaacatatgtatgggagtcattcctgttagttcctgcattacgtaacgacgctgagtaccttaatcctgttatatggactctgtgttacgaaatgatgttttaccttatcttttgtgtttctcttaatttaaaaaatctaactacttctgccatcgcaaccactttggttatatctgcaatagtatttagcgggtttttctataaaggagacaatatttatatcagtgcagctacagatagtatttctttggagttttgctatggtatgttattatatgttttctaa

SEQ ID NO: 237646 - DNA, 738 bp, Klebsiella pneumoniae
atgaccgacaccacctttatccctgattacctgaaaccggcgctggagcgactggccgaggcccgagaggcccatcttgaacaggcccgccggatggaggacaccctgacagccattacccgcgcggaggagcagaaagcagcgctggagcaggataacggcagcgacacccgcacctggcgcgccgctttccgtgccgggggtgccatgctgaccgatgagctgaaaagcggtcatatcgaacgcgtggcccgccgggagctggcgcaggaatgtgacaacctgaccgaagtgctggcttttgaacgtgaccagctgaaagtcgcctgcaacagcaccgcgcgggcattccgccaggcgcatcatgctgtgctgagtaaatacgctgaggaagagcttaaccgcgcgctgaatgacaccctcgggccactggtccgggcgatggtgctgaaagcggatgtgatggcaaacccgctcgccaacaccatcggccatcaggggtacgccgagccggagaaagaggtcatgcatcaggtggtgaccttcctgaccaggaaagtgagcgccttctccgtcacaccagcggatgagccggtgctctccctgaccggcttcccggccgtcgcgcttccgcacatgaaccacgacgccgccagcacgcccggcgagcgtaaagtctggcaggaggaaatccgtcagcgcgaggctgacctgaaagcgcgggggctgctgccatga

SEQ ID NO: 237647 - DNA, 738 bp, Klebsiella pneumoniae
atgctgatatatagacctaccgataattacttgcaaatgtcaggagataaagtcaaatattatgaaagaaaaattattgctaaaagtgatatcgtaattggcacttctcaagatgtaattgcgagtataaaaaaacaatatccagatgaatttaaggcaaaaaaatattttgttattagcaatggctttgaccacttacatttcgatagtagaactaaagactcagtaagaactggcagcgtgtatattggctcgttagattatcgttttgattttgatgctttagaactattatgcaaaaatttttcagatcatttttttgatatctatggtccaatcgagaaaaatagtgaagataaagtaacggcattaaaagaaaaatataagaatttaaatttctacggtgccatctcttataatgacgtaccaattaaactaagcaaatataaggtggggcttcttctattaaatgatcatttatctaataaaggtagaagtccaatgaaattatgggaatatgcggcgtcagggttacaggtattgtattcgcaagtggagcatgaatgtacttatgattttctttttaagtatgataaatgtaatcttgtagaaaaatatcttttagcgtatcaagcgccttgtaaccgagatattaaaacttcccttatgcaatactcttggcaaaacaaagttcgtgaaattgaaaatataattagcgagtttattaatgaccaatga

SEQ ID NO: 237648 - DNA, 630 bp, Klebsiella pneumoniae
atgggcggccgcagagacgcgggagatattgcgcagcagcgccacatcctgcgggctggcgtcgaactcataggccgagatcaccgagccgatcggctcgccgccgggagtgtcatactccgcggtataggtgtgccagtagaggccgctctggataagctccggcgcgtcctcaaagtcctggcgcagatcgtctttggcgacgtcgaggatctccgttttgacgttctgccgatagtcggtgttgtccaccagctgtttgaggccgcgccacagggattcgacctgctgaaactcctgatggtgcatcaccgcgtccagctgacggcttatctggaaatccagctcggcgatatggtggtcgatcagcgttttgtcgagcttttccacccgctggccggactgacggatgcgttccataaacacctgcatcgccgcggtgagacgttccgccgccggcgcctcggagagcgcggcatcgtccagaaagtcgttgatatccccgaggtgagacgccggggcgagattaattttttcaaacagcgaggcgtaaacgccctcgcccgccctgttttcctgcagcgtggtttgcccctgaacaggggcgttttctgtggtaacagacattag

SEQ ID NO: 237649 - DNA, 567 bp, Klebsiella pneumoniae
atgaatatcaacgtggtcggcaccagcggctcaggcaaatccactttggcccggcgcctggcgcacaggctggaattaccctggatcgagctcgatcgcctgtactggcggccgaactggcagggcgcgccggatgaggcatttttcgccgccattgccgccgcgacggccacgccgggctgggtgctggatggcaattacaatcgcagccgcagcgttaaatggcgtgcggtggatttggtgatctgggtagattatggtttctggcgcacgctgcgccaggcggtatggcgggcggcgagccgggcgtggcgacatcaggagctgtggccgggcacgggcaactgcgagagctttcgccgttcgttctgcagcagggaatccatcatcctctggacgctgaaaacctggcggcagcatcgccgacgctatctggccgatatgcaggatccgcaatatcgtcatattcgcttcgtccgggtgcgcaatccgcggcaggccgaggcgctgctccgcgagctggaagcgcagcgtggactgcaccccaaaagttggacacccaactga

SEQ ID NO: 237650 - DNA, 801 bp, Klebsiella pneumoniae
atgaacgaaattgttaaagagccagtaagtcagatagctcagtcatttagagacagaatttcaagtccattatgggggtatgtttttttctcttgggtatcctgtaactggactaatatcttatttgtctttatgagtaaggaagatatcgagactagaatacatacagtactaattcagcctaatttatgggtgaattacttttggactcctattttaataggggtgatgcttttcgttcttatgccatttgcgcaatggggtttatctctatgccataactggatttctaaaaagaaaaaagaaagtgataaactaaatgcgctggaaaagtaccaggatgatattgaccttgccgataaaaaaatcgaggctgaaaatgctgaaagcctgtcaagacagaaagaaaatgcgaaaaaggatttggttgaagcaagaggtcagacccgcttgtctattttaaatgctagaaaagctaagattgataattcgatagagggactaaaaaatgcgttcgctgaatcgcaaaagaagctagatgaaattaattatgagctaaaaacaattgaaggtaaggttaattcaaaactggagcaatatcaatccgcgagtgaaagagtgaatgcaatagctgaattgtattttacttatgaaaacattgaatcaagagagggatttgtttcattcttaaatgatataaaagaaaagaaacttatcgcgcattcttttcttagtcggaggtatgatttgatgttagacaaggaactgaagtatttagatggaagtaaagataatgaataa

SEQ ID NO: 237651 - DNA, 648 bp, Klebsiella pneumoniae
  misc_feature (545)..(554): n is a, c, g, or t
atggaaacactttcggcgttactggctgccattccgcagcccgatgtggcgggcatggcgcgcgctcagcagcatattgatggcctgttaaagccgcccggcagccttggccgtctggagacgctggcggtgcagctggccggtctgcctggcttgcaggggcagctggcgctggcggagaaagcgattgtggtcatgtgcgccgaccatggcgtctggcatgaaggcgtgaccccttcgccgcagggggtgacggccattcatgccggcaatatggtgcggggcaacaccggcgtctgcgtgctggcggcgcaggccggggccagggtgcaggtagtggatgtcggcatcgatgccgacccgctgccgggcctgattaacctcaaagtggcccgcggtagcgggaatatcgcccggacggcggcgatgagccgccagcaggcggagacggtgctgctggccagcatgcagctcacccgccagctcgctgccgacggggtgaaagccttcggcgtcggcgaattgggaatggccaataccccccnnnnnnnnnnacgggcagcgaccctgacgcggtggtgggctgtggggctaatctgccgttggcgcagcggggccataaggtggcggtggtacgccaggcgatag

SEQ ID NO: 237652 - DNA, 189 bp, Klebsiella pneumoniae
atgccggtatgcacaatgtcagtagaggtcaaaatccgttggtggctgccgttctacctcaggactctggctttattctgcctgatgttccagcgagaacctgattaccgaaagactaccgcactcatcactaaacacggtatcagccagaaagcgaaggcggaaccagtgcgaaagaatacggagtaa

SEQ ID NO: 237653 - DNA, 345 bp, Klebsiella pneumoniae
atgaaaatgcctactaacccgagtaactggcctgatctgctggagttgctgcagagctggtggcgcggagatacgccgctgggggccgtgctgctctcggttgttatggcgggtctacgtatcgcctatagcggcggtggctggaaaaagatgctgcttgaaggattactctgcggcgcactgacattaaccgttgcgtctggtctggaatatctgtcgatccccaaaaacctgtcagtaagcatcggcggcggcatagggtttattggcgttgagcagttcagaaaactggtaatcaacattatcaacgttcgcttcggaggcagtaatgcagataagcgataa

SEQ ID NO: 237654 - DNA, 1062 bp, Klebsiella pneumoniae
atggaagggatgaagatggctgagttacgtttttctaagggtgaaattaacagagcaggggatattttaagagacaatgagcctgaaaaatacagtatcgatcagtttctatgggcgttagatgttttaaataatctccgcgagatgtatgttcatccattaaacgcctttcagacaactctgcggagaaagatgaaggtagcggatagagaagctttagcatctcaaagattgaagcgcataccttcaataattggaaagctaaaacgaagcccgaaaatgcaacttgctagaatgcaggatcttggtggactgcgagctgttgttgggactattgagggtgttcgtgaacttgagcaaagctatctcaacaactcctataaccgtttcaagcacgttctaacatctcagaaagattatattaatgatccaaaagcttcaggctatcgtggtattcacttagtctataaatatcaaggtgcaacaaatccccaccataatggattgctccttgagattcaaatacggacaaaaatgcagcatgcttgggcgaccgctgtagaaaccatgggaacgtttataggccaatcgataaaatctagtgaagcagatgaggcttggacagaatatttctctttggttggtagtgcatttgcccacatggaagggtgtaacccagtaccccagtatgcccatcttagcaagcttgaaacattcaagcttgttgatgatatgacagataaactagcagttgttgatagacttttagcatttcgagtagctgttgaagatattactaaaaacggtggaagctatcatttattggttctagacactgcttctcaaaatgtacaaattaaaagttttggtatcagaaggattggagaagcgacagctgaatatctagagtgggaaaagaaagctgaaggtaatcaatacatgcaggtggtccttgtttccaccgaaaacgtaagcaacctaaaagcagcttatccaagttactttctcgatgcagaagaatttgtcaggataataagacatattaaagctgagtgtttatga

SEQ ID NO: 237655 - DNA, 687 bp, Klebsiella pneumoniae
atgcaggattctacctttttaattgtgctcgttatcgtgccgctgatcgctggcgtcattttaggcctgcttattcgcggcaaggaactggctttcatggctgccaacttagcgatagcggaacaagcccgttcgtcggcaattaccctggcccgtgacctggaaaggaaactggaaaggaaagtggaagaaatcgaggagttaaccagccgttacgacgaagaatgtgaggaactcagggactcggtttccgaacaaaaagcgcgtattgttgcactcgaggagaatgccgagctcaacgatgacggggagacgtggaaagaaattgcccattttcactggctccagctttgccagcaaagagcgtggcaagcggcagagacgtgggaatttatggctatccgtacgctgctttccaaagttctgccctgggatgacatctttgaggacgaggatatggatccggcgataatgaaagtcgtaaaagaattttcagaggtgtattcccattacaactcttacagatacgactgtgagatgtggatgagggaaacggattccttcattgataaacatggcggcgacagaagtatgtggaactgcatcaggccggctatatcaagtgcgtcaaggataagtgcccttgttgaagacctgcaaaagaatgaatggaattgtggtgtctaa

SEQ ID NO: 237656 - DNA, 537 bp, Klebsiella pneumoniae
gtgcttgataacatcattggcttccttgagaggtctgatggtaacaacaccgataaacgaaaagctgagattgagtatcaaatctcgttagtcaccagcaagttaaaaaaggcaaccaccctgcttctcgaactggatgatgttacagagcttaaagaacaggtcaaagaactgaacattcaacgcagtaacttgcaaaatgaattagacgaactcaatcagcgtgaaacattgagtgataagccgttgcatcacctgtcggagattgacttgacgaccaaagcaggaagagtagaagcacaactcatactgtcaaaattcgtacaatccatcgagctgcaacgtgaaatgataataatcacgcttcgaaacggtactgtaattggaaaatcaagagacttatctcctgtgttatcacgggatttaatgaagcaagttgtatcatccccgtcacctacagacatcgacatgttcagcgtcattacatctgatgaagagttcaggaagtctggtaagcaggttacaaaacgttcttag

SEQ ID NO: 237657 - DNA, 198 bp, Klebsiella pneumoniae
atgaagaaaagaaagaaatactttatcatcgtagctgaaaagacacatcaattctacatgcagtataagagcctttccgaattaacaggaatcacatctccctctgattacaccccgcctcgtatgatgactaaaaccagacggtacgaaatcatcaaggctatctgcctgaaactgaaactccttgacagaatttaa

SEQ ID NO: 237658 - DNA, 843 bp, Klebsiella pneumoniae
atggcattagtctctaacccacattcggcttattcaccgcgccttccctggctgggaggtatagctggcctgctggcaggcggcgcgatcctttatttttggccgcaatggaaccggacatggctaagcctggtgcctgcgccagtctccgtgtatacccgctttctcggggtcactctcgaagacgttccgttagtcacctattgccatcaggcgctgctgggttttctgatggtgctgctcgcgcccggttacggtaagtcgacccttgccgcgtggatgatgcataacccagcgtcaagccggcgctggcccggcgaggtattccgtgcctgggtcacaaaatttggcctgctggtcatggtcttttgcaatctgttctttttgtcccgggtcccatccggaaccctggcgttatatatttttattctccagcacatcagcgttgccgcggcggtggcgtcaggggggctgctcctgcgtgacgcccggcgcctggcccgcacgttcgacgctcagctggcggacctgcgtcttctcatgatacttaccctcgggttccagacgattttgccggcgcagatcgcgctgatgagcgcccggggcgtgaatacgccgctgggctggtacattgttatcgcgcaaatggcaggggtgttactggcgtttatgctggtcggcgggctggtggcagcgctacgttctctgctgggcgaagagaggtgccgggcctggcgcggggatatggcgctcttcaacggcattgtcacactgtgcgtgacgggatttctcctctatcacatggtgtctgcctatccgcgaatctttgccgccctgcattag

SEQ ID NO: 237659 - DNA, 330 bp, Klebsiella pneumoniae
atgagtttacaggttttgagagattcagttcaaagacgcaaaccaatctcatttcattacaacaagccaggaaaaacaccgggcgagagaattggaaacgttcatgcaatcttcataatgagaaaaaaagatggcaccgaatccactaaattgcacattgtccagacatccggcgtaacagacagcgagcctgatttccctgagttcagaatgtttgatatagagtctctatcaaatatcaaaattctcgaaggtgaaccccaattcccaattaatgataaatataaccctgagtacgacggctataagaatgtaattgctaaggtttaa

SEQ ID NO: 237660 - DNA, 1005 bp, Klebsiella pneumoniae; identical to SEQ ID NO: 154488

SEQ ID NO: 237661 - DNA, 144 bp, Klebsiella pneumoniae
atgagcaagacaaaagcagtccgaattaaaaagacagataatcaactggtgaaactgaaagcggttaatgctggagcaaccatcagaaagactctggaaaatatgattctaatgtcctatgtgaaacacattaatgttatctga

SEQ ID NO: 237662 - DNA, 366 bp, Klebsiella pneumoniae
atgtatgcgacttctcatgcgctagaacaaaaataccaaaaaattggttacattctgatcttctgtttagtggtattctacatcttgttctttatcctcatctggcgttcgtccaagaagacgagtgaatttattgctaagccattaactcagttccagagcatggtcaatcgagtcgggctgggtgattttaacttagctcatgaaggcttccgtttaaaagagctcaacgaaacagcaaacgcgatcatcaacatgggtggcaagttggataggcttacctccgaactgaatgaggcaaaattatcggctgaacatgctaacctaaccaagagcaagtttatggtaatgactccaacttattga

SEQ ID NO: 237663 - DNA, 396 bp, Klebsiella pneumoniae
atggttacgttttggggaaattatgaggggatctctcagagccaggcgttgttcgaagcgatccgccaatatatggacatccattatgcggaaccgctgagccgggaatcggtggcccaggcgttctacctctctcccaactatctttcccatctgttccagaaatgtgggccaatgggcttcaatgaatatctaaaccatattcgtctcgaacaggcccgtatgctgctgaagggccacgatatgaaagtgaaagacatcgcccacgcctgcggcttcgccgacagcaactacttctgccgcctgttccgcaaaactacggaacgctcgccgtctgaataccgccgccagtaccatagccagctgacggaaaaagcatccccggtaaaaaactag

SEQ ID NO: 237664 - DNA, 543 bp, Klebsiella pneumoniae; identical to SEQ ID NO: 159406

SEQ ID NO: 237665 - DNA, 231 bp, Klebsiella pneumoniae; identical to SEQ ID NO: 159405

SEQ ID NO: 237666 - DNA, 204 bp, Klebsiella pneumoniae; identical to SEQ ID NO: 181384

SEQ ID NO: 237667 - DNA, 828 bp, Klebsiella pneumoniae
atggacaacaccgttattgcctgcgtggatggatcgtcatcaacacgcgccgtgtgtgagtatgcagcctggattgccgggaagcttgacgttcctcttgccctgctgcatgtgcttgaaaaaaatgaacaaccggcagtttctgaccttacggggactatcggtattgacagccgggagcaactgacgcaggaccttgtccgaatagaaggggagcgtaaccgcctgctgatgactcagggacgcgccattcttgccggatgcgcggaactgctcagccagatcggtatcccggatgttcagcaacttcagaaacatggcgcactggatatcatcctggctgacctgaagggtattcgtatgatggtgctcggtcgccggggagcacagaacccggttggcagcaatctggagagcattatccgcctgcagaaaaagccggtaatgattgtacctgaaactttttctgtaccttcaagagtcatgtttgcgtttgatggcagtgaggaaagccggagaaacctgcgtcgactgacgctcagccctctgctgcagagcctggaatgtcatatcgtaatggttaacggcgatgctcataccctcgaagaggcaaagcgtagtctgcagtgcgctggcatcagtgcgatatcccggttagctgaaggacgctcggtaacggaggcgctttgtcgttacgccgcagacaacggcgtggatttgattgtcatgggggcatatgggcactcttccctgcgacgttttttcatcggcagtaacacaactgcgatgctcgaacagaccagagtcccgctgttaatgctcagataa

SEQ ID NO: 237668 - DNA, 270 bp, Klebsiella pneumoniae; identical to SEQ ID NO: 149535

SEQ ID NO: 237669 - DNA, 531 bp, Klebsiella pneumoniae; identical to SEQ ID NO: 149536

SEQ ID NO: 237670 - DNA, 2304 bp, Klebsiella pneumoniae
atgccacgccgctcaatcctgtccgccaccgagcgcgaaagcctgctggcactgccagatgccaaagacgaactgatacggcactacacgttcaacgaaaccgacctgtcggtgatccgtcagcgtcgcggcgccgcgaatcgattgggcttcgctgtgcagctttgctacttgcgattccctggcacctttttgggcgtcgatgagcctccgtttccgcccctgttgcgcatggtggccgcgcaactcaagatgccagtggaaagttggagcgagtacggccagcgcgaacagacacggcgggagcacttggtcgagctgcaaacggtttttgggttcaagcccttcaccatgagccactatcggcaagccgtgcatacattgaccgagctggccttgcagaccgacaaaggcatcgtgctggcgagcgcacttgtcgagaatctgcggcggcagagcattatcctgcccgccatgaatgccatcgagcgcgcaagcgccgaggccatcacccgtgccaaccgacgcatttacgcggcgctgaccgattctttgttatcaccccaccgtcagcgcctggacgaacttctcaagcgcaaggacggcagtaaagtgacgtggctggcatggctgcgccagtcgcctgccaaaccgaactctcgccacatgctcgaacatattgagcgcctgaaatcctggcaagcacttgatctgcccgcaggcatcgagcggcaggttcaccagaaccgcctgctcaaaatcgctcgtgaaggtggccagatgacgcctgctgatctggcaaagttcgaggtgcaacgacgctatgccacgctggtagcgctggccatcgaaggcatggccaccgtcaccgatgaaatcatcgaccttcacgatcgcatcatcggcaagctgttcaacgcggccaagaacaagcatcagcagcagttccaggcttccggcaaggcgatcaacgacaaggtgcggatgtatgggcgcatcggtcaagcgttgattgaggccaagcaaagcggcagcgatccgttcgccgccatcgaggccgttatgccctgggacaccttcgccgccagcgtcaccgaagcgcaaacattggcgcggcctgccgactttgatttcctgcaccacatcggtgaaagctatgccacgctacgccgctacgcgccgcagttcctgggcgtgctcaaattgcgggctgcgcccgccgccaagggtgtgctcgatgccatcgacatgctgcgcggcatgaacagcgacagcgcgcgcaaggtgcccgccgatgcgccaaccgcattcatcaagccgcgctgggcaaagctggttctgaccgacgacggcatcgaccggcgttactacgagttatgcgccctgtcggagctgaagaacgcgctgcgctccggtgatgtctgggtgcagggttctcgccagttcaaggacttcgacgaatacctggtgccggtcgagaagttcgccactttgaagctggccagcgaattgccgctggcagtggccaccgactgcgaccaatacctgcatgaccggttggaattgttggaggcgcaactcgccacagtcaaccgcatggctgcggccaacgacttaccggatgccatcatcaccaccgcgtcaggcctgaagatcacgccgctggacgcggcagtaccagacgccgcgcaagccatgatcgaccagacagctatgctgctgccgcacctcaaaatcaccgagttgctgatggaggtcgatgaatggacgggcttcacccgccacttcacacacctgaagaccagcgacacggccaaggacaaaaccttgctgttgacgacgatcctggccgacgcgatcaacctgggtctgaccaaaatggccgagtcctgccctggcaccacctacgccaagctgtcttggctgcaagcctggcacatccgcgatgaaacctattcgacggcgctggccgagctggtgaatgcgcagtttcggcaacccttcgccggcaactggggtgacggcaccacgtcatcgtcggacggccagaacttcagaaccggcagcaaagcagaaagcactggtcatatcaacccgaagtatggaagcagtccaggacggactttctacacccatatctccgaccagtacgcgcccttcagtgccaaggtggtcaacgtgggcattcgtgattggggtctgacgctcagtggaacgaaaactcacgttaagcaacgttttctgcctctgacgcctcttttaatggtctcagatgtcctttggtcaccagttctgccagcgtga

SEQ ID NO: 237671 - DNA, 630 bp, Klebsiella pneumoniae
ttgctcggtcgtgagaacaatctgatgttgctcgaatatgccggggagcgaatgctctctcacatcgttgccgagcacggcgactaccaggcgaccgaaattgcagcggaactaatggcgaagctgtatgccgcatctgaggaacccctgccttctgcccttctcccgatccgggatcgctttgcagctttgtttcagcgggcgcgcgatgatcaaaacgcaggttgtcaaactgactacgtccacgcggcgattatagccgatcaaatgatgagcaatgcctcggaactgcgtgggctacatggcgatctgcatcatgaaaacatcatgttctccagtcgcggctggctggtgatagatcccgtcggtctggtcggtgaagtgggctttggcgccgccaatatgttctacgatccggctgacagagacgacctttgtctcgatcctagacgcattgcacagatggcggacgcattctctcgtgcgctggacgtcgatccgcgtcgcctgctcgaccaggcgtacgcttatgggtgcctttccgcagcttggaacgcggatggagaagaggagcaacgcgatctagctatcgcggccgcgatcaagcaggtgcgacagacgtcatactag

SEQ ID NO: 237672 - DNA, 456 bp, Klebsiella pneumoniae
atgaccataaagaacaatgagctcgtcatatggaatgacattcatccaagctatacaattttccataatgaaacggagaccttttcatcattatggagtcactacgatggcaatattcatcacttccatgacgcttattcagcagatatggcacgctatggtaataacctttcttattcacctaaagatgagtctcgggaaaatgtatttttcgtatcagctattccttgggtaagttttaccagttttaatctcaatatagctaatatgcagaacttttttgcccccatttttacttttgggaaatactacaaacaggatgggaaagtattgttgcctttcgccgttcaggtacatcattccgtgtgcgatggtttccatgtggcaagactggtcaatgagttacaagagatgagcgatgatatactgcgtctttcagaggaaatcaatgattga

SEQ ID NO: 237673 - DNA, 726 bp, Klebsiella pneumoniae
atggggctaaaaatatataattacacaatcttggtagtttcaataatactttttctgttttgttgtttaattattgcttatgcggtgggttttagcagtattttatatgagatgaaaaattttcctgattggttaagttctatcagcacatttggaactctagttgtagcatactcagcatataaaaaagcgccagaatggataagtcagagaatgcatgaagatgcattttctttagctaaaaaaataatccttgatgattatccatcacttaaagaaaaaatagataatgctggaaatcaagtgagttacaatgttatatattttgatttgcttgatgatgattgtgttgtatctatttccgtagaagattgtgacaaggcgttgtctgttttctatgatgtgcaaaattcaccgacgacaataaaaagcaatttggagaatctctctaaacttggatggaatgttgaccgggatattttaattatcaacgatgaaattaatgcgtgttatagagaaatgcaacatgcttatgttatggcatttgccggaataaagcgaatgatatcaactaaaaatattaatgagaagcgtcgttgcgccactcgaataagtggtttttttgaacaatttgagagtaataaaaataaatttgatctgctttacgaaagggtaagattaaagcacagacgggttccggattattttgatgtcgagaaaaaataa

SEQ ID NO: 237674 - DNA, 582 bp, Klebsiella pneumoniae; identical to SEQ ID NO: 148319

SEQ ID NO: 237675 - DNA, 447 bp, Klebsiella pneumoniae; identical to SEQ ID NO: 52336

SEQ ID NO: 237676 - DNA, 378 bp, Klebsiella pneumoniae; identical to SEQ ID NO: 52335

SEQ ID NO: 237677 - DNA, 663 bp, Klebsiella pneumoniae; identical to SEQ ID NO: 52334

SEQ ID NO: 237678 - DNA, 144 bp, Klebsiella pneumoniae; identical to SEQ ID NO: 102548

SEQ ID NO: 237679 - DNA, 918 bp, Klebsiella pneumoniae; identical to SEQ ID NO: 52332

SEQ ID NO: 237680 - DNA, 672 bp, Klebsiella pneumoniae; identical to SEQ ID NO: 149519

SEQ ID NO: 237681 - DNA, 444 bp, Klebsiella pneumoniae; identical to SEQ ID NO: 149520

SEQ ID NO: 237682 - DNA, 1590 bp, Klebsiella pneumoniae; identical to SEQ ID NO: 149521

SEQ ID NO: 237683 - DNA, 891 bp, Klebsiella pneumoniae; identical to SEQ ID NO: 149522

SEQ ID NO: 237684 - DNA, 564 bp, Klebsiella pneumoniae; identical to SEQ ID NO: 147056

SEQ ID NO: 237685 - DNA, 396 bp, Klebsiella pneumoniae; identical to SEQ ID NO: 96772

SEQ ID NO: 237686 - DNA, 612 bp, Klebsiella pneumoniae; identical to SEQ ID NO: 96773

SEQ ID NO: 237687 - DNA, 951 bp, Klebsiella pneumoniae; identical to SEQ ID NO: 96774

SEQ ID NO: 237688 - DNA, 633 bp, Klebsiella pneumoniae
atgttcgtttttggttacctccgggcatccacttcagagcagaatgccagccgggcaaaaaatgcactgaaggcatttgcaaaccaaaatggccaccgtattgctggctggtatatcgacaatgtctccggtacgacaatgaaccgtcctgaactgatcaggcttcttggtgatgcggaacctggtgatgtgattctcattgaacaggtcgacaggcttactcgactggatgatgcaggctgggagacactcagaaagcaaatcaccgacaagcagctggccatcgtcagtcttgatttaccaaccagccatctggcgctatccagcacagtaagtgatgacttcacccgaagcatgctgaaggccgtaaatggcatgatgctggatatgctcgccgctattgccagaaaagactacgaagaccgtcgacgtcgccaggcagagggaatctgtaaagcgaaaactgaaggaaaataccggggcagggtggccgatgcacagaaacatgaactgatacgtactctgcgtctggcccacggaaaatcactgcgtgaaacagcccgcctggctggcgtatcaaagatgacagtaatcagggtctgtaacggcaatcataagcaggatactgattga

SEQ ID NO: 237689 - DNA, 282 bp, Klebsiella pneumoniae; identical to SEQ ID NO: 101180

SEQ ID NO: 237690 - DNA, 1005 bp, Klebsiella pneumoniae; identical to SEQ ID NO: 101178

SEQ ID NO: 237691 - DNA, 252 bp, Klebsiella pneumoniae; identical to SEQ ID NO: 101177

SEQ ID NO: 237692 - DNA, 1314 bp, Klebsiella pneumoniae; identical to SEQ ID NO: 101176

SEQ ID NO: 237693 - DNA, 495 bp, Klebsiella pneumoniae; identical to SEQ ID NO: 101175

SEQ ID NO: 237694 - DNA, 939 bp, Klebsiella pneumoniae; identical to SEQ ID NO: 101174

SEQ ID NO: 237695 - DNA, 1641 bp, Klebsiella pneumoniae; identical to SEQ ID NO: 101173

SEQ ID NO: 237696 - DNA, 273 bp, Klebsiella pneumoniae; identical to SEQ ID NO: 101172

SEQ ID NO: 237697 - DNA, 303 bp, Klebsiella pneumoniae; identical to SEQ ID NO: 101171

SEQ ID NO: 237698 - DNA, 318 bp, Klebsiella pneumoniae
atgaccgacaagacaaccgacacaaccaagaatcgccgaacctttgatccagcgttcaagttacaggtggcgcgcatggtgcgcgagcaaggcgtcagcgtcagccaagtctgccgcgaaatgaagctgaccgaaagtgtggtccgacgctgggtacaccaactggatgacgagtcagccggcaggccggggattggtaaaccgttaacggctgagcagcaacgtattcgagaactggaagccgaagtcaggcgactaaaatcagacaatgaattattaaaaaaagcttcggccttcttcgcacgagaaataaagtga

SEQ ID NO: 237699 - DNA, 879 bp, Klebsiella pneumoniae; identical to SEQ ID NO: 52347

SEQ ID NO: 237700 - DNA, 681 bp, Klebsiella pneumoniae; identical to SEQ ID NO: 139460

SEQ ID NO: 237701 - DNA, 678 bp, Klebsiella pneumoniae; identical to SEQ ID NO: 149534

SEQ ID NO: 237702 - DNA, 1287 bp, Klebsiella pneumoniae; identical to SEQ ID NO: 149533

SEQ ID NO: 237703 - DNA, 924 bp, Klebsiella pneumoniae; identical to SEQ ID NO: 149532

SEQ ID NO: 237704 - DNA, 996 bp, Klebsiella pneumoniae; identical to SEQ ID NO: 149531

SEQ ID NO: 237705 - DNA, 1683 bp, Klebsiella pneumoniae
atgaaaatcaaagactttagtgtgggtatcaggctggctggcagcttcagcctaattctggttcttgtcatgatcatgacagtgaccggagtggggtacctgaactctatgctcacttccaccgatcgcgtgatggattattatcttctgcaggagcgtatggcgaatgaatggcagaccgctattgaatcaaacggtgcgcttggactggttctgctgacgtcgggggacccggatatcaggacatatgcacagcagcggataaagaaaaactctgctcgcgtggatatactgcaggataaatttaacagggagcttacttcagagcagggtattaagctgctgaaaaccattggtgaaaagcgtcaggtgtatgcagatacccaggtaaaagctcttcagatcagtgagcagggggaccgtgaagccctgaacaacttcattcggtcacagcagttaccgatcataaatgactacattgccagtctgcaggcactggtggaatacgaaagaacaagcatagataaagcgggtgaagttatcgatgatcatggtacggcagccatactgacactgatcatcactgggtgtatggcgcttcttctgggaggtgtgctggcatggctgatcaccagaagcattacctgtccgttgatttcagccgtccggattgcccgggaagtggcggaaggtaacctgtgtgtggagattaaagtggactcacaggaccagctggggcaactgatgcaggcactgcgtgatatgtgcgggagtctgagtaacaccgtccgggaagtacgtcagggagcggacaatattgcgctgactgcagcagaaatcagcagtggtaatacagacctgtcagcccgcaccgaagagcaggctgccggtgtggaacagacggcggccactctggaacaactgacggccaccataaacaatactgccggcaatacagcacaggtttaccagtttgtgacagaaacaacggccattgtgaaacagaatggagtggtcatgagtgaggtgtcttcccggatacaggagatttacgacacctcgtctgaaatgacagccatcatccaggtcatcgacgggattgccttccagaccaacattctcgcgcttaatgctgccgtggaagccgcacgcgccggcgagtccggccgtggatttgcggttgtggccggagaggttcgtaatctggctcagcgcagtgcttctgccgcgcgggaaataaaagagctcattgatgactccgtttcccgcattgcatccggccgtaccctggttgaaaaagcagacaggggaatggaggatatcatcagtaacgtccagagcatggaagggctgattgacgaaatagccaaggccagtcgtgagcagggagatggtattgcccagattaacagcgccatgggccagatagacagcaccacccaacaaaatgcagctctggtggaacagtctgcagccactgccgcttcgttgcagaatcagtcacggattctgcaggagaaggtgagcgtatttcgtctccgtgataataaaaaacgcgatgctgaacgaaaaaataccatagtaccgacaatcagcaacaccagcccgcagagtaaggttaaagcggtaaagtccgttcgtgaaacggaacaacacgccagcgagaactgggaaaccttctga

SEQ ID NO: 237706 - DNA, 318 bp, Klebsiella pneumoniae
atgagtgaaataaatccccgtcaggctaaatatgcagacatacatgcgaaactgaccgaccggatgcagtctgtcagggtcatccttgaacagatggaaggacacgagtacgccgcaatcagcacctacatgaataacatggaagcgattgcctgcttttacgaggaggcaggggaaagtctcagtgagccagacttcctgaactacctgaaacaaaacgaccttaacctgtttattgaaattctctctgtgggacgcgccgtttcactgatgaaaaacctgctggtgaatataaggcggcttgtagtggcacagtaa

SEQ ID NO: 237707 - DNA, 372 bp, Klebsiella pneumoniae
atggaagaagccttttttaccaaagatttttttcagtttcggccagaacaccgggaaggcgatgccgggaatagacgcgacgaggcccacggcgcccatccattcggagtggccgacgacgaactggttgaagaagccgttaacggtgttcatgaagaacatgaaggtaaaggccagcataaagaacatgccgagaataaccagcggacggttatgtctgagctcgtggaaaaggtcggtagttttgacgttggcggtctgctcggcggtcgcgacaacgcgttctttggtgcatttgtagcagataaacagggccaccgcgccgatgatcatatagatggcgtacacgccgaaccaggcgtagttcgctga

SEQ ID NO: 237708 - DNA, 210 bp, Klebsiella pneumoniae
atgaccgggagtaatgcgcggtggaaatggacaacagattacaaccgtcgctcgatagcggaaacggcgatgtaccgggtaaaacagctgttcgggggggcactgacgctgcgtgactacgatggtcaggttgcggaggctatggccctggtacgagcgctgaacaaaatgacgaaagcaagtatgcctgaaagcgtgcgtattgcctga

SEQ ID NO: 237709 - DNA, 645 bp, Klebsiella pneumoniae
atgacctgcttattcgcaccttccttagggggctcggcttctttctactctggtcttaccgccgaaaaagattgggagaaggtgtataaactcgctcaccttgacccactgatgaaacaaatcaaaaataatagcgatttggttgcgtcgatttactttaatacctgggattcatacaaccgaatctacccgtggttcaacaccgtcgctcagtaccctcccaaaatggacattccggagtacaacttttactacctggcaaacgctgaaaacaatcctgaccagaagacaatttggacagatgtttacattgatcctgcgggccacggctggatggcatcggttatcgcgccggtctacaaccaaggttttctcgagggtgttgtcgggcttgatatcaaagtcagtgacattatagaaagcattcaaaatctagccattccttggggcggctacgctgttttagtgagtagtaacggcacaattatggctttgccaccacaaggagaacacgattttggcttgaaagaactcactaagcacagctaccagcaagcaatcaccaaagagatttttaagcctgaggcatttaacctgtataaacgtgatggcaccgctgacttgagcatgcgtttactcaagtga

SEQ ID NO: 237710 - DNA, 342 bp, Klebsiella pneumoniae
atgtataacgagcttaagaagctgaacagatctttaggcttgacaacaagcaataaaaatattgagcttattgaagaatatgagtctatcagcggtcaggaaaaagaattagataatggtaaaaaggctgtgttcttggttgatatgaagtataaaaataaaaaagagatcataatcagcatcatggacgttaacaagaaccctgctgattacagcccctatgaagacaggacagtatacagggaagtgattaatacgttcaggaggccagtagcttaccttaaggctctacagcgtggtttagaggctttcgaccagacaaaaacaagtagtatatactga

SEQ ID NO: 237711 - DNA, 258 bp, Klebsiella pneumoniae; identical to SEQ ID NO: 233401

SEQ ID NO: 237712 - DNA, 258 bp, Klebsiella pneumoniae; identical to SEQ ID NO: 233401

SEQ ID NO: 237713 - DNA, 342 bp, Klebsiella pneumoniae; identical to SEQ ID NO: 237710

SEQ ID NO: 237714 - DNA, 423 bp, Klebsiella pneumoniae
atgactaaacctacccgcgctgaacaagaaaaaatcctggcaatgccgtcagaagactacatgaaccctgcgcaacaggactacttccggcggcttatccgccacgaaaggcaggaggtgcttgatcatatagatcagatgaagcaacagttgcaggaggatccagaaacgggtgacgaaggtgacatcgccattcgtgaagaacagttacgtctgttgttcagacagatagacagagaaagccgcctgttgccgaaatatgatgcagcgctgatacgacttgaaaaaggagaatatggcttctgccgggatacaggcgaacctatcggcctgcaacggctgctactcaggcccaccgcagaattaagtattgaagccaaaacaaaggaggaaaaagttgagattcagtaccgaaagaaataa

SEQ ID NO: 237715 - DNA, 186 bp, Klebsiella pneumoniae
atgggcttaaccgtttccgatctggttcgtatcactctgactaaagtagccaaagaaaaggctctgccgttcgatatgcgtgttcctaacgagcttactgctaataccatcgctaacagtgagaaaggcgtagacgttcatacagctaaagatgctgatgatctgtttaatcagcttggtatctga

SEQ ID NO: 237716 - DNA, 450 bp, Klebsiella pneumoniae; identical to SEQ ID NO: 237264

SEQ ID NO: 237717 - DNA, 234 bp, Klebsiella pneumoniae
ttggagtcattacccagactgcgttttaccgacatcaaagattttgaaccggagcaggttgcccggcaaattccgcaactccgtgccatgctggcgatgcgtaatttattacgcgatctcaaatccaatctgcttgataacgccactttcagaaaagagcttgaggcaatcctgaaagatccggcgctgtcccaggaattacgcgacgaaatgagtgcgcttgccccgaaataa

SEQ ID NO: 237718 - DNA, 657 bp, Klebsiella pneumoniae
atggcaaggaaatgtaggtcgggtaaggcgttagccgtcacccgacacaaaagtggctccgcgcccgcagttcttgcccggcggcgctgcgcttgcgcgggcctacgggactgcgtcatgtttcccgtcgcgggcttcgtcttcctggagcgctgcccaaggctacaaatggcaaggaaatgtaggtcgggtaaggcgttagccgccacccgacacaaaagtggctccgcgcacgcagttcttgcccggcggcgctgcgcttacgcgggcctacgggactgcgtcatgtttcccgtcgcgggctttgtcttcctggagtgctgcccaaggatacaaatggcaaggaaatgtaggtcgggtaaggcgttagccgtcacccgacacaaaagtggctccgcgcccgcagttcttccccggcggcgctgcgcttgcgcgggcctacgggactgcgtcatgtttcccgtagcgggcttcgtcttctttctgaagcactccctggagcgacaaatagcacataaacgtaggtcgggtaaggcgttagccgtcacccgacaaaacgacgccgcaggtagcccggataaggcgcaacgcgccgctatccgggaagagtcaggacgcgacggcttcgccttcgtcgaggcttttctgccggtttga

SEQ ID NO: 237719 - DNA, 1302 bp, Klebsiella pneumoniae
atgaacatcaagatcgatgcgctgaactactacggcgcgacgaagaaatatcacctccatttcccggcgctacgggaagatattgaagccgatgtggtaattatcggcggcggcttctctggcattaacaccgcccttgagctggcggaacaggggatcaccaacgtggtggtgctggaggcgcgccatctcggctacggcggcaccgggcgcaacggcggccaggtgatggccggtatcggccacgatatcgaagcggtaaaaaagcacgtcggcaaagaggggctggagacgctgtttaaaatcgccaacctcggcgcgggcatcattcgcgaacgcatccgcaaatataacatcgacgccgatttcgtgcccggctacggctatctcgcctataaccagcgacagcttaaaacgctgcgccagtgggagaaggagtttaaagccgctaccccggatgaagagatcgaactgtataccggaaaagaggtgcagcaggtggtgggctccgaggtctactgcggcgcgctgaaacatatgggcggcggccagatccattcactcaatatgctgctcggttcggcgcaggccgcccattcgctgggggtgaagattttcgaatcctcgccggtggtggaagtgaattacggcaaacaggtgcgggtacgcaccgcgatgggcagcgtcaaagcagccaaactgctgtgggcctgcgacagcttcctcaacaatatggagccggagatctacaacaagacgctggtcacttactcctaccaggtgtccaccgagccgctctccgatgaactgatcgaacgcatcagcccgctgcgcggcgccttcagcgatattcgcccggtaattaactactaccgcgtcacccgggaaaaccgcctgctgttcggcagcgccacccgctttgtggagtatacgccgaacgatttcgccgcctggaaccgcaccttgctggcggaggtcttcccctatctcagggatgtgaagatcgattttgcgtggggcgggccgatggcctgtagcgccaatctgttcccgcagatcggcaccctacgcgatcacaacaacgtcttttacgtccaggggtactccggcttcggcgtcaccccgtcgcacatcgtgtgcaaaatcctcgccgaagggatcaacggcggttccgaccgctatcgcctgctgagcagcatcccccacgcgaccatccacggtcgtgacagtctgcgcttgctattagtcacggccggaaaactgatgcatcaaaccgccggtttctggaaaggccggagttaa

SEQ ID NO: 237720 - DNA, 291 bp, Klebsiella pneumoniae
atgtcttttgtaataaataaaacgctggaggccagcgttattgcggacagtggcacggcgattggctcggttcagatcactgtggatgtaacctatacaatcacgttgattcaggtaattgacgacagcacagcctacgcctcggtatcggcatcagtgaatggacaagcgccaagacaggttgaccagtttgagtttaattacacgctggagggtggtaaaagcctgtttgaacaagcagaagacagcattattaatagtgatggttactctggagcaactaccgtttaa

SEQ ID NO: 237721 - DNA, 756 bp, Klebsiella pneumoniae
atgaaagaacgcggaatgatattcaacggggagatggtgctggccattctcgacggccggaagacgcagacccggcggattatgaaacctcaaccaggaccatgcccccgtggtggacattggtggccaagcaacgtgtttaaaacgatgcttcatgtcgaagaagaaatgcagaacggcaaaggcggctggggtgggcttgttggagatgcttgcccgctcggggacgtcggcgaccgcatctgggtgcgtgaaacatgggcaaccctgggcaacgaagacggctgctgtgtcgactgggaaggcaacctttgcaaaggggatgagcgctcagctgcgaggatttaccgcgctagctgcgagcagagaccaggtgattacggcctatggtctattcccgatgacgcctactggaaaccacataccaaagagcacaagttcgaaggagcatggcgcccgtcaatccacatgccgcgctgggccagccgcattctactggaaatcaccgacgtgcgcgtggaacggctgaacgctatcagcgaagaggatgcggaggcggaaggaatcgacatggaggcactttatgactctcaggactgttacgactgcattgcagaccacaatatgaccggaaggccaacggtaacaggagcattcaagtacctgtgggaatccatctacggcgaggagggctggctggctaacccttgggtttgggttatcgagttcaagcgcgttgaaggcggtgcagcatga

SEQ ID NO: 237722 - DNA, 783 bp, Klebsiella pneumoniae
atgtcatcgaaatatgaagagttagaaaaagcgcttaatgaattatcaactgatggactaaatctctacttatcgatggcagatgaatgtgggagcctcagcccagaacttcaaaaaaaactaaaagaagataatatcaaactcaatccatttaaaaacaattatcaaaagtggtatacatcagctgcacgtgtaatcgaacaaataatacctgagagacttgctgaatttaacaagttatattgcgatccaaaacgaaaagaagttgattttataaactactctatttacgattatattcttggacttactacctcaagaggtggaaaagcaatttgcggcccaagcaatgctattataaaaatggaaacacaatataatatacttaattcagcaaaattaaaattcaaatccaagctgtttgatatcaaggaagtattacaggctgatgtcttcgataatgaaatagaagcagcaaaagaactaaataaaaagggcttcacaagggccgcaggtgcggttgctggggtagtcttagaaaagcatttatcgaacatttgcaattttaggcaaattaaaagtagaaaagctcgtccttccatcgcagatttaagccaagctttaaaagaaaaagatgtcatagacactcctaactggagattcatacagcacctagcagatattcgtaatttatgtgaccacagtaaagagagagaaccgtcaaaagatgaagtttctgatttgatctcaggtgtcgagaaagtaatgaaaacaatcttttga

SEQ ID NO: 237723 - DNA, 147 bp, Klebsiella pneumoniae; identical to SEQ ID NO: 203889

SEQ ID NO: 237724 - DNA, 360 bp, Klebsiella pneumoniae
atgaaaaatgatactgatttgccccaaagtgtcacaattttagagcatgtacaaaaacctacgaaacagcgtttttttgtgttagggatattattcgttagcttatcgattatatatcttgaccgtgtcaatatttctattattgcagcaaatacacactttttaaacgaaatgcatcttaatgacaaaccaatcttagttggcttgttgatgtctttattcttagcgagttacgggattgctaatgtttttttaagccctttaggagattatattggccctcgaagggccatgcttatcgcttatgtggtgataagcctatcacttttgattggggggttgtcagtttctttgctataa

SEQ ID NO: 237725 - DNA, 708 bp, Klebsiella pneumoniae; identical to SEQ ID NO: 182312

SEQ ID NO: 237726 - DNA, 561 bp, Klebsiella pneumoniae
atggtacccgtgctccctacccctacggttcccaggtcagacggggttcctacgaagtcgaagttgttgacgtcgggtgtgcactgcccggcagggcggtttcctattagaccaaagatattagccatcttgacagttttcgatgcatcctggagagcgagagaatttgaaacgtctccaacggtgccttgcgcggatagggtaactgacacgcgattggtcccactgccaccatcatcgacagaggtgcacgaggtcgttatagtgctttgctgcacccgcatgagttgcccggatgcgacggacgcgtcaacctggccaaattggactgtaggtgtgtctatgttgacggtgcacgaagtgggcaacaccacacgtacagcagacggcaagggaatagagactgtgggacgactaccccacgcactgaattttgtaaacacaagtggtaccacgttgtacgtcccggcaacggcgttcggacctgcatggatgaagacgctcccagtgaacgtggatggatacgacattgtcacgggcgtcatggccgtagcaccctga

SEQ ID NO: 237727 - DNA, 174 bp, Klebsiella pneumoniae
gtgatcgcctttatcaccttcgtgctggtggtgatgctgtttcgtccggcgcagcagctggaggtgatctctaccggcctgttagctctgggaattatttgtacggtaccgattatgtcacgctggaaaaagctggtattgtggcaaaaactgccgctgcaaaatacgcgttaa

SEQ ID NO: 237728 - DNA, 264 bp, Klebsiella pneumoniae; identical to SEQ ID NO: 127147

SEQ ID NO: 237729 - DNA, 981 bp, Klebsiella pneumoniae
atggccgagctggccacccgcttcccggaagatatgcaatgggcggcgccgtacgacccgacggttttcgtccgcgactccatccgcgcggtggtgcagacgctgctggaggcggtagtgctggtggtgctggtagtgatcctgttcctgcagacctggcgcgcgtcgattatcccgctgatcgcggtgccggtatcggtggtgggtaccttcagcattctctatctgctgggcttctcgctgaataccctgagcctgttcgggctggtactggctatcggtatcgtggtggacgacgccatcgtggtggtggagaacgtcgagcgtaatatcgaagaggggcttgcgccgcttgccgcggcgcatcaggcgatgcgtgaggtctccgggccgattatcgccattgcgctggtgctgtgtgcggtgttcgtgccgatggcgtttctttccggggtcaccggacagttctacaaacagttcgcggtgaccatcgccatctcgacggtgatctcggccatcaactcgctgacgctctccccggcgctggcggccctgctgttaaagcctcacggcgcgaagaaagacctccctacccggctgatcgatcgtctgtttggctggattttccgtccgtttaaccgctttttcctgcgcagctcgaacggctatcaggggctggtgagcaaaaccctcggacgccgtggcgcggtgtttgcggtgtatctgctgctgctctgcgccgctggggtgatgtttaaagtcgtccccggcgggtttattcccacccaggataagctgtatctcattggcggcgtgaagatgccggaagggtcgtcgctggcgcgcaccgacgcggtgatccgcaaaatgagcgagatcgggatgaataccgaagggtcgactatgcggtcgctttcccggggcttaacgcgctgcagttcaccaacacgccgaataccgggacggtcttttttggcctga

SEQ ID NO: 237730 - DNA, 1035 bp, Klebsiella pneumoniae
atgtccggggcgattatgcagacgccggggatgcacttcccgatctcgacttaccaggctaacgtgccgcagctggacgtgcaggtcgatcgcgataaggcgaaagcgcagggggtatcgctaaccgagctattcggtacgctgcagacctatctcggctcgtcttatgtcaatgactttaaccagttcgggcgtacctggcgcgtgatggcccaggctgacggaccataccgcgagagcgtggaagatatcgccaatctgcgcacccgcaataatcagggcgaaatggtgccgatcggcagtatggtgaatatcagtaccacctatgggccggatccggtgatccgctacaacggttatccggcggcggacctgattggcgatgccgatccgcgggtcctctcttcttcacaggcgatgacgcatctggaggagctgtcgaagcagatcctgccgaatgggatgaatattgagtggacggatctcagcttccagcaggccacccagggcaacacggcgctgatcgtcttcccggtggcggtgctgctggcgttcctcgtgctggccgcgctgtatgaaagctggaccctgccgctggcagtgatccttatcgtgccgatgacgatgctctccgcgctgtttggtgtctggctgaccgggggcgataacaacgtcttcgtgcaggtggggctggtggtcctgatgggtctggcctgtaaaaacgccattctgatcgtcgagtttgcccgcgagctggagatccaggggaaaggcatcatggaagccgcgctggaggcatgccgcctgcgtctgcgcccgatcgtgatgacctccatcgcctttatcgccgggaccattccgctgatcctcggccacggcgcgggggcggaagtccgcggcgtcaccgggatcacggtgttctccgggatgctgggcgtgacgctcttcggtctgttcctgacgccggtgttttacgtgacgctgcgaaaactggtgacccgcaggaagccggtccaggaggatctgcccgcctag

SEQ ID NO: 237731 - DNA, 264 bp, Klebsiella pneumoniae; identical to SEQ ID NO: 127147

SEQ ID NO: 237732 - DNA, 1131 bp, Klebsiella pneumoniae
atggcaaattcagataaaaaaacgccgtcaccggtgcatgatttacgttcggctctggcactgttaaaaacgctgccgggcgaatatgttgagaccgataccgaagtcgatcctcacgccgagctctcaggcgtttaccgctacgttggcgccggcggcacctgccagcgcccaacgcgcaagaacggcccggtcatggtctttaacaaaattaaggggttcgacgatatcagcgtggccatcggtctgaacggctcgcgccagcgcgttagccagttcctgcagtgtgaaccggcaaaactgggtcatttgctgaaagattccgttgaaaatgctattagcccaaccatggtacagggcacggcggtatgccaggaagtggttcacctcgccagcgatgctgattttgatctgcgtaaactgctgcctgcgccaactaacaccgaagaagatgccggtccgtatatcactatgggcctgtgctacgcctccgacccgcaaacccatgaatccgatatcactattcatcgcctctgtgtccagagccgcgatgagctatcaatgtggctgacgccgggtcgtcatatcgatgccttccgcatgaaggcggaagcggcgggccagccgctgcctatttcgatcagtatcggcgtcgatccggctatcgaaatcgccgcctgctttgagccaccgaccaccccgctgggtttcaacgagctaagcatcgccggcgcgctgcgtggccgcgcggtggagatggtgcaatgtaagactattaatgaaaaagccattgcccacgccgaaatcgttatcgaaggcgaactgctgccgaacgtgcgcgtacgcgaagatcagaacacccataccggccgcgcaatgccggagttcccgggctataccggtgaagcgaaagaggcgattccggttattaaagtcaaagccgtcacccatcgtactcagcctatctggcgcaccaccgtcggaccaggcgaagaacatgtcaacatggccgggatcccgaccgaagcgagtattctcgatatggtggagcgcgccatgccgggcaaattactcaacgtcttcgcccactcggcaggcggcggcaaactactggcggtactgcaattgtaa

SEQ ID NO: 237733 - DNA, 141 bp, Klebsiella pneumoniae
atgcagaacagcaacattatgcggttagcgctcgcgctgtgcaacgccggaacaaatagccgggtgacaatcccccgtttaaccgggaaagagctaaaactattgctggaatggctgtcagtgctgagagcaacactataa

SEQ ID NO: 237734 - DNA, 1704 bp, Klebsiella pneumoniae
atgccatcaaacagcatcccccattacctctataagcgtaaccacacctggtggttcaggaagcgtttcgtatctgagggcaatgccatcgaatacagactgagcctgcaaacagccagctttcagcgtgctcgtcttcttgcccttcggttacagacactttgccaacagatggttgcttctttgggggcccccaagacactgaagaatggcgtgatggaaaaaacaacacaagagcaaatcaaagcaaaacttcgagcaaaaattgccgaatggaccgccgaggaaacagaatattggttcagtggctctgcacgtaatgaaggtgatctgaacgattatcttgagacattagatatggttgtctctgatttgaaagaacgcatcgcttacgatgataaaccatctctgcaccgagccgaagcaagtacagttctggacgaactgccacacctcaaagctactctcagtgaagacgattaccaggtcattgctcgcatggtggcacaagccaaggtcaaatccttgcaggataccagagcaattattcttggtggggatgctgactggcttacaactagcccagtttcctcacaagagacgtcccactctgatgttcattttctttcagatatgatcagcaagtaccaagccgagaacgcaagcaaagagcactcgcagaaaagtcaggacaaatatgctcactcgctcgcactcacctttagcttcttcggcaatgtgcccatttcggagatctcattatccagcggtagagagtttcgtgagttacttgcctcattacctgagaaactcaaagccaaagaattgctcgaaactccactacttgagcttatttctaagaaaaaggctactaaaactatcgcaacggctacggctaacgatcaccttgaaaaagtacgccgcttctttcaatggatgctagatacagggtatctgcctgatgacaatcccataccgaaagagccattacccgagccaaagcagagcaacaaggcagcgagacatgcgatttctgacgaagatgcagtaaaagtgtttaatcatcagatctttactgagcatcgaggccttgtgaccaaaaaaattcaacatccacatcacttctggcttcctttactctgcctctttacaggcattcggccgaacgaggcatgtttactgtatgtcgatgacatcgagctggtgggaaaggtgtggtgtatccgcattgataagcgttttgatgaacaaaagttaaaaacgcccaacgccttacgctatatccctctacataagcgtttactggaaattggctttgtgaaatatgtacatgatctccgctctttggttggtggaaacagccgattattcccagagattaaggcgattaaaggctaccactcacataaacccggagagtggtttaaccgtaacattcgcgacaagcagtcactagctccaagctcaactctttatactttcagacacgcctttcgcgataaattagtgatgttgaacgcaactgatgaatacttaaaccgtctaatggggcatcaaggtagcccctacggaagctccctgttaagtgatgttacccgtatgaaggggctcattgataagattgagtttgcaagcattgttcaaaacgttaaaccttatgcaagcctacaagacttccgtagcgtagcagggagggcgaaatga

SEQ ID NO: 237735 - DNA, 780 bp, Klebsiella pneumoniae
atgatgatctttaagtgtcgttttatgcctttagacagttcatttccgcatcatggtatgttccgtcaaacggaggacgatgaatggcaagttaatctctatatgctgttcaaaaaactgcccaaaccgcggggttcgagagccatttggtataaaaccagccaaaatatggttcataaactaccgagggaaatgtttaacaaggaaattcgtgagattggtgctgttttccatgacgaaattgataagaacacatggatttcagttcgttcggccctcgtgttactgacctatggctcccgaaatcacaagcatcttgagttagtacaatgggttgagcgatacaccggggtcaatctccctcgactaaaaggcttaagtcgtagagagacagtctttggacgaaaactccttgaattcattaaaaaagagctagttgacatcacgtatggtgactatgaattgcaaactcagtgccgcatgtgcaacgggaaatactatgtcgatttcacagtaaagcattactggaacggtaacgaagatagcaccaagtttcacctttatcttattgaatttgatgaagaagaacacgaacacttccaaaacaaactagccgatttagctagggactcagaaatcaaaaaacaggagccgaaagcaactatcatcagggtgaaacacaacgaatgtgatgactggtttgatcttgtacgttacaacaatgggctaattggttttgaacaagctcttttattgggaatttctgctgccagccgttga

SEQ ID NO: 237736 - DNA, 1266 bp, Klebsiella pneumoniae
atgagttataatcccaaaaaagaaacaatttatctatatcttgttcagatttctaatatggttgttcctcttttggttattccatatttgacttctgtttttggtgttgagtattatggtaagttaagttatgctcaagtcgtctcactaattgcccttttttttgttgatttcggttttaattattcagccgctaaagaaattggttctaatagagaatcagcagctgcagtcaataaaatatacactaatgtacagtgcatcaaaacagccatttattttcttgttatttctgttgttttctctttaacactttttcttaaacaaagcgaaatagacaatgatttattattgattggtgcactgtctgctattagttctattgtttcacctgtttggttgtttcaagggataggtaagttatcattagtagccatacctaatttaatagttaggttattatccttggtctttattttcacctttgtacatgatcgttctgatataataatggcagctatcattcaattatgctctccgttttttgcggggctttttgttatcgttattgtttggagaaataatattgctaaattcgatagaactctattttcctattcattttctaagacactagtgtctgaaagttttcataatttctcagcatcctttttgacgttaggattcacatatttcaaccctctgttgataaaatattttttaggtgattttgctttaggactttatagtttggctgataaacttgtgactatcttaagacaattatatactcctatagtccaagcgaattttagtcaagtctgcgctttatataaaaaagacatgatcttggaggtgtctattaaattgagaaaaatatttctatttttcgtcgcgttaagtcttattgctttcgttagcaatttttttgtaggtcaatatgttttgagtgttttttttgcaagaggatatgggcttgaagaaattatacaagtaaatcatttaatctcaataatgatatttactcagtttattatatcaatatcattaatattagtaaatctaataattgttccatcaggaaacagccattatcttaaaagagtttatgcgctagcattcgttttatatttggccattgtttattttatggtaaaattaataggcgtgtatggggtcgctcttactataaccattatagaatcttttataataatcctattttctctttttgtatttaagcaaaaactagtaaggctaatataa

SEQ ID NO: 237737 - DNA, 852 bp, Klebsiella pneumoniae
atggaaaatcatgttttaatgtttcctgatatgtttattaatgcaagtgaaaatactgtgcatgtaaaacagtctggattaagttaccgaaagcttttaataaacaccctttactgggataaaataataacaacaaataacaatatcattcatatttctaacgaccgagctccaggagtcagagagctaaaaaacgaagggatttatagtgagattaatttaccgctaacaggtgaaggtgatattgctgctcttatatatgaagcaaacatgaaatttatgatcgagtcacttgcgcgtaaagatataaactttattgccagtgaggctgataaggtattgattaagaatagtaatgaggttgctcctgataatggcgagttatttactttgataaatgcaattccagaacctgatgaaagtgtaaacattcatgatgttttggagtttaggcataaaagacagggtgaactaaaaaacctcatgaacaaaattaatgaattgaatattagggtgttaaaagctgaaaacagagacttagagttaaaagcagcaataaatgaaatagatattgcgtgtgccgatgttattagattatataatgaaagcatggttaaatttaatttgtctgaggttaggtttaactttaatgttcctgaaatagcaacgaatgcaggtgcagcttatattggtgcaaaaacaattggccttccggaaaccggcgctgtattagcatccatagcctatggggtcaatacttttgtgaacttttcttctgccatgtcattaagaagaatagataaatcaaacccatttaattacattgggcaaatgagtgtaaaacttaattaa

SEQ ID NO: 237738 - DNA, 276 bp, Klebsiella pneumoniae
atgacagtttcaacgcaggtaagccgtaacgagtacaccgggaacggcgccacaacccaatacgattttacgttccgcattcttgataaaagccacctgctggtgcagacgctggatacctccgaaagtatcgtgacgctaacactcggcaccgactacacggttaccggcgtgaatcgctacaatggcgggaaggtggtgctgacatcggcgctgccagctggctacaaaatctctatcgagcgcagcacgcctgacctgctccccgttgattag

SEQ ID NO: 237739 - DNA, 489 bp, Klebsiella pneumoniae
atggcggcatttgttccatatacctccggtatggttagcctccagatgcagtctgtcgaatttacaggcgttggtggcatcatgcccgcctgcattatcaaacagcacacagggtgcataattgtttgggtcagcatttccgcaatacataacgctgacgttctcaaacgggctgtcgaacagctcgccaccatagattgcgatgccgcggatatgtcggatagcgatgttgcgcaggcgaacataggagccattcagcaggttaatacctcctgcaccgacaggcacattacccgtttctttccagtaatctccgatgactccgccagaaatctgagagtacatcagacgttgccacgtcgggtctccggggacaacgcccttagtacctacagtggtaaatgcaaacttagcattacggtgcgggacaatgagggtgaatggttccagctcataatcccatcctgcaataaaaggcagatcttctaa

SEQ ID NO: 237740 - DNA, 1332 bp, Klebsiella pneumoniae
atgcttatattcacactgcttcttttttcattaataatcaatatattgacgccagttgtgttattgacaaaatataaaaagataactttgtattttttgtttttttactatttcggaataaattacttaaattatataatggggacgaatcagagcattgagaattttataatcaaagcctatcccgacgtgttgatgctttctctagttttaagattgtttattatgacaacgagaggtgacaatacaaataacaaaaagaaaggtgtagataagttatttttcgtgtgtatttttgtttccatgatctgtgtgatatacagcatggcaaaagataatagtatatcgagaattatattggattggcgtgatactgttgcgccagtattaatcatgtatttgatggtacggacaaatgtaataaatttcgacgatggtgatcgaatattgcattttattgcgctaatggttgttggtaattctattatcgctataattgattattataattttaatggaatagcagaaagctcatggcgttatgattttttgatagacttgaatcttaaaacagactctgactatgaatcaagaatggtggtatatcaaattgtaagaaatggaaatcttagatcgtctggtctattcgttagcgcattacagtactcatatatcgcagggatgttttgtttttatttctatcttaaactattgaactctttgaaatggttaaatttttcaggtctagccttaagtcttatatccatgattatatgtttggctggtgtgtatgttagtcaagtgagaacggcatttttaattattatctttaacattttattttatcacttgtgtcttagctataaaaataatttttcttttaaaccaaagttaactatgtctttagcagttatttgttcagtagttatgttttatgctatttactatttaggtgaatctgcagacgcttcatcatatgggcgattggcgcaatacgcgataatgatttctgattttaatcccttaggtgccggcttgggagcttataagggcctgtttgattctttttatgtatatattattttaacattaggtgcgccttccatctattttatttatttttttgtgaaaagatatatttatattttttccagaaaaaatatagaaattgataaaaaatacattccttttgttggtgtttgctttacggcatttccggtaatgatgttagcaatgagtttccagcatgttgcaggttccatttattatactttgaattttttaactttttttatttctatgcgatatttaacaaacgttagcctgaagtaa

SEQ ID NO: 237741 - DNA, 882 bp, Klebsiella pneumoniae
atgatcaaatgttttctttcacatagttcgaaagataaggactatgtgcgacaagttgcctcagggttaagaaaagaaactagaatctttgatgagcaaacttttgaaaaaggtatgtcaccagccgaagaaattataaaagggctagatgatacatcactctttgttctatttctttctgattcggcattagagtctgaatgggtaaaagaagaaatgcgcttggcaaagaaaaaaattgatgaaggtcatttgcagcgtatttatcctataataatagatgataggataactttctcagacgaaagaatcccttcttggatgaaggatggttttaatattcagccgattagaaagccaaatgttgctataagaaaaataaatgcacggttgagggaaatagcatttaaaaatcatccagggttaaaagagagacagaaaatttttgttggtagaaatgaaaaaaccactaacgttgagcaacgttttgatgattttgataagtcaccaccagtggtatttatagcttcaggccttaattctatcggtcgaaaatcattcattaaaaatgcgctaataaaatccaacgctatcagagaatcatatgagtttcctataatacagatggaatcgtcagatagtattgaagactttattttgaaaattgatgatctcggattgtgcgatattggaaaaatccaagatttaatgacaacctctataagcgataaagtaaatattgcggtaagtcttatagagggcataatcgatgaaaaagagcgtatactgatagaagataaaggggcaataatacagcccgacagctcaattgttagttggtttatcaatgttacagatcaggtaatgactccaatttactga

SEQ ID NO: 237742 - DNA, 207 bp, Klebsiella pneumoniae
atgaagaagcttttaatatgtgcgctggcactgctgccgttagcggctcaagcaggaaaaattacattacaactgaccgagcagaccgaaacagccaacggaaaaacgctctgtcgctacgaaaattctatatatagcttcacaatcacccagagcggtaaacattgcgccagtgtgaaaacgttctctactgatgatcctgattag

SEQ ID NO: 237743 - DNA, 717 bp, Klebsiella pneumoniae
atggctggggactcatcactagtatggcaggtatttgcaacaatcataggagtatcactacaggccgctatcgctattcttggctggcgctatgctgcgaaaaatacgcgagatactctcgatatccaagagcttgtatcgaatcgaaccacggcatcatttatcgcagaaaaacgccaaaaatggattgatgagttacgttctgatatggctatacatattgcgcaatctcaagaaatagtgtggaaatggcaggctataaaagatactactgctgaacgtgttgagattttgctaaatgctgcttttgagggtaacgttgaaaaaatcaaagataaaaagaagatagaagctaaaagaaatgaaatagagcagaagattcgtgatgatttctcaaaagaaaatggcgctagagatcgagaacaccaagaaagacatctacgtataaaatttagattaaatcctaaagagcataaggatcttcgggatttacttgataagattagagaaaatgtactaagcgctcagggtgctacacttggtattaaaatttacaatataaacaatgaattaggtgttcgtctggattctgcaactgtcttgactcaaggcatccttaaagaggagtggcagcgtataaagcaagaagtcgcttatcctgaatctttgatcgcgaaaatcccgaaacccaagacaactaatcaggatcatcagtag

SEQ ID NO: 237744 - DNA, 426 bp, Klebsiella pneumoniae
atgggctggcagggaagcaaaggcagcattaacgcgggctatggccactcccataatatcaccggaggggcaattgcgcactctgaaggccagacgctgtcgcgatcgcttggaagttcaatggcgctggtcagtgcaccggacgcaagcggcgtccgtcttaccagcggcaatggcgtaaccgattggcagggttttgccgttgcgccttatctttccgattataccagcaacaacatcggcctcgatcccagccccctgccggataatgtggacctgccgaaaaccaacgttgaagtttatccgacgaaaggtgcagtggtgaaagccgatttcgctacccgtatcggttacctgctactaatgaccctgaagcgcgtgggcgggatgggtattgtgcccttggtgcgacggtttcgctgttga

SEQ ID NO: 237745 - DNA, 213 bp, Klebsiella pneumoniae
atgagcgacaaccaaaaagcgctgaactacgacccagcagacccggacaagatgaagctccctgctggcaacacctgcggtaactgccaccacattcggcgctgtaaggccatttttggacacaccgaaactgacacctattgcgactggtcgccatcccgctttgttgtggcatcggcttcaatttcgctgcgcgagggggctgacaaatga

SEQ ID NO: 237746 - DNA, 831 bp, Klebsiella pneumoniae
atgagcaaatcaaccataaccagagagcgcgcacggcaaattttcctagctaatggaccagagccaagcgcatcagaagaacgagagttggcccgcatggcgctggccgcaatggacagcgagcaacacacagacgacgaattatctaatttattgtggtactcacaagaggccacctgtcattctgacccgaactactactgtgaatttcagcgactggcaacacccggattaattgccgggataattcgtgagctacaggaacgccgcaaggcttacagcgagccggttgcgtcggtgaattgcgtaacggcagaacatcgtcgcgttattgaaatgctgctcaccgtttgcggagcggcgttcgagctcgctgatgatagttgccagcaagattttgatggcgaagagtgccatgttgttccagacgacgcatttcagaagctaagttatgcgctggacgaaattgaaaacactctcccgacagaggataccgacaggccagacgtatttctggtctggtcggcagtgccgagggcagcgctgaaatctattctccacgcgcagccagcgccggtagtgccggtagtcccagatgaattactgaaagagtaccttcgattagtgcaatgcatgctatcggattatagggatggcaatcacggcgatgcacagcgctggattagacacatagcaaaagcctcagatgtgttcgcggaaaaacacggtctttccccgtgggaaatggcgaaaaagacttttgcccatcacccagcacactgcgtgtgtgataactgcattaacgcaagatctaaatgggattatgtttaa

SEQ ID NO: 237747 - DNA, 486 bp, Klebsiella pneumoniae
atgaacatctcagcagtaaacgagctcatcgccactctggagagcgcaggcgagctgtcgatcaaagagacaaaggttatggcgctggctaaagcgtaccagcagctggctgcggagaatgtggcgctcaaatcggctgttgatcatacgattgaatggatagaaagcacgaacggcgacccttgcgatgtagtcattcttaaaggcatcagaacccccgccaccgatcgcatcgtagccgggattaaggctgatggtcgcgcaaagggtatcaactttgcagcaagccgccttgccgccgctttcaatcacggattcgttgataaaccaatggctgaggttggcgacgtggtacgcatgattctgactgcgaaagaggatttggcgaacgacccggtcttagccgccgatggcctatcaggagagtacgcagaaaaatccctggctgaatgggaagcagaactgcgcgagggggccgacaaatga

SEQ ID NO: 237748 - DNA, 1122 bp, Klebsiella pneumoniae
atgcaacgtattttatgtgtgcatcaaggcgcagagttatatggctcagacagaagttttgccagtgcggtcaatgggttgaaaaaaacaaataaggttgatgttgttttgcctttcaatggtgaacttgtcgagtatctcgataaaaacaatgggcaaatatggtttaatagcaatggtattttgcgtaaaaaagatgtaaaaaaaacgctaaattttttatttaatacagtgaggggcgtgaaatactatttgcacctttacaaaaggtatgatgttatatatataaatactgtagttatgctttcagccctcgtcgctgctatgttttatcgattttgttcaaaaaagaaaatattttgtcatgtccgtgaaatacctacgggtaggcaactatcattctttaaattgcttttcaagataataggtgtaaggttaatttataattcggttgctacatataaggcatttaatttacccggtgatgttgtatacaatggtgtccctgatcctactcgagaatttgacgaaaaaaatatacaatacgatgcctataacattaaattgcttctcataggccgaatcaacacatggaaaggtcatcaacttctcattgattctttaataaatgctgatgagcattccaaaggggagctcccattccaattaagaatcgtaggtagcgcttttgaaggttatgaattcttattagatgaattaaaaacgaaaatcaacgacaataatttacaaaacaatgtcaaattttatgaatttgcgaagaatccatctgaacatttttcatgggcaaattatattattgtaccatcatctaagccggaaccatttggacgtgtcgcagtagaagcatttgctatgcagagaccagtgatcgctgcaaatcatggcgggttatctgagatagttactcatggttgtgatggctttctttttcttccaaataatgtagatgagttggtagagactttattatctcttactaatataacagaacctgaataccagactctatcaaataatgctagagcaaagtacgaagcattgttttcggaaagcaaatatcaatataaccttatcaatattatattagggaaaaataaatga

SEQ ID NO: 237749 - DNA, 840 bp, Klebsiella pneumoniae
atgaataaagtcttgtttatatgtgtggtttatgcaactcaaccagaaaagacaattacactcaatagccttgcaaatattaaattcgaaaaaaataatattattgcaagttttgctatttgggataattctcaagaaggatatgagagtgaagcagtaaaaacaatgctaaaaaatcatcaagtagatgtttatcattatggggtaaatgagagattatctaaagtttacaatcaattaattgcaaagtataaaagcagtaatgattgggtcgttatattagatgatgattctgtcattgatgatgaatatatacaaggagttctcaattttattgaagcatgttcaaaaaataaagcattaatagtggcatttcctaagatatataataataacatcatgatttctcctggttatatcaaaggtgttcgaggttatttaatacaagacatacagcacggcatggtaagcaagaagaatattgttgctatgatgagcgggacagttatctctcttgaatcaaatgttgaattgcctagattcgatgaacgtttgagtttttacggggtagatacgaagtttttcttggatatagatgatgtaaatggtggaaagtatattttaccttcacttttagaacataattctgctttgcgtaatccggcaattaaaaatacagaatattgtgcaagattgattaatcttttctcagcaagaaaagttatttttgaaaatgtaccttttaatcagattagactttttatatacaagctattagtaacaattaaattgatgataactagaagaagtcttgtttatttaaagttacttttcgcataa

SEQ ID NO: 237750 - DNA, 1038 bp, Klebsiella pneumoniae
gtgttctttatttttatttttttcttgatatctcaagcaaaggcaggctcactcgatgtcggtgtttattattatcctggctggaacaagccaggggttaaggtttgggagccaataaaaaaataccctgaaagagaaccaatacttggttggtatcaagatggtgatgacaatatcatacaaaaacaattagcatggatggagaaatatggggtcacttatattgcttatgactggtattgggatgaaaataccggtgttaaaaatagaacgtttgctattgatgcctatttaaggaattcacaagccactaatgtaaagtttgcattattgtgggcaaaccatacgaacactccaaaaaacagtaaagagtttgataatatagttaattactggatagataattattttaagagtagtaagtattttacgataaatcgtcgcccggttgtgtttgttttttcacctcaacgacttgagatggatggacataaatttaatatggatgtaccatccttgttaaaaagagcgaggttgctaggaaataagaaaggcttgaaagatatatattttgtggcatcgactggatatgatgaaaataataatctaatctataaatatccaccaaacagttatgatgctgttagtgcatataattatcatattggcattagtaatggtatccctaaaaagaattcatatagttaccaagagcttatcgcgggatataagtatacgtggaataaaattcttagcgatagtgatttgccatatattatacctgtatcgtcgggatgggataggagaccttggggaggcagtattcctcctgagcatgatatgtcatatggtaatcctaaggaattcggaaatatgttaagtgaggcaaaagaagaaataaaacttcaccaagataaggcattaaataatataattatttgctgctggaatgaatacggtgaaggatcctacattgagccttcgaaaaaatatggatttaaatttctagatgaaattcagaaaaataaaaacttctaa

SEQ ID NO: 237751 - DNA, 720 bp, Klebsiella pneumoniae
atgcaagaaagtacacttaagacgctcgcagacagacttaactttgcgatgcatgagatggggatgagtcaaggacaattggcgaaggcggctaacatggcgcaaccaactatatggcgtataacgtccggtaatgccaaaggaacaacgaggatcgtcgaccttgccaatgctcttggggttcgtcctgagtggctttcggatggcagcggcccaatgaagccatcatcagcccatcaacttccaaaagatcaagagtatgtcggtgtaaaaacgtgggataaaagcacccctttagaggatgacgaggtggaagttccttttctaaaagatattgagtttgcctgtggtgatggccgtatcggaaatgaagattacaacggatacaagctacgcttcgcaaaatcgacattgcggcaaataggagcgagtactgatgggcatggaatactatgcttccctgtacgtggggatagcatggaaccagtaatacctgacggcacaacagtcgcgatcaacactgaagacaaaaaaatagttgatgggaaaatttatgccatcagcgaggatgggtggaagcgagtcaagatgctgtatcgtacaggaccagataccgtaagcgttcggagtttcaactcggtggagcatcccgccgaagataagccactgaacaagatagaaataataggtcgtgtgttttggtactcagttttaatttga

SEQ ID NO: 237752 - DNA, 291 bp, Klebsiella pneumoniae
atgtcttttgtaataaataaaacactggaggccagcgttattgcagacagtggcacggcgattggttcagttcaggtcactgtagatgttacgtattctatttcgctgattcaggtagtcgatgataccacagcctacgcctcggtatcggcatcagtgaacggacaagcgccaaaacaggttgaccagtttgagtttaactacacaatgggaggtgggaagagcttgtttgagcaggctgaaagtaacctgctcaatagcggaaaatatgctggcgggatagttatctga

SEQ ID NO: 237753 - DNA, 243 bp, Klebsiella pneumoniae
atgaacatgtatcgacaggacgggagcaagacccagcagcgtctgcaggacttcgcggggattatcggccccttgaggttaacggtttttggcgagatgcggactggctcttttgtcgagatggaaaatggcgtccagttgaacccggcacattcccgctggttgatggggctgccgcacgaatgggacgagtcgagcccggggtggcaagagtggcaagcagcaaccgcgtcggccgcctga

SEQ ID NO: 237754 - DNA, 1773 bp, Klebsiella pneumoniae
atggcggtggaaaaactgattgtcgaccatatcgacacctggaccacggcgctgcaaacccgctccacgaccgggcgcggcagctcgggcaagattgacctgtacggcattaagaagctgcgcgagctgattctggaactggcggtgcgcggcaagctggtgccgcaggatccgaacgatgaaccggcgtcggtgctgctggagcgtatcgcagcggaaaaagccgagctggtgaagcaggggaagattaaaaagcagaagccgctgccggagattagcgaggaggagaaaccgtttgagctgccggaggggtgggagtggacaacactcaatacgcttgcagaaataaatcccaaaatagatgtgtctaatgatgagcaggacatatcttttgttccgatgcctctcatatcaacaaaatttgatgggtctcatgattttgaagtcagaaaatggaaagaggtaaaaaaaggttatacccactttgccaatggtgatatagccattgcaaaaattacaccctgctttgaaaatagcaaagcagcaatattttctggattgaaaaataatgtcggtgttggaacaacagaattgcatgttgcgcgcccatacagccaagctgttaatcagcaataccttcttttaaactttaaatcaccaagtttccttaaaactggtgaatctcagatgacaggctccgcaggccagaagcgtgtgcctagaaatttctttgaaaactacccgctaccataccctccattacaagagcaagagcgaatagtaaacaactttactcaattaatgatcctctgcgaccacctggagcagcactccctgaccagtctggacgcccatcaacagctggttgaaaccctgctaaccacgctaaccgacagccagaacgccgatgagctggccgaaaactgggcgcgtatcagcgagcatttcgacacgctgtttaccaccgaagccagcattgacgccttaaaacagaccattctgcaactggcggtgatgggtaaactggtaccacaggatccgaacgacgaaccggcctctgaactgctcaaacgtattgcgcaggaaaaagcgcaattggtaaaagacgggaaaattaaaaagcaaaaaccactgccaccgattagcgatgaggaaataccgtttgaactgccggaggggtggaaatggtgcctattcgaagacgtcgttgatattcaaagcggtataactaaaggaagaaatttagtcaaccgaaaactaattactattccttatctacgcgtagctaacgttcagcgtggttatcttgatctgtcagaggttaaagaaattgatattcctgaggaagagcaagataaatatcatgttattaaaggtgatcttttaataacagaaggtggtgactgggatactgttggtagaacaactgtgtggtgtcatgaatggtatatagctaatcaaaaccatgtttttaaaggaagaattataggaaaagagattgatccatactggcttgagacatacatgaatagtccttattcaagagattattttgctagtgccagcaagcaaacaaccaacttagcatccattaataagactcaattaagaggatgtcctgtagcgatccccccaagtagtgaagcaaacaaaatcatgctcaaattgaatgattttaatgaattatgtgaaaaacttaaattacagctccaatccgcccaacaaacccagctccacctggccgacgccctcaccgacgccgccatcaattaa

SEQ ID NO: 237755 - DNA, 279 bp, Klebsiella pneumoniae
atgaccgtgtcgctggtcgcccgtcagcatggcgttgctgccagtcagctgttcctgtggcgtaagcaatatcaggaaggcagtctcactgctgttgccgcgggtgaacaggttgtacttgcgtcggagctggcatctgcgatgaagcaaatcaaagagctgcagcgcctgctgggcaagaaaacaatggaaaatgagctacttaaagaagccgttgagtatggccggcaaaaaaagtggatagcgcacgtgcccttgttgccggaggatggcgaataa

SEQ ID NO: 237756 - DNA, 1008 bp, Klebsiella pneumoniae
atgagagagcaatgggtagactatgctaaaggcatagggataattttagttgtaataggccatgtaaacagagggctcgatagctcaggaatttttttatctaactcattttttaaattatttgacagtataatttactcttttcacatgcctttgttcttttttctatctggcattttttttataaagtcaatagagaagaaaaataagtcatattttataatgaaaaaaatagaaaccattgtttacccctacgcattgtggtcgattatacaaggaattgtcgcagtttcactttcaaaatttacaaactcaagaacagacatcgtgtctgttttttcattcccatatcatccgatagctcaattctggttcctttatgcgttatttatgatatttatggtttcgtgtttaatatacaaaaaagagtatttcacttcttatctaccaataataaccgtgctggcgtttgctatatacatatatagcgatagtataggtgattttcttcatgttgattttataaccaaaaatattgtatttttcttcgcagggtcactgttaagcactgtaagcatcactactgtatttggaagaaaaagctttataatgttgttctctgcatttgtggcgttctttcttattcaatataaattccacttcatagataggatgttttatgacgagataggtatatcaacattctcagtggcgatggtttcaatatttttcgtattctcgctatcattagtgttaagtcacgtgggctttgagcctctccgtaagattggtgagtacagcatgattatcttccttgttcacatcttagcaggaagtggaaccaggataatattaagcaaaggttttggtattaacaactggtatctgcatattgttataggtaccattgctggggttgttgctccggtaatcttctataagatagcgaataaattaaatttaggacttttgttttcctatccaataaaaaaaccagcaatcaaataa

SEQ ID NO: 237757 - DNA, 1371 bp, Klebsiella pneumoniae
atgagagcatttactaggcgtgagattttagtcggcttggcttctggtgtcattatgtctgcttcggcatcaaggctggcctttggtagagaggtagatgagggaaaaattctgaatcttgacatgggtgatggagcagttgacggaaatggagctacggttttcataaaaaaaccagtgatattaagggccggacattacgccaacataaaatttgttccagaaaagggttacgctggccctggacctatttttatggccaaaaacggacaggttattcatgagaatatatctgtttctgggttttctggtgcaggttgcaaaattctaagcagtttggaaaaaggcaatcgttttactgctataggtatttgtaattatagtaataatgggtctctgcgaaggaccatgttaactaatgatacagatatgcgattttcctcattcatagtagtaaaagatccatcaatatttagagccggtgattatatatggattggtgacggtaaatttaaagttcgcgaggttacgggtaaaaaggtgtatttggttatgggcgatataccaaacataatcagtccgaaagtgtttaatggtggatatgataaatgcgaaggtggtcaatttgtcactttgcatgccgaagataataacgggataagaataggtggcggtggttatggttgggatatagatacatctagggctataatagaatgcagcaacaatggtagatcgggattctttcattcgtgcaaaaattacaatgggaaacaagtcattgaaaatattaatgccattggaaatggttacattaacatagggatggggtacatgaatgaaggttggattaaaaattgtacagctcgtgattcgggtaataattgtatagatgtttttgaaagtaagagtagtgtaagcatttatgataatgttgtatctggggctggtgttgacggtatatttgttggtggaaatggtgagtcggcaaaagtatatgacaatcagatatcacattgccgacgcattggcatattaataaacgcaagaaaaagccctataaaaagcatcctgatcaaagataacaagatcacagaatctggaatgaatgctattacattaacagcagtggaaagcggtgaagttataaaaaatactttagatgggagcattagcaggcaggcgatttttcttgaaaagagaaacggcctatctctttccggcgttctaaatataagtgataatgatattttaaacgcaaaatcaggtgatattggcagcaattaccctggatacattaacgatcgcaaagcaagcgtgtctatcaagtcgtcaaggaaattagttattgatggcattaatggatattaa

SEQ ID NO: 237758 - DNA, 1086 bp, Klebsiella pneumoniae
atggcgataccgtttcttatcatatctgcgctggccatcgtcaacataccaatcactttgtttcatagtatttccgcctacaatttaggtaaaattcttgtttttggaaacccatactccgcagtttataaacatataattttcggaatattatttctggcaatgatatgttatgcgagaaaaaagaccgactcagtcaaaaagggcttaaagatatttataaatctttctgctatatactcaataattaccgtccccatatacatttatggcgcccctctttttgttgagaagtttagggactgggggcgaatgggggtaggatatccaacaatggacgggcaggtaatatgtctggcaatattttgtcttatatttcttatccctcaaaagagcaagatatcattcaacataaaaatggcggctttgcttcttgggcttgtgtgccagaacacagggacatctatggtcacaatgctaatgatagcagttgttgccatgataaaaaaaccaggaaagaccataagttattttgcagttatctttcctgccataatagcgatagctataaagcagtactattcagaccctgaatttttcactcaaatgttatatgtcacaacgaacaaaattaacttattaattgaccctagcgcaaactacggccaggttaacacccttgaaatgagggatgaccaatataaaatactaaccattattattgacaaaaacttaatgctgtggttttttggcgtaggtggagaagcgtatgttgagaatgaattcaagcttacattggcttcatatggaatattctcattcatatctttcgtcgcatcattcttttggatttcgatgctaatattgatgtcgaagaacaaacataaaataatattacttgttcttatggttttttgggcctttacatcatatacgctagcaagtattttcctttttgccacatcatgcggcttctgcattgtttttgcatatgcttatgtttccgggcttgatggatatgaaagcgaagggcagtacatagatgacagaaggtttaaatataaatttaaatacaacagatattaa

SEQ ID NO: 237759 - DNA, 2478 bp, Klebsiella pneumoniae
atggtgcgatatgagttacagaggctgcctggcgcgccgctgcagcgggggacggtagatgcaggctccacactggtgagtctgctggattctctgcagctgcaccgtgatgttgtcgtgaagctgaatggcagagcactgccggacgattacgacatcagccggccactgcgatctggcgacgtggtggctgtgttcgaccagccagagggcggggttggcaaactcatcaccacgatactgcgcccggtcactaaaattctctccggcgcgctgaaggtgttcggcctgtcaaataagccgagcgcttcggtatcggtggcgacgggagaatcgccgaataatgacttaaccggccagacgaaccgcgcgcgactctacaaggggcgccccaacatttacggccagtgccgcgtgtttcccgatttgattcaggaagcgctgtttgagttcgtcgacaataacaagcaactcacggagtggtttgaagtcggttacggccggtacaccatttcctcgatccgctactcggaatcgaacctcggcagcctggcgggagccagttctgcgatttataacccgggtgacgtgatcggcacgattgaggtggggtatcagttcgatgacgtcgataacgaaactgtccccggactgaacgaaagccaggactttccggcccagaccgcgaccacgacggcaccgacatcggtggcgatcgagagtaatcagctcaaagccattgtgctgtcgaacgatgacaactttgcctacttcgcagcgctggcggtgccacaccccgtgtcatttgccatcaacgccacctggagcgaaggcgggacaagcgtcacacggaatgtcactggcgccgggaacatcatctcctctgagagctttatcggagacgacacgctgtcgtacacgacgttctatatcggcgagctctcgggagaaattacgtctctgccgggcaatgcggttatcaacgcgacgctgttcacgctgaatgaccagacccctctggttatcggaccgtcagtgtcgccgatcgtctccactcaggtctgggtgcatgtgctggttcagctcggcgcgacggccggcacaacgcaataccggatcaagttctggcaggtcgatgacgacaacaatcaggtgcctggtacgtcggagcagcacgattatttcttcgataacgacttccaggtgacgacccggtatttccgcacaacgcataagttcgtcccggcagccggggcagggcgctatgcggtgaccatcgagcgcctcgataacagcaatgacgccaacgtcgtgacgctgatggcgatccacgcagttaacgtacgggaaaacgtcgtttatccggaggacaccattgcccgcatcactattaaggggccgaacgacagcaacagcaaccgcgagcagaagtacaacatgctggcgcagcggcataccatcagctacgaccggacaaccggcgcggttgattatacgctgcggccgagtcgctcgtttgccgacgccatccttcacgaatgggtggttgtcggcaagcaggacgtggccagcattgacgtcgccgctctttatgccattgccgattcgctgccggatgaggcgcttgggtatttcgattacaccttctcggatgagaaacagccgctgggtgagcgcatagcgacgatcgctaatgtggcccgagttgatggcaacaatatcggcgatgtgctgacgttctggcgcgatgagaaggtgacaaatcccgatgcggtttttgctcgctcaaacatgttctgggacgagtacaaagtcgcctggcaaatgtctcttcctggcggttacgacggcgtggcgctggattacgtcgacccgctgacgaacaagaaggcttacatctacctgcagatcgacagcagcggaatcactgaggttgaggacgccacggttaatgcgatgcagatcagcctggacggctgccgcaacgccactcaggcaactgaccgggcctggcttgaggcgaggaaaatcctttactcacgcctgaccatgacagtgaaagtgctggagtcgacgcaggtggtgcgcggtacggtggttcagtgtccggacatgtacgataacgcgcagcaaacgggatacatcaccgggcgctacggggatgtgttctcgacgtcagagcgtatcgatttttctctcggcgatatgtgggtggtgatgaccgacagcctcggcaattaccgcgggcgctggcgggcctatccggtaagcggcaagcccaaagcattccaggctgcagccgatactttcgatctgaacatttatgaccgcgaaaatgtgcaaaaccccagccggtatttcatcgctaccgactcggaactcaactccacaatctggcgcgtcgatagcgccaaacccaacggtgacgatactcaaacgctatccctgactgagtattcagactcgatttatccgtaa

SEQ ID NO: 237760 - DNA, 129 bp, Klebsiella pneumoniae
atgcttaatttaaatggtcttggcggggcaattgttattttcggcatcatctgcgcggtggtcggctggggagtaattgagttcatcctctggctgttctcgttcgttcacatttcttttggaggttag

SEQ ID NO: 237761 - DNA, 1020 bp, Klebsiella pneumoniae
atgaagaaatatgcgatttggaataacaagggcggtaccggtaagaccagcttgtcctttcaggccatttgcagatatgcagaaaccaatccgctcgagcgggttttagtgattgatgtttgccctcaagcaaacctttcagagctatttttgggagggctgattggtaatgggagcattaatctccttaccagacacgatttagcaagccgttgcactttaggcggttatttccagatgcgcttaccgacaccatatcagaagcctaatttcgactctcatgactacttaactcatccaaagtcatttaatgaccatattccgagtaacatttccttaatctgtggtgatccactgcttgagcttcaggcaaatgctatcaatacactggcaaaccaacaaatacccggaactaatgcttgggtaagtataattgattggataaatgatttaatagatggtatcagggacgaatatgatgttttgtttgtcgattgcaatccaagtttctcaatttacacccaaattgctctcgctgcgattgacaagcttattttgcccgttatggctgacgattcatctcggcgggctatacagaacgcattttctttgatctacggcttaaaactcccttccgacatctatgcctcatatgcctttgctaacaaacttaatgcagttgatagaccgctgccaaaggtgcatatgatcgcaaaaaacaggctaactcagtatatgggcccagcctctgcttatgcggccgttttgaattcaatcgacaatgacattcaacagttgttagtcagtcaccctcacatatttgattttaatgatgttgacgatgggatcgttaatatcaaagattttcaaacaacaggtgttgtggcatttgctaagggttgcccgttctccattctaccaactggaagtgtaagggttatgaaccgaagagttaaagttaatggtccatacaagcagtcatgcctagaggcgattgataaaatggtcgctaagctctga

SEQ ID NO: 237762 - DNA, 723 bp, Klebsiella pneumoniae
gtgattcacattaataacttacataagcgcttcggcgacagccacgtgctgcgcggcatcagctgcgatattaaaccgcaggaagtggtgtgcatcatcggcccatccggctcggggaaaagcaccttcctgcgctgcatgaacgccctggagacggtcagcgaaggcgaggtggtggttaacggctttgccgcccacgaccggaccaccgacctcaacaagatgcgcgaaagcgtcggcatggtgttccagcgctttaacctgttcccgcacatgacggtgctggaaaacctgatcatggcgccgatgaatctgcgcaatatgccgcgccagcaggcggtcgacctggcggaagccttgctggcgaaggtgggcttaagcgataagcgcgacgcctggccctcgagcctgtccggcggccagcagcagcgggtagccatcgcccgcgcgctggcgatgaagccgtcgataatgctgttcgatgagcccacttcggcgctggatccggagctggtgggcgacgtgctggaggtgatgaaaaacctcgccagcgaggggatgaccatggtgatcgtgacccacgaaatgggctttgcccgcgaagtggccgaccgggtgatcttcatcgaccagggcgtgattcaggaagagggcaagccggggcagatctttagcgcgccgaccaacccacgcaccgccgcgttcctcagcaaggtgctgtaa

SEQ ID NO: 237763 - DNA, 1275 bp, Klebsiella pneumoniae
atgtcactaactgatattaaagcaaaaaatgcaaaaccccttgagaaggaatataagctaaccgatggctttggtatgttcctccgtgttacccctagaggttccaaatactggcaaatggcctaccgtttcgaaggaaagcaaaaactcttctctattggtgtttaccctgctgtttctctttctgacgcaagacaacgccgtgatgaggccagaaggcttcttgctcagggtattgaccctaatgcaaagaaacaggcagaggttaaagagcttaaagccaaacgtgataatacacgctccttcagaacagtagccaaagcgtggttcgccacgaaaacaaaatggtctgatgattatggtgatgccgtatggaagcgccttgaaacttatgtcttcccggtaatcggtgacaaagatgttgccgaactggatacaggtgatctgctggttccggtgaaaaaggtggaggctcttggttatcttgaagtcgccatgcgcattcaacaatacattacggcaatcctgcgtcatgccgtccagcaaaagctgatacgtcataacccagcctatgatatggaaggggcagttcagaaaccacaaactgaacaccgccctgcacttgagctggaagaaataccccagctactgaacaaaattgccgaatacaaaggccgcaggttaaccatactggcaatacagctcaatctgatgattttcattcgttccagtgagcttcgtttcgctcgctggtcagaaattgatttcaaaagtaagttatgggtgatacctgaacagcgtgaagcaattgaaaacgtcaaacattcaactcgtggggctaaaatgaagcgtaagcacttagttcccctttgtaagcaggccatgaagatactcaaagagatccgacaactgacttatgaagaaggtcatgatgacggattaatctttactggttgttatgactcgtttaaacccatgagcgaaaacaccatcaacaaagcgcttcgcaatatgggctatgacacaaagcaggacatctgtggacacggtttccgcactctggcctgtagtgccttaattgagtccgggctatggtcagaagacgctgtagagcttcaaatgagccataaggaaagcaatagcgtccgtgctgcttatacccacaaggcaaaacaccttgaccagcgccgcctgatgctccagtggtgggctgatttccttgatgctaacagcaacgatatggtcaggccgtttgagtttgcttcaaataaataa

SEQ ID NO: 237764 - DNA, 1389 bp, Klebsiella pneumoniae
atggctaaactgaacaagcaacaacttgctttactcaaagaaatacctgccgatcaactcatgcaaataatttgtgatattgcagaggataatggtcaggcaaaatcctttcttattaataaatatctgttaactccagaagaatcactgaaaaaggctgaggctgaatacaaaagggtaattaaaacaaaacgcttttatgattattatgaagcagcgattttttttgaggggctatacaggaatgtcatatttccacttgaaaagacggtatcaacgctgcctgaaaaaaccgaggcgttttgccatgatttactgctctcatttgataaagtcagcgaaattgctgatacatcagatggatcatggatggactattataatggtgctgtcgaaatatggttaaaatccctgtccctacaaaaagacaaaagcattgatgttatagcggataaaataatttccgtacttaaaggtgatgtgtattttaactttgatatttttgataagtataaaaaagaactgggatacaatgttattcgtgttttaagggaaagtcttcttaagacaggtgatgtcaatggtgctgttgagttaagtctgtatatcagggatgttgatttcatcaggcaatgctttgagaaaagaaaactgaatcagccagaatatatcattaagtttgctgagttgctggttgatgaactgtgtactgaggaggccattcaggttctcaataaaatcaaagaagataaatcagttgatcaggcagggcttcgtgataaatggactgaggtgttggctctggcgttgattgaagaaggcgagattcagcaggcaaaaacaatttgtatagacggatttaagaacagatgtgatgttattttttataatatctataatcgggtagagaaaaataatgactcactggatttgttctctggcatagcaaagaaaaaaggctttccgtttgttattcttttcttgtccgggacagatagttatggaaaacttgattctgaagtcatgaatgcgagtgaaaatgaaatcgcagagatgatgtctttattacgcggttcttttgttcgtaccttatcgagtgagctttacaggcatggctatgcatgttctgcaactctgctccgtagagtgctggcagaggacagtatcagccgttctcagagtaaatactacagctatgcggcatctgatatgaaaaaaagcattgattacagtaaagatattacatggactgaaaaaatcccttcaacagaagagtatttaaaatccctgtttattgagcacaaaagaaaatacgcactctgggaaataatgctggaaaaaatcgctggtttagcgatagagaaagattcagtatcatattcagcatag

SEQ ID NO: 237765 - DNA, 393 bp, Klebsiella pneumoniae
atgatagcaaagggttataagctccctcatgaatttcctcatgaatcctttatacaagaagttcttgaagatttttttgaaagcgaaggatattctataatcgaagaaaaaccgatagatataaaatgttcaaatgcagacaagaatgaaacttggattattgaagtgaaggggaaaacatcacagattgggctagatttcaagacatgtttaggtcagattgtaatgcgaatgaataatcctgattatatatatgctatcgctatgcccgatatagaacagtaccacaaacaggtaaacaaagtgtcatctaaaattgctgccaaaattaatttaaactggatttttgtcagcgacaagggaagtattgaaataattcgtaactgtgattag

SEQ ID NO: 237766 - DNA, 345 bp, Klebsiella pneumoniae
atgtttttgtttaataacggaaatgtaaggacagcctgtttggctatgctattcgttctgttgcctctagatgtgttggctgcaagtgtttcgtcttttactgcagtggtgggggtctcactggagattcataaatcttgttcaagccagacagagaagaaaggaggaagttcaagtggggtgttgagtgtgtattgctcagataccgcatcctatcgggttagtcgagaaaacagcgatatcatttatcatccagttgctctgaaaggaaacacggaggtatatgtcttacatatgaataaatcaattataagtcgatatgaacgacatgttatctacttttaa

SEQ ID NO: 237767 - DNA, 219 bp, Klebsiella pneumoniae
atgtcccagccatttgatttcgacaaagccctgaaagcgctacagtccggtcagtccctgaccggcaaagatggcatcttaacgccgttaatcaaacagttaactgaagcagccttgtccaccgaacttgactcccatctagcttcagatgtgcaagccaaccgtaaaaacggctccggtaaaaaaccattaaagccccgacctgcagcttcgaactga

SEQ ID NO: 237768 - DNA, 966 bp, Klebsiella pneumoniae
atgtcattagtcaacagagcatcatcagtctatatcattctggtcgtgactctgatgtcatgtctgagtctgtcatcattctctgcccgggcagataatacctgctgggcttcagggcagggggtgttttcgtttggcacggtcagtgccggggcaagcgcaacaaccagtatgaatgtgatggcaacgtgtcagggaagctacggaaagtcagtctggttccgggtctgtttacaacccgctactgaaatactgaccatgaacacaaatacctccccggcctacagctttaagtttcaggtgttcaccgcatcagacatgacgcgggcgctggatacgagcaatgcggcagaactgacgatgatagcaggagataatgaatcggtttcaggtcagttccgattggtgggaaggacaatgtcaggacagacgggactgccggcacaggaatactttaattattactttcccctcaccatgaaatggacgagtgcagagcgggaggagatgctcccggcctgtcaggtgggaacgatggtggcgccttacccggccagtgccacggcgacggtgaagaatacctgtgccatcagcggtgtatcggtactgaattttggctctcttatgggggggcagacgccacaactgaggggaactgcacaaaatagtatctccatacagtgtccggttggtactgcgtattcggtagggctgggtgatggtcagcattttaacggctcgcaacggcaactttgttcagttgaaggtgaatgtgtgacttacggaatctggaaggatgctgcggcaacgaaagcatggggcaacgttccgggagcaacagcactggatgtctcatcgtcatcaggtgaaagcagccgttacgtcgtatatggggtattacccgcgcagccatggccttctccgggaacttataccgatacggttattatcacgctccggtactga

SEQ ID NO: 237769 - DNA, 2370 bp, Klebsiella pneumoniae
atgacagtccggctcttaaaagccttccgcttcagtcaccttagtttgtgtctgttgttcattgcctgtatgaaccgcaccgatgcggcgtcggtcctgcctgaaggagcactaccccaatatctggctgtcagtgttaaccagcaggcgatcccgggatttgtggaaatgtggcaggatggtaatgatttctggcttaaagtggaggacgcccggaagcttcagattgatatttcagatctggaacagaaggaagggcttgtccgtctgcgtactggagattacctgaaactggaatatgacgcgctgaatcagtcattacttctgaccgtatctggtgatgagctgacaggcaaaactgtactggacggaacgtcacaaaaccctcttcagaatgatgccttgacgccatcagtgagtggcctgactctgaattacagcctctatggtcagaaaggctcaggatatgaaacagttagcgctttaaccgaattacgatcaacaggcggtgagttcggggtgttcagcagcgggttgaattcccggttacttaactcagaaggacgctcttccgttgatacggagcggcttgatacccgctggacatacagcaaccctgaaaaacgaatcagcgttatcgctggtgacggttataccgaggcgctgtcgtggggacggcgcgtccgttacggggggctaaccatcacgcgggattattcgttacaaccttctgttaatacaggctcccggtcagtgctgacggacagtgtgaccttaccttcgacggttgatctgtatgtcaacgggattaaaaacagcagccagcaggtctctcccggccagttcgcgttgagtaccaccccgacatttacgggcggggggatggctgaagtggtgatcactgatatcaatggtcggaaacggatggtcagtcttgatgtttatggtacacagaacatactggccgacgggtatcatacagagtcgttcagtctgggatggttgagggagaactatgcagagacctcttttgactacaacagccatctgcttctcagcggggcgtggcgttatggcgtcaacaataatctgacgttggaggcgcatacgcaaatggctcagggacggttgatgctggggggcgcagggctgtcatggctgacatcaccgtggacaggcattatcagtctgaatgcggcgggcagtcagtacgaaggggcccacgggcagcagtctggttttggctggcagtggaatcgcgggggtgtgggattctccgtcagccatcagcagtacagcggaaattattgcgatctggcgtgtcttgccggtagtcagcagcaaaaaaagagtgacagtatatggctgacaaccggcacagacagtgccggtaatttcggcctcggtgtggtggagcagcagtatccctcaacagggcgttcccgttacggcagtatatcatggacgaagacgcttgatggtggtctgaccctgtcagtctctgcatccagaatgatcaccggggatgagcgacaaaccctgttctattccggtctaagtatccctctgggtactcgctaccgggtatcccttcaggcagacaggcaaaacggaaccacaggcacacaatggcagttaacatcactggccgatcgtacacaaccagactggggctggcagatttccagtcagcagggggaaagtaatctcttccatgcggaggtaaaccggactgcaatgacccatgaatggcaggcaggaactgatgttcagaggggagataagggtttctacgcctcactggacggtacgcttggctggctgggaaatcatttatatgccatgcgcaatgtgccggatgcgtttgctgttgtggacaccaacggtgtgccggatattccggttaagttgcataacaacaccgtagggcgaacagatgagcagggttatctgctgctgacggacctgaatgggtggctgcctaaccagattgcgatagatcccttgtctcttccgggtgattaccgggcaccggagacggtagcgacggttgttccccgtgctgggagtggtgtcagtgcccattttaatgtctatcgtgcccgtgctgtagtgttgaaactgaaaaatacgtccggggcagatattgatgtcggaagtgctgttaccgtgttgacgaaagatggaacctcggtagcatcgcacccggcaggaaatatcgtggggtataacggggatgtgtatctggaaaaccctccggaaggtggacaggttgaggtccatacgccatcaggtcagtgtgtggcagatattccggatatggcaagtcacacaaaaacgattgaacaggcagaggtggtatgtcattag

SEQ ID NO: 237770 - DNA, 717 bp, Klebsiella pneumoniae
atgaacaatacgatgaagtgcctttacgggctcttgacgcttgtcgcttctgtttcttccttttctttattcgctgctagtcttcaggtcacgcccgttaacctgttttttgaaaaaaatgaaaacgcgaaagccgtttacctgagtaactccggtccacatgacgtgcgggcgcagctccggctgtacctctgggagcaggaaaacggtaaggatgtcctgaccgacgcacgcgaccttgttgccagtccaccaatgacacaaatccctccgggcaaaacacagatggtgcgaatgctaatggtccaacccccccccggcagcagggaaagaagctggcgtctaattgttgatgagttacctccggccattgattccactgcatcctcagacaatcaggttaatttccttttacggtattccgttcccgtctttgctggcggggatacctccccagatatcagcaggatccatgtccggctggaagggaaccggttgtgggtcagaaacgataatcccgttcatatcaaactgagtaacgtcaggctgctgaagggaaaacagacggtaacagtaactgcaggcctgatgggttatgtgctgggcggaaaacagatggtatggcctgttggggcggctagtccgggcatgcaaaaggtggagttttcgctgaatgacagtccggctcttaaaagccttccgcttcagtcaccttag

SEQ ID NO: 237771 - DNA, 492 bp, Klebsiella pneumoniae
atgttcttcaataaactcaataagaaagtcgtctttttctctttgttactgtgtgttggtacacagcaagcagtagctgcacaggatcagactacacatgcaaacatggaagttactctggaagtgcttaagtcttgttcatttactgcggacaaaatggattttggtcagcataaatccgatgaaggcaacagccttcaagcttccagtaacctgaatattgtctgtaccaaaaataccccgttcagtatcacgactgcgagcagcgatctgtcaatggagccagtcagtggtgagggtgagaaggtaaactttgaactgtataccgacaataacaacagttcacctgtcagcaacagcgctgcgctgtctgggaccggtactggtgaagcacagaccctgactctctggggtaaagtccccgcaacagaattagcaaaagcttcagctggtaagtatcaggggaatgttaccctgaacatgctctactaa

SEQ ID NO: 237772 - DNA, 222 bp, Klebsiella pneumoniae
atgaatacccataagcttctggatacatacatgttagttggtgccggtctttctcgcgtcaaatatgagattttttcaggagatgaaggatcatatgcgtttattacgatttacgcatatgagcctcatttccatgttaggggttatgattccttaaagttagatgaagctgttgatatcaaagagcagatcgaagggcattttgctgagagatatcagtag

SEQ ID NO: 237773 - DNA, 327 bp, Klebsiella pneumoniae
atggggttttccgcgacgtttgcggaatggttcgacgtcggcgacgaaccaggaacgtttcggcttgaggtagatgtaaacgatatcggcattaccccgaaaacactggacgagcttaatcgtctgattggggaagcgaaaccagtcagccgtcaaatatcgcaactgacaatatctgttggaattgaggggattgccaatgtgggcgcctcttttttggatggtgagatggttacggtatatccgccaggatatgacccgggcaacggtatttactacgacggtgaaacgcactacgacagtaattttaattatgcagagggctga

SEQ ID NO: 237774 - DNA, 216 bp, Klebsiella pneumoniae
atgaaatcagcatatatcagttatttcgaagggtacgacgcaaaagggaatctgatctacaacgggaacggcgctgcaaccgtagagcacagcgatggtgaatgcatcgacccgtcagagcttaaagatcagcattgcaccttcctgctgaaaaaagccagagaaaccaacaatcttgtttcccggattgttatcaaaaaccttatgaaattgtga

SEQ ID NO: 237775 - DNA, 252 bp, Klebsiella pneumoniae
atgagtcattcacaggactacataaagggcgccattgctgcgcttaacgaagttaaggccattgggttagccacagccatgcacgcggggatccttcacgggaaagaaaccggggatgcggtaaaagcaacggtcgatggtgttactgatccgctcagagtgggaaggctgcgcgcctacggaaacgccatcaacattgaagcggcgacagcgttcataaaggcatatatggcggcggtggattatgtctga

SEQ ID NO: 237776 - DNA, 228 bp, Klebsiella pneumoniae
atgcatccgcgtctctccgttatatgcagcgcaccgctgcctgtctgcaccagggcgctagccgccctgaaatgcttcgcccgcggtcagcgcaatttttcccgcgttaaaccgcatgcctatctcgtgatccgcattggccgccgctggcgcttgctcagtaagaacggcggccagcagtggcgactcatgacccacgaaacctacaaccaggaatatcgaaaatga

SEQ ID NO: 237777 - DNA, 549 bp, Klebsiella pneumoniae
atgaataacttcatgttagatgttcgcgtgctgggaaaatcccctgactccccaatttttgccatcgagtgtgctttctttgagccgtccaccgggaagatcggccccggatactatcgcgctgttgatatcacaacggtcggcggtatttatcctgaggcggttttgcagctcatgagggcggactctgcgcaacgggcagaggtcatcaacgcaacgtgcagcgcgatcgatgctgttgcaggagcctgtcgttttatagcctcaacagcttcaaagcacgagaagctctattgctggtctgcgggtgattctcttagtgttgcggcgctggcgcatgctgtttcccggtatgatttgagtccattcttaccggcatttgaagtcagaaacctttcaacgctcattcatatcgcaggcgttaccgggtacgccccgcacccgcgccgctctttcactggcggcttgttgaccgatgccgtttatcgcaccgagcaggcatgtgagatctggcagcgcctgacctccccgcaccttgaatcgctgtga

SEQ ID NO: 237778 - DNA, 225 bp, Klebsiella pneumoniae
atgtcgatcaagtcaataaagttggaaagcggaataagtgatccggagtttatgcaaataaacaccgatgcgcgcataagtgagcgcgcccaattgttggggctgcttcgcatctacatgggcttactgaaaaaggaaagcctcaccccggaagagatttattcatcagtcgagcggtggatcgtcaaccgcgaattaaccaataacgagggtaacaagcaatga

SEQ ID NO: 237779 - DNA, 231 bp, Klebsiella pneumoniae
atgagcactgaaaacatcccttcaattgccagcctgctgaagcatggatgccaggtcacacatttcaggaatacacgcggttggattgaaactccagacgggcgtttctttaagccggaacctaataaggttcgctttattaaagaaatgaacagaccttttatttatacgcagaaaataaataaaggaattgtcgccgcgcttgctagcgcgattaaaaaaatcctgtag

SEQ ID NO: 237780 - DNA, 219 bp, Klebsiella pneumoniae
atgaaaagtggaattagcggagcggtctcgcagctgaatagtaaaaccagcctttaccgtggctttactattcttaagctcccacgcaaaaaaccatacagccgccagcgttatcagatcacgcatagcggccattacttcgggattgactttgcattagctgaagcatgcaaaacgatagaccgaattattaataaaaaccgatttattactcattaa

SEQ ID NO: 237781 - DNA, 273 bp, Klebsiella pneumoniae
atggaagcgagcgattacgcgatcaaatatccgcttgatgctgtccatgtggagaagttcgccgagctgatcggcaagccaaagtccgccgtggaagaaatgatcaaggcaagaaagctgccggtgattgagctgcgcgacccaaccaaaccgaacgcccgcgcgggtgaacgctgggtgtatatccctgagttcaaccgggcagtgcgtgaggcgtattacaaccgcccggtagaacagcgtgatgcctggttgctgtggatggggctttga

SEQ ID NO: 237782 - DNA, 981 bp, Klebsiella pneumoniae
atgtcgattaagaagctcgatgatggtcgctatatggtggacattagaccgcgcggggcagcaggacgccgcatccgcaggacgtttgacagaaaggcagaagctaccgcgtttgagcaatacacgatagcgaacgccagccaaaaagaatgggctggtaagcgcgccgaccggcggcctttaagtgagttgctcgatgcctggtggcggtaccacgggcaaaaccatgaaaacggtaaaaaggaattcaatcaccttttgaagacaataaacggcctcggcgatcccgccgttagtcggttaagcaaaagggatttaatggattaccgctcaagccgtttgaatgcagggatcaaggcatcaacgattaatcgtgagatgtaccgattatccggcatgtttacgaagttaatacagatagaggaatttagcgggcagcaccccgttaacgggcttccaccactggcggaagaaaacccggaaatgacatttctggagcgggaagagatcagcagtttgttgaacgttctggagggggattatctgttagttgccctgttatgcctgagcactggcgggagatggtcagaggtcgccacgttgaagcggtcgaatatcgtcaactgccgcgttactttcctgaagacaaaaaatgggaaaaaacggacggtgccaatctctgaagaactggaaaaaaaggtgaaaaaagaggccagcggaaagctgttcaaagtggattatgagaggttctgcaagatactgcgggaggagaagccggatatcccggaaaaccaggcaacgcatattctacgccacacctttgcaagccacttcatgatgaacggcgggaatatcatcgcactgcaacagatcctggggcatgcgaatattcagcaaacgatggtctatgcgcacctgtcgcctgactacctgcaaaacgcggtgacgttgaacccgttacaggggggaattgcggcataa

SEQ ID NO: 237783 - DNA, 843 bp, Klebsiella pneumoniae
atgtctaaaagtaaagtatcacctcaaacgagctatgaacaaatggtttgtggttatgttatgcctatctcagatacccctgattatcgctcagggcactgggaagatataaagtcaatgttggatgaagttactatatctattgggtttaaagaaagtagaatagttagtactggtctcgatgtttcaacaatacataaaagaattgtaaataatatttataatgacgacataataatatgtgatgtaagttctcgaaatcctaatgtaatgtttgagttagggatgaggatcgcctttgataaaccggtggtaattataaaggataatgcaacgcaatactgtttcgattctggcacaatagagcacctcgaatatcctaaagatatgagatattctgagatcgaaaagtttaaggctctattaaaacagaaaattgaaaataccatagatcatcataaatcaaatcctgaagcaagtcctatattaaatagtttcggttcatttactgcgattaagcctaatctccctgaaatgagcgaggctgatttatttaagtcagacttacaagagatcaagtatcttttggctaagagcttaagaaaccaggatgacttatggaatgggacaacaaactggattaaagaacagttccctaaagaaatgttcggtagtaccgatgatgagatttttgcaaatgtaacctcagtgccaggcataaaagtagagggtgttgatgataaatatgtttatgttttagcccgaacaacaacgccattgaagatattgtttcggaaatttaggactggagtttcacaaaattcattaggattgaatgattga

SEQ ID NO: 237784 - DNA, 189 bp, Klebsiella pneumoniae
atgttgatcgcgaactgcgtgggcacttcacccgccccggtagtcgttgatacggcgtgcaactgggtgagggtcatctacttgaccgaccacgatatcgacgtgctggatatgcagaccaagcgcgacattctggcgcacaacaaagcagtgcaggccaactgccatagcattacccctgctcattga

SEQ ID NO: 237785 - DNA, 1929 bp, Klebsiella pneumoniae
atggctgattttgacccggcgctggggagtagttcccctgcggtactgctcgataacgccactcgcctggataaactggtgaacgggacagaggaagaggtttccgaccgtggcggggagcctcttcctacctggcgcaatatggtggtgaagattgatgcgcaagtgagtcaactggaaagcatcatcggcggacttgacggcgatttgccaattcttgactcagtggaatcagggttggcggcaacatccgagggacagtattttcgcgttccgggcggggcggaggaaaccacttctttttacatctacaaaaacgttagcggcgtggccgatcttgtcgcaagacaactgggatacgcagaaataaatgaaattaaagagttggtgttttataaaaccagccccctaatttcgtataacgaagattattccgggaacaggtttgctgcttattcaccagatggcggtttttttctacctggaatgataggcgcattgcaggatcagtacgcgattaaaaatgcaggcaagataaaggtcgggatggcgaaggccgaaactatctcagaagttgtcggcacagacgaaactattttcctgtcacgtcagaatgatgacaccggcagcggctacgttgttttttctcccgatggcggaatgtatttgctcggaatgataggcgcattgcaggatcagtacgcgattaaaaatgcagcagatattaaagctggcatcgcgggcataaacgccgttcaggcatcagtggaagccatgaggccgacactgattgatcgccttttttatgcgcagaacaaagcgggggaactggtcagccaggcggtgcgtatcgggcgggtaacccgccgccagaagaccggctataacctgaactcgtggccacagggcaaactctgcattgacagtaacgggcggatttattgcggttacaacagtgcaccatcccacggcggcgcgggcacggtacccgtactgacatgcagtgatgacgatggcgtcagctggtcagacccggttcagattgtcaccggtgaaaactacgcgcgcggaacggactggtggtcgctgggtgtggatagcgataatcacctgtggggtattgttcgcagccggggtgcaaccaacctggtcggcgtgacgttctacaacctgtataaatcgacggacggcggcgcgtcgtgggtaaaagtcggcgaaatttcgtcagtaacccagaccatcagtgatgttgaatacgtgccggaactgttccacgacatgtgctatatccccaccaccgggcgcatggtaacggggtaccattttgctaattcgtcgcgcgttggtttcatgtcatttgatatcagcgacccgttaaacaccatcattacgcaggatgtgatcgcgcatggtgagttctccacaaccgtttattgtgaacctacgatcgccgtggaatatacacggaatgcagaggggaccatttatggtggcctacgcacgcaaacaaccgggaacccgtctcagttgtacttcatgaatacagacctgaccggattcacccggtttaacgctccggagtctgtgcagtacagccccatgacaattcgccgcattaacggccagtttattttactgacggtagagcgctacaacacgggcgcgatgaatttatggtttggtacgccagctgatttctacagcatggccgcatcaaatttctggaaaatgccgattggtaaaattgtggatgaaaccactaccggagcctcaaacgttggcgtacaggatatggaaatttacggagaccacctgtatttcgcctggtctaacgaaacacaaaatacgtatgccgacacctatatcgggaaaatgaacatcgtcaacccggcatcgttgctcaataacgactatctggaaggattataa

SEQ ID NO: 237786 - DNA, 756 bp, Klebsiella pneumoniae
atggctggtgcagttattctgaaatcaaaaaacacgctggtagcgggtcgctctccgatcgcgctgggcgacgcacttcatcttgaggcagcccacgcaacggttattggtgagaatgtcaacctggtcgattacctcaacagtgccaggatattcacacaactgtcgggggcaaacgcagagttgccctccccaccggtcattcagactgtggatggttttgaagagctgaactttcccaaaggtgccgggctggcgtcagcttatgatgcgctgagcggggccggagaggctacgatttatctggtgctccgggctgatttgtcctcagccgatgctaatggagtgatattccgctggatggccacctataccggagtcagcgcaacagataaaggcttcattctgcgtaaatacgcttccgccgcctctattcagtggcttgtagacggtggtgcaaataccacctcaatgtcacaggtgtttgcgaaatccggttatatcgtggcgtgcgtcggttggtcggtcgccaataatattgccttcttcaatattaacgggaccgaagtatctaacacgatgaccatttctccacctgaaggcggcgggttaatgtcgttcgggtacagccctgattatgctgaccagcgatgcccgatggggttacgtaccgtgctggggtatggcgcatatcacgatgccaccacgcgcgcgcttatggtgcagaaactgatggaagataatggattaagctaa

SEQ ID NO: 237787 - DNA, 378 bp, Klebsiella pneumoniae; identical to SEQ ID NO: 227033

SEQ ID NO: 237788 - DNA, 333 bp, Klebsiella pneumoniae
atggctttagttagctgcccggaatgccggaaagaagtgagtgattcagcgttgaggtgtccttcctgcggcaaacaactaagaaaaccgcgccgctcaatttttgggctacttataaaatggatcttcattctatttaacatcttcatgatctacgccctctttaaaggcctgggcggaaccggtgaagttattaatcatgccacatcggaagcggaaagggctggggctgctttaggggctggtctgggaatgatggccattggcactatttgggttattggcgacattgttattggaatactggtgtttcttacaagaccaaagggatga

SEQ ID NO: 237789 - DNA, 1074 bp, Klebsiella pneumoniae
gtgacaacattttatacagcattgactcaggccggccaggatgcgctggcgaacgctgcgctgacaggggagcctgtaggattttcgtggatgggtgttggcgatggcgacggagggcgcgtcaaggttacctctgcccagacagggctagtcaatgagaaataccgcgcgccgctcaaccgattggtcattgcagatcaaggcgcgaacattattcgtgccgaaatgattatgccaccggaggttggtgggttctggttgcgtgaagcggcactctatgacgatgagggtgtatgcctagcggttgccagtgtgcctgactcatataagccaatgttgacagaaggatcggggaggcttcaggcggtgaatttgtggattgcggtagccaatacggctgacgtgcttttgaaaacagatccaactgttatccttgccactcgggatgaagtcaacagagcgaaaaatgaagcaaaggattacaccgatgatgctatgagccagctaaataccgacattcagaaatccatcactgacgctatcgttgcggcacgccgggacttctgggaagaggaaaatccactcggcacggtgcgcttctttgctcaaaatatcaatccgaacgagaaatggccgtggtcgcaatggacttacactggcgagaataaaacaatccgcgtcggtaaggccgatggatcaaatgtgggtgccactggtggcagcgacactgttacactccagaaagccaacctccccgccgtacagattaacgtgactggatggactgatgaacaccaggggagtaatcaggaaacgactgaaaatggcgcgcacaatcaccagggtggagatggcgcaccgggcgcttcatggagagaaaccactcatggaacagacaaccagaaaagcacaacttataacaatacaagcgatgcaccagcgcataagcatggtttaactattccgcctcatagtcacacagttactgggaaaacggataatcttggtaacggtcaggcaattaacgtcgttgaggcgcacgccttgctgatgtgctgggcgcgggttgcatag

SEQ ID NO: 237790 - DNA, 144 bp, Klebsiella pneumoniae
atgtcgttcgggtacagccctgattatgctgaccagcgatgcccgatggggttacgtaccgtgctggggtatggcgcatatcacgatgccaccacgcgcggcgcaatggtgcagcaactgatgtcagaaaataacatttcttaa

SEQ ID NO: 237791 - DNA, 1362 bp, Klebsiella pneumoniae
atggctaagtataaggcgtatccggagtataagtattcagagattgagtggctgggaaaaatccctagtggctggttattgaaaaaagctaaatacatttttcagagagtccaacgtcctcttcgcgatattgatggcgtggtgaccgcattccgcgatggacaggttactcttaggactaatcggcgaaccgatggatttacaaattctgttaaagaaattggttatcaaggtgtacgtcgtaacgatttggtaatccacgcgatggatggatttgctggtgctataggtgttagtgattcagacggaaaatgctctcctgtttgttcggtatgtattccttggcaaaaccaacctctaaatatgcgcttttatgggtatttagttcgacagttagctgtgactgactttattctttctttggcgaaaggtatacgtgagcgttcaacagaatttagatttagtgaattctcagggttgatgttacccatccctccaatatatgaacaagaccaaatagccaaatttctcgatcacgaaaccgcaaaaatcgataacctgatcgagaagcaacagcaactgattgaactgctgaaagaaaaacgtcaggcagtgattagtcatgctgtcaccaaagggctaaacccagatgtgccgatgaaagattctggtgttgagtggttaggggaagtgccggagcattggtgtatcaatagccttaatcatgttttagccgctattggcgacgtagatcattacatgcctcagtctgttgatgatggtattccatatgttatgactggtgatttaactgaatttgtgagtgggattgagttcagtaaatgcaagcaggttaatctccgagactatttaaaactctcgaagaaaattaaaacctgcttgggtgatgtaattatggcaagatatgcaacaattggaactgtatcatatgttgatatagataaggattttttagtttcttattcttgtgtaactatcaaacctaatccttctaaagttctcggtttatatctttattattattttaaatcaaattcttttttgcaaggaattcagtatcaagttaatacaaatactcaaggcaatgttgggataaatgaccttagcaaaatgaaaatagtattgcctagtatcaaggaacaagaagagataattgcccatttacagatgaatttggaacaattggatgacttgtcaacgaaatctacacaagcaattaatttaattcaggaacgccgcaccgcccttatctccgccgccgtcaccggaaaaatcgacgtccgcgactgggttgccccggatacgcaggatgttgaggagccacaggaggccaccgcatga

SEQ ID NO: 237792 - DNA, 225 bp, Klebsiella pneumoniae
atgagtcagccaaatccactttgtgtgggcattgatgtttccaaagccacactggacatcgctgccagcagtgatgttgctcagtttacagtcagcaatgactctgatggctttaacgcgattattaccggactgagacggtactccgttgctctggttctgatggaggccactggtgggctggaggttgcggtggcctgttcgcttcaggccgaaggtttttga

SEQ ID NO: 237793 - DNA, 720 bp, Klebsiella pneumoniae; identical to SEQ ID NO: 129139

SEQ ID NO: 237794 - DNA, 669 bp, Klebsiella pneumoniae; identical to SEQ ID NO: 129140

SEQ ID NO: 237795 - DNA, 1545 bp, Klebsiella pneumoniae; identical to SEQ ID NO: 129141

SEQ ID NO: 237796 - DNA, 690 bp, Klebsiella pneumoniae; identical to SEQ ID NO: 129142

SEQ ID NO: 237797 - DNA, 1005 bp, Klebsiella pneumoniae; identical to SEQ ID NO: 196488

SEQ ID NO: 237798 - DNA, 921 bp, Klebsiella pneumoniae; identical to SEQ ID NO: 129144

SEQ ID NO: 237799 - DNA, 1107 bp, Klebsiella pneumoniae; identical to SEQ ID NO: 129145

SEQ ID NO: 237800 - DNA, 1107 bp, Klebsiella pneumoniae; identical to SEQ ID NO: 196491

SEQ ID NO: 237801 - DNA, 1785 bp, Klebsiella pneumoniae; identical to SEQ ID NO: 129147

SEQ ID NO: 237802 - DNA, 1008 bp, Klebsiella pneumoniae
ttgaaatacttggcctatattgaatctccattgcaagcatttaatttactagagtatgtagaggttaataaaataacagttgatattttgattattaataaaaaaactaccatctctttacataattactctcagatatcttttgttctaagtaaacttaaagctaaaacaatctttgaaatagatattgaggccggaagaaaaaatattttcaaaataaagaagactattgatgctttcctcagtaatattaaggagtcatttttattgattggtggtgaatacagatcaatgattttttggtatatctgtggaaagttttcacaacgtaaggttgtaattttggatgatggtactgcaacactgcgtatcaatagaacttatcgtcattttaaaagattaatgcgcgatctgttgatgcgtgccttaggttttgtggatgcattcattgagccaattgtttttttctctgtatatgatcttactaataaaattgccaagcacgatatattgattttacataaatatgaatcttttcagggtaaaatggcatccttttctaaggggcaaataacaatctatattattggttcacctttttttgaagctggcgttattgatgacaataatattgagatagtaataactttagaaatgataaataaacttaaagggaaatactccacttatgatattgtatatattccgcacaggcgcgagagtgaagacaagctagagcgaattagggaagttatacccgtggaaaaactaggttatccatttgagttactccccttagtttcagagaaaaagattactatcattgctggattttattcctcgctttttgataatatgcatgctatatgtggtaaggatttaataatcgaatgtttttgtttgcctgaaaaggttattaatcctgcttggtctggttttgtatctgatgtttatgaaaactataaaaaatacccgagcgattcttttattttcaaccaaatcacatga

SEQ ID NO: 237803 - DNA, 507 bp, Klebsiella pneumoniae
atgattcgtaaggtaaaaaagatatatagaaatattttgaaagctatctattctaataaagtacgtcgtaacgctttgattataggtgaaaatttaaatattaattttaaaactagagtgacatctaaaacctcgttgggtgataattttaactctaatggattgaacatcataggtaaggggcgggtaaaagttggtaataattttcattgtgggtttggttgtattattttgactgagaatcataatcatatgggaagcgcaattccttacgacacaacatatataatcaaagaaacaataattgaggataatgtatggcttggaattaatgtcatcttattgccaggtgttacaattggtgagggggctattatacaggctggtagtgttgttgtgtgtgatatacctccattagctattgctggtggtcatcccgcaaaagttttctcatggagagataaagagcattattataaattaaaaaatgagaagtcttttcattaa

SEQ ID NO: 237804 - DNA, 1287 bp, Klebsiella pneumoniae
ttggggcgctttagatttcttggaaaaatatctataatgaaaaaattagctggtgcagcgatgctatcagcaggtgatatcttagggaagctgattggcttccttattttaccgtatttgacttccaaaatgggagtctctgaatatggcctgttgacattatatctttcttttattcaaatacttatcatattaatatcctttagtggacaaggacttttgccagtcaaatatatacaggagaatgaaaatgcaagtttgatttttaggcacgacaatattaatttagccattttttcatcaatttttattttgttagtttttgttttttttaaatttttcttgagtattaatatccctttttctgatgctttttttattgtttttgcgtctttggtacaaggggttaatgttattaatctttcacatttaaggattagccaaacatataaattagcttctattgggcaattctcgttatcagttctcaacgtattatttacgattgtcctattttctttcttagatggaactgccgaatatagattaatggcggtaacattatcttttcttttagttcagcttttttattcctattctattttttcaaaactaaacgtggattttagcaaaaggaagacaagtaaacggcaatcatataaggaaattatgttatatggcatatctctgtggccacatcatggtagttattggataaaatcaacaatcgatcgtttttttattgcccattatatgagtgttgctgttgtcggcgtttatggccttgcattacagctatcatcaatattaatgcttttttttagtgtcatttctcaagcttttcaaccgtttatttacagatatctgaatgaaaaagatttcctttctgttaaacgaattcaatttatatatgtttgttttgtattgttttgtgcccttatttattatatcgttaccccttatgcattcccttacctttttagccataaattcaataaggcaataccctattttaactatctactcccagggacggcctttatgtgtatttattatatctatactcatgtgctgtttttttacaagaggaacaaaataatttcgaccattaccgcttcatcaatgcttgcccatctcattggtatcctttgtgttatattaatacatatttcggtcgagatgttttgcgttgtatatactgtttctagtgcgtttgcatgtattgctacggcctgcgtttgcagcaaaaatattaaagcaatgaggaggagtgtgaatgattcgtaa

SEQ ID NO: 237805 - DNA, 2241 bp, Klebsiella pneumoniae
atgttgattcaaaataaagtttcagatttccttgttttcgaaaccgagtcagttttaaaagctctcgaaaaaattaatcagaacaaaaacagaattgtttttattgtaaatgaaaatggtaaactcagtggttcgttttcagatggtgactttcgtcgttggataactaccggcgatttcgattttaatattgagatttctcaagtaatgaacaccgcatttctctctaagaggattgatgcttctcgtagagaaatcgagagtttatttaccaagggcataaatgttataccgttaatcgatgaatatagacgttttgtcgcggttgcaatacaagatgatagaggtatttcaattggcaagcatgtaatttcagagtcctcacccgcgtttattattgctgaaattggtaataaccataatggtgatatcaacttggcaaaacatcttgttgatcttgctgttgaagctaacgctgattgcgtaaaatttcaaatgagggatttaggtcagttgtataaaggaggcgaggataaagataaatcagcagatcttggtgctcagtatacacatgatctgcttagtcgttttcaattaagtaacgaaagtttgattgaagtttttgactattgtaaagctaaagggttgacaccaatgtgtacaccttgggatttaaatagtcttaacgtactagagcagtatggaatggaagcatataaagttgcttcggcagattttaccaaccatgaaatgttagaagcacttgctgctacaggtaaaccactaatttgttccactgggatgtgtactgaagctgaaatcaaaaaatctgttgaattccttaaatctttaagtgctcaatttgtaattttgcattgtaattctacgtatcctacgcccttcaaagatgtaaatttatcctatataaaaagattgcaaaatattactggtggcgttgttggttattcaggacacgaacgtggtatctctattcctgttgcagcagttgcacttggagctaaggtaatcgaaaaacactttaccattgataaagcaatggaaggcaatgaccataaggtttcattgcttccaaatgaattctcagatatggtatctatgattcgcgaggtcgaagagtcaatgggtaagggaggtgaaaggttaatcacgcaaggtgaaatgataaatcgtgagaatcttgcaaaaagtttgatcattaatcaagatctaaaaaaagggcagataataactcgcagtatggttgagattaaaagccctggacaaggtttacagccattatatatcgaccagttaattgggcggagtgctattagagattttgtgaagggtgattttttttatgagtctgatttaaatgacgtgccagttgaatcaaggaattattcatttagtcgcccgtttggtattcctgttcgttatcacgattatgataagctcaaggctaaatcaaaccttgattttgtggaatttcatttaagctatcaagatcttgaacttaatttagctgattttttcattgatcaacaagcaatgggatttgcggttcatagccccgaattgtttgctaatgatcacatacttgatcttgcctctgaaaatgatgaatatagaatcaaatccattgattatttaaacaaagtatgcgagataacccggaaacttaaacattatttccctgttacagaacggcctgttatagtagtaaatgctggcgggttcaatactaaaggttttatacctaaagaaaagacagcccagctctataagcgtgtagctgaatcgctatcccaagttaaccaagaaggtgttgaaataattattcaaacgatgcctccatttccatggcattttggtgggcagagttaccataatttatttgttgattatactgaaatttctaatttttgtagcaatacaggctatcgtatctgttttgatacatctcactcgatgatggcttgtaattattatggctgggattttcacgaattcacattagctgttgcaaaatatacagcacatatgcacattgttgatgcattaggagttgatggcgaaggggtacaaatcggtaagggcgatgtggatttcgaaatactggcggaggaccttaatcgagatgcgccaaatattcaattcatccctgaagtatggcagggccataaaaatagcggtgagggtttttggggcgctttagatttcttggaaaaatatctataa

SEQ ID NO: 237806 - DNA, 690 bp, Klebsiella pneumoniae
atgagtaatttagctataatacctgcacgaggcggttcaaaagggattccgggtaaaaatatcaaaaatattgcagggaaacctcttattgcatggagcattgaacatgctctccaatcagaatctattgatcgtgtaatagtaagcactgattcagaagaaattgcaaaaattgcaagggattttggtgctgaagttccttttttacggcctccagaattagcaaatgataaggctcctactgagcccagtttgatccactgcatcaattggcttgctgaacatgaaagttataaaccagattttatagtcttattgcaagcaacatcgccagttcgaagttccgaagtaattgatagtgcttttgaaaaattaataaatcaaaatgctgattcattgcttaccgtttgtgagttttggcatttcttatgggaaaattctattgagccaaaggctttatatgattatatgaatcgtccacgtagacaggatattctccctaaaaatataaaatttaaggaaaatggttctgtttatattactaaaacagatattcttatggaaacgaaaaacagacttggaggtaaaattgcttcttttgtgatgcctgaggaggagagctttgaaattgatactcagattgactgggatattgtagaagttattttacagaaaagaattgagggctaa

SEQ ID NO: 237807 - DNA, 1155 bp, Klebsiella pneumoniae
atgataaatagaattaatgtagggattgtgactgattggttggtaacatttgctggttcagaaaaggtagtcgcagaatttattaatgttttccctgattcagagttatatgcggttattgatttcttaaaaaaagaagataaaaataaatttttaaataaaaccattcatactagttttattcaaaaattaccgaatgcaaaaaaaaattatcaaaaatacttacctctaatgccgttcgcaattgagcaactcgatgttactaaacatcagattatactgtccagtagtcatgctgttgcaaaaggtgtccttactggacctgaccaattacatattagttatgtacattctcctatacggtatgcatgggatttgcaaaatcaatatttaatagaatcatctctggataagggctgtaaatcgattatggcacgctggatattgcataaaatgagaatatgggatgttcggactgcaaatggggttgatcactttgtagccaactcaagatttattgcaagacgaattcagaaagtgtacggcaggactgcagatgttatatatccgccagttgatactaatcgctttaaactcaataccaataaagatgactattatataacagcatctagattagtaccttataaacgtgttgatttaatcgttgaagccttcacccatatgccccataaaaaattaattgttgttggtgacggtcctgaaatgaaaaaaataaagctgaaagcatcatccaatattgaaattcttggctatcaagataatgataaaatgaatgagctaatggaaagggcaaaagcatttgttttttgtgcagaagaagatttcggtatttctcctgttgaagctatggcatgtggcactcccgtaattgcctttggtaaaggtggtgtactagaatctgttgtaccattaggcgaaaacaaaccaacaggaatttttttcgaagagcaatctgtttcatcaatatgctctgtaattcagaaatttgaagaaaaatatgatatttttgatccttttaattccagggaaagagctgaattattttctgaggagcgttttagaaaagaaattacaacttatgtagacgataaatggaaaagttttagagagtcaaagaatgttgtatattaa

SEQ ID NO: 237808 - DNA, 1005 bp, Klebsiella pneumoniae
atgtataaagttctatatgataaaagatggactggagaacacggtattggtcgtttcgcaaaagaaatcgctgataggataaaatttgatgcgttcattgataataaactcaggccgaccaacccacttgacgtttttattactccttggtatttaaaatcatctaaatgcttgtactttacgccagggtttaatgcaccatttttctttgctgataaatcaattataactatccatgatttaaatcacattgatattaaaggtaatgacagccttctaaaaacattatattatgaatacatattgaagcggggttgcagaaaatgtttgaaaatatttactgtttcagagttttctaaaagcagaattgtcgaatggagtaatgtaaatcctgagaaagttgttgttgttggtaatggtgtgtctagtggttttacgccaaaaggagaaatatttcttccaggattcgagtattttctttgtgtgagcaatagaaaaaaacataaaaatgagaaacggttaattgatgcctttgcgattttgagggaaaagtataatattaagttgttattttcaggctcgccaaatgataaaattaatagatatatagaatttaaaaatcttacaaaagatatcattttttgtggacgaatcagtgagaatgattttccaaaatattaccgaggagccaaaggtcttctaatgccttcattatatgaaggttttggtttgcctgttattgaagcgatggcttgtggcgttcccgtgttagcctcaaatacaaccgccttaggtgagttagcgactggttgtgcgatcacgatagatcctaattctatagatgaaatggttgccgggatggaaacattaattacggatcaagacgttagagatactcttattaatcaaggccttgagcgttctaaaaatttctcttgggatgaaacagctcgcataatcaaacatgaaattaaccatattaaattacgtcttcaatcttcatag

SEQ ID NO: 237809 - DNA, 1158 bp, Klebsiella pneumoniae
atgaagaatgtattaatattttgtcgtgcttatccacctagcattggaggtggaggggaaatttctactaagatgctagcagaaaaattatctgaattcggatatcaaattaacgttgttgctgtaaatagtgtgaaagagtacaaaaaagaaagtaaagtgagcatatatagaataccgtacagaaatctatattggtctttggagaaaaaaaatagtaaaattgttaagctgttgtggcattgtattgattcgaataatatctttatgaagaaacaactcaatcagcttttagatgacattaatccagatataatcataacaagtacgatagaagatatatcatctatcgtatggaaaattgcccatactaagcagattagaatcattcatatactacgtagctactctttattgtgtgttaatgcccatatgtataagaatgagaattgtaatgtacagtgtggtggatgtaagatcttaacataccccaaaaagtttaattcaaaatatgtaacagatgttatagggataagtcaatatattctagataaacatattgcaaatggctatttccctaatgctttacaaaatgtgatttataatatgtgcttggatgataaaattgatactaaaaaatatgaggggcgaaataatgatgattatagaattggatatataggccgtatacatattactaaagggattgaattattacttgaagccattaataatataaaggagagttcattatgtagacgcataacagtaatgattgctggcgatggcgatgaaaaatatatacataacctgaaaacaattgcttatgaaaataaaataaatgctgtgtttttaggaaatatgaatgcaaatgaatttttagacatgatagatttactggtagtaccttcgctttggcaggaaccttttggaagagttgtaatcgaaagtctggggcgtaaagtgccagtggccgcgaaaagttccggggggattcctgaactactagagaacaacaaagaatttttatttaattcaagtgaacaattagctaatataattgttatgtacttcaattttcaaattgagtttaagtttgatactgttgcatttgaaactgaaactattctttcaaaatggtcatctttactccgatag

SEQ ID NO: 237810 - DNA, 1545 bp, Klebsiella pneumoniae; identical to SEQ ID NO: 129126

SEQ ID NO: 237811 - DNA, 765 bp, Klebsiella pneumoniae; identical to SEQ ID NO: 129127

SEQ ID NO: 237812 - DNA, 513 bp, Klebsiella pneumoniae
atgcttttagtaaataatattctgggccacgtcaacgaccaggatttttccggtcgtcagacggaccgtgtatggattgcgtcggccgacgcgggtcgccgccggttacgcacttgcagcgaggggggcgtagatctaggcatcgagctgccccgtgtgagctggatgtttgacggcgcagttctgcatgatgatgggatgtgtatattggtcgtctcccgccgccccgaactggtaatggtaatctcgctcaacgagctgggccctgaggcggtgttccggattggccacgctcttgggaaccgtcacagtcctgcggagctacacggtaatgagctccttgtaccggtgaccgatacgcctgatcttgttgcgagatcggtccaggccctcggattgcgtgagctaacgatacgctttgaagaaagaccttttgcggctgcaagacctccaaatggtgtgggggctgcacacgagcaccatcaccccgtcgctaattctgacgatgcttga

SEQ ID NO: 237813 - DNA, 816 bp, Klebsiella pneumoniae; identical to SEQ ID NO: 129129

SEQ ID NO: 237814 - DNA, 612 bp, Klebsiella pneumoniae; identical to SEQ ID NO: 129130

SEQ ID NO: 237815 - DNA, 1716 bp, Klebsiella pneumoniae
atggctcagtctattgagcgttctagatatgtatcactgtacggtcctacggaaggagactgcgtacggctaggcgacactggcctttgggcgaaggtggagcgcgatttctgtgtagggggcgatgagttagtctttggcgcgggcaagacggtacgagggggcaccggttgtgacggtgtgctgaccgctgccgacggcattttggacctgatcataaccaacgctctgatcatcgacgccgttgcgggcatcatcaaggccgacatcggcattaagaatggccggatcgtaggaatcggcaaggctggcgaccccaatcttatggatggcgtaacgccagggctcacggtgggcgtgaacacggatatccgggccgcggaaggacatatcgttacggcgggcggaatcgactgccacgtgcattttattgatccgggacaggtggatgaagctctttcggcggggttcaccacgctgatgggaggagggctcggacccactacggttcccattgcgtcgacaggcacaactaacctggggctaatgctccaagcagctgaggcctttccgataaacttcggtttcattgcaaaagcggcctcgcatgccgtcgagccactgctcgaacagcttgctgcaggcgcagcgggtttgaaaatccatgaggattggggcgcgactccggccatcatcgatgccgccttgaaggccgcggagatcggcggtgggcagatccacttgcacgcagacactctgaacgaatcaggatttgtagagcacactctgcgcgccatggccggacggtgcattcacgcctatcacgtcgagggcgccgggggtgggcacgcgccagacatcatccgcatgtgcggcatatcgaatgtactgccctcatctacgaaccctacgaatccattcaccatcaacacgtttgatgaacatttcgacatggcgatgacgagccatcatctcaatccacgtttgcctgaggacgtggcgtttgcggaaagtcggattcgaaaagaaaccattggcgccgaagacgttctgcacgacatgggagcgatcagcgcgatcggttccgacagccaggggatggggcgcatcggtgaaaccatcgctcgctgttggcagcttgctgacaccatgcgcgagttacggggcgctttgcccgaggatagcggcagcggtgcggacaatttccgaattcgtcgctatatcgccaaatatactaccaatcctgcccttatgttcggcatcgcagatgaagtgggctcgattgagcctggaaagctcgcagaccttattttttggaagccggacagctttggcatcaaaccggaactagtattgaaatctggcttccctgtctgggctcccttgggcgaggctaacgcttctcttatgacctgcgaacctgtgcgttatcgcccgatgtgggggtactttggtcgcgctccgcagtcactcggcgtgcgttttgtctctccatctgccatcgcagccggggtggcccaacgactcgatttgaaagctaccttgcgtccagtggccgacacgcgccgtctcactaaacgcgatatggtgctgaatgatgtgttacctaaaattgacgtcgaccctgaaaactttcgggtttacatcgatggacaggccatcgacagccctcccacatcgcaggtctctctcggccaatcatatatgttgaaataa

SEQ ID NO: 237816 - DNA, 690 bp, Klebsiella pneumoniae
atgcgtttactgccccgtgaggtggatcgacttcttttgcgccaggctgctgaactggcgcgatcgcgccaggcgcgcggccttttactcagcgagcccgaggcacgcgcgattattgcggataccgtctgcgaaggtgcgcgcggaggaggtacggttaccgagatggtctcgatcgcgtccgggctgttgactgaagacgacgtgatggaaggggtatcagagcgcctcgatgcagtcatggtcgagggtttcttcccggacggtcaaaagctggtttgcatacacgaccccatcggcccaggcaaatccactgtcgctggcgcgcctcaccggccccgctggcgcctgggtgagcagccggtgataatcaatacggatcggccaacggtgaccttgcgtgtccaaagcaccgcggaccggcccattcagcttggatcgcactatcacttcttcgaggtcaatccagccctgcgcttcgatcgtgccgccgcctacgggttccggctcgacgtcccagctgcaaccacggtgcgcttcgagccgggagacacccgcctggttgacttggtggctattgggggagcccgagttgtatatggtctggcaggcctagtgaacggggccttggatgacccaacagtgcgctctgccgcgatgatccggttggaaagttttttacaggagtag

SEQ ID NO: 237817 - DNA, 708 bp, Klebsiella pneumoniae; identical to SEQ ID NO: 129133

SEQ ID NO: 237818 - DNA, 1794 bp, Klebsiella pneumoniae; identical to SEQ ID NO: 129134

SEQ ID NO: 237819 - DNA, 837 bp, Klebsiella pneumoniae
gtggaggctttaccgcttgacattttgacgactgccgcaattttgttcgtggtttcgacgggcctcatgatcatcctcggtgtaatgaagctcatcaattttgctcatggagcatttttgaccactggcggatacatagcttatcttgtcggcgctgctggcctcaacccatggctcgctgtcccggcggcggccatcttggggctcttggcggggctcgtgattgaacgaactattatcagaccgctttatcatcggccgttggatgcgatattggccacatggggactaggcattgttatcgggcaagtatttgcattgactttcgggcggggcgtgcagttcgcgccctcaccgattctaggtacgatagatgtttttggaagtgaatactctggatatcggctggccatgctagctattgccatagtgttggcagttgcgcttagtgctttgttgagcttcacccgcttcggattgaatgcacgtgcagtcattgccaatgaaccgctggctaggggcttaggtatagatagcgcgaatgttcgatccataactttcggcttgggtgcaggactagcgtgcgcagccggagcgttaatcaccccattgctctcggtcgatccaaacatgggactgccttggttggtgaatagctttatgctagtgatgatttcgggcgtttcgtttccgagcttgttggtcgcttcgctgctacttggagggtcgcaggtccttgtcagcacttacatcagtcccattctcggcggcatgactatcgttgttcttgctgcactgattctgcgtttaaagccgaaggggtttagccgtgcctga

SEQ ID NO: 237820 - DNA, 762 bp, Klebsiella pneumoniae
atgatgtacatcaatgcctgggtgccagagcagcaggtcgccccggttgtcgaccattttatggccgagaacgaggccaagaagtttttcctgattggcagcgattatgcctttggtcgcggcatgctgcagtacactcgagagtacgtcgagagtaaaggaggcagtgtggtgggcgaggcgtacttgcccatggatggatcagattggaccgcaatcatttctcaactacgttcggccaatccggacgccttgattacgtcaacggccggcggcgcgccaaacgtgacgctcaccaggcagctgcgcgctgcaggtatctcgatcccctatggtaactacgccctcgatgaaggcacagccaaaagcatgggtgataacgccgaggggatatacatcgtcgcatcttacctctcaagcctagagaccgatgcgaataaagccttccttgaagcgatcgagaagaagttcggaagcagcgccgagacgccgaacgagttgtcggtgccgcagtacgaagccatatatgcgtacgcggcggctgtcgaaaaggccggctcgactgattctactgctgttatacaagcgctaggggaagtgactgtggaagggccccgcggctccgtcatcatgaataagcaacgtcatgcgtcgctcaatatgtatttgggccgcgtcgctgctgatggttcagttcagctcgtcaaatcgttcccaaaagttgacccgggcgaacagtgtccgcaattcgctaacaagtaa

SEQ ID NO: 237821 - DNA, 915 bp, Klebsiella pneumoniae
atgcttagtccccttggtcactctggtcccgaccagagcccacaaaagctgaaaattgcctgcatccagtttgaaccaaagtttggcgaggtcgagcacaacgtcacacgcagcatcgacctgattgagcaggctgccggctacggcgctcgcttgatagttttgccagagttatgcagcaccggctatatctttcagtcgcgggaagaaactctcgcattatccgagcgtgtgcctgaagggcctactactaatgcctgggtcgaagcagctcgccggctagaagtgacaatcgttgccgggctagtagagcgcgacggaaattgtctctataacagcgcagttatcatcgacccttcaggcgtgctaggggtttaccgcaagcttcacctatgggcagatgagaagctctatttcaagccgggcgatcgtggtctacccgtgttcgatactctagtgggccggatcagtgtcgttatttgctacgacggttggttccctgagatgtttcgtctgtcggcctgccaaggtgcagagatagtatgtgtgccaaccaactgggtgcccatgccagagcaaccggcaggccacccaataatggcaaacattcttcatatggccgcggctcacagtaattcgatagtcattgcatgcgctgacagggtgggcattgagcgtgggcaacgattcttagggaatagcgtaatcatcaatcgttcaggctggcctgtagccgggccgtgctctgaaagtgaagaaaagatcctcatcggggaagtggatatggaccctaggtgcgaacccagctggaacagtgtcaatcacccgctaacagatagacgaacagatgtatacggcgagaatttaggcgcagatatccagattaacctggcaaagttagaggcagagcgatga

SEQ ID NO: 237822 - DNA, 207 bp, Klebsiella pneumoniae
atgtcggttactgtaacagttgaaaaagtaggggcggcatttgcattgatcaaatgccaccataggcctgaagcagaatatgaatttactggtgagtttctcgggctttcacacgagctgaagtttgcagggaagaatttacgagaactgagagaaactggctgttctatttatggaatttatcaggtgatgctgccaacttactga

SEQ ID NO: 237823 - DNA, 1188 bp, Klebsiella pneumoniae; identical to SEQ ID NO: 196474

SEQ ID NO: 237824 - DNA, 1401 bp, Klebsiella pneumoniae; identical to SEQ ID NO: 158905

SEQ ID NO: 237825 - DNA, 519 bp, Klebsiella pneumoniae; identical to SEQ ID NO: 158906

SEQ ID NO: 237826 - DNA, 1680 bp, Klebsiella pneumoniae
atgtcacttattcaaaacccgatattacgcggctttaatgccgaccccagtattattcgcgtcgaggatacgtactatattgccaactcgacgtttgagtggttcccgggcgtgcgtttacatgagtccaaagacctgaaaaactggaacctgctgccttcgccgctctccaccaccaccctgctggatatgaagggcaacccctcctccggcggcatttgggccccggcgctctcctgggccgacgggcaattctggttggtgtataccgatgtgaaggtcaccgaaggcgcctttaaagacatgaccaactacctgaccacggcgaaggatattcggggcccgtggagcgacccgatcaagctgaacggcgtcgggtttgacgcctcgctgttccatgacgacgatggccggaaatatatcgtccagcaaacctgggatcaccgggagtaccatcaccccttcgatggcattaccttaacggagctggataccaacacgctgaagttaatgccggaaaccgcgcgcaccatctaccgcggcaccgccgtggcgctggtcgaggggccgcacctctataaactgaacggctactactatctgtttgccgcccagggcggcaccgtgtttacccaccaggaggtggtggcgcggtcgaaaaccctcgaggccgacagcttcgaaaccgagccgggcgacgtgttcttaaccaacgtcgataccccggacagctacatccagaaacagggccatggcgcgctggtctccactccggaaggcgaatggtattacgcctcgctctgcgcccggccgtggaatcgcccgggggaatccatctacgacccgcgcggctggtcaaccctcggccgggaaacctcgatccagaaagtgtactgggacgacgagggctggccgcgtattgaaggcggtcacggcgggaaaaccttcgtcgaagggccgaaagacgctatcttcaccgaaagcgccagcgataatagccagcaggacgattttacgtcgccagcgctcgacccgaactggaataccctgcgggtgccgtttacggccaaaatgggcaccaccggcgacggcaaattaaccttaatcggccagggttcgttagccaatacgcatgacctgtcgctgattgcccgccgctggcaggccttctattttgacgccgcggtgaaggtgaaattcgagcccttcagctaccagcagatggccggattaacgaattactataacgaccgccactggagctttgtcttcctgacctggaatgaaattaacggcaaggtcatcgaagtcggcgaaaataaccgcggaaaatacacgtcgtacctgaaggataacgccatcaaggtgccggacggcgtggaatacgtctggttccggaccaaggtccgcaagcagacctacagctatgaatacagcttcgatggcgtgtcgttcaccgagatcccggtcctgctggatgccgcggtactgtccgatgactatgtgttgcagagctacggcgggttctttaccggggcgttcgtcggcctggcggcggtagactacgccgggtacggcacccaggctgagttttatcagttcgagtatcaggagctgggcgataggttagcggccgatgggagctatagctgggaggctggcgagacgcgggataagtaa

SEQ ID NO: 237827 - DNA, 1455 bp, Klebsiella pneumoniae
atgaatatcaaggccgccagtctgaccccggaacaagcgcttgccgagctggaagcgcgctatgaagcctcggtcacggcgttacgcaaagccatcggcgactatatcgaccataatacgctccccgataccgaagcccgcgcggaaggtctttttgtctatccgcagctgtcggtctcctgggacggcgccgatcataaagccctcaaaacgcgcgcctggggacgtttcacccatgccggttgctataccaccaccattacgaatccgaaactgttccgcaactatttgctggaacagctgaccctgctgtaccaggactatggcgcgcatatcagcgtcgagctgtcacagcatgagatcccctatccttacgtgatcgatggttccaccctgacactcgaccgctcgatgagcgccggtctgacgcgctatttccctaccaccgagctgtcacaaattggcgatgagaccgcggatggcctgttccatcccaccgagttctatccgctgtcgcactttgacgcccgccgcgtcgatttttcgctggcgcgtctgcgacactacaccggcacgccggcggaacacttccagccctacgtgctgttcaccaactatacccgctacgtggatgagttcgtcagctggggctgcagccagatcctcgatcccgacagcccctatatcgctctctcctgcgccggcgggatctggatcaccgccgagaccgaagcgccggaacaggccatttccgatctggcgtggaagaagcaccagatgccggcctggcatctgatcacccacgacggcaaagggatcaccctgattaacattggcgtcggcccggccaacgccaaaaccatctgcgatcatctcgcggtactgcggccggacgtctggttaatgatcggccactgcggcggactgcgcgaaagccaggccatcggcgactatgtgctggcccacgcctatctgcgtgacgatcatgtactggatgcggtgctgccgccagatattccgatccccagcattgccgaagtgcagcgcgccctctacgacgccaccaagcaggtgagcgggatgcccggcgaagaggttaagcagcggctgcgtaccgggacggtggtcaccaccgacgaccgtaactgggagctgcgctattccgcttcggcgctgcgctttaatctcagccgggcggtagctatcgatatggagagcgcgaccatcgccgcccagggctatcgcttccgcgtcccctacggcacgctgctctgcgtctcggacaagccgctgcacggtgaaataaagctccccggccaggctaaccgcttttacgagggcgctatctccgagcatctgcagataggcatccgggcgattgacctgctgcgcgccgagggagatcacatgcactcgcgtaagctgcgcaccttcaacgagccgccgttccgttaa

SEQ ID NO: 237828 - DNA, 264 bp, Klebsiella pneumoniae
atggggaagtttgtcgtcgttttaggggacgtgacttcgcacggtggcaaagtcacatcagcctcatccagcttcgatatattcggtaataatgccgcacttttgaatgataccgtaagttgcccgaaacacggtatgaataaaattattgaatgcgatgtttctgcgtatgaagaaaacgggcgtgggattgtattgcatggctgtaagacacagtgtggtgcgagtgtcatcgcaagcatgccggatatggaggttggctga

SEQ ID NO: 237829 - DNA, 354 bp, Klebsiella pneumoniae; identical to SEQ ID NO: 59978

SEQ ID NO: 237830 - DNA, 699 bp, Klebsiella pneumoniae
atgacaagaacgtttattttattgtgtaccggtgttttcgccatcgcgtacgccctgtatgagctgaaacatatgggcgtttactatccggatgccagcaatccgcagctgttcactggctggaaggcggtcaccgaactcggtcccgcaatcctggctaccgggatcgcagccacagcgttctcgctgtggctgttcattttgtttttcagaagctcagagtcccgccggatacagcgcgagataagcggatatcagcaggcactgagggaggcagaagaggcgcataccgccagacaaaatgcccttatcagggatcacaacatgaagacagaaaccctgcacagtcactattgtgatgcggcgaatgtactgcgggaagagtttgcgaaaaaagaaaagcgctggcgtcaggcgttgcagaatgcccgggaagaagccaggcaggagctggaggaacagacggaggcactgaatcagcgcgcgtccggcctgctggtacaggagcagacactgaaagccagaatggcggaagtcagaaagtatgttgccggagagcggcataacgccatgcgggcccgtctggaggcagaggaagcagagaaaaggcgacaaaatgccagcgcaacagcggaacggcgcagacggaaactggaaaaactccagaccactgacggaacagcagggcaaaaacactga

SEQ ID NO: 237831 - DNA, 132 bp, Klebsiella pneumoniae
atgagctacctttttcttgtcgccggcaccgcaccaggtgcgacggtccttttacagagttgtcctcatttgacgggcctggatggcccgttcttttatgcttttaacgtccggggcccttttctcgactga

SEQ ID NO: 237832 - DNA, 570 bp, Klebsiella pneumoniae
atgaaaaatacagtgttaattaaaaaaagaaaaagtaaaaaaggtttctcacttttagaactattacttgttcttggtattatcgcagcgttagtggtagcagcatttatcgtatatcctaaagtgcaagcgtctcaacgtgcacaggctgaaagtaataatatagcaacaatacaggctggtgtaaaagcactctatacatcagcatccagttttaccggattaacaaactctgtggctgttcaggcgaaaatattcccggataatatgttgagcggttcaggttcttctgcaacacctatcaatgcattcaaaggaaatgttgtcgtagaatcagccgatacagggccttccgcagcaacaggctcttcatttactatcacgtattcaaatgtgccagcagcagaatgtaccaagattatcactgcagccgcagggaatttctatacagcaggtgtaggaactgcaggtaatgtcaaagccgcaggtgaagtattagatgttgctaaaaccgcgacgcagtgccaaagtggtgggaatagtaatacattgatattcacgtccatataa

SEQ ID NO: 237833 - DNA, 552 bp, Klebsiella pneumoniae
atgaataagcataataaagaagggttctctctgttagagttattgctggttttaggtattgtaagtgcattgataatttcagcatttattatatatccgaaagttcaaacaatgtatcgtgtcgataagataagcaaaactattttaggagcaaaatcgtcgatccaagaactttatcaaggtaaagcatattatgataaaggaatcagtaatcttagaaacattgcttttcccgccaatacttatactagtaaaaataatggattgccacggaatgattatggaggaacatatagcatacaaggtcaattttcgatatcttcaggagtttacagtggttttagtatcgacgtaacatatgttccatctgctgactgtcagaaaattatatctaatgtgtatacttcatttcaagctgttgatgttagcggtactaccgtgtaccaagcacatataaagtttggcaataggcaaattggatttgatcgttctgtaattgccgaagcatgtaacaagacagaaaatgtaaccattcaattttatactttataa

SEQ ID NO: 237834 - DNA, 261 bp, Klebsiella pneumoniae
atgctgcatgcagtgaatacgcagcatggtctccagcggatagggccgtcggccattgcccgccttgggataaaacggctcgatgacagcggtcatattctgccatggcagaatatgctccatgcgggagaggaaaatctcttttcgggtctgacggcgcttagtgctgaattcactatcggcgaaggtgagttgatggctcatgatgtccctctgggatgcgctccggatgaatatgatgatctcatatcaggggtttga

SEQ ID NO: 237835 - DNA, 1170 bp, Klebsiella pneumoniae
atgaactggcagcgcttcaacaaagtaagtagtttttcaggagaaaccagtggcatagtaaagaaaaattttattattaccgcggcgttgctgagcagtctctttctggcggcaatagtgaatcttttatatatcgcggataatcttaataataaagcagacgcgcgcagcagtttacttttgcaaaaagccctcactaaccggcaggaaaagatacgtgcaaatttaatggataatgccgactggggcgaagcgtataataatttgcacaagcaggtgaatgttaaatgggcatgggacagccagaaccttggtgaatcgctttacacgaattaccagtatgaaggcgtatttgttttgtctcccgccggggagacgcgttatagcgtcattgaaggaaatcttgtcagccagcctttcgagaaatggctcaaccggaacatcaccaaagaactttttaacgacctctcacaaagccagggtaaagccgtctcacgccttatgatgaccaacgggcaactcaccttactggcggcggcccggatcacgtcggaagacgatgaaagcatcacgccggtggcggaagatgcctcggtactgattttcgccgacgtgttaacgcccgttaaactggagaaaatgggcaacgaatacggcattcataatgcgcatacgttcggcagaatggagccacacctgaacgccgactaccgggaagctcagcttattttacccattgataatggcgatgttctgattgagtggcgaagcgacgatccgggcagagcgctgatgaaccgggagctgccgttaatcatcattctgatgttatcgaccattgcatttacctggttgatgcggcgtggtgcgttaatcaaagcgcaaattaatgacgaaaatgttttcctgcttgagcaaagccgacaagcgcttacggcaagtgaacgacgctttcgcgacgtcattgaagccaccaccgactggatttgggaagcggacagcgaggcacggctaacgtggttatccgaccgtttttccggcgttaccggtcatcattctgacgactggcttgggcggaacatgttggatttcatccacagcgacaaaatcctttttcatcactggctgctgaatccgcagacgagcagtaattacacgcggctttgttga

SEQ ID NO: 237836 - DNA, 1095 bp, Klebsiella pneumoniae
atgaaacatattaaagaacttgatggccttcggggtttgatggctttgtgggttgttgccgggcatgcctatgaagcgatcccctctatctccagatttatacctatgactttaatgaatgattttgctgtagatgttttcattgttcttagcgggtttgtgatatttaactatctcaataaaaaccctggagtctcttataaaaaatacataaagcaaagggcattaagacttttccctatttatcttgtagtcacagcactgacaatttcaagtatatacttttaccgggatatccttaccgacgcccctttgtcaccatcaactgaatatcgcatctatcaaatagatgtattcttaaatgatatggtgcaacatattatccctcacctgttccttttgcagggtattatacctgaaagaatacttcacttgtctggcacaacaattgttggtcaggcctggagtgcttctgtcgaatggcaattttatcttatcgcaccatttttatttatcttctttgataaggtcataaaattcccaacagtgaaaaaaaccttcatcatcatcttatttgtcattgtttttttgattttcagtaagctaatgtacaataaggcatttatcggaacaggcgcaggaccgttctttgttggttttatgtcattttactttctaagagatgtttatcatagaatatccacgcaatcgttgatactgatatcactctgtacaattattgcaactattctcttattgaaaaaggattgtgttggatatctgatttggtttgttgtattttcggcggtgcttatcaaaaataagctgtcaaaagaaaatgttatcacaaagttgtttgataacaagatatcgcaggttattggcaaggtatcttactctgtctacatgattcacatgttggtcatttactttgttctgtatttaatggtttcattttctcttccgttaagcatgtacatactgcttgtcccgctttctatggttgcatctgtaatcatttcaatatacacatataaatatattgagtatccaatgatgcagttaggaaaaagggagcctattgctcagcactaa

SEQ ID NO: 237837 - DNA, 393 bp, Klebsiella pneumoniae
atgaatccagatttaaccgggtttacccggtttgatgcgccagaatccgtgcaatacagcccgatggctattcgccgtattaatggtcagtttattttattaacggtggagcgttacaacacgggagccatgaatttatggtttggcactccgactgacttttacagcaaaactgcctcaaacttctggaaaatgccgattggtaaaatcgtcaaggaaaccatcaccggagcgtcaaacgttggcgtgcaggatatggaaatatacggggataacctgtatttcgcctggtcgcatgaaacgcagaatacatacgccgatacatatatcggaaaaatgaatattgtcagcccggcatcgctgatgaattacgattatctggaggggttataa

SEQ ID NO: 237838 - DNA, 831 bp, Klebsiella pneumoniae
atgctgatgtgtgatgcgaccggtctgtcgcaacgtcgtgcctgcaggcttacaggtttatccctgtcgacctgccgctatgaggctcaccgtccggctgctgatgcgcatttatcagggcgcatcactgagctggcactggagcgcaggcgttttggctaccgtcgtatttggcagttgctgcgccgtgaagggcttcatgttaatcataagcgcgtgtaccggctttatcacctcagtggcctgggcgtaaaacgcagaagacgtcgtaaagggctggcaacagaacgtctgccgctgctccgtccggcggcgcccaatctgacctggtcgatggatttcgtcatggacgcactggccacaggtcgcaggatcaagtgtcttacctgcgtcgatgatttcacaaaggaatgcctgacggtcactgttgcctttgggatttcaggcgttcaggtctcgcgtattctggacagcattgcactgtttcgaggctatccggcgacgataagaactgaccaggggccggagttcacttgccgtgcactggatcaatgggcctttgagcatggtgttgagttgcgcttaatccagccgggcaagccaacgcagaacggatttattgagagctttaacggacgatttcgcgatgaatgcctgaatgagcactggttcagcgatatcgttcacgcaaggaaaatcattaatgactggcggcaggattataacgagtgtcgtccacattcagcactgaattatcagacgccatcagagtttgcagcacggtggcgaaatggaaaatgtgaaggtaaacaaaccgaccttactaactga

SEQ ID NO: 237839 - DNA, 258 bp, Klebsiella pneumoniae
atggcaaccaacaccgctcaggtaactgtactgggtgaagtctctgatgcagctaactcttgcgtcgtgactccgactggtaccctgaacaacggtatcgttcagctgatcactgtgaccactgcggaagcaaatgctgaagctgcaggtactctgttcaaaactcaggacttcggttttaaagttactgactgcgcacagggcagcgctaacccggttaccggcctgactgtaaacgttgccggtgtcacctcctga

SEQ ID NO: 237840 - DNA, 285 bp, Klebsiella pneumoniae
atgtcacaggtatttgcgaaatcagggtatatcgtggcgtgtatcggctggtcggttaccaacaatatcgccttcttcaatatcaacggaaccgaagtatctaacacgatgactatttcccctccggcaggtggcggttacctgtcattcggctatagtcctgattatgccacccagcgctgcccgatgggattgcgtacggcactggggtacagcgcttaccatgatgcggtaacgcgcgcgcttatggtgcagaaactgatggaagataatggattaagctaa

SEQ ID NO: 237841 - DNA, 933 bp, Klebsiella pneumoniae
atgaacgatgataaaactttcaactctttgaaagagaaaatcgcctttgttcagcgtgacgtggattctcttgcccagcacaagggaagatcctttgctgatgatatcctgtatagatctttggactctcatttaagcgatctccgggctgaacaactagccatcgaaaacaagcatcccttgcaggattttatggaactgcgtctaaaaggtgttttggttgatcttggctcaataccattagaaatcctgtcaattatttcaggaaatttagcggcgttggtacagaaagcagtacatcgtattggctctgggaaggactcgcgacgcgtcccaaatgatgttaaaaattcgctaaatttgaggcttgcagacctaggtccaggctcgacaaagctcggagttactttttccactggcgcatgtgaacttgttgaaacagtgtctagccaagctgtgaaggaaattttctcattgcttgaagcagcagatgaagaaacctttatggctaaaatttctgaaattggttcgaattcaacgattaaccttaagaatattattgatgaatgcgaaaggaatagcttgaattttgatcttacctggattggcccactcagtgatgggactaaacatgtctcgataaattctgatggcattcatcgccttaccaatagattagccatgactaaaatttctaagctacccgatgaaattatttctggtgaactggcagtcttgtctatgtatggaaagcttgaaatcgcaactgacaatggaaagattaaagcatcatatccaattgatatgcttcaggatattcaaaatagatataaagttggtgagcgcataacattaactgctagtgtttctgaagtttataatgagcgaataaatacttcccgtcgtaactatatgatcaagaaaataatttaa

SEQ ID NO: 237842 - DNA, 474 bp, Klebsiella pneumoniae
atggacaagccttgcttccctcccctgctccctcccggattccatgactttgatgatgataaaatcaagtcattatgcgtggaagcatttccgaattccgttagaaggagtatgctatactgtaattacatacagttaattgagcattttagagcaataaaccagcagtgtcgctgttttacagaggtgtggctcgatggttcttttactactcaaaaacccgagcccgatgatgtagacattctagtggttattgattttttagctttaaacaatttgcccgacgtgctgaaaccaacggttagcactttgttaaatagagattatgttaagttaaattttaacatcgatgtcttgttattggctgaaaatcatccagatctcgattacgatgagaggcggagttactggcgcggatggtttggctttgataggaaggagaatccaaaagggcttgcgagggtcatgttatga

SEQ ID NO: 237843 - DNA, 264 bp, Klebsiella pneumoniae
atgttgaaaatgacattcaattttaacggcgtgacggtaactgacggtgtactcaatgtgattatgccctcaatcagcacggaccagacaacactgagtttcgggcttgcgtatagagccagtaccagcgatccgctactcaattccgaaacatacagttgtccgtatgatattacggctggcgacccattcaggcaggcgtatgagtacctgaaatcaatggataaatttgcatcagctgaggatgctcaggccatgcaataa

SEQ ID NO: 237844 - DNA, 597 bp, Klebsiella pneumoniae
atgagtaacagcctgttaccgccggggtcgtctgcgctggagcgcaggctggcgcaagcctgttcaggtatcagtgatttaaacgtgccgctgcgtgatctgtggaacccgtggaaatgcccggcaaagtttctgccgtatctggcctgggctttctccgttgaccgatgggaggagacctggacggaaaccgctaagcggcaggcggtcagcgatgcgttctggatacatcagcgtaagggaacgatagccgccatccgctttgtgattgaaaacatgggttattccatatcaattgatgagtggtggcaagtcgcggatccggcgggaacattcaggctagaggtggatataaataatatcgggctgacgccatccatgctcagtgacctgaatcgcctgattgatgaaacaaagcccgtcagccgacatatggcacagttcaatatcgccgtaaaaatgagcggtgatatttatacggggtcatcgctatgttgtggggacattatcagcatttatccggaggggttcgagccggaagaaaatattatttatgacggtgccttttttcatgatggaaacgttaactacgggtaa

SEQ ID NO: 237845 - DNA, 621 bp, Klebsiella pneumoniae
atgatgcataagacgtttctgagttatcatcatgcaaatgagcaagatctcaaagatgagataattaaattgtttggtggtgattcatttattgataagtcagtaagcgatggtgatataagcaccactaattctgatgaaacaataatgagaactatccgtgaggatttcttagaagactcgacggttactgtcgttcttatcggaaccgagacaaaacaacgcccatttgtaaactctgagattcaagcgtcactctggggaagtggttataatgggttagttggtgttatcagggacgaaatctacgataatgtgtttactccagcggtatgtgcagatccgtcatgtggatgttctatcaccctaagaactcctggttttggatatgatttttatttgccttatttggttagggaaaatcacgtttataaaaaaacagtcccacattataatgatacagatgtgtactgtgcattggtgaaatactctctgtttattaaaaaccctgaatattacatcgaccaagcatttaataagcgcaagacgatggtacctgctgcgaaaaaaaactcatcggacgttcctgcgattcgtagttcatcaatttttaattggtag

SEQ ID NO: 237846 - DNA, 732 bp, Klebsiella pneumoniae
atgtacaagctatgggttttgtggggttgtgtttttgttcttctcctaatagttatgggatgcgttccgttttcaccatttgaaaaatggtggtttacggtaaactttatgtcaaatgttaatattattcgtgcttttttatcagttttgatattgtttttaatagcttatattttattaattggtgcttttcatcaaagatactcattgaggttggaacagttaagttttggcggtattaatatactgcttaataaatcagatcttctttttaaaaaaagcgtaaaaaattatttggatactaaacgctcattgtttaagttcgacccaaattatgattcaattgaagaggtgttgaactcatactatgaatgttataaattcattaaagatgaaatgaagttattggatattactaaaaggcgcgataaaaaattgtattcgctagccaatgaaatgttgaaaacattaaatcgttttttgacgaaacatcaaaataactatagaagatggcataaatttatttcagataatgataaggtgattacaaaggacaagaattataatggagaatttgtaacattgtcctatcatttgacgcctattagtactatccagtcacattattatcatttcaatgaaatattggaaggctttaaagaggttaatgattttttcactgataaggttgttaatgagtttaatataaatgttgataagtggggtatatga

SEQ ID NO: 237847 - DNA, 576 bp, Klebsiella pneumoniae
atggatttcagcagcggtggtaagaaagtcattgaacgtctagttgaggcgtacgggttctctacgagacaagctctttgcgatcatttgggagtatccaagagcaccatggctacacgttacatgcgagacatcttccctgcagattgggttttgcaatgtgctattgaaactggttatccactagaatggttggcattcggtataggggacaaaaaaccctcaaatataaatgcacaaattttggtaccaaagaaaaaattaatttcaggaacgttaattgaagatggagcatatatttttgataaaacattcttacctgaaaaaatatgtaatccgttcatcattcaagatctggataacgaatacatatgtagctttgaatataatgacataagcgatggattgtggctaataggcatagacgaaaaaatttcggtccgaaccctgacccgcttacctaataacaggttatatgttgaaggaggaaatcgtggctttgagtgttccagagatgaaatacaggttgttggaattgtgtggtgctgcatactaagaagagcagaaaaattttag

SEQ ID NO: 237848 - DNA, 1332 bp, Klebsiella pneumoniae; identical to SEQ ID NO: 17504

SEQ ID NO: 237849 - DNA, 138 bp, Klebsiella pneumoniae
atgagttacagcatcagggagctgagctacgcagcaaagctaaagaattggctttatccgtactcagaactcacccagatggtcaaaaaaacggtaaaggggttaaacaagctgaagtatttcgccttagtggcctag

SEQ ID NO: 237850 - DNA, 300 bp, Klebsiella pneumoniae
atggaaacttcaactaaccgcaacatctcagaggctcgacgaatcgaatcgtggcttcttaaccgcatcgccctgaagggtggaaacaatgtcgccaaggcgattggcgttgataaagcgcagatctcccgctggaaggaaagctggttgccgaagatggcaatgctcttggctgttctggagtggggcgttgttgatgacgatatcgcaaggctggcgaaggaagtagcagcagtgctcacaaagaaaaaatccccgacagatagcagttctcaccatcagctgaacattgaattttag

SEQ ID NO: 237851 - DNA, 162 bp, Klebsiella pneumoniae
atgacaaagcgtcgtaagaaataccaggaaaaagaagaaattcgacaccctgattcacctgagggattggtcgtcaccgcatccaataacagggcgttcgcagagcgtctgattggtgtttacagactagccaaagcaggagttaagaatgggcgtcgttaa

SEQ ID NO: 237852 - DNA, 894 bp, Klebsiella pneumoniae
atgggcgtcgttaagttagccgactacaggcatatccctgtacaaccgcaggaggcaaccagtatggggtatgtctctatacatcgccaatttatggatagccgactctataaggactctcaggcagtacatctttggctacacctaatccttaaagcaaaccatgtcgaagttactgtaaacactgatatcggacccgttacagttggccgtggtcagatgcttaccggacgacctaccttagtcagtgagaccttcattccagacaataaggttcgcagtttattgcgtacctttgagtcgaaaggaatgcttaacatcacctctatggggaagaagtttagcctgctgacaatcgttaaatatgatgatttccagtctcaaaattgtccaacggttgtccaacagttgtccaacgcaaacaccagtaattacgcacctctcagcggtgattgtccaacgaatgtccaacggttgtccataaacaataatataactaataactctcttactaacgtaagagagagtgcatcagccggcaaaagtcaggcagagaaaaaaccaaagatttcctgcgaagaagtcttccaggcattacgtgaagaacttcctgaagcgagagggtggaagtttattgacgaccgccgccgaaacctgatccgtactttctgggcaaaggccaacaaaattgccagaggtcttgatgatggcaagccgctgacgattgaaggttttagggattacctgaaatacattcgcgagaactgccgctggatgctggaagaccgccaagacaacaagagcggaaagacctggcggcgcaagaacttcgaagccttcctgagcgacaagctctatctggaagttcgtgaaggagatcgcgatgacttctga

SEQ ID NO: 237853 - DNA, 1434 bp, Klebsiella pneumoniae
atgacttctgaaatcatcaccgccccgcacaacctcgaagcagaacaagcagtcatcggtggcctcctgctggacgacgataacagcgagcgagtccagaaggttctggcaatgctcaagccagagtcgttctatggcagagctcaccagataatcttttccgaaatcaggcagatgttccgggaaaacaagccagttgatggactgaccttgtttgactcactggagagcaaaggtcttgccgagcaggtcggtggattcgcctatatcggacagcttgccaagaacactccaagcgctgccaacatcgttgcctacgccgcatcggttcgtgaagctgcaatggagagatatggcattcagcgcatgaccgaagcgacagagttgctctacgccaggaacggcatgagcgccgtggagaagtacgaagccattcagagcatcttcacccagctcacagaccactcaaagaccggtagtcgccgtgggcttagatcgtttggcgaggttatggatgattgggtaaacgatctggaaaaacgctttgacccttccggagagcagcgaggaatgagtaccggaataccatcgcttgatcgactgctggctcctaaaggtctggttaaaggctcacttttcgtgattggcgcaaggcctaaaatggggaaaacaaccctgtacgggcagatggctatcaactgcgcggttcgcgagaaaaagccagcactgatgttcagccttgaaatgccgagtgaccagatcctcgagaagctggtaggacagaagtccggaatcaacccgagcattttttacatgccagcaactgatgatgccgatgagcagtaccagggcgactatgacggcgactttaagaaggctatcgccacagctggtcgtctgagtgaaatcgacatgctgtacatcgacgataccccaggactttcactggcgcatattgttagcgaatgccgacgaattaagcgcgagaagggctgcgtaggaatgattctggttgactacctgacattgatgaccgccgaaaaagcagaccgtaatgaccttgcgtacgggatgatcaccaaagggttgaagaacctcgccaaagagcttggatgcgtcgtagtgctgctgactcagctcaaccgcgaactggagaaacgaattaataaacgcccattaccgagcgattcccgagatacgggacagattgagcaggactgcgactactgggttggcatccatcgtgaaggtgctttcgatgacaatgttccccctggtgaaacggagttaatcctgcgacttaatcgccatggcagtaccggtacggtgtattgcaatcagcttaacggggcaatttacgacgctgaccagcaggcagcagccgcagagcgtcgcagccgcgagcagcagccgaaaaagaaagggggattttaa

SEQ ID NO: 237854 - DNA, 318 bp, Klebsiella pneumoniae
atgggctttccatctccggcgtctgactacgttgaacagcgcctgtccgttaacacgatctgcaatgtcgggcctaacacccgcgttttcgaaagggatggcggttatgttgtgctggatatctccctgaagccaaagcagggtagtcaggttcttatccagcacggcggcgggacggaacttgccactctgagagggagggcgctgataaccgaagatggcgaagcgattgaaggcgaggccttggacgatgtcactgtcgccggcgttgtgacacatattatttgtgatgtacgaagcgatagcctggctgtttaa

SEQ ID NO: 237855 - DNA, 912 bp, Klebsiella pneumoniae
atgactgtacttgccccacctgctgaaatatgtatttattctgacgaataccgaccgggtactcttcagtttctcaatttcattgagacgatgggggtcaagcatggtcgtaaacttgagatcgatttatccaaggtaagatttgcatctgctgcggcatcgttgctgttttttgcggtagttaatcgagcacagttgctaacaggagaccctcacttaatacgcttcaagtggccaaaaaaggagaagaatcttcaggggcaccgctggatcgtaagtacgggtctctcgcgagcattgctggccgggactgatgaaaagcttcaggctcttacccgcgaggaacgtttttttcagtctgctgtcgaaccatttgagcatattgttgaaactgtaaccatgctgcaaaggaaagctgtcttaaatgatgaacagttggatttgttgctaacagctatcagtgaggctttgcttaatgtctctcaccatgcgtatgaagatgatgctttcaaagatgatttgcttctgttgaaaggtaaacgctggtggcaatgtgcctggttcaatccagaagaaaaccgcgttgttttcattgtatgtgaccttggcttggggatttttaagagtttcatgcctgatgatgatggtcttagcactcaaaacgaagtatcttctgtagaaagagctatgctggttggtgaatctcgttttgttggctcgggccgtggcaacggttcagaagatatcaaacggccgattggcgttggttgtgtagatgatgagacactactaatcctaactggacatgctcgatacaactataattctaatgacagctgtcctcggtgtgagagacttactgaatacataccaggaactttactacagtggtcgctggttcccaggagatga

SEQ ID NO: 237856 - DNA, 327 bp, Klebsiella pneumoniae; identical to SEQ ID NO: 184566

SEQ ID NO: 237857 - DNA, 846 bp, Klebsiella pneumoniae
atgaaaaaagtcatcatggccgctattgcggtcgcttcgctgtgcctgattaacgccgcttcggctgcggatgtcgttatcactacgggtcaacagggcctgacctataacgcggtgtacggcgttaatctcgccagcgcactcagcgagtatggttacagctcgacggtgatccccagtaaaggctctctggacaatctcgacaaggtcgccagcggtaccgcccagatcggtttcactcaggctgatgctttccagttctggcgcagccgccacagcaacgaagcgcagaaggtggacatcatcggcgagctggctgatgaatgcgtttttgtcgcggtgaagaagggcggcaaggtcagcgatgaaggtgatttaaaggcaggtgtgaaaatcgcggtcggtgagccctccagcggatcgtatgcatcctggcaatatctgcaggggctggaaaaggattacgccaaagtagagacctatgccaaaggcggtgtgcgctcgctggcgaaagtcaccactggcgagtatgacgccttcctttgggtatctgcgccggaccggtcgaataagtttctggaggcggttaatcaggaaggcagcggcctgacgatgatcgatatgaacggctggcacgttgacgataaattgccgaacgggaagccggtgtacgagatgaaaaaggcggttaccgaatccggctggctgagtgattcgaaggtgaaggttccctgcactaagacgctggtggtcgccaataccgatgccggtgatgacatgctggaaacggcctcgactgtcctgctgaaaaacctgagccgggtactcggcaccaacggtaagtaa

SEQ ID NO: 237858 - DNA, 588 bp, Klebsiella pneumoniae
atgccgccatccggcactaccgcaggtacggcgcctgactgcccggcggcgctgcgcttgccggtcctgggggggggagcccgcaggaaggaacgtaggcaggataaggcattgatgccgccatccggcactatcgcaggtacggcgcctgaccgcccggcggcgctacgcttgccgggcctgggggggggagcccgcaggaaggaacgtaggccggataaggcatgtatgccgccatccggcactaccgcaggtacggcgcctgactgcccggcggcgctgcgcttgccggtcctgggggggggagcccgcaggaaggaacgtaggcaggataaggcattgatgccgccatccggcactatcgcaggtacggcgcctgaccgcccggcggcgctacgcttgccgggcctgggggggggagcccgcaggaaggaacgtaggccggataaggcatgtatgccgccatccggcactaccgcaggtatggagcctgaccgcccggcggcgctgcgcttgccggtcctggggggggagcctgcaggaaggaacgtaggccggataaggcatgtatgccgccatccggcataa

SEQ ID NO: 237859 - DNA, 195 bp, Klebsiella pneumoniae
atggcactatcaaaagaagaagaggctcaacgcctgattttgctcggcgctatcagtcagttggatgaggtggaacgcgaagaaatatacacactgaaagctaagtttctggatgtgttcaaaacagcaactaagccagagtttgcaatggctgcgttgggattggcatctgcagaagctcagaaagaggattga

SEQ ID NO: 237860 - DNA, 435 bp, Klebsiella pneumoniae
atggcgaccaaacccaaaactggccgcccttctgattatctaccagaggtggctgctgacatctgttcactgctggccgatggggaaagcctgcgtaaagtttgtgagcgtccggggatgccgagcaagacatccgttttccgctggcttgccgaacaccaggagtttcgtgaccagtacgcaaaggccacagagacacgagcggatgcaattttcgaagagatatttgagattgcagatgatgcgactgaagagtcggccgctgtagcgaaagcacgtctgcgaattgacacccggaaatgggcgctggcccgcatgaacccgaagaagtacggcgacaaagtcagccaggaaatcgatcacaaatcctctgatggcagcatgacgccgaagccgaccataatccagctactgcctgttgagccgaaatcatga

SEQ ID NO: 237861 - DNA, 342 bp, Klebsiella pneumoniae
atgtttagatggaaaaagcaggatgaattgaaggctaaactggcgttcaaattagccattgcagattacaagtacctgatcttgcaattgccagatcaatttgataaagaggatctgcgtaataagtactctaatgagagaaaaaaactaaccgaccttctttctgcgtgtaaccatgcatggcttgtcacggaagatttattactatcacatgatttgattgtgtctaactggcgtaatattttggatacgcacgctcattacttgcaaggttctagacagtccgaggaattggtgattttttgtaatgccattcttacaaaaaaattcattttctcctga

SEQ ID NO: 237862 - DNA, 210 bp, Klebsiella pneumoniae
gtggtgggaaaatcgacgacgatgcctggtatggtgatgccgttgataggccagaaacactccatgttggcgctattcattacgatattgaaatggatgtggcgcatctcattgctgagcagcgtgaatctgagcggaggggttagcgttgagctcgatagcttcgtggtcctacacggcaacagcgacaatctggcgcaatcttggtaa

SEQ ID NO: 237863 - DNA, 171 bp, Klebsiella pneumoniae
atggcgtggatttcagttcagcaacggctgccgcggacgtttacccgggtgtgggtgatcaccgataccggtgagcaaacgacagcgtacgtgaaaagcgacggcgagtggttcattaactgcgaccgcatacgcgccacaggcgccgttgtgctgcgatggagggaatag

SEQ ID NO: 237864 - DNA, 504 bp, Klebsiella pneumoniae
atgaaaaagacgatattagctttgtttatagtatcaatgcctctggtatcaattgctgctgaatatgtaactgagggggcgtggcaggttaagaaagaacaaaacaaaatgaccgacaacacggacgtcgtggctataaacagatctcctgatgtatatacgcggcagggcatagaaagaagtacatctctggttatcaggtgtaaagaaaataaaacagaagcgtatctatctgttagcgagtatatgggtagcgacgaccctgtggtaactgtaagacttgatggcgggaaagcacaaaaacggacatggtctggcgcagagggcggagaggctgctttcagcaccaaaccagtctcttttatcaaagagatttcttcccataaaaagatgattgttggttttgagccttatgggtcaacgatgcaagtggttgagtttgaccttacaggaatagattcaattgcaaaagaagttggcaatgcatgtaaatggaaaccctag

SEQ ID NO: 237865 - DNA, 177 bp, Klebsiella pneumoniae; identical to SEQ ID NO: 187759

SEQ ID NO: 237866 - DNA, 216 bp, Klebsiella pneumoniae
atgctcagttctctgcggatgatttcgttaaccttcgttttcagtcaaatgagggttatcaccctgatggatcgttcaagacaggctcggtgtggatcgttgactctgtggcggcgggacaaaagaaatattataacattgatgtctatggttatcgttatgacgatacagtgtacacagatgggcttgagtattacgccccctctgatgccctga

SEQ ID NO: 237867 - DNA, 471 bp, Klebsiella pneumoniae
atgccaacattacgagaatggaaagagaggcgtccggcgagcgacatcaaacagacggtggagttttatcaccctgcgtttggttattaccgggtggtcaataacctgtttcgcccggcgatgtttggcggaaactcattcgagcctgcgcggttcagcgtgaccgagccggcgcaggacggaacggcggtcatatcaatgaccataacgtttgtcgccgccacggaacatgtacggcagacactgaaaagctggcgcggggcggcgcgcatgacgccgataaagtgcctgtatcagcagtgggatgcgatcggtgatgcatcatccctgaaagactggacgctttacgtgaacgacatttcagccgatgccagcaacgtcaccgtgaccgccggcaagactaatccgctgacgctggccaactccatcatttacacaacgaaagactatcccgggctaataaccgtatga

SEQ ID NO: 237868 - DNA, 174 bp, Klebsiella pneumoniae
atgaccgggctgggcgtggcgcggctgtcgttcagcagcccgctgcgggttgatcgccgggaaattccgctgaaaaccttcccggtgctggcgaaaacggacccgctggcggagtaccagccggaggccgggcggcagcggccgggtgatgatgattttgcggggctgtactga

SEQ ID NO: 237869 - DNA, 276 bp, Klebsiella pneumoniae; identical to SEQ ID NO: 233309

SEQ ID NO: 237870 - DNA, 1578 bp, Klebsiella pneumoniae
atggccggggcggctttgcttggtataggggcgatgattgcaggatcttccgataaagatcattcgtcgcattctccgaacgatgatactgattctgatgcggacagtgattcggatagtgattcggatacagatccagggggcgaccctctctccgccgctaaaaacattacagtaacagacgatgttgagctacataccggtagtatacctaatggcggcctgaccaatgatgctactccgacaataagcggaaccgcgcaggctggcacgacagtgaccatatacgatggcacgactgtattgggtaaggtagtcgttggtgctgacggaaaatggagttttacgctcccaaaactaagtgatggtgaacattcacttagcaccaccgtatctgatacgaaaggtcataccagcggccactcgccggactttgtgctcacggtggacaccaccgtggcgccggtcagcgatctgcaggtgacggatgatgtggcgcagcacaccgggccgctgaccagcggcgggctgaccaatgatgcgacgccggccctgagcgggacggcggaagccggggcgacggtcactatttacgacggcagcacggtgctgggcaccgcggtggcggatgaggacgggcactggcgcttcactccggatccgctgggcgagggggagcaccgcctcagcaccacggtgaccgatgtggcagggaacaccagcggccactcgccggactttgtgctcacggtggacaccaccgtggcgccggtcagcgacctgcaggtgacggataacgtcggtgaggagcaaggggtagttagtaatggcggaataacagacgatacaactcctaccctgagtggtactgcggaaccaggatctacggtaactatttttgataaagggattcaaataggtacagcgttagttgctgaaaatgggaattggagttttacaacctcagcgttgcctaaaggcgagcattccttcacaacagttgtcactgatgaagctggtaatacaagtgattcatctcctccctttgttgtcactattgaactgatcgacgactccgatgcggatgcagactccgacagcgactctgactctgacagcgactcagactctgacagtgactcggattctgacagcgactccgattcggacagtgattccgactctgacagcgattcggactccgacagtgattcggactccgactccgactctgacagcgactcggattctgacagcgattcggattctgacagcgactctgactcggacagcgactccgactccgacagtgactccgattcggacagcgattccgacagcgacagtgactcggattccgacagcgactctgactcggacagtgattccgactccgacagcgattcggattccgacagcgattcggactctgacagtgactcggattctgacagcgattccgactccgacagtgattcggactctgacagcgactccgattcggacagcgactctgactcggacagtgattccgactctgacagcgattcggactctggattcagggggccagtctag

SEQ ID NO: 237871 - DNA, 261 bp, Klebsiella pneumoniae; identical to SEQ ID NO: 233400

SEQ ID NO: 237872 - DNA, 2223 bp, Klebsiella pneumoniae
atgaagaagaaaaatctttttattctaagcttattcttaagcttattcataacctcacctgcccatgcattgaatctctttggtttagtgacgggaagtgaggatgctgtaggaaacaatatagacaaatggtttaacccgtttcaatcaaacatcacaggagccgttcttgatgtttacttgcctattataatgcagttaggtgggattatagccgcatacacgcttattgccggaacaatgtcaacagctcatgacggtgagatgttaggtaaaaaatggtcttcaatgtgggttcctataagaaccgccttggttccgggtttacttttcccgatctccaatggttattctgctctacacatgattatattgtggttagtgttagttggtaatcagtggggtaatgatgtttggaataagcttgcaccacgcctaatcacagataatacatatatatcagttgataacaaagcagcaatacgacaagtagtaatgaatacattatattcagcagcttgtgttaatatctacaatgaaaatgctaagaaagttaatgcaaattcgaaatgggggcctgcttatcgttatatggatacaactccgattaaaaatgacaaagttgtaggttataatttcggtttacccgctgcacctaacagttcatatggaaatggtatagacctttgcggtagcactaagttaaaactcctagacaaggatttaaaatcgggttctactttgattgatacaactaaaatcagtaaagccgttcaagaagcccaaataaaagctaatgaagctttggttaagggagctactgcttatgcaggttatctttcatcaatgccaaatgataacgctgaacaattaaataagattatcgatactttagttaatgcttatagccaattcatacaagcttccgctgaaagcgttatgaaagagtcattaacacaatctgaaattgataagctaacagagaaaggatggacttatagttatactttctattcaagaattgctgattcaatatcagaagctaatgcagcggttaacaggtatcctacggcttcaatgaattttcaacaaaatgataatgctaactattatggttttagtagtggaaatcaactttatgaagtatatccaaaattagaaagacttcaaaaacttttgagtgatgcaaataaagtagactcatctatgttagattctaataaaggtgatgatggttggtatcaaaagattatatcaactttaggcggaaacttatcatggacaaacaactatgaagcatctaaagcatcaagtttaatgcctctttctgtatccgttaatttgggttcaagaatgatagttagtgctgaaacatcatatatacttttagcgggtggtgctgtggcaggtggtagtattccgtttgttggtaatggtatacaaacagcagcaatctttgtatctccactctttaatagtatactaaaaaacactattttaggtgggaatttgttagcattcgtaattccaatgatgccttatataataggtttcttctgtgttgctggatattacatattaatatttgaagcaatgtttggagcgccacttttagttttggctatgttattaccagatcaagatggtattgtaggtaagcaagggcaaggatacatgcttgttttaaatattggtttaagaccaccattaaacatggctgggtatgctggttccttcgttttgacaactatacttttcgatatgatgaattctaccttctttacagcaggaagtaatactgaaggtggcttattagccataaataaaggcttaactatgctcctactatatggttcattaatgctaactgtagagttaatgtgtttaaaacttatgcatgttattcctgataatctttttaaatggatcggtggggcaacatcctctgtgttaggcatggtttcaggacaagctgaatcatcaacagctaaaaccgcagcggcggcagcggcaggtgctggaatgatttctaatatgatgtctccgcagtttaccaagcctaaaactgaacctaaagaaacaacaccgggcggtaatgatcctaaagcaaccgaaggtagtaatacggtatttgatgatgtaaaaactgagcctgtagttaaaggtgatagtggacaagatatcaactgtctcttatacacatctgacgctgccgacgaatag

SEQ ID NO: 237873 - DNA, 858 bp, Klebsiella pneumoniae
atgaaatattttgttttattttattttttgatatcaacacaatttatccatgctagcgatagaaatgatgagatactcttttccaagagtgaccctggaaatctattagatcgagatgcaaacgaaagatatcatgatcaatttattgattttaaaacaactcaaaacaatctcccagatataaagagaaataagtctttattttccaatcagtattggttggtaaataaaaaacaggacttatggattggggtgtttgatgggaaatatgtaaaaatacccgcaggtacttatgttaatattcctggtgaaacgttatttcctgaaagcataattcgaataaaaagaggaggtaaaatatctcaatttttattactaaatagtaattgtacatatccatccgtttgtgtcaatcgaagatatgggatattatttgatgctcatgattatatggttttttatactggatgtgcccgtgatgatagattagcctctaaaaaattaagcgttttttataatatactattttacagtaagacatttgatacaatattgcggcttgatgaattccctgattctgcattgcagggcgaaagtatcaatgttttcaaaacatctattgaaacagttaaagattactatatcgattatagtatcgagtcggcatttaagtttacaggtccagatcaggttatcgttgttgatgaaaaaactggaaaacctcaggagaaggttcaggaaacagatgataatggaaatcctgtcatgaaaaatggtgaaccggttatgattgatgatcccgatggattccaacctgtcattttaaaaagacttcctgaagttactattgccaattaa

SEQ ID NO: 237874 - DNA, 561 bp, Klebsiella pneumoniae; identical to SEQ ID NO: 237454

SEQ ID NO: 237875 - DNA, 243 bp, Klebsiella pneumoniae
atgacaataaaagtacattatagttacgatcttaatggtgaaactaaaagcaactcatttgagttagatagcgagtttcacattcttgatatttactacgatatttcttcattagaaaatgtctcttggctcattcctgcgagagaaaggggcggagaaagaaacaatttaactgatgttgcttatgctgcaattgaaagagcaggaattacgaatataaagtttgattgcagagtcctttaa

SEQ ID NO: 237876 - DNA, 141 bp, Klebsiella pneumoniae
atgtctaccatgactttcgttgttgagtttgaagatggcaaagagccgccggtacacgcgcacatggaggtgtttggcggtaaggttatcgcagtggctttccgtgacgcactggaagaaccggaagaggatgaagactga

SEQ ID NO: 237877 - DNA, 225 bp, Klebsiella pneumoniae
atgaaaattaaatgcatcaaagacacagagggatactggactgaaggtgaaatgtatccggctcgtgtagttgctggcggttttgttcaagttggcgacgatgacgatcctaatggcgaaggttggagcgctgcaccaatggaatatcgtgaagatggctcgatcgtttatcaggtcggtgggattgagggtgctgtgttgttcgaggaggccagccatgactga

SEQ ID NO: 237878 - DNA, 729 bp, Klebsiella pneumoniae
atggtgcccgatttacctgttactaccggtctgaaagggatgcatattcagggtggtaatgccgcgctgagcatcaggaatctggctgacagcgccactccgctgaccatggtaggcacaccgacaatttccccgacctttggcgctgtgtgtaatttcagtaactgtttcgatacaggcagggtgtctaccaggaaccagacccatatcgtgatctgtaagccggtaaaaccgacggcggccaccgagcagcaacaggcgttcatgatggggaactacaattactcgggctcaccgatcgtctaccggggggatggccttgctttcatgttttcgtcgcagagtttgtatggtgcctttgttgaagacaacaatgccaccccgactaacatgattaataatttcacgaccaattatgacgtgacgaaatgggcggcctttgtgtcactgattgacggcgataataacattgccagaatcggtgggcggcagggaggtgcgcttgcatggcaaggttcacgtacgctaaccaacaggactgcatacactggcagaaccatcaggatagggtcgcatcatgctggtgcagcgtatccagccggagcggatatcactatgggcatggagctgatttttgaagcagcactaacccaggccgaagtagcatctgttatcgacagcatcagtgcgtatcttaatgcggcatggggcattaacgatttgggttaa

SEQ ID NO: 237879 - DNA, 411 bp, Klebsiella pneumoniae; identical to SEQ ID NO: 23328

SEQ ID NO: 237880 - DNA, 876 bp, Klebsiella pneumoniae
atgtcgactgtagtcgctggtagtgtcaacgctggcgtgttaacggggtcggtggaggggaatcattctcaacgctggcgggtaaacggatccgctaccggtgctcatcctcaacgctggcgggcaaacagggccgctgccggtgctcatcctcaacgctggcgggtaaacgtgaccgctgacggtagctatcctcaacgctggcgggtatgcgtggccgctgacggtggctatcctcaacgctggcgggtaaacgtggccgctgccggtgctcatcctcaacgctggcgggcaaacgggggcgctgacggtgcttatcctcaacgttggcgggtaagcggggctgctgacggtgctcatcctcaacgctggcgggtaagcggggccgctgccggtgctcatcctcaacgctggcgggtaaacgtggccgctgaaggtggctatcctcaacgctggcgggtaagcggggccgctgaaggtggctatcctcaacgctggcgggtaagcgtggccgctgacggtagctatcctcaacgctggcgggtaagcgtggccgctgacggtggctatcctcaacgctggcgggtaaacgtggccgctgccggtgctcatcctcaacgctggcgggcaaacggggccgctgacggtggctatcctcaacgctggcgggtaaacgtggccgctgacggtggctatcctcaacgctggcgggtaaacgggaccgctgccggtagtcatcctcaacgctggcgggtaaacgggaccgctgccggtagtcatcctcaacgctggcgggtaagcgtggccgctgtcggtggtcaccgtcaacgctggcgggtaaacaggggcgataccagtgaccatcctcaacgctga

SEQ ID NO: 237881 - DNA, 549 bp, Klebsiella pneumoniae
atgaaaatgaaatcactttgcctggcaatggcactcgtcggcttgacctcacattatgcctccgcggcggacggtacgctgtatttttcaggtacaattgtcaactcaacttgcaaactggcaagcggcaataatgacggtctcattgaagttaagatgggcgctgttccgctgtctaaattaaaaaatgataccaatggcaccgggccagaagttggggtcaatattagcgtcaaagattgtgacgagggcacgtactatattgtgctcgacggtgcatcagccaccgaggcgcctatcactaacgtactggctctcgatgcaggtaatcctacagctaaaaaagtcggcattaagctaaccgaccgcaataataccccggtcacgctcgataaacctttcgatcccaaagtcgacccgagtattacggtcaatgccgatggcaccggtaccttcaacctgaaagcctactactatacctgggataaagacaacgccgaagctggcgacggcaatgcgaccgccaggtttaccattatgcaggaataa

SEQ ID NO: 237882 - DNA, 540 bp, Klebsiella pneumoniae
atggctgactataaccgccgttttggcaaagtaccgcgacatgattttgacgtacaccgtgctgtagaacatgatgaggacctggggcttattttcactgttcgtgaaaaacgtaaagtctcaaaatcgttgacgatacaatatgataaaatgttgtacctgattgaagacagcgaactgagtcgccgtgcaataggtaaatatatcgatgtgtatcactatcctgatggcagaaaagagctgcgcctgaacggtacgctacttccctactctacctacgaccgactgtcagaaatcgaccagggcgcgattgtcgataacaagcgtcttggccgaaccctggagtttatcagtctggtgcagagcaagcgggataacacgcgctctcagtcaattcccgctggagatggcccttcccgacgacggccaaagcaggaagggaagaaatcccagcgctcactggataatgatgacatgctcgaagcactcaaacagcttcagtcacgttcagaggacatttttggtaaaagagcccgctga

SEQ ID NO: 237883 - DNA, 354 bp, Klebsiella pneumoniae
atgtcaaaatcggcagcgggtacggtagacgagccggggcgcaacgttgcggcaaaatcaggtcttaaccgggcgatactggatcagggctggtacgaaatgcgccgccagctcgaatataagcagcgctggcgcggcggggaagtgcagaccgtaaacccggcatataccagccagaaatgctcctgctgtggtcataccgcgaagaaaaaccgtcaatcgcaggcagtatttgtctgtgtggcgtgtggttacgaagcgaacgccgacataaacggcgctcgaaatattctcgcggcaggacatgccgtgttgtccgggattaaccccggacgcgcccgtaaggcagcgtaa

SEQ ID NO: 237884 - DNA, 507 bp, Klebsiella pneumoniae
atgcgggggttatcggcaggttatactggcaaaacgtcgatggctctcgtattcccccgcttgcgggggttatcggtaaatcagcaaatattgttgtctaccgtgtcggtattccccccgtctgcgggggttatcggagcaaatcgaaaatccggctgtttgaaaaatggtattcccccccgcatgcgggggttatcggtgaggctgctgacggagaaatgggacctgttcgtattccccccgcacgcgggggttatcggccgacccggtgcccaggagaactggctgaatagtattccccccgcgtacgggggttatcggttccctgcactaagacgctggtggtcgccacgtactccccccgcatgcgggggttattggccggttcggattttgcgaaacaggtgcagggcgtattccccccgcttgcgggggttatcggggcatgagcgagaaccactgcgagagtgtggtgtattcccccagcatgcgggggtatcgacatag

SEQ ID NO: 237885 - DNA, 177 bp, Klebsiella pneumoniae
atggcaaatctcaccgacaaacaagagtcagttgactggtcaaaagttcatgtccggatgagagagtggcaggaagatcttgataaaaatatgaccaacgaaaaattcattgatttgtatattgggagattctctcctcaaccatcaatgaaacaggatgagcgcttaagaaagtaa

SEQ ID NO: 237886 - DNA, 216 bp, Klebsiella pneumoniae
atggctaaagggttgattaatcattacatcgtgaatatctatccggtgtcagatggctcacactccctctgtatatccattactacccccgttaagccgataattgaacatgggttcattcattgtcactttgacgacgatggagtggataagcgagaaggattcagcctcaaagaaatctctcgttacaccatcattacggtaatgaaggaatag

SEQ ID NO: 237887 - DNA, 879 bp, Klebsiella pneumoniae
atgaccagcaaattatccagagatcgcctgcaggaaatcgctgaagacggtttcctgaagcatggcgaaagcaaagcgttggcccgtatggcgctggccgcaatggacagcgagccggtggcgcttcaacctgagctggcaaaagttatctatcacttccgtgactggaatgaaggatttccggttgagcggttcaaggccgactacgtcattagttggatgctggcaaattatccgccagcgccgccagcgccggtagtcagcgcagacctgcttcatacggcggcatcagcaattgaagacctgcttaccactaaagacaggacaggtgcaggtgtgtggttcgacttgccattccggctccgctcggcggctaacgcgcagccagcgccggtatctctaacagaagcccaggttgctgcgcttgaggaggaagagaagtcatgccatgacgggataagaaaatgtattgcttcattaaggtaccaccataagcgagctgaagcacattcaactggttacaaaggctcgacgcttgaggatgatactttgaaaagtattaacttcctcaaaagaaatatcatcgccgccatgttccgggctgaacctgtaacgactgctaacaagttgggtaactccccggtgcaatcagattgctgcccggcgcaaaaccaaggatggattccggtaagcgagcagatgcctgataatactgagcctgttctttgtattgaaaaacgtgctgattttggtacttacggacaaccattcgtttgttggcatgatggaggtggatgggttggaaaaacaaattaccgtccaatcgtaacccactggatgccgctgccggcagcgccgcaggaggtgaaaggtgaataa

SEQ ID NO: 237888 - DNA, 144 bp, Klebsiella pneumoniae
atgcgtactactggaatcctaatggcggaaattacgcttcgcccacacatgaagccgctgcccatcctttcggtgcttttgcgctggggctggctcactaagaagtgtatccggattggccctgtaattggcaagcaggcgtaa

SEQ ID NO: 237889 - DNA, 690 bp, Klebsiella pneumoniae
atgacagctcaataccttgaatttgttcgccagcagctgatggtggccaccgccgacctgagcggtgcgacgaaagggcaactggtagcctttgcagagaacgcgcaattcaccgctacggcacgcagccggggaaggaagaaggtatatagcgaggtaaagcaaaaaatggttaacccggatggcccgccgatgagcggcagccagtcccgcgctaagggttcatcaatcgctcttgttctgcccgttgagtattcgacggccagctggcgccgggctctgctgtcgctggaagagcatcagaaagcgtggctgctgtggaactacagcgagaatatccgctttgaatatcaggtagcgataacacagtgggcatgggagcaattcagcgagaagttggctggcgtacgcattgcgaagaagactgtcgatcgccttcgtcaacttatctggctggccgcgcaggatgcgaaagcggtgctggcagggcgcgaccagtatcagtacgtggaccttgcggctatggttggtgtagaggtgaaaaactggtccaagacgtttacggtgcattgggaggctatgcttgcggtgtttgttcagctggatcgagaagcattactcgccttaacaaaaacacgttcggaacaaaaaacgacattttcgcagcagagtattgcaaaagtagattaa

SEQ ID NO: 237890 - DNA, 213 bp, Klebsiella pneumoniae
atgtacagcggcgcgataggtccgcgccagcccgtcaaaactcaccggcggctcataccagcggtccatttgcacacattctacgtagtccagaagttcgcggcggtccagtaccggaatgggatcgccaaagctgaacgcctgggtagtcgctgcatcattgggttgtacgtcgggtggcatcacatcctgtgcggtattctcagtcattaa

SEQ ID NO: 237891 - DNA, 720 bp, Klebsiella pneumoniae
atgaaagaacgcggaatgatttttaacggggagatggtgcgggcgctgctgagcggcaggaagacgcagacccggcggcctatcaaatggaaacagactcggttcactgaaattggtgagcgcgaagacggtagcaaatggccgtggagcgaagacgcagagcatgcttgcgacttctggcacccatgcccgttcggcgccgtcggcgaccgcatctgggtgcgtgaaacatgggcaaccctgggcaacgaagacggctgctgtgtcgactgggaaggcaacctttgcaaaggggatgagcgctcagctgcgaggatttaccgcgctagctgcgagcagagaccaggtgattacggcctgtggtctattcccgatgacgcctactggaaaccacataccaaagagcacaagttcgaaggagcatggcgcccgtcaatccacatgccgcgctgggccagccgcattctgctggaaatcactgacgtgcgggtcgagagactgaacgctatcagcgaagaggatgcgcgagcagaaggtattattgacggtggctgtcttaattgcggtgaacctgagccatgcggatgcgccaatccagagcctgacgctaccgatgcttttgcctacctgtggcaatcaatctacgggcaggaaagctggaatgctaacccctgggtttgggttatcgagttcaagcgcgttgaaggcggtgcagcatga

SEQ ID NO: 237892 - DNA, 654 bp, Klebsiella pneumoniae
atgttaagtaaaatatattttatccccttggtatttttattatcaagctgtgctttatctcctactgaggctatccaataccaaaaggagaatggctttgataagcaaaaattcaaaacaaattcaggtggtacacagtctgtagacgatctaagagagatatataaaaacgtgactggattaaaccttcctgagcaaaacacaagcgaatgccttaaagataacgtctgctactacaataaatatgccaatgtcttcgattccatgatggataaaaaaagagaaaaagaaagaaaagaaaacgaagcatttgcagcacagaaagaagctgagtgtcaggctagtaaggagtgtatggccaagcgagagattgatgccgcgtcttacactttaaataatgtctactattctctaatggcccgatacccataccagcaggctgattctgatgctggggtaaggcgtatgtgccgggcggctggcgaggctgagagatctggcgtttctctggaattgatgaaaaagaacatcagcttaacagaaggaattggccctgaaatgagataccaaattatccaggttgctgaggcctgctggaaaatgagcaagtacggcgttcctgacgggactactcagatcaaggcaatgtattga

SEQ ID NO: 237893 - DNA, 312 bp, Klebsiella pneumoniae
atgtattcgcccaacggtaaaaaggacggcatccagatcatcccactgtcagaagtagcggcaaaggatgagtttctgaatatcaaaaacgtgagccgtgatgacatgatggctgcgcaccgcgtccccccgcagatgatgggcatcattcccaacaataccggcgggttcggtgacgtggaaaaggccagccgcgtctttgtccgcaacgaactgatgccactgcagaaacgattgcaggaattgaataagtggctgggcgaagaggtgatccgattcgacccctatacgctggacctgcaggaagactga

SEQ ID NO: 237894 - DNA, 1077 bp, Klebsiella pneumoniae
atgcaatctaaacctattgaatacatcaaaacatcagaactcaactttgatcctgaaaatcctcgtttctatcgtttgaacgatgcagacaaagaagaagttgttgttgaaggcatgcttgatgacgagagtgtccacgatctaatgctctccatcggtcaacaaggttacttccccggagaaccgctcttagccttccgctcaggtacgcaactaatcgttgcggaaggaaaccgtcggttggccgctgttaaattacttaacggcgaattgaatccgcctgaaaataagaaaaatagcattgaagaaataaggaacgaagttcctaacaagcctaacgaactcccttgtattatttacgatgcacgtgaagatgttctcagatatataggttatcggcacatcactggagttaaagagtgggactccctatctaaagcaaaatatttgaaagagttatgtgtaaaattttatagtgaagacaccaaagaagatacacttaaatacttagccagagaaataggcagccgtccttcgtatgttggacttttactaacatcattatcattatatgaattagctaaaaataaaaagttttttaaactcaatattacagattccgatatagaattttcatatatcactacagcgctcggttacaatgcgataacagagtggttaggtattgaagataaaaaagactatgactttaaaaacattaaagaagataacgtgaaaaatcttttttcatggtttttcgtaagggacgaacacgctcgaaccacagttagagaatcaagaagaatcaaagatatagctttaattgtgcaacatgatgatgccgtcgactgtttagttaaaacaagagatcttgatcaatcctatctctatacaaatggtcatcaggttgctctagaagaggcaataaaaaaagcaagaaacgatttaaaagttgtatgggacatgcttttaaaagataaaaactataatgcaaacgatctcgaaaatgcagagcaactctttgatatgagtaaaaccattagaaatcacatcagaactgcgctcgaggatgagtaa

SEQ ID NO: 237895 - DNA, 921 bp, Klebsiella pneumoniae
atgctcaataatcttgaatctattccaacaaatgatgagtatctttgggctgactatcttgaaattagagcaatgattcatccggataaagcatttagccgtggcgatttggatagcataatgcgtgctcaaccagaagagtatgaccgggaatattctggcgaaaagtggagatttggaactgattttataagacaaaggaaaacatatttcggcgatgcttacccttttacattgtcagttgatggggatacgctaacgttagttaatcatacaaacttgactacgttgcaaaaactatatatatccctcgttatctgcgcaaatataaaatatataccaactggggttaggcctactatcactcgatcttttgagctgattagccttccaatattttcatccttgatgccttcaggatgtgaggttcatccaaactgggccggtggtggggcaaatgctagatatacaggaaaattaattaataaatataacgcaattgcaaaagatataagatgtgaagtaacaaccttcaaagaaagagactttaagccaagggactctggggatggtggtattgatattgtcgcttggcatcctatgggcgatgatagagatgcaattcctgccgcatttgttcaatgtggctgttcgaaaaatgaatgggttcacaaacaacttgaatcatcttatgcaaagttgggtggaaaaatgccagtaccgcacccttgggcctcatattattttatgccccaagatttgaggtggattgacggtgattgggcatataaggccgatataggcggttcaataattgttgaccggttacgtctaataaatcttgtccgccaaaatgaattgcaaaacagcctacccgatgttgattatgtcgagcaggctttagcaatgggatatagatga

SEQ ID NO: 237896 - DNA, 936 bp, Klebsiella pneumoniae
atgccaacggtagtatcacttttttcaggttgcggcggttcagatgcgggggtcacaaatgcaggcttcaatgtattgatggccaatgatattttaccctatgctcgtgatgtatatttggcgaaccatgctgaaactgattatgttttggacagcgttgcaaatattgagcatttccccaaagccgatttattagttggatgctacccatgtcaaggtttcagccaagggggagtacgtcaagcagatcgtaagattaatactctttacttagagtttgctcgtgccttaaattacattaagcccaaagcttttattgttgaaaacgtttcaggtatggttagaaggaattttgaacaccttttaaaggatcaattcaaagtattcaccgaagctggatatagagtaaaatcacaaattttaaatgcatcaaattatggtgttgcacaagatagaaaacgtatctttatagttggtattcatgagcggtttggtattgattatgagtttcctatgcctgtgtttggagatggtttagatcccttggtcacaataaaagatgcaattggtgatcttcctgaatggccagaaggagagttttatgatgcggattttcattggtattatttatcaaggaatcgtcgtcaagattggcttcaaatttcaaagactattgtagccaatcctagacacatgccattacatccaatcagtcctgagttaacgaagctaggtcctgataaatggcaatttgtgtcagactcaccagcacgacgttttagttatcgagaagccgcgcgtttacagggttttggtgatttgatttttcccgaaacagaaaaggcttcaatgaacatgaagtatactgttgttggaaatgctgttccgcctcctttatttgaggcggttgctaaagctttaccaaaaatctggtga

SEQ ID NO: 237897 - DNA, 1233 bp, Klebsiella pneumoniae
atgacgacaatctctacggcggtaccggccgtgacattttccaccactggccttgatgttccagatgagggagacattcttgccgggcgtatagcagatattggttctgcattcgggacggcgatgagcacgaacctcaagacgccgcaggggcaactggctgtcactgatactgcaatcatcgcagacaagaacgatcagcttctggctatcgtcaacaacatgaacccggacttttcctccggcagatttcaggatggcatcggcaggatttacttcctcgatcgcattgctgctgcgggtacggttgtaacggccacatgctccggcgtaccggggacggtgatcccggcacagtcctatgcaaccgacgataacggttatatgtacgtgtccctggcggccggaacgataggcgccgacgggacggtgaagatcgagttccagaacctgactaccgggccgatagcttgtcccatcggcaccctgacaaacatctatgtcgcggtaagtggctggtcgagtatcaccaacgagaccgcgggtgtaccgggctcgaatgttgaagggcgatctgcatttgagtatcgccgtcgccagtcagtggcacgtaacgccttcaacacggcagcggctgtgcgggctgctgtcctggaagtcgatggggtgcttgatgtttatgtgatcgacaacaaagagccgacttctgtcgaaaaaggttccacgaattacacgctgcttgccagctcgatttatatcggggtttatggcggggcagtggcagacattgcagcggccatcaataaaaaacttcccccgggcaccgttatgaacggtgacaccaccgggaccgtgcaggataccgaaaattatgacgccccttatccggagtacacctacaggtggaaaacgctggatgcggtgagcgttcatatcaaggtggaatacgaggcaaatgatggccttccgtcagatatcaacacgcagatcagaacggtcgtcctgaattccttcaccggcgcagatggtggcacccgggcacgtgccggcgcgcgaatttatggcagccgctatatcggacccattcaggcgcttgatgcacagaacatgaacgtgctttcggtccagatctctctggacggaaccacctggtctagtgcgctgaccatgggcattgatcaggaaccgaccctcgatgcaacaaacatcataacggaggcggtaagtgaataa

SEQ ID NO: 237898 - DNA, 303 bp, Klebsiella pneumoniae
atgtattcgcccaacggtaaaaaggacggcatccagatcatcccattgtcagaggtggcggcaaaggatgagtttctgaacatcaagaatgtgagccgcgatgacatgatggccgcacaccgcgtaccgccgcagatgatgggcattattcccaacaataccggcggatttggagatgtggaaaaagcaagccgagtgtttgttcgtaatgaattaaccccgctccaaaaacgttttactgagttaaacgattggattggagatgaggttatctctttcagtgcatactcactcgacggttaa

SEQ ID NO: 237899 - DNA, 348 bp, Klebsiella pneumoniae
gtgtcccatgagttcagagacgccgttaaggttgatggtgctgaagcttctattgaagagaagcagctttaccaagtacaaattgcggtgaaatcattaatagattttgttgtcacaagctttgaacagcttggtattgagaagcttcatgagttggttgacccatcattagacgaactccatgagataattctcaaactggacaacaaggctaaagagttgggtgcacttgatttgcaacaagtgctacttacagctcaaatactaatcagggatataaaagataagaaccctgacatgtgtgccattggctctagaactctgaaaagagctactatttttaagtga

SEQ ID NO: 237900 - DNA, 123 bp, Klebsiella pneumoniae
atgaataaacaacaaattatcgctgacatgcttaaactggctgatcgactgaacgaaattgtcgctggcatggaagagcgtaagcaaaccatgcttgcagaaatgcaccgcaaggcagcttga

SEQ ID NO: 237901 - DNA, 1098 bp, Klebsiella pneumoniae
gtgcgcgagcgctttaaagaagccgcagaacacgacggctactttggcggcggccagatttacatcgacgttcgttcgccgcggggaatctccgcatggatggatgacaacgaactgcaatcgaagctcttcatgagcgacaagaagatcacgagaggcagcctgcaggggttcagggtcattgagcctatctggacctatccggggatttataactccgacaacccgctgagcccggatttctacaagccgacgcagtggtttgtcatgggccggaccgtacatgcaagccggatgattgatttcgtctcgcggcaggtgccggatctgctgaaagcatcgtataactttcgcgggctgtctctctcgcagatcgccgagccatacgtcaataactggcttcgcacccgcgacagtgtcagcgacatgattcactcgttctcagttccggtaatcggaacaaatatgagcacgattctgcagggcggcgcagctgatgaccttcttgcaaggcttgatgtcttcaaccgatgccgtgataaccgtggcgcattcgcaaaagacaacaaccctacccagccagaaacggttgagttcgttaacgccccgcttaacggcctggatgccctgcaggcacagtcgcaggagcacatgtcagcggtttcgagcatcccgctcgtcaaacttctgggcatcactccaaatggtcttaacgcaacgtctgacggcgaaatccgcgttttctacgactacattcacgccctgcagcagtctgtttttaaagacaacctgaagcgtgtgatggacatcattcagctctctgagttcggcgacattgacgatggcataaccttcgactttgagcccttgtacgaaatgagcgctaaagagcgggcggaaattcgcaaagtagacgcggacacagacgctgtctatgtggcctccagcgtgctctctggcaacgaagtccgcgaaaaaatcgccggtgacccggactcgccctatcactctctggacctgaatgatgacctcgaaatcgaagacgactacgacgaagaggaagaaacagaccctgacgataagggcggttcatcctaa

SEQ ID NO: 237902 - DNA, 555 bp, Klebsiella pneumoniae
atgggtggaactggattagcaaataacctgagcagagaactagctgttttctctgcaagcttatataaaaatgttagtatacgcaaagaatcagatggtaatactagcgttcaaataatttctgcacctgagcatcaccctatagtaaaacaagcttgcaatgcagttaaaaacaatatatttatttgtagtcatagagttagctatgcgggtgatagacctataatattaccgctgaaaaccgtgaaagcgtacgataagaatatatctattgatattgcttatggaagatcaagtggggatctaaaatcagccgagcttaaggaattaaaacaaaatcttcagtctttaggtttcaatattacaaccgcagataatcctcaagtacatgctaagtttttctcttgggacaataacaatattgtagtcacaagtcttaactggttgtcatcttcttctaagggtgatatttacaatgaactaggtttccttattacacttccaggcattggaaatgaagtgaaggaaaaattccatgaaatgtatccagaataa

SEQ ID NO: 237903 - DNA, 1212 bp, Klebsiella pneumoniae
gtggcggcattccttcgttccggatcgcacgccgcgaccacgctggcacagctcaagttgctttcgggtacgctgactctgaccgttgatggtacggaggagacttctgcggctatcaacctcagcggcgccaccagttttgataacgcggcagagctgattgaaaccggcattggctcctcggttgtagtgacctgggatagcgtgctgaagaaatttatcatcacctctgccaccacgggcgtggatagcaccattacctttgccgatgaaggtacgctggccacaggtctgaaactgaccgaagcgaccggcgcggtgatctctcagggtgcggcgccggcagtggttgacgatatctttactgccattctgtccaaagagcaggactgggtaacattctccacgacgttcgctgtcaccaaagaccaggctaatgcgttcgcgctctggacaaacagccagaaccaccgctttgcctatgtcccatgggacgcatcaggaacggcaatcgtggcgggcagctcgaatgcactggtgtacgacatcatcaacacctacgcctataacgacatctgtccggtgtatggttatccgaaccacgcagcaaacgctatggggtttgtggctgcgctgaacttcacgcaggccaatgggcgctgttctctgaatggtcgtcaggtgtccggcctgctgccgatgatcagcaacgatactgattacgaggcggctaaggccaacggctataacttctacggcaactatgcctcgaatgcggtcgaaaccaaccagtgggcgcctggctctattaccggtgattatgcgtggcttgacgcctgggctggtcaggtatgggtaaatgctcagcttcaggcggctctcgttgcgctgttccagcaggcgagcaatctgccttacgcagcagccgggaaagctcgtattgagtcgtgcatgaagccgaccattgagcaattcagggcatggggtggcatgacggcgggaaccgatcttgaccagtcgcagatcgaccagattaacgccatcgctggcgtcgatgttacggattcgcttctggctgaagggtattacgtctatatcggcccgttcaccccggcaatgcgcgccgcgcgtaccaagccaacggtttacttctggtacaccgatggcgggatcatccagggtatcaccgttaacagcgtggaggtgcagtaa

SEQ ID NO: 237904 - DNA, 444 bp, Klebsiella pneumoniae
atggccggtcaaaatattacgtcggcagacgccatcatcgagctggtaatcgctgagctctacccatccggttttaacctggaacagttcgaagcgcaaaacatcttcgaaatgggtgataccgacacggcagagtaccagcgtactgctgacgggaaactgctgggtggttttgtttatggtgatctgccgtggactttccatctggcggcatcatccccgtcgattaagtacatcgacaactggcaaaccacgcagatgaccactcggtctgtgctgcgtgttaatgggacggtgatcctgccgtcactgggtaaaaagtacatcatgaccaacggtatcctgcagcgcgcgcgccgtatgccgtctgctggccgcgttcttcagccggtgactggactcatccagtgggaaactgtcaccccggcagagtactcagcgtaa

SEQ ID NO: 237905 - DNA, 336 bp, Klebsiella pneumoniae
atgacgtctgacaaaccgataacagcacagcaggccgccgatttgctcatcgtgtcggcgcgggtgatctaccgcctgattgagtctggagagctcgccggccgcaaggtcggcaacaagtacagaacgaccgaggcggcgtgtattgcatatttgaaaaccccgcgcgatcctgtcatcgcgaacgcgggtgaacataaaggagaagttttatgtcaatcaccctcaggggcggcgtgtggcactgtcatttctttacgccgtcaggaaaaagagttaggcgatctcttggcacgggggacaaaaagcaggctcaggagctccacgacaagctga

SEQ ID NO: 237906 - DNA, 675 bp, Klebsiella pneumoniae
gtgtacgacatcatcaacacctacgcctataacgacacctgcccggtgtatggctacccgaaccacgctgcaaacgcgatggggtttgtggccgcgctgaacttcactcaagccaatgggcgctgttcgctgaatggccgtcaggtatccggcctgttgccgatgatcagtaacgatactgattacgaggctgccaaggccaacggctataacttctacggcaactatgcctcgaatgcggtcgataccaaccagtgggcacccggatctattaccggtgattatgcctggcttgacgcctgggcgggtcaggtatgggtgaatgctcagctgcaggcggctcttgttgcgctgttccagcaggcgagcaatctgcccttcgcggctgccggaaaagctcgcattgagtcgtgcatgaagccgaccattgagcaattcaggacgtggggcggcatgacggcgggcactgatcttgaccagtcgcagatcgaccagattaatgccatcactggcgttgatgttacggattcgcttctggctgaagggtattacgtctacatcggtccgtttaccccagcaatgcgcgccgcgcgtaccaagccaacggtttacttctggtacaccgacggcgggatcatccagggtatcaccgttaacagcgtggaggtgcagtaa

SEQ ID NO: 237907 - DNA, 672 bp, Klebsiella pneumoniae
atggtggagaaaatcactgcgcagaaggggaggatctcgccaaacctgttttacccggacatgacgaaggacgactacgggtatcacggcgactggaacagcgatctgaaaaaagccaccggcgtgatgggggcgctgattgacaccaataacctcctgattgatgacaccccgggtatttcactggcgcatgtcatggctgagtcacgtcgcatcaagcgcgaacgcggcaaggttgggatgatcctcgttgactacctgacgctgatgactgccgataaggcagagcgaaatgacctggcttacgggctgatcaccaaaggcctcaagaccctggcgaaggagctggattgcgtcgtggttctcctgactcagcttaaccgtgagcttgagaagcgaaccaataagcgccccttgccgagcgactcccgcgacaccgggcagattgaacaggactgtgattactggctggccatataccgggagggcgcctacgacgagaacgcaaaccagagtgacacagagctcctcctgcgccttaaccggcatggtgagacaggtgttgtctattgcgagcagcgtcacggggcgatttatgactgcgatcaggaggctgccagtcagcgccggcgcgagaaagaggaaaaaccaaccaagcggggtggattctga

SEQ ID NO: 237908 - DNA, 333 bp, Klebsiella pneumoniae
atgtgtagccagttaaaccccttgttcgcagacgcatacctgaagccacagcagactcataatgtgcagccggtgaaaacaaccccgttgttcgcagtcggataccagaagccacagcagactcattatgtgcagctggtgaatacaaccccgttgttcgcaatcggataccagaagccactgcagactcatgatgtacagcatgtgataacaattccctgttcgcagtcagatacctccatcctcatcagacccttgatgcgcagcaagttaaaccccctcagcttgtcctcatttggttacctgaagtctcttcaggctaccgatgtgtag

SEQ ID NO: 237909 - DNA, 234 bp, Klebsiella pneumoniae
atggataacctaccgtcggaaactcgcaattacgtccctaaagtcatggccggaatgcgccccggcgccgggatggccgtagaccgagcgatgcccgggcagtccggtgcgacttatcagttttatggaaccaaaatcaccacccaggcccagaacgtggaacagcttaccagcgacatcaaaaagcacggcgacaaccgtgtcatgcttttggctggctactcaggacaataa

SEQ ID NO: 237910 - DNA, 147 bp, Klebsiella pneumoniae
atgcctaagagcaaccgattttaccaggcacaaacacacaaaaatgttacccgcgatcgcttcattcgctctgttaacccggtggttggcatgaaaatgcgcgccatcctggaagagctgaaacggaaggaggaaggccgtgagtaa

SEQ ID NO: 237911 - DNA, 222 bp, Klebsiella pneumoniae
atgagcgctaaagagcgggcggaaatccgcaaagtagacgcggacactgacgctgtctatgtggccgccagcgtgctctctggcaacgaagtccgcgaaaaaatcgccggtgacccggactcgccctatcactctctggacctgaatgatgacctcgaaatcgaagacgactacgacgaagaggaagaaacagaccctgacgataagggcggttcatcctaa

SEQ ID NO: 237912 - DNA, 489 bp, Klebsiella pneumoniae
atgaaaaatattttattagctgtgttggcttgctctgtattagcaggttgtaatgattccgctgaaaatactagctatatttgcaaagatcgtgaatcagattatcaaatggcgatctctttaactggtttcccggaatcactagaagcaagtggtgtgaaatatcaccctttcaatttatcgcctattgaatctactgatgatgtcactgatggtgtgcaatatcagtttgaatatacaaaaaacactaaagattatggcatttattcaagcgtgtttattataacgtataagcacccatatttagatgcaattaaagtgttgacctcaaataaaattaaagctccttttgctaaaaaatggaaagaagcaaaagatattatatcaagtgacattagagtcacttcaatgttttctacaacttatacagaatctggtaatagccacaataacgatcatttttggatgaactgcaaaactcttaaatag

SEQ ID NO: 237913 - DNA, 192 bp, Klebsiella pneumoniae
atggactatttagaaatttgtaacttaattgataatgaattgattgaaaaatatggctctctgtataaggcgtgtaaagttcttaatcttccacgtacaacggtacaccacctaagagatcagccctctgtagctctggctttccgtattgctcaggctgctggtattgctttaaaaggggaggtgatctaa

SEQ ID NO: 237914 - DNA, 717 bp, Klebsiella pneumoniae
atgcaacaacctcaaatgcagtcacaacaatctgttctatcagtcccttgcttccataccgtctaccatgagcatggtcgttacaaaatcatcaatggcagctcttttgtccatgatggtcatgaataccctattaactccaaaggatctggtgttcggcatgatatccttgtggcgatgatcaacgagctaaaagcagtgcagaagctttatagtcgagtgttctttacccgttttgatcttcatctccctgagttcacttctgtagaagatggtaacgaatacatacgtcaactattcaagcgattacgtgcacgtctgagttctaggaacaacggtttatcggaaagaataatcaactttgcttatggctgggtgtgtgaacaggaaaaagcatcacaaccccattaccattgctggattgcgcttccacatcgattggtcaactggtttggtactccagacagaggaatcgctggtattattactgaaatctggatgaaactgacgggtggtaaagcgacactggtaaacttgtctaagtctactaaagactatccggatcactacgttgttcaccgtgatgatgctgagacacttgaaggcccggtattctggttatcctatcttgcaaaagagagaagtaagttgcagacggggaagggaacacgaaactatgcaacatcgaagctgagttgcaaaacgcagaattcgtaa

SEQ ID NO: 237915 - DNA, 1149 bp, Klebsiella pneumoniae
atgccatttaaacggaaaacactgagcgaactgcgcgaagagaatcgccagtttatgcaggcagagcttgaaagcgtcggcgcgctgctacggtttggaaaccttaaggtgctcgctgatatggatgcgggcatggcccatctgcactatgcctacctggattatattgcccgtcagagcacgccattcacctctaccgatgagtggcttgcaggatggatggcacttaagcagatataccgaaaagccgccactgcggcacgttctccggcagcgaccgttaccgggacaccgggtaagacactgtcaaaaggggccgtattaaaccgtgatgatggttaccagtacacaaccgatagcgccataacgattaacaccgctggcagtgcgacggtcgccgtaacagcggttttgccggatattacagacgatgtgactggaggcggggcttccggaaatgccgatgctggcaccattcttacactggatgctaatgcccccggcatagacagctcggttacgctgattgagcccgccaccggcggcgccaacattgaaagtgaagaggatttccgtttacgtggtctgctggcatatcagaatcccccgcagggcgggagtgacactgattataaaagctgggctttatccgtgtcggggatcaccagggcatggatacggcgccgggggatggggccgggtaccgtggtgatttacatcatgtgcgacggcgatgataaaaccaatcatggattccctgtaggtactgacggtgtctctcaactggaagagtggggggcggtaaaagccaccggggatcaggggagagttgccgattatatgtatccgcttgcgcctgttacctcccttaactatgtgtgttcaccaatccggcgcgaagttaactttgatatagcgggtatacagagtgctgacagcaccgttgtgcaggctatcaaagatgccatcaatgacctgttttttgatgaaggtaacccggacggaacggggaaaatttatctgtcagatctcaaccgggtaatcagctccgtaagcggcacaacagggtattcgcttgagcagccggcagctaatattgtgctggccatcggggagcttcctgttctcggggaggtgatattctcatga

SEQ ID NO: 237916 - DNA, 411 bp, Klebsiella pneumoniae
atgcatccctctgcgcgacggtggtctgatatggctaaaacaaccaaaactgtactgggcgatgatctgaatgcggaaggaactgcagatgatggtctgaatattgatgagctgaatgcaggtggcagcgttcacgagacccaacagcatgacgataaacacggcgaaccatcagatgatgaggataccgctgaagaagatgaccaggaagaagacgcggagcctgagtttgtggtgctgaaagggaattgcattcgccatgacggtgaggtctaccgggaaaactcccttattccggtctccggtaaggatgccgagcgtctgctggcagcaggtgtaattgccgatgtccatgctctgcgacagcgcgcgttatctgctgcgcgtggtgtgaaaattacaacggagtga

SEQ ID NO: 237917 - DNA, 270 bp, Klebsiella pneumoniae; identical to SEQ ID NO: 96505

SEQ ID NO: 237918 - DNA, 990 bp, Klebsiella pneumoniae
atgcatattacctacgatcttccggtatctattgacgatattctcgaagcgaaacaacgcctcgcgggaaaaatatataaaacaggcatgccccgttcgaattattttagcgagcgctgccagggcgaaatatttcttaaattcgaaaatatgcagcgcacgggttcatttaaaattcgcggcgcctttaataaactgtgcggtttaaccgcggcggaaaaacgcaaaggggtagtggcctgctcagcgggcaaccacgcccagggcgtctcgctctcctgcgccatgctcggcattgacgggaaagtggtgatgccgaaaggggcgccgaaatcgaaagttgccgccacctgtgattattcggcggaagtggtgctacatggcgataactttaacgataccctcgccaaagccagcgatattgttgaacttgagggccgcatttttattcccccctatgacgacccgcaggttatcgccgggcaggggactattggactcgaaatattagaagatctgtatgacgtggataatgtcatcgtgcccattggcggcggcggcttaattgccggtatcgcaatcgcgattaaatccattaacccgacaatccgcattatcggcgtgcagtcggagaatgttcacggcatggccgcctcctggtatgccggggaaatcactagccatcgccacgccggcaccttagccgatggttgcgacgtcgcccgcccggggaaactgacctatgaaatcgcccgccagctggtggatgacatcgtcctggtgagtgaggatgacattcgccagagcatggtcgccttaattcagcgcaataaagtgatcaccgaaggggccggggcgttagcctgcgccgcgttattaagcggcaaactcgacagctatatccagaaccgcaaaacggtcagcctgatttccgggggcaatatcgatctctcccgggtatcgcaaattaccggttttgttgacgcttaa

SEQ ID NO: 237919 - DNA, 819 bp, Klebsiella pneumoniae
gtgcagtacatcagcgcgctgaacatcatccattgcatgcatgataagtacagctacgaggcggcgctgatggccctgcacgaccgcgacgtctaccgcacgatggcctgcggcatcgccggcctgtcggtggcagcggattcgttgtcggcgataaagtacgcccgggtgaagccggtgcgcgatcaccacgggctggcggtggactttgtcattgaaggcgactatccgcagtacggcaacaacgacgatcgggttgatgccatcgcctgcgacctggtggagcgctttatgcgcaaaattcaggcgctccccacctggcgtcaggcggtgccgacccagtcgatcctgaccatcacctccaacgtggtatacggccagaaaaccggcaacaccccggacggacgtcgggcggggacgccgttcgctttgggggccaatccgatgcatggccgcgaccggaaaggggcggtggcgtcgctgacctcggtggcgaaactgccgtttacctacgccaaagatggcatctcgtataccttctccatcgtgccggcggcgctcggcaaagccccgtcagcgcaggaaaacaacctggtgggcctgctggacggctacttccaccacgaggagacggtggaggggggacagcatctcaacgtcaatgtgctgaaccgggaaaagctgctcgatgcgatagaacacccggagcagtatccgaatctgacgatccgcgtctccggctatgcggtccgctttaacgcgctgacccgcgaacagcagcaggatgtgatctcccgaacgttcaccagtcaactctga

SEQ ID NO: 237920 - DNA, 384 bp, Klebsiella pneumoniae
atgaaacaggcacgcattgaatggcaaggacaggtacgcgatgtgctggtcaatgaacgcgaccaggtgcgcctggacgatggcacggtattaaaagaaggggaattccgctggctgccgcccgccaacggcacgctgttcgcgctggggctgaattacgccgaccacgccagcgagctggaatttaaaccgccaaccgagccgttggtgtttatcaaagcgccgaacacctttactggccaccagcagcagtcggtacgcccggataacgtcgtaatacatgcactacgaagccgaactggtggtggtgattgggaaaaccgcgcgccgcgtcagcgaagccgaggctatggattatgtcgccggctataccgtgtgcaatga

SEQ ID NO: 237921 - DNA, 918 bp, Klebsiella pneumoniae
atgatggtcaataagcggccggtgctgatctatcagacgcgcttagcgccgatcagggtgattgtcacgatcagcgacatccatctgcgcgatgagctatatagcgataccgatgacaacgggctggcactctgggtgcagaaccaaatgattgccagatatggcgatgttaagccgctggctgcggacccacaccaggaggtatttacctcgcccgcctattcgtttcgtattgcctatcccgagtcgcttttttttagtctcgcccgcctggtgaataatgtctccggcctgctgatctttattttctcggtttcgctgctgttttatttcctgatgcgtaaatatcttaatgtttacacctctgaagaggaaaagttgcgctacgccatcacccagggttatatcgttccctactatcagccgctggtgaacgggaaaaccggggagatatacggcgtggaaattctcgcccgctggcaaaacagcacgacgccagcgcgctcgcccgcggaatttattccgctggccgaacgtaccggcttaattattcccctaacccgcagcctgatggcgcaggtcaacgcgcagatgagaccactctttagtaaactaccggatgggtttcatattggcctgaatatcagcgtgtcacatattaacgcgccgacgtttatcgatgactgcctgcactatcagcgcggctttgagggtaaagcggtgaagctgatgctggagatcacggagcaggagccgctgttgctcaacgggcggttgtggacaagctcaatacgttacactcccgcgggttttccatcgcgctggacaactttggcaccggctatcccgagctttcctgtcgccacgagctggttttcgactatatcaaaatcgatcagagttttgtcggccgggtaa

SEQ ID NO: 237922 - DNA, 1272 bp, Klebsiella pneumoniae
atgtttgatattaagcgctcacgaattcattcagctttcgatagtatggctgatgcttattggcatacgacggacaggaagaagagtactgtttaccacagagactggtgtaaatgggcctgcgtttttttggcaggaatagctatgccgtgttctgctattgatctgatgtatggctatcaggtgatagtgccgcctcgctctgtaactttgactgattcttcaacaactaatcagaatatcactcctggttggcaagcacttgatgcaactgttatgaaacgaagtatgaatcggggagttctgggcaatgtgcatgtgcttcctcctgggcagtttggggatgactggtgtcgtttgggggcttttccgtacgttacactcgatggttataaaggctatcaggtaagcacgggtgtactcgtcattccatttggctccatgtctgctaactgggggttgtcgccaatgacggtatcgggaagcatctatgcaccgacatttacccgttccggaacagcgataagcggcacggtaagtggaagctggggagagaagggcaaccggacttcgggaactgcgcctacagagccaggttgtggcgtggcgctttcctaccaggggacgatccctgcgggtccagcctgggaaatatatcctaacggagccactggtattcagcttggactgaccaccagtacaaatatcgggtatggcgtatacgtgagtcccacagcgcctccgtttcgcgcaacagttgatgcgcgtattcaccgtggtgagaattctaccaattcttttgctgccgacatcgtgacaacactggatctgaatctggctgctgcttcctgtactgtggagacgccatccgttgtcgattttggcaatatcgccgcgtcagacggtcagaatcctgctaccgttgagtcgcaaataagtgtgaactgcaccggccgtacgggaaccagccttcctgtaacttattccgtgacgcccaaaagtggagctggaaccaaaaatactatccctatgaaatctgcggctggcggagtggctggcgacattcgtggattcctggggcagacggccagcgcagacgcagggtgcactgataagccgtcatcagtggcgatgaacggtagtgcgagtagctggggaaatgtcactgtcggaacgcgagattctaaacctttagcctggactctttgcccgcgaccggatgcgaacccgggacctgcaacggcgacggcaacgcttgaagtgacatggtga

SEQ ID NO: 237923 - DNA, 258 bp, Klebsiella pneumoniae
atgccagggttggtgaaatatgctcgttggggatttggtctgaactggggctggcagcgcgatcgatccgctgaccttgagcggatgctgccgatccttgtcgaaaagcctgttcctgacaaccgcgctgacgttacccgtcggctgggggattatatccatgagaacaggcacaataacccctacgaggatgagatgtttgtgatccaggactttcgcatatcggctttaaaaggccagagttgcttgataaaatga

SEQ ID NO: 237924 - DNA, 813 bp, Klebsiella pneumoniae
atgatgaaaggcccgtatgaggtacgtcccggcttaaccctgcctgacggcgatattctttatccagacccggcaatttttgataccacgctggctatgctggattttggcgatacctgggcgggggcgggtaaggtggaggggtacgccgctaacgacaggattagcaatatctgttatgtcgatgatttcgcctatccaaacctacctatgccatttgacggcaatggtattcagtttgcagagcacaacggcagcaaaataaccctgccagactcgtttattattcctgcgggttgccaggtgcagcttgtcaggctgtgggtgaagttcgccacgtcagatgtgggggaaaaggtagcgcggtataacaatcaggttgtggttattggcgagacatatgcgtccgcgaaggcactgacttatatttctgcaaacaataccgaaactggtgaaatcagtaatttcccggttggggcgtggggggcggtctgggatacggggcaggccttcgccgctgcaaaaacgggggatgtggttcagctcgcctggctggcgacaaaaattgacgcggaatacgccacgctgcggacatttgttaatggcaggtatgccggtgattttctacctgctaaatacagcgcccgccctgcggatattcttatccaccaaattaataacaagggcgccagtgaaaataccgtgcgctgtacggtgtaccggctggcgattgatgacctgaccgattcaaccttgacggctgaggacattgtcgcgcgtgattttgcagagaataacgggcggttttcatga

SEQ ID NO: 237925 - DNA, 1830 bp, Klebsiella pneumoniae
atgacggtaacaattatgtatccggggattgatatggcgagtattaatgaaacagcgcaatgggaaaacgaaatttaccagatagcgcgtggtgataaagtcgagggcggtcgcggtggcgctgccaatatccaggctaaacagctcggcaaccggacgcgttatttgtatgaccagatgcaggcgataatgaccagcgcgtttacgggcatctatcacgcctctgatgaagaaaatggcctgacccataccagcgaaggagagttatttttcacgtcaaacggacctgatgatgaatttattttcagtttttttattaatcagggtggcgttgccgtcagcgctggcgaggtgattaatggccgtgccatgctgggcctgatgaggctgatttcctctgtcagttatctggagccggggcgcttctcccggtcgccagtgcattcggcagtgatggataaagaccggcgctggttgtcgtattttgtgcaggacatgctgcacctgaagcgactggcagtgcacggtgccatgtcatcggattcactggatgtgaacgaaatcagggtgaagggggttgctgcgccgctcaattatctggatcctgcgcggtatgaccgcgttccgtattccgaagtggcgaccgataaaaaccttcgcatcatgagcaccaccgatgataacgggcgcgtcaccatcgccggagtggaaataaacccgccctcaccgccgggggataaatacgaggtttattgcgatagcggcaagctgttccgtgtcagcaataaaaccggtgagcgcgttttgctggatgattctggtgacaataccgacgttaaaaacgacgaaacgcatttttcttttacctccccgcgcgatgcgtcggttattggtcatcgctggtacagcccgtatgagagctatcagcctgcggcgtatttcgggcgacgggctattgtcggatttggtcatagttttatggctaacccgcgattcctgcgcacgctgtctgatttaaccggactgccaacctacaattttggccggtctggtgggctgtcgcgtaccgttgcgttacgcgccggggcgtacaccgtatcctatgagccagtcggtggccttatccctgaatccggtcctgttgtattgtcacccgctgacccgggcgtattgcagattgtcggaaatgctgcgctgtctgaaaccgtgagggggaatttttcgggagttgatggcgtactttcgtgggacgggacaacgttaacgtttacgcgtgatgatagcgggcctgctgtggctgtcagcgagccatccccgtttatttactatccgtacacgattgattcaacgaataccgttgagaagggtgtgcgatatgaccctcatggcgaggcgataaattggttatggctgggccggaataacgcatcgcaggcggggcagattctgagcgatgcacgggccattattgagagtatgagggcaaagcataagcgatttgttatttcgccagaattcccgatggcaactgagattaaaggtaccagcggtaacgcgtatattccgtggcttaaccagcagcttaaaaagctggccccggataattactgcgagattgacggggttgatatgctggcgaacttcaacgcgcactacaacccggcgtacgcgccggacgtgactgatattgacaacggcatcacgccaagatctctgcgccaggattctcttcaccccagccagacacttcaggcaaatgcgctctatatcggcgcagatgtaaacgcgcaatttggactccagtttttgaaaaataaagggtggttatga

SEQ ID NO: 237926 - DNA, 195 bp, Klebsiella pneumoniae
atgcaaaattccatttctagtgaggataagtgggttaagcgctggtcgaagcacattatctgtatggcgcagaacaatgaccttagttcacgagagatcgacagctataccgataagctggtcgagcaggcaagcagcgtagagctaggccagatcattaaagacctactaaatcacatcagaatgcaaaaataa

SEQ ID NO: 237927 - DNA, 1545 bp, Klebsiella pneumoniae
atgaaaaaaatacatcaaatggcaagtaaaaatgctctaaaatatttcctgcgcaatgactcttatacaacactcgaacttccgaactacataaacttctcaccactactcgataaaattaattcatcaatagataacaatgaaatttccgtttctcccgacgctaaaatattaatggggaaagatataaaccatgaagtacttgttagtaaggatggattatacagctggaggagaataacactcataaatcccttatactatgttcacttctgtaaattgataactgaaaaagaaaattggaaaaagataagagcaaaattcaaagagtttgagttaaatgacatattcctatgttcaagcattcctgctcaacagaaagacacatctaacatagcatcttctattctaaattggtgggaagattttgaacaaaaaagcctagctctttctcttgagtatgagtttatgtttagcacggatatagctaacttttatccctctatatacactcatagctttgagtgggtgttcatttcaaaagaagatgcaaaaaataaaattaacggtgacaacccaggccaattgatagacaagcacattcaaatgatgatgagtaatcaaacgaatggcatcccattaggtagtaccctgatggatacatttgctgaacttatactaggccagattgatcttcaattgaggattgaaactaccaatttggaaatatctgaatataaagttgttagatatcgtgatgattaccgtattttttccaatagcaaggatgatttggataaaatatctaaatgtcttgttaaggtattagcggggtttggtttagatttaaactctaaaaaaacagaattatatgatgatataattttcaactcactcaaacctgttaaaaaagacttcattaaggaaacccgagtggattccttgcaaaaaatgttatatgttatttatcttttctctctcaaacacccaaactcaaaaactactgttagatatttgaatgaatttttaagaaaattatttcgtagaaaaaggatcgttaacagtggcaatcagcttgaagcaatgctgggcatagtttcaggtatcatgtcaaaaaatccaacaacatatccagtttgtacagcaatattctctaaactactcagtttcttatatgatgatgacgaaagtaagttcattaaactagatcaacttcatcaaaaactaagcaatcaaccaaatacggaaatgttagacatttggtttcagcgagttcaagggaaaattaatccagaatggactggcacttatcactctcccctttgccttagagtagatagtgagtttaggaaaaagaaaacattcccgatagacaatttatggaacatggactggattccggggaaaagtacaaacaaaaacaaatccaagatactatctattctaaagaaaactaatattgttgattttgatatacttgataagatggatgtggatattacacctgaagaggttaatatattcgttaaggaacatagtgcataa

SEQ ID NO: 237928 - DNA, 2169 bp, Klebsiella pneumoniae
atgtcttcaattaaaaataaaatcgataaaacagagtcagctgaaattgatttaggccgattaattggtgagttaatcgatcaccgtaagttaattatttcggtaacttcaattttcgtcttgatagcactagtatatgctttatttgcaacccctatttaccaatctgatgccctagtgcaagttgagcaaaaacaagggaatgcaattcttagtagcctaagtcaagtactacctaatgtgcagccacaatctgcaccagagatggctttattgcaatcacggatgattttaggtaaatcagtagaggatcttaacttacaggcgttagttacaccggaatattttcctatatttggagagggatgggcaagattacttggtgagaaacctggttctatatctgtttcaagattttctttatttggaacagatgacgacatagatagtatttatttaacggtcaaggataaagaacattacgttataaccggaaatgggtatgaaatttcgggtaaagtaggcgagcaattaaaaaataaaaatttattattagaagttaatgaaataaatgcggttgaaggttctcggttcaaaattacttacatgagtagacttagagctataagtcttcttcagaaaaacttcacaatagaagaacaaggtaaggatacggggattctttccttatcattagttggagaagacccagaacttatcactaagatattaaataatattacaactaattatttaatgcaaaatatagatagacaggctgctcaggatgagaaaagtttagaatttttgaataaacaacttcccaaagtaagaagtgaccttgacatcgctgaggataagttaaacgattatcggcggacaaaagactcggttgatctaactttggaagcaaaatctgtattagaccaaatcgttaatgtcgaaaatcaacttaatgagttgacttttcgtgagtcagaaatttctcaactatacacccgtgagcatccaacatataaagcattaatggaaaaacggaagacgttacaggacgagaaaaataaacttaataaaaaagtatctgatatgcccggtacgcaacaggaggtgttacgattaagccgagatgtcgagtcaggacgggcagtttatatgcagttactaaataggcagcaagagctaagtatcgccaaatctagtgccatagggaatgttcgcattattgatgatgcgattacacatcccaagcctgtaaaacctaaaaaaacaataatagttattgttggttttattttaggtgtaatggcctcaattagcatagtgcttcttagaatgcttctacgtcgtggtattgaatctcctgaacagctagaggaagtgggtattaatgtgtatgcaagtattcccgtatctgatactctgtcaaattataatcagaagaaaggtatacgaataagagcggataaactagaacataagtcatttcttgcaattgataaccctgcagatatagcaatagagacaattagaggcctacgaactagtttgcattttgcaatgatggaagctcgaaataatattttaatgatttcgggtgctagccctaatgcgggtaaaacattcgtaagtactaacttagcagctgtgatagcacaaaccggtaaaaaagttcttttcattgatacggatatgcgaaaagggtatgttcataagttatttaattctacgaatgagaatggcttgtcggatatattatcgggaggtattaatattaccgatgcaatcaagagaatgtctggtggtggatttgattatataactcgaggaacagtaccccctaatcctgctgaattattaatgcatccaagatttggtgaactccttaaatggggaggcgagaattacgatttggtcataattgacactcctccaattttagcagtcacggatgcagctataataggtaattactccggcactactttgttggttgctcgttttgaaaaaaatacaactaaagagattgagataagtataagacgattcgaacaaagtggtgtgaaggtaaaagggtgtattttaaatggagttgtaaaaaaatccagtagctattatggctacggttataaccactatggttatagctatgaaagctcctccgataaataa

SEQ ID NO: 237929 - DNA, 1167 bp, Klebsiella pneumoniae
atgctcagtcaaatacaacgctttggcggcgccatgtttaccccggttttattgttcccttttgccgggattgtggttggtatcgccatcatgctgcgcaacccgatgttcgtcggcgaagcgctgaccgcacccgacagcctgtttgcccagatcgttcacatcattgaggagggcggctggaccgtctttcgtaatatgccgctgattttcgccgtcggtctgccgatcggcctggcgaaacaggcccagggccgggcctgcctggcggtgctggtgagctttctcacctggaactattttatcaacgccatggggatgacctggggccacttcttcggcgtcgatttttccgctgaacccacggccggcagcggcctgacgatgattgccgggattaaaaccctcgacaccagcattatcggcgccatcgtcatctccggtctggtgacggccctgcacaatcgctatttcgataaacccctgccggtattcctcggcatctttcagggttcatcgtttgtggtcattgtcgccttcctcgcgatgatcccttgcgcctggctgaccctgctcggctggccaaaggtccagctgggcattgaatcactgcaggccttcctgcgctcagccggggcgcttggggtgtgggtttacatcttccttgagcgcatcctgatccccaccggcctgcaccacttcgtctatggcccgttcatctttggccctgcggtggtggagggcggactgcaggtctactgggcagagcatctgcaggcgttcagtcagagtacggaaccgctgaagacgctgttcccggagggcggctttgccctgcacggtaactcgaaagtgtttggttcggtggggattgcgctggcgctctacttcactgccgcgccggaaaaccgcgtcaaggtcgccggactgctcatccccgccaccctgaccgcgatgctggtcgggatcactgagccgctggagttcaccttcctcttcatctcgccgctgctgttcgccgttcacgcggtgctggcggcgactatggcgacggtgatgtacatctgcggggtggtaggcaacttcggcggcggcctgctcgatcaattcttgccgcaaacttgccgcaaaactggatcccaatgttccatcaccacgcttcgatga

SEQ ID NO: 237930 - DNA, 1116 bp, Klebsiella pneumoniae
atgggcatttatcaaagaggcaacatttggtacgccgactataaaaattccgaaggtaagagagtccgcaaatctatggggacaaccgataaaaaacttgcttcagagttgtatgacaaagttaagtacgagtcatggcgctcatcaaggcttggatacataccacgtgtaacttttgaaaaggcatgcatacgctggctgaaagagaaatccggtaaaaaaacgttatgtgatgacaaaaaaaggattatgttctggctggcattctttgggacaagataccttgatgaaataacagtagatatgatttaccaagctgttaactcaatgattaatcagaagtatgaacagaactggagagccaagcatctggcttgtaatgcctcagcactggccccatcaaagtatgttccaaaagccgtatcgatggcgacaaagaacacgcaccttgcatttatgaaggctctacttcgcaaatcatggcttgaatggaaatggctcgaaaaaatgccttacattcgtctttatcctgttaagaatactcgcgtacgttggttgaaaccttacgaggccaaaaaacttataaatgcttgtagtgaaccattaaaatcagttgttgaatttgctcttgcaacagggcttagacgttcaaatatcattaatcttaagtggcagcaggttgacatttctcgtcgggtcgcatggattccatctgaagagtctaagtctggtcaagcaattggtgtggctttgaatcaaagtgcttgcgatatccttgaaaggcaggtgggaaaacattcccggtgggtgttcgttcacaccacggcaaaacatcgaccggatggaacgctgacgcccgcggttagaaaaatgcgggtggatgacaataacgcctggcgcgccgcgctaaaaaaagcgggaatcgaggatttccgttttcacgacctccggcacacttgggcaagctggcttgtgcaagctggcgttccactttctgccttgcaggaaatgggaggatgggaaagcattgagatggttaaaaagtacgctcatttgtctccaacgcatttgctgatctatgctcagaaactggatagtattttacgtgaaggttga

SEQ ID NO: 237931 - DNA, 165 bp, Klebsiella pneumoniae
atgttagaccgtcacaagcttgaattaacgttgctcgagatagcccggcagaacgatgaaggagtggacagcaacactctttacaccattcgcaacggcgtggcacaggtgctgcaggctaaagagcgccaccgccgcgcagataaaacagagtcatggctatag

SEQ ID NO: 237932 - DNA, 372 bp, Klebsiella pneumoniae; identical to SEQ ID NO: 194176

SEQ ID NO: 237933 - DNA, 996 bp, Klebsiella pneumoniae
atgtcgctgaaagccattgccaaacaacttgggatctccgtcacgaccgtcagccgggcgttgaacggctacgacgatgtgtcgcaggagacccgcgcccgggttgaggctgaagcgcagcgccggggctatcgccccaacactttcgcccgccgcctgaaaatgggcaccattgatgccgttggtctcgtctttcctgtccgccccgcgccgctcaacaataacgtttttctcgagatggtcggggagatcagccatgagctggcgcgccatgacattgatttgttgctgatcgccgatgatgagcaggcggataaacatggctatatgcgcatggtgcagggccgtcgcgtcgatgcattaatcgtggcccatactctggatgacgatccgcggctggcgcagctgcaggcctccggctttccgtttctggcgctcggccgtagccgcctggcgcagccctacgcctggtttgatttcgataactatgccggcacctgccgcgccacccgccatctgattcaacagggccaccagcgtatcgctctgctgggcgagaacaacaatcaggcgtttattttgcaacggcgtaacggctacctcgatgccctgcgcgaggcggggttatccgatgcatggctgcgtagcgtgccggcgacgcgccgcggcggctatcaggccacgctggagctgctgcgtctgcctgagccgcctaccgcgattatcaccgactgcaacacccatggcgatggcgccgcgatggcgctcgcccacctggggcgtttaaccggcgacaaccgcgtcgccctggtggtgtacgacgggctgccgcaggacagcatcattcagaccgatgtcgccgcggtgatccagtccacgcgccagggcgtgggaaggcagattgccgatatggtgcgtcgcttaatcgccggggaggatctcgccacgctgcaggtgctatggcagccggaatttttcccgggtgaaaccgcctga

SEQ ID NO: 237934 - DNA, 2124 bp, Klebsiella pneumoniae
atgtctgattcgctgattcacctgcaaagcgccggtgccgatattgtaattaaaacccgccctttcgccgaaattgtctactggggaccgcatttaagccacttttcgccgcaggatgccgacagcctgacgcgcccggtcgccaacggcagactggatgttgattcgccagtgaccttaatggcggagctgggccatggtctgtttggcgcgccgggcattgaaggccatcgtcaggggctggatgcctctccgctgttcaccaccagcgaagtgcggcacgagggccagacgctgaccctggtcagcgaagatccgcaggccggcctgcgcctgcagagcgagatcgcgttggatgccagcggcgtgctgagcgtgcgccatggcgtgaccaatctgcgcgccagcccatggcaggtggatcgcctggcggtcacattgccggtcgccgaacgcgctcgcgaggtgatggctttccatggccgctggatccgcgagtttcagcctcatcgcctgacgctggagcacgacagctttgtgctggagaaccgccgcgggcgcacctctcacgaacatttcccggccctgatcaccggcagccgcgcctttagcgagatgcagggtgaagtttggggcgtgcatctggcctggagcggtaaccatcgcctgcgggcggaggtgaaaaccgatggccgtcgctatctgcaggccgaggcgctctatctgccgggcgaaatggcgctggcggaaggggaaaccttgtggacgccgtacctgtatgccagctactcggcgaatgggctgaacggcatgagccagcagttccatcgttatctgcgcgaacggattattcgtttcccggacaacaaaccgcgcccggtgcatctcaacacctgggaggggatctatttcgaccacgacccggactacatcatgcgtatggccgacgaagcggcggccctgggcgtcgagcgctttattatcgatgacggctggtttaaagggcgcaacgacgactgggcggcgcttggcgactggtatctcgatgagaaaaaatacccctacggcctgacgccgattatcgatcacgtgaagtctctgggtatggaattcggtatctgggtggagccggaaatgattaacccggattccgatctgtaccgggcacacccggactgggtgctggcgctgccgggctataccccgctgaccggccgccatcagtttgtcctgaacctcaacattcccgaagcgtttgattatctgctggagcggatgagctggctgctgggcgagcatgcggtggactacgtgaagtgggatatgaaccgcgagctggtgcagcctgggcatcagggacgagccgctgcggacgcgcaaacgcgccagttttaccgcctgctggatacgctggtggcccgtttcccgcacattgaatttgaatcctgctcctccgggggcgggcggatcgattatgaagtcctcaaacgcagccatcgcttctgggcttctgacaacaatgacgcccttgagcgcaacaccatccagcggggcatgagctacttctttccacccgaggtaatgggcgcgcatattggcaatcgccactgtcatgccaccttccgccagcatagtatcgccttccgcggcctgacggcgctgttcggtcatatgggccttgagctggatccggtgagcgccgatgaagaagagcgcgccggataccgaaaatatgcggccctgcataaacagtggcgcgacgtgatccatcacggcgtgcagtggcgaatagatatgccggatgctaccactcttgcccatggcgtcgtcagcccggataaagcgcaggcgattttcctcgtcagccagctggcgatgccggactacaccctgatggcgccgctgcgcctggcgggcctggaggcgagcgcccgctatcaggtgacgctcctcgatcatccgaacattcagatcaccggcgagggcggccacaccatgcggaagctgccggcatggatgacgacgccgcagacggtgagcggtgagtggctgcagcaggcggggctggcgctgcccatcctcgacccggaaagcgccattctgattggtctgcaacgcgtgtga

SEQ ID NO: 237935 - DNA, 225 bp, Klebsiella pneumoniae
atgcggcgcctggcgcgccttgtccgggctacctggggctgcaggccgggtcagacgcacgccgccacccggcatagatgcggctccgagcctgctgcctggcagagcgatgtcgatgcggcgcgcatcgtcggctccgcggtggtcgctacgctgcacaccaacccggccttccagcagcagttgcagaaagccaaagatgaattcgcgaaaaggcagaagtaa

SEQ ID NO: 237936 - DNA, 816 bp, Klebsiella pneumoniae
atggataattcaattgtaacaaatagaaaagggaaaggaatctttaaaagagaggagtggattaaagaatcaaaaagcctctatttatcggcaaaattgttacgtaagcaaggggatgaaagcagaggtaaaatatctagctcaaaagaaagggatgggtcaatatttgacttgattgatattgtagtggcgacagacaagagtagccggcttttattaggttatgcatttgaattactattgaaatcagcaaccttacttatgaattatggtgctactaaaaacaccatctatcaaatatttaaatcttactcccatgatttacaagccatggttatagatttagaattgtcactatcgaattatgaattagaattattaaaacttttatctcaagatatagttcagcaggcaaggtatcctattggcattgtcgatgatgataaatacatgagaatagtaaatgaaagaagccataatttggcaaataaaaaattgtttaatgatatgatcttattatacgataagataaagtctacagtagttaaattggataatgatacgggtaactgtgcaacttttaattccctaaaattaaatgatgtttctttatttatgcgatctggtggtggattaaatgcacgttgtattgtaatttattcctctgattacccacaagataaaaaaacgagaacctatttaaaaagcattattgataaaatcccaaaaggaataagacattggtatgctgtttattggaatgagtacatgttttatgaagatacagggaaaaaacttattccattgatagattaa

SEQ ID NO: 237937 - DNA, 429 bp, Klebsiella pneumoniae
atggtagacccaacctccttagctgcaatctctggcacgcttgatcttgtgaacaaatcggtggatttagttcgtaacctccgcaaaaaaggtgatgaggaattaacagccgctgagatgcgtaacacgttgattgatttgctagatgatctagttgaagttaaaagcgaatttgtgacgttaaaggcagttttacttggtaaagaagaagagatccaaaaccttaaagctcaattagaaggtaaaacaaaactaacatttgatggtaagatttactggcttgaaggagataaaacaccatattgtagtaaatgctacgagaaggattctttagcatttcacctaagttttgctaaagcttaccctgcttggggggatcgtgaacattggtattgcctgaattgcaatgcaacattttatgattcgtaa

SEQ ID NO: 237938 - DNA, 264 bp, Klebsiella pneumoniae
atggaaaaaataacagttcattttaaatataaaggggagtctcatgaaattactttcgaggctgagaaatggacatatggctgtgttttaactcaaatagcaaagaaatttgatatagatgcagattattcgagaagctctattgttgctaaagctttactaaaaacaaatgaattcaataatgagtttagcattagttctaatatggatatccctgctggaagacttcatacactttatctaaatagatttgcacacatttaa

SEQ ID NO: 237939 - DNA, 636 bp, Klebsiella pneumoniae
atgttgaaaaatgccaaagaagacgggctcaccgcctgggtgagagccaaaatggcgctgcgggcgggtgatgccataacagtggcggcatggttcgcccaagcggctgcgtcattcctgccaaacgaagcatggggcttccagcagtctagtgatgacattatcagcgaggagtttgtgacgctggtctgccgtattcacgcccagcaggcgatactcgcgctcaaccgcgacgactatctgcaggcgatgtggttgatgtatcaggcgaaagaaaattactggccggatgtcgcgcacattgccgaacgggagctaacggtcaatgagctcattgctttcgtggataaaaatgtcccggcaccttctccttctgatcttaatatgccgaaaaaatgccgggcgcgaaagcgccgacgccaggctacgcaatctgctcgcacgacgcctgatgcgcacgggccagtagcaaaagctctggcctatttttcgctaactgaggatagagacaccgcccaggcgtttatcaatgccttgccgacaaagggacacaagaaagctcaggcgcagggctggtggcaagcggtgctgatcctgcgccatcaaacagcctatgagatggcgcctgattgttag

SEQ ID NO: 237940 - DNA, 780 bp, Klebsiella pneumoniae
atggatattaatgagttccctccgggagtaattgaacatcttggttggtatgtatatcgactgattgatcctcgagatggaagtactttttacgtgggtaaggggaaaggtaatcgcgtttttgctcacatgcgcggtgaagtggctgccgctgatgatgatgaacttctcagtaacaaactcaagcaacttcgtgagattagattagctggtctggaggtcatccatgttatccatcggcatggtattgccgatgaaaagactgcttacgaggtggaggctgctctaatcgatgcttacccaggtttgaccaacatcatgaatggtgcgggcagtaacgagtatggtgcagcacatatcaaagaattaatcgcaacctaccagcctgagacagtcgagtttaagcataaggctttgatgatatctgttaacagaagttcaaaggacgttgatctttatgacgcagtacgcttcagttggcgtgtaagcctcgaacgcgcaagcaaagctgaagttatcctggctacagtaaaaggaattgtcaggggggtatatatagctgatgagtggttaaaatcaacccgtgataactttcctgaaatgcgccaatggaatgaagatgatgagtttgaagctactcaaagttcacgctttggttttcggggacgtgcggcatctcctgaagttacacagctctatcttggtaagaagatccctgatgacctcagaaagaaaggggcaatgtctcctgtgaagtattctccgaattttgattcctga

SEQ ID NO: 237941 - DNA, 558 bp, Klebsiella pneumoniae
atgctagtgaaagatgcaattccaatccttaacgaagccatatctgaattggaatcgattgaggcctcatggaaaaattgtagggcctgtccacattcaggtaaatgttgtgatggcgcattcattaaggttgtatttccagaagaagccaaggcaattgccgaacatctcatagcacatccagaaaaactggtatatgcgaaagagagagcctctcgaagcaaaaattgctacttccataacccacatgccaatgagtgtttaattcatagtgtacggcctattctttgccgatggactccctacactgcaactacgggcggtaactcttttgtagctcagattcgagatgagagatgtaatttcacgccggtcagaaagattgattcgcttaaacatataaagccagggattattgaggttattccctatgaaggaactgtgaagcagcaaaaattccttcatcttcaaggaatcgaagcattacacccattactacggcgttctcatgaggctatagatatggccgcggttttagctctttctctcaaaaaataa

SEQ ID NO: 237942 - DNA, 615 bp, Klebsiella pneumoniae
atgaatgtccgtatctattgccgcgcatctacagaaggccaacatgccgatcgtgcactgattagcctgagcgaatttgcgcaaagcaagaactggcagatttccgaagagtacattgagaatgccagcggtgcgaaactggatcgcgtagagctaatgcgactccttgaggaagctcaaccgggtgatctgcttctcatcgaagcaattgaccgtctcagccgccttaaacatgaagaatgggctgaactcaaagctacgctgaatagtaaagggctggttattgtatcaatggatttgccaaccagttggcagatggttgaaatgtccgggaatgatcttaccagtggaattctgcgtgcagtcaatgctatgctgatcgatatcctcgcgacaatggcacgacaagattatgagacccggcgtaaacgtcaggcgcaggggatcgcgaaagcaaaacaggcaggtttgtacacggggaaagaaaaaaatctggaagcccgtgagacagttcgcgaaatgctagcgcagaacgttaaaccagctcacatcatgaaagcggcggttatcagtcgcgccacgttttaccgaatcaagaaggagttagtaagctaa

SEQ ID NO: 237943 - DNA, 609 bp, Klebsiella pneumoniae
atgaattcatcatacatacactatattaaaaaatccgttatagctgttgctataatttatggcatcggtaacatcttgtacggactatcaaccactccagaccaacctaacacaccggaaacaaaggtcgtagaaaatacgaatacagccccgtcacaccaaccaacggaaccaccaaagccactgacagtcgatatatttccgagaatgtacacaaccggggaagtgtatgcacgatttcaagagcatgaattccgtgcaaaaaatgacttcaaaaattgccgactgatggttacaggaaaaataaaagatattggtactatgactttcactaaagatcctgtggtaacattggatattcccggttctgatgatgggctgaagttcatattcgaagatacggattccaataacgacgaagtggctgcgttggatatcggaaaatcgatagtgatcgccgggaggaacgcactctcaggatcctttggtggcgtatttctcgatgattctatactaatgtcagacatgatctccaaggaactacataaacatcgacaaatccttgttaccagtggtggaatttttgacagagttatttatcataagtaa

SEQ ID NO: 237944 - DNA, 864 bp, Klebsiella pneumoniae
atgaaactgttaaaacctcttaaaatcattatgttgctatcgatcactctccctctagcggcactagcaaccccaagcagcttcaatggtttccatgatattggttctatagatgaattaatggcacttccacgagaggagctttgttcgaacggcgggccgtcacaaagtgaaatcgatctaatactccatgatgggccactagccctgcctatgtatcaaaacgatccaaatgcagctcgcttgcttctcaaggagcaatcccaaaatatcagggccaagattaagcaaaaatgttcagccaaagatagtgtccccctacgaaaactgacgaaggcaatgcttagtaatgaggaagaaatgtgcaaagccggtgcgccaactaaagacgaactcaaggtttttataaaggaatcgaacgaaattgatattgatgagcaactaagaaaaatgccttatgagggacgccttcttatggaggaggccgcaaaattgaacggaactacattccgtgaaatgttcatagacgatgtgactaacgctgcggcaaaaaattgggaaaaagcctgttcagaaaaatcatatcttaaaaagagtaaaaagaaaggcagtgatagtaaaaatgatgacacagaaccaaatttcgaaagcgaagacaaggctgatttcagcaaagaatataatgttagcgatcgaaaattaaacgacgcatggcaaaatttaaataaagaaacccgtaagcgtttgttacctgcacaaagacaatggataaaatcaaagtctgcctgcaatggcaactgggaatgtctcactaatatgacgaacgagcgtattcttgaactggaagctgaaaatggaaaataa

SEQ ID NO: 237945 - DNA, 1770 bp, Klebsiella pneumoniae
atgtctacatatgttacaatcccaagaaatacacttcttcccgcgaaacacaatgtcatgaatcgtccacgcttatattcgtatatccgttactccagcgaacggcaagtcaaaggtaactcgcttgaacgtcaaaaaagctacattgctaagatggcgaaacagatcgccgaagaatacaagttggaggttttcgaggagtatcaggatttaggcgtatccgcgtacaagggtaaaaacgttcaagaaggcgcgttatccgatttcatagcccaagtgaaatccggtgtgataccaaaggggtctttccttttgattgaatctcttgaccgcttctcgcgtcagaacgcaatgcaagcggttaatttgttcaccggtttactgcttaatggcatcacggttatcaccgggattgacagacaggtttacaagcatactgatgcaaataacgatacatttcagcaactgatgtttagtgtgatgttgttcagtcgtgcaaatgaagagagttcaaccaaatcgcaacgaaccattgctagtgcgctatccaagataggacgtcaccagcaacggaaaccgggtgatcctgtaatcgcaataaaagagttaggatcggataaatggtggacagattcgagtagtggctatgttaacccgcatccggtactgttccccatagcaaaagaaattatccagttgaaacaagatggttggtctaaccggatgatccttcagcacctaaaaaacagctacgatgggccgattattggcaacaaaaaatcaaaaggtatatggaatatgcagcattgctccagaatccttgaaccggctatttatgggcgaaaagtgattacgataaacaatgcagaatacattctggacgattattaccctgcgattatcagcaaagatgaatacgaagcattaaaacttcaagtaggaaacaaagggtttgcccctaatcgtgagagtaacccagaaataccgttactttccggtattggtattctgtactgtgcacactgctcatgctatatggttaaagcaaaatcaacccttaaaaaccatccacatgcttaccgttaccagtgtgcatcaagggatttacatcaagattgtaataagtggggattcagagcaagcacccttgaacggacaattttacaactgatagctgaccgagttttcttgcctacaaaatctcaaccatctggtttagaaggtaaaatagcagatatacaatcacaaattgagaactatgtattagctataggttcagctaaaagtccagaaatcattaacaacatcacttcgaaaattgatcaactggaacaaaaaaaacaaagactggtagtggcaaaaagattatacgatgaatcaatcgtgcaaatgaacactgaagggtgggacaagttcagggagtttgacattaatgacgccctagcccctttacgagcaaaaataagggcaagcattaagactgttgttatgcgcgttgattgcttcagaatagataagaaacacaatttgtttaccatcacataccgcgatcagcagaaacaacgcgttgttatcgaaaacaactcaggctggaggaagggtaaggtttatgttgaggtgcagactatcaacaacactcaacttattgaatctgaaggtttcatactgcacgaccatattgacatattaatcaaccgagataagttcatgatggaagtgaaaaaacgactcgagaatcctagaaccctgatcgatgaactgacggaataa

SEQ ID NO: 237946 - DNA, 2562 bp, Klebsiella pneumoniae
atgagcacaattgacaatctcgacgcccacacgccgatgatgcagcagtatctcaagctaaaggcgcaacatcctgacattctgctgttttaccggatgggggatttttacgagctattttatgacgatgcgaaacgcgcctcgcagctgctcgatatctcgctgaccaagcgcggcgcctccgctggcgaaccgatacccatggccggcatcccccaccacgccgtagagaactacctcgccaaactggtcaatcagggcgagtcggtggccatttgcgagcagattggcgacccggccaccaccaaggggccggtcgagcgtaaagtggtacgtatcgtcaccccgggcaccattagcgatgaagcgctgctgcaggagcgccaggacaacctgctggccgccatctggcaggacagcaagggcttcggctacgcgacgctggatatcagctccgggcgctttcgcctgagcgaaccggccgaccgcgaaaccatggcggcagagctgcaacgcaccaacccggcggaactgctgtatgcggaagattttgccgaatcgtcgctgatcgagggccgccgcggcctgcgccgtcgcccgctgtgggaatttgaaatcgacaccgcacgccagcagctaaacctgcagttcggcacccgcgatctggtcggcttcggcgtggaaaacgccccgcgcggcctgtgcgccgccggctgcctgctgcagtatgtcaaagacacccagcgtacctcgctgccgcacatccgctccatcaccatggaacgccagcaggacagcatcattatggatgccgccacccgccgtaacctcgagatcacccagaatctggccggcggcaccgacaacaccctggcctcggtactcgactgtacggtgacgccgatgggtagccggatgctcaagcgctggctgcatatgccggtccgcgataccgccgtgctggtggagcgccagcagaccatcggcgcgctgcaggagcgctataccgagctgcagccggtgctgcgccaggtcggcgatctggagcgtattctggcgcgtctggcgctgcgtaccgcccggccgcgcgatcttgcccgcatgcgtcatgccctgcagcaactgcctctgctgcgtgagctgctggccgacgttgacagtcagccggtgcaaaaattgcgcgagaaaatgggcgagttcaccgaactgcgcgaactgctggagcgcgcggtgatcgacgccccgccggtgctggtccgcgacggcggggtcatcgccccgggctatagcgaagagttggacgagtggcgggcgctggccgatggcgccaccgattatctcgataaactggagatccgcgagcgcgagcggctgggcctcgataccctgaaagtcggctacaacgccgtccacggctactacatccagatcagccgcggccagagccacctcgcgccgatccactacgtgcgccgccagacgctgaaaaacgccgaacgctacattattcctgagctgaaggaatacgaagataaggtgctgacctccaagggcaaagcgctggcgctggaaaaacagctttatgacgaactgttcgacctgctgctgccgcatctcgccgacctgcaaaccagcgccagcgcgctggccgagctggacgtgctggtcaacctggcggaacgcgcggaaaccctgaactactgctgcccgacctttagcgataagccgggcattcgcatcagcgaaggccgccatccagtggtcgagcaggtgctgaaagagccgtttatcgccaacccgctgcagctggcgccgcagcggcggatgctgattatcaccgggccgaatatgggcggtaaaagtacctatatgcgccagaccgcgctgattgcgctactggcctatatcggcagttacgtcccggcgcagaaggtggagatcgggcccatcgatcgaatctttacccgcgtcggcgcggcggatgacctggccagcggccgctcgacctttatggtggagatgactgaaaccgccaatatcctgcacaacgctaccgaacacagcctggtgctgatggatgagattggccgcggcacgtccacctacgacgggctatcgctggcgtgggcctgtgcggaaaatctggccaacaaaatcaaggcgctgacgctgttcgccacccactacttcgagctcactcagctgccggagaaaatggaaggcgttgccaacgtccacctcgacgcgctggagcacggcgataccatcgcctttatgcacagcgtgcaggacggcgcggccagcaagagctatggcctggcggtcgccgcgctggcgggggtgccgaaagaggtgatcaagcgcgcgcggcagaaactgcgcgagctggaaagtatctcgcccaacgcggcggcgacccaggtcgacggcacgcagatgtcgctactcgccgccccggaagagacctcgcctgcggttgaggcgctggagaatcttgatccggactccctgaccccgcgtcaggcgctggagtggatctaccgtctgaaaagcctggtctag

SEQ ID NO: 237947 - DNA, 420 bp, Klebsiella pneumoniae
atgaaaaaaaacgaaccaccatttctggcaattgattatcgtatcctggcgttagatattaaaacagccataaacggaaaaaccatcgatagcagcaccatcctcaaactcaaactagtctattgttacctcctcggcctctccaaaacttgcagtgaggtttatccagaacaaacaaagatgggtaaaacattgggtatcggttcccgacaggttgttgggagattaatttcgttacttgagtctctgggatggatttcaaaaacatccagaacaggaacatccaatctatacaaggtgaaaaccgtcgaacaaattttagaaggtattccgcgcgaggttatagaagaggaaaagaaatttcctgaatcaatccaggaaacggtattaattgatgatgatgatgatttaccgtggtga

SEQ ID NO: 237948 - DNA, 366 bp, Klebsiella pneumoniae
ttggcatatgcacgacaaaatgtagtattcgaggaaacaattgaattaggatttaataacagaaatcacaaagttaaggtttctaaaaaattaaaaccattagcaatcattaaactctacgaagaatccccaccactaacaccagaagaacaagaaataatcgattctatgcaaggtgttaaatggaaatctcgccaaaagtacatcggttttaaattcaatcgtgagccactaaaatttgaatatctctttgataatataaatgagtacgagggttggctggagtttaaccgattggaaaatgaacagtatcagggatacgatgttgatattatggatgcagcatataacggcatctctgattaa

SEQ ID NO: 237949 - DNA, 204 bp, Klebsiella pneumoniae
atggtaactatcacaaaaggcgtccaaacatatgacggaaaaatccccgttactctgttggttgatgacgtcgaaacagccaatactttggtaaaaatggcaaaagatgccaacgtcactgttattgaacaggacgaagatattaacaaatctgcaatcaatccagtattcaaacatctggataagattgcatccaaaaaataa

SEQ ID NO: 237950 - DNA, 372 bp, Klebsiella pneumoniae
gtgggccacccagagcatgaggtactgttcgtagccaatcaggtcaacaaggctgcgggtctagctaaccagaacattgcccactatattgcaaagggcgtggcgagcggcatccgtctaggagacttaggggataaattatcctgtaatggtgaactaagggagccgtcgggtcgcttaatgcgcggcacaacgtggctcattgacgagccgaatgcttacaaggttctacctagaggccatgcaccgcagtcagaaccgttccataagtgggtcaccgaggaagtcctgcggattgacggcaggactggacagtacgatatcgctaagtccaccttgataattgacaatatgtcaagcgctttgaattag

SEQ ID NO: 237951 - DNA, 693 bp, Klebsiella pneumoniae
atgaacattatcaatcttgaccagcttatctcgatgacctcaaaagaaatcgcggagttgacgggtaagcgacacgacaacgttattcgcgatgttcgtaagatgcttgatgaaatatatccggacgggggtctcctcagttttgaggacacctacgttaatacccagaatggcgaaacatatagcatgtaccgactcgaccggaagcatacctttattctggtcgctgggtattccgtccaactccgcgctaaatgctacgaccacattcagatgcttgaacaaaaagtcctccgattggaagaccagcagaaacgcgcagccgtacagtcggctaaccgccgtggtgtaacatggggcgattactgcaagacgcatggtctacctgctcagaagttgatgaacatcctcaagcgggaacgcaagctctttcaggtccaccccgtcagtggtgaatggtcagtcaatccaaaatatgcggaatacttccgggtcatcaagccaactgaccagcgattcaacccgagcggcattaacatacggttcaacgccaagggactggaattctttggtcaacctgagcatgtcctaaagatgcgcggaaaggttatcgaaattcacggtacagacgccgagaagcagaagcacctactggatgtcgctagtacagctcctcaaaatgagggactgtaa

SEQ ID NO: 237952 - DNA, 822 bp, Klebsiella pneumoniae
atggttacaaataaaggtccatttgagattcgcaaaaatttagagttggcttcaggtgatattctgtatcgtgaatcaggtatttatgattccacgctgggattacttgatttcggcgatacgtggtcaggagcaggcaagaccgccggttatcaggagaacgaccagattaaaaacctgtgctatgttgacgactatgcagccccgaacttaccgatgccgtatgatggcaacggtatccagtttgcagagcacaacggtagtaaaataacgcttccatcgtcgttcattattccctcaacttgcacaagacagcttgtccggctgtgggtgaaattcccgacgtcagatgtgggagatacaactgttctgtataataatcaggttctggtaattggcgggacatatgcatcaaaccagtctctgacatacctgggggcaaataacaaatcagatggaactattagcaatatcgtggttggcgctttcggggtagggcttgattcaagcaatacgttcacaactccagcgaaatcaggtcaggtagtgcagttggcgtggctggcgacaaaaattgatagtaagttcatgtcagtacgtctttacgttaatggcgcatacgtgaatgacctgactcccgtggcatttggtacaaggccggcgactatcgcagttaatcagcttaacaacaaaggtgtttccgaaaaaacagtgcggtgtaccatctatcggttagcgatcgacgatctgaccaatagcgacctcgaccctgctgatatcgttgcggctgattacgcagataatgtcgctagatttagttaa

SEQ ID NO: 237953 - DNA, 981 bp, Klebsiella pneumoniae
atgaatataattgatagtttgcatgattggaaaaaaagcgttatccatcttgaatgtgccactgacagcgttgatgtattccaacgctttgacctcattagtcaatttcgggagtcgtcagagaatcacaatatagaaggagagcgaaggctgagtgatgaattagaacagttccgaaacaacattcgctcgcaaggaaccgctttttacatcgaacataataataagcactatataatcactgccaggcatgttctttttgatgaaagacagtatttagcaaatgaaagggagcaacaaaatagctttccagattcttcaccacgagaaaaaacatgcgtattcaaagaaatatacagagttccatctctttctgagctttcaaactgtaacgcacatgacagaataaatgaaattatacactctggttttttgagtttagtttcatcaggcgcatatgaattatccacttatattttatcgcaggaagaactggatatcggaataatacagttagatcgatattacccaaatgtcattcagggattaaaaaagtttggttttatccccctaccttcctcagtcattagtgaagaagatttcggcgaaggtcatgatgtttttactgtaggttttcctggttcttctattgttggtcaattagatctttgtaacccatatagacagtggatgtccagtgcagtttcagagcatgtatacacatggggcagagtagctatgaaccataatgatttaccgtcattctggtgtgatatgactatttacccaggaaatagtggagggccagtaattcatgatgggaaaataattgggcttgtaagcgggcagcccacaattccaatcgaagggagtccagaactgagaacgaggataccatttgcccatataatcaagggaagacatataatgaacacgctcagagcgttagaggaaaagatagccaataattacgggagttga

SEQ ID NO: 237954 - DNA, 279 bp, Klebsiella pneumoniae
atgaaatacgcagaagctgatagctctgctgtcaactatccaatcatcagcaaaaattataattcagcacaagaaacttggctcaatgcatatgatcaagcctgtatgagttatcgtgaaggaaaactaaacaaggaaacgtttaagaaaacttatcacgttccaatcagagagttgtacgaagataaggagttgcagtttttcttcagtcctgctgacacatctaaatatcagtcaattatatcggtttaccgggaatgggaaacctatcatcgctga

SEQ ID NO: 237955 - DNA, 339 bp, Klebsiella pneumoniae
atggcagtccaaacttataaggaattagcagaaatatatgctgctcgcatatctaaatgcaaagatggagatatgcgagtgatagaattgaataaaatctggatggaaattcagactttaaccgtagatggaaaccctcttactgagcatcaacgggttcgtatgctcgaagagctaaaaaaggccctgacggacctggggtatgacgatgatgttatcgcccttgaacactacagtggtagggaggattatgaggcgttagctaaatcaggctcatccattagcaatgatgaaatactagcaatgatgagaatggtagtaaaaggaccgaaaccatga

SEQ ID NO: 237956 - DNA, 696 bp, Klebsiella pneumoniae; identical to SEQ ID NO: 146504

SEQ ID NO: 237957 - DNA, 1248 bp, Klebsiella pneumoniae
atgaagccagcagcgaataacatcggactcagaaattatttacccatactgctcacgctgccgctggccggactggcggagcttgcctctctatactctattcaggcgctgctgccaaagctggcggaggtttaccatattccgcttaatcaggttggcctgatcctgtctgccgaagtcggctgtttggccctggccatgctgtttaccggcagcctttccgaccgctttggacgcaagcaaactatcgtcgtttcactgctgctaggcggcattttgacgctgatgtgcacgaccgtcagcgcctggccggagctggtgctttatcgcgctctgcttggccttgccgtcagcggcatcacggcggcggtcaccgtttatatctgcgaagaggtatctcccgttctggcgggcgtagtcaccggctattttatttttggtaactcgctgggtagcatgtcgggcagggttttcgccacgctgatgatggaacacgtttcgctgaacgttattttcatgctgtttggcggtctgctgatctttattgcgttttacgttctctatttccttccggcgtcgaaaaactttaccccgagcaccgcgctaaacctgacgcagatgttaaaaggcggtattgaacattttaaaaacagaaatatctctctggcctacgttatcggctttattctcttcggctcctttacctctatttttaacttcgtcgccttctatcttcaccgcgaaccgttcaatctctcatttacccatatcgggctgatccccgtgagctttgcgctaaccttcttctccgcgccgacgaccgccaggctggccgtgcggtttggcgccatgaatatgcttagcatgctgctgatggtgatgattgtcggcgccgccatcagcatttttgccaccaccgcggcggtatttattttcggggtggttgtcctctcggtggccttctttacctcacactcaaccattctctcctgggtgagcaggcacgcctctcatgctaaaggacaggcaacggcattttatctcttctgctattacgcgggcggggcggtgctgggctacctcaacggtttcgtttttgccaaagcgggatggaacgggctggcgctctccgtgatttccctgctggcgattgggctgctgcttagccgtattctgcatgctgccaataagcaaagagtaatggagacgcgcgagatggttaatatcgggatcgatgccgataattaa

SEQ ID NO: 237958 - DNA, 1422 bp, Klebsiella pneumoniae; identical to SEQ ID NO: 146506

SEQ ID NO: 237959 - DNA, 609 bp, Klebsiella pneumoniae; identical to SEQ ID NO: 146507

SEQ ID NO: 237960 - DNA, 876 bp, Klebsiella pneumoniae; identical to SEQ ID NO: 146508

SEQ ID NO: 237961 - DNA, 921 bp, Klebsiella pneumoniae; identical to SEQ ID NO: 146509

SEQ ID NO: 237962 - DNA, 981 bp, Klebsiella pneumoniae; identical to SEQ ID NO: 146510

SEQ ID NO: 237963 - DNA, 1422 bp, Klebsiella pneumoniae
atgaatttacctatctatggatgttatacgaaatcgaatattttatggattggaaattatcccggtgagtggttcattacgaaagtaaaatatgaagcatatgttaaggcaagagtcggctggcatggtctaaaatcggatgattttacggatgaaggaccatttcttgtcacaggtagtgactttaaatcatcacgcattcactggggtgattgctatcattgtgatttaaatcgctatgagcaagacccatatatacagctaagaaatggtgatttacttattactaaagatggtacgattgggaaagtagcattggtagacgggttaaaaaccaatgaaaaagcgaccttaaatagtggtgtgtttgtcgtaaggccacttataaataacttctctactaaattctatttttggttgctccagtctaaggtgtttaccgattttgtcgactacaataaaacaggtagtacgattgttcacctgtaccaagacacctttgttaatttttcttacgcatctccccgactaaaagagcagatacaaatcgctgctttcctcgatcacgaaaccgcaaaaatcgacaacctgatcgagaagcaacagcaactaattgaactgctgaaagaaaaacgtcaggcagtgattagccatgccgtcaccaaagggctaaaccctgatgtgccgatgaaagattctggtgttgagtggttgggggaagtgccggagcattggggagttacgactctacgaaatttgattcgaaaccaagatgtatttattcaggatggcaatcatggagaattgcatcctgttgctgctgaatatgtagatgaagggattccatttttaatggctaataatgttcggggcagcaaagtcgaccttgttgaatgtaagcgaatttcaaaatccagagctgataagttaagaattggttttgccaaagctggtgatatgttgttgacccataaaggtacagtcggtgaggtggcgagcatccctgattacataccggaaccatactggatgttaacaccgcaagtcacttattatcgatggaacaaaaataaatatgattctaagttctgtgcttatctatttcagtcaaaatgtatacaaatacagcttgaaattattggctctaagcagtccactcgctcatatgtaggattgattgcccaaggcgaactcattgttgtaattcctcctcttgcagagcaacaatcaatccgaaaaagactcgatattaggacttctcgattagaggaaatgcttgcatttgcggaaaaaaatattgagctaatgcaggaacgccgcactgcccttatctccgctgcagtcaccggaaaaattgacgttcgcgactgggttgcccccgacacgcagaacgttgaggagccacaggaggccaccgcatga

SEQ ID NO: 237964 - DNA, 681 bp, Klebsiella pneumoniae
atgatttctcgttacaaatggctattagttaacacaccatctagattggatgatgttgtggaaattttgcacaaacataaatttagcaataaagagagtaaaggttatatcattaataatattgataatgaatcattaagtgccacctttgtggagcgagtaattcaacatgaaaaaattaatagaccagatggtacagaggatgacattaaaattgaacgctttatctatacgtcatttaagatgaagatttttgataatgatacatatctcatgcgagtggaaaatgcaccgcgggctttaaacgaattctttagtttttggaaaaagattttcaatgaaaatttttatatagaaccaatcaaaatagatgtaatgaatacaatattttctattctaaattctgaatttagaaatgtgaagataaagaaagtaaaagcttctggtattagtattaatattacaacttctgctagcattgaagttgtttcttctcataatgctttggaaaattttctttcagagtttggtaagcgggagtttaaatttgattatgcgaaagtacaagctattttcaatggctcaccctgttcgttagatattaaaactacaagtattttatctgatagtgaggatgcaattgaatttttagaaaggaaattaataagaaacgacgagtga

SEQ ID NO: 237965 - DNA, 1113 bp, Klebsiella pneumoniae
atgagtaataaaggagattatgggaacagaactggtgctatctatagtgcaacagataaagccatgtttgacgcgctgcagcaatataaagtaacaagggatgatataaaagaactgtattttacgagaggtgttattatttccaataaaacatctaaagaaattttggcagataatttttcaaaatatattcatggctatgaggattatgagtttctctcaaagatattaggcgtttcaacgcaacgagagcgagttaaatccgttgatttaattagcactgatattactagtgaagatatagaagaggcattagataaagttaaagagcatttatcggttaccagcaatgatattgttgattataacatagttggaaaaagctatactttgaaaattgaatatagtgaacctgattttacgaagtctgagtttagacaagtcgttgataaagacgccgaaattattatagagaaaaatgcgcaaggatttagcttgattgggccacacaataaaaaaatggaagttgttacatcattgatatttgatgcacttgcagaaaaacattcgtcattaatacgtgatgaaataaaccttgaagatgtaatagataaaagcttggttagtaaattatttgataaactaactacatcaatggaagggtacagcctggtaagtgtgaccgatgtttatgtatataatccagataaggatgatggaacaggttctcatattaaaaaagcatctctatcaggaactggtgtaacgttatcacaagaattgggttcattatataaaaaaggtttttatatttggcgaattgtttggacagttacagatgatagatatctcgattcagatatctatgagattgaagctttattttcagaacctgaaacctgttcagattttgcatttttggttaaaggttattatcctgtgaaagttgatagtacagacatcactgatacgcaccataaaaaccgagtaaacctcagtaaaagtgaagagatgaagttcaataaactagtattaaaaactgccaaagatcttttggaggagttttcaaaattagatgaaaacagcaaggatgatgaggggggcgctatatga

SEQ ID NO: 237966 - DNA, 1119 bp, Klebsiella pneumoniae
atggctgagactatcaatataagtgagttggcccatgaagtgtccaacgatatattttcgtggtttaaatggaaggaaatcaacctctacgatgaaaacttttcgtgccgtaaatctgaagagcattttcccaaaaaaatagcgaatagcagtgaaagtgataatgaagtagaatcggaacaggccaatgaagttgagagtgaaaaaaagtgtactcatccggtagacattgtatttaaatacaatgatccatatagtggcaaagatgtgctttttaatactgatttaaaaagctatgctgctaaaagcattagaccaagcgatgtaagagatatgctcaagtcaatagctaaaactattgactgcgcttcaataagtcccgaatggaaaaataggtatggaatcgactctattaagtatgaaatacgagggatgcttttcatttataatcatgatggaaaatatcatagagatttctacaaagttttcaaaacagaaaaagttaatgaaagaagaaagttaggcatcaatttggcttctataggattaaaaagcaatcaacaaattcatatcgtagagcctttgatgattagctacatgacaacaattattgctgatattgataggcttcatcgagaaggaacatttccacgcgaagaatactcattctactatccagagctgataagaaataaaacaataagtggtgataaatattcaaggccggcgactatagaggctataacagcaccttatttaattattgaacatgatatggtggaaactaaagatagaagtggtcaactaaaaacaactcaggcaggattcgttatttattacaatcgtcctgggaatgatccttatgagtttgtttatctctttgatacattatccagatatcaaattttaaatggagaacataatataaggcttcgtttggcacattatgaacccgacccagatgtgatcagtcattttgaaaaagcaaaagatatttatataagaagttgggggtatgatgataataaaaagaatattcttgacaggatttcaatcaaagaaattaccctaatgcaaacttgttataaaacaaaagaagtggcaaggagaacgaaatga

SEQ ID NO: 237967 - DNA, 627 bp, Klebsiella pneumoniae
atgaccatcatcactaaaaagcgtttaatcgccgcgggagtgctatccgcactgatcgccggcaatatggcaatggcagcggatgtcccggctggtgtgcagctggcagagaagcaaaccctggtacgtaatagcggcgccgagccgcaatcgctggacccaaataaaatcgaaggggtgccagaggccaatattagccgcgacctgttcgaaggtttgctgaatacttcgccgaaagatggccacccgatccctggcgtggcggagagctgggataataaagattttaaagtctggaccttccatctgcgtaaagatgcaaaatggtctaacggcgagccggttaccgcccaggacttcgtatacagctggcagcgtctggtggatccgaaaaccgcgtctccttatgccagctatccgcaatatggtcatatcgttaacgtcgacgaaatcattgacggcaaaaaagcgccgagcgagctgggcgtaaaagccattgacgaccacacgctggaagtcaccctcagcgaaccggtaccctatttttataaactgctggttaacccggcgatgtctcccgtctacaaaccggccatggctttgttgaataaatcgaacttttgctga

SEQ ID NO: 237968 - DNA, 807 bp, Klebsiella pneumoniae
atgtcacaacagtcaacgatgtcgcgcgtatctcagaagcctttccactgcatcaatggcagcaggaatgtcgttaatccagaccactgccccagtcgtcttgttttgctcaaacttggagtgaagggccgaaaggtagtcattaacagcctgtttatagtgctggcgctggcgccctcgaagatgaaggctcagtgcatcgaagtcaaattgccgctgtatacgaacaacttttcctttccgcaagcgctccagttcggcggtaagaaacagctctatggggtcggaaacagcattgaatttatcaagccggtaccgggagagcgcccgcttgtcgccataccacagcccaaaaccaaaggaaatcagagtccagatgaacacaatcaggggagggttggtattgaacagcaaaacgaattcagtccagatgcttcccataaattctggcgactccttttaatccagttatctgtttttgtggttgcgtttcccgccggggtttatatcagcatgcgaagaaacatacatcgtgactggcgccagcatatcccgaaaggacggctcccgaaagcgcctgttatggggatgctctccatttggtttttccctcgaaagataaagcctctgagctggcaggtatgggagcagcgttcgtggtttctcgatatgaagtttcgctacggctttgagatcgcttatcgggatacttggtattggaaaaaactctcattgagagttagcgggtcatttgatctcaaatcaagcgctggtgagctgaatgtttccagaaacgggcggcattaa

SEQ ID NO: 237969 - DNA, 138 bp, Klebsiella pneumoniae
atgattaagctgtgtgtcgaagtgaccactcttaacacaataataggtaaaattcgtaacgaaaagctttttatgcaacttttacaactctatttcgctgcgtccagtcgtccatttctagtgtcgctcctgacatga

SEQ ID NO: 237970 - DNA, 588 bp, Klebsiella pneumoniae
atgtctttcctcccatccgatagcctgaaacagccccattttcgggtgataccaacgggccccacggggttcggcttctgccatcatttggcggaatgctttcataaaaggctcgaactctacgatcgcccgtcgagacagcaggccatcaggcgtcatgaactcgtgcgtatcggttgggatgcggtatgcgttaacaaggtttcgacacttggcatcggtcataccgctttttgcgaccacctggcgataaccgacatatccggcccgcatatttccacgcttaatgttttcgacagcttcgactacggtttcaacctgttcttcaacctggtagaggcgtcgctcctgctcaacattcagcagggccatttcagcgatcagctctgcctgcgattttggccgggagcgttcttcttccagctctttccagcgatctaccagtctggcggtaaactcggggctgagttgcgcgaccacaatgatgctgtcacgcttcccttcttcactttcaaaaacgtaaattgttgtggggcgcccggcagtaggctttacctcaatttgaggagaccggataacgtcctttga

SEQ ID NO: 237971 - DNA, 2991 bp, Klebsiella pneumoniae; identical to SEQ ID NO: 194177

SEQ ID NO: 237972 - DNA, 2802 bp, Klebsiella pneumoniae
atgacaacccttaattttgataaatacactattgagattgaagctgatgcggccaaacttctggctggtcaggcgagcgcagatacagctttaaagcaaattgaaaactcagtcaaaaagacagctaactctgctgacaagctagataaaagcctggataacttgggcggaggtttttcgcgccttgctgtggccgtgaaaggatacatatcaattcaggcgttgatgaagctccagcagctttctgaggaattcacgctacttcaggcgcgagtaacgcgtttatcctcaagttcagaggaaggggcgcggagctttcagcagcttgtgagtattgcttcgacaaccggggccagccttggggataccgtcaacctctggcagcaactcaccgccacactgaaaaccgtaggtgctactaacagcgatgttaaccggctcgtgatgacgctgcaaaagattggcactatcggtggctcatcgtctcaggaaatggctaacgctctcaggcaatttatgcaatcggtagcgtcaggaagaattcaggcggaagagtttaactcggtactggaacaaatgcctgagttggctcgacagatagcagacggcatgggaattccgtttaacgagcttcgacaattgatgctggccggcaagttagatattggtgaagttcttgcggcaattgaaaagcgttctgacgagatcaaccagcagtttgagaagatgcctcgcaccgttacacaggctactaatgccctggttactcaatttggcgtagcagtgtcaaaaatagatgatgctattggggcttctcgctatttggcgaagttattggacggagccgcactcagtatcagcgtcgcaaccggaaacgctccagatgctgtgatgctgactcaaaagcttgagcaaaatactgagcaacttgctgtcgctgagtctgatttagctaaggcgagaaaggcgggcttgggctggggagtaaaacaaactgagcaaacggttaagagacttaaggcggagcgtgccttgatcctaatggctcagcaggcaagtaaagactcacaaagtgtatacacgccgtctaaaggggaaacgccagcctatatcaccaatctcgaaaagaaaacggcagagaataatgccaactccattatcaaatcaggccaaacagtagttgataagctcacccagcagcgtgaacagctaagcaaagacaagtccaaagggctaattgatgataagaaatatgctgatgctgctgctgttctggataagcaaattgccgatgccagaaaaaaacaggataaaacgccgaagaatgcctttgcccgcagcgatgactcaatagacagcctgcagcggcagattgccgttttgacaatgcgctatgacgagaacaccagagaggctgcgcagtttaatgccgtggccgctctcggagctaaggccaccgacacgcaaaaagagcgggtgcgtgaactggctggacagttatttgacgcccagcagcgccagaaagaccttaatgatgcgattagcaatgaccccgtgcgtaaggaaaataaaacttattcagatggtcgagaccagctaaaacgtcaactagacggccagatgattgaccagaaaacctataaccagcaatctgagttaatggagcagcagcatcaagtcaatctggcaaaaatccgtgctcaggagcaaacagcaaacccgatagcagccgcccgcgctgaagttgacccggtacagcaactggtaaacgagaacaaccagaagcttgccctgctgaggcagtatcagcagcaggaacaggcaatactccagcagagctatcaacagggaaaaatcagttacgatcagttcatcgctgccaaatcagctacggatgctcagtatctggccctgagaacagctcaggagaaccagttcaacgagcagatgacagcagcgcagtggcagctattaagccagcagagcctcggctataacatgctgacgagtgcggtggacgcatttagcgggaatgcctcaaacgccattactgggctactcactggcacaatgtcggcgcaggaggcaatgcgttcgctcggtaacaccatcctgaacagcgtgatcaacagcattgcccaggttggtgtggagatgctgaagaacttcatcctgtctcagacattgggcgcggcggctcaagcggcgaatgctgcgtctgccattgcaggaggggctgcggccctcgccgcttggtcgccggcagcaattgccgcctcaattgctactgggggaacagcctcggcgacaggcttaaccgcgtataagggggcgcaggccgctggattggctacaagtgtgctcggtggccgcaaaaatggcggccctgtaactgccggcggagtgtaccctgtaggcgaaggggatctcccggagttcatgcagaccagcaaaggtctattcatgatccctggtgatgatggtcgagtattcagcaataaagacgttactggcgcaacgcccagcattaagagagcgtcaaccggtaaagaatatctcccggcatcctcagcatcatccagccaggcggaaagccgcactgaacgaccgatacaggtcaacataacccttatcgaccagaccaccggcaatcagcacaacatcactggcactgaagctttccagcaaggtgacgttgtgacagttactggatggctaaatgacgtagataccgcaggcccaatgtctacagcattcgcagatgctcacgggcttagacggcgggcaaggggagccttttag

SEQ ID NO: 237973 - DNA, 291 bp, Klebsiella pneumoniae
atggcaactaattcaccctggcatcacctctataacaccaaacgttggtaccggctgcgttatcaccagcttcagaagcaaccactctgcgagtttcacctcaggcgaaatcaggtgatatccgcaaccgttgttgatcacatcaaacctcacaagggcgatgaaaacctcttccacgacccggacaatcttcagtcgctttgcaagcgctgccacgattcggttaagcaacgtatggagaagggcggaacggttaccgaattcgacaatgaaggcagggttatctggtaa

SEQ ID NO: 237974 - DNA, 228 bp, Klebsiella pneumoniae; identical to SEQ ID NO: 195746

SEQ ID NO: 237975 - DNA, 231 bp, Klebsiella pneumoniae; identical to SEQ ID NO: 185380

SEQ ID NO: 237976 - DNA, 150 bp, Klebsiella pneumoniae; identical to SEQ ID NO: 168718

SEQ ID NO: 237977 - DNA, 558 bp, Klebsiella pneumoniae; identical to SEQ ID NO: 171779

SEQ ID NO: 237978 - DNA, 2760 bp, Klebsiella pneumoniae
atggatgagattcattcgcgtcgtataaagtcggcaatgattgtatatgctatagagcaggctttagggaattttattttaaataattcagagttcagcgaggatttatcagaaaatactatttccgatatacttaagagagaacaggcaagagggagaaatatctctaattcagatacgcaattaattatagaatcaagttatttgaatgaaatattttcttttgcattagatattactaaaggctctacaagatatgatgatttaaaaaggctaaaagaattttgttcttatttagaacttttcgaaattagaaatgcaattagtcatccaaacagaccttttcccgagagttattggtatagatctgctgctatagcgagcgatccattaattgaaaaattaaatttgtatcaggtaactcaagcattacatgctgcgatttcgggtaatatatcgcctcctcctgagcaatgggtcaaaaatgttatatgggctgtaaaaaacagtttgccagaaaattttgatcatgaaattacaggtcttttaggtagggataaagaatttaaagagttaaaaaaagtattagaagttcctagaaatagtttgattgcaatcgttgctccgggcggggtaggaaaaacagcattaatacttcagttcttacgagatttgagtttatcaccggaaacaacgaaatatgcagaggctattcttttttgcactcttaaaaatgaaaagttgacagctgatggcattgagaagatagatgctattcaaggcgttgagcagattaaagagcatgtacttcacgatctttcagtgctttatgaagatcatgagtttgaaagttttgaaaatgcatgtgataaattaagcgataaaaaaataatactttgcattgataatttagagaccttgctccttaataatcaacgtgaatttatagagtttaatcagtctcttccattacattggcgcgttattgttactagccgaataactgttgattcagcgactacggtggtattggatgcattagggaaaaaacatgcaatgcatctggctagaaattatttcaggaaaagaggagtaagccaactaatagaaagtgagttagagacaattgtttctaaaacaaattataaccccttggcaattagattgacagttgacttatttttacgtggtcaagatttaccttcatcaatatcgcaatcgcagaaagatatagcagcattttcttatagaaacctcattgacactttgttacctgcctcaattgcaatattagaagctatcttctcaagtggtgcttcttcgagaaatgaacttgcagagattctgacacttgataatgatgaagtcgcccagtccgttaatgaacttagtaagactagtctaataataagaagcttggatgatagtgaacaggatttatttagtttaagcgattcaattagagaccttcttcttgttaaccctaagaatattgaagtaagaaagcatgtttctgaaactataagaaagagaaggataatgcttcaggagcactcccggagtcaagagcagagaggagtaacaaagtttgacgaggattatataccgtctgatactcctgacggattaaaaatgcttggggtggagacgaataaattactgaggaagcggcaaatcccagtgggagttttggccgatatatcaaataaatatcgagatgctttaagtcagtactcgaaaaattatttgtttaatttcaactatgcaagggttttaatgcagttgaaagttgatggctctgctctgtattatttactggaagcagagaagttaaatccaaaatcaccaatgattaaacttgcaatcgcaaaataccatttttcaaatggtcaatatcctgaggctgaaaaatatttcaaagaattgttcaacgaaggctatggaaataaagaaaattctaatgagcatttttctcactctgttgttaaaggctggttacaatctttactataccaaggaaaacatgatgatgtaattggtattactgaagggtggcagggggttgtcggccatagagcattatttggttcttatcgcgcttccgcatacaaacgttctattgagcatcaactaaatgatattgataaggttgaaagtgctcttgataaagcaatctctgtattatctgaagtgttcaaattggaaggcatgggtactattgcatgtgcagaagcctttagagtaattaaagaactccattacattctacaatcgcaaagtacattctctgttgggttcctgtatagagcactggcgttcgtgtctgataatttgtttgaaatgttacaggataatagaaactattctctcgattcatcagagattaaagattggttgaaggtgttctatgatgttgatattaaaaacaaccctgttcataatttagggtggtatcattcggaagaagtgaattactcccttgagcatattaatatgcttgaaagggatgggtatacaattgttacagtttatcaccttccaaataatgaagatggggtgcctaaatacatgtttgcagcagatgataaaggaactcagtattatttgaatgttaatttctttaaggcaggttgggaaagatggtctttctttgatgtaaacacaaagcttgcaattaaaacaaaaaataatgtgcaaacaggtaagacaatagcagcaaatgaaatagttgaaattaataaggaaaaagcaataagctga

SEQ ID NO: 237979 - DNA, 885 bp, Klebsiella pneumoniae
atgagcaaccataagaaaaatatcgatacagattggtataatttccaagaagagatttgtgaacattttaaaaatttaggtgccaacgctaagacgaatgttacagtagaaggtgtaagaggaatttcgaatatagatgtggtagtggaatccaaatatcttgggactgatttcaaatggttcgtagaggctaagtattggaatagtaatgtcacaaaagaaattgttcatgctttttttacagtgcttcaaaataccggtgccgatagaggtttcatcatttcaaaaaaaggttttcaatcaggtgcaatagaagccacgaagcatacaaatataagtttgtatacacttgacgaatttaagaaaaaaacaaaccatcttgtgcaatctaatatattaaaatcttttttgaatcgtgctattttaactagcactagatactgggggcatacaaagaaaacaaggataaaatatgaacttagatatgaaatgtttgatgatagagaaatcctttcatgcgctgtaattctcattattgttaccgacttaattatcgatgaagagattacctatccatttgatgtttctcactacacagggaaacaaatagatccaattaacagttttcatgagttaatgcattggttgaatttaagtttgaatgagttagatcgtagaatactagatgctgaaataatgatgaaggtcaacggagatttcgatcctatatatgaatattacacacctgacatcattagaatttgcactaaagaaagaattgataactttttagattatagtttctttcctgaaaaggaaaggaaaatcttgattgcacaaaaaaaaatggcagaagactacagacaaagtcggaagattaattga

SEQ ID NO: 237980 - DNA, 1425 bp, Klebsiella pneumoniae
atgaaaaaaagggtatatctgcagatcctgttgccggtgctgatgacgcttattgttctgtcagtaactaactattttattgttttgtcccagaaggactaccagtcgagggtggctgaacggttattacaatactccgaacgggtagcagggcagttagcagatgctattgaagctgctgaaagctcaggtattgcaggctgtacaccagccggtatcaatcttttgagaaccatccgacaaaaaaataaatacattgatgatataggtatcgtcaacggcaaccgcattctctgtacggctggatggggaacattaaggagcagtattctcctgtcgtctcctccctaccagacgccgagcggatatttattgtacccggtcagaaaagacaatgttcatcttcgcaatcccggaaccgtaacgataaaacataatattgcagtagtatctcctgcgctgacgtttgccaacgtcctgaatgtgaatcccgacttctacattgccctggccgtgcgtaacgggcaaaagcagctcttttccctggggcaaaattatcttgccctgcaggcgacatcgggttctccttttcgtatcagtacccgccattgcagccagatccgcgatttatgtgtcacaacgaataaaccggacggtggggttatgtcactctcctggatgctgattttccttctgagcctgttcgggataattaccggttgctggatggtctcgcttatcgattcagctcttgaagctaaaaactcgctagaaaaacggtttatccgggcggtcaagaaaaaagatttttatattgagtaccagccgatcgttcaggccagcgacagagttgtggtggcgtatgaagccctggtcagatggcaggaccggtattttggccgggtatctccggagctgtttattggcctggccagcaggctaaaactgtaccagaaactatcaggatttgtgacggaaaccgctctggatgaaatgcaggaacatctgagaagaaatccttcactccggctttcactgaacgtaggtgataatgaaatgaatgactgtcagttcctggaacaactggtatcaggctgccgccgccttaaaattcagctccaacagatcaaactggagatcactgaaagttcacgatctgaatcaggtttgattgccgcattttgccagcgagccagggaatatggttttaatatttccctggatgatttcggtacaggaaccgcgaatatcgaatggctgacggtactggattttgatgagataaaaatagaccgaatttttattgccaatattgatgaccccgtgaagcgcgccttactggtttctgtggtgaaaggattacgtggcaccggaaaaccactggtgtttgaggggtgtagtggcacagtaaatttggccacctga

SEQ ID NO: 237981 - DNA, 681 bp, Klebsiella pneumoniae
atgtttcactgtccgttctgcaaaaccagcgcgcattcctgcaccagtcggtatatgtccgataacgtcgaacagcgctatcaccagtgcaggacatcgaatgctcggccacgttccacacgcttgaatccatcgacggggtttttcgttcaccggcgacagagccagtcatctctgtacccgcaccggcagccaccgttaaccgtgccggtgtgtaagcacggccagtcatcaggagaaacaaacgtgaccacactgatgctacagaaaacctttgaggcctgtcagacaaacaaatccgcctggctgcaacgcagggaagaactgacgcaggccgaaaaggcataccgcgaacagcttgccggcagcggccacagcggccggagcctgcaaacgttgcgtgagattatcgacgtgaaaaaatgggaaattaatcaggctgccggtcgctacatccgctcgcatgaggaggtgcagcgcatcagcatccgcgaccgattaaatgattttatgcaggcgcacggcgcggagctggccgccgcacttgccccggagctgatgaattatcccgggcaacatcccgccgttcagcgctgtgccatgcagcactcactcgactatctgagggaggcgctacagctctggctggtcgccggtgaaaaaattaattattcggcgtag

SEQ ID NO: 237982 - DNA, 552 bp, Klebsiella pneumoniae; identical to SEQ ID NO: 182276

SEQ ID NO: 237983 - DNA, 180 bp, Klebsiella pneumoniae
atgcgtaactatttccgcatcaccggctacgccgttaataagcgcggtttaacggttggtatcggttatcagctcatatccagcgacaccaaaacagcaacggcccacgcagtgcttcaggcgcagcgtgaaggtctcagccatgtgcgcattacccgcgttcaggaggtattggcatga

SEQ ID NO: 237984 - DNA, 552 bp, Klebsiella pneumoniae
ttgccgtctacggtatcgatagccgccgtatgggtatcattatttgcctgcggttcggtatccgaatcggagtcggagtcgctgtcagcatccgaatcgctgtcagagtcggagtcggagtccgaatccgaatcactgtcggagtccgaatcgctgtcagagtccgaatcactgtcagcatccgaatcgctgtccgagtcagagtcgctgtcagagtcggaatcactgtcagagtcggagtcactgtcggaatccgagtcactgtccgagtcggaatcactgtcggaatccgaatcgctgtcggagtcagagtcactgtcagagtcggaatcactgtcagagtccgaatcgctgtcagcatccgaatcgctgtcggagtcggagtcactgtcggaatccgaatcgctgtccgagtcagagtcgctgtcagaatcggagtcgctgtcagagtccgagtcgctgtcggagtccgaatcgctgtcagagtccgagtcactgtcggagtcggagtcggagtcgctgtccgaatcactgtcggaatcagagtcctga

SEQ ID NO: 237985 - DNA, 627 bp, Klebsiella pneumoniae
gtgattcggactctgacagcgattccgatgctgacagtgattccgactcagacagcgactctgactcggacagcgattcggatgctgacagcgattcggactccgacagtgattccgactctgacagtgactcggattctgacagcgattccgactccgacagcgattccgattccgacagtgattcggactccgacagcgattccgattctgacagcgactcagactctgacagcgactcagactcggacagcgattctgactctgacagtgactcggattctgacagtgactcggattctgacagcgactccgactcggacagcgattcggattccgacagcgactcggactctgacagtgattcggactcggacagcgactccgactccgactccgacagcgactctgactcggacagcgattcggactctgacagtgactcggattctgacagcgattccgactcggacagcgattccgattcggatagtgactcggattccgacagcgattccgattctgacagcgactcagactcggacagcgattctgactccgactccgattcggataccgaaccgtaggcaaataatgatacccatacggcggctatcgataccgtag

SEQ ID NO: 237986 - DNA, 270 bp, Klebsiella pneumoniae
atggcgatcctcaagcggcccgtctcgcggaaaaaccacaccaacgtgctgatgcatattcagggttatttccgcgaccagctgaacagccgccagcgcggcgagctgcgggaggttatcctcaactatcgcgccgggctgctgccgatcctcgccccgctgacgctgcttaagcactatctggccgagtatccggatcgctacctgcaggcgcagaactattttgacccctatccgcaggatctggccctgcgcctgacggtgaactga

SEQ ID NO: 237987 - DNA, 519 bp, Klebsiella pneumoniae
gtgattccgactctgacagtgactcggattctgacagcgattccgactccgacagcgattccgattccgacagtgattcggactccgacagcgattccgattctgacagcgactcagactctgacagcgactcagactcggacagcgattctgactctgacagtgactcggattctgacagtgactcggattctgacagcgactccgactcggacagcgattcggattccgacagcgactcggactctgacagtgattcggactcggacagcgactccgactccgactccgacagcgactctgactcggacagcgattcggactctgacagtgactcggattctgacagcgattccgactcggacagcgattccgattcggatagtgactcggattccgacagcgattccgattctgacagcgactcagactcggacagcgattctgactccgactccgattcggataccgaaccgtaggcaaataatgatacccatacggcggctatcgataccgtag

SEQ ID NO: 237988 - DNA, 183 bp, Klebsiella pneumoniae
atggctgtttttgaagaatttatttcttttaaaatgcttgctgtgttaatatcatttattaaattaggcggtattcgaggtaaaattattgctgctagtttcctgcttagaaatatgaatataattcaccccagttatattttagcgaatctaccgaaaattcaaaagaaaagtcatttttaa

SEQ ID NO: 237989 - DNA, 2154 bp, Klebsiella pneumoniae
atggccgaacttaacccgcctttgggaacgacgacgcctgaaattttcctggataacgtcaagcgcgctgacgaactggtgaacggtccggccggaacggttaacgaccgcggcggtgaaccgctggatacgtggcgccagatgatggcgaaaaacgacgagatcaggcagaacctgatcccgctcagtaagcagtacgcgacgctggcggcggcgcaggcggatatcgcgaatatccccgaggggagcaccacgtattaccgcagcccggacgacagcgccctcgcgattgaggtcatgaacgttggcgggacgctgcagcctaccgggcggaaaatgccttctcaagcggccatccaggcagttcttgactatatctcatctgtcattgctactgatgatgctgattctcctttactgacacttaatgatgaggcggggtttcgtctggcggcattcggcctgaatgcaattcagagcaatgcgatgacggctgagtatgatgagtttattgatggttttgtattccgggatagcgtcggattcgttattcagcaaatagggactcctctgctcagctctgttgacagtgttcagcctgtcgttgagcagcagcgattggtgactgaggcattcagtgctgaatctgacgcggatatttctggttttgtatttcgcgacagtgtgggatttgtcctgatgaatctcaatggtgagcaaagcgatcagaataacgatggggtagatgacatttcacgcagaaatgcagcaaatcttgccgctgctgctgccgcacgggacgaaattaatacgcgtattgctcgcccggtttacgattacaatattctgatcacagacggccagtcgctgagtaacgggactgagggatgggcagcactgagcaaggacattcgcgctactctgaacattaatatgctcggtgactccgtccggccaaaaaatgagaatggttcaacatttacgccgttgaacggagctgaaatcagatcagcccgtgcggtggtgcaggatttaatcgcccctcctgacggcggaaaccttatgaccgatgaggctgtggccgcactgcctcgtggggctaacaatttcggtgaaaccgtcgatattggcgcgatgtggatgtggcgggaaatgcagttacagttccggggagtggtaacggatgagcgcaaaattgtggctgtgaactgcggtgtgggcgggcagattattgaacatctctctaaaggccattcctggggattctacaaccggatcatttcagccgttacccagattaaagccattgctgatgccgaaggtaaaacctgcggcgtggtgggttttttatatcttggcaatgaatataactatgacagcacaaaaggaggggcgacagaccgcgcagaatacagagcactcctgagaaagctcattgatgatgtcattaccgatactaccgctatcaccgggcagacagagccccccctgactgtgctgtatcagaccagcggcagctggacgcgcgacagcacgaatatgagcattggcgaggctcagctcgatatctgtgcagcagatgcaaacgtaatgatggcatcaccggcgtatgctgtcaccgacaagggtggccatcttgacgcgaacggctaccgctggctgggaatgcagttcggaaaagtgctccatcgtgcaattgatcgtcgccagaactggcgtccactgcaacccctgtcagtcacgcttagcggaacattcctgcgtgcggatttcctggtgtggagcccgccgcttcagtttcgagcgtgctacgtgggttcatctccgacgacgtatgccgcaaaaggattcagagtcactgacgacgccggggacgttccggtgacgcgggtcgacattgtagccgataccgtagttgatattacgctggggcgtgaaacgaccggcgatgtttatctatggtacgccagccagaccggaagtaacggtaacggaaatctgtttgacagcgacacaacggtcgctgttgcgaattacgaatttcatgaagggacagggcaatatccggaatcaaatattccagagctggtaaaccgtccatacccactgaataacccctgcgtggcattccgccgccaggcaatcattatctaa

SEQ ID NO: 237990 - DNA, 354 bp, Klebsiella pneumoniae
gtgacccatcagccagacgttcaaaatttgaacaaggtaatctttgatggcttgtatgcgcgtattctgcatgttgttgcaaaagcgctatcacaaaccaagcttttctcttttgatatcgagtttctgcaagcagaaaatcccagttatcgtgaacgagcaaatttgctggcagaagttcacagggacatgagaaaagttgcagaagcactaaacttcgactaccaggctgaagttattggggagtatgtccatctgatgcatgaaatggctacggctattgaagaaggaaacgaagaaaaacttcaggaagtcatcagaacgttggaccaaaaaccttttatttgtctttaa

SEQ ID NO: 237991 - DNA, 387 bp, Klebsiella pneumoniae
gtggtaaaccaagagttcgttgaaatcctccgctctgttgagtatgcgccagcggaagcccggcatatgttcgatgggcgcaaggctgagaacatccggattatcaacgtccggggtgacagcatgtccggcacgattgagcctggtgatctgctgttcgtcgacatcagcgttaagagcttcgacggcgacgggatatacgccttcctgtacgacgacactgctcacgtcaagcgcctgcagaagatgaaggacaagctgctggttatctcagataacaagagctatgcagcctgggacccgatcgaaaaagacgagatgaaccgggtgttcgtgttcggcaaggtgatcggcagcatgccgcagacgtacaggaagcatgggtag

SEQ ID NO: 237992 - DNA, 354 bp, Klebsiella pneumoniae
atgatgattaaacattccttgctattctcaattctgctaataaccaccactctttcatatgcagagacgcttgatgatttctttaataaaaacaaagcaattaacgatgacattgaaattaggctggccattaaagagaaagcctttcagcttgcttcatcggaagcatataccgagggttctaatgatcttgccggcagaagtagcagtctgatgcgtaaagatggtggcagttacgctaggtatgcagtgaaaacgctcgtggatgcttgcaataatataggtccatatcaaagccgccttgatgatgatgcgtgtaaaaggctagaaggcaaggttggcggcataaaataa

SEQ ID NO: 237993 - DNA, 954 bp, Klebsiella pneumoniae
atgacaagtatagcaattcttgaagcagttaacacctcttacgtgccgttcaacggtcagcaagtgataactgcagttgctgctggggtgacttacgtggcaatgcgtcagattgtagagaacatcggaatggactggactggtcagtcggtaaagctgcgcaaaatgaaggacagattcaactgtagagatatctctatggttgccgccgacggcaagttgcgtaagcttttgtgcctcccactgaaaaaactcaatggatggctgttcagtatcaacccagaaaaagtccgtgctgatatccgcgacaaactgatcaagtaccaggaggaatgctttaccgttctgcatgactactggactaaaggcgaggttaagaacccgcgcaaaaagaccacggtcgatgaaaggacgccacttcgggatgccgttaacatgctggtaagcaaaaggcacatgatgtatccggaagcttacgcgatgatccatcaacgctttaatgttgacagcattgaggacctggaggcatcgcagattccaactgcaatcgagtatgttcaccgtgttgcgcttgaaggggaattccttggcaagcaggaagcgctgccagcgccgaagtttgacgttaacattccgcttcaatggtggatcgataacaacccgttggttcgcagtggcaacctgtcatttggcaggggctgcactgctcctgcactggatgtgacgatggatatgctttgcggcgataactcgacatctgcggccattcgcctgattaacgttctggaggaggctggctttgatgtatcagcgccgaaggccgaaattgtagcgatgcgcaaacatctgggtaatgtcgagtacggtatgaaggctatcgcagatgcttgccgccgggcgggaaataaaaccatctcgttccgtggcggaaaggctgaatatgtgattggttaa

SEQ ID NO: 237994 - DNA, 2412 bp, Klebsiella pneumoniae
atgacaatcaccgaaacgcaaaaaactgctcaattagcagcagatgccgccgttagtgccgcagaagccaaacaatacatgctggaggctgagcaaggatatcaggatactagtgctgccgcccagcaagcccaggatgcagctggatcagctcttttatccaagcagagcgcggctacatcagaagaaaattcactgcaatatgcaacagaggcgggagttgcaagagatgaggctgtaacagcagcatctaatgcctctgaatatgcactgaacaaattcacgttctataagactgccagcgatcctgatggcaccattgcagggctggcagcaactattgacggccagtcgttctgggtagcccagggtccggatgcgctttctgctgcatggcagtatcaaaacaatgctggcgtggccgtgctgcaggccaagcagccgggcaccgcggccataacagggacaatccgcgagtttccgacactggctgcggcgcaggcagacgcagatgctggcaacataccggtaggatcaactgcttattatcgcagcacggacgacagcgctctcgcgatcgaggtcatgaacgttggtggaattctgcaacctaccgggcaaaaaactccctcacaaaaatacatcaactcgatgatcgtcacagatgatagctcccccatcatgactgtaaatgacgacgtcggctttaggcttgccgcactagggcgagatctacttcaaaacagagcgatacatgctgaatatgacgatactcttgaagggttcatttttagagatagtgtcggatttataattcagcaaataggggtcccacttcttagcaatgttgatgatatacagccaatagttgaacaggagcagttagttacaaaagcattgcatgcggaggcaactgatgatgtaacaggggtgttgtttcgagacagtgttggcttcatcttattaaatgtggatggagagcagcaatcaatatctgacagcgatagtgcagatatagccaaacgcaattctgacaatatcgctgctgcagatgccatgcgggcagaaataaactactcttttcagaggcctgtttttgatataaatataattgttacttatgggcagtcatatagtaacggaacgcaagggcaaccttgccttaccagagcaataaaagattctcttaatttaaagatgctggggatgtcagtcaggccactaaatgtgcatagtgggtctacatttaacccagttggtagcgcagcgcttaccaatttggttgctgtaaatcaaagtgatgatgatggtcatatcatgactgatgctgaagttattgcagccagcccatggtctaataattatggtgaatcagttgatattgcctctttgcaaatgtggagaacaatgcagttccagcaaaaggcgatttcatcagattctcgtcagtatgttgcattaaactgtggtgttggcggccaaattatcgaaaaccttgaaaaaggtgcatcaaccggtttttataacaggattatttcagcggtgacgcaggttaagggcatagctgatgcagctggcaaaacctgcggcgtggttgggttattgtatctggggaatgagtacaattacgacagtacgaaaggtggaaccaccgatagagtgacctacagaaacaaactgcgtgggttaattgatgatttcatcagcgatacaattgcaatcaccggacaggagtccgtgccgctaactttactgtatcagactggaggcagttatactcgcgatgtaactaaaatgtccattggagaagcccaacttgaaatatgtgctgctgaccggaatgttatgatggcctcaccaaattatatggttacaggaaaaggcggccatcctgacgcaaatggatatcgctggttggcctctcagtttggaaaggttttgcacagagttcaggatcggtctcagcaatggaaaccattgcagcccaggaacattacaataaaagggagcctaatcagaatagattttttagtatggtcgccgccacttaagtttatgtcttcttacgcgattggcacggtagcccaggattactctgccagaggatttagggtcacagatgatcttggtgatgttccgatatcatctgtacaaattgtcgcggcgacagtggttgatttagaattatccagggagacatcaggtagtgtatttgtctggtacggcagcgaaacggcatctggaggttgcggaaatttgtttgatagcgatggaacaatatctatatcaaattatgaataccgccctgaccttggagagcgatcctctgcgaatatcaccgcccttgtaaataaaccatatccactaaacaatccatgcgtggctttttatcggcaggctactccactttaa

SEQ ID NO: 237995 - DNA, 738 bp, Klebsiella pneumoniae
atgggaactcgaatcattactaatgactttgtaggagatagtgggttaggttttgatccactagtcaggagagggttgcaatacttaaacttttttggcggtaccgctgataaaacaggtcgaaatctggccccgggaggcgcagccgcaacggttcttggctctcctgtgttgcaaacaaacggcgttcagtttacaccagcagggacactacttgacagcggaatactgcagcctctcgattttacatttttcactatatttaattgcccaactctctcgcagattctcttgttgagcaactttaatggtgctcggcagtctggctcaggaaccacgcaaggggtgactttaagaacccaggctggctctactaatatgacgcttaactttgctgttaatactattaacggcagtacacctacccagcagtcggtcgcattaagcgggttactcgctaatacgaattatctggtatgcgcaagatttaaatccggccaaaaaatggattttaaaatcataaataaagctctttcagcggagaaaacctcaggaatgagcgaccctgccgatttgggggccaagttacgtataggtggtagttaccaaattgacctgacaaacgcagggattcacagaatgtcagcactacacaacgttgcgctaactgatgatgaaattacgaaagccggtgcgcaatgggctgcgtgggctaatgctgtaggtgttccgctctag

SEQ ID NO: 237996 - DNA, 330 bp, Klebsiella pneumoniae
atgaatggtatttcagagctgagcgacgattctttaaggaaaaaatataaagagtcagcacttatatatgccgattgccagagaaaaaagaataggattacgggaattctgtttctatatggcgtaatagctaccttattgacagccatttacattgcagaaattcttattaatcaaagagattatcttgttttgacgctgctcatttctggggttgtgtgcgtcttgttggctatgaaacgcgaaaaattagaagcggcagaaagagagtaccggttaaacaacttatcggaattgtctcttgaaatgagcaaaaggggattaatgtga

SEQ ID NO: 237997 - DNA, 1155 bp, Klebsiella pneumoniae
atgagcgagttgagttatctggaaaaattgctggatggagttgaggttaagtggttgccattgggtcatattgcagctataaaaactggacaatctgtaaataaaaatatgatttcaaaaaatcctggtgtctatcctgttattaatagtggacgggaaccattaggttttattaatacatggaatactgacaatgacccaattggtattactaccaggggagctggtgtcggctctgtaatttggcaggaggggaaatattttagggggaacttaaactattcaataactatagataaaaaaagtcacataaatataagatatatgtatcatgccttgcttcacatgaagaatgatatccatgagttatgtacatttgatggtattcctgctctaaatgccggtagtttaaaaaaactactcatcccaatcccctgcccggacaatccggaaaaatcccttgccatccagtctgaaatcgttcggattctggataaatttactgcacttaccgctgagcttaccgctgagcttaccgctgagcttaccgcgcgtaaaaaacagtacaactactatcgcgaccagttgctgagttttaaagagggtgaggttgagtggaagacattgggagaggtggcaacctttcggcgaggtacggcaattgctcagaagcaaacaacacctggtgacatacccgtagttgccaatggaccaacgccaacatactttcacagcgagagcaatagacaagatgaaactattgtcatcgctagatcaggtgcctatgcagggtatgtgagtttttggaatcagccaatatttttaactgatgccttcagtgttcaccccaacctaaaaattgtaaagccaaagtttctttactatgttctacagaacaaacaagagcatattcacgcgatgaaaaaaggtgccggtgttcctcatgttcgagtaaaagaatttgagtcatatgatgtacctattcctcctcttgccgaacaagtccgcatcgtaactattctcgataaattcgacacactgacaaactccatcactgaaggccttcctcgcgaaatcgagctgcgccagaaacagtacgaatattatcgggacatgttatttagcttcccgaagccggatgtggtagaggcgtga

SEQ ID NO: 237998 - DNA, 423 bp, Klebsiella pneumoniae
atggccgtttatcaccatgcgctggtactgattaacagcagtcaggacggcgtcccgctgctccagcatgccgccagaatggcagaagagaacggcatgcgcatcaccatcgcccacatcagcaccgattaccgggcgctgaactatgtttccgacagcctgcgcgacgatcgggtctcgcaggaggtgatccaggccaaagccctgctcaacgagctggcctgcaccgtctccctgccggtggataccctctcgctggtgaccacccgccggtttgaagacgtggaaacctgcgttcggcagcggcagatcgatttaattattgccgggcaccataaccggttgctgggcgtcctctcctcacactcgctggagtacatcaaccacttaaacctggacgtgctgatcaagcacctgccctag

SEQ ID NO: 237999 - DNA, 915 bp, Klebsiella pneumoniae
atgatgaacgaaccctggcagcggctgcccgcgctctctcttaaacagcttcagtatttcgtcaccctggcccagctgcgccattttaccgataccgccagtcggctggcgattagccagccggcgctgagcagcgccctgcggcagattgaaacggtactcggcggtaagctggtcaaccgtaccgctgcgacggtcactctgactgaactgggggcggcgattttaccccacgcccagcggatcctcagcgtggcgcaggcggccttttccgatatgcagcagattgtcgaggcgggcggcgacgggacggtgcgtatcggtctggtgccgtcggtcagttcgctgctgtttccgctgctgccgcagaccctggctgaggcctttccgcgtctgcgcattgaatttcacgatcagaccaacgatgcgcttatccaggcgctgcagcgcggcgagattgatttcggcatcggggcgatcgacagctcactgcccgcagaactgctggtctatccgctgcgcgaagatccctttgtggcggtgctgcaccgcgacgatccgctggccgcgcaggcgcacttgccgtggaagcagctggtggggcgggatattgccgtcttctcgaagggcaatattcaacggctggtggcggcattagtggagagccatcgcctgacgctgaccacccgctaccaggtggactatatcgaaaccctgtatggtctggtgcgctcgcgcttagcggtggcgattctgccggcgctgtacaccacccatctgcaggacccggcgctcagggtcgcccacctgcagcagccggcgcttgcccgcacagtggccctgatgcgcggcccgcaggcgctgcccccgcttattgaagactgtttttctctgctgcaggccgccttgcgctag

SEQ ID NO: 238000 - DNA, 1344 bp, Klebsiella pneumoniae
atggccgataacacacttcactcttccgcccgcgctaactggctggagcgccgctttgcgctgcgctcgcgcggcggcacgctacgcaccgaatgcctggccgggatcaccggctttctcgccgccgcctatttactggtggtcatcccggggctgctggcgatcggcgggatggacaaaggcgccgccaccaccggcaccattctggtcttcgtcgtcggctcgctgctgatggcgttttatgccaacctgccgtttatcgtcggcccgggcattggcggctcggtgctggtgggggtgacgctggccggtagcgaagggattggctggcagactggcctcggaattgcctgctggtcggggatcctcttcttcctgctgacccgctttggcctgcgcgaagtggtcacccgctcggtgccgcagtcgatcaagctgggattgacggcctccatcggcctgtttgtcgccgtcctcggttttcgcaatgccgggctggtgctggccaatgcgaaaaccaacgccctgatgctcggcgactttctcgcccccggcgcgctggtggcgctgtgcggcctgttcctggcgatagccctgcaggcgcgtaaggtaccgggcgccattttgtgggccattctgtgcgccaccctggtgggcatccccttcggcgtcacccatctgccgacaagttttatcgacgttccccattcgctgaccccggtgctgggacaggttgacctgctgggggcgttaaacatcgccttcctgccgttcctgttcgtctttttcgcatctgagtttttctccaccatggggacaacgctggcggtgggcggcgaggcgggtctgctggatgaagaaggcaacatgccgcagattaatcgcccgttcatggtcgattcgattgccgccgcgctcggcccgtgggtgggcattccggcggcgacggcgctgattgagtcttcggcggcggcagaagccggcggcaaaaccggcctcaccgccctgtcggcggcggtaatgttcctgctgatgttgctgttcacgccggtggcgttgatgatcccgaaagaagccaccgccccggcgctgatcctgattggcctcaacatgttcagcggcctgcgcaaagtggatcttggcaacttcaccgacgggctgccggtgctgatgatggtgatgattacgcttatcgccaacagcttcggcaccgggattgccggcgggctgctgttttacattgtgatcaaggctatcgccggtaagtggcgggagatcccgattggcctgtgggtattggccgtcccgctggtgtattacttcgcgaccttagtcaggcattaa

SEQ ID NO: 238001 - DNA, 372 bp, Klebsiella pneumoniae; identical to SEQ ID NO: 95427

SEQ ID NO: 238002 - DNA, 756 bp, Klebsiella pneumoniae
ttgcttaacgtgagttttcgttccactgagcgtcagaccccgataagcaccgtcagcgcccccgtttgcccgccagcgttgaggataagcaccttcagcgcccccgtttgcccgccagcgttgaggataagcaccgtcagcggtcacgtttacccgccagcgttgaggataagcaccgtcagcggtcacgtttccccgccagcgttgaggataagcaccgtcagcggtcacgtttacccgccagcgttgaggatgagcgccgtcagtggatccgtttacccgccagcgttgaggataagcactggcagcggccctgtttacccgccagcgttgaggatgagcaccggcagcggccctttttgcccgccagcgttgaagatgagcaccggtagcggatccgtttacccgccagcgttgaggataagcactggcagcggccctgtttacccgccagcgttgaggatgagcaccggcagcggccctttttgcccgccagcgttgaagatgagcaccggtagcggatccgtttacccgccagcgttgaggataagcactggcagcggccctgtttacccgccagcgttgaggatgagcaccggcagcggccctttttgcccgccagcgttgaggatgagcaccggtagcggatccgtttacccgccagctttgacactaccagcgactacagtcgacattaaaatcgccgtgacctgctgcagcgtgatatacgcccggctggcatcaaaagaatcttaa

SEQ ID NO: 238003 - DNA, 273 bp, Klebsiella pneumoniae; identical to SEQ ID NO: 95368

SEQ ID NO: 238004 - DNA, 489 bp, Klebsiella pneumoniae; identical to SEQ ID NO: 100630

SEQ ID NO: 238005 - DNA, 249 bp, Klebsiella pneumoniae; identical to SEQ ID NO: 36223

SEQ ID NO: 238006 - DNA, 660 bp, Klebsiella pneumoniae; identical to SEQ ID NO: 35583

SEQ ID NO: 238007 - DNA, 1191 bp, Klebsiella pneumoniae; identical to SEQ ID NO: 198466

SEQ ID NO: 238008 - DNA, 129 bp, Klebsiella pneumoniae; identical to SEQ ID NO: 33085

SEQ ID NO: 238009 - DNA, 279 bp, Klebsiella pneumoniae; identical to SEQ ID NO: 33086

SEQ ID NO: 238010 - DNA, 192 bp, Klebsiella pneumoniae
atgaaccgtctcttgctgatgtggattctgtgtctgctgcagaaacgaatttctctgaagccagtgggcctgacaatgatttttttctgtccgggaatgacttcatgcgagcagaagaagaatctcaaagagtggttgaatcattcagagatagccttagcaggaagaaaggattctgattttgaattctaa

SEQ ID NO: 238011 - DNA, 426 bp, Klebsiella pneumoniae
atgggaagctacgtagaccaatcattaacgagaaatgaatccgtaatatctcgcgctcaaacctcctggattccaacaatcatcccagtaattatcggaatcttgttgctgcctttttacggcttagggttacttataataatccctgtgctccttagagtttggtcaacggagcttgcattaactaaccaaagagtcatcgcaaaagtgggttttatccgacgcaatacggtggaactccgtattgataaagttgaaagccttggcatacatcaagggatactgggacgaatctttaactatgggtctatcgtgattaaaggcactggcggaaccaacactccaattccaaacatcaaggcgccaatgcaattcagatcgattgtgaacaatcatatcgaggaaatgaattctaagcagcagtag

SEQ ID NO: 238012 - DNA, 657 bp, Klebsiella pneumoniae; identical to SEQ ID NO: 9983

SEQ ID NO: 238013 - DNA, 510 bp, Klebsiella pneumoniae; identical to SEQ ID NO: 9982

SEQ ID NO: 238014 - DNA, 1032 bp, Klebsiella pneumoniae; identical to SEQ ID NO: 28023

SEQ ID NO: 238015 - DNA, 231 bp, Klebsiella pneumoniae; identical to SEQ ID NO: 20732

SEQ ID NO: 238016 - DNA, 501 bp, Klebsiella pneumoniae
atgaatacaccatcctttggcaaattctcgccgcgctggctagcgggaaaaaggggccttatcgtcacgctgctcgcggggctggcgatcctggcgctcggtcggggcatgactttgccggccagagaggtttaccgtgagaggcagatccgccagctggaggaggatgcgcagtgggtggcggaacgccttgagcggcggatgaacattccggcgccgcagcgggaagcgacctggccgctggcggcgatgcgcgccgctctccagaccctcgcccgggagcggcattatcagctgctgctggtgaatggcgacgggcatctgctggcggcatcgcacgcgctgccggccagcgtgctggcccaggtgcaggcgcagttcccgcgagagatgcagcccccgctgttcggcagccactaccagaccattcagccattcgccccgcatcagcggatgttaagccctgatgaatcccctaatgatttttatcaaaatcattaa

SEQ ID NO: 238017 - DNA, 1197 bp, Klebsiella pneumoniae
atgacaccagcgctgcgacagaacctgacgctggcagtcctggtactgactgggatcaatatgcggccgctgcttacctccattggtcctttgctgccggacatccgcgcagccagcggcatgagctataccctggccgcactcctgaccgcgctgccggtgatcgcgatgggggtgctggcgctggccgctggctgggtcgatcgctatatcggtcaaaagcgcagtattgcgctgagcctgctgattatcgcggcaggcgccctgctgcgggaaatcgccccgaatagtggcttactgctcaccagcgctctggccggaggaattggcatcggcattattcaggccgccattccggcggtaattaagcacctctttccccgacggacgccgctggtgatgggactatggtcagcggcgctgatgggcggcggcgggttaggcgccgcgttcaccccatggctggcgtcacatagcgcggcctggcatgatgcgctagcctggtgggcgctccctgcgctcctggctctgttcagctggctggcgatttgtcggcaattgcctcgcgcaccgcatcaggccagcgcttccccccgggtcgcgattattggccagcgccgcgcctggacgctgggactctatttcggactgatcaatgccggttacgccagcctgatcgcctggctgcctccttactacatccagctaggcgacagcgcccagtacagcggttcgctgctggcgctgctgaccgtcgggcaaaccgccggcgcgctgctgctcccggcgctggctcgccaggaggatcggcgccagcttcttctgctagcgctggcgctacagctgattggcttctgcggctttatctggctgccagagcatttctctgcgctctgggccattgcctgcggcgtggggttgggcggcgcgtttcctctgtgcctggtgctggcgctggatcacgccggacaaccggcggtggccggcaggctggtagcctttatgcaggggatcggatttatcatcgccggtctgtcgccctggctttccggcctgctgcgtagcctgagcgggaactacacgcttgactggtcctggcatgcgatctgcgtcctgctactcatggcgctgacgctgcgctttatcccggcacactacccggccgagtggcgacagcgcgcctcagacctgccctga

SEQ ID NO: 238018 - DNA, 966 bp, Klebsiella pneumoniae
atgtttaaatcggtatattctagtatcaaagaactgatcaaattccttgataggcatttaatatggactctccttgctacaggatttgcaagctatctacttggcattttttttgaaaatttcgaacttacaaaatttttatcggaaccattaaaaagcttttctaaaataatcattggcgccggtgtttttacggcccttacaaaatcaagttactatgccacattctttcaaaatagagttttcaatgtcttttatcagcctggaaaacatttttcccaggatgagctgaataataaatggttaacgttaacgcaatatttaatcgagaaaaatgcaggtaaatcaagtagaaaggtttcagagatactttctgctcgctacctccgtgcggacatggattatcattttaaaaacatgacaatcacctatgatattgagttggacactgatagtaatgacctagtaataaaacaaaacatggaagcttacattataataaacaatgatcttactgaggcggagttgcaacataaaactgtaaccgatggttcaatggaattattgcatttaatgatcgatgatgaacttattcaagaagaaaataagtatatcgcccagcaagaagattcaaatataaagatacttaaaacaacaattttcaatagaaacgttccaataaagattaattggtgctacaaaacaatacagaacatcgctgatgagccatttatcttgaataactattctagatatgttaatggcctggttgtgaaattcaaaaccactaattgtgccccaactttccgtttgacaggtgtcattacagcccccgaaaacaagctctctctctcgctggatggaaatggttacacacatgttgtcatcgccaagcaaggggatttgaccctacccggtcaaggatttatattagtcttgtctaaagacgacatgagaggagagtaa

SEQ ID NO: 238019 - DNA, 3057 bp, Klebsiella pneumoniae
atgatcccacaaatttctcaggcgccaggggtagttcaactggtgctgaattttttgcaggtactggagcaacagggttttaccggcgataccgccaccagctatgccgacaggctaacgatggccaccgacaacagcgtctatcagctgctgccggatgcggtcatttttccacgatccacggcggacgtggcgctgctggcgcgcgttgccgccgaaccgcgttttaaatcgctgattttcaccccgcgtggcggcggcaccggcactaacggccaggcgctgaacggcgggattatcgttgatatgtcccgctatatgaatcgcatcatcgagattaaccccgaagagggctgggtgcgcgttgaagccggggtcatcaaagatcagctgaaccaggttcttaaaccctatggttacttttttgcgcctgagctatccaccagcaaccgcgctaccctgggggggatgattaacaccgacgcgtccggccagggatcgctggtgtacggcaaaacgtcggatcacgtgctcggcctgcgggcggtgctgatgggcggggatatcctcgatacccaggcggtgccggtggcgctggcggagacgctgggcaatatcccctcgacggttggccggatctacaacacggtctaccagcgctgcaaggcgcagcgtgacctgatcattgataagtttcccaaactcaaccgcttcctcaccggatacgatctgcgtcacgtctttaacgatgagatgagcgagttcgacctgacccgtattttaaccggttcggaagggacgctggcgtttattaccgaagcgcggctggatatcacccgcctgccgaaggtgcgccgtctggtcaacgtcaaatatgactccttcgactctgcgctgcgcaatgcgccctttatggtcgaagcgaaagccctgtcggtggagaccgtcgattctaaagttctcaatctggcgcgcgaggatatcgtctggcactcggtaagcgaactgatcaccgacgtaccggataaagagatgctcgggctcaatatcgtcgaattcgccggcgatgacgcggcgctgattgaccagcaggttactaccctgtgccagcggctggacgagctgatggccgccagcgaggcgggcgtcattggctggcaggtctgtcacgatcttgaaggcgtggagcgcatctatgccatgcgcaagaaggccgtcggcctgttgggtaatgccaaaggcgccgccaagcctattcctttcgccgaggacacctgcgtaccgcccgaacatctggcggattacatcgtcgagttccgcgcgctgctcgacagccacggcctaagctacggcatgtttggccacgttgatgccggggtgctgcacgtgcgcccggcgctggacatgtgcgatccgcagcaggaggtgctgatgaagcagatctccgacgatgtggtggcgctgacggcgaagtatggcggcctgctgtggggcgaacatggcaaagggttccgcgcggagtacagcccggccttctttggcgagacgctgtatgccgagctgcgcaagatcaaagcggtcttcgatcccgataaccgcctgaatccggggaaaatctgtcctccggaaggtatcgacgcgccgatgatgaaagtcgatgcggcgaagcgcggcacctgggatcggcagatccccatcgcggtgcgcagcagctggcgtggggcgatggagtgtaatggcaacgggctgtgcttcaactttgacgtcaagagtccgatgtgtccgtcgatgaaagtcagcaaccagcgcatccactcgccgaaagggcgggcgacgctggtgcgggaatggctgcgcctgctggccgaccgcggcgtcgatcccaaccagctggagaaggcgctgccggagcagggcgtcagcctgcgctcgctggtggcgcgcacgcgcaacagctggcatgcgcgcaaaggcgaatatgacttctcgcatgaggtcaaagaggcgatgtccggctgtctggcctgtaaagcctgttcgacccagtgcccgatcaaaatcgatgttcccgagttccgctcgcgcttcctgcagctgtaccacagccgctatctgcggccggtgcgcgatcatctggtggcctcggtcgaatcttatgcgccgctgatggcgcaggcgccgaagacctttaacttttttattaaccagccgtggctgaaaaagctgtcggagaagcatatcgggatggtcgatctgccgctgctctcggcgccgtcgctgaagcagcagatggccggccaccgttccgccaatatgacccttgagcagctcgaagcgctgagcgccgagcagaaagcgaagatggtgctggtggtgcaggatcccttcaccagctactacgacgcccaggtggtggccgactttatccgtctggtcgaggccttaggctatcagccggtgcttctgccgttctcgccgaacggcaaggcgcagcatatcaaaggcttcctcacccgcttcgcgcgcaccgcgcagaagacggcggacttcctcaaccgcgtggcgcagctgggcatgccgctggtgggcgtcgatccggcgctggtgctctgctaccgcgatgagtacaagcagacgctcggcgacaagcgcggcgatttccaggtgctgttagtccatgagtggttgccgaaggccctaaccagcgacgcccgtcccgatctgggcggtgagccctggtacctgttcggtcactgtaccgaagtgaccgcgctaccggcggcgacaaagcagtgggcagatatttttgcccacttcggcgcgaagctggaaaacgtcagcgttgggtgttgcgggatggctggcacctatggtcatgaagtgaaaaaccacgccaactcgttggccatttacgcgctctcctggcagcaggcgatgcagcggctgccgcgaaaccgctgtctggtgacgggctactcctgccgcagtcaggtgaagcgtattgaaggcagcggcgttcgccacccgctgcaggcgttactggagataatcggatga

SEQ ID NO: 238020 - DNA, 1242 bp, Klebsiella pneumoniae
atgtcagcattaccttcccccgaatacagccgcaatatgcggctgattggccatagcgatcagggcggtcgtccggacggcgtgcagctgatggtgcaccgcggattcgcctatatcggccatatggtgtcgcagggtttttccgtggtcgatgttcgcgatccgacccggcccaccaccgtcaactatattgccgcgccgccgggcacctggaacgtgcacctccaggcgcatgacgatctgctgctggtgatcaacgcccgggatctgtttgccgacgcccgttttgctgatgagaaggtgtactacacccgctcggtgggtgacacggtcagcgatgtgcaggacaggggctggagcgccgggctgcgcatctttgatatttccactcccgcgcagccgcgggaaatcagtttcctgtcgcttaacggcatcggtattcaccgcatctggtacgtcggcgggcgctgggcgtatgtgtccgcgctgatcgacggttttaccgactacatcttcctgaccatcgatctggccgatccgcgtaaacccaaagtggccgggcgctggtggctgccggggatgcaccaggcgggcggtgaaacaccggactggccgcagggcaaacgctatgcgctgcatcacgccattattgccggggataccgcctacggcagctggcgcgacggcggcctgacgctgctggatgtcaaagaccgtacccagccgaggctgattagtcatcgcaactggagcccgccgttcggcggcggaacgcataccgcgctgccgctgccggatcgtgacctgctggtggtgctggatgaagcggtgctcgacaaccaggaggacggcgagaagctgatctggctgtttgatatccgcgagccaaccaacccggtgagcatcgccaccttcccgccgccggacgaagcggattatgtggcgaaaggggcgcatttcggcccgcacaacctgcatgagaaccggccggggagctttgtcagctcaacgctgatttttgccacgtatcagaatgccggcgtgcgggcttacgacatttccaacccgtatcgtccgctggagaccggggcgctggtgccggctgcgcctgagagaatgatggatatccgtcccggccgcccgcgggtgatccagtcctgtgacgtgtttgtcgatgcgcaaggcattatctacagcaccgattacaacggcgggctgtcggtgattgagtatctggggtga

SEQ ID NO: 238021 - DNA, 1050 bp, Klebsiella pneumoniae
atggcccgtgccggagtcacttatcacgatatcgctaaagccgctgaagccattaaaacgcaaggccaggaacccacggtggatcgggtgcgcgaacacctgggcaccggcagcaaaagcaccatcgcgccattgctcaagcgttggcggtcagacaatggggaggcggccgatgtcagtgggctgccgaacgacctcgtcgaggtggtaaagtccctgcatgagcgggtacagcagatggccgaccaccgtatcgaacaagctcgccaggaattcgagactttaaaggaagaactccgcaaagagttgacccatgccgacaacaccatggcgcaactaactgcccgacaacgggacctggagaaccagaccgaacggctgagcaaagaaaaaagcgagcaaagtcggtccctggaagacgcgcgtgtcagcctggccaaggccgagtcccagcgggacgaagctgctgcacggattgttgaattgaaggagagcgttgcggaactcaaacaagaaaataaggatatccgcgatcatttcgaacattaccagcagcgtactgccgaagaccgccagcaggagcgcgaacaattccgttcagttaaccaggggctgaacgatcagatccaggatctgcaacaccggctcgcccaggctgagtcgagagcgtcagagctgtttgacgccaatgtgcagttacaacgacatgccgatgaattaaaacgggccaatggggcgctaaatagcgacgtgaagggaaagatagaagatgtccagaacctgaaacacgagcttgaagaagccgtggcaaagtgccgggaataccagcatcaaaatgatcatttggcgcaaaacatggccgtgctcaccactcagaaagctgatgttgataagcaagtggccgtcttatcccaaacactggagaccacaaaaaccgaattgaaaaccacccaggataaagcggcgcttctgatcgacgagaataaagtcattcttcaggaaaaagccgtgatccaaggtcaatttaaacagctccaaagttcgctgtag

SEQ ID NO: 238022 - DNA, 333 bp, Klebsiella pneumoniae
atgaatctgctgtcaattttcacaatatttgtaattactgcggttgccgaaattgtaggttgttatctgccgtggctggtactgaaacagaacaagtcggtatggttgttaattcctgctgcgctttcgctggcgttatttgcgtggctgttgacgcttcacccaacggcggcaggtcgcacttatgctgcctatgcgggcatatatctgggcgttgctctcctctggttgcgtattgttgacggagtggcgctcacccgttgggacatcgcgggggctttggtcgcattggtaggggttaccatcatcgttatacagccaacggccggttag

SEQ ID NO: 238023 - DNA, 1203 bp, Klebsiella pneumoniae; identical to SEQ ID NO: 52387

SEQ ID NO: 238024 - DNA, 222 bp, Klebsiella pneumoniae; identical to SEQ ID NO: 13641

SEQ ID NO: 238025 - DNA, 828 bp, Klebsiella pneumoniae; identical to SEQ ID NO: 13642

SEQ ID NO: 238026 - DNA, 882 bp, Klebsiella pneumoniae; identical to SEQ ID NO: 13643

SEQ ID NO: 238027 - DNA, 189 bp, Klebsiella pneumoniae; identical to SEQ ID NO: 13644

SEQ ID NO: 238028 - DNA, 780 bp, Klebsiella pneumoniae; identical to SEQ ID NO: 52392

SEQ ID NO: 238029 - DNA, 237 bp, Klebsiella pneumoniae; identical to SEQ ID NO: 13646

SEQ ID NO: 238030 - DNA, 1398 bp, Klebsiella pneumoniae
atgatggtcgccacaatggtgctggctgaacctgcaatggcgcaggagctaagtagcagcggtgttatgaatgatgtgctcaagcgttttcatgatgctgccgcaacatgggggccagctattgagtccgctgcatcgcgtttgttctggacgctggttgtgatttcgatggtctggacattcggcatgatggctttgcgcaaggccgacattggcgagttcttcgcggagttcgttcgcttcacgatcttcaccggctttttctggtggttgctgacgaatgcgaaccagggcatgaatatcgccggtacgattgttcagtcattgcaaactctgggcgcgcaggcggggggactttccaatagcaatcttgggccctccagcatccttgatcttggtttcgagttatacaaccgcacagtacaggccacctcggagctgggatggcggcagatggcaactgctctggtcatggagctaatggccctggctgttttgtttgtcctggcgttgattgcggtcaacctgttgctgttgctcgcatcagcctggattctgttgtatgccggtgtgttcttccttggctttggtggaagtcgttggacttccgacatggcgatcaattactacaagaccgtgctgggcctggccgcacagcttatggcaatggtgcttctggttgcgattggcaaagagttcatcaatcactactacacgcaaatcagcgagaacatggcatcccaggaactggccgtgatgttggttatatcggtcatcttgcttttcttggtcaacaaagttccgccgatgatttctggtcttgtgtctggtggtggtattggcgcagccggtggaattggaaacttcggtgcgggtgcggcagttggggcggcggtgacggcggccagtatggcaactggcggcgctgccctggcaggtaaagcggttatgggtgccgcagccggtgcagccggaggtgcaagtgcactccaagcggcttttcagaaagcatcagcgagtatggaaaccggcggtgacatgtccagcatggggtcagttgtcagcagtggcggaaacggtggtggtgaagcgggtactgctggcagtagcccattcgcccaagcggctggctttggtgacagcggcagtagctcaagcggtggcggctttgccaaggccgcgaagctggccacaggcacggcctccgagttagccaagggtgtcggctctcaagtgaagcagggattccaggagcgagtgagcgaaaccacaggcggaaaactggctgcttcgatacgcgaaagcatggagccgaaagaagcaagccaatctggccagttcgagggcaatagcttgggcgccgattctggcccagatagtaacgaagtcaggagttag

SEQ ID NO: 238031 - DNA, 249 bp, Klebsiella pneumoniae; identical to SEQ ID NO: 13648

SEQ ID NO: 238032 - DNA, 204 bp, Klebsiella pneumoniae
atgacagacccaaagaacctagagaacaggctgcatgagaaggccgacacggcccgcgccgtttccactggtcgggtgcgctacacactggccgaactactggccgacgcggaagcatccggggcttacccgctgccgccggaggaacgcgaatggatggatgcgccgtctgtgggtcgggaatggccaaacagtgaagattga

SEQ ID NO: 238033 - DNA, 1068 bp, Klebsiella pneumoniae; identical to SEQ ID NO: 13699

SEQ ID NO: 238034 - DNA, 507 bp, Klebsiella pneumoniae; identical to SEQ ID NO: 13700

SEQ ID NO: 238035 - DNA, 768 bp, Klebsiella pneumoniae; identical to SEQ ID NO: 13701

SEQ ID NO: 238036 - DNA, 333 bp, Klebsiella pneumoniae; identical to SEQ ID NO: 13702

SEQ ID NO: 238037 - DNA, 2988 bp, Klebsiella pneumoniae
atggccgctatctatcagacagcttatccacgaattaaatctgatatcaccgaagatgagttaggggatgtctatacacctacgccggaagatcagaagtttgcactgcgtcactgtaaacgaaccagcgcatcctttttggggctcctgattcagctaaaaatcacgcagcgattgggccggttcgtaaacctgggtgaaataccaaaggtgatcatcacgcacattaaaaatcagtgccgttcgcgggtgacactgaaggatctccaaacctattacacatcgggcgcgaaggatcgtcacgtaaagctgattcggcgccatcttaatataaaagcctacgatgcggccaagacctctgaattggcacagatttgggcacttgaggcagcgactaccaaagaagcattactggatatcatcaatgtcacgttggaatatttggtcaaagagcgatacgagttaccggcgttcagtgtacttgagcggatatgtcaggcggccagggccgaagtcaacactcggtattacgatcaattgtgtggctttttagagtctgaaagtcgccaatgcatcaacgatattcttcgatctagcacaggactgaatggttttggttggagcacgctgaaaaatgaacccaaacgcccgacccctcgcaatatccatgcgtacatccaatacctggaatggcttacatccctgcaaacacttttgcccacggatttggggttgccgccagttaaacaccagcagtttatcaacgaggccaaggccctggattacgccgaattgatgaaactaaagctgaacaagcgactcgcactcgtcatcgttttaatccggcaccaatacgcacaaacactggataacgccgccgatatttttatcaagatgttgttaaaaatggatcgctcggcgcagaagctgttggagaagtaccttgcagaccatcaaaagcaaaccgatcatttgatttctgtgttgtctgggacggtcaaggtgtatcttgataaacccgattcggtggcagcttttgatccgatactgggaaagaacagtgatcagctaatgcaaatgtgcgaacaatatatggcattcgcaggcaacaactatttgccgtttatggttcgactctataaaaagcaacgatccaccttgtttcgtacgattgaaatactcaacctggcatcggccacggaagacaaggacttgctcaatgcgttccagtttattttgacgcacaaaaagcgtcgcacggagttcctgtcaattcaaagcgatccgaacgatccctcttccagaaatgtcattaatattcgctggattcgcgaaagctggtggaaattagtcacgggaaaatcaaccaaatcagcacaggtgtcggaggttaataaaacctgttttgagctgtgtgtgtttgaacggatcgctgaagaactaagtaccggtgacttgttcattccctacagtgaaaccttcgatgattaccgggagcagatgatcacctgggaagaatacgaagcgcagttgcctacctattgcgaggaggtagggctcgtcgccggtgatactgaatttacaacaacgctgaagaagtccatggaaacgagctgccggaaagctgacagccaattcccggaggacgaactggttcgtattgaaaacgggaatctgattatcggtaaaccaaagcctgatcaacccttacctgaagtcgaagaaattggagcgcttttgcgcgatcggttggacaaaatcaacctgcttgatgtgattatcaatgtcgaaaagtggctgaacctgaataaacattttggcccgttgtcgggcttcgaatcacgtatcagcgacccggagttacgttttgtcctgaccgtgttttgttacggtaccaacattggtcccaccgaaaccgtgcgatctgtgcagggcgtttctcgcaagcaagtcgcctggcttaacttaaaacgcacgacggaagcgcgtctcgataaagctattgcgaagatcaatagcgagtataagaaataccggctcattgagtgttggggatcaggcagcagtgtgtccgctgatggaaagctttgggatctctacgaagataatttgctatctgaataccatattcggtatggcagctatggcggcattgcctattaccacgtctcggacacctatattgcattgttcagccggtttattccctgcggtgtctacgaggcgatttatatcttggacggcctactcaacgatgaatctgattttaatccggacaccgttcacggcgatacacaggcgcaatccacacccgtctttggcctggcgtacttgctgggcataaagctcatgccccgtatccgaaatatcaaagatctcagcttttataagcctgatcgctccatggtactcaagcatattcagtctttgttcaaggagccgatcaagtgggatctcattgaaaagcactatgcggatatgatgcgaacggccatgtcagttaaagcagggaaaatcaccgcttcgacaatcctgcgccggttcggcaccaagaaccggaaaaacaagctgtactttgcgttccgtgaactcgggcgcgtggtcagaaccatgtttttgctggaatacattaccgacgttgatctgcgcaaaacaatccaggcagcgacctgtaagagcgaagagttcaatgagtttgcccggtggttgttttttgctaatggcgggaaaattcctgcaaacttgagacacgaacaaagcaaaatcgttaaatacaatcatttgctggccaacttcgcgatcttatacaacgtaaacgcgatgaccgaagtgttcaatcaattgaagtcggaagggtacaatattacccgcgacattatggccgaattctcaccgtatcataccgagcatttggggcggctaggaagttttgggctggatctaaccaagcaggttaagcccatgacttttgaactgctggttgattaa

SEQ ID NO: 238038 - DNA, 567 bp, Klebsiella pneumoniae
atgaatgcgatagtgaagcgcgctacaaactctataaaacgcctctggtcacttgtagtgtatgcatttcaatcgccggttcaggattctcactcaaaacggcgtaccgcgatcctctttagtctggtgctggtcgtccacttggttgtcctgccagcgcatgaactgggttccgatattggcttgcgttcttttgcacatcttaatctgagaatcgcgctatttgcgtttttgttcgcaacgctggagagcgttctcatcaatttatgggttcaactgatacgcaagaagacccattgcagaacggcaccagcggcgggcggcatagttatcgggattgtaagccccctgttgtgttgtaccccgctgctgccgaccatcttaagttttatcgccattttgtttccttccgctgtttctggtatgggtctcaaaattcagtatgcggtcaatgtgtatcaaaccgaactgttgctgttggcgttggtattactgttgtttgcgattgttcaaaatgcttggcatctcaattcaggcgacgtaatggcaggccatcacaaggaataa

SEQ ID NO: 238039 - DNA, 396 bp, Klebsiella pneumoniae
atgtcagaaaaatgtgaaaccggcccccacgactgggtagccaataaaggccgatttattctcacctgggtattgccagcgatactcatagtgattaccggcatgatgcaacttgcaccgtggatgaccggcagtatctgggcgatcgctttaagttggatgggatatgcctgtttaagaaatgcgcgtcaatgtgggcgaatgcattgttttttcagcgggccattttttctgggttccgccatgttggcattaggcattgggatgcagtggatacaatggctcacctttaacggattaggactctttttactgatcggtacaccactggtttgcgtgttaccggagatgttctggggaacttacaaagttgcgacaaacggcaaagaagaatga

SEQ ID NO: 238040 - DNA, 435 bp, Klebsiella pneumoniae
atgtcaaaagccgccgtgtcaaaagatgtgtcacgatactttgaggtgatccccgactttgcggcattcatggatgccgatgggcaggcactcgaatttcccctgacgatctcgcaactggcgaaagccgcgcaaaccacagtgcataccgtcaggaattacgtcttggaaaatttggtactttgcccagagcattccgcgggtggtttcggtttatacaatcaatgcgctttaaaccggctgcgcttcattcgcgcagcgcgtgcggcgggcctgctgatcctggatataaaacccttgctctacgccatcaacgaaggcgaccagcaagcctgtgaagccgccatgcgcgaactgcaaaccaaaattgatgaacgccaggcttacttgcaggcattggattcacagctgtcggagctgcgccaactggcctga

SEQ ID NO: 238041 - DNA, 801 bp, Klebsiella pneumoniae
atgggaacggcacccgccacgcattcactgacagccccaacggtcaatgcgttggcggatggattgaacaagggtgaattcgttcctttttaccagcctctatgggatgttcaacaccaatgctgggaaggcgctgaaacgctcattcgctggcaacatccaactgaaggattgatccagtcagacacctttattcccgttgccgaacaaagcggattaattctggaactgggcgcgtttgtcttacgggcggcctgtcaacagatgatgcattggcgtcaacgcggtttacccgagggtatcatcgcggtcaacgtctctgccttacaaatccaccaacctgactttgtcgaagaccttgccaggatattgcgtgatacgggactgcctgctccggcattggaactggaattaaccgaaacactggccctggaggatacgccaatcctgatcgaaaacctgcatcgctgccaggcgctgggcattcgcctgtccatcgacgattttggtaccgggagttcgtcgctggcacgcttgcaatgctgcccagtgacccgcctaaaaatcgacaaaacctttgtcacgcatatgacaaccgagccaaaggatcgcgccattaccgaaagcgtcatcacccttggccataacctgaatttatccatcgtcgcggaaggggttgagacggccactcaacaacaacttttagagaagcttggctgtgatgtattacagggctatcggctggcgcggccagccgatgccgaaacgactgaagcgttgtggccaggccgcagtgtttga

SEQ ID NO: 238042 - DNA, 1668 bp, Klebsiella pneumoniae
atgatcttactatcgatagaagggatgacctgtccaagttgcgtcgctcacgttaaagaagcgctcgatgcgatcgaaggcgtgaataaggttgaaatatcttatgaaaacgccagcgcaacgatcaccacaaacggtggggtcagcgtaaccgatctcattggagcgattgaagccctgggttataccgcaaaagaaaaccccttagcggaaaacacagcaccgaacgcctactgtgacaacgaaaataccagcaacacagaaagcaaccgaactcaacatgtggcgattatcggtacgggttccggcgcttttgcctgtgctatcaaagtcgctgaaggtggtgccaaggtcactcttattgagggagccgatgtgattggcggctgttgcgtgaatgtcggctgcgtaccctcaaaaattttgatccgcgccgctcaattggcacagcagcaacgcaataatccctttgccggactggaaaatcatgcgccccaattgagtcgagccttgttggctcagcagcagaccgctcgagtcgaagagctgcgcgctgcaaagtatcagaatattctagagacaaatcctgcgcttagtttacttaaaggttgggcgcaatttaaaaatgcaaacaccctgatagtcagaaaaaatgatggcactgagcaggaaatctttgctgataaaatcctgatcgccactggctccacgccaaccattcctcccatcgaggggctggccgaaacgccttactggacctctaccgaagcgctgtttgccgaggaattgccgcagcacctggtggtgattggttcatcggtcgtggcgctagaaattgcccaggcttaccgacgattgggcagtgaagtcaccgtgttggcaagacactcactactttacagtgaagaccccataatcggtgaaaaactggcaggctgttttgaaaaagaaggcattcgagttttaaacaacacgcaagccacccaagtgacccacgatggaaatcaattcaccctgaacactaatgcaggcgagctcagttgtgatcgtttgctggtaagcaccgggcgacacgccaataccagccaactcaatctggacgcggtgggtgtcaccaccaacaaaaagggcgaaatcgttgttaacgaacgcatggaaaccaatgttgctggtatttacgctgccggtgactgctctaacatgccgcaatttgtctatgtcgccgcggccgccggtagccgtgctggtatcaatatgacgggcggcgacgccaaactggatctgtccaccatgcccgccgtgatctttaccgatccacaggtggctaccgtcggactgaccgaggagcaagccagggctcaggatattgagaccgacagccgcgtactgggtatggaaaatgtcccacgtgcgttagccaactttaaaaccgacggttttatcaaactggtcacagagaaggaaacggggttgttgctaggcgcgcagatcctggctcacgaaggcggcgaactgatccagagtgcggctttagccatccgcaaccgtatgacggtgacggaattagccgaccagcttttcccttacctcaccatggtggaaggtttgaagctctgcgcgcaaacctttaacaaggatgtcaaagaactgtcctgttgtgcaggataa

SEQ ID NO: 238043 - DNA, 420 bp, Klebsiella pneumoniae
atggaaatgctaatacagttactgacccgtttcggcgataagattagctcattgggcgcgctggtttctgctatgggatgcgccatgtgtttcccggccatcgccagcctgggcgctgcggtcgggttgggttttctcagccaatgggaaggtttgtttgttaataccctgttaccgttgtttgcctggattgccctggtactcaacggacttggctggttcagccaccggcaatggcaccgtagtgcgctgggtgtggtcggccccattttattgctgttatcgctctatccgtttttccaatacggctggagcagctatgtcacctattcagcgttaggcctgatggttgccgtatcgctttgggatattttttcacccgcgaataaacgctgtgatgatgacagctgtgctgtttaa

SEQ ID NO: 238044 - DNA, 276 bp, Klebsiella pneumoniae
atgaagaaaattgccttgttgtctttgctagccttgaccagcctgaccgcttttgctgcgccgaaaacagttactttggaagttccaaccatgaactgtgtgacctgcccctttacggtcaaaaatgccttaaaaaatgttgagggtgtgagtaaagctgaagtcacctttgaaaccaaattggcagttgtcacattcgacgacgaaaaaaccacagtaaaagcactgaccgaagccaccactaatgcgggttatccatcaacgctcaaggagtaa

SEQ ID NO: 238045 - DNA, 348 bp, Klebsiella pneumoniae
gtgtcacagaaagaatccaatctacctattattggcggcgttatcgcggctgttggcgctggcctgtgctgcgctggtcctttcgtgttgttgctgctaggcgtgagtggctcctggattggtaatttaaccttgttagaaccttatcgtcccatttttatcctgctggttttagccttatttggcttcgcaggctggaaggtctatcgccccgttgaggactgtgagccaggcaccgcctgtgcagttcctcaagtgcgaaaacgccggcaggtgatcttttggttaacggcactgactgcgttggtgctagtcaccagcaattattggattgtctggtttgcctga

SEQ ID NO: 238046 - DNA, 387 bp, Klebsiella pneumoniae
atgacaagaactatcagtaaagttgccaaagaactggctatcaatatagaaaccgttcgcttctatgagcgtcgtggattaatagagcaaccgccaaaacccgagttgggctaccgccattatcccgatgaaacggttaatcgcatccggttcattaagcgggcgcaagaattggggtttaccctggaagagatcgccaacctgctaagcttgaatgaccgcccatgtgctcaggtgcaggagctggccgagtataaactcagcgccgtcatggaaaaaattgccgatctgaagcggctcgaaagcgcactcaaggcattattgacgcaatgtcagagtaataacgatgactcacattgtcccattatcgactccctgcaaccttaa

SEQ ID NO: 238047 - DNA, 492 bp, Klebsiella pneumoniae
atgatgatctcatatcaggaacttgttcgcaccttccctagttccaagaccgatcaacaagcctccggcttagtgcgagcattacctttcggtgcaccagactgctgtcctgctacggccatgaaaaactggatagaactgggtggcattaatgaaggtccggtttttcgccccattaaccggtgggataagattcagcctaaagcgttgaatcccagtgccattaatgaattactcaagactttgggtaacgcctgccagttcgattttgtaccggaattgagcagccatagcttccggcgcggcctctctacatcggcagcccgagaacgagttgattttgagttgattaaaaagcaaggcggatggaagagcgatgccaccgtctgggagtacattgaagaaggacagcagctctccaataacgctacccatatattgatggagaaaatggcggttcttatagataccgttcgggtaaaagagatatga

SEQ ID NO: 238048 - DNA, 660 bp, Klebsiella pneumoniae
atgaccagtaaaggcgaacaggcaaaaaatcagcttatcacggccgctatcgcccagtttggcgagtacggccagcacgccaccacccgcgatatcgccgcccaggccgggcagaatatcgccgctatcacctattattttggctcgaaagacgatctgtatcttgcctgcgcccagtggatcgccgattttatcggcgacaattttcgcccgcaggccgaagcggcggagcacctgcttgccggggaagcgccggatcgccaggcgatccgcgacctcatccttagcgcctgccacaacatgatcctgctgctcacccaggacgatacggttaacttaagcaaattcatttcccgtgagcagctggcgccgaccgccgcctaccatctgatccaccagcaggtgattgcccccctgcaccattatctcacccggctgattgccgcctggaccggctgcgaagccagtgatacgcaaatgatcctccatacccacgccctgctgggcgaggtgctcgctttccgtctcgggcgtgaaactatcctgctgcgcaccggctggacgcagtttgacgcgcaaaaaacggaacagattttcgaagtcattacctgtcatatcgatttcatcctgcatgggttatcgcaaaggagtttgggctga

SEQ ID NO: 238049 - DNA, 1131 bp, Klebsiella pneumoniae
atgagaaataaaattgacttcattccatctggtgacgaattaaaaaatctagttggacaaatgaactgcacagccacaataattaataatatattgcgggagagaggggtattctgctcttcttcagaaaagactataacagtacccaatctaataacttcttttttgagccctgaagaatcctatgaattactccaaagcatcaaaacaaaagaaaaattagataaagttaattttcgtaattttgagattgataatgacgctgaacttttagaagaacttagtggatgtatcgatgttgatgatttaataaataacgaatatactaacattgaaatttctgattttaacgattttacatcattagatggtaaatcaaataattctataataatggagttcgagttatgtcgtaaagatatattagatgattggtatatcaccgagaaatttttcagaggttctgtagaaattaagaaagattatgatggcgaacgtgctcaactattaatgaatgttaaattgaatcacacatcaccagaaacaaaagaaatatctgaacgaattgtgtcgttagttgaaagtaaactccttaaagatcaaatcatcaaagattcccctcatggtgggaaagtactctttgacgattttgaaaatgaatatcgtgtatcatttttaagcgaacttgctaaacagcacattgggtatgaattttactataaaaaaattgatgatgttcatttcaatccagataaagatgcagattactctacacaacctaaattagtaactaatttccttgaaaaagatattgagcaatatcgggttaaaggggatcttgataaaatcatatcaataaaatggaaacatattcacccatacgttaaagtaactaaagtattagctagttatacaattgcacatggtaaatatgagggcgattgtaaagtctcatatgaatttagcgattacggacgtaaaaactctcataatccagaattatgcattactgttgtaaacataaaaatgaaaggggcctctcaagagaggttgaatgaaatacaagacttaataatgcgacaaatcgagacaagaaaagctgaattactccgtaagtacaaaaaatcataa

SEQ ID NO: 238050 - DNA, 921 bp, Klebsiella pneumoniae
atgggtgaattttcaaaatacgttggtgaagtaggcgaagatattgtcaatgattttctaactctatttggttggcgaaacatgtgcaataataaaaaagtagattgctgtgtttcaacacatgaaaaaataacacatggtgtcgatgctttatacgtatatgattctctacttcaaaaacagacattagttagtgttgttgtttctgctaaatactctgcatcatcttacactagtgtcaaatcaacctttagagatcattttaaagatattgcaaacacaattgaatgttacaataaatcacaactaaaaagaaacattaccaaaaactttaaaggcagttctcgaaaagaggatattggtgtattgttttatttaaacaatgatgagaatgaagaaaaagataacattaaaggtaccatagcaaataccagaatagagagtacattaaaatttaatacaattcatgtcattgataacgcaagagctaaatttttatttgagtcattaaacttcattagaaaaaaatataaagattgtgattttttttgcaataatacaacattaaatatagcatcttcaaaaacacacacaaaaatcatgccagtagaatatatcacatcaccaataatccctatatctgttgcatctgaaaatggtcgaagatttattttgctttgcgatttcgattttagtaaagagtccctcattcttgttttcaatttagccagaaaattatgctctgacttttcaagtcactatgaaatatacttcaggcaatataacgcgctcaccgacgatcctataatagatgaagttaaaatgtcacaaataaatgaagatgatgacatcatagagagcatagatgtacaaatctcatcttataattctaacttcaggaatatcaaaaatgagaaataa

SEQ ID NO: 238051 - DNA, 633 bp, Klebsiella pneumoniae
atgcaggggctcgtccggggggtacttttatgccccaatatgatgggccttaccgaatcaaatatttatcatggaaaacgcatagccgcgatggggtataccgtccttgttgccgatttatatggtagaggttttagtctgtcctctgatgaagcttttgcgatgatgacagaattgaaagatactcctgaggagattaatcgattaaatattgttcttgagattctgtctgatgataaacacgtaatacgggagaaagtgggtgttgtaggcttttgttatggtggacactgtgctttggaacttgcgcgaattggcgctgaaattaagaccagtatcagtgtacatggaacgttaacgacaacacgacctatagttaaaggcaggacttccgccaaagttgtcgtgctaaatggtgctcgtgattcttttgttcctcttctacatgtgattgaattttttaaagaaatggtaacagctgaagcaaattttgagttcgtcaattatgctgaggctgtccactcttttacttttcctaaagctgatattccaggcaagatgttttaccacgaggatatttgcaatagggcatttaagcacattgaaagtacactacatgaagcattaatttaa

SEQ ID NO: 238052 - DNA, 321 bp, Klebsiella pneumoniae
atgcaactgaaccggattaaagccgtgcgctgctataaagctccgcgttgtatccctggcagaccttcagtggttgtgcctaatcgtgtgcagcggcagtttaccgctgtccgggctaatcaggtctgggtcaccgatattactgatatccgcacctggcagggctggctgtatctggcggtggttatcgctctcttcgcccgtaatgtggtcggctggtcgattaagctcactctctcacgcgaactggcactcgacgcgctgataatggcggtctggcgacgtaaatctgatggcgaggtcgtcgtatactcggactag

SEQ ID NO: 238053 - DNA, 1209 bp, Klebsiella pneumoniae
atggccttactcacggataccaaagcccgtcatatcaaacccaatgacaaaccgatttcgcatggtggtgtcactggccttacactacatccctcttccactaaaggacgcggaaagtgggtgctacgctacgtcagccctgtcactcagaaacgacgtaatgccggtcttggctcttaccctgaaatcggtattgccgaagcggctaaactcgcgcaaaccatgcgagaacaattatcggctggagatgaccctcttgaactcaaaaaagcggagacgaccaaaatcgtaattccgacttttgaagaggctgcacgaaaagttcatactgagttgctgccaggatggcgtaacaaaaagcatgcccggcagtggatatctacactcgaacagcatgtgtttccagctatggggaccgttcctcttgatgcgattacacctgccaatgttgcggatgttttgcgtccttcgtggatgactatccccgaaaccgctggacgggtaaaacaacgtattcataaagtaatgcagtgggcctgggctcatgggttctgctcagccaatcctgttgatgtagtcgaccacctccttccccagcaggtcagcgccagtatacgtactgaacatcagcctgctatgccctggaaagtcataccgttatacatcgcaagccgcgtttacactgaagatcgttacaacgttacccgaggactactattatttgtcatactgacagcatgtcgttcgggtgaagctcgtgcgatggaatggtgtgaaattgattttaagcgcaaaatctggaccatcccagcgggtcgaatgaaaggaggtgttcggcacagagtaccactatctaagcaggcgcttgagttgcttgaacagatgagaggattacatgaaacgctggtattcccttcccccagaaaacaaaccgttctctctgatatggttttgacatcatttttacgcaaaacaaaggctatcagcgatacccagggacgatttgcggtcgcacatggatttcgctccagttttcgtgactggtgtagcgaacagcattacccacatgatttggctgaacgtgcactggctcacactatcaggaacaaatctgaagctgcctaccatcgtacagatttgttaaatgaacgaaggcctatgatgcaggcatggggagattacgttatgtctgcgatctccaagacctga

SEQ ID NO: 238054 - DNA, 699 bp, Klebsiella pneumoniae
atgagatcaccttatgagttatctgaaaaagaatttgaatccctgctactggcagcagaaaagaaatatgactcccggttatcacgctatatgcttcgtcgctcacttgctgtgatatctaattatctggaaaactataaccgggtatttgcattacgagctgacctgagatttgctcagtcccatgtgccagatgagccagacttaccgacatgctttcagaaagatgatgagaaagccattactcgggctatagaatcccttaaaagtcagctaagggaagagcacaagcgttctggcagggctggtgagcctgtgccactcggttatatctgggccagagagcgtgttaccggggaacaccctcactaccatctggttctgctatttgacaaagaggtttatgcctatctggggaactacactgaatctgatgctgataatatggcgacccgtattcagaaagcttggtgcagtgccattgggcttgattatcctgaatatgcttatctcccgcattttccgaagaaccacagcatttggttcactcgacacgacgcgttaacgttaagtgctgattattatgactttctgctacgggtagcctatctgagcaaagaatacagtaaagacttccatgacggttatcgcaactttggcacaagccagctaatacagccccccttgagcgacaaatag

SEQ ID NO: 238055 - DNA, 1509 bp, Klebsiella pneumoniae
atgagcaacaaaaatgaaattaatcatgagcttaacctgaattttgatattctgccacgtcatatcaggcgatggactttgtacctacaccacatcacaggtgtggctgttgagattatcgtcgttacgttattagcatttttggggttggcctgccaggatctgttttgcgttcagttgggcaataaacagcgatttcctctggcgttatacctgttgctgctctccaggtctggtagtggtaagtcaagaatatacaggttgctcaagattcctgtagagcaacaggagcggcgatttgaagacgagtattgtgtcgagcttgaggagtatgaacgaagggttattatctggcaggctgagtttaaagtattaaataagctttacaaaaaagcgctgagtcaagggggagatacggctgaaacacgcagaaaacttgaagagtgtatcagccgccaaccgcagaaaccagtaaggaaatccattattttaacaaacccgacaagcgaagcgctcactaaagaaatcgggatgggatatcagaataaagctctttttaacgatgaagcagcaggtgtgtatacgagtagtttgtacaacgaccccacacctttcaatacattctggtgttgggataaagtcaccattaacagggtatcacgggaaagctttgttattgaaaattatgtattttcatctttattaatgatgcagcctcatccgtatgacaattccagcaaacggaaaagggccagtatcagattcacaggattgctggctcgtaccctgatgatagatatggagcagattacagagccatatactaacaatgagcacagtgctagggatgaaagcctgcttcaggagctgtattctgtcatgtcacagcttatggacgccggtgttaagcgaagagaaaatgacgatgagtatattgcacttacccttgccccggacgcgcaggatctaatggatgaaacgtcgttgagtttgcagcagctgatgaagcctggcggtgccttatatcactatgatgatatagctgctcgttttatcgagcagagcctcaggattgcaggtatttttcaggttactggtgaccctgattcgacagaaattgtaagggaaaatctgttgtctgctttaaatctgactgactggtttgtaaatcattccattacaaaaattgattccacaagagagcttagcgatgaagagaaaatattgttctggttagagtcgcatcttgtagaaaatagatctttcgaattcagaagaaatgatcttatcaaaaagggtccgaattcagtcaggcgtgctgagaggttgataccagcgctggaaaaacttgagtcgaaagggaaggtgcaactattcgaagtggcgggtataaattatgtcaaatttactggttcagaaatggatcctgttgaactagctgagaaaactaatacgcccatataccagtctggatcactggcactgagtaagctggctaagcctgaataa

SEQ ID NO: 238056 - DNA, 222 bp, Klebsiella pneumoniae; identical to SEQ ID NO: 105311

SEQ ID NO: 238057 - DNA, 1842 bp, Klebsiella pneumoniae
gtgggaaatgcatttgcaaaactgatgtacgatgtctgtcagaccttgggtgtgttcagggaagggagtaaacagcgggatagacgtgcatatgggagtttttggcggcatcaggcattttttaatcaacgctataatgagataataaaaataattgataaagaaagggtcttcagtgaagaagatcgacgagttttgttctataaatacgaaatgctttataatcaaattatatcttaccccgtgttcagcactctgacccggagccaggtattcgagcgttatatccagctcggggtttcttcatgcctggcacttgatatacacaaaactttcagctcaagtaataataatggattctattttcacattgatagcttcctgttaagtaatcattgcccaacattggaaaatagtgaaagggatatcaccgcaggggtaagaaactatttacgtggtattttcaaaacagatgatgagattcataaaaacattctccttccactatttgaacgaattagaaacatccgaaaaaatagcaacccgagaaaatcatggatgaacatcgtcatagatgaatgtattgaatattcccaaaaaactctagacgatgatgcgtttgatgatattaaagttcgcttggataaatttaaatctgcctacgcctctcttcgaatcctactaacttttgaacgaagaaccggcctgactaagtatctttccagtgcttacaaatatctccacgagggagatggaatgaatgacagctattattcagcattaaatcagtatctttatgaatcgaaacacttcgatgagagactgctggaatcattagtcgaagagtttcagaaagaaacgaacaaacatgatttgatagagataaatgaagatacatggatggatatcaaggtaatctggcatcttgttttcagctctcttaatggtgatgtattttctgaattagatttaattgagttggctatcaatcttaagaatgctcaaaactcttttgcgcttaaaccatatctggccttaactgaaataatacatagaatttgcattgatgatttaactgaagcaaagaaaaaaattgatgctatttcacttaatgaactacctactggcttcatctcagcagctatcagtgttatcaggattgctcttaacatcaaattaaaagggaagacaataaaaaatggagagttactctctgatataaacacagttttattacatcgaggcgtttttactgatcatatcaatatcgaccgcaaatttaaacaagccgatttgatattagttatgtgcgccaataatttgataataatgaatgcgataaaacagtataataacatggttcagatgacaagtttctacaacgagcttgaactttctgccatccacccacagtctattacaggaattctggatgaagttgaatctgcattgggcaaaataaataaacggcttgatgcagccgagaaaattattaatagcgaagaactgtccaagttaattatagatgagaaaatattaactgttcgggagtgcagacaaaacctcgtaagctatttgaatgaatttacattgtacaactgcattcttaacctgaattatataaaaccttacctgacactccccggggagaagttagttaatatctacggacttgtcggcaattcagaagaacgtgtaataaaacgagaatttttagctgaggctatcagaattgttaatgagagagaaggtcaaattaagcctttagctgaaggtgaaaaagctcaaaaaatggcgctaatacacgatctgagcagtgagcttttcaaatatgatgagtga

SEQ ID NO: 238058 - DNA, 4953 bp, Klebsiella pneumoniae
atgtgggatggcggtttacaagagcaagaagtggcagctattgagaaaataaaggctgcgttttcggataatctatccaagtctgacaagcctgttcgtggaggttctattggcgagcagctacaaagatatggttataccggcaacggaatgttcccctggaaaggttatgcaggttttcgttttgttgaggcaaaaaaagaaggtgaatttgatttagtcattgttacgcattgtaatgtgatcattgttgagttgaaggactggaaccatcaacccgtaactgcgcgcggagatacttggtataagggtgataagaacatgggacgctcgccggtaagcgtgacccgtggcaaaaagttcacgttggacaataaactcaagcgtctggcagaccgttttacgaacaaaggctatgttccatttgtacatttttttgttgtgatgactggcaatgcggacttcagtgagttaccggaagaacaacttcaccatacaatctcgttaacagattttcttaaatttgctgatcgcaacacattcaacaactacttcagaccccatccaggctcccaggttctaaacaaagattttcccctttttgataaccttttcttagggcctcagacagcgccaaaagccctgagggttaatggcttcgaagctaaggatatgattttcgaacatcctaaaaaggtgtatcgggaatacttggcaaaatcagaaatatcagcaaatagcgaagcattgctcagaatatggaatttccggaacatccaaggaacgaaagcgtacacgccggaaggaagagctgagatcgtttcacgtgagcgcgaagtgttacagcacatcaatcaccagaaccgtgacctgtataaccactgcctgaggtctctgacgagttttcagaaagacgaggtgacggcagagtactgcgaagtctatgagcttccgccgggccatgtcaggtttaatgaatttatcggaaaatatggcaaggccttttctgatatggaccgtttgaatgtggtcaaactgctcattgcgaaatttagcgatctccatgagatgaaaattgcgcacagggatatcgccgatcacagcctgtggatttcaccttcaaaagaagtcgcactttcgaactttatttcggcgtaccaccggccagccggaacggtcggcgactaccgtaagcttttatccgtaggcgcagtcgagataaaagatatgcttgatgagggcgagcttacgccttttcagcaggatgttcatgccctgggcattgtagcgtggcacttattaagcggtaagcgcatgtcgcctaagagtcttgagacagtacaggacaatatgctaaatagtcagcactggtattcagatgtattacttgatgccgttgctgcaaaatttgcttccgcgactgaattcttcgatgccctgaaacaagccgaacctgcgggcaatgcgatccctacatttgatgatactgagcttgatccttatcggcatgctattaaccactctcgccagtaccgggaagacgatgactttctggtagaaacatccgacaaagaagtctatatctcgggtggaagactcgtgaaggcctggctgaacgtgggggggcagggagacgatccttcaattaatttccaagttctgaaatttctaaaacagcttgagcagctttctttagttaaaccaacgtatctgcctcaaattcgtgaattcggtatcgcatccaaatcatcaagtctgtacatggtcacggatcaggtacagggagaaacctgggataaaatggtcgtcccgaatgatgaaaaaatcgacctcattgataagtttgtcgccgccgttgagcacttacacagtctgggggtttctcacggggacatccacccaggcaatgtgatgcttgggacacagagtcgttcgcttttcctcatcgatatccccgatttttcaccgtccggtgacgaacctaaaaaccacagctacagccctgaatacatcgataattgtacttcttttgaacgcgacaactatgcagtgatgaagatgtcctgcgagttattaggcatgtcatgggggcaggaatcagacatttatcctactattgcgaatgccatccgagcagagctggaagatccggtttttgggtttaaggatttgggccggtttaaaaaagcgatagacagtaatgaccaggcaccagaacaacccctgatagatatcactgtaggaaacgccgatgaaataatctctgtcctgcctgataacgggcatctgtatgtcaaagttgagccaaatcctaaagtgccagctgaagtaaaagtgactttcaccgggataggtggcagttttactgcagtgttcaacaaggatcagaagacgctgattcatggtttcaggccatgggctcgcgccacaattcgtaagcaagatattgatgaaagtcagttcgaaattgttactggcatcaggattattcccggtagtccgcaggatatgtcagcgttgacagtattgcttaatgaagaagaatcttttacgcgggcaatcgagttgattgccgcacctgaagatgttcaggaacagaatccgcttacgcttcagctaaaagatgcttttgcaagacttgataagcaggcgcttgaacctgctttaaaagaagtgctggaaatcccgacggtgaagctgtggcgcgccattctggatactgaaacagaatcatatccaaacattgaagtcagcggggaggtggtcccggttgcagatgctcatggagagcttcttctcccttactctgcagacgttgacccacttggcgctttcagaagtagtgatgaagtcgaagccttacaggtcgatcaggaaggtgttgagcgatttataggtgaggtgtcacttaagaagtcggagctcaaagagatccgcctggtcaaagtgcgttcagcagcctacaggctgaaggattctgatattgtcttcttccgtacaaggcaggatcgggcatcttatcagaaacgtaaacgcgcattggaacgtctcctagatcgagaaagtgtgctgcctgacttaattgacctgttcgacccatcctgcaaacagatggctcaaaattatggtatcactctcagcgatgacgattttgccagatacgaccgtgaagatcagcacggaaacaagattagtctgaatgaacagcaaagaaaggcgtttaacaaactggtcaacaatggccctctttccctcctgcaggggccgccggggaccggtaaaaccgagtttatcgcggcctttgtccactatctgatcgaaaagcagaataccaaacgcattttactggtcagccagtcacacgaggctgtaaatacagcggccgagcgcatcagaaagcactgttcccggcttggtacagagctggacgttgtcaggttcagcaacagggaaggggccgtttcccctggcctgaaagatgtgtattcaaacgcgatcacaacggagaagcgtgaactatttaatgctgaaattaagtaccgtgttgaagcgttgagtgaagccattggtctggagccggggtttatttcgggagttgtacttgcggaactcagattgttcaggcaaatcgatcaccttgagaaattgctctatcaagttaacgatttaacggattcaaaagagatcggcgaactgaaagatattgcagtcgaactcgattttgccatccgctccaggctgagtcaggagtatgggattaacctggataaagacgcgaaggtctctgcagcaaaagacattctaatttccaggctgtgtaaggattatggcgtcagaccggatgaggcacgacgggtaaaggcattagctaaaatatcccgtgatatgcaggatgctatgtcgggagagcgagtgaatctggacgagttttattcgcgttccaggcagttagtggctggcacatgtgttggtattggacaagggcacattggcattcaggagaatatctacgactgggtgattattgatgaagcagcacgctcaattgcaagtgagctggccattgcaatgcagtcggcccgacgcatcctgttggtgggtgaccacctgcagcttcccccgttgtactcagatgcccacaaagcggcattagcgagaaagctgggtatcaataactctcgcactgaaattgacgaggtattacgaagtgactttgcccgtgccttcaactctgcttatggtgcgcaagcgagtgcagctctgctgacccagtaccgtatggctccaccgattggtgatctcgtatcgaagacattctatgacaggaagcttctgaatggagaacgggcaattccggatgtctatcagcacgctccagaagcgttatgtagcgtcgtaacctggcttgatactgctaatctgggccaccgggcacatcatcttgaagatcgcggaacaagcatttacaaccgatgtgaagctgacgagattatttctgttcttaaacaggtatcagagaatgaagaatttgtcgctcagctttcaaatctcgttaacaaagatgaagccgctatcggcgtgatatgtatgtatgccgaacaaaagcggctgctccgtcagaaattcaatcaggaaatttggagcgagggatttaaggacattgttaaaattgacactgttgacagttatcagggtaaggaaaaccggatcatcatcctgtcactgacgcgttcggataagcagcatagcccaggtttcttacgagctccaaaccgtataaatgttgcgatgtcacgcgcaatggatcgcctgttgattgtgggtaatgccgatatctggaagggaaacaataaagaactaccattaggctcagttgtaagttatatggctgaacgaggtcaggaagctggatacaggttcctctccgctcagcagggaggcaaaaagaaatga

SEQ ID NO: 238059 - DNA, 2046 bp, Klebsiella pneumoniae
atgagcgtcaagatcaattcagtaccatccgtttccgttacttatgcacgcaacggagcatcgaccaaggctaatgcccttgggatgcgccctatgcaagaacgggcctatgagaagcgcggagaacaatatcttctcataaagtcgccgcccgcctctggcaagagtcgtgcgctgatgttcgtcgcactcgataaactcgcaaaccaggggatcaaacaggcaatcattgtcgtgccggaaaaatctatcggcgcgagcttcaacgatgaaccgctatcgcagtttggattctgggctgattggcatgttgaacctaagtggaatctgtgcaacgcccccggtaacgacaacggcggcaaggtaaaatctttcggctcttttcttgaaagtagcgacaaggtgcttgtttgtacacacgcaacctttcgcttcgcggtcgatgcctacggtgtagaggcgtttgacgatcgcctgatcgccgtcgatgaatttcaccatgtgtccgctaacccggataacaagcttggtcagcatctgggacagttcattgagcgtgacaagacgcacatcgtggccatgaccggctcctacttccggggagatgcggaagccgttttggctcctcaggatgagtctaggttcgataccgtcacctacacctactacgaacaactcaacggttacgaatacctcaaacagcttgatatcggatacttcttttatagtggatcatacattgatgacatcctcaatgtcctcgatcctgacaagaagacgattatccatattcccaacgtcaattcgcgcgagagtacgaaggataaaattaaggaggtggagcacattctgagcgagcttggcgattggcaaggtgcggatcctacgactggttttcagctagtcaagcgccccgatggccatgtgttgcgtattgctgacctggtggacccagccagtcaaggcaagattcaggaaagcctccgagctccagaaatgaagacagaccgtgactatgtagacatcattattgcacttggtatggcgaaggaaggtttcgactggatctggtgcgaacatgcgctgactgttggctaccgtgccagcctgactgagatcgtgcagattatcggtcgcgccactcgtgacgctccgggtaaaacccgcgcgagatttactaacttgatcgccgagccggacgctgtagagggcgcagttactgaggcagtcaacgataccttgaaagctatcgcggcgagcttgttgatggagcaggtactggctccgcgcttcgagtttaagcccaagaatccagaaagcggcccgactccaggctttgattatggtgatggaggatatgacccggatagctgcaattttggtgttaatgagcagacagggacgtatcaaatcgagattaagggacttgccgagcccaagagcaaagaagcggcacgcatctgccaggaagatttaaacgaagtgatcgcggcctttgtgcaggataagcccgccatcgaacgaggcctgttcgatgaagagctgatccctgaagagttaacacaggttcgtatgggtaagatcatcaaagaaaagtatcctgaacttgatgctgaagatcaggaggctgtacgtcagcatgctatcgccgcccttaacctcacgcagcaggccaagcgtattgtcaacggcgagaacgatgggacgctcaatactgcccttattgacggagtgcgtcgctttgcgatggacgtacgcgatttagacatagaccttatcgaccgcatcaatccctttggtgaagcctacgccatacttgctaagacaatgagcgaagatagcttgaagcaggtcgcggcggccatctcggccaagcgtacctcgatcacgcctgaagatgccaaagtgatcgccaagcgtgctgctgaatttaaacgtgaacgtgggcgactcccatcgttaacttcggcggatgcctgggaaaagcaccttgcagaaggtgcagccgcgtttatgcgttttagggcggagggacgttatgagtaa

SEQ ID NO: 238060 - DNA, 2787 bp, Klebsiella pneumoniae
atgccaatggagaactgtaagcaaatgaacgccgtagaaattgaacaagccatcacggatcttgcagagcaaccctttgatcccatagagtttccttatgctttccttgaagcctttggtaacaaggaaacgactatcaaacgcttgcgagccggagcatcgaataagtccgatttgggcggcgttcttcagaccaataacattcacattttggctagtgaagaagggcaagtaacacaaatgcttgcttcactcaaggccagcccggcaacaggcaaggccaaggccaaattcatcctcgccacagatggaaaagacttcgaagctgaagacctcatcagcggccagactgtcgcttgtgcctttaaagactttcccgatcacttcggtttctttttgccactggcaggtatcagcactgttcggcagatcagcgaagacgcctttgacatccgggctacaagccgcctgaaccgcctttacgttgaactgctgaaagacaaccctgaatggggtactgcggagcgtcgtcatgacatgaataagttcatggcgcgtctaatattctgtttttttgctgaagatactgacatattcataggcaaggggcgctttactgacaccattgcacagatgagtgagcgcgatgcttctaatatgcacgaggtcatcggcacgctctttcgtgctatgaacactccagactatgagcgtgccgcagtaggtattccgcgctgggctgcagaatttccatatgttaacggcgctttgttctcaggtacggaagaggtgccgcgcttcagccgtatcgcgcgctcctacctgcttcacgttggcaatctggactggaccagaataaatccggacatattcggctcgatgattcaagcaattgccgaagatgaagagcgcggtgaattagggatgcactacactagtgttcccaacatcctgaaggtactgaacccactattcctcgacgaactgcgttcaaagctggaagatgcgggcgaaaatccacgcgctttgctcaatttgcgcaagcgtatcgcccgtatacgcatttttgatccagcctgtggttcgggcaactttttggtcattgcttataaagaaatgcgtgccattgaagctgagattaactggaggcgaggcgaacctgatcgcccatctgatattccggtcacaaattttcgtggcattgagctgcgcgacttcccggcagagctcgcccgccttgcgttgattatcgcagaataccagtgtgatgtactctatcgtgggcagaagttggccttggccgaattcttgccactacgcagcgagaattggatcacttgtggaaatgcgctgcggatcgattggtatagcttaatggatgtgagtggctcaggagttaaggtggtttcagacgatatcctgcaaactccacttgatcaagctgaaatcgagtttgaacatgaaggcagcgaaacatatatctgtggaaaccctccttataaaggaaccaaaaatcaatccgctgaacagaaggcagatctattgtttgtcttttctaaatatcctggaactttcaaagtgctcgactacgtgagcgcatggttcgtgaaaactgcggagtacctctcccatgtaaatggagcagccgctttcgtcagtacaaactcaatttgtcaagggaaccaagttcctgtgctgtggccactgataatgggactaggtgtcaggatctcgttcgcgtacacatctttcaaatggtctaaccttgcaacccacaatgctggtgtaacagtcgttgtaattgggttgacgcgtagttttggaacgaagtgtagattatttgagcatcaaggtgagggaatagtcgagagagaggtagataatatcaatgcctacttggttccaaatgcagacatctttataaacaagaaatctgatcctcctcctggctgcgccccgatggtacttggtaatcagccatacgaaggcggtcatctaattttcgatagtaaggggattgaagccctttgcatcccaaaggatgttcgagagacgatcacgcgcaaaatcttaggttcgagcgaggtaattaacggtagcgagagatactgtctctggattgagaatgagaattttgcgctggccacatcgtttccagcagtctcagcgcagatcaataaagtcaaagaatggcgcttaaagagcgagcggcaggcaacgcgttctatggccactcgaccgcatcagttttgtgagatgaagtgtggaaatcagtcggtaataattgttccaatccggagttctgagaatcgggaataccttcccgtggctctattcgatgagcggactacagtaaataaccttgcttattcgatctatgatggatctttgtttaatttggcactaatagcatcaagattgcatctaatctggattagcaccgtctgtggaaagctagaaacacgatttagttactcaaacaaaatgggttggaacacttttccggtgccaatgcttacagataagaataaggaagacttaacacgctgtgccgaggacattttgctggcgcgagaacatcatttcccagcaacaattgcagagctgtatgaccccgaaaatatgcccgctgatctacgtgccgcgcatgctcgcaacgacgaagtgcttgaacgcatctacatcggccgtcgctttaagaatgataccgagaggcttgagaagctgttcgacctctatatcaagacggccacctcggctgtaccggctaagggaaaaaagagttaa

SEQ ID NO: 238061 - DNA, 1062 bp, Klebsiella pneumoniae
atgcgcagcgccttccgggttatccggaccgtgcgggaaaaacacgcctgtacaaaatgcgacgctatcgtgcaggcccccgcgccttcacgtcccatcgagcggggtatcgccggagcggggctgctggcccgggtactgggctcaaagtatgcagagcataccccgctgtaccgccagtctgaaatatatagccgccagggtgtggaactgagccgctccctcctgtcgggctgggtggatgcatgctgcaggctgctgtcaccgctggaggaggcgcttcggggctatgtcctgagcgacggcaaacaccatgtcgatgataccccggtccagatgctgctgtcgggcaataagaagacgaagtccgggcgattgtggaagtacgttcgtgatgaccgcaacgccgggtcagcagtcgcaccggcggtgtggttcgcttacagcccggacagaaaagccatccacccgcagacccatcttgccggcttcaggggagtgctgcaggcggatgcgtatgcaggattcaacgagttgtaccgcggtggccagataacggaagccgcctgctgggctcacgcccgccgtaaaatccacgatgtgtacgcccgcacgccgtcggcgctgacggaggatgccctgaagcgtatcggcgggttgtatgccatcggggcggaaataaggggaatgccggcggagcaacgtcttgctgaacgtcagcagaaagcgaaaccgctgctgaaatccctggaaagctggctgcgtgaaaagatgaacaccctgtcacgacactcagagctggcgaaagcgttcgcgtacgcccttaaccagtggccggccctgacgcactatgcaggcaatggctggacagaagccgataacaacatcgctgaaaaggcgctgcggatggtcagtttgggaagaaaaaactggctgttcttcggctcagaccacggaggtgagcgtgtagcgctgatgtacagtctgatcgggacgtgcaaactaaacgacgtggatccagaaagctaccttcgtcatgtgcttgacgtcatagctgactga

SEQ ID NO: 238062 - DNA, 369 bp, Klebsiella pneumoniae
atgataaatcttcctgcaggcactaaaatctggctggttgccggtatcaccgacatgcgcaacggcttcaacgggctggcggcaaaagtgcagacggcactgaaagacgacccgatgtccggccaagtcttcatcttccggggctgcagtggcagtcaggtaaaattgctgtggtctaccggcgacaggctgtgtctgctgaccaaacggctggagcgtggtcgcttcgccagacccgcacccgtaaaccgttccccgaatcactccctcgtgacgaaaaacggctgttgtcggcggcatcatgctgcccggactgtggcgattcactgcgctggctgggtgaagatactgctgaacagctggagctga

SEQ ID NO: 238063 - DNA, 876 bp, Klebsiella pneumoniae
atgaataaaactgatggccttcaggccctggaaaaaccgctggcgtcgcttcccgatacgcttcgccagcttattcttgaacgtattcagaatctgacccactacgagccggtgattggcatcatgggcaagagtggtgccggtaagtcgtcgctctgtaacgaactctttcggggggaagtctccgccgtcagtgatgtgaacgcctgcacccgcgacgtactgcgcttccggctgcgcagtggtcgtcacagtctggtgattgttgatttaccgggcgtgggagagaacggacaacgggaccatgaataccgcgccctgtaccggcgtatgctgccggaactggacctggttctgtgggtcattaagtccgatgaccgggcgctgtcggtggacgagcagttctggcgcggtgtgatgcagccttaccagcagcaggtggtgttcgtgattaaccaggccgacaaaatagaacccagccatgaatgggatacccgttctggtactccctcagcacagcaacagaaaaatcttcaggaaaagcaggttgccattaccacgatgtttaagccacatcacccggtctgcgtggtatccgcatgtaccggatggggcgtggaggatatggtagcaaccatgatgcgctgtctgccggaccgcgccaccagcccagtagcgacacagttgcacgggaggctctgcacggagccggtaaagtcgcaggcccgtgacggcttcggtgaggcggtggggcgggtgttcgatacggcagaatcatcgtcattcctgcctgcgccgctgaagacggtgatacgtaccgtgcgtgatgctgtggtgtctgtagcccgcgcggtctgggactggatcttcttctga

SEQ ID NO: 238064 - DNA, 714 bp, Klebsiella pneumoniae
atgtctcaggctgagcatcgttatgaccgcctgtctgtccggctttctctgattatcagccgtctgctcgcgggtgaaacgctgaatatgcgcaaactggccgctgagtttggcgtctcggagcgtaccctacatcgtgatttccgcgagcgtctgatttatctcgacctcgaatatcaggatggctgctgccgtctgctgaccggaggccgtcaggagattcgggaggaggccgcaatgcagtttgcccgtcagtcaggcactggcgcgttgtttcctgatatggaccaccatctggtcagttcattgctgagcagcaaggactcctcgccatgccttatctggcatccgggggcatccgtaacgtcttcccgcccaggcatcttcacacgactggtcagggcggtatcagaaaacaggaaggtaaccctgctggctgacggatgccgttgcgacaaccttgccccctaccgactgattttcagcgccggtgggtggtttctggtgggggaacaccttgcccggataaccgtttttgcactgcacacagttcactccgtgacgtttcacgcggaaaccttcacaccagacggacatttcacccgcattctgtcacacccggattttttacaggcgttacctcattttcatgtttttcattcactactcgctgacggcagttacgggcagcttacccataaggaacaggcatga

SEQ ID NO: 238065 - DNA, 636 bp, Klebsiella pneumoniae
atgaaattactcacctcggcggcgctggccgccagcctctgcattacctctgtgaccccggccatcgcagaaaatatcgtgggttcagttaaggcctggcagtacatgcaggctgatggctggaaatccgctgatggatacgatgataaccgcatgcataacgagttataccaggcggtcgttcttgataattatccctggacgaatcactttctgcttcgtagcagaggcggtagttcgctttatctggcagacaagaaagctaaaactgtcaaatacatcgatataaaacctcgcgacgagtatccgttacatcttcaggtagtttatcggggaactgatgacgggagtggctgttatttcgccattgtagatgaccgaatggcaaactactggacgattgttgaagatcgtcttctctatcaggacccacctgttgaagacgtcgatgcgaaagctgctgagcttagaaaacaactcacgccggaagtcgtgatgatggtgaaggataattgtattgacaaacagcagcaggctgcactggcagctaagcgttctgaaaaagatcgagagttgcaacagtgggtagcgaaacagagcctggcggaattatgtcgtcgtaccggcaactgctga

SEQ ID NO: 238066 - DNA, 450 bp, Klebsiella pneumoniae
atgaagaagctgaaaagtgttatttccgctgcgaccctgagtctgtgtctgctgacacccgctcatgcagaagagcaacgttatatcagtatccgcaatacggacactgtgtgggtgcctggtaatatctgtgtttaccggttccgccttgacaacggcggcagcggggaaggcttcgggccactgaccctttccctgcgcctgaaagacaaacagggtaatacactggctgtgggggagatgggcgttgagccgtttggcgacagcgatgcctcccgaactcaggatgcctcactggaacatgaatgtgtggaaaacgtcagttccgtcgaaatcatgaaggcgacggaagcctctgagggttaccagactgacctgccgctgtccgtgtttgacccgcagtattatcgtccactaccggtgtcggttgccggaggtaaggcatcctga

SEQ ID NO: 238067 - DNA, 234 bp, Klebsiella pneumoniae
atgccagaacttactgtactgcctgatggtccgtttacccgccagcagtcagcggctgtggcgtcacaatacaccaacgttgctacagaggatgaccagaacacacattttcgcctggtggtccgggataccgacggcaggatgcactggcgggccaggaactttgagccggaggcgggttactggctgaaccgctatctcaccagcgatggcattcgcagagccacaacgtaa

SEQ ID NO: 238068 - DNA, 819 bp, Klebsiella pneumoniae
atgcgactcgccagccgctttggccgtatcaatcagatccgccgcgaccgccccttaacccatgaagaattaatgcaggttgttcccagcgtcttcggggaaggtaagcacgtgtcccgttcagaccattacagctacataccgaccattaccctgctggagaacctgcagcgtgaaggattccagccattctttgcctgccagacccgcgtcagggaccagagccgccgtgagcatacgaaacatatgctgcgcctgcgtcgctccgggcagataaccggtcagcaggtgccggaaattatcctgctcaattcgcatgacggttcgtccagttaccagatgttgccggggtatttccgtgccatctgtaccaacggtctcgtctgcgggcagtcatttggcgaggtgcgagtgccacaccggggaaatgtcgtggagaaagtgattgaaggcgcttacgaagtcctcggtgtgttcgaccgggtggaagagaagcgtgatgcgatgcagtcgcttttactcccgccaccggcacaacaggcttttgccagagccgcgctgacgtaccgcttcggggaagagcaccagccggtgacggaagcgcagatactgacaccccgccgctatgaagaccgtcaggatgacctgtggtcagtttttaatcggtgccaggagaacctgctcaaaggggggctgccaggacgtactgccaaaggcaaacgcagccatacccgcgcggtgaaaggcatcgacggcgacgttaagctcaaccgggcactctgggtgatggcggaaaaactgcagcaggcgctgagctga

SEQ ID NO: 238069 - DNA, 480 bp, Klebsiella pneumoniae
atggagcaacagttaccgttgtttgcccgtgaattagcccctgccgaccagcagacagtcaggaaagccttatctctgctggagtgccagctacgtgaaaccggcgcgtcatttacttccagccatgccgtccgcgactggctgcgcctgcagctcgcgtcactggagcgggaagagtttaccgcgctctttctcgataaccagcatcgcctgatagcccacgaaacgctatttaccggcaccatcaaccatacgcaggtccatccccgcgaagtggtgaaggccggtctgaagcataactgcgccgctgtcattgtcgcccatagccatccctccggggaggctgaacccagcaaggcagaccgtcaggtcactacgcgtattcagcaggcgctggacctggttgatatccgcttgctggaccacctggtggtcggcggcatggagatcacctcgtttgcagatcgtggctggctgtag

SEQ ID NO: 238070 - DNA, 360 bp, Klebsiella pneumoniae
ttgtcgaataaaacaccgacagtaaaccacgatatcactgacccctggtgggggcttaaacgcagtatcacgccctgttttggcgcacggctggtgcagtcgggcaactgtctgcattatctcgctgaccgggccagcatcaccggacagttcagcgacggggatttacggcatctcgaccaggcatttccactgctgctcaaacagcttgaactgatgctcaccagcggtgaactcactccccgccatcagcactgtgtcacgctctatgcaaaagggctgacctgcgaggccgactccctcggctcgcatggttacgtatacctggcgatttatccgacaccagcggcaaccgcgtaa

SEQ ID NO: 238071 - DNA, 492 bp, Klebsiella pneumoniae
atgaagttatccctgacggtagaagccgacgccatcaacgttctggccctgaatgcgggccggatcgctgtggatattgacggcattgaactggctgcgctgatcgatatggtctgtgataacggttattcccttcgcgttgctgactcccccggaaagctggtcgttgaagatccgcttccacccgtcgcctgcgttaatggcatccagtgcagtaccgcgcatattacggagaaagacaacgctctgctgtttactctttcacaccagaatgaagactttggtgagtcggaatggattagttacaccggatcgggttatctgctccacctgggtgcctggtcatttccggtcttacgcctcaaacgtctcggtctgtcgaaagcctgccgtcggttagtagtgacgcttatccgtcgctacgccgttggcattgttcatctggatgcctttggcgaagtgctgccgggctttgacattttcgactggtaa

SEQ ID NO: 238072 - DNA, 204 bp, Klebsiella pneumoniae; identical to SEQ ID NO: 161806

SEQ ID NO: 238073 - DNA, 186 bp, Klebsiella pneumoniae
ttgggaagaaatgacctgcttattcgcaccttccttaaatataaattcgaagaatttaacaaaaaggccgctgcggtgggcaagagagtcgccgttatcgatagcatggattacggcatgatgcgtggcgataaaattcttgctgcggcgctggcgctgctggatgaaccttcactcaacaagtag

SEQ ID NO: 238074 - DNA, 987 bp, Klebsiella pneumoniae
atgaactatacgcatcttggccgcaccggcctgaaagtcagccgcctttgtctcggaaccatgaattttggtgacgtcaccgacgagaagaccagcgcccgcattctggatgaggcgcttgaggcgggtatcaatttcattgatacagcagacgtgtatggcactgaacaatctcccgatatccagcaaggctcggggctgtccgaggaaattattggtcgctggcttcagcagggtggccgccgtgaacgcatcgttctggcgacaaaagtctatcagcctatgggaccgggcccgaacgatcgccggctttctgcgtatcatattcgcaaagcctgcgaggacagtttgcgacggcttaagaccgaccatattgacgtctatcagatgcatcacatcgatcgtcatacgccgtgggaagagatctggcaggccatggaactgcttgttcagcagggaaaggttctttatatcggtagcagcaatttcgcgggctgggacattgcgactgcgcagtcagtcgccacggcccgtcatttcctgggcctggtcgccgagcaaagtctttataatctgacagcccgcaccattgagctggaggtcattcccgcatgccgccattttggcctggggttgatcccctggagcccgcttgccggagggctgcttggcggcgtactgaaaaagatggcaagcgggcgccgtgccaggcccgcgtttgcccgtctaatcgaacagtatcgtccgcagctggaagcctatgaaggattatgtaaggacctcggcgaaaccccttccgatgtggccctggcctggctcctgcagaatcctgtcgttaccgctccactgattgggcctcgtacggtcgaacaactccagcaggcgcttcacgcaacgacagtcacgctatcagacgacaccatgagctgtctcgacgaaatctggcccggccccgggggagaagcgccccaggcttatgcctggtaa

SEQ ID NO: 238075 - DNA, 1182 bp, Klebsiella pneumoniae
atgagcaagatgatgcatgaccagccttctgctgccgtacccgcttcccgggaccggcgcaattttctgatcgccggcgccggtctggctttggccgcaaccacccttggcaggagcggcgccgtgatggcgaaaccggctggtcaggacacgccgaacgccccttcggatgctgctcccgtccggaaggaaaccttaaccacgcgtaaactcggctcgctggaggtgtccggcatgggactcgggtgcctgccgatggtgggttattacggcggaggtccgcgcgatcgtaaagctatggtttcgcttatccgggcagccttcgaacaaggtatcacgttctttgatactgccgaggtctacggcccccatctcagtgaagaatttgtcggggaagcactggcccctgttcgcgatcgtgtggtgattgccaccaagttcggtttcggcgtggaggaggggaagcccacttcccttaacagccatcctgaccatatccgccgcgccgtagaaggctcgctaaagcgtctgaaaacggaccacatcgatcttctctatcagcatcgccccgatccgaatgtgccgatcgaggatgtggcggaaaccgtgaaggcgttgatccaggagggtaaagtgaaacactggggactgtcggaagcgagtgccaggacaattcgccgcgcacatgcggtactccctgtgactgcggtgcagagtgagtatgccatgtggtggcgggaaccagagacgcggatatttccaacgctcgaagagctgggtatcggtttcgtaccttactgcccgactgcccgcagcttccttgccggagcagtcaatccaagccagcggttcgacagcaccgatcggcggcataacctgccacgcttccagcccgatgccctggccaaaaacatggtgctgcttgaattcgcgcagtcgtgggcccgtcgcaaaaacaccactccggttcagttcgcgctggcctgggtgatggcgcagcggccctggattgtccctatcccgggtacgacgcaatatccgcacctgatagaaaacagcggcgcaccgcaagtccggttgacggacagcgagctacgcgaaatcgatgcggcgcttgccaaaatcccattgcagggcggtcgcgccgatccgtttaccgaaagtcagtttgataaaagttaa

SEQ ID NO: 238076 - DNA, 570 bp, Klebsiella pneumoniae
atgttgattggctacgcgcgggtgtctaccggcgatcaaaacctcgatttgcagaaaaacgcgctggttcgcgcagaatgtgagcagattttcgaagatacagcgagcgggaaaaatgccagacgcccagggctgaggcgtgctatccgtcgtttaaaaccaggtgattctcttgtggtctggaagctggatcgccttgggcgtagtgttcgtgaccttataagtctggtctcagagctgcaggataaaggtattcactttcgcagtcttactgacagcatcgacacctcgacgcctgcgggacgtttcttcttccacgtcatgagcgccctggcggaaatggaacgcgagttgatagtggagcgtaccagagccggtttagccgcagcgagggagcagggaagggtcggaggccgccgcagagttatgaccagggaggtagtggaacgctgccgccagatgctggcgaacggcgccagccggcagcaggtttctgcggtgattggtgtcgatgtgaaaaccatctatcgctattgccccgcatcagaggtcatcgtcgataagaaatag

SEQ ID NO: 238077 - DNA, 1026 bp, Klebsiella pneumoniae
atgtttaagaatgcatttgctaacctgcagaaggtcggtaaatcgctgatgctgccggtatccgtactgcctatcgcaggtatcctgctgggcgtcggttccgctaacttcagctggctgccagccgtggtctcccacgttatggcagaagcaggcggttcagttttcgccaatatgccgctgatcttcgctatcggtgtggccctcggcttcaccaataacgacggtgtatccgcactggctgcagtcgtggcttacggcatcatggtgaaaaccatggcggttgttgcgccgctggtgctgcatttacctgctgacgagattgcggcaaaacaccttgctgataccggcgtgcttggcggtattatctccggtgctatcgccgcctacatgttcaaccgcttctatcgcatcaagctgccagaatatctcggcttctttgcgggcaagcgttttgtgccgattatctctggtctggccgctatcttcaccggcgtgatcctctccttcatttggccgccgatcggctccgcgatccaaaccttctcccagtgggctgcttatcagaacccagtggtggcgtttggtatctacggtttcatcgaacgttgcctggtgccgtttggtctgcatcacatctggaacgttcctttccagatgcagatcggcgaatacaccaacgcggctggtcaggtgttccacggcgatatcccgcgctacatggcaggcgacccgacggcgggcaaactgtctggcggcttcctgttcaaaatgtatggtctgccggcagcggctatcgcgatttggcactctgctaaaccggaaaaccgcgccaaagtgggcggtatcatgatctccgccgcgctgacctcgttcctgaccggtatcaccgagccgatcgagttctcgttcatgttcgtggcgccgatcctgtacgttatccatgccattctggcgggcctggcgttcccgatctgtatcctgctgggtactgagagatcccctcataatttccccaaagcgtaa

SEQ ID NO: 238078 - DNA, 1050 bp, Klebsiella pneumoniae
atgagcgaacaaccccagcgcagcgatattccgcatttacaggattgggctaacgctatggcttttgtcgccagccattatcggcaaagttactcaccggggacgcttcatgccgcggcggagtgggcgacgcaaaaaacgctgcctgatgcgcttaaacatttatgccgtcatgccggattgcattgccaatttcttaatggcaatgaccggaaaatgtcggcctggcggctgccgcttgtggtacagctcaaagatggccagattggcattattgaaagcttcgatctacataactcagtcgggatccgttttgtcaaagagcttacattactaagccactgtccgcttgactccttgttagatgaaattgaattcactgtggcttttcgtccggcctcgccggagaaagatattagaactgaaagctacctcacacgcttccagccggactggttacgtaagatcgttttaaaagattggcgtccctatacacatgtcatgctggcgtcgctggcgatcaatattttggcattagccggtatcctgttttccatgcaggtatatgatcgggtaattccggcccaatcctatcccacgttatatgtcttgtttagcggcgtattaattgccgcagtgttcaatttcgttctgaaaattacccgcggtcacgtgaccgacctgctgggaaaacgtggggatattcgtatctccgatcgcgtatttggtcacgcattacggctgaaaaataccgcggtgccgcgctcgacgggcagctttatttcccagattcgcgagctagagcaggtacgggaaatgatgacctcgaccatgatgacggtcattgccgatttaccttttttcctgctttttcagcttgtgctatttatcgtctcgccatggctgagttggatcgcgcctgttgcgactatcctgatgctgttaccgggattgttactgcagaaaaaactggctgagctggcaaataaaaatcagcatgaaagcacgctacgcactgagagatcccctcataatttccccaaagcgtaa

SEQ ID NO: 238079 - DNA, 1437 bp, Klebsiella pneumoniae
atgcgtctatttcaaaaaaaagggatggtcagcgtttacagctgcagcactattttcctgtcaatctgcgtggtattaacggttgacgcagaggaactttcttttccgcccaccagcatcagcacccagaggttaaacgatactcagcaggtcgccggatatagcgaagagcttatcaaccctgaaagtcatcttgccggtccactggatattgctaccgcagtaaaatcagcagtcaattggcatcctgctatcaatcaacaggtgagtaaacttcaggagcaagtgcaaaaagtggatgtagcgaaagccaaatattatccgcaggttaatgcgggtatgaataatgggtacagtaacacctactctgattctggatattccccctcattagttgtctctgtttcgcaaatgctgtacgactttggcaaagtctccagttcggtgagagcggcggacgctgccgttgcccaacagcaggcgatggtcatgcttaatatcgatcaggtggctcatgataccgcgggtgcagtggtacagctgcagggttatcaaaagctcgtgaaaatagcccaggcccaggtcgattcgttaaagcatattggcgatcttattcgccagcgcaacgacgccggggcgacatcgctttctgatgttgtgcagacggatacccgcgttgagggcgcgcaggcgacgcttatccagtatcaggcagcgcttgagcgctggaaggcaacgctggcgacgtatcttggtctcggaagtattacctccgtaaccgaaagcgtaccgcaggctatggatgccgcctgcgccgttagtaaaattgattatcgaaccgtaccagcggtgctcgccgctttggcccaggctacacaggcacaagcccaggtagataatgccaccgcgcaaatgttgcctacaatctcgctggaacctcaggtaacgcattacctcaatgataattacgccaacagcgcggtattaaataaaacgcagtattcggcatgggtcaaagtagaaatgccgatctaccagggcggcgcgctaacggcttcccgcgaagcggcgcagcaaacgctatctgcggcgaatgccgggatcagaaacgcgcaactcgatgccagccagaagttgagcgcctcccgcgacgaggcggtaaacctgaaacaatctatcgccatccagcgccgccagcaattgcttggcgaacaaacccgcgccctgtatcaggatcaatatttacagctcggcacgcgtccgttactcgacctgcttaacgtcgatcaggaaatttatcaggcgcaatttaatcaggtattaactgaagcgcaactgcgaaatctggaactggactgtctgttcagtacagggaaaatgcgcgccgtttttgctctggataaccaaagaattcagggcgtggagattcgaccatga

SEQ ID NO: 238080 - DNA, 1071 bp, Klebsiella pneumoniae; identical to SEQ ID NO: 14536

SEQ ID NO: 238081 - DNA, 1593 bp, Klebsiella pneumoniae; identical to SEQ ID NO: 103751

SEQ ID NO: 238082 - DNA, 327 bp, Klebsiella pneumoniae; identical to SEQ ID NO: 103752

SEQ ID NO: 238083 - DNA, 1002 bp, Klebsiella pneumoniae
atgccaaactggtgctcgaaccgacttgacatcaccttacacaacgcggcggatatgccggctcttaaacactggatatatgcggatgatgggatacccgcctggcagacggcgatagcacaaagtctgcatttgttgctggccggctgcgcggggatactgaaaccggtcagaccgctgtcttttccgccgttaccggaactgacttcatacggtgcaaccgggcctgtttccccgggaaacacggctttcacgcactgggttgacctgctgatgactgcaccggatttgacaccgtcatgttgtcagcaaatccatcagtggtatcagatgtggttatctgaaggcggggcgtaccattcctgggactcgctgacggcgacgcagaaagcgagactgtccccgttgttatcgggaagcagttttgactggcttaaccggtttaccggagaggatgagagccgggtggcgacagcctgggaggatattcagtaccttcgcagtaccggagaagccataccgatggatatgcggactctgttaccgaccagccttgcggctgaattacacggttttaacggctgtttatggaaaacaccggaggtcatctggcggcaggcgcgctggcaggcgtttgcccccggtaacagtacatatcacctttatcagtgccgttatggtgtgaaatggccgaacggcagtggttttcactgtattgatggcgggtatgcgacggagttatccgcagagtttgatactccgtgggggccgccgtcagcagcggttttgtgtgctctgtctgcgcgtttccgctgtcaggtccgtcatgtctatgccgaagaaggctgtggtttctgcggatacagcgagtatgaccatggccggttaaccgaccatgaatctgatgagattgagttcagtgatgaagagaatgaggacggtttccaggatgtgacgggaccggactatattcttgattcattgccacattacggagggtga

SEQ ID NO: 238084 - DNA, 300 bp, Klebsiella pneumoniae; identical to SEQ ID NO: 103754

SEQ ID NO: 238085 - DNA, 975 bp, Klebsiella pneumoniae; identical to SEQ ID NO: 190856

SEQ ID NO: 238086 - DNA, 648 bp, Klebsiella pneumoniae; identical to SEQ ID NO: 103756

SEQ ID NO: 238087 - DNA, 513 bp, Klebsiella pneumoniae; identical to SEQ ID NO: 103757

SEQ ID NO: 238088 - DNA, 357 bp, Klebsiella pneumoniae; identical to SEQ ID NO: 103758

SEQ ID NO: 238089 - DNA, 423 bp, Klebsiella pneumoniae; identical to SEQ ID NO: 103759

SEQ ID NO: 238090 - DNA, 318 bp, Klebsiella pneumoniae; identical to SEQ ID NO: 103760

SEQ ID NO: 238091 - DNA, 363 bp, Klebsiella pneumoniae; identical to SEQ ID NO: 14547

SEQ ID NO: 238092 - DNA, 195 bp, Klebsiella pneumoniae; identical to SEQ ID NO: 190863

SEQ ID NO: 238093 - DNA, 612 bp, Klebsiella pneumoniae
atgaaagtctgtttaattattttgtttattaattttgctttttgttttccgttaatggcgaagacgttatttttaggtgattcattaacggctgtttatgaaatgtcagcaaaatatgttttggatgaaaaaataaaaacagaatatgtttccggttcggggttaataaataaaagtaaaaaagattggatcgctttcgtgaataatttcgatttgcgggagtttgataatgtgattattagtctcggaacaaatgattttgttcaatatggttcggatgaatggctgaaatattacagtctggtatttcaattcattgctgaaattcaaagtgaaaatccgttagcgacaattgtctggatatctccaccacatttaaaaaatccggaacatgaacgttatttaatacatacccggcatataattaaacacagtgcgatattattaaatattcattatctggatattaatcagcctcatatattaggaacgcaatggcaatctgttattcataatgaaactgtacgaactgatgatggaatacatattacccgtaaagggggagtacgggtgatcagagaagtggtaaaaatcctgaatgggcaggattga

SEQ ID NO: 238094 - DNA, 909 bp, Klebsiella pneumoniae; identical to SEQ ID NO: 103764

SEQ ID NO: 238095 - DNA, 300 bp, Klebsiella pneumoniae; identical to SEQ ID NO: 16654

SEQ ID NO: 238096 - DNA, 408 bp, Klebsiella pneumoniae; identical to SEQ ID NO: 16655

SEQ ID NO: 238097 - DNA, 1515 bp, Klebsiella pneumoniae; identical to SEQ ID NO: 190867

SEQ ID NO: 238098 - DNA, 339 bp, Klebsiella pneumoniae; identical to SEQ ID NO: 103768

SEQ ID NO: 238099 - DNA, 1443 bp, Klebsiella pneumoniae; identical to SEQ ID NO: 190869

SEQ ID NO: 238100 - DNA, 975 bp, Klebsiella pneumoniae; identical to SEQ ID NO: 103770

SEQ ID NO: 238101 - DNA, 441 bp, Klebsiella pneumoniae; identical to SEQ ID NO: 103771

SEQ ID NO: 238102 - DNA, 2226 bp, Klebsiella pneumoniae; identical to SEQ ID NO: 190872

SEQ ID NO: 238103 - DNA, 2868 bp, Klebsiella pneumoniae; identical to SEQ ID NO: 190873

SEQ ID NO: 238104 - DNA, 438 bp, Klebsiella pneumoniae; identical to SEQ ID NO: 14572

SEQ ID NO: 238105 - DNA, 486 bp, Klebsiella pneumoniae; identical to SEQ ID NO: 103775

SEQ ID NO: 238106 - DNA, 1530 bp, Klebsiella pneumoniae; identical to SEQ ID NO: 103776

SEQ ID NO: 238107 - DNA, 897 bp, Klebsiella pneumoniae; identical to SEQ ID NO: 190877

SEQ ID NO: 238108 - DNA, 645 bp, Klebsiella pneumoniae; identical to SEQ ID NO: 103778

SEQ ID NO: 238109 - DNA, 417 bp, Klebsiella pneumoniae; identical to SEQ ID NO: 14567

SEQ ID NO: 238110 - DNA, 369 bp, Klebsiella pneumoniae; identical to SEQ ID NO: 103780

SEQ ID NO: 238111 - DNA, 240 bp, Klebsiella pneumoniae; identical to SEQ ID NO: 190881

SEQ ID NO: 238112 - DNA, 327 bp, Klebsiella pneumoniae; identical to SEQ ID NO: 14564

SEQ ID NO: 238113 - DNA, 609 bp, Klebsiella pneumoniae; identical to SEQ ID NO: 14563

SEQ ID NO: 238114 - DNA, 750 bp, Klebsiella pneumoniae; identical to SEQ ID NO: 14562

SEQ ID NO: 238115 - DNA, 2148 bp, Klebsiella pneumoniae; identical to SEQ ID NO: 103785

SEQ ID NO: 238116 - DNA, 555 bp, Klebsiella pneumoniae; identical to SEQ ID NO: 103787

SEQ ID NO: 238117 - DNA, 639 bp, Klebsiella pneumoniae; identical to SEQ ID NO: 14558

SEQ ID NO: 238118 - DNA, 735 bp, Klebsiella pneumoniae; identical to SEQ ID NO: 103789

SEQ ID NO: 238119 - DNA, 741 bp, Klebsiella pneumoniae; identical to SEQ ID NO: 190889

SEQ ID NO: 238120 - DNA, 663 bp, Klebsiella pneumoniae; identical to SEQ ID NO: 190890

SEQ ID NO: 238121 - DNA, 1938 bp, Klebsiella pneumoniae; identical to SEQ ID NO: 14554

SEQ ID NO: 238122 - DNA, 1230 bp, Klebsiella pneumoniae; identical to SEQ ID NO: 16656

SEQ ID NO: 238123 - DNA, 213 bp, Klebsiella pneumoniae
atgtatctttacgagtttcccaatgaggttcgcttaaaatatcatacatttcagcagactgagtataataatcttcatagttatccattctgtaattaccttattcaatttcctactaattatacatattgctcaaaattgtttgatgaaatatttagtttaaggcgtttttttattaatttaatggaaattagtactgcgataaaagtataa

SEQ ID NO: 238124 - DNA, 1530 bp, Klebsiella pneumoniae
atggacattgaggaagagttaaataatttattcgcgcatagggtttcaggccctttcctatttcttggttcaggtttctccagaagatatatggggcttgaagattgggagggtttattaagtcaattctgtgtaatggggaaaccttatgcctattataaaagtagcgccaatggcgacataccaacttcagcacgacttattgcagaagattttcatgatctttggtggggtgatacgctctacgaggagagtagaaacaggtatgaaaaaaatattgtaaataaatcatctcctttacgctatgagataagcaagtatctcacaaataaaactattgaaaagaaaaacaatctagaatttaaagaagaaatcgaactattaaaagcttgtgatgtagatggcattattacaactaattgggatacattaatagaatatatttttgaagattacagtacttatatagggcagcaagagctacttttttctaacacttataatattggtgagatttataaaatccatggatgtagcactaagcctaacagcctagtattaactgatgatgattattatgattataatagtagaaacgcatatttagcttcaaagctaataactattttcgttgaacatcctgtaatttttattgggtattcaatttcagacgaaaacatacgctcattacttaaatcgatatcactttgcataggtacagataagcttgaaaaattaagagacaacttgatatttctggatcgcaatgagccttctaatggtccagtcattgagacatcacacttacattttgataacgtccaggtgcctgttaaaattataaaaataagcgattactctcatgtttaccgagcaatacatagctttgaaagaaagctgcccgcgcgtgttttacgcttctgtaaagaaaaagtctatgaaatcgtacaaagtcaagatccacaaacaaaattggctgtaatagattatgataaaataaaagacaaagatgatattgaaattgtattagggttaggcgtgataggtaaagtaggtgaaactggctatagatcatttactttaaaagatatttttgatgacgttgtatataataataaaaatttctcgccagataagattctcaatgttacggtgaaacaaataggaactaagtgtcaatacattccaatatttaaatactttaaccaaataaatattaatgatgagaaaagttatattgaaagtggtattgatttagatttctatatacgaaaagacttcccaacaacattctgctctggtaacgagaaattatttgataaattcaaaaatatgacatttcgccaatttaaagaacaggcaagtgaaaatgccttccttacgctcacaccataccacccagatgtggatttagatatccttgaaaattatattaaagataactataaaaatctcatgaacaacaataaaaagtatttttttagaaaactaatctgtttctatgattggttaaagtacggctttatttaa

SEQ ID NO: 238125 - DNA, 405 bp, Klebsiella pneumoniae
atgcaaaaattaaccgttggtttaattggtaatcctaattccggcaagaccaccttatttaatcagctgaccggcgctcgccagcgcgtgggcaactgggctggggtgaccgttgagcgtaaagaggggattttcgccaccactgaccaccaggtcacgctggtcgacctcccgggaacctactccctgaccaccatctcctcgcagacctcgctggacgagcagattgcttgccactacatcctgagcggcgacgccgacatgctgattaacgtggtcgatgcctccaacctcgagcgcaacctctatctgacgctacagctgctcgagctggggatcccctgcgtcgtcgcgctgaacatgctggatactgagagatcccctcataatttccccaaagcgtaa

SEQ ID NO: 238126 - DNA, 228 bp, Klebsiella pneumoniae; identical to SEQ ID NO: 135073

SEQ ID NO: 238127 - DNA, 171 bp, Klebsiella pneumoniae
atgctcgtctggctttacgtcgcggagctttcttgccttaccacttttgcaccttatcaggacgtcaccatcatcggggagaaggactcctgcatcgttcttgtcaaccacaaccccaaatcccccccccgcaaattactgtatataaaaacagtgtttatactatcataa

SEQ ID NO: 238128 - DNA, 135 bp, Klebsiella pneumoniae
atgaactttgaacctgaaaattacagccggcgcgctctgctctggttcgcagctgtgatcgacattgccggttgggtcgctgttatcgtcgtgaccagggggatctgcaaactgattgagtggtggacggcatga

SEQ ID NO: 238129 - DNA, 1107 bp, Klebsiella pneumoniae
atgtttcaccgtttatggacattaatccgcaaagagctgcagtcgctgctgcgcgagccgcagacgcgggcgattttaatcatgccggtgctgattcaggtgctgctgtttccctttgccgcgacgctggaggtgaccaacgccaccatcgccatctacaacgaggacagcggtcgccacgcggtggaactcactcagcgctttgcccgcgccaaagcctttacccacgtcctgctgctgcaaagcccgcaggcgatccagccgaccatcgatgaacaaaaagctctgctggtggtgcgcttcccggccgatttctcgcgcaatctggataactatcaaaccgccccgctgcagcttctgctcgacggacgcaactccaacagcgcgcaaatcgccgccaactatctgcaacagattgtgaaaaactatcagcaggagctgctggagggtaaagcgaagccgaacaacagcgagctggtggtgcgcaactggtacaacccgaatctcgactataaatggttcgtggtgccgtcgcttatcgccatgatcactaccatcggggtgatgatcgtcacctcgctgtcggtggctcgcgagcgcgagcagggcacccttgaccagctgctggtctcccccctcgccacctggcaaattttcgtcggcaaggcggtgccggcgctgatcgtcgccaccctgcaggcaactatcgtgctggcgattggtatctgggcctatcagatcccgtttgccggctcgctgctgctgttctatttcaccatggtgatttacggtctatcgctggtgggctttggcttattgatttcgtcgctgtgcgccacccagcagcaggcgtttatcggcgtgttcgtctttatgatgccggctattctcctgtcggggtacgtctcaccagtggaaaacatgccgcagtggctgcaggatctgacctggataaatcccatccgccactttaccgatatcaccaagcaaatttatctgaaggatgcgagtctggagattgtgtggggaagtttgtggccgctactggtcatagcggccaccaccggctcagcggcgtatgcgatgttccgaaggaagattgcgtaa

SEQ ID NO: 238130 - DNA, 438 bp, Klebsiella pneumoniae
atgaagtggcaacaacgtgtacgcgtcgcaacgggtcttagttgctggcagattatgttgcatctactggtcgtggcagtactggtgatgggttggatgagcggcgcgctggtgcgcgtcggattgggactgtgcgtcctctacagcgtcacgctgctggcgatgctgtttttacagcgtcaccatgaggcgcgctggcgcgatgtgggagacttccttgaggagctcaccacgacctggtacttcggcgcggccatgatagcgctgtggctgctgtcgcgcgtgctgcacaacaacctgctgctggccctcgccgggctggtgatactggcaggcccggcggtggtctcgctgctggcgaaagataagagccgttaccctaaagcgttcgggctacaacaaggcggcaacgcagcgaatccccagaagcatagataa

SEQ ID NO: 238131 - DNA, 507 bp, Klebsiella pneumoniae
atgatttttaccaaaatcattaggggattcatcagcgcgctgcgctgccgtttggcgttgattgaggacggttgctataagatttaccagccgaaagtcgccagcgaagcgataaagcgcacttaccagcagaatgcggcgatgtgctttcatcctcagcgcccggatatctgttttagcaccgatattcgccagggcatctttgatgccggcacggtggtctactgggcgctgcaaattctcgcctggctgggcttcaatactatcctggtgagcggcctggatatgaccaactttaaccagccgcgattctacgaaacacaacaagaaaaattgccttcttacctggcaacaaaagtggataccctcgtcatgccctcctttgcgcatgccgcgcaggtactgcagcaacgccagattcgggtgattaatttttccccagaaagcgctgtgccggatactatcttcgaaaaggttgcgtttaatgagtactttaaaagtgagtaa

SEQ ID NO: 238132 - DNA, 978 bp, Klebsiella pneumoniae
gtgaccagaaccaatttgatcaccggctttctcggcagcggtaagacgacctcgattcttcatctgctggcgcagaagcctgcggatgaaaaatgggccgtactggttaacgagtttggcgaagtcgggatagacggcgcgctgctggccgacagcggcgccctgctcaaagagatccccggcggctgcatgtgctgcgtcaatggcctgccgatgcaggttgggctgaacaccctgctgcgccagggcaaacccgatcgcctgctgatcgaacccaccggtttgggccacccaaagcagatcctcgatatcctcaccgcggcggtgtatgagccctggatcgatctgcgcgccacgctgtgcatcctcgatccccgccagctgctggatgaaagagccgtcagcaacgacaacttccgcgatcagctagccgcggcggacatcattgtggcgaataaaagtgatcgggaaaccgccgaaagcgcccgggcgctggccgactggtggcagcgctggggcggcgagcgtcgcaaggtgtcggcaatccagggcaatatcgatctggccctgctcgatgagccacgacggaacaccgccccgctgccggcgagcgcggagcacgcccaccgccatccccccacttccggcctcgccgcgctcagcctggcggaacaccagcgctggcgccgacatctcaacaatggccagggctatcagggctgcggctggatcttcgacgcggagacggtttttgacaccatcggcctgctcgaatgggccaggctggcgccagtggggcgcgttaaaggcgtgatgcgcattgccgagggggcggtgcgaatcaaccgtcagggggaggatctccatatcgagaccctgagcgtcgctccgcccgatagccggatcgagcttatttccgcgaatgaagccgactggaacgcactccagaccacgttgttgaggcttcgtttaagttaa

SEQ ID NO: 238133 - DNA, 873 bp, Klebsiella pneumoniae; identical to SEQ ID NO: 14470

SEQ ID NO: 238134 - DNA, 432 bp, Klebsiella pneumoniae; identical to SEQ ID NO: 14471

SEQ ID NO: 238135 - DNA, 1353 bp, Klebsiella pneumoniae; identical to SEQ ID NO: 103805

SEQ ID NO: 238136 - DNA, 1650 bp, Klebsiella pneumoniae; identical to SEQ ID NO: 190830

SEQ ID NO: 238137 - DNA, 591 bp, Klebsiella pneumoniae; identical to SEQ ID NO: 14474

SEQ ID NO: 238138 - DNA, 285 bp, Klebsiella pneumoniae; identical to SEQ ID NO: 14475

SEQ ID NO: 238139 - DNA, 1296 bp, Klebsiella pneumoniae; identical to SEQ ID NO: 103801

SEQ ID NO: 238140 - DNA, 561 bp, Klebsiella pneumoniae
atgcatttatggtgtcttattttaaataagaggaaattcttcatgagtgtgccacaaacaaaagctgagctgcttttagctattgataaaagttttagtaaattaattagttacctcaacgcaatcccgccagaaatgacttcagataactcaatggatggacacgccaaaggaacgaagataagtgttcatgaccttgtttcatatctgcttggatggaatgctcttgttgtaaagtggatcacttttgatgctaaaggtctgcctgtcgattttccggaaactggctataaatggaatcaacttagtcttcttgctcaaaaattttactcagattacagtgagttaagttatgaattgttagtagctgaacttcaggctgtaaaaaatgaagttgtgaaacttattgatgagcgtaccgatgatattttgtatggaagactatggtacacaaaatggacgatggggagaatgatctcatttaacacatcttcgccttacgccaacgctaatggaagattaagaaagtgggcaaaaaacaataagatcagtttaaagtaa

SEQ ID NO: 238141 - DNA, 705 bp, Klebsiella pneumoniae; identical to SEQ ID NO: 14478

SEQ ID NO: 238142 - DNA, 537 bp, Klebsiella pneumoniae; identical to SEQ ID NO: 190836

SEQ ID NO: 238143 - DNA, 2055 bp, Klebsiella pneumoniae
atgaaattatttctgtgcgaaaagccgtctcaggccaaagatattgcccgggtgatcggcgctcatcagcggcgggataatttttttcagggaaatggcgttcaggtcgcctgggcaagaggtcatctgctggagcaggctgaaccggaggcttatggcgcacagtttgcggccccctggcggcagagtgccttacccgttattcctgaacagtggaaaatggtggttaaaaaagacgcggtttcgttgtttcagaccataaaacagttgctcagtcaggcgacggaagtggtgattgccacggatgcggacagggaaggggaagtgattgcccgtgaattactggaggcctgtcattaccggaaaaaggtacaacgtttatggttgtctgcactggatgaggcgagtatcaggcaggcattaaataacctgttacccggcgagaaaacggcctctttatattcagcgggattagggcgggccagagcagactggcttatcggtatgaacatgacgcgtctgtttaccctcaaagcccgggaactggggtttggtgggatattgtcggtcggacgtgtccagacgccgacactggccctgattgtccggcgggaaagagaaattacgcactttgtttccaaacccttctggcgggtgaccgcctcgttgcagcatcaggggatcatttttcaggctcactggcgacctgcctcgcagtattgtgatgatgaacatcgttgtattcacgttcaggccgctcaggccgtagagcaactgtgccggcaggcagggaaagcgacggtgtgtacagtgaatgaaacgaaaggaaaagccttgccgccgttgccgtttgatctcgggacacttcagcaggcggcctcaaggcgttgggggtattctgcggataaagtgcttgaaatcgcgcaaagtctgtatgaaaaacataaggccaccacgtatccccggacggactgcgggtatctgccggtgtccatgcgtgccgacataccggttgttttagatgcattatcacaaagcgatccggccttacagaatgtgctggcacaattgcagccggcgcgaatttcccgggtctggaatgatgcaaaaattacggctcaccatgcgattataccgacccggcagacacctgatttgaacgccatgaatgaggctgaactgaatgtctataaacttatccgtgcccattatctggcgcagtttttgccggatcaggaatgggatgcaacagaggtgtttttagatataggcggacaacaatttgttgccaaagggaaagtcgaaagagtgaagggctggtctgtattatttgtgaaacatgaagacgatccgccagtaaaagaagaggcagaaaccgggctggaagccggaacagaaacattgccgtcccttcacgaaggtgaattctgtgtggtacaggaggcaaaggttgtacaactggcgacctcaccaccgaaaccgtatacggatggtacattgattgcggccatgaagaatgcgtcctcctttattaccgatccgacattaaaaaaagtcctgaaagagaatgcggggctggggacagaggcaacccgggcagggatcatcaccacgctggaaaacaggaaattgattgtcaggcagaaaaaaacactccgggcgacagacaccggttgtcagctgattgatgccctgccggcagcctgtacagatccgggaatgacggcgttatgggaacaatcactcgagcaggttgcacagggaaatctgtctctggatgtgtttatgcaaaagcaaatcagctggttggcacatctcattaaaaaaggcggggaaatgccgctggcgctggatctgccaccgatgccatcctgcccgtcgtgtcatggaaagatggtcttacgggagagcagtaaaggccgtttctggagttgtcagcgttatccggattgtaaagggagtgtaccattaccggaaaaaatgcagggggttacccgggggatgaataaaagaaagaaggccgtgaagaagagcataacaggactctttacctga

SEQ ID NO: 238144 - DNA, 468 bp, Klebsiella pneumoniae; identical to SEQ ID NO: 103796

SEQ ID NO: 238145 - DNA, 924 bp, Klebsiella pneumoniae; identical to SEQ ID NO: 103795

SEQ ID NO: 238146 - DNA, 333 bp, Klebsiella pneumoniae; identical to SEQ ID NO: 190840

SEQ ID NO: 238147 - DNA, 312 bp, Klebsiella pneumoniae; identical to SEQ ID NO: 16660

SEQ ID NO: 238148 - DNA, 1203 bp, Klebsiella pneumoniae
atgttgatgcagcatatcggtgtcggctattttgggtattaccgagcaactgcttatgcgatgaaacactctcttatgcccgagattgcgaagttaagaatgaaggccctgaacttctgggataagcatggtatccgtgccgcagctgatgcttttggcgtatcaacacgaacgctctactggtggcgccggttgcttcgcaccggtggtcctcaggcgcttattccaagaagcaaagcccccctggttcgtcgttcaaggcactggcaccctgatgtgctcaaggaaatcaggcgcctgagaactgagctacccaatctcggcaaagagcagatttttgtcaggctgaaggcatggtgtgaactgcggcattttacctgtcccagcaagtcaaccattggaaggatcattgccggagctcacgataaaatgcggatggtccccgttcgcctcagtgccagaggcaaagtcaggttgataaaaaaacgctctgtgaagcccagaaggccgaaacagtaccgcccggtaaaaacaggcgaactcatagggatggacgcgattgaactcagaatgggggatctgcgccgctatatcattaccatgatcgacgagcacagcgactacgcgctcgccctggcagttccttcactcaacagcgatatcaccagccatttcttcagcaaggccacaaaactctttcctgttgctatcaaacaggttgtcactgacaacggtaaagaattccttggaaactttgataaaacgttgcaggaagcctcgattaaacacatctggacctatccgtacacaccgaaaatgaatgcgacctgtgagcgatttaaccggacacttagagaacaatttattgaattcaatgaattgttgctttttgaagacctgagtttgtttaatcaaagaatggctgaatatctggtgctgtataacagcaaaaggccacataaatcactcgaactaatgacgccagtggactatattttacgtgagagtaaaaattgcaatatgtggtggacccatacatctccttgccttacggcagctaagaggctaatctgttggtgtctagtcaagcagatggcctcgtgttgtaatgaccccaaaaagttggacagaataatcgaggcttctcagaaagagtccatgaaatacatgggcttttttttgtttggcgttaaagctaaataa

SEQ ID NO: 238149 - DNA, 723 bp, Klebsiella pneumoniae
atggatgcagtacttccgccaactcctcgccctgaaatgcaaatccggccaactggcattaggcgaccgcttaaagtcaaggatgccccgtggagtgaagctgaagaaatgtggacaaatttggttgacgaggatgttaaaccctggatagatcgtgccgacgaattcgtaatagccgaggtttcacaattcaaaatgcatgatacccggcgtgctgaatatcaggtctatcgtattagcgcacctcaaattcatatttctgttgccaaattcatggcatggtatcaaagtttgcccgctgtcgtttggctgggtaagatgatcccactcgacgaagacctcgcaccgacaatagtcagacgtgtagtaagctccatcgggacaatgtcttcgccgggatatgccattacattatgtcctaatatccagatgcttctgggatggcatgaatccagcgagatgcctaatatttataccgacaaggactcaacaatcgtagcaagattagtgaactggcgagacgctgggccagtggatattgatgatgattatatatggggggaaggttgctatctgacgctttccaaagcaggcctgatacaaatcaagactctgttcggcgaattcaccgtgcgtaatttcgcaagcagggctgttcggcaattgcgacaaggcgaagcgcaaatgataaagacagctcagaatcagttcccgataccgtag

SEQ ID NO: 238150 - DNA, 1362 bp, Klebsiella pneumoniae
atgaactgctatgtaaggtatatcggcgtcgttgacaaagacgaccggattcatgctgtggagtttactcggggtctgaacatcattaccgggaagtcttcgacaggtaagagtgctatcctggagatcttcgactattgcctaggcagcagcgaagacactatccctgatggcaagctgaccgagcgtggcaaaacatttttcaccgtcctgcaattccctacgctgactttggtaacagggcgtacagcagcttccaaacgctgcttcttgcgtgaagtcactgggagagaggcggacaagattcttgaggtcatggggcgcgtcgaatacttcttcgatgaacgatactatattcacaaagatcagttcttgaagagcctgggcaagttcttcggtatcacgatggagaacattgataaagacccaatgtataagcaggtcacaggggctaaaggtgcgacgccgtccgtgcgcagcttcccgtcatttatgctgcagcaccagaatctggttgcgaataagcatgcgattttctaccgtttcgacgagaaggttaaacgagaccaggcgatcgaccacttcaagattctcatggggatcgtgaaggaagattactttgatgtgtataaagatctgaccgaggcgtcctatgagcttcggcgtgttgagctgaaaataccgaaagacgacaaagcacgagaggtggccatcgcgaaattcaacagactgctggatcagtaccaagctcttgcaggaaagcccctcttcgacatgacggcagatgaaattttcctcaagcccaagcaagcgcttaggcttatgctcgctaccccagtttacgtggatggtctagccgacgattacgagaaaaccctcaactccttgcgtgaccagaaagccaagcttgtggccgaactacgctcagccattggccggctgaacctactggaacggtctgtcgagcaggtcaaggggatcggcacctcgtacgcatcactgacagtcccacgttccacgagctttgctcatacgttctgccccgtttgtgagtcgcattccgacattcccgaagatcaggcgaacaaactcactcaggcgattgagtggctcaacaccgagttgaggctttcctcctacgcccgagagagcttggggcaggagagtcgtgatctgagaaaggagatcaaggaaattcgactgaagctgaagagcgttcaaacctcgctcaaacctttcgaggagcatgataggagggttgcagaagcaagctcgctcgaagatgcgccgaaaaaggccaagctgttacttgagattgctatagatgagttcatcgagaatccgcctgaagtggtttactga

SEQ ID NO: 238151 - DNA, 462 bp, Klebsiella pneumoniae
gtgaacctgaacgctgccgactacatctataccttgcgccggacgccatttgctctcgcgcctatcatccactctttctatgaccactgggatccgacagagaaggacatccttcttagctacctagtgctgccgctagtgacatacaagcccatgcataagttcttgaactatgccaagaaaaacagctcattgcgcacgctaatgcaggagccaagccgtgttcttggcttggaggccaggatcgaggaatacaagccaatcacccatgcttccctgctcatccttacctccgagaaaagcatcaaggtcaatgacgacatgtcggtggaatcccaaggtaagatcagggaagaaaatgctaatgcccagctcatcaagtacgcacgaaagctagctattgtgtttaacggtgaaaatgttgtttctgtttacagatcgttggggttgaaatcgctatga

SEQ ID NO: 238152 - DNA, 1170 bp, Klebsiella pneumoniae
atggataaattgtcagagaaattgccgtttgatgcttcgaagcttttcgaagcccttacgtatcagttagttgttgcgcttgagtactgccataagctggagaaggggaaacgtctctgggtcgaggtgtacggcgatgtaaccttggaggatgtggctcaggtggaggtcaagctatatgccgataccttgagagatggccaccagaacatctggaacaccttgaataactggttgaataaagcgtttgaccataaggcctacgaaagcctgatactcttgacgaaccaggagtactcacccaagtccaccctgaccgactggaactgctccaccgctggcgaaaagctcgctttactgcttgcgatctacgacggtgccgagcagcgctttgccgcctctaaggcgacggagccatcggaaaccctacagttgcagcggtcggtcatggatctggcaatcagagacgatttgctggaggtgctggagcgcgcggtattcatcaccggatcaccttcgctcgacgagcgaatccatgcctataaggtggacaaactcagagtcatacgggagtcgaagcagcagaccttcatggatgacatcctgggcttcattggcagctcgcggtacatcaatactggctgggagatcacctgcgaggagttcaccgccaagtttgttgatctgaccaagcgctacatgaaacattcgagcatctttccggaggtcgataccgacgctctgaagcagaagattgatctagatgaaattgctgaccggcctttcgtccagaaaattcgagagatcggtggtgaagcacggatcaagcaggccgctctgcaattgctcattgcgggtgaggtcattgatgagctgtacagcgacaacttggcctctgaattcgacgtcaagcgctaccagaaaaaccaccttgatcgtcatctggacggacgcctgagtgcgatggttgattgcatggatgagacatgtcccatccagttgcagcgccaatcgctgaaattcttctacaagcagcacgccgaaaccgtggtgcaattcaacacctttgaagatacgacggcggactttcgaaacggcatttaccacatgctggctgatgtgaaaaccgatgacgaaaacaaaacgttttactggagactatggccgtga

SEQ ID NO: 238153 - DNA, 1074 bp, Klebsiella pneumoniae
atgcaaggtttaaattatctatcggaagtggaaaaactaaagctatttaaaaacattcgaatcggaatgaattctgaggaagagtttgatgttttccttacttctgttgggaatgacaaaaataaagatgaaataaaaaggcgaattaacggtttatttttagaggatgaattcgctttattgtgcttttttatggaagtatgtacaagtttagcatctttaggccaatcaccagtaaataacactggcagtaaggtaccagattatctggccagttttaacatgcccaagggtaaggaattaaaatgttttattgaggtaaagacaagcaatgctttagaaaccaaaaaaatctcaggatcttttttaaataagtacagtgagttctgtcacagatttcgataccctttatttattgcatcacgcattcatcaaaacaaccttcttttctggatattgcaaagtgagagtgagtttgtagattctgggcgaaaagtagatgtgcgtgatttgacgaataatagtgggtgtattctcctagatgattggtttatttccgcaattagtgccttaaaagtgacaattcattttagcgagcatcctttagtatctcaggccagatatgaggacaaggggtatttacatcgaattaccgtatcacaggagtatggtggaaagacttacgagtttaatcttaatgagaaagaatttgttttaaatgccttccttgatgagtttcagtctaatgatgtttattataaagaaaaaaatatattagtaagagaaatacctgagcattctggtgatctattgagcagtttattactaaggatgaatatgcgagtaattgattcagccagcccagacgacagattgaacgcaagtagaatgttggtaaaaatagaatcaggctacagctcttacataaacaaaagttatttgaaaaacataatcaatatattaaataaaaaatcaaacctaagcggtgccggagttatttttgcaccactgggacttggtagtgaccaagagagaaaaaagaaaatgggcgaactacttaggctttgtagatga

SEQ ID NO: 238154 - DNA, 2649 bp, Klebsiella pneumoniae
atggcttctgcaagacaagattttgatcggtttgttagctgggtttaccaatctgaggcaatcccatcagatgtccggcaactggctagcctgtgtcttgcaaactttgatgctcttgcaggaacttccagaaatcgcagccagcgctccatctatctggcgcagttgatgcgtcagcagttggcgcagccccccgcagagcctcccgcaattgaagccaatattgaggtaggtgaatggccgtggtcacgcctgcataggctgaccttaggtcccttccgtggtttcagaacaccagaatcctttgagctcgataaacagataacgctgctttacggcccaaatgggagtggaaagaccagcctttgtgaagcgttggaatatgccttactgggggatgtagaggaggcaggaaacaaacgcattgctgcacgaacctacctcgcgaaccttcatgcaggtcgttctgctccgcctgttcttaaagctctcgacaatcgtggccaggagcttgatgttgtttcaaatccagacacatttcgcttttgcttcgttgaaaaaaaccgcattgattccttctctcgaatagccgcccgtcccaatactcaacgtgccgagcttatcgccacactatttggcatggaccagttcagtgacttcgttagccacttcaatgagagcattgataaccagctcatattgactgcgaataagcaggccatgcttgaaacgcgccgcgccggactgctgacagatagacaactggtggacggcaaagccgaagcattcatgacactcatcaacgaagagtcagctttagctgaaagctatgcaccaggaactacgtacgccgacctgaaagctttgttcggtagcgaagacgcgccaggacgcctgcagcaactggacaccattctggaggccgttccacccgccattgttggtattaacggcccagcccttcaggaaaactatgacagggctgaggcacacaagaatgaattgaaccgcatcgccgccgatctaaaagctcaaagcgaccaggtatctttcaaaggactttacgaagccgtactagccctacgcgagcccgtgggggatcgctgtccggcgtgcgataccccactcactggtgagaaccatgtcgcaaacgatccgtacgaaaaagccacaaccggactgcaacagcttgaagcactagcgctgctccaggaaaatcaaaaagcagcggagattgaagttaaccgcatctcccgagaactcaggctgatcctcaaaaaaatagagcgattcattggcgctgagcccgtgacaccggtaggggccttcctcgctgcattgcccgatgaacccgcgggattctggtgggaagttattgcgcctgataatgccgggattattccgtccttggcacaaatcatcgaaatagcagatcggattgcggcgcaagatactgcgacaaaagcgtcccaacagggacgccagcagttaattgaggaacgaaaccggctcagggatttccagcttcgcgtacaggtgcaggaccaaaaacgtcaacaattgaaagagaacattgacgccgcaggtgctcgtattacagggtttgatgaaacaaacgcctctttaattttggaagtagcgcaagagcagcaggacatcgtcagggacacgccgctaaagacaacgtatgaccttttccttgaagcaataagatcgtaccgcaaccagctgcctggacagctcatggcgggacttaacgagtcagccatgacgatctacaactcatttaaccgcaacgatcttgacgcagataagctcgcagcactccatttgccattaacaggtgaagaaaaaatagaaatttcatttcggggtgcccctgaacgccgggtagatgcactgcatgtcctgagcgagggccatgttcgctgccttggtctcgccattctgctggcgaaggcgaggagcattgcatgcccactcattgttttcgatgacgctatcaatgccatcgaccacgaccaccgtggcggaatacgagaaacgatttttgaaaacgacacctttgaaaatactcagcttatcgttacctgccacagcaacgaattcatcaaagatattcagcaacatcttcccgtaagacggcggaataactgccgcgtctaccttctcagacatcatgatggcaattatcaacctcgcattcgcggtaatgtggcgagcgcaaactacattgccagagcaagggcgggccgtgacgttcttaatgaccgggaggcgttagccgcttcccgacaggcattagaaatgctttcagaaaaggtatggaaatggcttagcagtcatgatcagggcgtcctcacattacaaatcacggcggccggtgccgagccccagctccgaaatctttgcgactcgctactgaaaagacttagaagtgctgtcactttccagcatgccaataaagagccattaattgcagcctatggcacaattctgggcattccagaacagaatctggtttggacatatctgaacaagggaacacacgaagaggaaaatcgtgatgactttgatggagagcatgttgagtctgttattgctactcttgaagccttggattcgctggatttgcgcctcggaagatag

SEQ ID NO: 238155 - DNA, 2145 bp, Klebsiella pneumoniae
atgacaacgagtatgatatctcatcttgtaatagtaccggatgacacgcgtgcaaggcgaacgactttctttcagggtttctcagatttttggtatccggactatttagcaatattaaaggttctaacccaatttccacatgaccttggcgacatatactttaccgggggagaatacgtactgactaaagccataggtagcccgcttcaaatacagacgttacgcgcagaccttgttgaacagtatttatccgattgtgaaacccggccactcatcgtgtggagtacagcattaacggtagatgtagttaaatctgccatcggacaaaaaccaataactcatatctcaacagcccaacaagagggtgttatacatgttgactcgttgaaccacgactctgttctggcactaatttctggaattgtagatgcgttggcagaagaacacgatgaatttagggagttcaaaaaagttgctgagcgtaaaagagcggaagccacacaagaaactctcactgtcaatgcaaaagggcataactgtaccgaacctatgctggatgttttactcagttatggagcacaaattgacgttacgccaattaaacctgcaggcgatacatctgaacatattacagggatgctggaactgggcgcactgattgacggattgcgtccagagcaaataagcgcgtcaccattcagaaaaaatgatgtaattattcactgcccctcggtttacacttatctgtatcgtgcagacagtgctcactggcaacggctcaacaggcaacttaataaacctaaacgtaattttctccggcgcggactgataagaagcagcggttatggcaactacactcttcagatggatgagaaagatcttttcaatccgtatgaggacccaatattaaggccgttgttatgtgaccgacaaatcgagttgaaacttttcacaacgatcatcgcacttgtcgccgtcaaccaattctccccggcatttagacttccaaatgatgtaatgcttcatcatgataagcttcgggacattggaaaacttctttgctcaaacgacagaaaatggcgtgaaaaactcaacacaaaaatgcgggaatatggccaactgcttaagacagacattggtgatgctctgttagccaatatattcagtgaaagagagaaatttttagccgtatgcgattttccagttgaatgggtaccggttgacgaactccccataatgttcaggtacgagttatcccgggtaccttcaacccctggtaatgtcgctctggacgtattaacttcccgaccgaagtccatattcagatataaggacttatgtaacgtcctcataatcagatcctttgctgacaacgatccgatcaagaatcatctgtcggatatagtgcaggcaagagagcaagcccaaagacttcctggcatgcacattcagatagtcgatgttaatacacgtcagggaattgtcgacgcgctgaacgcatttacaggattaatggttattttcgattgccatggtggtcatggcggtgaaacagaatctgcctggttaactataggaaatgaaaaactgagtgtctggcatctttatcaggaagctaagatcccccctatcattgttctggcagcatgtagcacccatccagccgagggctcgcatgcctctgtcgcgaatggttttctcgaatcaggtgcatttagcgtcatcggaacgtttgcgccagtcgactcttctcacgcagccgtttttgtgacccggcttctggaacggatcgcaatttaccttccgttagtactaaaacggagagcgtactcctggcgtgagattgtgacggggttgctgagaatgtcatatgtacgtgatgttctggatggacttcgggacagactcggagttattaatcagcagcaatatgaaaaaattcatattcaggccaataggctcataaatactcatgaggacaaaaattggtttgagcatttcagatctctggtttcagaggaaactgaattagacaaagccactgaaacaaaactttggaatgagcacttccagtttgtagagactatgctttttgttcaactcggcagaccagaaaatgtatttattgctatcgagggtgagtga

SEQ ID NO: 238156 - DNA, 903 bp, Klebsiella pneumoniae
atgtcgacaaatcagttttatgaactctctcgccagctcgccgcattacgaacggatgctgacaatagccattccgttatcgcggaactgaccctgctgtgccgcgaaacaataagagcctcatcccctgaagagtgccttcgcaccgcagataattgcctgcatgtaatcagtcagtctgctccgctttttgcacttgccctctcctcctggctgaccgataaagagtgtattggactggcgaaagccctcgcgcatgaggctagtgtgtgccaccttcaggcagcgaacccacaggcgtacgacctatcctccgtcgatgagtcacgcgcgttactggccgcgtctcgactctgcgcactgcatgtctcccctgccatctcactcggctgggctttaagcctggcaaccgcttaccctgccagcgccacggcactaaatgcggccggcgcactcctgcagcatcatatggaagagtatccctggaccacgcagcggctgcttgtcagccctgaatccccgtttagctcgcttgaactgtcacacaccgcgctagcacagctggaacagcagcaaaaccatctgaaggcgctaccggtgcttcgtgagcttacgatgacgcctgagatgcgtctgatgtatgccagtctgaaacgcagtgagaaccgggagattcaacggcactcggaagagcactccatttttggtcagttcgtcacaaagcaatatttcaaatacgccaacaaaactgccgtcgagttttccgtgggtgacaatgtcaaagaaacctcgctggaaatgacgccctttcaaattgaagttgagttgcctctcacctggcgcaccgatccactttcaggtgagctgaccagaaacaggctgtggaaaggagagctggaatga

SEQ ID NO: 238157 - DNA, 612 bp, Klebsiella pneumoniae
atgaatgggctatacaacgtattgaaattaaagtgtgagcaggaaattgataggctggctgggtatgagggttttcctgtcgaaaaaattaatgcctatgacactgaagcgcagcaatggatcgaaatacaaagagagacatacggagataagaattttttgaagatgagtgctgcattgcttaaatctgaagctgcagatttacggcacaaagcatggtttctcaatgaactcggacactacctgcttttgtccttatgccactatcacctagctttattcaagcaagatagaggcttgttagctgaagcatgtgagcatttacaagatgcgcattactattgcggggcaatggtcgggatgtatgagtattgtgattggcgaaattgtcaggaagaagaggaaagtaagaggatagaaaaagcaacaaaagcaggagggagcagagggacaaactatgctcctgttaaggttgagcttatccgtctcctaaggttaagggcgtcagaaaataaatgggaaacagttgaggatgcaatcaagggagtctatgaagggctttgcacctttattgagaaggagtcgaaggcgtccggaaaaaaactttgttga

SEQ ID NO: 238158 - DNA, 219 bp, Klebsiella pneumoniae; identical to SEQ ID NO: 103816

SEQ ID NO: 238159 - DNA, 2082 bp, Klebsiella pneumoniae; identical to SEQ ID NO: 16663

SEQ ID NO: 238160 - DNA, 2370 bp, Klebsiella pneumoniae; identical to SEQ ID NO: 190919

SEQ ID NO: 238161 - DNA, 177 bp, Klebsiella pneumoniae; identical to SEQ ID NO: 14595

SEQ ID NO: 238162 - DNA, 348 bp, Klebsiella pneumoniae; identical to SEQ ID NO: 190917

SEQ ID NO: 238163 - DNA, 1065 bp, Klebsiella pneumoniae; identical to SEQ ID NO: 103821

SEQ ID NO: 238164 - DNA, 303 bp, Klebsiella pneumoniae; identical to SEQ ID NO: 190916

SEQ ID NO: 238165 - DNA, 135 bp, Klebsiella pneumoniae; identical to SEQ ID NO: 103823

SEQ ID NO: 238166 - DNA, 144 bp, Klebsiella pneumoniae; identical to SEQ ID NO: 29491

SEQ ID NO: 238167 - DNA, 354 bp, Klebsiella pneumoniae
atgttaaaatttatcttacgtcgctgtctggaagcgattccgacgctatttattcttatcaccatctcattcttcatgatgcgtctggcgccgggaagtccttttaccggggaacgcacgctaccgccggaagtcatggcgaatattgaagcaaaataccatttaaacgaccccatcatgacgcagtacttcaattatctgaagcagctggcgcatggcgattttggtccctcttttaaatacaaagattattccgtcaacgatctggtggccgccagcttcccggtttcagcgaaactgggcttcgccctgagagatcccctcataatttccccaaagcgtaaccatgtgtga

SEQ ID NO: 238168 - DNA, 1959 bp, Klebsiella pneumoniae
gtgctggatatcgccgaaaagcagcaggtgcggatcgatatcgacgccctcgccgcccgtctcggttgcccggtcattccgctggtatcgactcgcggacgggggatcgaagcgctgaagatcgccctcgaccgtcatcaggcgaacagcgatcttgagctggtccactatccgcagccgctgctgcgcgaagctgacctgctggcgcagcagatgtcagcgcagatcccgacccggcagcggcgctggctgggtctgcagatgctggagggcgatatctacagccgggcctatgccggcgacgccgccgataaactggatatcgctctggcgaatctcagcgacgagatcgacgacccggcgctgcacatcgctgacgcgcgctatcagaccatcgccgccatttgcgacgccgtcagcaataccctgaccgccgaaccaagccgcttcaccgccgcgatggacaaagtgatcctcaaccgcttcctcgggttgccgatttttctctttgtcatgtacttgatgttcctgctggcgatcaacatcggcggcgcgctgcagccgattttcgatgccggctcggtcgcgatctttgtgcatggcattcaatggctgggttacaccctgcacttcccggactggctgaccgtgttcctcgcccaggggatcggcggcggtatcaacaccgtgctgccgctggtgccgcagatcggcatgatgtatctgtttctctccttccttgaggactccggctacatggcgcgcgccgcctttgtgatggatcgcctgatgcaagccctcggcctgccggggaaatccttcgtcccgctgattgtcggttttggctgcaacgtgccgtcggtgatgggcgcccgcacccttgacgcgccgcgcgagcgtctgatgaccattatgatggcgccgtttatgtcctgcggcgcgcggctggcgatcttcgccgtcttcgcggccgccttctttgggcagaacggcgcgctggcggtcttctcgctctatgtgctgggcattgtgatggccatcctcaccggcctgatgctgaagcacaccattatgcgcggcgaagcctcgccgttcgtgatggagctgccggtgtaccacgtcccgcatatcaagagcctgattatccagacctggcagcgcctgaaaggctttgtgctgcgcgccgggaaggtgatcgtcatcgtcagcatcttcctcagcgcgctgaacagcttctcactgagcggtaaggtcgtcgacaacatcaacgactccgcgctggcctcggtgagccgggtcattacgccggtgtttaaaccgatcggcgtgcatgaagataactggcaggccaccgtcggcctgtttaccggcgcgatggcgaaagaggtggtagtgggtacgctgaacaccctctataccgccgaagatatccagaatgaggagttcaatccgcagaccttcagtctcggcgaagaactgctcgccgccgtcgatgagacatggcagggactgaaagacaccttcagcctcagcgtcctggccaaccccatcgaagccagcaaaggcgatggcgaaatggccaccggcgccatgggggtgatgggcagtaaatttggcagcgcagcggcggcatacagctacctgatcttcgtcctgctctatattccctgcatctcggtgatgggcgccatcgcccgcgaatcaagccgcggctggatgaccttctccatcctgtgggggctgaatatcgcctattcgctctcgacgctctattaccagaccgttagctttagcgatcacccgcgctacagtctggtgtgtatcctggcggtagtgttgttcaacgtggtgctcttcggcctgttgcgccgggcgcgcagccgggtggacgtctcgctgcttgccacgcgaaaaacgccggcctcctgctgttccagcccggctggcgattgccactaa

SEQ ID NO: 238169 - DNA, 165 bp, Klebsiella pneumoniae
atggggccggcgaccgcgccgcccagcggagagcctgcgctgagaaagccgacggcggtagccgcttgctttttaggaaaccagccgttgatcatcttgttcgccgatgcgcagatcgggccttccgccatcccgaaaagcacccgcagcaccagcatggaataa

SEQ ID NO: 238170 - DNA, 1032 bp, Klebsiella pneumoniae; identical to SEQ ID NO: 189859

SEQ ID NO: 238171 - DNA, 597 bp, Klebsiella pneumoniae
gtggtgatcggcgttgccgccggggtgatagccgccctgaagcaaaatacccgctgggactacgcggtgatgggggtagccatgaccggcgtggttattccgagctttgtggtcgcgccgctgctggtgatgatctttgccattaccctgcactggctgccgggcggcggctggaacggcggggcgctgaaatttatgatcctgccgatggtggcgctttccctggcctatatcgccagcatcgcgcgtatcacccgcggttcgatgattgaagtgctgcactctaactttatccgcaccgcgcgggcgaaggggctgccgatgcgtcgcattattctgcgccatgcgctgaagccggcgctgctgccggtgctctcctatatggggccagctttcgtgggcatcatcaccggctcaatggtcattgaaaccatttacggcctgccggggatcggccagctgttcgttaacggggcgcttaaccgcgactactcgctggtgctcagcctgacgatcctcgttggcgccctgactatcctgttcaacgccatcgttgacgtgctgtacgccgttatcgatccgaagattcgctactga

SEQ ID NO: 238172 - DNA, 1434 bp, Klebsiella pneumoniae
atgataaaaattgcgcgcattgccgcgacgttgggtttgctttcctccctgggagcccaggcttacgcggccgggttagtggtaaatgacaacgacttgcgtaacgacctggcctggctttccgatcgcggggtcatccatctgagcctgtcgacctggccgctgagccaggaagagatcgcccgggcactgaaaaaggctaaaccgtcctattcttctgaacaagtggtgctggcgcgtattaaccagcgactgtctgccttaaaagcggatttccgggtcaccggctacacttcaaccgatcagccgggcactccgcaggggtttggccagacgcagccggcggataactcgttaggcctggcgttcaacaacagcggcgagtggtgggatgttcacctgcagggcaacattgaagggggagagcggatcagcaacggatcgcgcttcaacgccaacggcgcctacggcgcggtgaagttctggaaccagtggctctcctttggtcaggtaccacagtggtggggaccgggctatgaagggagcctgatccgcggggatgccatgcggccgatgaccggtttcctgatgcagcgcgcagagcaggcagcgccagagacctggtggttgcgctgggtggggccatggcagtaccagatctccgccagccagatgaatcaatataccgctgtgccacatacaaaaattatcggcggtcgttttactttctcacctttccagtcactggaattaggcgcatcacgtattatgcagtggggtggggaagggcgtcctgagtcatttagcagcttctgggatggcttcactggccatgataataccgggacggataacgaaccgggtaaccagctagctggttttgactttaagtttaaactcgagccaactctcggctggccggtcagtttctacggacagatgattggcgaagatgagtcaggatatctgccttcggcaaatatgttccttggtggagtggaagggcaccacggttggggtaaagatgcggtaaactggtacgtggaagcgcatgatactcgtaccaatatgagccggacgaattacagctatacccaccacatctataaagatggttattaccaacaagggtatccactgggggatgcgatgggtggggatggtcaactcattgccgggaaggttgagctgattactgaagataaccagcgctggagtacgcgcatcgtttacgccaaggttaacccggagaaccagtcgatcaacaaagcattcccacatgccgataccttgaaaggtgtacagctaggctggagcggggatgtttatcagtctgttcgtctgaatacctctttgtggtacacaaacgctaacaacagcgacagcgatgacgttggggccagcgcagggatagaaataccgtttagtttataa

SEQ ID NO: 238173 - DNA, 1161 bp, Klebsiella pneumoniae
ttgagacaacctaatgctactccttttgatgatggagacttaaattcagcatacttttattttaatgttccagataaagatttttcagaacttgttaaaactacacaaaatgacttaagtgattcaggctatgaaatagtctcaatcggaagtaatagtccgagaccacaaacgtcgagagaagtccctgttaaaaaagaagtgtttgtttctaaagtcgcagaaactttcggcgaagaccttgaaatactagaccaaatactactttcaaatgtgcctcttttttctgatgagagcctccgttcaaaagggaaaatgcatacaagagttttagatttagctaacagttgtgaagatttggatcttaataaagaagaaacaaaggatgacaatgctgatatttctgtctgggaatatttagtctcacgcttaggaacttatgataaccgtatagcccgaaaatcagggacatgttttactccttttgtaaaaaatgatcctaagatgaaacagcgaatgcaattcggctcagatgcaatgttgcaaatcaataataatttatcaaatatcattcgtcttcttaataatgagttccatctcgaatatgaatacgatgacatatatgtggtaaagtcattcaatttagtttcaccagactatcaatatgaagacttaaataaaagaaacagatataaagttaactcctttaaaaatgccctgcattcagaatataatggcctaaataaatttgagttagaaattgcagaatctattgattcattgggggttgattggtgcagaaacccatcaaaaacaggttataacattcctattcctgaaattggtcaagggacttctaatttctttcctgattttttattatggggtaaaaaccaagtatgggctttagatccaaagggttcacatttaattaatgatgcgatttttctaaaactcatggctatatcagatatcaatgataaaagattgagattaaaggttggatttgtattagaaggtgaatatatgcttggcatcaataatcgccctcaacttcagagtaaaaatggttgtactttaatttataaaaagaacgcatctatcagagctaaatcatacccgacgtcaaaagagctaactaaagatttgcttgttttatag

SEQ ID NO: 238174 - DNA, 600 bp, Klebsiella pneumoniae
atggaatatacattcaatatttttgaaaaaaccgatgaaaaaaatcgcaaccattattttgttttcgattcattcaatacttgtcttggatatttcaataacattgatttagcatatggtttgataaatacctatttaaagtatttagaagaaatttataaagacagcccacactttgatcttgaaaaacaaatagtacaagtttcagatgaaattaaaaagcaaaataataaagaaattgacgatttaatatgtattgaggaaataatcacctctctgttttacatagaaaaaaacaagaaaaaagaatttctatttactgaaaaatgtaaactattctctactatacctactttactaaataaaaattttacagttgttttcgatagtgaagatatcaagagtttgcacaagcaatttctttccacattgattaaaagaaaatatgctaacggtagtactgttgaaactttgaaaaatgctctttctgacaaatttgaagaaaaggagcttgctaactatttcccatttctaattcaagaaaatgaagtagatgataaatcaatcaaattgatgaaacaatcaaaactaagttcataa

SEQ ID NO: 238175 - DNA, 1197 bp, Klebsiella pneumoniae; identical to SEQ ID NO: 199095

SEQ ID NO: 238176 - DNA, 2331 bp, Klebsiella pneumoniae
atgatttttatacaagaagtgttacatgcccctgcacaatcactgataagcatctctttattacaacaaaatggtagtgatcctgctgatgaattattaacagcaaaaaaatgcaaagatatctttagcgcttctactgcgacttataaaagtgaaggagttaacggcgaaatattgacacagttataccaagcaccagaaaaaatttatttaccagataaaaataagctagagcatgatttgcgccaatttttaccagactatatgatcccaaaacatatttattttctaactgagttccccttaaccgcaaatggcaaaatagataaccaatcattaaaattgtattgtcaggaataccaagaagaatacctaaatcaacaacctatcaatggtaaagaacagatcatcataacaatatggcaaaagctccttggcaccaacaagatacaccgtcacagtcatttctttcgtgaagggggagatagcctagttgctattcgattgatctctgatttaaaccatattggctaccaagttgaactggagcatatctttgcttatccgatcctttctgattttgcacaaaatataaagcagagcgaagttttcgaaaaacagccagcaatttcacataacgaggcgtatagatacaatccatttccactcactgatattcagcaagcttacttagttggacggcaaaataattttacacttgggggtgttggtacacatttttttgtccattttatagcggaaaatttagatgtacctaaattagaacgtacaattaatcagttgatttctcgtcatgatatgttacgtggtgtcattattaatggacaacaacaagtacttaaaaaagttccttattattccgttaaaacgcattatatccctacagaaaaaagtgacgcttttctagtattacgagctcaacttgctaacattgtttatgatccagaaatttggcctttatttactattcaagttatcaagaccaaagaacaaccagatcatatttttattagccttgataacttattccttgatggaatgagtatgcagatatttttcagtgagctaaaaacactgtatatggagccaaatcaccaatttatccctctagatattacttttcgagattatattgattgtgatgcctatccgattaacacacaaaatgattgggaatattggttaacgcgtttaccacaattaccaccagccccacaattgccactaataaaagatccagcacagattgtgcaacctcgcttctcgcgtttacaaacatcattatctacttctgtttggcaagcactacaacaagttgctcagcaaaataatgttacgccagcagcacttttgattgctgcttattgcgccacattatccgcatggagtaaaagccctgagttaacaattaatttgacattatttaatcggcatcctgtacatcctcaaataaatgaagtacttggtgattttacctcattacaattactcgattggtatacctgtgatctttggtcaaacagtatctcaatgatgcaaaaacgtttacataaagatatgcaacatcgtagtgtttcagccattaaagtaatgcgtgaaatggcaattcaacgacagatgtctcatatagagatacctgtcgtttttacctgtgcattgggctataaacatgatgaaggttttctttctcatcattcatggctaaaacctgtttggggaatatcacaaacaccacaaacatggctagatcatcaagtatatgagtcagacggtgaattatatttaaactgggattttgtcgaacaattatttgactacacaaccattttttccatgttccagcaatatgaacatatactcactaaactggctactgaaccacaatcttggcaattgccactaaataaacttataccaagatgcaataatctcgtcatcaccccagttttcaatgccaaaaataatcaaaacacacattataaacaatctactgatacacaaaaaacaggtcagacaatacaaaaactacaacaacttgttaagcaagttattggaataacgttagcacctgaaacaaattttttcgaagcaggtgccagctctttacaattggttcaacttcatgcagcactacaaaaaaatggctatagccatattacaattactgatctgttcgctagtccaaatctaagtacattagcgcaattgctttggcaaaacacttcaccaacatgtgagcaatattccgaccgagacaaacacaaaaacaagagaaagaaacggttacaactacgaactcatagtagataa

SEQ ID NO: 238177 - DNA, 1533 bp, Klebsiella pneumoniae
atggcaataagtcatattgccgcacatcggggtgctttttatattcagcatcaattacaactcgcaatagctaaaaaaatcagtaaagtaccattatcattttttgctcaatatggcagtggaaatctgcgacgtattatcaatgatgatataaaaagcttagaaggttttttcgcacatatgctacctgatctcgtctcagccatagtgactccctttatcgctattatattacttttttatgtaaattggcctcttgccttattatctctaaccccattacccattgcttttatggctcaacttctcatgttgcgtcgagccaataaacaaaccaatgagtggatgaatattcagaaaaaaattgctaatgaaataggagaatatattaaaggaatacgagaaataaaagcgtttaacttaacctcccatacttttggtaaattatctcaatctatcaattcctctgttaaatggataaaaaataatgtcaaagctagtacaggctcttggatggtatttagtgggatattaacagcgaatctcgttattatagcaccagtaggtgggtggatgtatttaaatcaaaatattgatttatctacttatattttatttttaatgacatcccccctcgtacttgcgccgttattacgactaacatttgtgctaggagaacaagctcaacgaaaacaaaccttaaaacatatcagtatgatccttgaactttcagagcataaacaacatgataaacattttactctccctaaaaatagcgatattacttttaaagatgtctgtttggatcatggtgataaaccgatattagagaaaattagttttaatgcccaagcgggtacaacaactgcaattgtaggccacagtggtgcaggaaaatcctcattattaaaactaattccccgtttttatgattgtacttctggccaaataaaaataggtcaatatgatatcaactactggccagaaattgatttactttctcaaataagtgttgtttttcaagatgtatatctatttcatggaactattttagaaaatttactcatagcaaatcctaatgccttatttgaggatattatcaaagcaactaaagcagccaatattcatcatgttattgaaaaactcccagcaggatataatacattaattggtgaacaaggaaataaactttcaggtggagagaaacagcgattatcaattgcaagagcactattaaaaaactctccaatcctacttctcgatgaaattactgccaatgttgatgctgaaaatgaaattttgatctatcgcgcattaaagagtctatgccagaatcggactgttattatgatcactcataacctacatactattattaacgcagataaaattattgtgcttgataatggaaagattattgatacaggtacacacacccatttattaaaccaatgcccaacctatcaaaaattatggaatgattatagtcacactattcattggcaattaatccaggagaataataatgattaa

SEQ ID NO: 238178 - DNA, 1728 bp, Klebsiella pneumoniae
atgattaaagaattaattaaatcaggttatttgctttctaataaaaaagataaagatttaatggtgggtctatgccttgccgtagttgaaggtctttttgctactattccatatattctactctattttttattaattgatctttttgccaataaaatcacactagctcagttattttattactttttatcaatactcttatctattgttctgcgtattgtcattggtacttatagtatgccaatgatttttattggtgcttataaaatgatgggacaagcccgtctaagaatagccgatcatttacgaaaaatcccgattggctggttttcttctcaacgcagtggtgatcttgcatcacggcttactgctgatttagagatcattgaaaatatctggtcacatttcttaggaatgtttatcagtactttagcgatgcctgtttttctctcactattcttagtatgggtagattggcaactcactttaattatattattttctattccaatcgctctgttcgcattatccataagccataaaataatgttaaaagctgcacaacaggcagctgatgctaatgccaatgtacaatccgaattactcgattatatccaaggaattatggttattcgtagttttgggcgacttggtcctgcatggaaaaaactaaaagcagccttagaaacacaaaataaaacccaaatagttctagattccaagcctgccccttggattgcactttatggttttattcttgaatcaggttttattttattaatgataataggaacaagccgtttaattagtggctcactttctccttctcaattcgtttttttccttgtattagcactccccatttatcgacaattctttgatttaggattatccagtatgttgttaaattatgcacaaaaatcattacaacgcatagaagaagtaatgaaagtggttccactttctgagcctaaatatactcaattaccaataagaacagatatctattttaacaatgtaagctttatttatccttataatagtcaattaacattagataatatatcttgctgttttcctgaaaaaagctttactgctattgttggccctagtggctcagggaaaagcactttactacagcttatttctcgtctatgggatgttaaccaaggtgaaatattgctagatgatattaatattaaccaaataaattccgataaactctgttcatatgtatcttctgtttatcaagatgtcgttttattttcaggaacaattaaagataatattttaatgggaaaaacagatgctcacgatgatgaaataataactgcagctaaattagctaatgcacatgagtttattatacaaaaaccacaaaattatgatactcctattggttacggtggtatgttactctcaggtggagaacgtcaacgtctttctcttgctagaactttattaaaaaatgcaccaattttactgatcgacgaagcaacatcgagtatcgattgttcatcagaagtattaattcaacaagctttatcattgttatcaaaagataagacaatcattatgattgcccatcgattaaatagcattaaaaatgccgataacattatcgtaatggaaaatggaaaaatagcagaacaaggaaaacatgctgagttacttgcaaaaaatggcttatatgcacatttatggttacaacagaaagcgttatgctaa

SEQ ID NO: 238179 - DNA, 1950 bp, Klebsiella pneumoniae; identical to SEQ ID NO: 157020

SEQ ID NO: 238180 - DNA, 1182 bp, Klebsiella pneumoniae
ttgaaactaacaatagacacgctcaaaccatttcaaattaaagcggcaagtgaaattgctgagatgattgcaacttaccctaaccctccttacaaaaggaggtttgatcccgaaaccggtatgtcgcttcccttcctatgcaggctaaaagctattacagggagtggtaaaacgccgatactttcactcgcatgtaacaaaatcggtgatggtattatcctttggacaacgaacagaggagcagtaatctcacaaacaaaaaataatcttagtgtcggaggaaaatactccaatttactccctgacgatgtaaatatcctgaatttaaatgagattacggaaactgattgggtcgatatttgtcgtgccaaaaaaggcttaacaattatccttgctactgttgctttatttaatagggatggagatgctttaaatgttcataaagacagagatggcattagtcattgggatgttctttcaggaaaggggccagaaggtagaaatcgccaactttatgtagtctacgatgaggctcatggtggtacaaaagctcagttctcaagattgaaagaactcaatcctcgtgcatttattttagcatcttcctccgaaatgtcgggcgatcttattgatcttttgcctggaaacaatgtggatgaaaaatctttatcattaaaaactcaaacggtagtagtttcgacaccattagttgttaaagaagggctattaaagacccgtctttatcttgtcgattgtaatacttctcgattagatgcattaaccgaagctaatactaaatggcaagaactcagcactaaaatgagtagctttaatacttggcctgtaatttgttgcattgtaaattcaacattagcaggcttagaagtttgggaatcgttggtcactcagttaaaagttgatccaaaaagaattgcagttcatttagcaaatgtaaattccaatttagccaatgttaatcccaatgcaccatggagcttattagtcgatactcataaagccaagaaaagccctgaagatttacatgatgaaggttattcacatattatctggaacttgtcattaagagaaggttgggatgaaccatgggcgtatgtagcttaccttgatgggttagggaaggtgcgaataagcaggtcatttcttcccaagctgactcgctga

SEQ ID NO: 238181 - DNA, 681 bp, Klebsiella pneumoniae
  misc_feature (653)..(662): n is a, c, g, or t
atgatgacaggcgtgattgaacctgtttcagtgatctttcctgaaggtgcatctcaaggtgttgaagttctctatcaagattttagttttggtcgttattttaaccaaattgctgccgcggtacttaaaggattactttctcactaccagcccactgtggctaagcctttgcgaattattgaagtcggtggtggcacgggaggaaccacctcttggctgctacctattttatcaaccatacaacatgttgaatacgaatttaccgatatttcacctatcttcacccgacgtgccgcacaaaaatttagtcaatattcatttgttaactatcgagagttcaatttacaacaatcccctgaaatacaaggttttcaatctgattattatgacattattattgctgctaatgttattcatgccactcaacatattggagatacattaactgctcttcgtactttactgcgttccaatggtcatttgcttatgcgcgaaataaccaaacaagctcgcttatttgattttgtttttggcccactggtgttacccctccatgatgaaaagatccgtaaaggaaaactatttttatcaccagaattatggcatcaacagtgtcgcttagcaggatattgtgatcccataccagaaaatannnnnnnnnnatattcgctggttacctga

SEQ ID NO: 238182 - DNA, 135 bp, Klebsiella pneumoniae; identical to SEQ ID NO: 34870

SEQ ID NO: 238183 - DNA, 747 bp, Klebsiella pneumoniae
atgcattgccactatatcgttaacagcctctatccacataataaagcaggacgtttatggatagaaaacacacagaagatatatcagcaaatacaacaacgaccagtgtggggacaaattatcacaagcaggcaattaatttattccgccttagatatatattgccaagcaatgaaattacaccctaatgatattacagtcacattagaaaaagataataccccgctacaatttctacgactatccaaccctactggtgatttgcttttatgcctacaaaaacatttgtcatctaacgatcctgatcagcatagcctcgtgatgcatcatatgatattaggctggccagctggttatttaactctcgctggaagttatgggccagtagaatggaataatgcgctttatattcatcatcaccaagatagtaaaaaagccatgtatcaatctcctgccacgatggagcttgatgaaccactgtttcattcatttcatactccaccaaatagttggcaggatgtgatggaatgtgaagcaccagaagctattaattacttactggcagagatagataaatgctggcaattacctaatgataaaaaaccaatgattttacaaccccattaccaattagctttatctcaattatggataaaaacattgcaaacagcaggtaaagccattgatggcacaattgcgccatttaagcgaatgaacttcaccaaaagtagtggacggagaaaataa

SEQ ID NO: 238184 - DNA, 774 bp, Klebsiella pneumoniae
atgataaaacaatctcccaaatatattactcctttaaatgagcaaaatgtaaataaagacaatgctaacctattggtttgcccatttgctggtgccagtaatagtgcatttaactcgtggagatctaccgatatttcagggttaaattgtcaattagttaattactctggccatggttgcagatttaaagaaccagcctttaatgatattgggttattagccaatgaattaataacaataataaagaaattttatccaccacggcataattcattattactttgcggtcacagtatgggggcccaagttgcctttgaaactgctattcaattagaaaaaaatggctgggaattatctggactaatattatcaggctgccaagctcctcatattcaagcaaggagattactgagtgatttaaatgatgatgactttattcaacaattaattgccattggtggatgtgatgctgaattaatcaagcagccacagttgttaaaacagtttatgccattattacgtgctgatttccttgctaccgagcgttatttttttcaaaaaagcactaaacggctttttcatacccctgttttattaatgtatggtagtcatgatagtgaagctgataaaaacgaagttgaagcatggcaagattggatagataagcattgcactattaattgcatcgctggagatcacttttatccaattacacgcccaaatactttttgtcgttttattattgatttttatcaccaatttatcaatgattaa

SEQ ID NO: 238185 - DNA, 1038 bp, Klebsiella pneumoniae
atggcatggtgttactggcaggatctattatctgatttaccttctgccccatatttaccgataaagaattcatccattactgaacaacctcgttttacgactttccaacatcatgtttctatagcgcaatgggacaaattaaaacagaggtggaaaaagcatggtattacaccatcagcagggcttttaacactttttgctttagttttaggtcgctggacaaaatacccagcctttacactaaacttaactttctttaatcgtcaaccatggcacccagatgttacacaacttattggtgattttacctctgtactccctatagatatttatctagataacgactgtacattaaatgagtcaatggcaaaaatacagcgcagactttggcaacatttaagtaagtcccaagtaaatggtgtagagattttacgtgaatggggacgctataaaggggatagtagccaatctctgttacctattgtatttactagcatgttaggtatgacactagatggtgacaatattgatgaagcattaaatcagcttttcggccaacccgtatatagcttcgcgcaaacacctcaagtttggttagatcaccaagtaatggaaggaaaagaggggctaacattaaattggttctgcatggatgacatctttgctgacggtttattaacaatgatgttctctgattatcaaagcttgatcactcaattatgccaagatgaagataataatcaatcagttgataagattattgcgcaacttccttcatatcaacatttagcaatagataatcacctccaatcacgctatcaacaactcgagcaaacattggaaaatcatccgcaaatcaaacgtgctcatgctatggtaatggtaaaagacgatacgaaagtagagcctcctctacaattactgtttgaagcctcttctgatattccactatccgttattaaacagcccaattggttacctaatttactttcgccatcagcttcactcagtgacgaaatgctctttttaccgagctaa

SEQ ID NO: 238186 - DNA, 882 bp, Klebsiella pneumoniae
atgatttttaccaaaatcattaggggattcatcagcgcgatgcattcattacaacgtaaagtactacgcactatttgccctgatcagaaaggcctcatcgcgcgtatcaccaatatctgctacaagcatgaactcaacattgtgcagaacaatgagtttgttgaccaccgtaccggtcgtttctttatgcgcaccgaactggaaggcatttttaacgacgctactctgctggccgatctcgacagcgccctgcctgaaggctccatccgcgaactaaatccggcaggccgtcgccgggtggtgattctggtgacgaaagaggcgcactgtctgggcgatctgctgatgaaagccaactacggcgggctggatgtcgatattgccgcggttatcggcaaccatgacaccctgcgctcgttggtggagcgctttggtattccgtttgagctggtcagccatgaaggactgagccgcgaagaacacgatcagcggatgggcgatgctatcgccgcccacgaaccggattacgtggtgctggccaagtatatgcgcgtcctgacgccagaatttgtcgcccgcttcccgaacaaaatcatcaatatccaccattcgtttttgccggcgtttatcggcgcccgtccctatcatcaggcctatgagcgcggcgtgaaaatcattggcgctaccgcccactacgtgaatgacaatctggatgaaggcccgatcatcatgcaggacgtgattcatgtcgatcatacttataccgcagaagatatgatgcgcgctgggcgcgatgtcgaaaaaaacgtcttgagccgggcgctgtatcaggtactggcgcagcgcgtcttcgtttacggtaaccggacgattattctttaa

SEQ ID NO: 238187 - DNA, 129 bp, Klebsiella pneumoniae
atgatgtccctctgggatgcgctccggatgaatatgatgatctcatatcaggaacttgttcgcaccttccctaaaaatagcacctgcatcatcattatattctttaatttatccagatatgttttttaa

SEQ ID NO: 238188 - DNA, 549 bp, Klebsiella pneumoniae
atgactaattttttgttcaatataaaaaatcactatttgcgagtcgctattgctgaactggttgatgaagcgatgaaggccgccgggcggtcacactatcagttttctcaacaatgggatgcaggatcgatggcgcaagctgatgtgatattcacggaaatggtcgcgggggagtggtacttgtgccaggatctttttcagcatgccccggaacaatatacgctttttattttcccggacaatgaacacgctaccgtagatgagggtttaccgaattgtctgcagcatgcggtatttatgccgcctcacgctcgcgttcagcggctgaaagatgagatagctaacgccattgagcgtccgctgctaccgcggcaagacccgccgttcaatcgtctgcggcgttgcattaattgcgcctgcaggtcggtcagcgacgcgcaaaccaaagtcatttacgccttcagtattggcctgagcccgcatgaagtcgccgctgcgctaaggaaggtgcgaataagcaggtcatttcttcccaagctgactcgctga

SEQ ID NO: 238189 - DNA, 186 bp, Klebsiella pneumoniae; identical to SEQ ID NO: 137318

SEQ ID NO: 238190 - DNA, 432 bp, Klebsiella pneumoniae
atgaatccttcgttaaccgattcccgccgtcaggcgctgcgttcagcttcccactggtatgccgtgctaagcggcgagcgcgtcagcccacaacaggaagcgcgctggcaacagtggtatgaacaggatcaggataaccagtgggcctggcagcaggttgaaaacctgcgcaaccagcttggcggtgtgcctggcgacgttgccagccgggcgctgcacgatacccgcctcacccgccgtcacgtgatgaaaggattactgctgttgctcggcgctggcggaggctggcaactctggcagtcggaaaccggcgaaggtctgcgggcagattaccgcacccccaaaggcgcagtcagccgtcagcaactggaagatggctccctgctcacgctgaatactgagagatcccctcataatttccccaaagcgtaa

SEQ ID NO: 238191 - DNA, 384 bp, Klebsiella pneumoniae
atgttcgccatctggcgctatgcctggcaatgcgcgtggtcgggcgccggttgccaggatcacgtgatcggcccggtaatcgcgcgcctcccctcgggcatcctcgaccgtgatttgccccttgccgcgcagccgcgcggtgccatcaatcaccctcacgccatttttcttcaacaggtacgcaaccccagcggtgagctgttgcgatacggtacggctaaactgcaccagtttctgcagatcgacgttcacctcgcccacgctgatgcccagctgactggcatgggtgatagtgtgcgcaacctcagcgccatgcagcagcgccttggttggaatgcatccccagttcaggcagatgccgcccagatgttgtttttccactaa

SEQ ID NO: 238192 - DNA, 1536 bp, Klebsiella pneumoniae
atgagcgaaatcaagacgcttgaaatgccaaagtgggggctttccatggaggaaggcttgctcgctcgatgggcaatccaggagggtgacgatttcaccagagggcaggaaatctgtgagattgaaaccagtaaaatcgtcaatgtgctggaggccccctttgccggtacgttacgtcggatactcgcccgcgagggtgagacgcttcaggtaggcgccgtgctggccctggcggctgacgcgtcggtcagcgatgctgaactggacgaatttgttgcccgcctggcgacggcgaaacccgcagccccaggcccggaggctgtcgcgccggacgtagcggcacaggcaggcgataagccagcttccattgtttcgccgccatccaacagccccgagccccctgttgggcagaccgtcatccccgtcagtctgcaaggtgtgaccgatgtgactcaggttaatgccacgccccatgcgttacgactgtctgcccgctggggtgtcgacctgaaaaaagtccgcggcagcgggcgcggggatcgtatctctgtttctgatctggaaagcgcgatcgttgccgccggcggtcgcctggcctctccgacgccccccgttcgtcgcagcaaagcgccccgctcgcatgccgatgacagccaggtatcggccaccccgctggcgcgccgcctggccggcaaactgggtatcaacttgcatgactgccgaagcagcggttcacgcggtcgggtaagtcgcgatgatgtgctggccgcggcgttgttactcgacgagcacccgcagaccagtcctgtgcaggagagtgccccggccccctttgagagcatcccgatgtccggtatgcggcgggctatcgcttctcgcctgcaaacgtccaagcaacagtctccccatttccgtttgagcgtcgatctcgatctggagcgactgttagcgttacgtcaggacattaaccgcgaagtacccggcgtcaagatttcggtgaatgacctgctggtgaaggcctgcgccctggcgctggtggccgtgcctgacgtcaatatccagtttgatgaagcggcacaaagtatccgccgctttacggatgccgacatttcggtggccgttgcgctgcctgccgggataattacccctattgttcgctcggcgaaccggaaatcgatcagcgacatatcgaacgaaattcactcgctggtgaccagagccaaagcgggcacgctgaagccggaagagttccagggcgggacctttagcctgtcaaatctggggatgctcggcgtccggcagtttgacgccatcatcaatccaccgcaaagcgcaatcctcgccattggcgccggcgaggtccgggcggtagtacgcgacgggcaaatcgtcgcgcgccagcaaatgacggtatcgctatcctgcgatcaccgggtcatcgatggcgcggcaggtgcggcttttctccgggaactcaagcgactgattgaaaccccgaccttgatgtttatccaggagacgagctatgcacgataa

SEQ ID NO: 238193 - DNA, 1020 bp, Klebsiella pneumoniae
atgacaataaaaacctatcgtgaagcggtcaaggaagccctggctcaggaaatggaacgcgatgaacgcgtggtgctcatcggtgaagacttgcgtggcggtcatggcggaaatgcgcccgaagaggcgaaaatagaagcctttggcggtgtgctgggtgtcactaaagggctgtggacgcagttcggctccgatcgggtgatcgacacgcccattaccgagtcggccatcatcggtatggcggccggcgccgcagcgacgggtttgcggccggtcgcggaattgatgttcatggatttttttggcgtgagtcacgatgcgctgtacaaccaggcggctaagttccgctacatgtttggtggcaaagccagagctccgctggtgatgcgagggatgatcggcgcggggttttctgccgcagcccagcattcacagtcaccctataatatctttgccaccacgcctggactgaaggtggtggtgccctcgacgccttatgacgtcaagggtctgttaatccagtccattcgcgacgacgacccggtggtattctgcgagcataaaatgctgtacgacctcaagggcgaggtaccggacgagatctataccatcccgctaggtgtagccaactacactcgcgaaggggaggacgtcaccatcattgcgttgtcggcaatggtacataaagcaaaccaggtggcggacaaactggccagagaggggatctcggtcgaggtggtcgacccgcgaaccatttcgccgctggatgaggaaggtattctggaatcggtggcgtccacggggcgggtcgtgattgtcgacgaatccgctgcacgcttcggttttgctcatgatgtcgcggcgctgattgcgtcccaggcattccattacctcaaagcgcccgttctgctggtgacgccgccacacacgccggtcccgttctcccctgctctcgaaaaactctggatccctggcgttgaacgtatcgaagccgccgtccgtcaagtgctggaggattaa

SEQ ID NO: 238194 - DNA, 960 bp, Klebsiella pneumoniae
atgctcagcaaacaggcgttattgcaggcttaccgcaagatgcgggagatcagaacatttgaagagcggttgcatcaggaaaataccagcggtgatattccgggcttcattcacctttacaccggtgaggaggccatcgcggtgggggtctgcgaaaatttaacgagcgcagattttattggttcaacacaccggggacatggccactgtattgctaaaggttgcgacattcacggcatgatggccgaaatattcggtaaggacagcgggttatgtcgcggtaagggcgggtcgatgcacattgccgatctgtcgaaaggaatgctgggggcgaacgctatcgttgggggagcccctcccctggccatcggcgccgcgctaacggcaaagacgctaaaaaccggcaacgtcggtgtctcttttacgggcgatggtggttctaatcagggcctggtctttgaagccatcaatatggccgtcgtgctccagcttccagccgtctttattttcgagaataacggttacggcgaagggaccggccatgactacgccgtgggtgggcgtgatatcgcccggcgcgccgctggcttcggcctgccggcagtgaccgtcgatggcaccgatttctttgccgtttatgaggcaacctcagaggcggtcaagcgtgcgcgagaaggcggtggcccaagcgtcattgaggccaaagccttccgctggcatggtcattttgagggcgatcccgcgctatatcgtgcggaaggtgaagtgcaacgcctgcgtgaacaacatgatccgctgaagattttcaccgctaaggtcaagcaacatatcaccaaggaagaactggcggcgattgacgaggaagtagaagccctggtcaacgatgccgtattgaaggcccgcgccgctgcctacccggctccggaagacctgctgacagacgtgtacgtctcatactga

SEQ ID NO: 238195 - DNA, 2766 bp, Klebsiella pneumoniae
atgaagccattggatttagaaggtcgccaatcaccctcactggtctccgggccattgcggctgacgcgaggcttgccgctaatcctgaccaaattcgtcccgcctcgctcctcaatacaattgctggagcgcccccggctgcttcagcttctcagtcccgttcagcagtgccggctgggcgtcgtctgcgccggcgctggatttggcaaaaccacgctgttggcgcaatggcatcagcagatggtcgcccagggcgaacgtatcgcctggctgagcctcgatgaggatgatgatgacgtatggcagtttattccttatctgctgcaagcattgcgtccactctatgctgactgggacgccgatttctggcgtgacatggaagagcagaagctctccagctccgagcaactgctggccgggctcattaaccagctacactactgcccgcatgacgtgtacctgattatcgacgacttccacgtgattaacgatcgtggggtctatgaagcgctggggtatttaatcaagcatgcgcctgccgccttgcatctgatcattggcagccgtttccacccgaatcttgcgctgagccagctgcaggcccaggaccaactggtggagatctatgatcgagacctgcaattcacgctcgaagaaacaaaacactattttagccgcacggttgcgctacccctcagcaaccatcatgcacagcggctacagtccgtgacagagggctggatcgcgggcatgaagatcgcttcattgtcggcagaattacagaatgatcccgagcatctgttgcgtaatatgcatggaggaacacgatccattgcccgctatctgaaagaggtggtactggatccgctgccggaagaggttctcgatttcctggtgaaaacgtccttcctcagtcggttaaatgccgaactatgcaatgcagtgactggacgtgatgatagtaaagcgatgctggcatggattgagcgacacaacctttttttgtcagcccttgacgaacaaggctactggtttcgctaccatcctctgttgcaggaaaatcttcggaccatgctgcagcagaacaatgatattgaccgcaaacagctgcatgaattagccagtcattggttcgtcgaacagaagctgtggtctgaggcggtacgccatgcgctcagcgcaggcaagccggtgcatagccccgtgcaggacggcgcaagcgctcagtcactggcggaagaaggggatatcgataccctgatttcatggatgcatcatttaccgcccagcaccgatccttcgcgcattgacctgcaaattaacctggcctgggcactggcgcattatttccactttgatgagtcgaggcagctgcttgataacctcgatcagatggtacttcatcatcgtgaggatttaacccgcagcacctggtgtaaattgcgcgttgtgcgggcaatttgcgaagcctttgctgaaaacatcccggagagtctggctattgttcagccgttgctggccgaagtgccctgcggcgacacctgggttgatggtctgatatgcaatattctcagctattgccatgttgttaaccagcgctatcacgacgcgctggaggttcaacagcatatgccctctccggaaagtcctttagataatctgtttgtctcggtttatcgcgcttttatcattgctcagtgccatctttgtcagggcgatctggggaaagccgggtggtacgcagagaaaacgttgcgccaggctgaatgttataccggtacccagtcgaccagtggcgcgacgctggcgccgctgctggcggagatagcctatgaatgtcagaggggtgactcgcccgagcatctgttagccgaccggctcgaattcatcgaccgattcagtccacccgacgcgctgagtcgttgctatacctatctcgcgcgtcaggccttagataacgatatgccctatgaggccgagcgattgctggagcatgcgcagcgtcttgcggtgtctcgcggctggcaacggctccaggccatgttgttagccgagcaggtgagggtgcgactgcagcgcggcaatttcaccggcgcagagcaactgcagcgacagcttgaacaaatggccgccagcttcagaatggatgccgaacatccctgccaacgcgccatcgttatgtctgcatcccttagccgcagccggcttcttctcgccagaggccaggcaccgcaagcctgcgttttactggctgagatggtctccgatcaggaaagccggggggacaggttaaccgcagcgcgtctacgtacgctctggtcattggccttgtggaacagtggcaaaactgccgctgcgcgcacgacatttcagccagtcgtgcagctggctgaacaactgcatctcaagggcctctttcttgaggctggcgataccttgcaacctttgcttgccggtatgaatgaatcctcttcggcttgtacagagaaaaggggagtgcagggatcctgggcagacaagcgcgggcctgtagacggaacaccgtttaatagtggaagccccgatattcctggcgagctcagcgagcgtgagtttcagatattacagctgattgctgaaggtcagatgaacaaagaaatcgctcgctccctcgctatttctgccgagacggtcaaatggcacatcaaaaacatctacgcgaagcttaaagtgaatagtcgcactcaagcgatgagccgggcgctggagatgaaattactggattaa

SEQ ID NO: 238196 - DNA, 183 bp, Klebsiella pneumoniae
atgattgtcagaccacctaatctttctacgatctggctgatgattgccgagtatcagcttaacgatcacaaaacgctttcaacactggaagagctggtgacaatgctgatgcagttggatgagacaaaaccgcaagaggcacgcgattttatgacatcctggtatgaactggttgctgcctaa

SEQ ID NO: 238197 - DNA, 1350 bp, Klebsiella pneumoniae
atgaatgagaaaaatgcacgacatctgaatgccatcaaagcacgccgattacagcgcctaccacaactaacccccgtagcttctttaacggtggtggcgcggcacttggccggggagccggacattgcattagtacaggcctgtaaggtcagtgaattttaccgctcctccgtcgaaagcatggatcttgcggtcaacagggctgatgctttggcccgtcttgaacacctctccacgggcagtgccatcgatactattctggagcccgtcttcctgagcctgctcgatgggacgatgcgggcgtgtaacatcggcattcgtcagggaattacgccttcgcgtctgaaccaggaatgccggaccttccagtatgaggccatcaacagcagcaactttaggctcgacagctacagtgagcagctgattgaacgccaaaatattcagaatttggctgataaaaccgtctataacagcggtacgatgacgcgtgatggcgtgactgttcagatgcgcaacggtaagaaaatggagaaacataaggacgcccacttcggcaacagtcagcgatcccatgatgagtacgacggacaggtcgtctacagaaacaagcggcacgctaacagtgaagggacaccggagcgagcagcacaggttgaccatgccatttcttgtgctgaagtgtgtaacaacctgaaaggtaacaaggccctgaacctcgatgacatcaaggctatagccaacattgacaaaaactataaagtgacgtcacaggccaataacagtggcaaggattttggaaaattcgacaagacgagcgcggagcttcagcaggaagtgaagcaggggtatgtgatcgtcaaaaaaaggggcaaggaggtcaaaaagccactcactgaggagcaaatccaggcccgtcagcagatgatagacgagatgaaagtggctaagaaagccattgacgacaaaaccaatgaaactgtgtggtccaatatcagtaaagaccggagtgtccaaaaagttctggccaaagatgccggtcaggcagccggtcaccagtcgctcggcgatctggttctgttcgtcattaagccgctttactacgagctccgcaccagcctgtcggatggtctggacaccggcgtaggggtcagtggctatactgaggcattgaaacttcgcctcagccgcatgaagacatacgttctcactaatgcgtcaaccttgctgaaggacttggcggaaggctttgtaaaaacttcctctcaatgctgctggaaggaattgttaactgttttgtgggcatattcaaaaacctcatgcggatggtcaaggaaggctttaaggtgttga

SEQ ID NO: 238198 - DNA, 366 bp, Klebsiella pneumoniae
atgcggatggtcaaggaaggctttaaggtgttgatgcagtcagtcaccatcctgcgtgataaaagcagcaaccaggcccaaaaaggggatgccattctgaaactggtggtcggttccttatccatttttgcctcgcttggcctcgagacgtggctgaacagtctgggtctgccgggtccgttacctctccttctgtcctcggtcctgaccgccgttattacagccctgctgatgtatgccctagataagctggacctgttcggtacaaatcacgatctaaagatgaaacggatcgatgaattacttacaaatgaaatcgccgaaactgaacactctatgatgacaatggttaatcagcttcgttaa

SEQ ID NO: 238199 - DNA, 192 bp, Klebsiella pneumoniae
atgtcccgcattttatttccctcaacatgtaatcctgaaagaatattcgatttctgtaatgaaattgagaagcattctaataatcaacaaataactatagacttctcaaacatggggagaattgaaccgtttgcaatggtttatgttgctaaacatattcgagattttcatagaaaacagaaaaaaatatag

SEQ ID NO: 238200 - DNA, 783 bp, Klebsiella pneumoniae
atggctttctttagggctttcggattaaaacatggtcgtgagccaggatgtacggatggaaataataatttcgtgcctttcaccattcttcgtgttcaaaccgtaattgatgaagctaatgataaatatactgaagtacaagagatagttgaagcacgctccggaagattagcaaagatacttgctcgccaagaagaaggtgatcttattgatgctttgacattttctattagggaaataatgcgtaatgttgttgaacatagtgactcaaaggtaattgagtattgtgctcagtattggccctcttatgattgtgtcgaaataacaatttcagataatggcatgggcatgagaagttccctatcgaaaaacccctacatagaagctgataatgattctgaagccattcagttagcactaatgccatctatttctagtaaaaattacaaaggtgcaagggttaatacaaaaaacccatggcataattcagggtttggactttatatgattagccgcatctgtaaacttggcggtagctttcttatttgtagcggtgaccatgctatttatctcgatgaacaaggaaagaagcatataactttaggtcattatcatgaaggaactgtagttagaatggttttgaatactaggaaacttggttctttaagctcaatgcttgcgcaatttagagatgatggttacaaaatagcagctgaaataaaacatgctggtatttatacagcttcagctgcttcgcaaatgctttcacgggattttaagtaa

SEQ ID NO: 238201 - DNA, 1113 bp, Klebsiella pneumoniae
atgttaaaagatagagcccaaaaagcattagctttgaaattttgtatatctaaacgctggttgccacaactcgaagtaaatatagagtcgagcaagcggcttgaaaagcaaaatttactgcttactgatttagatgtccttgctgttgccttatctcctgtcggcgaacaggttaaatttattttcgattgtaaaagtggaaacagagaatcaccgatagggcgtgttttttggttaaaaggagtaatggaaaaaacacactcatcgcacggttttatcctgatgaattcgaaaatgaatattggaaaagatcacaggttaacagcagcagatctaaatatttcattacttaaagaaaatgaattcgaaagtttatctatcgggactggtggaagcacatcgataaatacagaatattcagtagcggcagatattacagcatgggaaaaattgtctgaacttaacaaaaaatatcctaacatgtcagaatatctttcattttcaaattcatctttttggatgatcaatgaacctggagagcagtgtaggaaggttgttgctaaactgagaagaataagatcagagttagatccatctaagaatgagcatttatgtatatttggtgatgcactttcattatttttgatgacaatttcaaacatagcaaataaattactactcgtattaatttcgccaactgagaaagatgatttttcttctcttgtattagcatatctatatggtggttatgagaaccttaacgcggcgattaagatccgcagcttagcaacaggtcaaaatgaaggtgatgcattaagcatttttccagaaacaaataaatttgaacatttgactagagaaataatgcaagccccacagcaagctatggctgctgctttattagctcgagagttatctctatgtatgctaactaattctgagcagaccaaattacaactagatattgcaaatgaaaatccatatgcaacgaaattcattttacttgcttctgaatatctgcagcaagctataaaattgccgcctgaattttttgatatttattctaaaatatcctttggaataacaactgaaaattccaaaagaaaaaaatag

SEQ ID NO: 238202 - DNA, 1281 bp, Klebsiella pneumoniae
atggatagaaaaactgcagttgcaagatgtcatgaaatccaactggctattcgagataaagaagttgtcaagtttgaaaaaatacccgaaatcggaatggctgttcaattagcactacacataaggggcctgcccattattgaataccagcttctaaaaatggtcgctacctcactaattggaatacctcggttagctgttgataggatcgtatttcttttggctgaaattggatttgttaaaattcactctgaagggaaaagtattaaagccgtactaccaaatgttccttattttgaagacctttatgatggaatcggtgaatattatgaaaatcagtctaaccctgatgagttcgaaaagttgtcccttataatcgtagattcattggcaggctcaccttttaatatcgattctttagccgataaactaggtgctgatagaaaagactttgatcaaagcattgagatcggagaaagaggcaattatatctactctagaagatgccgatctaaaaaaatacttttaaatcctacgtatttttccgaaaatgcagatatttttgccgatcatgtagcaaaagctggggccaaaacagttcaaaaaacgctccatcttttagagaaagcccaaggttggcctttatcactaatcttaaaaaggaaagaaattgctggccactctctttctgatgatgagactagtttgataaaaagacttgcacaagacggtatggtaaaacctccttctattatcacttcttattctggagataattctttcatatttactccaacaccaaattttgtaaatataagcccattcaaaagagagcaatatgaacgagctttagcgatagtttctgctatacggcaaggggaattgttgccaaataaatacagaattagaagccctggagctgtgttgtataaattgaaaactgagcttaagctttcacccacaagtgattatgctgagcaatatcaaaatcttcaacacttgcgcatagcaaaactagtcaaacttcataatggctataatcaactcgagattattgatacaccagaaaatagagagtccttaaaaattgcatatcagttagtccaaggtgataagatacccgaattagtagttgataatgatgtaatgaaagcgatggcaggtactcgtgactatgtagaatctttggtaagttccaaattaatgcgtgaaaaggaaaatatatcgctttcggaagaaacagagaatgaactaactcagttgcttttggagaaaatttaa

SEQ ID NO: 238203 - DNA, 276 bp, Klebsiella pneumoniae
atgagcgacttactcgaaatcaaggtaggacgtacctaccgggcaaagcggccgggccctgctggcaccattatcagcccgctggtgaacgaccgtaccgttacctggttcagcgggtcacacgtccagtatgacagcccgtccgtttcgtttgggcggcattaccccacagtcaccatcgagaagtttcgctcatgggcttctcacgatgtgaccgacgaactcccccagggtgagtacgccccatggccaattaaaaaggcagatgcagcatga

SEQ ID NO: 238204 - DNA, 345 bp, Klebsiella pneumoniae
atgagcaaatccttaaatgcgcgttgtatccgccgctggaaagtgaaatttaaatctgtctgcgattcaaaagttaacccctactggcgcaaaagcgacctgcgcgggtatatccgcgaagcggcgcttaccaccgcttacagcatggtcgagagcatggctgaacttaacgccaaatttgactatgacggtgagcctaacggttggacaccagaattttcggcatggtatcgggaacgccatgaacactacctgaaagaggcgcgtgactacctgaacgaagacgctaccaacgacgaaatcgacgaagagatcgagaacgagctggaggcctggaatgactga

SEQ ID NO: 238205 - DNA, 231 bp, Klebsiella pneumoniae
atggacgtcaacatgaatgatgtggctgtatgggttctgaattataaatattctgcaccgggattagaaaactgtgtagggatacattttattgctgcagttgaaaatgaaacgttggagcaacttaacgaccgcttctatgcagagattgaagctgaatgcatcaagaagcatggtagtttcaaaattaaatctggggaaatatctgcataccagatgaaaaatcaataa

SEQ ID NO: 238206 - DNA, 618 bp, Klebsiella pneumoniae
atgttaggcatgagtacgttagcctttatcacaccagaactccacaagctggatgagatgatcagcggcgtgtcttccagcattgagcgtccatacaatgattttgaaaaaaatcataatgatacggttcctaaaacaacggtaaaagaagttatgcaaagagtctacaattcgaaagatgccactgacaaagcatcatctgaagccagacgcctcaccaaagttttattgcacggtaccgagcaagaaatcgaatctttgcaaattgttgatgaatcagtcattcgctctttgcgggaaagagcttcctacatcgagaatggtgccaaaagaatcaaatatgctttttttattgctcgtgcaaaccgtgcttggttacctcatattcatacacttaatcacttagagcgccgattaacctcctcctacgagagttatgtaaaaagcattagagaactggcggacactgcacaacacttcatccccacagatgagggtttcgaacttgatacgaacgaattaagcgatagcatgggatccgaaacggttacatcgccttcttgggtaaaaactcccgaagatttcataaaatgggcgagagagcataataaaaaatga

SEQ ID NO: 238207 - DNA, 882 bp, Klebsiella pneumoniae
atggcgactaacgattttaaacccttcgctactggtagcggggcaaacgtattatcacaagctgattatgacgcactgtcggccagaacaactggttttttaagtggcaaagcgtcttcggcccaggtcaacaaagctttaaggcaggcatcaactattgcggcggttgtggcgcagtttatttcggataacagcggcgatgacacccttgataacggtaatttacctaccttactggctagtctcgaaagcgcccttctcaagtcctctcctgggcggttacagaatatcgttagctttaccgcaaatgggacctacaccccatcgccaggaaccaaacatgtaaaagttattgttactggcggtggtggtggcggtggtggttgtcagggaacttccggagctgaatcaatttcaggtggtggtggcggtgctggcggtacggccattggttattttgccgttactgaatccagctatgcagtcactgtaggtgctggtggttctgctggcgttggtgctgttcagggtggaacaggcggaacctcaatcattaacggcattagcggattgggcggagatggtggtcagaaatcagggatcactacgctggctggcgggaaaggcggtgtttctatcggtggctcggttaaccttcccggaggttacggcactgatgggcaaaatggctccctgattatccccggcaatggtggatcatcatattggggcggcggtggtcgtgggggcgcacgcgggggcgtggcaggggattgttatggtgccggtggtggtggtgcatatgatgctgccatgtctggtaactcctacaatggcggacaggggaaagcagggattgtatatattgaggaatattcttaa

SEQ ID NO: 238208 - DNA, 750 bp, Klebsiella pneumoniae
atgcctatttccgccatttatattgatgcagctcttcctgtgataacagggatgaaaactctttctgattttgatgtttctaactggtttattggtctgccaaccacaggggcaacaccgtatgccgggttctatttcggggacccggtaacagatattacttacgactcatacgatcaaaataacccggcggtgattaacgggacagtgaataacactggcgggtttattaccgttaatcctagtaactatctggatacaaggaagaaagcaacacttagtgttaccatttgcggcgtggtaaaaaggaatgccgcagctggactgaactctcatatgattgcggattatgcagggagcggctctacagccagtggcttttctataggctttgacaccagcgggcggttgttctgtgtagctcaaaataccgggcagtccgctgtgtatgcttatgctgattttccttcatcgatagcagcaggaagtctgtttgcatttgtggccactgttaatcagggagtggtggcaatcgatattttcaacgccgcgacctccacactggtatcagcgacatcaaccctgccagggacaagggctgctggcacaaataacgtactgatgggcagaaagacggataacaacgttgaaacatccagcaagtatattaagtcggccttgctgatgaacggctctttaacttctgctgaaaaaatatctgtctctcaatttttactggcgatgcaataa

SEQ ID NO: 238209 - DNA, 3642 bp, Klebsiella pneumoniae
atgactgaacaaacatcccgccttgctattattcttgatagcaccggagcagaaaagaacgcggatagtttagccagtgctctaaacaaaataacggcagagggtgaaaaagctgagttcgcaacggataacctttccgcagccactaaagacctgaattccttccttaaagtggggccgaagcatgccagtgacaatgcgaaggcgacgaaggagcagcgagaagagatcgaacgactgctggataagcttgaccctacgttaaaggcgtttggtgagcttgataaagcaatggagcggctgaaaaaggcaaatctatctggtgtgctgggggctgaggaattcacccactacagttctattatcgatcaaactcgcaatcgtcttcagtctgctcaggatgagttgactgggtatacgcaggcccagagagaagctgcgaaagctgctcaggattcagcagcgcaacaggcgcagcaggagcgaattctgtctcaattgcaggctcgtcttgatcccgtcacccacgcattacaggctcttgacgagcagcagcggcaaattttcgaatatacgtatagtggtgcgctcagtatccagcagtatgatgcctacagtgccaaaattgctgaagcccgtcgtgagttgaacggagaagcgcaggcagaacgtgaggcagtaaaggctcaggaagagcagcgtgcttcgttgcagcgattagttggccaacttgaccctttctcagctgcgttagataaaatcaagaaacagcgagctgaactgtcggcagccaaagatgccgggctgcttacgcctgaataccacgcagagctttcaaataagctggatttgacggagaaagggctcaatcaggtcagcaatgaaatgcggtatggggccatctcggcagggcagtataaaaatgccatgcggttactccccgcgcagttgaatgatattgctgttggcctggctggtggtatgcctttgttcactatcttcatgcaacagggttcgcagatcgccgattcgtttggcggttggggtaatctgttcgagatcataaaacagcaactgctgggggccggagatgccgccgatgaatcaagcgattccctgtcagataacgctaactcattgtctgaaaatgcagagaatgccaaaaaactgactggatttctgaatcccatgactatcgggatcggcgctcttgtcgcagttgtgggtactctcacatatgcctggtacaaaggcagccaggagcaacaggagttcaataagtcccttgtcctgaccgggaatattgccggggtaaccaccgggcaattggcagacatggcgagatcggtcgcagataatacagggaataccacagccgctgccgctcaggcactaaaccgtgttgtctctggtggtaaaatcgctacaggttcaatgcagactgtcacagaggccgttgtcgcaatgaatgatgcaaccgatgaatctatcgatagcatggtggcagacttcgagaaaatcgcacaaaacccggtagctgctattggagaactgaacgacaaatatcacttcctgactctggcaacttacaaccagattaaggcgttgcaggacgagggtaatcagcaagaggctgcgagactggcaacagagacgtatgctgcgactatgaagcagcgttctgaccagattcagagtaacctcggctcactggagcaggcatggaaatggttgggtgatgccgcgaaaggtgcctgggatgccatgcttgatataggtcgtgaaaaatctatagatcaaaaaatagcagaagctcaggacgaactgggtagggcgcaaaagtcactttctgatttaagtgccgggcaatcaaaatatgctgggccatatggcgcatggaagtctagcgacctttccatgcttcaaaagggggtcgatgctgctaaagcgcgactagcttcattgcagtccgagaaaacagctcaggacgtgattaatgacgcccttgactcttacaacaaaaagcagcaagaggggataaaagcccaaacttatatcaatacactgaccgaacagacgttaactaacgcccaaaagcgcactagggaacaggataagctaaccaaggctttggaaaaagccagggcggccggcacgtcaataagcgcagaggaagaggccagacttcgcgccaatatcaacgagaagtacaaagacccgaaaacacccaagacgccaaagggaaaatcatatacagaggatgccgcaacccggctgcttgatcagataaaccagcagactgctgccatgcagtcccagctggatgccagtgacaagcttaatagcgcgacacaggctcggatcaagttcgagcagcagattgctgacctcaaatctaaaacgcagctcaccgctgaccagaagtctattctttcgcgttcacaggaaatccttcaggcttacaaaaatcaggaagcactgcaaaactccgttaagacgctcgacgattaccggaagatgcaggagaaaattgcaccaaaggaattgagtcaaaatgagacgttgcaaaaacggctcgaaattcttcaaaagatggttgagctaaagaaactgacgccggaggctgctgggaagcaggcgagcgacctgattagtaaatcagtgctaccggattcagttatttctggggtgaataaggctggcggtactctgacgtctggagcaactaatagcgacctgtcagggcagggcttgaatatgatagggctgcagattgatccgcagcttgaggttatcgaaaagctgaaacaggcacaggccgactatgctatctggcttaacaatcaggaaaaaatcatcacccagaatagccagttgaatgcgcagcagcgccagcatgcactcgacgaactatatgaaaagggtatgcagaatcagcaggcaatcagctccgctgtttatatcgcgcaaatgcaatctgcacaggaatcgtttaccaacatcaccgattcgatggggaacatgtttggtgagcaatccgcaatgtataaagccgcttttgtgacacagaaagcattcgccattgcacaggcttcgctgcaactcccaatggcaatggggcaggcattagccggattacctttcccagctaacctcgcagctatcgcgcaagttattggactcatggcttcgattacttccagcataaccagtgctgccgccgttggcttcgcctccggcggttacaccggccccggtggtaagtatcagcccgcgggtattgttcacaaaggagagtacgtcttcgaccaggcatcaacgaaccggatcggcgtgtctcagcttgaggcacttcgaaatggccaaccgcttgatgcaactctggggcgtacagggtttggtactggtgttcagaacgttaacagcgacaacagcagcaagaccaccatccatgctcccattgagcagcatttccatacgccgcccggtgtgacacctgatcagatggctctctccatggctcaaacgcagaagcgggcgacaacggaagcccttgatcaggttgctgcgcaagtgttgagaggagatgggaaagttggtaaggcaatgcgcagtaaatatccaggcagagggttagagtga

SEQ ID NO: 238210 - DNA, 522 bp, Klebsiella pneumoniae
gtgagacagctattggttgtagttcttggagttttactgatgtcgggatgtgccaataacattggtttaaatcctgagactaacgtaagtaaatttgacggcgttaaaacagtgactatccagccgcatggagcagattgctgtatgtcaattggagcgttttggacagaaaaagtgcctgatatggcggttctgaacttaacaacatatgttaaatatatgaatctggaaagtgctgaacttcgtatcgacgacagaataatcaaattacgccctgtggatacattaacaaagtttgaacaaatgatgcctggcgataatgcggttaatatgccaacgtcgacgcgaggttttgctctcccactttcagatttaaaacaagttatgacagcaaagacgtcaatgattaggcttaccacactttccgatggggctattgttggtacgattaaagagggccagaatgacaccaaggcttattatgccttgcaaaggttcttaagtcagatccccattaaatga

SEQ ID NO: 238211 - DNA, 531 bp, Klebsiella pneumoniae
atgaaatatccaaccgtatcagtaaacggcgtttccgttcgtgtcgatgactatggacgttacagcctgaacgacctgcacgcctcagctgtatgcagtggccaggccaaagaaaatcaggggccaagccagttccttcgctctaagaaggttaaggaatttgttcaaaccttagccagaatgcaaaaatgcactctggaagaaaatcaaccagttaaggttattaacggcggcgtaaaccaaggtgtatgggccttggaaattgttgcaattcgctatgccgcatggctcagtgctgagtttgagatccgggtttaccaaacctttcagtctcttgttcggcagggctttgatgctatggctcgcttaaacaaaatcgaccatgtgataaacgcagaaactagggaggtgagtcagtgcgcaagccgtatgggaaaatggggatctggtggtcgcaaacgcctgctcctggcagcccgtgcccgtgtggttgatgaggttcaaatgtacctgcctggctttgaggcttaa

SEQ ID NO: 238212 - DNA, 156 bp, Klebsiella pneumoniae
atggatactccgttacgggcagttagcctgcactgctttattgtgcgccaggatgtcacgcttggtctgcttatccaacacatcgatatcgtggtcagtcaggtagatgatccgcacccagctgcaggccgtgtcaacgactaccggggcgggtaa

SEQ ID NO: 238213 - DNA, 1029 bp, Klebsiella pneumoniae
atgaccattgaagacgaatcccctcaggttaagggtgggaaagctcgtgcagagaaaatgacagcggatgaacgcaaagaagttgcccagaacgcagccaacaaacgctggcaaaggatcaaaacgaaccttccgacggcccagtttgaaggtgtgctaaaaattaatgacactgaactggaggtggcagtactcaacaatggaaagcgaataatttctcaatcctccgtttttaaagcgttagggagaccaagtcgaggcgtaagagctacccttgatggtgagatcatactgcctgcttttatggacgctgccaatcttgttccatatattaatcaagatcttatggaggtgatcaaacgcgagcggtttttagacaattcaggggctgaactcgagggttatgatgcatcaatactcccattagtatgtgatgtttatttaaaagccagacaagatggtgcgctgaaaacaaaccagatggatacagctcaaaaagctgaaatcttagttcgttcgcttgcaaaagtcgggatcatcgccctagttgatgaagcgacaggctatcaagaaattcgccccaaggatgctttacaggcctatttagacaaaataattagtaaagaactttctgcgtgggctaaaaagttccctgacgagttttacgaaaatatttacaagctgaaaaattggccttggtcgggtatgagtaaaaaccggtttagcgtagtcgcccattacactagggaccttgtatatgagcgtctcggcgactctattcttcaggaacttgagaaaaaaacaccaaaacaattgaatggtcagcggaaaaacaaaatgcatcaatggcttactgctgatgtcggaaaccccatgttatcgcaacacttgcattctttaattatggttcagcgattagccatcgccaatggatatggatggaataggtttattaaaatggttgatcaggtcatgccgcgcaaaggcggtacctttgagcttgaacttaacgatacttcacttgattaa

SEQ ID NO: 238214 - DNA, 189 bp, Klebsiella pneumoniae
atgtcaggaacaagtgttgaggtaaatatccagccaactcacaagtgttctttctgcggggtgagtaatgtcgagtttacaggcgttctaatcgccgggcccggcgtctctatctgtcagaaatgcgtctttctgtgcgtagaaattgtttttaaatacgccgaaaagaccgataagccaacgtcataa

SEQ ID NO: 238215 - DNA, 132 bp, Klebsiella pneumoniae
atgctatcgctctttaaccagttgccagaggccgaaaaactacgactaatcctccataccaaaggtgtattgcaagatcttgagctgctcaagaacgatgtttatgacctgatacacaatcaaaaaaagtaa

SEQ ID NO: 238216 - DNA, 1890 bp, Klebsiella pneumoniae
gtggggcagtgctcagatttaacagctctcaggactattgaaccgaccgcttctaaccagcgaattagtgttgcctcatattcacccggatgggctggacttattggcgcacctgttggcggtggtgagttctattatgaccctaatgacacaacatccgccgacgatgatatttttgtatttgttactgctggcggtaagcgctggaagcgtgcttgctcgggtaaaaaaatatgcctggaatggaagggagtacgaccgggtgatgatgctgccccggcattaaatgctataggtgcttatcttaacagcagggctgtcgcaaaaggcaccgtttccggtcttcctcgcgtgcatgttggtgcaggcgtttatcctctgtcagatacagtgagcctcacgtatgcgtttcgcataaaagcggttggtaatgttgaatttacagccactggctgggacagtacggtcgcaaaagacattttcaccatcgctaacccggctaatatgccagcagttcctgacaaggggtatgcaagcggtgacccgtggcttaatggttctgatggcaccattttaatcactggtcccgtctatgatgctgcggtcacaaacaatgtggttggcgttggtgtgggaaacctcgtcaccgggcggacgcccgttcgtggtaatgtgatgcatggcgtttcaatccgttactgtggcagtgcgatttacctgcgcatgcgtcgtctgtacctgacgtcatttagtcgtgttcactgcgagcttaataacacacatattacctgtcctaaccagtcaggcaccgaagactccggggagcgtattgcatttcatgagtgcgtttttggcgggtgcaggaaccagcacgtttatgtatatatggcaccggctctgcattttgaatcatgttcattcgactttgctcagggtagcggtatttatctggatgggatatctgagtatggtcttttttcattcacaaactgccattttgagaacttcaataactaccttattaatgcccagaccggttctcgagtcactcttctaattactaattgtgatgtattcaataacagccagactacgccggttaccgcagcatctgcttcatccccttcccgtcctatgtttaatcttgccaacggcgggaatgtggttattaacggatttaaactgaactattcatatcgacctcttggttcattgaatatgctggtttcgtccgggacacaaactgcagatacaagaacacgagtatcagttaacggactgacggcgggtgataaggcaatgacaccgtgccccgcagcagcgcatatcatgaaccgatcaaatgattttagcggggaggcggtaggctctacgattaccagcaaaatcgcatacacaacaacacatgttcagccagtacaggacattgcaagttcgtggggggcagggatgtctgcatctgttgtcgctgacggtagcacaaaggttttgcagatggtgtcagcagacaatactaacttcggttacattcagccaaaaactgctattcctgtttcgccaggtcgctcttactcagcatatttcagtgttcagaaactactggcgaccggcggcgttaactggtctgtgagctatctgtggtacgacaaagacgggaacctgttatcgaacgatagtgctctgtcaggtcagttttccagtgtatataacgacacgacattaccaggatattcaaccgacgcggctgagaatggtaaccgtaagctgagtacaactatgtgtgtgcgcattgcgccgccaggcgctgcttactgtcgcccatactttagtgtgtcgtcgtttaccggaactataaatatcgtcaactttttgatgtgggagtatcagtaa

SEQ ID NO: 238217 - DNA, 198 bp, Klebsiella pneumoniae
atgaatatttacctcgaaccaggaaccaacaatttatttattctccatccggaatcgcctggtgaggggtacgaatacattggcgaggtcagtgatgacatatcactgacccctgtcattcctggtgcgatttatgatgttattggtgcctttagtcaggaactgctatcaaccgggtttgaaatatctataagataa

SEQ ID NO: 238218 - DNA, 198 bp, Klebsiella pneumoniae
atgacaatattttacatctataatacggattcagagggcgtttacagcgtttccaccgataacagagacgcaccgatagcgcagtttgagtccagcgaaactaatcaggccgccatacttcaggcagccgatcagtgcatggcattaactggcggtgcctgtccggaaattcagattttctatgttttggaaatttaa

SEQ ID NO: 238219 - DNA, 2853 bp, Klebsiella pneumoniae
atggtcgagaacgacacttcatcggttgagtatcagctatcaaccagcactggcccttttagcatccctttctacttcattgaaaacgggcatattgtcgcggaactgtatacacagaacggtgacgactttaacaaaactacgctgacaattgacgttgattattatctgaacggcgccggcgataagaatggcggtcagctgactttgctctccgcacacagtggcgctacgctactgatttatcgtgatcccgatgctacccagttaaccagttatctggcgagcggtaagtttcctgcgacaagccatgaacgcgcgcttgataagctgactatgcttatccaaaaattcggttggtggtgggactctttggctctgaaaaagccaaatattttcgctaactattatgacgcgctcaataaccgtattcgtaacctgcgtgatccttcactggcgcaggatgccgcaacaaaaagctacgtcgatagtagtgatatcgatctgcagcagcagataaccagcaattttaatcgttcgctgcgtgtccctgactcctatataagccagctaccatcggcccaagaccgcgcctggaaggggttgggttttgacggtgctggtcagcctaaattgcaggaccctgcaggaacggggctatggggatacgttccggccataggttcgtttgagcagggatcgctactcactcaacgttttgaggttcttctgtgggaatccacggacgaatactggcgctgggatggcgtaatgcctaaggtcgttttacctggtagcacgccggcgacggctggtggtacaggaaaggggaagtgggtcgatgtcaccgatgcgactcttcgctcaaacctgggttcaggcgacggttttaagatggttggtagatgtgcgtcgctgtcatcattgcgacttactgagccagccgttgacgggcagtggatcgttcttgaaaaagccattcccggtggtcaaatcattaacgaaatattgacctacgatgcggctgacacagtcagccctgacaatggctattctgtttttgtgacagccaacggtcgacgctggaaagctgacctgtcaaaaggatataaccctttattcctgttaggggcggtcggatacgaaagtatttcctcatgcatcaacaaaatcgcgtatgacctggctgttttatggggaaacaagaaaggggttattgattactgcacaaccatccgaatcccgggcatgccgcgtggtgagacccgatatcatgtcaccggagccattcacattccttcattcgtttccttcaatttggatgtggacacttgctttgattattacggcgtacagaacactgacggtattatcatcgacaacagctatttcccgatgctactggattcaaactatgacacgtcgccgactgctcgcccgcgctctgtacttctctgggaggctgagcgtcaaaccatccaggggggcaagctcacgcttactcacccaaccggagcggccagaacgtcaaatgctggcatcacaataggtaatacggccaacggttttattgacgttcgtggttgctgccttaataattttgcatcactcggtttttattatggaataaagataaacccgtttgataactatatcaattcattctctaactttcacctcggtagaaatcactatgccgtggctgttattggtgaaaccaaaaacaatgcaggggaacgtttcgcattctttaacggaacactggctgactctgattctgatttgatatatatcgaaaataatgcgtttgagttatttttcacactttgctcatgtgattattccacgggagaccttgttaagataacaaaaaatggtaatgcgctggttatttttagccagtgtcatatagagggtgttcaggggatgctggttaatgttgtttcggcaaacacattccccaaatatgggaaaaaaattgtatttgtggggactatgatagacatagggtctggtcagtctggtgctggaggatggaataaaacatggttcttctcttcggttattaacacgtatgcaatcatcgaagaatcatgccgcgtctggagttcaacttctactatgagtcaggctaaaacagcatatcagtcactcatcgtatctggtcagccagcaaataatgccatagtactggatttccctcagagcatcgaagatttgcttgatgcctccacagttctcctggggcggtttgttgctggcggggagaataaacgcgttattagtaccaacaggtattctggcgcggctggagctgcatataacgcctccgtatccatggctgattcctatggatggtacaatgttaatggggcatgggtatatgaggatgcggatgttgatgacaatgacgggctgcaatcaatctccgtaacgtcggataatgaaagtaacgttttttatatcatgctatcgaaaccccatgaggtaataccgcaggataagttcagggcgctgggcgcaatcaaagtcgccgcaggatattccggagcagttaacgttgcgtgcgtggttgaagtgcacagcatttttacgatgaacagctcagccctggcagacaccacgctggcaacgacatacagtccggcagttgatgttgctgcactggccgcagctaacgggaggattggtaaatttcagggtttttgtacgcaggccgcacaggtcaactcatattcaaacacattgcatccaatgcatcatgttcgtgtggggttaaggatttcaggctttaaaggaactatttcactgaaaatccccaccgttaccagccacagacttttgagtgcgtaa

SEQ ID NO: 238220 - DNA, 213 bp, Klebsiella pneumoniae
atgaaccgtgagtacagccaggtaatatatctcgcgatcggtattgctatagcaatcagctttgttaccattctgaatgatgggttttcactgctgaacattctgtgtggcccttttgcagtaatcggaactgttgcaggattatgtatcgcttggtattccactatcggcatcaataaaatcctgcaaaaatttgggttcagggattactga

SEQ ID NO: 238221 - DNA, 372 bp, Klebsiella pneumoniae
atgaatcagctgaccaaaaccaaacctatccttttaacctacgcacaacgcgaagcactggaaattatccagagtgaagagcgggcgcgttctccttacggcgctgcgccgtctatccccgaactggtgcgtagcctgcttgatatagcgttaaaggatgtctacgcgggcattgaaaagcagaaagaaatgaaggcgcagcaggaagatttggaaaaacggctagccaccgcgccggtagcagaagaagcgacaaaggattttcttgctacacgtaattctctgctccagcaggaacatggggcagcccccggctcattaaattacatgggcgcaactatgcttactgaaacaaaaccagaggaagcgtaa

SEQ ID NO: 238222 - DNA, 2256 bp, Klebsiella pneumoniae
atggcttcagcattagtaattgatgagtttgcgattaatattttattggctaattttgatctaccgatgaattggttgaataagtttaatccagatgatttgcccgagagcatcttttggttcaaggaacatgattctaatgtactatatcttttaagcaaacaagcccatgagaaatctaaactattgatcatagatacctgtacgagcgggcttttcgataggattaacaaaaaaacaaaaaatgatgctttttataggatattaagagtagggcacttatcaatgtcccctgggaaaataatggtccctacaaaatgggccccttatcattcaggttcattattatctatacaatccagccatagttttaacaatgataagggaaggattttcttcgatctaaatccgaatgaaactgatcatacctacgtttattcttttgataataaaaaaacagacataacattagttaataacaacagagaaatttttcttaaagctattaatgcatatgaagatgctctcattgcattgttaacaaacgatacaattaaaaatgaaagtttcggaacagggaaaattacacttcccccacttcaagataaattaactttaggttttaacctgagggaatggttagatgctaagttgacaattgaacaaagagattttgtttattctgaaattgataaaagtattagacttgtaggtgccgcgggtactggtaaaacattgtcattagtagttaagtgtttgtatgaatttagtaaaagatgcgttcaaaatgaagcggttaattttctttttttaacgcataattcatcaacggtggaaaatgtttcgcaatccttagacataatggataatgaattattaagagagaataatcctcaatcaaaattaaccatatgcacattgcaagagctggctaatgaagcgattaagtattcacttaatgatttacaacccttatcaatggatggctacgaaagtcggctacttcaggtagaggtcattgagtcaattgtaagagaattcaaaaactctgattgggttatttttaaaagccaatgttcagatagctttgcaggatatatagatgcagatagtcgttctactgagtttcgtgcttttgcagtagctcttatgaatgaattcgcttgtgttttagaagctgaaggtgttaggcgtagccttgaaaagaaaaataagtatttaactgagacaagaaaacaatggatgatgaagttaaatagtgaaagtgaacgtagagtagtattacatttatatgataaatttaggaatcaactaagagatatgaatgtgattagcgctgatcaaatgatttctgattacttaggctatctagatagtaatgcttgggataatcttcgctttaaacatgggtatgatcttatttttgttgatgagcttcatctctttaaccgtcaagagagaatgacatttcataatttgatgaaggattgtgatagcattcctaaaataattatggcttacgacacgaagcaaagtacatatgatacattttgcgtggacttgagtccaaatactaatattgcgaattcattggggttagggcagaccaaaaaattcaaattggaaaaatcgtttagatatacacatgaaatagcaagtgttctcgaatggatagataatgcgtttccagcattaggcattgaagatgagttaggtgatgattggaataaaatcactataaaatcagagaataaatatggtgataaacctaagcttgtagtttgtgataatacaagggaaatattcgattatgtttttacttctgccgatagaaaagcaaaaacactttctcaagctaatcaggtcgcaatattatgcgcaagcgaagatttgttcttaaaatacgcagaagcggtaagatatcaagatctttttacattaatatctgatcgcgagcaaataagttcaataaataaaaataaaaagaaatttatactaagtatgcctgaatacgttgctggaacacaatttgatactgtttatttgattgaagtaaataaggatgaagttcctgagggtagttatcattcaagtgctatgagaaaatttatttcgaatatatatgtcggtgcaagtcgcgcagagaacacacttcatatatttgttaatacagatagaggtggtccttctactgcattgaaatatgcaattgaaaatggtgctttagatattcataatgttaaagaaatggattga

SEQ ID NO: 238223 - DNA, 1053 bp, Klebsiella pneumoniae
atggaattatacgataaagacgcgagtctatccacaaaatcacaagccgtaatcaatcgcatcaatggtcgcacattagcttatgtgaaatcagctacgtacaaacgcaatgaattaaaggcggagaataaacgccaatcatcaaaggctaaccactgcataccaccagcctggacaaagaagaaatggcgcacaatgaggcgagctttgtttactctggatgtcgaatcaactagtggtatcccctactcctttaccttcagacccgttaagggaacaacgccagagaaattcaacaaagtgttaaaggcacttaccagatggttgacttcgaaaggcaatcagtgggtttacgtcatggagtgggctcgacaccagtcagagccgcatgtacacgcaataatcatgatgaacgaaagaagcattaatgggcaaactggcaaaattatcagcaaatgggtaacactggcaaacaatgcaatcccatcaaatgatcctccccagtgggatctagatttgaaaggtcagcaatattcagagcctacaaagtgtataggtaaacagattgattacatggcaaagcccgaaactaagttaaatgactttaatagagaggcgagcaagagcctatatgattggtcagatgccaacgtttggggttattcgaatggctgggcgcggcatgagataaaaaaagaaacactttctatcactggctttcatgctgtaagacgcatactaaaagccgttcaggcatcaaggaaagacaactacaaagctaagcgacagatacagcgtacattgaaacgacaagacataaatcgctcaccaatcaccccgttccaagcaccgttaattagcaaacacgatcgggatttatcagtgatagcggtcaccaaagaggcagagacagagcgcagggagttactatcctcacagataataaactcgaacaaagtacaaacccacccgctgttaaggatgctaagaaaagcacgagtgagagcatccagagccagaagagaaagcggaggttatgaccattactactag

SEQ ID NO: 238224 - DNA, 387 bp, Klebsiella pneumoniae
atgagcactcatacacgtacccagatcgccgcaaatatacgcgatagcctactaagtggcaggaagcttaccccaaaggagtttgacgacatattaaggaaagccggaaatcacgaacgtagtcgcgttttaacactgttacgcaacgattgggggattcctgttgagcagtttaagacaggggcgtatcacgtcacagaacgcgatttagaagcatatcacagcgataaagacgaaacattgaagatctggaggacgaacgccagatatgtaaagacattgcgtaaggtaaacataacgttgtcattgttgcgtgggctggtgggcaaagtgcctgaagacacgcttagaactgtttacaagggtattgaaaccaaatacctgtga

SEQ ID NO: 238225 - DNA, 195 bp, Klebsiella pneumoniae
atgattaattatctgaccgctaaagacgcagcagaatatcttggcgtctgtctgtcacgcttctatcagttaaagcgatatatccccagctttcctccctatataaatcagaccatcaatggacgcaagcgccgggtgtggcttgcctccagccttgatcaattttccggcagatttctggggggacaaaaatga

SEQ ID NO: 238226 - DNA, 192 bp, Klebsiella pneumoniae
atgcagttgaaacccaccaatcaaaagctgaacgtaacccatgttgattttgaaaccttcgcggaactgattagatcagatccacaaaaggtaagcaccagcacctgggtttatgatttgaaatccaccaacggtggaaaagctatcggcattgcctctggcgatgattacttagtaatcgatctgatttaa

SEQ ID NO: 238227 - DNA, 192 bp, Klebsiella pneumoniae
atgaaaaagtcgctgattcggctatctgaggttttgaaacgcactggctatagcaaggcgtgggtatatgctctgatgagccgaggacaattcccccaatcagtcaagattggtgctcgcgcaatagcttttattgaaagcgagatcgatgactggatcgatcaacgtatagccgaatcgcgtagcaactaa

SEQ ID NO: 238228 - DNA, 756 bp, Klebsiella pneumoniae
gtgactaagatgacaggactagatgcgttttataacgagtcagaagataaaatctggtttggtaatctgatcagcgaactggcaagactaaacaatgaaaatgaaagaatgatagctgccgcaatcttaagtaactacagattgagcaaggctaaaccagatactttaggggggctgggcttttatcagttcgattgggtatctggttttacgactaataaagactttgaaaagcagtgtgtggagtttttaggtcttctggctatggggcatgaatacagggagagcctgataccgggggaagaagggactttcaacgttaggaaaggagaagactttttatatcacgatgatgaggatgattggtatgggtcttacgattcgttttatttcaagcgctccgagcttgtgagcttcttcccagaactggatatgaacgttccagataacgaaccagaaattggtgcactgtcaaaaaaagtagaaagagaacaaaactggagaggaaaagatacggctttaaagatgatcgccggaatggcgattgccttatttgaatcaagcaaagattttcatagtggaggaaaccttagcatcaatagggttagtgcccaagtaatagaaaacaacataatattcgggaaggatgaagacagcgatacccacccagatacatttcggagattgctaacgaacgctttggataagtacgcacccaaatttaagaacaaagcaaccaaaaagcgcccaaaataa

SEQ ID NO: 238229 - DNA, 1338 bp, Klebsiella pneumoniae
atggggcataatttggggcattgttggttcgattgtatatgtgcccccaatatgaccagaaaccccctcaacagattgacagatcgtcagtgcaaaacagccaagccacgagacaaagcttataagctgtctgatggcggtggtctttatcttgaagtatcccaaatcggttcgaagtattggcgtatgaagtatcgccgcccatcagacaagaaagaagacagacttgcttttgggatatatccaaccaccagcttacaagacgccagagaaaaacgagacgacgccaggaagctgctatccagagggatagatcccaaagccgagcaaagagcagcaaaagcggaagaaaaaggcgcattcacttttgagacgataggacgtcaatgggttgaaagccaccagatgtggaacgaagaccaccgaaaacgcgtacttagaagccttgaaatgtatattttccctcacattggcacttcggatattcgcaaactggaggcgatgacaattttacctttgtttaagaaggtagatgacgccgggaaacacgatacagccaaccgacttaaacaacgagttaaggacatcatacatagcgcccgtctgagcggcattaagacagaaatcatcacgaatgatctcgatgtccggttaatgcaatatgaaactaagcatcatgccgcactacatcccagagatttaccagactttttcactcggttgggcagctttaaaggtaatcctcttacccgccttgccattgagctaaccatgttcacctttgttcgttcaagcgagttaaggtttgcccgttggaaagagtttgaccttgatcgggctgagtggattatccctaaaaaaagagagcctatcgatggtgtgaggttttccacccgtggcacaaagacgggaaaagacgaacatatcgtgcttcttagccgtcaggctgtttctattgtaaagcagttgagagaactaagcggaagctacgatgttgtgtttccgaatgaaagaaacaccaaaggcgtgatgagtgaaaacacggtaaacaaggcattacgcttaatgggctataacacgcaagaggacgtaactggacatggattccgtgccacagcctgtagttccctgatggagtccggtttgtggcaggaggacgcagtagagcgccagatgagccacaaagaatataaagacgttaaaagagcctacaagcacaaggctgattacttagaagagcgcaaactaatgcttcaatggtgggctgactatctggacgccaatcgagaaaaacatataagcccttatgagttcggaaggagaacacgtcgtgactaa

SEQ ID NO: 238230 - DNA, 231 bp, Klebsiella pneumoniae
atggccatacacataagcatactatttatttccttattttttgtgaatcagataaattttcagctagctaactttggtagccagaataaatttatgcgatttacgatagagttaagctattcctcctgtctttaccaattcttgtgcgggattccccacaatattatcttcggcgggtttcgtagcagaaaccgtttcctgggcaggaaccgactcactgacaccggatga

SEQ ID NO: 238231 - DNA, 150 bp, Klebsiella pneumoniae
atgagcggtaaacgttatcccaaacagttaaaattgaagcagtcaaacaggttattgatcgcggccattctttttttcagtgtggctactcaacttgatatcacctcgcacagtctgtatcccatcttcttttctcatcaaaaggagtga

SEQ ID NO: 238232 - DNA, 672 bp, Klebsiella pneumoniae
atgatcttacctcttatcgacttgtttagaactccatacacaaacagttacatgaactgctgtttgatatccccatatcaggcagcagttcatgctgccaaaactgtgggtacagaccaaggattaactttccatatcgaagacgctataaagcaacacccttcgtggttgtcttacatgccagaaactacacctaagccgattgcagaatatcaaggagatacttattgctgtgatctaaaggcagtatcagaagcaattcgcttaattggtaggccggtgatgccaggtcaatatctatttcatggcggaaagtggcccactgaatataaacacggcgctatatttgaaaccactcggccattatcaacaacattatgtcccaatatcgctatgggagttccacagtggcatggtagagcatatcgtaataatgcaattgatctatttgtacttcgggttagtgaaccacgtgcaaaaggttttttctttaacagtaaagatatagatacagggcacgagaaagaactggtttttgagcaaggggtaaaattaacacttacaagctgtgaggatattcaggaaattcctgttgccgattttaatcttagtagctcagtacaaaagaccaaagacgtaactgtaagagttttagctatcgaaatatcctga

SEQ ID NO: 238233 - DNA, 876 bp, Klebsiella pneumoniae
atgactatagccgcagcttgggtaagaactttaagaaattgcaaagaattgattgtagtatcagatagtagattaaatggtggtatgaaaatggattgtgggcagaagataataactctgcctcgttcagatgctttcatatgtttcgcgggtgatactagttgggcatatcccttgatgcatcaagtggcatcagcaattgacatatatgatcgttgctcctcacgagcccaagatattaaagaactcaaaacccatattcttaaaatttttgaacgactgagagagcaaattcacgatgctataggtgacatggatatacccgatgcaaaattcatattcgggggatattcatggataagaaaaaaattcatgatttggcacatcacctaccaaaagagtaccaactcatttcgtgcggatcctgcacgtgaaatatatggatcacctgttgtatttactggtgatgaagaacatgtaattaaagctaatgctatgcttcgtgaaaaattaaaatcgagagggaagctggataatttagaaagaggcataaaaaatactgttaaatttgaatgggaaccatttgaagttattcgagacatgctttacaaggttaatgaaagttcttatgaattcaaaaactcatcaattggaggtgcgccccaagtcctaaaaatctatgaacatttatcaagtcaaaaacttggtgttctgtggatgaacaggatggatagtgaaccgagcatatatttatcgggccgaaggcttactaattatggcccgcgagatatatggatattagaccctgaaaaactgataacgtacaatccattgaaaagtaattccgataaggaggtaattaatcaattcatctaa

SEQ ID NO: 238234 - DNA, 903 bp, Klebsiella pneumoniae
atgcagacaacaacactctatgttatcgggaatggcttcgatctcaggcattgcatcccctcaagcctgtggcattttaaggaattccttcgggcgagggattcggatatctaccgggacgttgaagaatatctacccgtggatgatgactggtgtgatcttgaaactgcattagcaggtcttgatgccgacatgcttatcaacaatcttggccatttcatgagctcttacggcgatgaagactggagtgatgcaggtcatcatgattttcagtatgaggtggagcaggtagtcagacgcctttctaagggtctgcgttaccaattcggactgtggatccgtcagttgccgataccctcgtgtacaaatgcacctaaccgcttgactacgctggatccacaggcaacctttctgagctttaattacaccaatacacttagtcgtgtctacggagtcgaaccggagcgtgttcttcacatccacggttctgcggagacgagggacgatgatttgattctggggcatgcctgggagccgggatcccgcccctctctcaacgaaagagccgatatcgcagagattgatacccggatcatggaagcgaacagcatcattgatgactatttcttcgcgacttttaagccttcacagaagcttattgctaaacaccggcttgtttttgaggagttgagcgaggttaagcaggtggtgattttaggccattctctgtctgaagttgatgcggcttatttccaggctctttttctgcagaaatccgttgcagcagcacagtgggtaatagcgtgccgcagcgaagaggagtgggatgagaaatcccataatcttgaactaatggggatcagaccagcctctgtcagaaaagcgctgtggggtaatctgtaa

SEQ ID NO: 238235 - DNA, 132 bp, Klebsiella pneumoniae
atgctgttcccagcgttaagacagacactgccgctcccattcaccagcctcaccaagcttgataaactgaactactgtcgggatgattttttccataatgttccggtgtggttagggtatctactgatataa

SEQ ID NO: 238236 - DNA, 618 bp, Klebsiella pneumoniae
atggatgaaaacaatcgacctgaaaaacatactgacaagccagctaactcagataaatggacactttgtgatttattaaacccttttatcgaagtctttaagatttttacttcaaaagatgaaaaggcagttgaaaatgcagctgaaagctttcaaatgcgaattcagaaatggatatttcttacattaagtctattacttttagccaaaggtttttttgaaatattacaaaccctatcgttcctagatcaacctattgtgctaaacattccaccatttaaagaacctctcattttttataaagaccatggtttagtaggtggattattaagaataaaagcacttgtattcattgccaatgctctagccctttcgtgcggattccaattagcatatatgcttgtaactaaaggacctgatgaagcagttgaacccattatgctaggtattgcatctgctattctcctcattctttctgatagttcaccaagtgcatggggacaaggaaaatctttagcaattttccttttgataattagcattccaattttatattggtcatcaaggaagatgaaagaagataaaaaaaacgacactaaaaaagacgaacatgaataa

SEQ ID NO: 238237 - DNA, 1080 bp, Klebsiella pneumoniae
gtggcgttatcagatgcgttaattacagtaaatcaagccgaacggggcggtgaaaacgcgttgagaggcttttcatatcaagcctcttgggggataaattatttacttgagaaacaaaaagaaaaggagaaatatttatttctatttgaatatcatgacgatattcttgtattgaattcatctgtttctccgactagtgctgagtttatccaagttaaaacaaaaaaagatggtaaatggacactcgcagcaatagtgaacgcaacaaaagctaaacctaaatcatttgttgcaaaactatatgaccatttctatcaattcgttggtcacgaaatttatatggttctgttatcgaatgctggattcgatttcttaaatgataataacgaaaaaggtagtgatcttaataatgagcataaggaaattataattagtaaggttcaagagcagctaaatactaaaaaagaagttcctcttgataaaataaaatttaaaacatctgatcttagtttgttagatcctaactcacatttatacgggaaagttgcagtttttttgaattcttactttggggatgatcatggtattaattcaacagcattcactaaattattaatcaataagtgtaatgagaaggttagtgttgcttctagtgatatcaaaacttttgaagatttagtactaaagaaaggtatatcttcagaatttgtaactgatttattatctggactcattgcaagcataaaaataacgccaaaatgggaacaggtttgtatgttgcttggtactttctcagatccttatgaggggattaaattacaatcagtttttacacgcatatcaataaaagtgctcaatgtcaattcaatatactatctttattttctggaatttcaatcggctctaaagattatagagcattatcgtgagatacctgttcgagacctcttctttacactcgaaaaaacaattgcagcgggggacggggatttctctttattaaatcaagaagagaaatttatgattgctatatatgcaattataaagttgacttttgaggatgtttcttatgaagaataa

SEQ ID NO: 238238 - DNA, 699 bp, Klebsiella pneumoniae
atgaggggttttattgcgcttagtcttttgatggcctcaggcgtggctgtggctaatgaaaatcttgtttgtgagtatgcagtcggggatttttcttcacctccaactcttctcactaaaggcagcgcaaatgtgatattcaacggaaaatcttttacagcatataggccaggaggctcttatgtagtaagcccaccactgactgaaaagaaagatggtatgattttcattgatgataaaacaaaggtatttgccgctagccaggacaaatctaactttgcgatatctgaccgaataaaaaaaaccaccgagcagtgggataaatgctcagttgatgtcgctaaagatggcctagatagaacaaaatcagacgtcaaagagcaaatgaaacgaattgcatccattccgtggggcggtaaagaggcacataaatttttcctcaaggagactcatcttttcatgcttcttgaatgtggatgggctggtagtgtagggttttcaactggctataaaccgcttgttatgattggagaatcgtattaccagggtgaaagggcatcatttaaaaatggagagtattctataaccttcaatggtggttcaatgagagttgcatacaaccctcaaaaggtcagtggatatatttcagatgcacacagttttactccatgctcagcagtgcgcttaggagaagattga

SEQ ID NO: 238239 - DNA, 204 bp, Klebsiella pneumoniae
atgcagtataaagtgctatttcacgcctttattgaaggcaaaaaacaaactcttgatgctgtttttgaatcatctaacgagccgaagctcaatgataaggaagttattaaagccgtgatgcatgctctctctgacgtcgtaaatgtggaaacttcaacttttacaattgagttccatattgatgctgtcgtaccgatagtttaa

SEQ ID NO: 238240 - DNA, 210 bp, Klebsiella pneumoniae
atgtctataagtgaacgcaaaccaaaatttaagaccggtgatatcgtttatttagtttcatccggcccggcgatggctgttcaggaaccaatcattaacacctacaaggaatttactggcgattactggtgccagtggtttgcggggaggaagcaagaaagagcaagattcccagaggactcattgactgcaaccaacccaaagccgtaa

SEQ ID NO: 238241 - DNA, 171 bp, Klebsiella pneumoniae
atgcgcgactggagattagttttacgcgatatggagcgagaagaggagcgtaagcgctctatggtaaaaatcgttcaaggagaattacgaaatcaaaaatgtccgtgcggtagcggtcgaaaagctaaaaattgccagtgcgatatgttcaagggggcgaaaaatgcctga

SEQ ID NO: 238242 - DNA, 537 bp, Klebsiella pneumoniae
atgatttaccctaaccagcaacgacttaaggagttatttgattacaaccctgaaaccggaattttcacgcgattaaaaacagtcaagtctaatgccatggcaggagatatcgcaggtagaaaaggtagctatgggtacattcatatatcaatagacggttcgagctgtctcgctcatcgcctagcttggatttatgtgcatggaaaacttccggaaggaatcatcgatcacatcaacggcatcagaaatgataaccggatattaaatcttcgcgaagctacagacgctgagaataagcgcaatgctcgcaccccattaaggaatacatctggcgtaaaaggcgtctcttgggcaaagagagagaaaaagtggcaggtgcatatgaagctggacggaaaaacatactggtttggatatcaccgagactttgaggttgcaaaggaagtggcgaggaaggctagacagagcctccataaaaaatttgccaatcatggtgatagaaccgatttttctctgcgcgagggggccgacaaatga

SEQ ID NO: 238243 - DNA, 285 bp, Klebsiella pneumoniae
atggagaatgcaattaaacgcaataaggacaacgcacgtcgcatcgagacatggctgctgaatcgcatctctctcatgggagggaaaaaagtggccctggcggtaggcgtcaatgaatcgcaggttacgcgctggaaatcatcgtgggtgccgaaaatggcgatgttactggctgttcttgagtggggcgttgtcgacgacgacatggcccgccttgcaaaggaggtagcaaaacttctcagaaaagagatggccccaaagtgctcgaaacactttgaggcctga

SEQ ID NO: 238244 - DNA, 720 bp, Klebsiella pneumoniae
atgaaagaacgcggaatgatttttaacggggagatggtgcgcgccatcctcgacggtcggaagacgcagacacggcggattatggcaccgcagccggctgacgacattgagcgtggcattttccctaacccagaagtaattggctggaaatcctctcggaggcacaagcatggcagcaccactgctcatttttgccattacggaaaaccaggcgaccgtatctgggtgcgtgaaacttggggcgttgtcagtcacgcctttagtgacgatggcttgatgattgactgggttcctgatcgtccagcgactgccatccacgaaatgccgtttggcaatggctattactctggctacgccatttatgcagctgatggtgattttacctggggtgatgacgatggttatgaagatggccgttcgtgctggaaaccttccattcatatgccgagagcagccagccgcattctgctggaaatcaccgacgtgcgagcggagcggctgaacactatcagcgaagaggatgcgcgagcagaaggcattattgacggtggctgtcttaattgcggggaacctgagccatgcggatgcgccaacccagagcctgacgctaccgatgcttttgcctacctgtggcaatcaatctacgggcaggaaagctggaatgctaacccctgggtttgggttatcgagttcaagcgcgttgaaggtggtgcagcatga

SEQ ID NO: 238245 - DNA, 477 bp, Klebsiella pneumoniae
atgaaattcaatattcgctctcaaattgtcgaaatggatgaggccgatgctctgagctttgtaggttatcccatccacatcggctcgaatggctatgcaaaagtcaccggctggcattttggcaaagaaagataccttcatcgcatcatcatgaatgcgggaccgcatgatgtcgttgatcacgttgatggtaataagctcaactgctctcgctcaaacttgaggatctgcacccaggcagataatgccaaaaatgtgggtttgaggagtgacaacagctcaggaattccgggtatttattgggtacccagtcgcctcaaatgggcggctcaaatttcagttgatggccggactgttggcttaggccgctttgatgaaattgccgatgctatcgatgcccgccggaaagcagaagatttgtattacggggagtttgcggccagtaagggggtgcttcgtgaaaaagcgcgccagtaa

SEQ ID NO: 238246 - DNA, 834 bp, Klebsiella pneumoniae; identical to SEQ ID NO: 142253

SEQ ID NO: 238247 - DNA, 204 bp, Klebsiella pneumoniae; identical to SEQ ID NO: 142252

SEQ ID NO: 238248 - DNA, 369 bp, Klebsiella pneumoniae; identical to SEQ ID NO: 142284

SEQ ID NO: 238249 - DNA, 225 bp, Klebsiella pneumoniae
atgatggcccgccagggagtcagtggtgcgcaatgccgcaattttgccgaaaattataaaatatttttcacgctttttttaattggcgcatcttcatttaattatctaacgaaattacgtaaatactacttatttttcagctggttgatgtattttctcgctatgagaaagttatttttttattcccgcatcgtttttctcactctcaataatatttccccctga

SEQ ID NO: 238250 - DNA, 1311 bp, Klebsiella pneumoniae; identical to SEQ ID NO: 5783

SEQ ID NO: 238251 - DNA, 303 bp, Klebsiella pneumoniae
gtgcgaaataagcaggtggtgttactcattgccggaatatccggcatcgcgacgggaataatcgtcagcctgaatatcccctttatccgtcaggggcttttttatcccgccagccctgtagaaattgtcgtttcgctgtgccttaccttttctgtttctgttgtgttttttgtgggggcaattgtgggatggatttcggtgtctgaaatatattacagccgcaggactggacggaaatatcgggatattcctgctgaaatgtcgtatgcgccgggagaacaaattaagggagggcaagaatga

SEQ ID NO: 238252 - DNA, 453 bp, Klebsiella pneumoniae
atgagtaataatataaaatatggctccagaatacttgatatgggtgttctgctggagatgaaagcgcttgtgaatgcaaatggtggtgtgtcacggtgcattatggagtgtcggcagcttgcctgtgaggtccgtcattcgcaacaattactggataagctgtcatgtattgacgactggttgtgccggttttcctcaataatgtatcaccgttttgataaagaacagattcagtggcgggaggatgtggacagggattatcccagagaaaaagtttatattttcagtcccgataatgtctccgtccataataatgatattaaagactctgccaataacacatcaggaataaccgtgtcgattacagccagtaaaatatgcgcaggtcagaaagagtttgatgcttttttaaaactggcagaaaaattgagagaaaaccctacgggtaattaa

SEQ ID NO: 238253 - DNA, 462 bp, Klebsiella pneumoniae
atgtataaacaggcaacagaattaatgctgaactttaaagaccgcattctgattaagggggaagaagataccggcaagtcaactctcctgactgaaataagaatcagtgatagtgattcccggtattacaactttaaaactcttaactctgcggggtacaaccggctttgtgatgaaaatattgataattttgattttctgaatacacctgaaaagacgttaatccttgatggagtcaggctgtgtgaaaagaaaatgacatcaaaagttatcaggttaattaaacaggccagaaaatatcataaacgcctggttgtggttgcagactcatgtgagtctgagtttatcgaactgttgtttgatggtgttattgcattgtccttcaattctgacagagaaaggagttgcaatgtttatacgccatcaaggcatcgtaatacagataatatttatgccaggtaa

SEQ ID NO: 238254 - DNA, 573 bp, Klebsiella pneumoniae
atggcaaataatacgtcgtcccgtcaggcgggccatgccgcccggtatgttgtcgcccgggttctgcgaggactgttctggtgtctgaaatacgccgtcattctgccactggccacaatggccctgatggctctgtttgttttatggaaggacaacaccacaccaggaaaattactggttcaggaaattgacttcgtaagacaaacagcccctgccgggcagtttcctgtaagagaatgtttgccttctctgcatgatcttccaggagcagaagagaaaatctgccgttaccgtgctgctgatgctgcagattatgtcagggagactgaccggtcactgatgcaactggtcaccgcattctgggcaacgctggcacttatgtatatgtcgtttgcggcaggcaccgggaaatatccggtgcgacccggaaaaatgaaatgtgtccgtgtggcaacagcagatgagcgtctgaaggaagttcttgcagaagacacttccctgccgggaaaaatcagggaatgccatgtttatttccccgatgacagaacaatcagaaacaacggagaaaaatga

SEQ ID NO: 238255 - DNA, 555 bp, Klebsiella pneumoniae
atgcccggtgacatgatattgcgtgttcagaatgcgctcgtgacgcagacgggcgaaatacgccccggactctgtactttccgtatcacccgctgtcaggaaaggctccgcgtagtggtaaatttcaccggcggtgatcccttcctgactgctgatactttccgtgctgtcctgcggcgtcagcgcttcccggtagttgtagtcccgggtggccacccttccgctcaccacgttatatgcagtctgaatatcccagatactctcctgtccgctgtcactcatcccggcctggttgcgcagtggcagcgtgacgccaaattcatactgctgctggctgtcctgaaaaatcaccacgtcctgttcaagtcggctgtccatttcatagcgccagtaaatacccacctccgccagcaggcgctggataaactcaaggtcagtctcccgccactgggtgatgagctcccgggacggatattcgcgggaaagccggaactcgaaatcaggcccttccagaccgtgtttacgcagtaccttttccacaacttcagtgactga

SEQ ID NO: 238256 - DNA, 327 bp, Klebsiella pneumoniae
atgcatcgcttcggaaagtgtcggatgcgcaaagatcatcgacaggagactttcgtctgtggcctccaggtgacgggcgatgccaaagccctggatctgttccgtgaccagtgcgccaaccatatgcgcgcccagcaactcgccggtttcagcatcgaaaatcgtcttcacaaaaccctctgtctcgccgctggccagcgccttaccattgctctgataagagaacttaccgatcctgacgggccgtcccctggccagggccgtcgattccgtcaggcccagactggcaactggactgaccccataaagttggatggttcatattaa

SEQ ID NO: 238257 - DNA, 2166 bp, Klebsiella pneumoniae
atgtctaacggcaacattatagtcagtaccctaacaaacagggtcgagtgggatgtagaccggacatcatatggtaaggcactcaaagctgtaaaatctctcaaagccgctcacgagaagcctgctaaagcgctggaggctgcacagaaacgcgcctcgcagagtgaaggcaaagcagcattagccgcagcgaaagcccagacagcgaagctacgccaggccaaacagatcagtgctgaacagcagaaacaagcacaactttcagccaaggttgcccaacaagagcaggcccacgctaaaaagatggctgctattaacgctcgtggtgcagtccagcaaatcaatcaggccgatcaactggcgaaacagaatgagcgcctggcccgtattagcgcgaaggtcagagcggcggcacggtcaagatcgatgacctataacccagatatgggtggcacagctcccgaaccaggattattagcagcgcaaacagcagcaatgaatcgcggccatgcttctatcgctaacgatattatccagacgaaaaaggctatcgcactggaagagaagcgccagcgtgagaaagaagccagcctcaagcgccagagcactgcatacgataccctacgccgggccagcttgacgatcagccatatcgaaggtgccagcctggctgacaaaatgaaagcggtgcaggcaatcaaagaggcgacccggggttacgccgagcagcgttttaccatcgcagaaatgcgccttgaacttgctaaagcgactctggaaaccagacgccaggcacgattaaaccgccagattgttaaggatagagcgaaagctgagcgtgctggtcgcattaatgccgaacgtttgacccgtgagcgcaaagagcgcggttatggtggactgacgacggcaggcgttattgcaggtggttccctgattggctcaatgggtgttgctcgtgttggtcagaccctgcaagggagcctcgaacgttcacgcgatgtgaaaaagctgcaacagtatggaatctcacaattggagtttaccgcacttcaggatctggctatgagccgtgtcggttactcactgagtgctgacaaactcgctgacctcaacaaggacacgactgaaaaggccggggaattgctgaataccggctctttcaaacgtaacaagaaaacaggacaggtgaacttcagcggcggaggtgagttcgcagatatcatcaataatgtgcttgcttccaccaacggcaaccaaaaggtagcccagaaagtgattggggaactgcaaaagctgaattttccaactttcattacatacttgaagcagttgcagaaaacttttaaatggacggataaccagacccggcacctggctgaagccgtaaacgatggttctgtcttccttgaggttttcaacgatgaaggacagggcttgataaatcgtatgcagaaactttctgctgaaggttggacattatcagaagctcagcaagccaacctcgataagttggcagcattaggagctgagtataatcgagtgcaaaccagtctctctgaccacttttcaagcgcctttgtgaatgggcttcaggattacgccaccaatacggatacactccgtcagtcaatgacaggattaatcccgattgctgacaatctgggccaatcgctgggtgaactcacaactaacgttatcgcgtgggcctcgcaaattggaggagaactccagaaaggtgcgacattaccgagcgctatctataacaccaccgttgatgaaggcagcaatgccgcggctcagtggattaaggataggacaggttttgatcctcgtgtcatcggtcagacccttaaacagatttacccgtggctggatagttctgcacagaacaacatcggcagtggacaggcttggacaaatccggggttaacccgtggggttgctggattcagtcaaccacaaatcaccttcactccgcctgagccattcggttctactggatggagaccagacagctccaggtttaatctgactggtgaggcgacggttaaagtcgaggttgagcagactttgaatgctggcgttttagatggtcttattgatacaaagatcaacgataacaacgtcagacagcagaatatgatactgggtatagcagattaa

SEQ ID NO: 238258 - DNA, 630 bp, Klebsiella pneumoniae
atgaacagcagagtatcgcaaaataagccagagctatgggttgaagaagatcgccagcttttctttgcagaaaccatcacaattaaagcaactggtgaatgtttcaacattgaggacaaacttgaaaagattcatacctacatgcttgaccaatataacagttaccaagctgatggtaagagtttctacgaagatcagcgcgatatcgcgactaaatgtaaatgcacgccaaaaactcttggcaagtggctgaaagttcttcaagcacttggtctacttatcattgatgagagccagaagagccacgcttacacggtgcggtcagtagtcagccagcaacacaacttgattttcagctatccggaattgttgaacggcaagccgtcatacgaccatgaggaggcgcttaaacgcctttatgcatctcagggacgtaggaacgtaaaaaatcatcagctaaaaaccgaagagagcggtaagaatgagcaaaaacctgttgtggaatctgccccgcctgctgttggaaaacccgacggcgtacctgttgtggatattcctgtcgatgctgatgtacctgccaatgatgatgcgatgaacctggatgaaatgtttaatgagatcccatactaa

SEQ ID NO: 238259 - DNA, 192 bp, Klebsiella pneumoniae; identical to SEQ ID NO: 109436

SEQ ID NO: 238260 - DNA, 738 bp, Klebsiella pneumoniae
atgtacccaacccggtgcattaggcccctattatttaaattctgggaaacgagagtgaaacaccctaagagatacctccagcacggtacgagttttggcggttcagattcatggcgtactaatcccaggatgtttgcaaacctcgcccgtgagttcggcgggtttactctggatacggcagcgagcgcggataacgcactctgtgagcggtattggtcggaatatgatgacgctcttacgcaggactggtctctggaggatcgcgtgttctgcaatccgccgttttctctggcggctgagttcctcgctcaagcccataaaccatgcctatctgttttcctgatcccgtgtcgccctcagacctcgtggtggttgcggtacgtatggggcaatccccattgccacgagatccgcttcctgcaccgtggcccaaaattcttgcatcctgagacagggaatagtgatatccgggcaccgcttcccgttgctgtggtcatatacagaaatattccctgtagcggtgataaacggatgatcgtctgctgtgctgacacaatgctcaccctcgaagtgatgtctaaaggcagcaagccgggacggccaaaactttatgactggcagactttggataaggtgatcaacctctgggacaacaaacggcagacagccaaacagatcgcggagacgttatctatcccactgcgaacggtccaaagggtagttcaaagattaacctga

SEQ ID NO: 238261 - DNA, 690 bp, Klebsiella pneumoniae
atgttaaacggctttggatatttatgggttattagagtttttttaatcatagccatcttatcacctttatacgtctacttgacaaaaaattcaagtccgtattcaatcgctataattgttctttttttactattggttagtttgctgttatcaatatttccatatgaaaaacatgggaaattattatcgcatatttttgatgatgtgctatttccagcaatatcctacggggctgttttcattttagggtataattactttctttttaataccaaacaaaagatatttgtattctcgttatttttgctagtattttgtctttatttgatgttaaattatttcatgtttggggtggttaatggaccgcagtcttataaatacccacctacattatattacattgcatattctatcgttgttatgttggtattataccacgccgttaatttacttatgttacgacgcaacgtgtggcctattatccttattatttcgtctaatacaatttggatatatttatggcacatacctgttgtagagtatttttatagatataataacgaaactaattttttcttaaagtatttagtggttttttttattagcacatctatagcattaacacagagatttttggttatgcactttttcccaaaatccaaactaatgaaggtgatctttacaggttga

SEQ ID NO: 238262 - DNA, 1407 bp, Klebsiella pneumoniae
atggctacattttacaatcggtcgcgttcgaacgctaacgcctccttgatttcaatggctcaaagattttctgatatattaataatcataatggggctttatttagtctgtttttttaatgccttgacctttcagacctctcatgccatgatgacacttatatcactagttatttttcaaatgatcggtggtataactgatttttatagatcatggagaggtgttaatttttcaacggagtttattttaatattaaaaaactggactttaagttcgttaatagctttaggtttgttatcattaaatactgcctttgaattcaagcttattctctttatgcaatggtatttaattgttaatgctggtttttttatttgccgactttttattcgtattatttccggcttgatgagaaaactaggatacaatactagaaatgtagccgttgttggcaccctcccagccggaattaatttacttaaaagcttcaacgaagaaccttggctaggttttgtagttaaaggtatatatcatgatgagccttataatgagctttctaattatggggatgtaccatatggaggtggtgttgataagttaattaaagaagcgcgggcaggtaagatagatcgcgtttatgttgcaatgaatatgaaagatgaatctaaaataaaaaacatcgtaagtcagttaaccgatactacatgttcagtattattaattccagatatattcacttttaatattctccaatccagaaccgaagagataaatggcgtacccgttgttcctctttttgattcaccgctcaatggaattaatatggtcttcaaacgattagaagatataatcgtttcattcatcattttagttttgatatctccaattttgttggtaattgctattgctgtaaaaaccacatctaaaggccctattattttcagacaagttcgatatggaatggatggtaaaccaattaaagtctggaaattccgttcaatgactgtaatggaaaatgatgataaaattattcaagcgactaaaaatgatgtaagagtaacaaaagtcggtagatttcttcgtagtacttcattggatgaattgcctcagttttttaatgttctttttgggcaaatgtctgttgtcggacccagacctcatgcagtatctcataatgaacagtatcgttcattaatacagggatatatgcttcgtcataaagttaaaccaggtataaccggattagcacaaattaatggatggcgtggagagacagatacccttgaaaaaatggaaaaacgcatagaatacgatttactttacatccgagggtggagtatctggctagatataaaaattatatttcttactgtatttaaaggttttattaataagtctgcatactaa

SEQ ID NO: 238263 - DNA, 135 bp, Klebsiella pneumoniae
atgcatacagtctttgaaccgtatgttaaagttgatttatacgaattatttgtaatgttcatccttaactatataacgcatttcgatattatttataatttggttgacagatacttttcaattttattgagttaa

SEQ ID NO: 238264 - DNA, 1410 bp, Klebsiella pneumoniae
atggggcaagtgattatagatggctcagattatgaggaaatgaactctcctattttctggataaaaggctacaaaattaattatgatcaacaattattagttggtgagatattatcagcaacaatgggcggtgggtttacatttataggtccgtttcctagtagaaagaatcatatagttgttcttagaataggtaacactgataaagaaaatggacgtaatggtttctccaattgtaatatttcaatgtccaatgttcatataaaaagaggaacaattgggcttgaattaacatcttttgatgttttcttatgttccttttcgtattgtacatttgggccaggtagctataaaaacatttgcgtttcagatatatttgaccgtgaatctaataatgctggagaaaggatatcatttactgattgcgtaatctatggtggagggcaaggagctcatgtttttataagcgtaccaggatttaatatcgactttactaatgttagtttcgactattgtttcggtgactatatttatatagacgcttcttatactaagttacggattattaattgtcatatggagggattcgatggttatgttataaactcaagtgatacaaaaaaaattagtaattgtgtagtctctttattcaatacagacataatgagtacacttggtgatggtaatcatgttaagatggttaatgatacaataatttcggctaactctatatgtagacctttttttaatcattttaaaggggttcaagtagtattgaatcagtcgggtaatgttagccaagtcattccaccttttaatgaaaatattttttggatgaaccctaaggctaatggcgatctgaagattattaattatcaaggtgaacatcctaaacctatatctaaaaataaactaatgctgtgtattgagaattttaacgaggaaaaatattcctataccaattcatctacagttaatgcagaagttgaccatgatctttctctaaatttaagagtaataaataatgctgcgattgcaagttttattctaaatcaaactgaattgcttccctgtacccaattgcgttcatatgcagcagtattatttcttggtttttcaggtaaaaatgaaaccttaaaaagtaatcaacaattatatatagaaacacaatatatttggtttgattataatcagaagcaaattcttcaagaatctgttaatgtatcccttcaagatatgttaaagtcatttgatgaaatgttacctaatatttcaaaggtagatactcttccggtgtggccacttcaaaaacaagctcctccttgtgcatgttatttcaaagttagatggcacattgggaaaattgaaaatgctattcaccttaaaaaaatttttgtttgggaaatatag

SEQ ID NO: 238265 - DNA, 2463 bp, Klebsiella pneumoniae
atgaatctggcgccttatgctgcttataaacaacagggcagcctggcagacagaaaagtggcaggcgtccagcgctattactccagtgcggaagatttgcaggcagggcgcacagccggaaaactggagaaagacacggtagtcacgctgagtgacactatagtcacccgtagcagtgacaggcgtcagtttactgaagtgaccattacccgtgagacgaaaaatgcagcagggggcacacttgcagcggggactaaagtctggacggtatcagaccaggggaatctgaaagcaacagaatcggtgcctgttccgtcctggtgggaaaaatgtactccggcttacactaatgagtcagaaggcgttgtgaactgcacttcgcgtacaaactgggcgtactatctgagtagtgacgatgttctgcaatataaaaatgcaggcaccctggtagccgatttcccgctttcatacgagcccggtaataccgcacagcaggtcatccgtccaggtaagaatccaggcgatgcagcaagaacattcagtctggtcactctggggcgggataaggatacgctgaaaaagggcgaccgggtatgggtggtgtcggatggtgacagtctgacgccggttacagtggccgcatccggtaatgagcctgtttttaatgatgtgtatgtaccttctgtgcctgtacctgtcagtgccggagacagcctcgggcatatgggcttctatcagctaccggaagaaaacggcaaacgctcgcgctaccaggtacatatagagtgcctgagcatggatgatatggaaaagttcatcaccaatcccggaaaggtgggagaggatgcgccggtgtatctgacctggaaagccgatgcaccgttgtttgagaagggtgagcggggaatggttgcgggcagtcgtaaaacaaaggcgccggggattcttacgcttgcaaacgtacccggagttgatgctaaggggaagacgctgaccaataacaaggatgcggcctggtttcagatccgccctgaaggcggctggttacctgccgacagcgttaagaaagtgtcgcagtatgcgcttggtgagctcggatttgtcacactgaataaggctccggaaagttttgacctgattgatggtataaaacatccgaataacgtggtgaagggtattctggagcagttgtataaagcagcagaagaggaaacccggaccactcacgcgctgaacaaatataactaccagcgtctgctggcgttgatagacagtaaccaggacgggcattaccaggagcaggagtatcttcaggcggtccataatatctcttaccgcgaccgcttataccgtgtaattgcgaaacacgccagtgaatggtactacggtaaggatgatccgctctggaagacatacctggatacattaaccacggatgcaccgttgtggaaaacgtatctggaagcgtttctggataagatgacatggatgaaggctgtggctgagaagggcgtggcgctgggaccggagccatggcatatgcatcctatttcatttacggaaatgtttaaagacgcgaggtgtgattgcgaagaactctatgctgataaatttaaagttactagatatggtagtcaatatggaccggtctattggggggatatctctttaaatagctataaccgctgggatgatctcatcgctgaaaatagaattacggctgatgaaaaaacaatactgattgctatgtctgagaatgaagggaatttggatgcagtgcaatcatatgatagtgaagtcattacagcgggagcgatgcaaaaaaccgtgaaaaatgaacgaggacgagagggaaaaggagaactatcaacccaattagcgaaatttagagacagccaccctgatttgtatgaaaaatattctgtgggttgtggctggtctgtagagggaacaggaacatcggctattatttattacagcgataatgttttaactcaggggaacaagataacatcttcagaattaaagattgtattaaggaaaggatgttcagaaagaaatttcggctcaaccgtacataacaaacctctggctgcgttggtcaagattctaaaactaccagagtatttagatattcaagttttagattttatagaaagactccacgcagccgaagaaaacatcgtaacttctgatggcaaacaaataaagaattttgtcaagagtaattttggtagggcagtagtattagatcattcagtaaatcgtcccacttatgttgttcctgattttcaaaaagcaatcgaaaactttcacgccaataaccctgctataagtttagacccacaaacatggggaattgagagcgtaacaaatgaaaataaactactggaagaatataaattaacccgaagaatgacagattcttctgctcggtttaattcattaaaggcaaagctatga

SEQ ID NO: 238266 - DNA, 855 bp, Klebsiella pneumoniae
atgacaagttcttactttttaagagttattattttagctatttttactacgaatgtaagttatgctgatatagaaattaaatctccagaaggcgggcgtttaattttttctcagggaaaaaaaggggagcattatgaaaataactcatggggtaaaatcgttttttctcgcaatgcgtatacggcagatctcagtcgcagcgacagatattatatagaaaatggttcatcaaaaccgtctccctcaggaaaatatcttattgtaacgagtgtttccggggggtatgtagagttcggcgatggtgtaaaaaaatataccgataaggcttattgtagtatcgtggacatgaccaatggttgcattgttagtgactgggatggtgaggcatgtggttatagctgggtgggtaataaagatgtattagccagttcaggggatgttaatgcagataaatttgacttccagtcaatgcgcccgatgatcaacaaaacgatagatgatttttctggaatagatgaaagagaggtagccaacatgcttcggtgtgactcgccatctaaggaaaatataaacacatatcaaagaatgacaaaggaaaacaaaaaagcgaaagaaattgtattgaagtccatttctgaatatctaagcaaaattaccgagatatctacggtgaaaaccaagtcaaatttattcacttttccaaatgacaataacaaaaccagtgcttatcttattcccggagataaggtaaagattattcagacatctccagacagtaaatgggtgaatattggatatatcaatgcaaaaggtttccctcttatttcctggatcaagactgatacacttgagtaa

SEQ ID NO: 238267 - DNA, 264 bp, Klebsiella pneumoniae
atgttgcaaattattcgaaaaggcgacaaaaccactcatggcggttcagtcatgacctgttctggcaccatgatatttggtgggattggcgtggcgcgtaaaggtgacatggtttcctgcccgatacctggacatggtccgacaactattatcgaaggtaatcctgattatcttgataacgggatcccggttgcctttcacggccacaaatgtggttgtggctgcacattgatcagttcttttgttcctgtaagggttgcctga

SEQ ID NO: 238268 - DNA, 1209 bp, Klebsiella pneumoniae
atgcctgtcctgctggatatcatccctgaaaaggcggcgacggttccgcgacccgatacccgccgctggctgctgtttctggcatttgtcatgtcaggtgggattgtgttaacgctctggaactgggcgacagaacgcactggctttattttctggtttactgccctgggattgcctttctgtctctggggactgcttttctctctgcgccggtttgcatacaaagcagagcaggtggggactgagtcccggaatgtggaacgcgaagcgcttattgatcgcgaaatctgtcggggtcagcgctgtgcctggatactcgatacatacgttcaacacttttcagggaatagtcccggtgcactggtgaaagccgttaaacgtaccgtctcagcttcagaggcctcaacgccacgtggttccaaatctgctgtcaggtatgcagccttagccagttttcagacagatctggatacagaactcatctccgccacgtcaacacttgtcgctcatgtacaaaaaattaccgacaccctgccgaaggatattccttgctgcctgatgctggactgtgacgacgatatccgacccaggctggaggagcacttcagaaatgaactcacggccagaaccgggcgggtcttcaggctccttgcgggcaaaggtctggcgggatttgatgcctggctggaccagcgctgggacactccaggcattcttgcaggagtgacgttttcattgcctgctcaacctgatgaaggtgacgctgatgccattacctttgtggtgctcagcaaccgtaaggctgctggctatccagatgcagtatgcctgcatcgcccagaaaagggcaaggaaaccaggcttgtcaaaacgctggacagggcactgttatgggccgcaacaggcactgaagcactaaaaacggcctggtatacagggccaaccctttccagcggaagtgggtggaacatggcttgtgaagacaacggggtgacattcagcttgtcaaaagacaatcatggtattgatcccgctctgggatatgccgaacgagctgccccctggcttgctattattcttgcctctgctgcatgtagcaataatggcccccaagttatcgccgcccaacccgccgctgacaaagacgacgtctggatcgccgtcatcaccaaagaagaagttcgcaaggaatcgcctaagaatgtctaa

SEQ ID NO: 238269 - DNA, 618 bp, Klebsiella pneumoniae
atgtctaaggtaaaagtaaaaactctcatcggctcggttgtgactgtcgcctttttcctgacagccatcgtggcatttttgttttatgcctttccggaaaatgtggccgcagccaccggcttcggaccgtatgacggtcaacgaatactcacattctgcgccattatggttgccgcgatgtttttactcggctggctgacagagaaggctttcgacttcgccggtaaatccgggttgtatttccagtggggccagaaaaaggctgagagtatcactccggtgacgaacaccattctcagtgaagaagacgacgaacaacctgtcttcagcgaagaggcggtgtccgagcacctgcggtttcgctatgggcgccgctggcagcgtaaggtgcgtctactgctggtgatgggtaatccggatgacgtccagaaagcggccccgggcctgtgtcatgacctctggcaggaaggcgacggcaatgtgctgatttatggcggtgatgcgcagtcacttccggatgagatctttctttcaaaactgaagcgtctgcgatctggccagccggttgatggcatcattcaggtgatgagtacctcagccctcccgacggatagctaa

SEQ ID NO: 238270 - DNA, 492 bp, Klebsiella pneumoniae
atgcgcagccgcaataatcttctctcggcagccattgcagacaatataaatctccaatctcccttttgtatcgccttcttagccactttatcaggccggtcatgcagtttttccatgacttttattttgctcccccgccaggtagcgaggggaaatgattacatcactaataccggctcagtcaaaggtgcttctacacccgttgtggctacccggcctaccattttatgcagcttcgctttctgcatattccagactctgcagatattgcaacgcgaccgggtcggcaatatattcaacctgaccatgatggcgctcgacctcatcaataatccgacgaagctcaacccgaaaaaactccttgcgcagattaattttattaatgcgataattttccaagtgatcatgcagcgttttttccagtgcgggggcatcgtcgcaggaaatcatagcatggacgtcaaaatcaaaaggtaccgccgccccacttag

SEQ ID NO: 238271 - DNA, 627 bp, Klebsiella pneumoniae
atgaacgttagaatttactgccgggcatcaactgaggggcaacacgctgatcgagcacttaccagcctacgtgaattttcaaaattaaaaggctggcagattgctggagagtacatagaaaatgctagcggggcgaagcttgagcgcgtagagcttatgcggctattgtccgaagcccagcccggcgatctgttgctagtggaagctatagatcgtctgagtcgcctagaacatagcgcatgggttgaactgaaagatacgctcaaccgaaaagggttaatcatcgtatcaatggatttgccaacgagctggcagatggtcgagatggcaggcagtgacctaaccagcggcatcctgagagctgtaaatgccatgttgatagatatccttgccacaatggcgcgacaggattacgaaacacgccgtaaacgccaacagcaaggcatagagcgggctaaaagcgaaggcatatacattggcagggagaaaaatcaggaagcccgtgagatcgttcaagagatgttggagcaaggagtaaaacctgaactcatcatgaaggcagcagaaatcagccgagcgacttactaccgtataaaaagtgagctgtcagtcgtaaaatcagaataa

SEQ ID NO: 238272 - DNA, 132 bp, Klebsiella pneumoniae
atggctggcagttacggtttactgttaatcaggcataacgcaattttgcgttatgcctcaaaaatcgatgattacaacttccagttgccgctaccttgctggttcttactaaacattctcattgagagatag

SEQ ID NO: 238273 - DNA, 207 bp, Klebsiella pneumoniae
atggaaaaaacactaaaagaattgcggaactggttgtcactgtcccccgattatcctgagatcaattgcgatctgggaagctggggatatgatgactgcatgatcatcggcgatgcagttgatgctcggactatgctgggtttgcatccagattgcctagagatggataagtctcagattgttaccgacactggcggtcttgaatag

SEQ ID NO: 238274 - DNA, 1296 bp, Klebsiella pneumoniae
atgcatcgtcttcatccctatcctgatgtgcaggtgatgtttcgccgcctgctgatcgccaccctgattggccttctcgccgccctggcggtggcgctgtttcgccacgctatggtggtgctggaaacgctgttgctcagtaatgacagcgggagcctggtcaacgccgcacagtcgctgccggcgtggcgtcggctggttacccccgcgctgggcggcctgacggcgggaaccttactctggctctggcaacgacgcagcgtcgcgcgtccgcatgccgccaccgattatatggaagccctggagaccggcgacggctgtttcgatacgccggcaagcctggtgaaatcgctggcgtcattgctggtcgtggtgaccggcagcgcgattggccgggaaggcgccatgatcctgctggccgcgctggcggcctcgctgtttgcccgtcgcttcacgccgcagagtgaatggaagctatgggtcgcctgcggcgcggctgccgggatggccagcgcctatcatgccccgctggccggcagcctgtttattgctgaaattctctttggcacgctgatgctggcctcgcttgggccggtggtgatctcggcggtgatcgccctgctgttgacgcagtttcttaatggcggcgccgcgccgctgtatcacgtcgtgttacagcaaaacctcagcgccctgcactatggcttaatgctggcgactggcctgctggccgggctgtgcgggccgctgtttatctggctgatggactacagccaccgcgggttcgttaaactgaagctggcgccgccgtggcagctggcgctgggcgggctgattgtcggcggcttatcgctcatcaccccggcagtatggggcaacggctacagcgtagtgcaaagctatttgctgctgccgccgtccggtgcgctgctggtgggcgtatttatctgcaaactgctggcggtgctggccagcagcggctccggcgcgcctggcggggtctttaccccgacgctgtttgtcggcctggcgatgggcatgctgtttgcctgcttcagcaggctgtggctgccgggaagtgaagaaatggccatcatgatgggtctgaccggcatggcggcgtttctggccgccacgacccatgcgccgatcatgtcaaccctgatgatttgcgagatgaccgggcagtatacgctgctgcccggtctgctgataacctgcgtcgtgtcgtctgtgctgtcgcggacgttacgccgggattcgatctatcgccatcacgttgccgagcatgtctaa

SEQ ID NO: 238275 - DNA, 198 bp, Klebsiella pneumoniae
atgaatatctatcttgagccaggcgccagcaatgtgtttgttctctccccggaatctccgggggaagggtacgaatacattggtgaggtcagtaatgatatatcactgacccctgtcattcctggcgcgatttatgaggttattggcgcctttagtcaggaactgctatcaactggttttgaaatatctataagataa

SEQ ID NO: 238276 - DNA, 267 bp, Klebsiella pneumoniae
atgaccaccttcactgtagaaattcatgaagatatcgttaccgggcttaaaaggtgcactcgcccggagatagttctagatctgtcatcggtgccggaacccggcgacaagctatggctgaaaagtatgcgaggtacacatattgtcgaaacggaaagatgcacgatcgtagagtcgcgccgcgtttcgcgcctgcgcccgactgtacgccttgtattagtctttggcattgcaactcataatgggcacgatgaattttacgaatag

SEQ ID NO: 238277 - DNA, 252 bp, Klebsiella pneumoniae; identical to SEQ ID NO: 153543

SEQ ID NO: 238278 - DNA, 312 bp, Klebsiella pneumoniae; identical to SEQ ID NO: 153544

SEQ ID NO: 238279 - DNA, 465 bp, Klebsiella pneumoniae; identical to SEQ ID NO: 153545

SEQ ID NO: 238280 - DNA, 816 bp, Klebsiella pneumoniae; identical to SEQ ID NO: 153547

SEQ ID NO: 238281 - DNA, 291 bp, Klebsiella pneumoniae; identical to SEQ ID NO: 153548

SEQ ID NO: 238282 - DNA, 441 bp, Klebsiella pneumoniae; identical to SEQ ID NO: 153549

SEQ ID NO: 238283 - DNA, 3186 bp, Klebsiella pneumoniae
atggcagaggtcaaaaagccgttccacgagcaggttgccgaacgcctcattgagcaactgaaagccggcactgcgccgtggcaaaaaccgtgggaaccgggcatgcccggctccttcatcccgctcaacccgactaccgggaagcgttacaagggcatcaacgcgattcagctcatggcccagggccatgcggacccgcgctggatgacctacaagcaggccgctgccgccggcgcacaggtgcgtcgcggcgagaaaggcacgccgatccagtattggaagttcagcgaagagcagaccaagaccgacgagcagaccggcaagccggtcctcgatgccaacggcgatccggtcaaggtgacggtgcagctcgaacgcccgcgcgtgttcttcgccaccgtgttcaatgcggagcagatcgacggcctgccgccgttggaacgcaaggaacagacttggagcgccgtcgagcgggccgagcacatccttgcggcgtcaggtgccaccatccgccacggcgagcacgaccgcgcgttttatcggccgtccacggacagcatccatctgcccgacaaaggccagttcccgagcgccgacaactactacgcaaccgcgctccatgagctggggcactggaccggccacccgtcgcggctggaccgcgacctggcgcatcccttcgggagcgaggggtacgccaaggaagagctgcgggccgagattgccagcatgatcctgggcgacgagctgggcatcggccacgaccccggccagcacgcggcctatgtcggatcgtggatcaaggcgctacaagaggacccgctagagattttccgcgcggccgccgacgcggagaagatccaggatttcgtcctggcgttcgagcagaagcaaattcaagaacaaacgacccagcaggccatcgagcctgcgcagggggcaactatggagcaacagcaagaccaggtggcacgaccggccattgcgccggccgacgagctgatcgcgcagaccctgcgcatgtaccgcgccggcgcggagccggcggaaggcaaccaatcgctggccgcgctgaccgaaaccacgctgggctttgagctgcctgccgattggaccggccgcgtccaggtccaggccaacgtcgaggtcgagcacgacggcgaacggtccgtggtgccggccggcgaccgagagccggagttttggggcgtctatgcgaaccatgcgtggggcggccaccaatggcttgccgacttcgccggccccgacgcgcagaccaatgccgaagcgctcgccgaccgcctggccgtgatcgacgcttacgcgacggccaacgagtacgagcaggccgcgaagttcgcccgcatccatgaagagcgagttcgccgcgatcccaacagcaccgacgaggaccgcgttgccgccaaggaggcgcgcaaggccgccgagggcacggccatgctgcacgacgaggacctacagcgccggatcgccgactacgagcgcgagcagcaggaaatggcccaggccatgaacgccgccgagcagccggcggccgctcaagcccccgccaagcccgagcgcgcctacttgaacgtgccgttcaaggagaaagacgaggtgaaggcccttggagcgcgctgggaccgccaggaacgcgcctggtacgttccggcaggggttgaccctgccccgttcgccaaatgggcgcgcgagggcgctacagcggccgtagaggcccgcgccgaggcccagcctacccaacccacggccgagcgccccaacgcggcccaggagcgcgtctacctggccgtgccctacggcgagcgccaggttgccaaggcggccggcgcgcagtgggacaaggtggccaagtcctggtacgccggaccgaacgccgacatgggcaagctgcaacgctggctgccggacaacgtgcccacccagcaatccccggccgtcacccccgaagatgagttcgcggaggccctgaaaagcatgggctgcgtcgtcaccccaggcggcgagcaccccatcatggacggcaagaagcaccgcatcgagaccgagggcgacaagaagggcgagaagtcgggcttctacgtcggccacctcgacggccacccggccggttacatcaaaaacaaccgcaccggcgtcgaaatgaagtggaaggccaagggctacgccctggaccccgccgagaaggccaagatgcaggccgaggcggcggccaagctggccgcgcgtgccgaggaacaagaacgccagcacgaagccacggcgcagcgcatcggccgccaggcgcaaagcctggttcccatcacggaaccgacgccgtacctgcgcgacaagggtctacaggtgcacgccggcgtccttaccgaccaggagggccagaaaacctacatcccggcctacgacgccgacggcaagcaatggaccatgcagtacatccaggaggacggcaccaagcgcttcgccaaggacagccgcaaggaaggatgcttccatgtcgtcggtggcatggatgcgctcgcggccgcgccggcgctggtgatcggcgaaggctatgccaccgccgccacagtggccgaagcgctggggcacgcgactgtcgccgcgttcgattccggcaacctacaggctgttgccgaggccctgcacgcgaaattcccggacaagcccgttgtgatcgccggcgacgacgaccgccaggtgcagatcacccagggcgtgaatcccggcaggacgaaggcacaggaggccgccaaggcggtcggcggcaaggccatcttcccaatcttcgcgccgggcgagaacgcctacccgaaggagctgccgccgatcaccccggagaactaccgcaaccatttgcacgctgaaaagcgcctcgcggacgcggcggccggcaaggtccagttgagcgaggccgacacggccaagctcaaggaatcgctgttgaacgatggccagctcgccgccctgtcgaacatgaagaagcacaccgatttcaacgacctgtccgagcgcagcagcctgggcaaggacggggttgaacgccaggtgagaagtgctgtcggcaaggtgcttctcgacgagggccagcggcagaaggtgcagcagctcaagcagcaagacatcgagcagcaagaacagcggcaacgccgcgcgagaacctactaa

SEQ ID NO: 238284 - DNA, 264 bp, Klebsiella pneumoniae; identical to SEQ ID NO: 153491

SEQ ID NO: 238285 - DNA, 2214 bp, Klebsiella pneumoniae; identical to SEQ ID NO: 153492

SEQ ID NO: 238286 - DNA, 534 bp, Klebsiella pneumoniae; identical to SEQ ID NO: 153493

SEQ ID NO: 238287 - DNA, 1908 bp, Klebsiella pneumoniae; identical to SEQ ID NO: 153494

SEQ ID NO: 238288 - DNA, 2199 bp, Klebsiella pneumoniae; identical to SEQ ID NO: 153495

SEQ ID NO: 238289 - DNA, 372 bp, Klebsiella pneumoniae; identical to SEQ ID NO: 153496

SEQ ID NO: 238290 - DNA, 405 bp, Klebsiella pneumoniae; identical to SEQ ID NO: 153497

SEQ ID NO: 238291 - DNA, 726 bp, Klebsiella pneumoniae; identical to SEQ ID NO: 153498

SEQ ID NO: 238292 - DNA, 438 bp, Klebsiella pneumoniae; identical to SEQ ID NO: 153499

SEQ ID NO: 238293 - DNA, 1347 bp, Klebsiella pneumoniae; identical to SEQ ID NO: 153500

SEQ ID NO: 238294 - DNA, 348 bp, Klebsiella pneumoniae; identical to SEQ ID NO: 153501

SEQ ID NO: 238295 - DNA, 927 bp, Klebsiella pneumoniae; identical to SEQ ID NO: 153502

SEQ ID NO: 238296 - DNA, 528 bp, Klebsiella pneumoniae; identical to SEQ ID NO: 153503

SEQ ID NO: 238297 - DNA, 504 bp, Klebsiella pneumoniae; identical to SEQ ID NO: 153504

SEQ ID NO: 238298 - DNA, 1077 bp, Klebsiella pneumoniae; identical to SEQ ID NO: 153505

SEQ ID NO: 238299 - DNA, 780 bp, Klebsiella pneumoniae; identical to SEQ ID NO: 153506

SEQ ID NO: 238300 - DNA, 315 bp, Klebsiella pneumoniae; identical to SEQ ID NO: 153507

SEQ ID NO: 238301 - DNA, 954 bp, Klebsiella pneumoniae; identical to SEQ ID NO: 153508

SEQ ID NO: 238302 - DNA, 1137 bp, Klebsiella pneumoniae; identical to SEQ ID NO: 153509

SEQ ID NO: 238303 - DNA, 774 bp, Klebsiella pneumoniae; identical to SEQ ID NO: 153510

SEQ ID NO: 238304 - DNA, 315 bp, Klebsiella pneumoniae; identical to SEQ ID NO: 153511

SEQ ID NO: 238305 - DNA, 324 bp, Klebsiella pneumoniae; identical to SEQ ID NO: 153512

SEQ ID NO: 238306 - DNA, 231 bp, Klebsiella pneumoniae; identical to SEQ ID NO: 153514

SEQ ID NO: 238307 - DNA, 216 bp, Klebsiella pneumoniae; identical to SEQ ID NO: 153515

SEQ ID NO: 238308 - DNA, 234 bp, Klebsiella pneumoniae; identical to SEQ ID NO: 153516

SEQ ID NO: 238309 - DNA, 258 bp, Klebsiella pneumoniae; identical to SEQ ID NO: 153517

SEQ ID NO: 238310 - DNA, 981 bp, Klebsiella pneumoniae
gtgcatgacgcagtgctcaatcgtgccgatttggtggccgacgtggccggcgagcgttacgcggcggcggtgtggaagctcaacgggggcacgttcttcggttgcgccggcgaccaggatgcggccgagagggtcatagagcgccattgccgcgcgacgccgggcgtcgtcccgatgtggggccaggaaggcgacttcctggcttccgtggacgggatgcgcgtatgggtggaggtcgaaagcggctacggcggcctaaccacggtgcatttccagttccacgccgtggacctggacggcccttttatttccgaaacgggctatcggtcccattacgaccatgcgcgcggcggcatgacggtggaccaggtagcggacggggttttgcgcgccctgttgcgctcgcatcgccggtatctggacgcccgcgaccaggaccgccttgccgacgagccactgccggcgtggctcgcgggtatcacgccaccgccgcgccgcgtgcgggccgtggtcgaggactggcggaagccggacgaactgccgccgggcttcgcctgggttgatgccgtgctgccggcgcaccaggcattcatcgcccgcaaatgggcggccagcgccaaggcgaagctcgcggccgcgcgtgcgaaagctcaggagccggccgggcagcgcagggagccggttacaccggccaagccggagccggagccggccaaggacgaggacgcgccggcgtggccggcgacgttctttcctggcctgcggtgcgagattgtgagcgtgcatcacccggtttttgccaaggaaatcgggaagcacgtcatcattacgaagatcagtcccgaaacgcgacaggtgtgggcgcacgacgacaagccgccgcgctatcgcatcaatcgcaacggtagaaaggtttgtgaatatgacccgcgttgcatcgagtcgtgctacggctacgaccaattgcgggccgccatttga

SEQ ID NO: 238311 - DNA, 273 bp, Klebsiella pneumoniae
atgcaagacgacaacatcaagcgccgcaacgatgccatcgttgccggccgcttgttcagcggttcggtgcaggaccgcgagacagagcgatgccaccactgcggcgagttgctgcatccgttcccggaacccgaatactggatgcagtacccgttgccgacctgctgcgtcctggacggcttgaagttctgcgatgactaccggaaaccggattgcatcgcggcctacctggtagcggggtctgacgctcagtggaacgaaaactcacgttaa

SEQ ID NO: 238312 - DNA, 441 bp, Klebsiella pneumoniae
atgactgatgttcaaatcccctcccctatcgttgccacccgcgtcgccgaggcggatcgcctgcggtttctgccgacgtacttcggcccctcgatgctgcgcatgctgcgcggcgaggccctggtattcggctggatgggccgcctttgcgctgcctaccacggcggtttctggcacttctacaccctctcgaacggtggcttctacatggccccggagcatgacggccgcttgcgcatcgaggtcgatggcaacggcttcgcgggcgagctgtcggccgacgccgccggcatcgtcgccacgctcttcgccctgaaccagctctgcgcggagctggccggcacggccgacgcggacgccctgatcgaccgctaccaccacctggcggcgtttgcgagcgagcacgccgaggcggcggcgatctaccgggccatcgactaa

SEQ ID NO: 238313 - DNA, 351 bp, Klebsiella pneumoniae
atgtctgaaccacaaaacgggcgcggcgcgctcttcaccggcgcgctagccgccattcttgcatcggcctgctgcctcgggccgctggtcttggtcgccttgggattcagcggggcatggatcggcaacctgacggttctggaaccctatcgcccgatcttcatcggcgcagcgctggtcgcgttgttctttgcctggcggcgcatctatcgcccggcgcaagcctgcaaaccgggggacgtgtgcgcgattccccaagtgcgggctacttacaagctcattttctggatcgtggccgcgctggtcctggtcgcgctcggatttccctacgtcatgctatttttctattaa

SEQ ID NO: 238314 - DNA, 456 bp, Klebsiella pneumoniae
atggaaaacaattttgagaatctgaccattggcgttttcgccaaggcggccggggtcaatgtggagaccatacggttctaccagcgcaagggcctgctgccggagccagacaagccctacggcagcattcgccgctatggcgaggcggatgtaacacgggtgcgcttcgtgaaatcggcccagcggctgggctttagcctggacgaaatcgccgagctactgcggctggaggatggcacccattgcgaggaagccagcggcctggccgagcacaagctcaaggatgtgcgcgagaagatggccgacttggcgcgcatggaggccgtgctgtctgaactggtgtgcgcctgccatacgcggaaagggaacgtttcctgcccgctgattgcgtcactacaagacggaacgaagctcgctgcatcggcgcgggggagtcacggggtgactacgccttag

SEQ ID NO: 238315 - DNA, 300 bp, Klebsiella pneumoniae
atgttcatactcttcgccgagcgaaaagttggggaacagcacgggccggccgcgcaaggcgtgctggcagccgtgcagaccctgcgtgagatgaacgccgacaacctgcgcaaggtgccggccgatgcacccacggccttcatcaagccgcgctggaagccgctggtgatcaccccggaaggcctcgaccggaaattctacgaaatctgcgccctgtccgagctgaagaacgccctgcgctccggcgacatctgggtcaagggctcgcggcagggcactgttgcaaatagtcggtggtga

SEQ ID NO: 238316 - DNA, 237 bp, Klebsiella pneumoniae; identical to SEQ ID NO: 77389

SEQ ID NO: 238317 - DNA, 870 bp, Klebsiella pneumoniae
atgaaaagcattagaaatcagagctttatagaagagagactatggtatatagaatggcttttgatgatgcgaggatggttatcccgcatagacttaatggataaatttgggattaagggagctgcggccagtcgtgacattaaaagatataaagaacagagtgatgagaatttatatttagatcatagggttaagagatatgttgctgatcttgataaatttaagccagtttacgaaacctccgaggaactcatcttttcaaagcttacggatctagatgagtcgaagtctttaggtgcggggtccccactgattgaaactatccctcgcttggctgaaataaacccgaaggatataacggggattactcgggcgattctaaatatgaatgttcttaaaatagcttattgctcaatgacttcaggaacatcagagaagaaaatcgttccccattcaatgtttcataatgatcttaaaacatacgttcgttgctatgatctcgggcgaaatcggtttttagatctcgttgttgggcgaattcttgagattctgggtgaggatggggctgctcctgcggaatgtttgagagagtttgacgatgattggaacacatatatttctttggagttggtcgttcatcctaggattcagcataagaaagctattgagagtgacatgcaaatgactgacggtgtgaaagtgattgaagtcagaaagtcactggctcagtactggctacgtcgatggtgtgtagattgttctgcgacggcaaagatgaccgataaagcttttcagcttcacctgagaaattccagcgttattaatggagtcaatggtgctttccctggggtaaacaaccatatcgattga

SEQ ID NO: 238318 - DNA, 297 bp, Klebsiella pneumoniae
gtgattgggttagcctgtaccaccagaactaaccctaacaaaccgtacgcaaaagcggcgcttgagtaccacctcaagtgcttttataagccagccactagatttgttgagtgctacagtacaattctgagcgcaaaaatcaacattcaagtggcgaaatttgggaaatgcgacatgcagacagacgagtctcaggcatacatttttcgcccttacataacggtaaagggtaaacggatcacccgtcctaacgggggaatgttcaagatcccgattaatcgggaaaagaaaaaatag

SEQ ID NO: 238319 - DNA, 207 bp, Klebsiella pneumoniae
atgctgctttttgccttcaatagtccaggtgtaatattttttcttaaaacctgtaccacaaacatcacagcgacttggtttaaaaatcgcaccaagaacaataagtacaacaaaaccaccaataacccattccataaaatccctctcaatgaaaaagcccgctatgcgggcttcagtcgtaaacttcgcgtcggtggccgattgtag

SEQ ID NO: 238320 - DNA, 249 bp, Klebsiella pneumoniae
atggcatggtatatcgatagcaaaaacgtcaaagaaaacaaagttgaaaccgcaaatgaaaaatataaaaaaatctggaaaccaggggaaaaaccatcttttgcaggaatctatcgctgtcagtcatgtggatatgaagatttaatcaaccgccagtgcaccaagctcccaccatgcagcaattgcgaggaaaaagggcataaaaacaacacatggaaactgctggtaagagcggttgatgcggaatag

SEQ ID NO: 238321 - DNA, 456 bp, Klebsiella pneumoniae; identical to SEQ ID NO: 25798

SEQ ID NO: 238322 - DNA, 186 bp, Klebsiella pneumoniae
atgacctgctccgcctgcccgatcaccgtcaagaaggcgatttccaaggtcgaaggcgtcagcaaaattgacgtgaccttcgagacacgcgaagcggttgtcacgttcgatgatgccaagaccagcgtgcagaagctaaccaaggcaaccggagacgcgggctatccgtccagcgtcaagcagtga

SEQ ID NO: 238323 - DNA, 264 bp, Klebsiella pneumoniae
atgtggggaagcctgctggtcagcctcgtgctgttgacgctggtcattgggtcctggacgacgctgagtgcgtttgaggtcctgcggtccgtatcatttctttttgtacttctctcgctgacgttgctgagctttgtcaaagcgatggaggccacgttccggcgctggcagctgttgagccgccgcgtcagtatcgcggaaaaagggacattcagggattttacggctgagaacgcctggatacgccagacgatgggatactga

SEQ ID NO: 238324 - DNA, 768 bp, Klebsiella pneumoniae
atggctctagttatccctggcgctaatttctacaatggcccgctggttagcgattttgagttattcagcataatgaatgatgtcccttataaaactgggttacttgggtcgtattttctgggtagcaaaaacgctgacccgacatataactttgctaacccgtcgctgccgcttctggctgtaggtgatattccaacccaaaataaatatgcgaccctgtccagagcagcatattatgacacgcagttactgtcacaaacttcagtgacaattatagcgatgggacgtcagcctgcatctggtgttgcagggatcgccgtctcgtcgtacctgaaagacgggagcggaaccacaggcgatacgctgatagaccgctggtctgggtctacggctcaggtgtcattctacgcgcagtcatcggcaactgcagtaactcaggccaacaggactactgatgttgtgggcggcgggtaccacgtgtatggggcgctaatcacagatagtgggttggccattggcacctggacaatgagcgagacaaccgaccctggacatacggatgcggtgatgtcgggacggtcggtgtcgtcaagaacgttgaggatcggctcaacctattcagacacggaattcttgaccgccactatagacctgtctgcggtattgatttacagcggcaatgtcggcagcagcaatatgacagcggtgatgaactggctgaggaactcagtgggagttgcggctggtatttggcctgggccaaaataa

SEQ ID NO: 238325 - DNA, 1803 bp, Klebsiella pneumoniae
atggcagaagtaccgttaccaacccccaccgacaaccaggtaccaagtactgatattcgggacgcagtttatgctggcgccatgctggataaggttgtcaccagtaccgacctgacatacaccgatcgccagggcagtgagcactacactgtagatggaatgaaggcggaaggggataaagttgtcgaagaaacgcggcagaacctgatccctctcagccgacagtatttgactctcgaagctgctcaggcggatattgcgaatattccgccaggttccacaacctatgtacgcagcactgatggtatctcgcttgctgatgagtacatcaataacgccggaacgttgacagcaaccggccgtaaaatgccatctcaatctttcgttgagagtgttgactcttttgccagggaacaattaaaaataattgattcaccaccagaaaagaccccgctaataatagatgactctgccaatccccgcgttgcgatttgggtggaagaaggaaaattaaatagcatcccgttacatcaggatttagttgatcaggtgcaggagggtatggctagcgaggagttcgtttctgagaatttggctagcccaacgacagcgccaaacaaaaccgttttaattatggataattcacctcagcctcgcgctgctgcctggcaagaggatgggttgtggaatagcatcccgttacatccggatattacgggtcccattgttgatgaaacattatcgaaaataccgcaacaagttgttagttcaggtaaaacactctggctgtatcgtgcaaaaaaatcaaaattagataatgcagtatcaactaatttaaaaattgggttcagcggagattcctgggcagagaacagagctatacctcagcaattcgccacctatctacaggcaaaatatggtaaatctggtgagggttggttgcaactgaacgtaaccggcaacagcctgttaaatgacgtcacgctaaccaaaaccggatggactgtttatgatgcgtctggaacaacggcaaatccgccatttccaacatcaatggacggtcaatactgttatgcgacaggcactgcagccgtgatgagcgtagggaatctgtttgctacatcagtcaggatattttactacgacggaaatggaacatttcgttatacagttaacggtggctctccggtggtgatttcaggaggtgggactaatgcaatagttagcgtattgatttcaggtcttacaatcagttcggcaacgacgataaacatcgacctgataggaaatgtaggaactgtagttatatatggattttacagcgtcggttcaggtaatggtattgaaataaataaaatgggtaacggcagcattactgccgggcaatacgttaaaactttgccatatctgtctcagacagcgtcgtttgttaatcctgatctgcttgtcctgataattggcactaatgattatcggttaaatgaatcattggataccttcaaaatcagcctgactctatgggttcagtcgtggcaagcggcgtgtccagattctggcattatcctggtggcccctccgcagactaactcgacaggggataacccactatctgaattcaaaaatataatgcaggaagtggctacaactttaggcgttgaattctattctttgtttgattttctgaacgttccttacgcaaaaagcaatgcgcaagggttatggaacgacgctcttcactttaatgcaaatggcgcgagatttctcatgaatcaaattaatgaacatttcctggagataagataa

SEQ ID NO: 238326 - DNA, 501 bp, Klebsiella pneumoniae
atgggcgcagcaatactcagcaattacaggatgctctcggccgaaagcgacagaggtgcggtgcttctcgcttcgagcattatcgaacgaggtctgacggagttaatttgcgccttcctgttagaaagtgataacaaaagagatgagctctttactgggccggccgcccctttgggaacgcttgaatcaaagatagctatggcctacaggttggggctgatacgcaactttgttcgtgactaccttgatatcttcaggagaatgcgtaacgattttgcgcataacattgagcggtatagctttgatgatcccagcgtcaggaaccgtcttaatgaaatatataaacttaggaaagaacagtccgatttcttagatcggctattccttgataccaaaaaggaagcaacggtaagagataagtttcttatgtttttctcctcggatatggctgcaatacaaagagtaagcctgacggtagagaggattgtacctcttgattaa

SEQ ID NO: 238327 - DNA, 423 bp, Klebsiella pneumoniae
atgaaaggcgccagtcaaatagcaccattaggtatcaggcttcccgaagagttgagagaaaaaatcaaggagaaagctaaggaaaatggtcgctctgtaaactctgaaatcgtccagatgcttgaagatgcgctgaacaacgatgctcaaggtcatgatcgtgagctcgaaatcgtttcagaggcctatgaagaacacataaagtccttagagaaaataataaacgttcaaagcctatcaatggatttggccaaagagcagatagcccttctgaagcaacatatcaaagcaactaccgggtttgatgtacaaaaatattttgaaaaggtcgtggactatgacgccataagcaaaagcgtcgaggaaacattcaagagtgagttcaagaaaaagccaaccagattcttaaagagcgaagactga

SEQ ID NO: 238328 - DNA, 945 bp, Klebsiella pneumoniae
atgggaaaagacatctttagtagatttgactgggttgatacgctgaaggggatcggcatcatacttgtcgttgctgggcatattttcggctcatacatctctggatttatatatttatttcacatgccattgtttttcttcctcgctggatatttatattcaccaaagccattaaggcaatatttaaaaagcaaatcatcaaacctgttgataccatattcaaaatatcttttgttttttacagccatatcaactgtatatatgattttaaatcatgatagcatatcaatgattttaaaatcagtaatcaaatcattgtatggaggaaacctccttacaggatggatgggagtcttctggtttatcaccgtatttttcatcacacagcaactctttaatttttcaatagttaaactaggcgtaaaaaagacaagcgccatagcaatcatatcattagcgctttcatacgttgcaagccagtttattaaaataaccaccccacttaatatcatcgtgacacttcatgcttttccatttatgtgtctcgggtatttattcaaaacacatagaataaaagtaaatacgatggcggtaattttaatttgtgtaacttgcatatggtttttctcatctcacaaagttgaaatgaaatttgatatgaaacaatcattatatgggataccatttataagtttcattactgctttagcgctcgttgttatggcaataattattagcagcataataaaatgcaagcccctcgaattcattggcattaactcaatgaacattatgtatatacatcaattcattcacctaagcatagccaataagatatttgaatcggatttcgcaatatttacaaccacagtaataatgtcattattttattgcataataataaacaaaataaatataccgtcaattaaaaaaatacttagttaa

SEQ ID NO: 238329 - DNA, 3369 bp, Klebsiella pneumoniae
atggccgaacttaacccgccactgggcacgacgacgccggaaatattcatggacaacgttaagcgcgctgacgagctggttaacggtccggccggaacggttgacgaccgcggcggagagccgctcgactcctggcgtcagatgatggcgaaaaatgatgagatacggcagaacatcattcctctcagcaagcagtatcaaacgctggcagcggcgcaggcggatattgcgaatattccgccaggttccacaacctatgtacgcagcactgatggtatctcgcttgctgatgagtacatcaataacgccggaacgttgacagcaaccggccgtaaaatgctgtctcagaagcgcgttgagttatctgatgccgctgcccagcgagaaatattcagcaatcgccaggcgttatccttaacggattacaccttgtcaaaaatgaccctgatggcgcagcaaaaaaagctgtcgtttactgctgcgggtagcagggcgtttacctctgaagatgatgtgacggtattcgttaaccagatttcagcaaatgaatccagtgatgcaagatcccgcagtcaggcattgaaattttctgccactgccagcaatgggacggctgtaatagccagcctgttgccgggcgagcgcttcagcgatggtgttattgactcaccgtatcatgtgctggatctgaccggaattgcgcccgggactgtgttgcttgatgccacgaactctgtttttcgaatggttttcagcaatataccattacaaaatacaactcaacttatcgccccatattcagttattgatacctcaggtgtatttactgcagggaatactggtggatatgcgtacgataagaaaagttgctctatgtatggtgtgtcaacgccatatatccaactaactatcccgtatgctgagattatttcagcaggatacaccccagatgcttcaggtggggtgaaatactacattgataaattttcttcagttgttattaactataagacaactgatattacaaaaaagaatgccaattttatcactcaattacctgccggggacatcactataacagcagatcagtacttggtgctatctgctgacgtatatcactataatggtcgccaaaagcctgagttcacatcaagctctctggctcgttacatctgcgatgcgagcaatgatacctcaatggactacactgggctgctagagctgaaagtatcatttcctgcagggctagtcatgcatcacgaggatatctccgtgactgacaaggatggcaattattttgtaggacagtttgcgggggaagattttgtaaaccttcgcttccagtctaatgaggggttctggccggatggttcatttaaaacaggctctgtctggattaacgatactatccctgccggacagaaaaaatactacaacattgatatctacgccaacacaaaacagatggctgcatatccatctctcgattattacgccccaactgaaggaaacaaaagattcaatattactgttggtagtataacctgtcgatttagttggactacttactactatgggttaacatctattgattctgctccaaatgatgatgtaaaccgtgttgtgattgggctcagcactcaacatcgctatctggacggaactacacaaaaaacagaatattttactgacaatgtaaccctgaaactctcaaataatggtcctcttttttcagaggttgagcgtgtggcatataacgcagccagtgcggtatattcctctggtgtattaaaatcaataacccgttatcgcatttttaataacggtcaaattcaggttcgtaaccttgttactgctgtgagcatgattcctgtcgggaaaatgcttggtgcatttatcccgatgatagtgacctatggaagctcagtaacccctaactatgattttgcctctcccgctgcaattataggcgggactcctgtaggaaacgggtcgctatctatagttccaacgattgttaatggtgatattcatcgtgatggcaccgcaggcggtccgaccagacaggccacgatatcaatgtccaataacacatccagcagaaccttaaccgttcaggctggatggataacatcatcgtctactgattactcattcctaaactggcctgttgaaaaaaactggacgtggagtgtcgaggcgtggattaacacacaggaaacagagtctgctcattttccgctggcatcaaaagtactgaaccgaccggtggcatttgcagcaacaggagttttgccgaatgttgcggttaaacgggctgaacggttttttctggaactgatggatggtgtcccggatttctggatgaatggagactcagcaggaattggggggatgacaccgccattaaatcttagcaacccaagccagttaacccccttcggttaccttgcatgccgcgagttaaggaagccgaatggaacactcgctgtattattaccgtcattcattcagtatcttaatacatattacagcggaacaggactaggcgcagcataccttagcggaagcagggcaattgctgacctagtttccacagtgcttaaacccatagtttctttttatcgttctgctgaatacctgggagagagcacagtaacagatgcactgaaaccctacatcacaaattttgctgatgcgatggtcatcaccgtcattaataaaggaggtataacgaataaatacactgatagcggtacgggagcaaccaatatcaatatttacggactgcttctggttgcgctggcgataaaaacgggaatggatactaccgggaaatatcagacctgctacaacactgttattactctgctgacaaatacatcaacaatttttcgatatacaccgaccctggtggattcacagccagtaacaaccagtctgtcacgtagtcgctggtttaactacgatatggacctgacagctgaatatctgattatgaccgatatgctgggtattgccccagcattcaacaacgtcacgtatggtctgcacgggttatgtggtgatggacgtatcaggacaatcgattacaacatctcggaaagccgtcgtggtttattgtcgacaccggtgagtgtggccctgactatgatgatggtaaggagagtctcgacaggaaatgcgctcatcttaagcatgcaggcttatgaacgtgattatcttacagacccgtatgcgagtggacgtttttatgatcactcaccccggcttggtacaggtatgccgacagatatatccagtcataaccgggttatgttagaaatgctggcaggatattttgtgaatcaaatagcaagtaaaggctaa

SEQ ID NO: 238330 - DNA, 276 bp, Klebsiella pneumoniae
atgagcttcgaaattattgctgggctggtggtcgtcatcctgggcgctatagctggcgcgttcggtattggccacgctcgcgggaccagtaaggcagaagccaaagccgatcagcagcgtaccgaagagaacgctgccgccaccgtcgccgcggcagaacgtaaggcggaagttgtgaaagaggcaagtgatgtacaggaagacgttaagcgtatgggcgatgacgatgttgatcgggagttgcgcgaaaagtttacccgccccggtagtcgttga

SEQ ID NO: 238331 - DNA, 498 bp, Klebsiella pneumoniae
atgtcccgacatgacttgatattcgatattcattattcgtattacctcgaaaagatgtttgcgacattaactggccgcatcgaccggtttatgactttccttattattttgtcgggatgtggtgtttttgtttctatcactggctacgtttggtttggtgcatttatcgctgcattatcggtaagccaagttgtttatcaattctcccgctcttcaggtattgcaactgaacaagctcgcttatatctggaactaatcaccgacgaaccttctcttacgcatgaggaattactcgcgcgttttaaacatttgcaaaacgccgattcaaaaccctggggttgcctagaattaccagctcagaaaagagcaacgattgttcttggctttccagatacctatagggaactcagtaagcaagagagaatagctgcatggttggctggagatttgccccccaaaaaacagaaggaaactagagatgactcaacccccacttga

SEQ ID NO: 238332 - DNA, 132 bp, Klebsiella pneumoniae
atgcgcttccatgttatgtgcctgtcttttatccacatcaggctcagtgcatcctggttattccccaacaacaaggattcggttaatctggatatccccaacaacaaaaggagcttttatgaactgcaatga

SEQ ID NO: 238333 - DNA, 1194 bp, Klebsiella pneumoniae
atgcacaaactttatatcagattggcatatcccatatttatttggtttattataattaaatcatttgccggtccaattggtttgattttgccagctataaactatagtggggttttatttatgacggcgttattgatcgtgcgctggatagggtcacttttacacaagccagccgtcttaatgctaacgatgatgtttgtattgtatataattattggaattataaatactaagctaatacaggttgtctttgcaatctatatatttattccttttatttattgtattgcatttgctgatgtcttatttagcaaggtattttatggaaataagttttttatatatttatcgattatatctgcactgggggttatatatgtgaatcattttggtgcaccttgggtaggaggagtattaaatattggggggcatgaaaaggttctttcgcgagattggactactaatggtatttctcgcatacctgggtttacaggagcgtcctttgatgcagctacgataataatgataagtggtttttttgtattatttgattttgtgcagcgtaaattatggctacctttgggaatgctaataattctatttttttacgcaatatatttaacaacaactaagacagcaataataacatttggtttcttgtccttgttactactattaccagcagtactaacaaatttaatgtcaaaactaattgttttaatatctatcatatttacatatatttgcatgtttagtgtaacgggtaacagaggtggttacatcactaatactttcttgatgcggatgtatgagacttggccagcggctatacgactgctagaagataatatagatctaatttttggcaagggattcggcgcaatcggtaccccagcacttttttttgatgcacaaaattacaatgcggcagataatgcttttgtctatttatatattattgcaggcattcctagtgtcatactagttattcttttcttagctagatatttttcagcaagcttcgaaactggtttaattaaaaatgagtactacttgtgctcattatgcgtatttatcggcggccttacatataatctttttgaatcggttttttatgcaccatttgcaggtattcttgttggtgttatttttcaaaagaagtatttgcaaacggatattagtaatttaaagtga

SEQ ID NO: 238334 - DNA, 2169 bp, Klebsiella pneumoniae
atgtcattgttaaaacaaaaaaacattgtgaaagagtctgatgaagtagattttgggcgattaattggtgaattaattgatcatcgaaaattgattatctcagttacatcattgtttactcttatagcgcttgtttatgcattattcgctactccagtatatcaagccgatgcattgatacaagtagagcaaaagcaagcgaatgcaatattaagcaatttaagtcaaatgcttcctgatagtcagccccagtcagctcccgaaattgctttgttgcaatcaagaatgatactaggaaaaactgttgatgatcttaatcttcaggttgatgttgagcagcaatatttccctatttttgggcgtggttgggatcgactgaagggggataaaccaggttcggttgttatttcccgcttatatatagatgataaagatcaaaatataccagagttaacactcacggttaaagataaaaatcattatcgtttgtcgtcagattcattcgatttagaagctaaaacgggtgatttattaaatgcaaaaggtgttactcttaaagtcgatagtattgatgcagctccgggaacaaaattctcagtaagttacgttagccatcttcaggcaatcaaaaatttacaagaagctttcgttgtatcagatcaaggaaaagatactggaatattaagcctttcgattactggggaaaacccacagttaattgaaaaaataatcaatagtataagtgataactatcttgttcaaaatatttctcgacaagcggcacaagatgctaaaagcttagattttttaaatcagcaacttccaaaggtccgtagtgatttggatcttgcagaagataaactgaaccagtttaggcgcaaaagtgactcagtcgatttatcccttgaggcaaagtcagtactagatcagattgtaaatgtcgataatcaacttaatgaattaacatttcgtgagtcagagatttctcagttatatacaaaagagcatcctacttatcgggcattgatggaaaaaagaaagactttacaagatgaaagagtaaagttgaacaaacgagtttcggcaatgcccgagacccagcaagaaatattaaggttgagcagggatgttgaatctggtcaagctgtctacatgcagttacttaatagacagcaagaattaaatatcgctaaatctagtgctattggtaatgtaagaatcattgataatgcggtaacacagcctaaaccggtcaagccaaaaaaagtgttgattgttttaattgggatcgtattaggctctatgattgcagtagggttggtagtgttgcgcgtgtttttacgccgtggaattgaatcgccagaacaactggaagaattaggaataaatgtctatgcgagtattcccatttccgaaacattttcgaaaaatatagcccaatcaaatggttggcgtaagaagcaacaaagtgaaataaatggatttcttgcagtcgataaccctgctgatcttgccgtagaagctattagaggattgcgaacaagtcttcatttcgccatgatggaagcaagaaataatgtgttaatgatctccggagctagcccgaatgcaggaaaaacatttgtaagctctaaccttgcagcggttattgcccaaactgggaaaaaagttctttttattgatacagatttgcgcaaaggatatactcataaactatttaatatgaataatgaccatggattgtcggaccttttatcgggaaaaacgagtattgaacaatctataaaaaatgttgtatccgcaggttttgattttattccaagaggaatggtaccaccaaacccagcagaattattaatgcacaaacgttttggtgagatattattgcaagttagcaaactgtatgattttgtcatattagatacgcctccaattttggctgtaacagatgctgcaattatcggtaattatgcaggcactaccttacttgttgctcgatttgagcaaaatacagtaaaagaaattgaagtgagtgttaaacgttttgagcaaagtggagttaacgtcaaaggctgtattttaaacggagtagttaaaaaggctagtagttactacagttatggatataaccactacggatattcttattcggatgatgtaaaaaaataa

SEQ ID NO: 238335 - DNA, 1533 bp, Klebsiella pneumoniae
atgtccaaaaacaaactcatagttaaaaacactatttttctaaccatcagaaccttattttccttacttgttgctttttataccaccagagtcgttttacaccaattaggtgtatcagattatgggctttttagtgttatttatggaacggtagctttttttgtttttattgtgtcggcaatgaatgattctgtacaacgttttatatcaattaacctaggaggtaataaccatgctgcagtaagtaatatattgaaaaatagtattctgatctattttttgggagggatgtttttttgtcttgttttaatcgcaattaggggctatgtagttgaaaatgtacttacaatagatgttaattcgctgcctacagctaaaactatatatatcattgcgttattatctatatttgtttctattatacaaacgccttttaatgcactagtattagcgcatgaaaaaatgtcattttatgcatatatgacaatatttgactccttatccaagcttattgttgcctttattttggttgttctgccttataataagctggttatctattctttattgcttttattttcttccttaattagctttactatatatattgtttactgttataagaatttcccccaatctttcaaaggtggaaaatttagtaaaaaaatcctcacagatattacaatgttctcattttggaacacttttggtaattttgcatatgtttgtaggacacagggtattaacattgctattaatatattttttgcaaccactgttaatgctgcatacgctttatcatcaactattcttaatgcaattaactcgttaactcaatctcttgtatcagcaattcgaccccaaatatttaagtcttattcagagatgaacgaggagagatatctcactttagtaacttcaggatcaaaatatactttttcgttccttttcttaatatcatgccctgtacttatatgtaccaaagaacttttgtctctttggttggttaatattccaccttacaccattggattcgtcaggttcgttattattgttgcgttaatcgatagcttttcatctagcataatcgcaggcgtgcaggcagttgggaaaattaaaatatatcaattgacagttagtttttttgtttttattagtttgccttttgcatatttatttttcaaattaggattttctccttttagcgcatatatccctttgataataacgtctcttataaatttatttctaaggtcgtacttccttgctagatatacaaagttcgatttcattgcttatttttatggtattgttttgccatgcatttttacagctagtgcagcttatagcatttcgtattatattaacacattgctttctccggaaggaattatgttgacattactctcttgttctttttattcctttatttatttgatttttgcttttgtttttgtgttaagtaatcttgagaagaaaattattctctcggcagtgatttcaaaatacaatgcctttagtatgaagaaatag

SEQ ID NO: 238336 - DNA, 891 bp, Klebsiella pneumoniae
atgaataatattggctttataaaaagatgttatcgctactattcatttcatttccaagagcctgtgctttctttacttaaaacgaggcagttagaaaagaaaaatagaatatcaaatctcagtcttcatgattcaaagaatattctggaagatgtagtcgttagcttaactactcatggcgaaagaattaataacgttcacattaccatagaatctattcttgatggggagagcgtcccttcaaggattattttatggttagatgatattaatatattcaataacttaccgctatcaataactcgactcttgaaacgaggggttgaggttaagatgactaaaaactatggtcctcatactaaatattatccttatgtttcgggagaagccctgaaagaatttcttgtcactgctgatgatgatatcatttatcctaaatattggctttcaagtctttatcgtgcggcgaaaggttctcgcaaggaaataatttgccatagagcacatgaaataactttcgatagagaagggttttttttatcatataataaatggaaaccatgtgcattcacaaataaaagcattagatattttgcaactggcgtgtctggtgttatatatcccctgcatttccagcattgtctgaaatcgtttggtgagatctttttagacaaatgtcctaaagctgatgatgtatggttgcattttgtagcttataaaaatgactataaaataaagcagctaactaaccgaagcatccattttcttactattaacaacacccaacatttaggattaatgaatgttaatgtgtgggagagtcaaaatgataaacaaataaaaaatacttattcaaatgaagatatgcaaaaaatttactcagatgactag

SEQ ID NO: 238337 - DNA, 981 bp, Klebsiella pneumoniae
atgtgtaagataagtgttatcatccccgtttataatattgaaagctatctttctgcgtgtatagagtcacttataactcaagattttgaaagctccgaattcatttttattaacgacggtagtactgactcctccagatacatacttgctgaatatgcaatcaaagataatcgaattaaagttattgataaatctaatggtggtgttgtgactgtcagaccgctaggtattaaagaagcaaaaggagagtttatactttttcttgatggcgatgatagtctattcccgggggcgttacaaaagttatacaatgtagcggtgagtaacagttgcgacattgtggcaggtagttatttagcagagcgggatgcgatcgaggaatggcgttttgagtgggatgataagctgtataattcaagtctggatttcttgactgattgtattaagagtaataatttttatatatgggggaagttgtttaataccaagcttttttcttcggaattttactatggagattcaaattatggtgaggatggtgtctttttacttcaattgataaatcgtgcaaacagattgaatgcaattagtgacattgtatattgttatcgtttgcgagaaaatagtttaacctctgccccaactgtgcaatcatatataggaagatatcagtcttctaaatatatttatgactatgtaagaactaattttcatgattcggttgttaattctattgtagagctttattttttgtctcaggtttacaaaacaatattggattgtggctctgcatttgtaatgcaaaatcctcaacctgtaataacttcaaggatggttaatcaacaaaaaaaagaactcaaggaaaaatattcactggcatgtatcatactgaaaatatatgtttttaatcctagtctttgcattaaccttgtacaagctgctaaaaaattaaaacaaatcattcgatcaatcaagaaatga

SEQ ID NO: 238338 - DNA, 708 bp, Klebsiella pneumoniae
atgataaagaaaaaagttaaatatcttatcatgcttatcatattaccgttcttatcaaatgcttcctttgaaattggtgttggtacacatttagatagatacaagtatgatagtgctacgtatttgaaattgttgcaacagtatggtttcacctcgtttagagatgactatacatggtcaaaagttgaaaaagttaaaaataaatataaggttgatagaactcttcaacaagccgactttgcctttatgaattctaaaagttataatgtcaatggtatggtaatactagcctatggcaacatgaattatgattttggtaaatatccaacgtcagatgaagctataaaaggttttgccaattatgcttcttggacagcgaaaagattcaagggtcgagtaaaatattatgaaatatggaatgagtggatatatgggacaggaatgccaaagtctaggaataatataccatccgctgaaaattattataacttggtgaaaaccacaagtttagccataaaaaaaattgatcccgatgcgatcatacttgctggttcattcaatccattaaatgagcgaagcaagttaattggaatgtcagattctcaatggtttgaactgctagttgacaaagggataatgaaatatattgatgggatttctatccatacatattcattttctaacaggaataaggcattaaatagctga

SEQ ID NO: 238339 - DNA, 1068 bp, Klebsiella pneumoniae
gtgatttatgtcaatgctagattctttactcagaaaattacgggagtacagcgttttgccagggaaatagcaaaagaattggcaagccaaagagatgatataatttttttagttccttcaattagtgatattgtggatatcgagtctttgaatgggattaatattttggaagctaatggcggtagtggtcatttttgggagcagattacgttgccatttttcctttacaagagaggtaatccgctattattgaacctatgcaatgctgctccaatcttatattataataaaattatcacattacatgatattacatatattaagtaccctcaaagttattccctaaaatttagaatgttatatagagttttaacacctcttatcattaaaggtagcaggaaaattatcactgttagcgaattttcacgtaaggagataagtaattattacaatctagattatggaaaagtgtcagttgtatataatgctgttacaaatgaaataaaaaagacacgagcagcaataactgacagagaaaataaatacttattagctgtttcatcacaaaatttccataaaaattttcaaactttaatccaagcattttctggatattcaggaagtctctcccttaaaataataggtgacaaagcacaggcatttaatggtgtagaatatgtgtccaatgataatcgaatacagtttctaggaagagttagcgatgttgaattggctaatttatatacaaatgcctatggttttatttttccttctctttatgaaggctttggtattcctcccttggaagcacaatattgtgggtgtccggtaatttcttcagatagagcttctatgccagaggtgcttggtaatagcgtattatatttcaatcctgaatcaacaagtgaaatcgtgatggctatattaaaattagaaaacaataaaaacatacgtgacgaactaattgaaagaggccgagagaatgccagtcgattctcatggtcaaaatcagcgcttgaagttaacaatattattaacgagcatttaaataaaagaggtaaaaaatga

SEQ ID NO: 238340 - DNA, 798 bp, Klebsiella pneumoniae
atgaagcacattgttaaaagaaaatttgaaggagaagaattcgatatagtacacactaataatttagctgggttttcagtttccatatggacgtggtgccagcaaaaaagaataaaaataatacatactactcgtgattattatcttttaaaccccaatgggacattgttttgtaatggggaaaatacatctccagaggaatttaaagcttacacgttttcttggttaaagaaaaaaaagtcacataaagttgatgcagttatcggtattagtaactatatttcttcgctgcatgaaaatcataattattttaaaaatgccaaatcatatgtaatatataatcctataccaatcataagcaagccaatcaaagttattaataaaaggtctattgtattaggatttattggtagagttgaaaaggcaaaaggaattgagtatttcttagaggaaatgattgcggttaaacggagcatagtcattaaagtggcaggaaaagcagaggaaagctatatggcttatcttcaaaataaatacaaatgtttaaatgtagagttcttagggttagttgatacagagaaatttttccctacacttgactatactgtagttccgtcaatatggaatgagccattgggtagggttgttatcgagtcatatgcatatggtatacctgtcttgggaagttgtaggggagggattactgaaattatcagacaaggagagaccggttttttattcaatatagaaactgtctcttatacacatctgacgctgccgacgatctactctgtgtag

SEQ ID NO: 238341 - DNA, 792 bp, Klebsiella pneumoniae
ttgaataaaaagaaaacttttgaagtaagcattaacaacctaccagcagcattaaaacgtttaaacctactagccgaacaagtccaggttatcgaagattataaaaaacaatttcccttccttttagaagagggtgaaaatgttttggttagccttgatcagctttgggaagcactggatacaccgtattatacaccacccggaaagccgtccgaaaatccggacgggttagagaagccaggaacgatacccgaactttcgggtagcgtaaaatctcgttcaacacagcaggaaaaacaatataaacgcaataagtttaatcagtgggttgagtcagtattaaaagaaattgataacgagccttttagtcgaatggtgcctactggaaagacaaagaaaaaggaaaccttcgttaccattgaagatgcaaaaacaattgcgatgttaacacccggtgagcagggtagaaaaatcagacgttattttgtgactgtggaaaaggtctgcaaaatcctctggcaatacaacttccagcgtcaccagatagaaaataaatctaacgaagtttacaaactcaggttagcacaaactggttataaaggttttgatgttgctgcgaaggataaagttaggtttaactctctcgtgaagaaaattgcaggtgcgagaaatgttaaagaaactgaccttgatgagtattatcacgttcaatttatcgtttttgatggaatgaaacgtggaagaacagacagcgagatccttgcatttcatcttggtgatgaagcagcttaa

SEQ ID NO: 238342 - DNA, 444 bp, Klebsiella pneumoniae
atggacacaaataaatttacacgccatgatttttctgaaacagcctttactctgatgcagattattggagataaccgtgagtacgaggctaaaattagagaggattattaccgatccgcgcttttatctttaaatcaactgaatgatctaatagcaattaatgaagaaaaaaccatagagaataagcgtatagtatttactttaggcgatagtttatctttcaatcttgaacttaaaaatcactttgataaaactgctataacattaagctgcattgagcaagatgaatatggcaaagagtttttgagcaaggataggaattacacatttacaatagacataaatgggaaactaaacgatgttgatggtgccttaaatcgtagacattaccatgaacactttacacatatctttaccttgcttgtagagaaaatcatcaagtaa

SEQ ID NO: 238343 - DNA, 777 bp, Klebsiella pneumoniae
atggcgagagtcgtggtgataaccggcggtggaaccggaattggcgccgcctgcgcgcggctgatgcgcgccgcgggcgaccgggtgtttattaccggccggcgcgaagcgccgctgcaggctgtcgccgatgagaccggcgccacggcgctggtgggcgatgccgccgacggcgaggtgtggcgccagcggctgctaccgacgatcctcgaccagaccggcgggattgatgtcctcatctgcagcgccggcgggatgggcaacagccccgccgccgagaccagcgaccgccaatggcgcgaggcgctggacgcgaatttaaacagcgctttcgtcagcgtgcgcgcctgcctggcttcgctgattgcctgccgcggcaatgtgctgtttgtcgcctccatcgcctctctggccgccgggccgcaggcctgtggctatgtcaccgccaaacacgcgttaattggcctgatgcgctccatcgcccgcgattacggcccacagggcgtccgcgccaatgcgatttgtcccggctgggtcaccactccgatggcggatgaagagatgatcccactgatgcaggaacacgggctgtcgcttaccgaagcctatcaacgggtgtgccgcgacgttccgctacgccgccccgccagccccgaggagatagcccaggcctgtcagtttctctgctctccgcaggccgccatcatcagcggcgcgacgctggtcgccgatggcggggccagcatcgtcgatgttccaacgctggcgtttacttaa

SEQ ID NO: 238344 - DNA, 240 bp, Klebsiella pneumoniae
gtgaaaaccaaaggaggtgaaaatcaccggaatggccgacagggccaggccttgctcaaccggcagcgtcagaaggttcacctgatgaatgtgcggcatcagcagggccagcataatcaccaggaagacgattttggcgctaaacaggaagcgattgaacagatccaccagcgcagtgccaatgcacactaccgccccgccgaggagggtgaagatcagtacgcctgcggccggtggtag

SEQ ID NO: 238345 - DNA, 375 bp, Klebsiella pneumoniae; identical to SEQ ID NO: 181664

SEQ ID NO: 238346 - DNA, 192 bp, Klebsiella pneumoniae; identical to SEQ ID NO: 181662

SEQ ID NO: 238347 - DNA, 282 bp, Klebsiella pneumoniae; identical to SEQ ID NO: 181651

SEQ ID NO: 238348 - DNA, 210 bp, Klebsiella pneumoniae; identical to SEQ ID NO: 181649

SEQ ID NO: 238349 - DNA, 192 bp, Klebsiella pneumoniae; identical to SEQ ID NO: 181648

SEQ ID NO: 238350 - DNA, 138 bp, Klebsiella pneumoniae
atgagcaagattcaaaaacctaccgtccctgattggatgcagccaacggctccgctcactgatgcgcagcgcgaggagctacggcaagccatccgtgcgtatatccgtcgccggaaggacgaggagcgtgacgcatga

SEQ ID NO: 238351 - DNA, 225 bp, Klebsiella pneumoniae
atgaaagtcaaatgcattaaagataccgagggttggtggaccgaaggcgaatattacgaagcagtagaatatgccggcggatatattctggttggtgatgacgaagacccagtaggggaaggctggagcgccatgcctatcgaataccgggacgatggttcgattgtttatgccttgggcggtatcgaaggtgaagtgttattcgaggagcccagccatgactga

SEQ ID NO: 238352 - DNA, 402 bp, Klebsiella pneumoniae
atgactgatatcaccgaactggcgcagagagagaaattcgaagcgtgggctgaagagcgttgcgctcttccatggggctatctaaaaaaccgacgcactaatacaggctacttctctaaacatgattacaccagcttatgggccgcatggaaagcggctggcgctgagctggtagaggcgctggagaaggcgcaacacgaagcgagagttgactgggaggcggcagcgtcgctgaacgttgaaaaccaggaattgaagcgccgcatcgcagagctggagtcccgcactgtgaagctgccgcgccctgggttcatcaccatctcaggtgagcgcatggccgtttatttgaaaggtgatgttgatgcagcaatgttggcttcaggcattgaggaggctgagtag

SEQ ID NO: 238353 - DNA, 540 bp, Klebsiella pneumoniae
atgacagcagaccagattatcgaggggatactcggcaaagagagtggttatgtcgatcatccatcggataaaggcgggccgacccgctggggcatcacgcaaaccaccgcccgtgcacatggctacaccggtgatatgcgaaacctgcccagggaaacagcaaagcaaatcctgctgagcgattactggaccggaccccggtttgaccaggtggcagctctatctacgttactggcggatgagctttgcgacactggcgtgaacatggggcccagcgtcgccagtaagttctttcagcgttggctcactgccctgaatatgcgcggaaagctgtatcccgatctgattccagatggcgccattggtccccgaaccatcaccgcgcttaagggatacctttccgcccgcgggaaagagggtgaacaggttctgttgcgtgcgctgaactgcagccagggtgccagatacctcgaactggcggagggccgcgaagccaacgaggattttctctacggctgggttaaggagcgtgtcctgtga

SEQ ID NO: 238354 - DNA, 231 bp, Klebsiella pneumoniae
atgactggtattgaaaatgcaatactccgttctggctcggcaagtgcgcttggtgagttgatcggcgtttcaaaaatggccgtttcgctgtggcgccgcaaaggcatccctgccgaacgagttctgtcagtgtttgaggcgacaggtgtaactccccacgaactacggccagatctatacccaaatccaactgacggccttccgaaacaggaggccggatcatgcaaataa

SEQ ID NO: 238355 - DNA, 1143 bp, Klebsiella pneumoniae
atggcgacggttgagcttcaactttccccacagatgattgactgggtggcagatcaaggcggatatactccctccgcccttgcggaagagctaatgcctaaaaaaaaggaaatgtttctacggggccatgttacaaaaacagtcgctgaaaaacttgcaagaattggtcaaattccatttggatatctattccttgacacgccacctaaaaatacccccccaacgatccctgatttaagacaaaccattaacccaatacctttatctaaagattttattgatacatataatgatatcaaatataaaatagattggtacaaagaatatcttgatgattttggaattcagtttaatattgattttattggtcgtttttccatcaatgacgactttcgccttgtcgctcaggatatatcccaaacaatagagctagatattaaaaagatccttaataaaataacaaaagactcttatttttcttttgcatgcaatcttatagaaaaaaaaggaattctggtattcaaaaatgggatcgtcaaaagtaatactaaaagaactattgatccaaacgaatttagaggattttgtcttattgatgagatggtaccatgcgtgtttgttaatggtacagactcttactccgctcaagtttttacactttttcatgaagtcgctcatatttgggttggtaaagcaggtgtctctaattggcaattcgataataaaatcgaatccttttgcaataaagtagctgcggaagttttaatgcctcatgacctattcaaaaagaaatgggatcaagaaacagagtttactgatgaattattagtagctgcaattaacgttgcatccttcttcaaagtaagtttgtatgctacagcaataaaagctaagtccttgaatttaattaacgatattgatttcgtcacgttaagaaattatgtgttaaatgtaccaaagaaagaatctagcggagctaacccatacgcaacatatccgtacagaaacagtccaaaactaacagatgcaatactgtcttctaccatgaatcagcaacttcctttaagagaagctgctaatttactcaacattaagacaggtactgttattgagctgtataagcaaaggacgtctaagaaatga

SEQ ID NO: 238356 - DNA, 510 bp, Klebsiella pneumoniae
atgatgcctgaaagatttcttattgatagtaatgtctttattgctgcgaaatattttcattataactttagctattgcaaaatgttttgggactgcctcgttcagtttaacagaaaaggaatcgtttattcggttaactcagtaaagaaagaacttttagctaaacccgatgaaatttctaaatgggtcaacgaagaggttcctcctactttttttcaagatgaaatcacttctatgcaaagttatggagtactgatgaattgggctcagactctcgatgttagcgataaagcaaaagaggattttgcctctcaatcaaaagccgacgcctttttgatcgcacacgctatgacccatgggttttctataatttctcatgaaaaaaaccaggaaggagctaaaaagagaattatgatcccaaatgctgcattagcccatggagtaaattgcttaagcatttatgagtttttagcactatattcaggtcaaaatttttcttgtactccttag

SEQ ID NO: 238357 - DNA, 870 bp, Klebsiella pneumoniae
atgcacgttcgctattctctgctcgcctcgcaggcgacaacggccctttttgtgctgctgtggggcagcgcggccatcttcacccgctggggactggataacgcctcgccgatggcgctgctggtctttcgttttctggttgccctggtcgcgctggcgccgctggctatcgtccgtcggcgctggctgcccgcgccgggcacccgcctgcagacagctgtcaccggtctgatgctgattggcggctattcggtctgttacttcgaggcgatggccaacggcgtgacgccgggacttatcgccaccatcatggggattcagcccatccttacgctttgcgtggtggagcgccgcctgcaggggcggcggctgtcaggactgctgcttgccctggcggggctggtgctattggtgtggcgcagcctggcggcctcaccgatggcgacggtggggatcctgtttgcgctggcggcgctgctgctgatgacctttggcgcgctgtggcaaaagcgcagccgtcaggcgccggcggatgtcctgccgctgcagtatgccgttagtctggggctgtgcctgctgattgccccggtcagcggcttccggtttaccgttaacgccgggttgattattccggtgctgtttctcggactgctgatttcggtggtcgcccagctactgctgtaccgtctgctgagcgcgggaaatatcgtcaatgtcaccagcctcttttatctggtgccagcgatcacggcgctgctggattatctgctgctgggcaaccggctgccggcggcggcgatgatcggtatgatggcgatcgtcggcgggatcgtgctggtgttccgcaccgcgaaggtccgcgccggctga

SEQ ID NO: 238358 - DNA, 864 bp, Klebsiella pneumoniae
atgagtgataaaccgacagtatttattgcttcttcatcagaagccatttctgtttcagaggctgtacacattaaacttgaccatgagatgagaccaaatatctggaacaatgcttttgacatttccacaataacaatcacctctcttatcgaacaaacgaaaacagttgattatgctgtatttgttttccatccagatgacaaaatatttattagagaagaagaatataactcagtcagagataatgtcattttagaattagggatgtttattggtgccttagggctggataaatgtttcattttagccccacaagaaaaaggatcaactttcagaataccctcagacctcgctggcgtaacaatatctttctatgacagccaagaacccgatataacgaatgcagttacagcgagttgtgcgaaaataaagcagcgcataaaatctttggaggccagcaaaaaaacaccagaagccgtcagtgaactagaaacattaaagaatcaactgagcagcactcagtcaagaatatggagtctaaaccatgacattcagcgtataagcgcagagtcacaatcattccaagagtcaataaaatctgcttttttctcaattgtaaaaccagccacccaagcagaaataaaaacctgggaggaaggagcaaaagaaagtcaacttaaagatataaaaataaaaagttacaaaacttactttgcagaccaagatgttattatcccgtcattgactggcgctgattcaatatctcttattgtcggcgttggtgttaaggtttatggggtaaatcaatatagccacaattcaatttattacatggatggattcagagttacatccctggattaa

SEQ ID NO: 238359 - DNA, 189 bp, Klebsiella pneumoniae
atgttttacctatatgaaatacagacaataaatcagataagtcagtacatgttaaccaaagttgagggtgatggggtgattacagtatttgatgccgacagtgatgaagaggccatagatattgcgttcatttatattagcaaagtcattggtttaaaaaaagaatacggtatatcaataatttcttga

SEQ ID NO: 238360 - DNA, 435 bp, Klebsiella pneumoniae
ttgttcgtactgagtgttagcggcattcatcagttcaagaccgcgctgggttatctgccccttctgcgtttcgaactgctggatgagagccaactcctgagcatgctgattagccagctgttggacagggtcaatctgcccccgagcttcctgcatggggcttacagtttgctgagcgcgtatcttagccagattaacctggtgctgagcctccagttgctcactggtctgattgtactgctgctgagtgatttttttggcggccagtgcagtttgcagatctttaacatcctgctggtaagacgcattctctctggcttcagggagcagtttttctgccgcagcctgggctttgagggcattagccgtatcccatatttctccacggtatttaccggcaagagcaatttgctcttgggtggctcccttacctag

SEQ ID NO: 238361 - DNA, 171 bp, Klebsiella pneumoniae; identical to SEQ ID NO: 199706

SEQ ID NO: 238362 - DNA, 717 bp, Klebsiella pneumoniae
atggataaaaacaccgctgttattgactcaccagaggcgctgggcgctgccctgtgccgccatgtacccgatatggccaacggtttcaccatcaccacccgggacagccagctgcagttgactgtaaccgccgaagataccagaccctttatggtggcaatggaacgtctgctgaagggcaaaatccgtcagattcagcgcggacatcagggccgtgtactggacagaaaactagctcggattaaccagaatggcgagaaactgactgctgccgagattgcggagaagtactgcaactaccggtctgaccagcagcagtcagcatcgcaggaacgggattatgccacgcaattgatgagtacggaggagctgaacacactcctcgatcgcgccttagagcaaggtatgccggaacagatgctggcccctttccgcaatggtgttaaaacccgggaacaggccagaaggcttgagctttcctaccatgcatgggtcgcagtagaaaacatcagagattttcatcgtcagaggtcccgcagggacgatcagaaagagacgtccgaagtatcgggtcaagatgccgggtccctctgctgtagtcagcaagatcccgcacggcccgaagtaggtggtcaggagccgagtgattcaccatcccgaccagacaatcatccagatacccggcaaagtccaggcgatcaaacgaactctcgctga

SEQ ID NO: 238363 - DNA, 354 bp, Klebsiella pneumoniae; identical to SEQ ID NO: 199662

SEQ ID NO: 238364 - DNA, 591 bp, Klebsiella pneumoniae; identical to SEQ ID NO: 199661

SEQ ID NO: 238365 - DNA, 801 bp, Klebsiella pneumoniae; identical to SEQ ID NO: 199660

SEQ ID NO: 238366 - DNA, 204 bp, Klebsiella pneumoniae
atgtcgcgtattgtactgaccctcgaccagatacggagtcttgcctcctttgctgagggagaaggtcaacccgcttacatcatcaccgacagtaccatcccggcttttgaagctgacgatggttcggtggttcccgaatataccggcctgattgtttattcggagtcagagcaaagcggcgtactgcagttagctgaccagtaa

SEQ ID NO: 238367 - DNA, 2715 bp, Klebsiella pneumoniae
atgggcggtggtggcaaaggttcgaaaaaagtcacggtcggctaccggtactcctgggatgtccaggcggggctggggcgcggtccggtcaatgagattgtgtcgattatggccgataaaaagacggtctttgccggtaccccggggcagatatcatccagcacctcggtgtacatcgacaaacccggcctcttcggcggcgatgataccggcggtgagggaggcatacagggtcagctcgatatcatgatgggcgaaccggatcaggtccccccggcatcgctactgaggttgctgacggggctggtgccggggtttcgtggcgtggtgaccacctttttcagcggtctggtcagctgctatagcgccagccccaaaccatggttataccgagttcgtcgcaccaccaaaggctgggacggtgacgtctggtacccggagaaagccaccatcctgctggagaattcagagtctcagatagatgatgaggccgacctccttcccgggcagatcgccaacctgcgggccattcatgcgatgaacccggcccatattcttgtggaatgtgccactaaccgcgactgggggcgtcagctgtcgctcgcagatgacctgaacatcgacagctaccgtgctgctgccgacacgctgtttaacgaaggtttcggtttatgtttccgctacaaccgccaggatggcctggacacgtttgtgcagcagatcctcgaccatgtgggcgcggttcagtatgccgacctcgaaaccggcaagctgaccctcaaactgctgcgcggagattacaacgtcgatgacctgccgctgttcacctatgacaacggcattatcgctgttcaggatgacgacagcgccagcaccacgtcgaatccgaatgagattgttgtgacatggaatgacccggtcaccaattccgatggcgaggtccgggcgcagaacctcggggcgatacagaataccgggctcaacagcagctcggtggagtacaaggcgatccccacgcattcccttgctgcccgcgttgctcagcgtgacctcgaaactgcgcagtctcagctgacccgtttggttatccagtttgaccgtcgcggcggtattctgcgcccgggagatgtgtttcgtgttcagctccccgaccgcaatatcaacaatatggtgctgcgggtgggcaaaattgaggaaagtgacaccggcgtgctgaccctgacggtggttcaggatgtttttggcctgccatctacctcgtacagctctggccagcagggcagcagctggacgccaccggataaaacggcccgtccggtcgtcatccagcgcgttattgatctgccttacgcagtgctggccggaacactcagctctgctgacctgagctatctgaaaccggaatctggtcatattggtgtaatggctgtcgcgccgacgtcgctgagtatcaattaccagttgcagacacgggctgcaggtgctcagttcgctgatcgcggccagggtgactggacaccatcagggacgctgactgcccctgtcggtcgtcttgatactatcctgcatgtgaatttggatatttccccggctgtgggcgacggactcattgtcggtgacgaggttatgcgtattgacggcgttgatatttcagcaggtaccgtgaccgtcgggcgcggttgtatggactcactgccatcagggcaccttgccggagaccgatgctgggcgtatcgggatgctcttgaatcagatggtgtggaatatctttccggtgaaacagcagaagtacggttgcttacccggaccagcactgaaacactgactgaatctgccgccacggtcatggcactcgcaattgcagggcgacagggtcgtccgtatctgcccgggaatatccggctgaacagtgtcctctacccggacgcggtggccagcgcgaccacctattccctgacgttctcacatcgtgaccgggtcctgcaggctgaccgcctgattgactgcaccgagggcagtatcggccctgagcctggtgtggagtacgtggtgaaacttctggcgcaggacagcggggatacggtctggtcactgacgaccagtctggccagtattcctgttccctatgtcaccgggggtagtggcgcggcggtccacaccctgtcgctgcagagtattcgtgatggcctgctgtcactgaatacctttgaggttgcgcttcccgcaggccggtacaaaccgttccccattgtcgtgacgatgtctctgaccatcatcgccggtgccagttgggcagagggcaccccggaaactaccgcgaccggcgcggtgccggagctgcacactattgcagatgccgccggcgttaccaactggtatccgcctgacctcctggccagcggcctgtcgattccggcagatgatatcgactatccggcaggcacatggcccgcatcgccgttctcgttcggctcccatcaggttctggccattgcgcagtggacggaaaccagtgggccactgactgtgctggcactgggtggagatgcttccgcactgcagctggattccgccactggcacagcagcggccattgaatgggtggcgggtatttatctcacggaaatggatatcacgattttcacgacggaggggctcgttttgaacgagggcataatctccctgaaactgactgaacggagtatcgggccatga

SEQ ID NO: 238368 - DNA, 813 bp, Klebsiella pneumoniae
atgagggaaaactattattatggtcagggtaaggtgttcctggctccgagagataataaacgtgcattccggtgggtcggtgatgtttcatcattgaaaatggggttttcgtatgagcaacaaataacaaaagcatctcggggcggacagctctatcagaaccagagaattattacaggagccagcggatccatcagttcaacctggcataatttctcagttgaaaatctggcactgttgttgggtgctcaggcagtggatgagccgttttcgtttaatgaatcagtggtattacccaccggtattgttaaaggcgatgtgatcgcgctgcctcataccaccgtatttaatgtcaacattacgggactggaacgggatagtgattatattgttgaccgccagttcggcacgattgaatttctgtctacaccagcggtcggtatgtggacagtagaatacgaccatttatataaccggtggctcccgtttttctcactgaaaccccaggagttttatttacgttttcagggtgtgaatctggcagaggattcagcaccagtgctgttggagctgtacagagtctctgttgatcccctggcgacattagaaatgattagtagcgggacggatatcgcaggtatggatatgacctcgttgatcctccctgattttaatcagcagacaggaacggctttcagctatttcgggcggatgcaggttgttgttccgcagtctacacaaccaccgcagtctcccctgacatatgacggtcgggccagttatgacgggcaatatcaatatcgaggtaagtag

SEQ ID NO: 238369 - DNA, 2163 bp, Klebsiella pneumoniae
atgccatcagttataaataagaattcccttaaagaaaaagatgagattgatttaggacgcctgatcggtgaatttatagatcatcgaaagcttattatttctgtgagctcacttttcactctcttagcattgctgtatgctattttcgcgacaccgatatatcaggctgatgcattaattcaggtcgagcagaaacaagcaaatgcaattcttagtaatttgagtcaaatgttaccggatagtcaaccacaatccgcccccgaaatagcattacttcaatccagaatgatattagggaagacagttgatgatcttaatttgcaaacgcgtattaagcagaagtacttccctttaattggtagagggttttcacgcttatccggggaaaaaagtggtattgtaacaatttctcgcttgtatttgcctgataatggtaaggatgaatctgacttactattgactgtaaaagattcgaatcattacattatatcaaatgatgattttgaaattgaaggcaaagttggggaattattggatgagaagggaatttcccttaaagttgatgcgatagatgcaattcctaatactcagtttattataacatatgtaagtcgtttaaaagcaataacagacttacaagaaaaactggcagtaaatgaccaaggcaaagacactggcatactaacaatatctatgacaggtgataacccacagttaatagaaaaaattgtggatagcattagtgagaattatttagctcaaaatattgcaagacaggccgctcaagatgcgaaaagtttagattttttaagtaaacagttaccccaagtccgcagtgatttagatcaggcggaagacaaacttaatcaatatcggagacaaagtgattcagtagatttatcgcttgaagcaaagtctgttcttgatcaaattgtaaatgtcgataatcaattaaatgaactaacattccgtgagtcagaaatatcacagctttatactaaggaacatcctacttataaggcgttgatggagaaaagaaaaactttacaggatgagaaacttaaacttaacaagcgcgttagtgcaatgccggaaacacagcaggaaatacttcgattaagtcgggatgttgaatccggtagagctgtatatatgcagctgttgaataggcaacaagaattaaatattgcaaaatcaagtgctattggaaatgttcgtattattgataatgcagttacacagccaaaacctgttaaacctaaaaaaataataattgtcctcatagggatttttttgggaatagttgtatctgctggaattgtattattaaaagtactattacgtcgtgggattgaaacgccagaacaattagaagagcttggtataaatgtatatgctagtatacctgtagcagaagcattcgccagaaaaaaagttaatgataaaggatggggtaacagaaattctgagcaaagtcagagcttcttggcgatagagaatcccgccgatcttgcaattgaggctatacgaggtttaaggacaagtttgcattttgcgatgatggaagcacgtaacaatgtgctgatgatatctggtgctagcccaaatgcaggtaagactttcgtcagttctaatttagcagctataattgcccaaactggcaagaaagtaatattcattgatacagatatgaggaaaggatatactcacaaactttttaatgtaaaaaatgataaagggctttctgatatcttatctggtaagtcagatattaatggtgctgttagaactatagaacaggcgaattttgattatatatctagaggtgctgtaccacctaatcctgctgagttgttaatgcatcgtcgctttggtgaattgctcaattgggctagtgaaagatatgatatagtagtacttgacacaccacctatcttggctgttacagatgctgcgattataggtaattatgcgggcacgacattattagttgccagatttgaattaaataccgctaaagagatcgatattagtgttaagcgttttgaacaaaccggtgttaatgtcaaaggatgcattttgaatggtgttgtcaaaaaggcaagtagctattatggttatggttataatcattatggttattcctataccgacaaaaaatga

SEQ ID NO: 238370 - DNA, 2034 bp, Klebsiella pneumoniae
atgaatagatcaagaagactacttatgagaggtattggttacctaactttgtttcctttgctttttttattttctaaaaaagtatcctctgccccgaatggattaactgaaaaagttaaaaatagaaagattgagaaggatgtgagtgaattacctaatcagatttcctatttggaggatatttatagtttggttcccaagattgatgggcagctaataacatcaaaacatgcaataaaaagtgggccattactaaatagccaaattttttatgataaagacgatacggtaagtacggctgatggatattccgtttttgtcagccatgacaaattaagatggaaagctgatgtatctaatggagtagatgtaagattagcgggtttgctctcagatggttctaatcttggcagttgtattaataaaataattctcggtgaaattgccaaagttaaagctgggaaatctatttttgaatgtgttactacgatttatatcccctcaaagtttaatgggcgtgcgaaccctaattacatattggatgaaccaatagtacttccttcttttttttgcttgaaaacaaatggatttgtttatatctcagttccagataatattacttatgctataaaagtcactaatgatattcttgacttttcaactaatacacttgataagtcccctactgatatccaaggatgtaaaacttttgatgcaggtggggggcgttttgtatttagtggttctggaagtcataattcaacaactggtttgtatattggaaaccaacgccaacatagttttgctgtaagggatttgcttattaatgatattacccttcagtatttcgaaaatggaattgagtttgcacctaataataattttattaatacatttgataaaatcaatgttgtaatgtgcaaatatggatttttagtttcagctgataactcagttagtgctggtgaaaaaatagtatttaatgattgtgtcttcggtaataatgacatagctcattttcgtctcgctgctcaagtaaattattatattattaactgttctttagattatacagggcagcatgttttttttatagatgaaacatgtgccctatcaaggcttattatcgacaagggacatatagaaggcgttccgcaatatttagtttattgtcccaaaaaactaccgttacctttaaaaatccaattccgtgatgtcatgctttatatgaatggtgcaatttataactcaatgcgtcaattaatcttttcaccagaaggtaattgccatataattttcgatggttgcgattggaccttcatcaattattatgaacactctccatatatttcgcttacaggttatagggataaaactgatattaataatagaattgtaattaataatccactgcctagggttacaggtttaagatcaaattgtattttaccacaatataaaagtagtttattgggtgctattcctatttctcatgcaaaaaagggcgcatccgttttgaataagttcgttgattcttctaatgttatatttataagtgaaacatctggtgtcgaaattatctatggtgatatagatgatgacaatgctcaaattattgaagtgatttcttattctaatgatacagtcgtagacttaattagcgcgttttatcattctggttctattgggtcattttggagtggtggttgctctatagaattggttgacgttaaatcaaagcattgcaatatgttttttattattgactcatataatgagaactataaaaaagttattaatttcgatgagtacaaagatgctaaaaataatattgtagagtcctatttttccgacgtcattgatttaaataagatattttctactgctaagaatgcaaataaacactctggttttataggtgtttggcaaagtgttaatcagccaaaatgtgcggtaacctttcaacccaaaattcgcattcaagaatttaaaggggtaattagagttaaattacctgttttttggcgtgagtga

SEQ ID NO: 238371 - DNA, 729 bp, Klebsiella pneumoniae
gtggcaaaatttttttttagcttaaagttacaggaagcaatctcttcaatacctgtcatgaagatgcttgttgagcaggcagaagcgaatatatcgcgtgcattaattgatgctgataagccagaagccgttgagtcaggggaatttccggatgaccaacatcatgaagatggccgaattacaacgtttccatgcacttactattcatgcggttcgtgctttggctatgatgaagatgaagttagatctaaatacaaacatctgatcgcgcagctgactcgccgctccgtatttcttaccatttttggtctgttcgaacaccgtatggttgattgcctcgcactaatggacgacctttcaagcaagaccacagacaaaacgcgcaagaccattgaagattgccacaagcgtctcaaacgcaacttcggcggtaaaagcatcaaggatgtcgatcacctggctgttatccgaaacatcatggctcatagcgatggtgttgcagaagattataagactctttcctgtaaaaaaacaaaaaaaactgaatatgaaaaacgtctcctgcgtgctattcctcgtgcgatggctgagaacgccggtgtgtcaattaacatgtttaatgacatacttatggatgatcggtttctgatgtatgccgtcggtgaatttgagcgctatgttaatgaactgaacactgcagttcgcacttatcaaaccaggttgacctga

SEQ ID NO: 238372 - DNA, 186 bp, Klebsiella pneumoniae
atgaacgatgtgaaccgactcaggatccctcaggatgttatcgaccggcagctcactactcatctgtggcctgccggctggatatttctgacagacactgccggcggttactggagcgtaaccgtgaacatggaccgctttcacttgttaaccgtcggtgtggccagcctggcaaccgccaactga

SEQ ID NO: 238373 - DNA, 168 bp, Klebsiella pneumoniae
atgccgggcctcgctgaacgtgcactgcgtattatccgcgaacgctacgctgattttggtccgactttagcctgtgagaagctcgccgaggtttatgggctgtatctggccaaagtgacggtacgcaagctgatgacggctttgttgaataaatcgaacttttgctga

SEQ ID NO: 238374 - DNA, 276 bp, Klebsiella pneumoniae
atgaccatcgaccgctggctgctggttacccaaaacggcaaagcgtttggctggttcgacacccatcagccggcaacagcaattacccacgacaacatcaatctgggggcgacgttccaccagcaagggagcccgttgcgccatttactggacgctgcactgagctcgcccaaccaccgggccgtgatcgtcgatgaacggcaaatcccgcaggggaccatccacctcaatcaagtactcgacatgtgtaaatccacgcgccaggagggagcatga

SEQ ID NO: 238375 - DNA, 867 bp, Klebsiella pneumoniae
ttgcaacagtgcccgcatgactgcggtaaaggcatcggcatcgcagcgacgcacgaaggcgatctctatagctatgccgggattgaaaccctgaccaatccgctgccgccgatcgtcgcggtgaataccaccgccggtaccgccagcgaagtcacccgccactgcgtgctgaccaataccaaaaccaaagtgaagtttgtgattgtcagctggcgcaacctgccgtcggtttccatcaatgacccactgctgatgctcggcaaacctgcgccactgactgcggcaaccggaatggacgccctgactcacgccgttgaggcctatatttcaaaagatgccaacccggttaccgacgccgccgctatccaggcaattcgtctgatcgcccgcaacttacgtcaggccgtagcgctgggcagcaacctgaaagctcgcgagaacatggcctatgcctctttgctggcgggtatggccttcaacaacgccaaccttggctacgttcacgcgatggcgcatcagcttggcggtctgtatgacatgccgcacggcgtagcaaacgccgtcctgctgccgcacgtggcacgctataacctgatcgctaatccggagaaatttgccgacatcgcggagtttatgggtgagaacaccgatggtctgtccaccatggatgccgctgagttggcgattcgcgccatcgctcgcctgtcagccgatatcggtattccgcagcatctgcgcgagctgggcgtcaaagaagccgatttcccgtatatggcggaaatggcgctgaaagacggcaatgccttctccaacccgcgtaaagggaacgagaaagaaattgccgggatcttccgtcaggcattctga

SEQ ID NO: 238376 - DNA, 354 bp, Klebsiella pneumoniae
atgtcactttcatcaccgggcgtacatctgttttatcactcacgctggcaggatacgcgcgagcttgatgaactatgctgggggctggaagagcaaggcgtcccttgccggacaatctgttgcgacgagcatgactgcgcgctggccctcagcaagctggcggctaaaagctcaacgctacgcgtgggtctcggcctcagcgccagtggtgatattgccctaacccacgcccagctacccgaggatcgggcgctggtccgcgggcatatcgccgccgggatagcccacatccgcacactcggcgccaatgctggccaactggtcaaagtgcttccctttagcgagataaaataa

SEQ ID NO: 238377 - DNA, 531 bp, Klebsiella pneumoniae
atgtaccgcatctatacccgaaccggtgataaaggcacgaccgcgctgtttggcggcagtcgtatcgacaaagacgacatccgcgttaacgcctacggtacggtggatgaactgatttcccagcttggcgtctgctatgccagctcgcgccaggcaaaattacgccaggatctgcatgccatccagaagatgctgtttgtgctgggggcggaactcgccagcgatgagaaaggtctcgcccgcttaacgcagacgattaatgccgaggatattcaggcgctggagcaacttattgaccgcaatatggcgcagagcggccccctgaaagaatttgtcattccggggaaaaatctggcatcggcacagctacacgtggcgcgcaccctggcacggcggctggagcggatcctcatcgcgatggacagaacgctgacgttacgcgatgaacccaagcgttatatcaaccggctgtcggatgcgctgttctcaatggccagaatcgaagaaactactccagatgtttgcgcttaa

SEQ ID NO: 238378 - DNA, 1926 bp, Klebsiella pneumoniae
atgacggcgcacacgcatagcatcgggcaggaagtctcttcggttctcgcccagtcctggcatcgttgcagcaagtttatgcagcgggaaacctggcaggcgccgcatcaggcgcaagggctgacctttgagtcgatttgtcgtcgcaagacggcgctgctgacgattgcgcaggccgcgctggaagatgcctgggagtttatggacggtcgtccgtgcgcactgctgattctggatgaatcagcctgtattctcagccgttgcggcgatccgcagacgatagaacagctggcggagcttggatttcgcgacggcagctattgcgcggaaagcattatcggcagttgtgcgctgtcgctggcgacgatgccggggcagccgacaaaaacctctggcgctcagcactttaaacaggcgttgcatccgtggtcgttctgctcgacgccggtgttcgataaccatgggcgtctgtttggctccatctcattgtgctgtctggtagaacatgagtccgtttctgatttatccctgacgctggcgattgccagagaagtcggcaattcattgctgaccgacagcctgctggcagaatccaaccgccatctgaaccagatgtacgggctgctggagagcatggatgatggcgtgatggcctggaatgagcagggggtgttgcagttcctcaatgcgcgcgcggcgctgcttttgcatctcgacgcgcaggccagccagggcaaaaacattcacgacctgctcaatttgcccatgctgctgcgtcgggcaattaaacatgcccgcggtctgaatcacgtcgaagtcacttttgaaagccagcaccagtttgttgatgctgttatcaccctgaagccgattgttgaggagcagggcaacagctttatcctgctgctgcacccggtggagcaaatgcgtcagctgatgaccagccagcttggtaaggtgagccacacctttgagcagatgtcgacggacgatccagaaacccgacgcttgatccattttggtcgccaggcggcaagggggagtttcccgatcctgctgtgtggggaagagggcgtagggaaagagctgctgagccaggccattcacaatgaaagcgaacgcgccagcgggccgtatattgccgtgaactgtcagctgtatgccaacagcgtgctggggcaggattttatgggcagtgcgcccaccgatgatgaaaatggtcggttgagccgccttgagctggcgaacggcggcacactgtttctggagaaaattgaatatctggcgccggagctgcaatccgcgctgttacaggtgattaagcagggggtgttaacccgtcttgatgcccgtcggctgattccggtggatgtgaaagtgatcgccaccactacggttgatctcgctaacctggtggagcaaaaccgctttagccgccaactgtattacgcgctgcactcttttgagattgttatcccgccgctacgggcgcggcgtaacagtattccctcgctgatttatacgcgactgaatagcctgaaaaaacgcttttcatacagcctgaagatcgacgatgacgcgctggcacaactggtggcttattcgtggccgggcaatgacttcgagctgaacagcattatcgaaaacatcgccatcagtagcgataacgggcatattcggctgagtaatttacctgattatctgtttgccgagcgccccggtctggagaccgcgtcttccctgctgccagccagcctgacgtttaccgctatcgaaaaagaggcgattatccatgccgcccgtgtcaccagtgggcgagtacaggagatgtcgcaactgctgaatattggtcgcaccaccttgtggcgtaagatgaagcagtacgacatcgacgccagccagtttaagcgcaaacatctggagtag

SEQ ID NO: 238379 - DNA, 1098 bp, Klebsiella pneumoniae
atgctaaaagttattcaatctccagccaaatatctccagggtcctgacgcttctaccttatttggtcaatacgctaaaaatctggcggacagctttttcgtgattgcggacgacttcgtcatgaagctggcgggagaaaaggtactcaatggcctgcacagccatgacattagctgccacgcggaacgcttcaacggtgaatgcagccatgttgaaattaatcgcctgattgccattctgaaaaaacacggttgccgcggcgtggttgggattggcggtgggaaaacgttagataccgccaaagcaattggttattaccagaagctgccggtagtggtgatcccgaccatcgcctcaaccgatgcgccaaccagcgcgctgtccgttatctataccgaagcgggtgagtttgaagagtatctgatctacccgaaaaacccggatatggtggtgatggataccgcaattattgccaaagcgccggtacgtctgctggtggccgggatgggcgatgcgctctcgacctggtttgaagcgaaagcctgttatgacgctcgggcgaccagcatggcgggcgggcagtccaccgtggcggcgctgagcctggcgcgcctgtgctatgataccctgctggcggaaggcgaaaaggcacgctttgccgcgcaggctggcgtggtgaccgatgcgctggaacgtattgtcgaagccaacacctacctcagcggtatcggctttgaaagcagcggccttgcgggggcacatgctatccataacggctttacgattctggaagagtgccaccatctgtaccacggtgaaaaagtcgcctttggtacgctggcgcagctggtgctgcagaacagcccgatggaagagatcgaaaccgtgctgaatttctgtcagaaagtgggcctgccggtaacgttagcggaaatgggtgtgaaagacgacattgacggcaagattatggccgtggctaaagccacctgcgcagaaggtgaaactattcacaatatgccgttcccggtgacgcctgaaagcgtacatgccgctattttgacggcagacctgctgggacagcagtggctggcgcgttaa

SEQ ID NO: 238380 - DNA, 1095 bp, Klebsiella pneumoniae
atggggaaagagctgctttcgcaagcggatatccagattaatggctctcgtgcctgggatattcagcttcatcatgtcggtttctttaagcgggtactgcaacaaggctcgttagggctgggtgaaagctatatggaaggctggtgggactgcgagcggctcgatattctgttctgcaaaattctcaaagcaaaactcgaccagcaaatgccgggcaacctgaaagatattttacgcattgtcagcgcccgcctgtttaatttgcagtcgcggagccgcgcgtggattgtcggcaaagaacattatgatattgggaacgatctttttgcgctgatactggatccgcacatgcaatattcctgtggttactggaaagacgccaccacattagacgaagcgcaaaatgccaaattgaaaatgatttgtgagaagctacaactcaaaccgggtatgcgtttactcgatatcggttgtggctggggcggactggcggaatatgcagcgcgtcattatggcgtggcggtcgaaggcgtcactatctcaaaagagcagcagaaaatggcgcaacagcgctgtgaagggctggacgttaacattctgctgcaggattatcgtgacctcgataaacactacgatcgcattgtctccgtggggatgttcgaacacgtcgggccgaaaaactacgacacctatttcagcatcgccgaccgttgtttaaaaccggacgggctgttcctgctgcataccattggcagcaacaaaaaggggatgagcgtcgatccgtggatcaataaatacattttcccgaacggttgcataccggcgatttcgcatattgccgaggccagcgaatcgcgctttgtaatggaagactggcataactttggcagcgattacgataaaacgctgatggcctggcatgagcgttttaatcaggcatggccggagctgtcttcacgttactccgccaccttcagaagaatgtttaattactatttatgcgcctgcgccggggctttccgcgccagagatattgagctttggcaggtactgtttagtcgcggcgtcgagggtggcctccgcgtttatcgttaa

SEQ ID NO: 238381 - DNA, 405 bp, Klebsiella pneumoniae
atggagactctcgcgcaaaaacagtggaattcatttcccgataactccattacggagctgccgcaggacgtgtatttccgttcttatgtcctggaagccaactatcatgttccgctgcattcgcactcttttatgcagtttcatttcgcccgtaaaggcagcatgcgaattgatgtcgccggcaaatgctggataatcccggcgcattatggaatctggatccccaataataccgagcatgcggtctgggcactggatgatgtgcatttagagaatctggatattaagccgggttttcttgaagagagcatcaatgaatgtaaagtggtggcgatcagtgatttcgctagagagtttattcattacgccaccaatttaatttgggtatccggaatttctggttga

SEQ ID NO: 238382 - DNA, 1035 bp, Klebsiella pneumoniae
atgtcacctcaactccaagacgctctaggcatgttcgcctttctcgctatcgagctatcggttttattcattggcattagcttgctggtcggagttcttcaacgtcacatcccaccatccaaggtggaagcgttactgacttccagtgggaagcgaggctattttcttgctgctggtttaggagctataacgcccttctgtagttgctcgactatccccatgttgaaagggttgattcgggcacgggccggttttgggccgatgatggtgtttcttttctcatctccgttgctgaatcctatcgtcgtcggcctgctggttgccacgtttggatggacacttactgctatctatgtgctcgccgctttggtggtcgcggtaggtgccggatggctgcttcacacgcttggcttcgagcgttatgtgcgccggacggcgacacaagagagcagtggatgtagttcatcagcaagcccgtgcagtgctacatcgaccgcatcgagttgcggcaccaacagctgcgacaccactccgaagacggcttcttgcggggctgataggaagacaacagtctctacgtctagcgaatgctgtgacagtcaacccactgtcacggttaagaaagaagggaagtacagtggtgtgtggcgggaagcttggtcggactttatcgatgtgttgccttacctgctcatcggtattgcgattggcagcgtgatctatggtttcatgcccactgacttattggagcagtatgcaggcccagataatccctttgccattccagttgccgctatcatcggcgtgccgttgtatattcgcgctgaagccgtcatacctctggcagcggctctgatggccaaaggcgtgggtgccgggacggtgctagcgttgatcatcggcagtgccggagccagcctgactgagctcattctgttgcgctctttgttcacgctgaagcttttagcggcgtttttagcagtcatttttgctatggcgatgattgccggttacgccacctacctgtttttctga

SEQ ID NO: 238383 - DNA, 234 bp, Klebsiella pneumoniae
atgccagatactggcaatccactgctgcccgatggttcgtttacccgcaggcaggctgaagctatcgtggcggcgtaccagaacgtcaccatcgaagacgaccagtccacccattttcggctggtccttcgtgaccgcgaaggacagttactctggcgggagtggaattttgaacccgacaccggattctggtttaaccgctatctgctcagccacggcattcccaaaagataa

SEQ ID NO: 238384 - DNA, 948 bp, Klebsiella pneumoniae
atgatgaaaagggtaaaactttccacctgtgcgaaatggctggcgctcggcctgcttgttgtggttaacagcagttatgctgcctcccgggtgaaaacagcggctcaggcgattcagtgtcagcctgatactcaggaaaacggctacaacgggacctgtccgtatcctgccgacctttaccgcgccgaccccgtctggaaaaaagatatggaatcggccttacagaaggcgggtatccgtaacgtactgggaccggatggcagtctgaacgggccggaagagacgctggagcccgtcaccgtcggtggcaggcaatggcttcagggctcgctgtgtgagcaggggaactgtggcgaccattatctgcgttttttatattcgccgggtacgcatcaggttctgggtttctacgttgacggtcaggcacgctgggtcgggaaaccaccggcagaagaagcgaaactgctgcgcggcaatgccgacgccatcgcggagaaaacaccgttaccgtctgccctgcccgcagcacctgcagcgcctgcggacggggcaccggcagacactatctggacctttaagggcgatggcggcaaatcgttatggcaggtctgtggtggtcagaacagcagctgtaccattatcgctaacacgaagtattacgttgctgtgctgaaccgtaaatccgcaacgggttgtgctttcggtgatttttatgtcgctgcccgggataccgcatcatggcaacagtatgataccggcacctgcagcccggatgcgtatatccgcaagggcagcatcaacaacggtcagtatctgtccgtcgatatcggtatcaacggggtgctggtgaagcagttcccgattggttactggtcaatgcgcaaggaattttccggtagccgacgcccgtcgtggtcaaaggttaaggaaaaaaatcagcagcactga

SEQ ID NO: 238385 - DNA, 216 bp, Klebsiella pneumoniae; identical to SEQ ID NO: 40220

SEQ ID NO: 238386 - DNA, 969 bp, Klebsiella pneumoniae
atgccgcaatataaagatgcgtcgccaaaagaacaacgggaggtgggagccgagacaccggacgagatggaaaatgtgctgtcaaacgtcacgtggaaggtcatctttgatgaagatgacctggccgcacgcaagtttgcggctgtggcgcgcagcggcagcctgaaaaaagtctcccgccagttcggtgtgcgtgtcgataagctgcgcgatgaattgactctgcttgaatcgcgagtggggtataagttgtttgtgcgcaataagagcatcctcgaactcacaccggtaggccggcggatttatgcgctgttgcatgcctctacattgtccggtttgagtgtggcgtccgcaacaataaaaatatcggtgccgccgctgttgctggatggttttttgctgcgaccgctgatttcctggttgcgcaaaagcgccggtgaaaaagtcgtgacgctgattcccggttgcccgtatgaagacgatgcagatattcgcgtatggctcagtcaacccggcgaagtttcgagcctgaatcagcatgtggcggggaaacggctggccccgttgccgtttatgccttgtattgccagcagttacgccagtaaactgatattgccgcattgtcttgacgatctggatgactatatgttgattcattaccagggatatcaggaatacccggcgcttgacccctggaatcatgtcatcgcgcaccgcaggcattcggtaatgcatgtctcctcctatgcggtggcgaaggagttgactcgctgggctggtgtaattggtctgttgccggtgcaactgccgcagttcaacagcaattttttaccgctgcccgacctgtttccacaaccgatggcattggacgtttggattgggctaacgctgcgcgcggaaagagaaccggaaatttgcagggtgtttgaactgtttgaacacagttttctcggcgctatcattgagtaa

SEQ ID NO: 238387 - DNA, 987 bp, Klebsiella pneumoniae
atgtcgatgaaagaaagggtccggcgtcgtcgtgtcgttatcggtttggtggggggaggaataggcattgccgttctggtcggcgtcatggcgctgcggcccactatggtggaaagtgtcgcatcacgcgagcagccggtcaaatctctcagcccggtggcgaggctgggagccgtgtccgtggcgtcgacggaattgcgtcaatggttggcaggcttgacgccggcctggcgtaacgcactggcggaaaaagccgagctcagagaccaatggctgagggagcggctggccgaaaaagcgctggtggccgaagctaaagccaaaggctgggaacaaaacgaacaggttcacgccgcgattgcggcggcgacgcagcagatcctgttgcgcagctatcttgatgccgtgagccaaccaccgcaagagtacccttcgcagcaggagttgacggaggcttatgagcaggtaaagggtcgcttgcagatcccggaacgttttcatttaaggcagatttttttagccgcatcggctgaggatatgtcgtctctgaattcggctcgcactctggcgaatcagttggtgaaagaagctaaggcgaaggacgccaatttcgccgatcttgcacgccgctattcgcaggatccgcaaacggtggtgcaaggcggtgatctgggcgagttgccgttacaacagctgttgccagaagtccgttcggcggtctcggcgctgaaacccggcgaggtgtcggcggccattcagtcggcatcaggctttcatatcatcaagctggaaggcgtcacaccggcgcgcaccgcgacggaaaatgaagtggtaccgcagttgcgcagcgcgttgcgtcaacaacggcaggcgcaactggcgcaacgttatctgcagaacatggttgggacagcgacgctgaatatcgacggtgcggccttgagcgccatcatggcatcctcctgtacgatggaagacctatgttga

SEQ ID NO: 238388 - DNA, 501 bp, Klebsiella pneumoniae
atgagtgcacatgacatgatagagagtgttacttccccgttattgacggaaatgctgcagtcggcgggataccgaaccaatgaaacggaactgaatggcgtaatgcaattgctcagcgccagccagggagtggggtttagcctgcggttcggtaatccgggccaagcgttgggtgaatacctggacttcacgctgagcaccgccctgcgtatcgatggggtcttgccggaggggctggtcgcgcaatggaaccactccaggcgtttctcacgcttgacggaacagaacggttttctggtgctggaaacggatgtgatggttgccggtggcgtaagccgcggttatttgcaggcgacgctcgagctatgggaccgcttgctgcaggagtttctgttgtatttgcgtaatacgattcattcggtaaatgaaaaagagcctgccaccgtcgaagagcccgatcccgcgctgccgcaaacgttgcgcagtgagttagcttcgtaa

SEQ ID NO: 238389 - DNA, 669 bp, Klebsiella pneumoniae
atgaatgagcaacgttttcgtctcccattctggtgggggtgtttgctagcggtactgttgtcggagattttaatgccaggatcggcctcggccgtggaacagaccatggaggagcgtctgcgcgcgcagctacgcaacacgaaccaacaattgcaagcgatgcaatcggggcaggcgcaactgcaggcggcgcgcaacgctgcggaagcccagctgaaagcggcgcaggctcaggtgaagcaattgcagacggagttggaacatgcgcagaaccagggtaaggcgctggcgcaacagcaggatagcgtacgcaaccaggccagcgaacaaatcgccgccagccgacaacaggcggggcaatacaagcaagcttacgatgaactgttggtgttggcgcgagggaaagaggcggaacgggtcaacttacagactcgttttcagcagcagcagatggcgttggcctcttgcacggtcaagaaccagaaactgtatgccctgggtaaggaggtgctgacggaatatgaaagcctgggcactggcagtctgttgaaaatgcggcagccgttcgccacctcttcgcgcgtcaagtttgatgaaattgcacaatcttacggcgatcggctctatgaaaatcgcgccgatgcgcgccagacgacgcaacaaccctaa

SEQ ID NO: 238390 - DNA, 1698 bp, Klebsiella pneumoniae
atgaatttccagcttaatggtgtggcaacgtgggttgccgtaagcctggctctgtctgcggggtcggcgttggcggccccttcggaaaacgccacggttaatttgatccggctgttggtcaagcagggcgtgttgaccaaggaacagtccgaaacgctggtgcgccaggcggaggaggaggcgcagcaggcgcggcagccgcgtaccgcggtggccgctgacgcagggtctgacgtgcagccaggcgatgtacgtgtgccctatattccggaaaccgtgcgcgatcaaattcgcgacgaggttaaaggggaagtgatcgcccaggcgaagtcagagaattgggcggcgccgaatactttcccggactgggcttcacgcattaaagtgaccggtgatgtgcgaacgcgcagcgaatcgcgtttttattccggcgcgaacagcgatcaggtcgtcgattttaatgcgttgaatgacggcggtccgtatgacgtcaataccaaaaccagctcgtcgctgccgcccttgttgaacactcgtaaagaccgcgaaaatcgcttccgcgtgcgtgcgcggctgggcgtcgaggccgcgctgagcgataactggagcagtgccgttcgtgttgcgacaggcagcgacgacagcccagtctccactaaccagacgctgggcgataattcgagcaagaaaaacatttggttggatcgtgcctggatcggttggcattcgtcgaataacgtctgggacgtaaagctcggccgtgcggctaacccgttcgtttctacggatatcctcttttccaacgagttgaatctggatggcgttgcgctgagtgcatcgcatctgaaggtggcggacaacgccagcctgttcggcacgctgggcgctttcccattggaatacggttccgactcatggccttcgcgcagccaaaataaaggcaagagtgaagacaagtggctattcggcgctcaggttggttccgagtggcaaatcaatgaaaccaataaattgcgcggtgcattggcctattactacttcgataatattgaaggacaacgctcgtcatcctgcagcctgtatactggcgatcccgcttgcgatacggactggtctcgccctggtttcatgcaaaagggtaatacgttgttcctgttacgcaatattgcactggaccccaacaacccgcaacaaacgccgctgccgcaatacgtcggtctggcttccgaatttaatttgctggatgtgaacctgatttgggataccgaaacctttaacgcgctgaaactgcgcctgcagggtgactatgtgcgcaacctggcctatgacaagagcaaaatgcatcggcgttccgaggggcagatcatcaataacctgaacggcgatggcgcagtgcaaagcggggcgaatgcctggatggtgcaggcggtgctcggccgctctatggatatgagccatgaaggcgattggaatgtgtacgccggttataaatacattcagccggatgccctgccggatgcttacaacgattccagtttccatctaggtggtaccaatgccaaagggtattacctgggcgccaattatgcactgaccggcaatgtgtcggtggaagggcgctggagcagttcggatgaggtttacggtgatcctttatcgatcaacgtcttccagctggatcttaacgcgcgtttctga

SEQ ID NO: 238391 - DNA, 726 bp, Klebsiella pneumoniae
atgttgtttaactcaaaacaaacgaaccagccggctgagcctagggttaagcgttcgccgaagttttacctttggctggcacttgccgtagcgctggtggcggtggtgggaacgtttatctggcaatgggccaatgagatgagcggggttcggcgtgagacgccgaaggtaccgatgatcattcctttgccgccaccgccaccgccaccgccaccggaaccgccgaaacagccggaaccggaaccggaaaaagtcgtggagccggaaccgccgccggagccgaagcccgttgaggaacccaagccgcaggaagaagcgccaaagccggctgacgatctggccaaggcgatggagatggacggcgccgcgcaagcgggcggcgacgctttcaacatcggtgccggttcgggaagcggcatgagcggtagcggcggtggtggcgggataggtaatgcgacctacggccaatatttgtcgcacgtctttcagaaggtcctgcgtgaggacgagaacacgcgaatgttgagtttccggctgcagctcaatctgtggctgaacgagtccggacaagtaacacgtgtggacatcgtgaagtccagcggcgaacgggatatcgacgagaaggtcgtcgccgcattgcggcgcgtgccggcgatgacgcaaaagcccccgaagtcgctgtcgttgccagtgcgaattttattacaggggcggcgcccaggctga

SEQ ID NO: 238392 - DNA, 426 bp, Klebsiella pneumoniae
atggcctcgatgaacctttcccatgacgatgaggataacgatggcccggtagatgggatcaacatcactccgttggtcgatgtgctgatggtggtgctggtgatgttcatcctgacggccacggcgcagatcgccggtattcaggtcaatctgccgaaggccagcgcgtcggtctctttatcggaacaaaaaaccaaggccatttcggtgaacgatgccggacaggtttttctcgacgcctatccggtcaccttgcccgaactggaggatcgtttacgcaccgagaaagcgttgaacccgaattttccggtgatcgtgcgcggcgacgccggggtgcaataccaaaaggtggttgaggtgctcgatctgttgcgtcgcctcgagctgtctcaggtggggctggtgacgggcaaaccccgtcaataa

SEQ ID NO: 238393 - DNA, 1839 bp, Klebsiella pneumoniae
atgcaacgcttattgatgttattgctcgtttgtctaagcacgctattgacgccgttagcggcgcaggcctggtggcaggaagactggagttaccgcaagcagatttccatcgataccaccgcggaaggggcggcgttaaacgatcgtatcgggcgtgtaccgttgctggtgcgcttgcataccggcaacttcgtgtttgatggcacgcaggagaaaggcgcggatttgcgcttcgtcgccgccgatgacaagaccgtgctgaattatcagatagaaagcttcgatccgttgctgggggtggcttacatatgggtcgatgcgccggatgtcgcgggtggacagcggcaggacatctggatgtattacggcaacgcgaaggcgcccgccacggccaacggccagttgaccttcgatcccgattataccctggtgtaccactttgacagtgcgccgggcgccgcgccgcgcgataccacggcgtatgcgaacaatgcgcaaacagcgccgggcggcatcgtcgacggtgtcctgggacatgcagcgcagtttatcggcggtgagccgatgatgatcccggcgtcaccttcgttagcggtgccggcagcgggcagctttaccttaagcgcctggatccgtgccgatcagccgagtggagagcagttgatctatgcgcgccgcgattccggcaattcattcctgatcggcctggcgcagggaagtccgttcgtggaaattaacgggcaacgcagtacggcggcgcagccgatcggggcggcgcaatggcagcatcttgctgcggtcgctggcgcggacggcgtcacgctgtatctgaatggccagccggtgagcacgctggcgctggctttgccgcctttgaatacgatcgccgccgtcggcggtgatgtcgcaagcgtaccgacacaggaaggcgctgtcgccccaccggagaatggtgctgcgccagatcagcgggcgtttatcggcgcgatcgatgaactgcggctgtcgaaagtggcgcgcccggcggcgctgctgatggctgattatctggcgcagggggcggattcgaaactggtggtctacggcgtcgacgaaaagcagtccggtttcggattcggcagccttgggttcctgctgaacgcggtgcccgtggatgcctgggtaatcatcgccatcctctgcctgatgatggtccaatcctgggtgatcatggtgcgtaaaaatcgcaacgtcagccgcgtcgaagaagccaacaaaaacttccgcgtggtctttgccgatgtcggcacgcgtttggaggcgttggccgacgacgcgccgctggccaaccggctgcagcactccacgctatggcgcatttacgccgtggcggtgcatgagttgcgcgtccgccgcagccagtcgggcggacgagtgatgacggtttcgctggctacgctggaggcgattcgcgcgtctatggactctgtgcgtacggaagagaaccgcaagttgggcgcgcgcatgggtattttgtccaacgctatcgccggtgggccgtatatcggtctgttgggaacggtgctgggcatcatggtggtgtttcttggcacggcgatggcgggggacgtgaacattaatgcggtggcgcccggtatggcggcggcgctgctggcgaccgcgatggggctgttggtcgctatacccgccttgtttggctacaaccggctggtggcgcgtaatcgcaacgtcagcgccgacatgcgcgtgttcctcgacgagttcattacacgcatggctgaagtgtacggctccgaaggtcgtgaaccgtcccctgcagcggcaggaggggagcgctaa

SEQ ID NO: 238394 - DNA, 1629 bp, Klebsiella pneumoniae
atgcatgacattgataagaataatcggtgggttgtttgcctgagcatgctggcggtaaccctgcctgcgatgtcgtcagcggctaccgaatcgccgcccgccgtcgcgtcggaaaccgtcgtcgacgctgcgcaagcgcctcgggtcaatattaatgaatatatcgtgcgcggcaatacggtgctcagcgcccgcgagatagaaaaggcggtctacccgtttttagggccgcaacgcacactggcggatgtggaaagcgctcagcaggcattgcaacagatctatcacagcaaaggttatcaatccgtttatgtcgcgctgcctgaacagcaggtcagcggcggagtggtctatctgcaagtcaccgaaacccgcgttggccgggtgcgcgtggtgggtgctaaataccattcaccgctggcgatccgcaatgaggtgcctgcgctggctgaagacaaggtgcccaacttcggtaaagtgcaagacgagttaagcgcggtgaatcgcagcggtgaacgccaggtgacgccaacggtaaaagaaggggtggtgcccggcaccatggatgtcgacctgaacgtcgacgacaagaacccctggggtggcagtctgacgttgaacaacgactacagtgccgataccaagcggttgcgggccatcgcgtctttgagcaattccaatctgtggcagaaagggcacagcgcttcgttgaccttcttcaccgcgccggagaagaccgataacgccaaagtctggtccgccagttacagcctgccactgagcgaacaatggacgctgcgtttctccgggtaccagtcggacagcgacgtggcgacggtgggcggcaccagcgtgttgggtaaagggcactcttatggcgcgacgacgttctacaccttgctgtccggcggcgagtggactcatcaactgagtctggggctggagtttaaagattttgatgaaaacgtgatgtacggcggcgtcgaagaccgggtaccgctgaagtacgcaccttttaccttcggatataacggctactacttcaacgatcggcggcagggcaacctcagtctcagcatcgtgaccgctaccagcgattttctccattacggcagcgactacgacgagtttgatcgcaagcgctatcgcgccagtaaagatttcgcgttgctgaaaggggacgcaggtctgacggaagcgctcggcggcgattggctgttggcggtaaaaagcgcgtttcagatcgcctccggcccgttggtttccaatgagcaattctcagcgggtggcgccacatcggtgcgcggctatctcgcggcggaacagtccgccgatgatggagtgatgggcagtgtggagctgcgcacaccttcattctcttcctgggtgggttcaccggttaccgagttacgtctgcatgcgtttacagatgcggcgcagctgtggttacgcgatgcgctgcccgaacagaaagacagtttcaacatggccagcgttggcgtaggagccagcgctgcgatttccgactggctatacggcaatgtcgatctgggattgccgctgattgaagggcccaacaccgggaagaacgacccgcgcgcgcagttcagcgtcagcgcgaatttctaa

SEQ ID NO: 238395 - DNA, 11805 bp, Klebsiella pneumoniae
atggtggtcaaccgcaacggcgtggtgttcagcggcagcagtcaggtcaacgtgcgcaatttggcggcggtggcggccaatatcagcgatgagcaattcagtcaacgcgggctgtattacgacaacaccggcagccgcccgacattcgccgatgcggcgggcgcggtgcgggtggaacagggagcgcagttgactacggcgcctccggccagctcgacccaggggggcggctatgtgctgctgctcggcagcgaggtggagaacgccgggcagatcgtcacacccaagggccagaccaccctggccgccggcgatagttttgtcattcgccgcgggcagggcaccgacggcaacgtgatgtcgaccacgcgcggcaacgaggtgctgccgggctttgccgccgacagcagtgccggccgggtgcgcaacagcggcctggtgcaggccgccaccggcgatatcagcctcagcggccgcgaggtggagcaggccggcgtattgctttccagcagttcggtggacagtcgaggcaccctgcacctgaaggcccgcgagcggatcactctggccgaaggtgccaccagcgcgattctggtggacagcagcggcagcgccgccctcgatagccagcgcgaggccttgctcaagccgttgaacggctccagtgccgccgtcagccggggcgacgacgaccgccgcgacctgtcgcgggtggagatcgactccgccggcagcgtcgatttccagggcggctccatcaccctggccagtggcggccaggtggcggtcaacgctggccagcgcgcgcagctgcgtgacggcgcggtgatcgatgtctccggcgcgcaaggcgtgcaagtggcgatggagaccaacagcatcaaggtcaacgtgcgcggcaacgagcagcgcgacgcctcggtcaaccgcgagggcggcggtctgaacagccaagacgtgtgggtcgacgtgcgcgacctggtacgggtgcctgccggcaccaacggctatgccagcgaccgctggtacaccgccggcggcctgctggaactgggcggttaccttggcacgcgcaaccattcggccggcgagtggatggcccagggcggcatcgtcagtttcaccggcaacgacgtggtgacccaggccggttcgcagatcaacctgtccggcggcaccctcgatgtgcagggcggctacatccgccagacctggctgaagggctcggacggacgcctctacgaactcgggtcggcgccgggcgacctgctctacgacggcatctaccgcggttacgaggcacacagcgagcgctgggaccagacacgttatttctacaatccgctgatcgcgccgacccagcgctacgagaacgcctacatcgtcggccgcgacgccggcagtctggtgatcggcagcgccaatgcgcggctcgacggcctggtagttggcgatacctatcgaggcgagcggcagagcgaagcgccacaggccggtctggacggctacaaccagtcgcagaatgccgtggcgcgcggcgcgcagttggtcgtcgggcgctacaccccctactacgtgaagagcagcggcctgctggagtacgctctcggcgccgatgccggcagcctcaagcaggtggtcatcggtgccggcgaggcggcggccgaagagctgaccctggacgctccggtggccactgagcgccagggccgccttagcctggacagcgaactgctcaacggcttccagctgggcggcctgaaggtggcggccggcgagagcatccgcgtcgacggcgcgctgaccctggccaatggcggcgaagcgatcctgttcgccaatgacgtggcgatcgacgccgacatcaccgcccgtggcggcagcctgcaggctggcaacgtactggcgcagatttccccgaacgggacgatcgatggggtcgtcgatgccggccgcgaagccggcatcctgcgcgtgggcgatggcgtacgactggatgccagcggcttgtggagcaacctgctgctggcgccggaggccaacgatacgttggcctaccgcgacggcggacggatttccctgcgcagcggcggcgacctgagcctggggcagggcagtttgctcgatgtgtcgtccggggcagcaatgctggccgatggcaagcgactgggcggccgtggtggggatatcgccttgcatgccagtgccggtccggcgctggccggagacggccaactgcagttgggcggtacattgagcggtctcggcgtgagcggcgccggcacgctgtcgctgcagagcggcaaggtgcggatcggcggcgacgatctcggagatggcagcctgcaactggccgaagatttcttccagcagggcttcgccaactaccgggtggtcggtcgctccggattgacgatagccgaggatgcccaggtgcgggtcacacgaccggtctaccgtgtcgccgccggggccggcgaggtcgcggctggcgaggtgccgcgagaggcgctggaggcctggacgccgccgctgtacctggaggatgtcttggccggacgcttgatacaacgcgaaggggcggatctgtacctgcaggcaggcggcgacggcaatatcctcgagcaactcgatcccgccagccagacgctggagctggggcatggttcgctggttgaggtcgatccggggcgcgccatcgtcctgcgcggttccggacagatcaccttggatggcactctgaacgcttggggcggacgcatcgacgtgcgccagcagcagttcggccagatcgatgtcgccgaaagcttccagagcgcccaggcgcaggctcacgcacgttccatctggatcggcgaacaggccgtgctggatgttgcggggcgcgctacgacggcgctcgactggcgcggacggacttatggagaggtgcagtccggcggcagcattgtcatcggcggtgagatcgacccgaccagggcgaccgcaacctcggcggatgcctttgtcatcgttcgccccggcgcgcgcctagaggcctctggcagccaggcgctgctggatgtacccggccagggaaggatcctggtggctggtgacggtggacgcattgccctcagttcctataacggattgttcctcgatggtgcgttgcgcgctgcagctggcggtcatggggcggcgggcggcagcctggaattggcgctggagtcgccgctgtatcgcgtcagcgagttgcagggcgctggagtgctggcgtggcgcgaactgcaggtggcgcaacagatggaggagccgctgggcagcgagttatcgccggggcaggcggatactgcgctgcgctatggccaggggcggctggcggtcgaacaggtcgaggtgggaggtttcgatcgactgtccttgctgagcaacggcggtatcagttttgcaggtgatgtgagcctggcgctggggcagagtctcaacctgtacagcggttccctgtccttggccgtgggagcggcagatgacactgcggtgagcctgagggcgccctatgtgcatctttccgggctcggaaattattacgccgtcagcggcatgcgacgaccacaaatcctgcattcgcaattgccagaggcggctgtctcccgggcgcgactgcagatcgctgccagcggactactggagcaggccggcagtctgtctctcggtatgcgtggcgatatcccgggccagtccgagtattaccagcgactggggttcgagcaggcgatcctgagcagccagggtgatctgcgtttcctgggtgccgtgtcggacggggactcgcgcggacgattgtggacgcgtggtggtctggaactgctggcggcgcaactttatcccagcagcggggtggtcgcagaagtccgtgccggggtagtcaacgatcccggtcggtctgagcgttttgacgaagcctatggcctgcggatcggcaggacgacgtcgacctcgtcggctatgccttactccgtctttggtgctctcgaattgtttgcctccgatgtgcagcaggggggtgtgatccgcgcgccgctgggccgcatcgaactgggcaatggcctcagcggcgccgagagccgtcaggtcgagttgctgcctggcagtctgacctctgtcagcggtaccggcctggtgatgccctacggcggtaccaccgacggagtcagctatcgctacgacggcaaggatatcgatctggccggcgccggtggcgtttcgggtaccgggctgaccaccggtatcacgttgaatggccagcgggtggaggttgacgatggtgcgcgcctggatctgtccggcggcggcgaactgactggcgccggcttcatctcaggtcgcggcggttctaccgacgcccgcttccatccgctggtgcagatagatgccgaggggcgcttccacctgccggaattgggcgacaatccggtctacgccatccttcccggggtgcagcccggctatgcgccgcagggcggcgaggccggggcggtggcgccgctggccggccagcagatcaccctgacccagggcgtccccggattgccggccggcacctacaccctgttgccttccacctacgccctgttgcccggagccttccgcgtcgaactcaacggccgtgggacgccggtcgcgccccaggccctgcgcaatggctcctggtccagcgccggttatctgtccgtaggcggaaccgcgattcgcgatagcctggccagccaggtgatcctgtcttcggccgatactctgcgacgatactcgcagtacaacgaaaccagctatgccgatttcgtccgtgcagacgccgcacgcctgggtgtgccgcgcgccatgttgccggcggacgcccgtgcgctgctgctcaacctggctaggagtgaggacgcgcaggtcggttttcacttcgctggcgaagcctcgttcaaggcggcgaaggacggctatggcggctcgctgatcctcagtaacctgaatggctacgaggtgctggccgccggtacccaaccgacctccggcttcaacggtgcctcggtgtacgccgacgacctcgttgccctggacgccagccgcctggtgattggcggcatgccggcggtgcagtacggccagactggcaatctggtcaatttcaccggtcccaacggagcggtcgcggtgcgctccggagcccgcctgtccgccgccgaggtgttgctgctcggtaatgttgaagtcgaggcgggcgccgccatcgatacccgcgggcgtggagagggcgccttcgattccagtgatggctatgtctaccagtctggcgaccgtggtctgttggcgctgtccaacggctggctgaatttcctcgcgccggccgctggcaataccgcccagatcagcatcggcgaatgcacgctcagcgtttgcgcgccggtggaactttattcggaaggcaccctgggcatcgccaccaacggttcggtgcaactcgacgacaacgttcgttatggcacgcgcaatctaagcctggcgctaagtgcgatcaatatcggctccagccagtcgctggccgacgcggccgctcgtggcgtgttgccgaacggcctggtgctggatcagacggtgctccagcgcctgctgcgcggcgagcgcggggcgggtattccggccctggaaaatctgatcctcagcgcccgcgacgcggtgaacatgtacggtagtgtcagcctcgacacctacgacccggccaccggcaaatccagcctggccaacctggtgctgggcacgccggccatctacggccatggcaccggcgaggatgtcgccagcattcgcaccgctagcctggtctggagcggctccagccagccggctgcggcaccggtcgccggcggcgccggtagcggcagcggaaccctgcgggtggacgccgagcgcatcaccctgggctacggcgcgaatacccagccgaccggcgagaccgacgaggcgcgcctggcgctgggcttcgccgaggtgcaactgaacgccagcgagcggatcagcgccaaccacaagggcagcttgcgggtctaccagcgcctggacggctatgtcgccggcgaaggcttgcactacagcggcggcgacctgcgcctgagcacgccgttgctgaccggcgaggccggttcgctgagtcggatcagcagtggcggtagcctcagcctggcggcaccggcgggcgctgccgcggtgaccttcgacagcggcaccgccgggcttggtgccgagttgtccctgagcgcccgcgagatccgcctggatagcgcggtctcgctacccagtggcaagctgagcctgagcgccgaagacgacctggagctgggcgatggcgcgcgcatcgacctggccggacgcaaggccagcttcaacgatgtggataaatacagctggggtggcgacctactgctgagcagtcgcgccggcgacatccgccaggccgccggttcgctgatcgacctgtcggcgcgcaacaaccgcggcggtaccctgagcgccgtggcgttggccgaggacgccggggtggtggacctgcagggccgcatactgggtagcgccagcggcgactacgatgccggcggcacccgcgtgccgttcctcggtggcgagctggagatccgcgcccagcgcctgggcgacggcggcagcctgagtgagcagttcaccgccttgaaccagcgcctgaaccagggcgaggtcttcggcgcgcggcgcttccagctcaagcaaggcgacctgcagatcggcgacggcctgaaggcgcatcgcatcgaggtgtccctcgacaatggcaagctcggcgtgagcggcacggtggacgccagcggcgcacaggttggcgagatccgcctggccggcggccgcggcctgagcctgggcggcaacgcgctgctggatgcgcatgggagcctgctgcggcgcgacagctacgggcagatcatcgacagcccgaaccgggcgatggtcgagctgagttccggcagcggcaccttggtcctggccggcagcgcgcgcgtcgacctgcgccatggcaccgcggcgccagcggaacaggccgatggcgtcgcccgtggcacgttggagttgaacgcgccacgcgtgggcggggtcagcgccggcgacatcgccatcgatgccagcggcgcgctggacatccgcggcgccggcagcatcaccctgaacgcggtgcagcgttacgacgatgcgccctggggcaacgatccggcggccggcgggcggccctaccaggtgatcgaccaggcttacctcgatgcgcggcatgccgagagcagcgcgttcatcgccgcggcgctggccaaccgcgagttgctcgacggcaagctggccggactgaccaatgccacctacgcggatgctttccacctgcgtccaggggtggagatcgtcagcgcaacggcggacggcgacctggtagtgcagggcgatctcgatctgtccggctaccgctacgccagcctcaatccgaacacgccgctgaccgaggtctacggttccggcgaggtcggcgcgctggtgctgcgcgccggcggtgacctgaacctctacggcagtatcaacgacggcttcgcgccgccgccggactcgccggacgacaagggctggatcctcaccccgggagtgcagccgttcggtggcgacctggtggttcccggtccgggcgtggtgctcggcgacggtaccgcgttcctcggcggccgtaccctcaactacgacctgccgatcaagggcaccaccctggccgccggcacccgtctggccaccgaggcggtactcgaacagccctataccctggccgtcggcagcgtgctggtagcggacatccacgatgccgctggcaacctgctgtacgccgcgggcagcctgctgcgcgacggggtgacgctggaggccggcagccggctgggtgccggtaccctgctggcggcaccggccagcgtgcaggcgatgacctggccggctggggtaccgttgccgagcgtcgaggcttccggcaatacactgctgctcaatggcgaactgcccctggcacggggcgcgctgattccttcgcagaccgacgtggtgctgagcggcgatgcgtcctccatcgaactgcgccccagcgacggaacacgtcaggggcgcaactgggcgctggcagagatgttgccggccggcagccagtcctggtccctgcgtctggtcgccggtgccgatctgtcggctgccgacaatcggttggtgcggccggattccacggcgagcttgaacctggccgatgcgcattatcaggtcaggatcgcagaaggggctggcggcggccaggtctggagcgatcgcatcggcgagatgggcatggggttggagccgggaacgccggtcgatgaagacaatgcctggatttgttccatcgatgccggctattgcgtatctacgcccaaggccacctgggcgcctgggaactggctaggtatgccggaaggtgtggcagtaaccgacgaggagtttgcaggcatctgccagttcttccccgaccaatgcatcatcaactcgacgaccaagctggagccgcagaaccagttgttcagcgtcctgcgcactggcaccggtgacctcgatctggccagcgccggcaacctgacacagtggtcgccgtatggcgtctataccgcgggaacgcaggccgtcgatgtcggggcgccgttcaatcagccgcgcggccagttcgacggaacgctgttgggtagcaatggcgcggactacgagtcgctggcggcaggccaataccaagcctggtatccgcaatacggcggcaacctgaatgtcagtgtggggggcgacctggcgggtgatgtctgggcaagcagtctgaacaacgccatgagtctgacgcgttccagcgcgtcggtcggcaattggctatggcgccagggcaatgacgatacacccgtcgcttggtgggttaatttcggtagctatgcaatggtagcggatgccgaacttccggccctgctcggtttcactggttttggcaccctgggcggtggcgatgtcagcatgcgggtcgggggggccgctggcaaccttgtgccgcggggaaccgacagcctgccagcgataagtgagaaagccttccgtagccaggggttaattgtcgcggtggggagcaacggacgggtcgagcgcgatggcaccctgacgcttggcggcggcggtgatatggacatccgcgtcggtgggacgctcaatcccgacttgcaggctcgggtcatttccgtcggcgacaagagcggcagcagccggcttgatctgcagggtgtgctggtcaacctgcgcggcacggcgcagtttagcagcggcgctatcggtggcgtcggtcctttatatgacatgttcgccggacaacgggacccgacggacacccgcccgtacgatgcctttaccgccacgcgcagcaacgcgtccggcggtctggtagtgatccccggtgacgccaccttgcgcctggatactcgcggcgacctggtgctcggtgggagcggcgacccaggacgggtcaacctgcccaacagctctgctttctcgactcaagagggtattcagtacgctggcggtggggtcagctggtttagcctgtggagcgagcataccgccattgacctgttcgccgccggcggcaacctgacgccgagcactcaagtcgcggagtatgccgtcaatagagggttgaacacctcacccagcgatgggcgtttcatttatccagcgattctgcgtgctgccgctccgacagggagtatctacctggggccatcgagcagtgtgctgcaatcggaccatttgctgaataccgccacatcgttgctgctggcgccgtcgctcgatggcgagctggcgttgctagccggcgagtccatctatgcgggaggctactcggtgcagcgctcgggcgccgatccggccagtctcccatcgatctggtcgccggctttcgccggctatgcggacgccggtttcgtcgaccgggtagctggcaacggtagtccagacagcaacccggcgttggtagaggggctaccgttgttctacttcggcgctgacagcgcagcggctctggcgcgcaacctacagccggtacgtttctatgcgttgagtggggacatcgtcgggctcaacagtggtgcgctgattcgcttcagcgaccaggcgggcacgcgcgccggacaaatctggtacgagggcgctggtccggtgtggatgcgcgccggacgcgatatcgtcgcttccggcactccgttgggaaggacggccagccagatcgatatgacgacctctttcaccggtaacctcttcgtccacgacaaccccaacgacctctctctggtccaggccggccgcgacatcctctacagcaacttcaacgtcgccggccccggtaccctggatatcagcgccgggcgcaacatcctcatggaggaccgcgcggcgatcaccagtctcggcgcggtggtgccgggtgacagccggccgggtgccgatatcgtgctccaggccggcgcggcgggtgccgactaccaggccttcctcgagcgctacctggatccggccaacctggcgcaggccggcaccccgctggctgagcagccgggcaaggtggtcaggacctacgaaagcgagttggccaagtggttggacgagcgcttcggcttcgccggcgacgcggaacaggcccaggcgtttttcgccggcctgtccgccgagcagcagcggatcttcgcccgccaggtgtacttcgccgaactcagggccggcggccgcgagtacaacgaggtcggcggcgtgcgtcaggggagttacctgcgcgggcgcaacgtcatcgccgcgctgttcccggagagtgatccggcaggtaactcgatcagttatgagggtgacatcattatgtacggcgctgccggcgtacacactgattttggcggtgatatccagttgctcaccccaggcgggcggcaggtattcggcatcgaaggggaggcgccgccgtccaccgcaggcatcgtcacccagggccagggcgatatccagacctactcgcggggcagtatcctgctcggccaaagccgtatcatgaccactttcggcggcggcattctggcctggtctgcagaaggcgacatcaacgctggccgcggcgcccagactaccgtggtgtacactccaccgcggcgtatttacgacggctggggcaacgtgacgttgtcgccgcaggtacccagcaccggcgcgggcatcgccacgttgaatccgattcctgaggtggcgccgggcgacatcgacctgatcgccccgctcggcaccatcgatgccggcgaggcgggcattcgggtctccggcaacgtcaacgtggcggcgctgcaggtggtcaacgcggcgaacatccagacccagggccagagcagtggtatccctatgacggcggcggtgaacgtcggggcgctgacctcggccagccaggcggcgggcagtgcggtacaggcagcggagcaggtgtcgcgccgagctcagcgcaatcagccttcgacgatcagcgtggagatcctcggctacggtgacgagcggctggaagcggggggtagcgcgacggctacgccggtggccggctaccgctatgacagccaagtacaggtattgggtgccgggccgctaagtccgcaatcgcgcgagcaactgacccccgaggaacgtaatcgattatcgctgtaa

SEQ ID NO: 238396 - DNA, 195 bp, Klebsiella pneumoniae; identical to SEQ ID NO: 36234

SEQ ID NO: 238397 - DNA, 219 bp, Klebsiella pneumoniae
atgtattcattaatttgggatgggctggcggtctgctttatgcgcgaagcagaccgtcacattgaacgctttccgtcaggatttggccactttattttttataaatatgatgtttgtatcgagccttcaataacgaaggctcgctattatctcgtcctactggagttttttttctttaaggaactgactaaccaaatcagcaatctgcacattatttaa

SEQ ID NO: 238398 - DNA, 1539 bp, Klebsiella pneumoniae
atgaatgacatctcttctgacgacatccttctgctgaaacagcgccttgccgaacaggaagcgctgaaccgtgccctgctggaaaagctggcagaccgggagcgcgaaatagaccatctgcaggcgcagctggataaacttcgccggatgaacttcggcagccgttccgaaaaagtctcccgccgcatcgcacaaatggaagccgatctgaaccggcttcagaaagagagcgatacgctgaccggtcgggtggatgacccggcagtacagcgcactctgcgtcagacccgcacccgcaaaccgttccccgaatcactcccccgcgatgaaaaacgcctgcggccagcgggttcctgctgcccggagtgtggtggtgcgctgagttacctgggtgaggatgccgctgaacagctggagctgatgcgcagcgccttccgggtgatccggaccgtacgggaaaaacatgcctgcacaaaatgtgatgccatcgtgcaggcccccgcgccttcgcgccccattgagcggggtatcgccggaccggggctgatggcccgcgtgctgacctcaaagtatgcagagcacacaccgctgtatcgtcagtctgaaatatacggtcgccagggtgtggaactgagcggttcactgctgtcgggctgggtggatgcatgctgccggctgctgtccccgctggaggaggcgcttcaggactatgtcctgactgacggtaaactccatgccgatgataccccggtccaggtgctgttgccgggcaataagaagacgaagaccgggcggttgtggacgtatgttcgtgatgaccgcaacgccgggtcagcgctggcaccggcggtgtggttcgcctacagccccgacagaaaaggcatccatccgcagacccatcttgcggggttcagcggtgtgctacaggcggatgcgtacgccgggttcaacgagctgtaccgcgatggccggataacggaagccgcctgctgggctcacgcccgccgtaaaatccacgatgtgcacgttcgcacgccgtcagccctgacggaggaagccctgaagcgtatcggcgaactgtatgccgtggaggcggaaataagaggaatgctggcggaacaacggcttgctgaacgtcagcggaaaacgaaaccgctgcttagtaccctggaaagctggttgcgtgaaaaaatgaaaacgctgtcgcgacactcggagctggcaaaggcgttcacgtacaccctgaaccagtggccggccctgacgtactatgcagaaaacggctgggccgaagccgataataacatcgctgaaaatgcgctgcggatggtcagtctgggtcgtaaaaactggttgttcttcggctcagaccacggtggtgagcggggagcattgctgtacagtctgatcgggacgtgcaaactgaacggcgtggatccagaaagctaccttcgccatgtccttgacgtcatagctgactggccggtcaaccgggtcagcgagctgctaccctggcgcatcacactgccaactgaataa

SEQ ID NO: 238399 - DNA, 381 bp, Klebsiella pneumoniae
atgctggttgcagtagagcgtcgcttcggtaacagcctgccgtcatcccccgttgagagtctgacggataacggtgcggcctaccggtctcaccagacgcgtcagttcgccagaatagtaggactggagcctgaacatacggcggtacgcagcccggaaatcaacgggatgacagagagcttcgtcaaaacgatgaagcgcgactacatcagtatcatgccgaaacccgatgggttaacatcggtaaagaaccttgcggaggccttcgaacattacaacgaatggcatccgcatagtacaccggggtatcgttcgccacgggaatatctgcggcggaggaccagtaatgggttaagtgataaaaagtgtatggaaatatag

SEQ ID NO: 238400 - DNA, 11730 bp, Klebsiella pneumoniae
atggtggtcaaccgcaacggtgtggtgttcagcggcagcagtcaggtcaacgtacgtaacctggtggccgccgccgccagcatcagcgacagccagttccgcgaacgcggcctgtatttcgacgccaacggcagccagccgagcttcaccgacgccgccggcgcggtacgggtggcgcagggcgccttgctgcagaccgccaatccggccagctccaccgcggcgggcggctacgtgttgctgctcggcagcgaggtggagaacgccgggcagatcgtcacgcccaagggccagaccaccctggcggcgggcgacagcttctacattcgccgtggcgtcggcaccgatggcaacctgcgctccaccacccgcggcaatgaagtggccacctccctggccgctgacagcgccgccggccgggtggtcaaccagggtctgatccaggccgccaccggcgacatcaccctgaccgggcgccaggtccgccaggagggcgtcgccctgtccagtagctcaaccgacgtgcgcggcaccatccacctgctcaactcggccagcgacgccaggggcagcgtggtcctgggcgagggcagcaccaccgcggtgctggtcgacgccagcggcgccggcgccctcgacagccagcgcgacgccgcccagcaggcgctggatggcaccacgccgaccaacaacgtggtcggtcgtttcgacaacctcagccgggtcgccgatcgcagcgagcagtcgcgggtcgagatcgtcagcggcggtagcgtggatttccagggcggctcgctgaccctggccagcggcggccaggtggcggtcagtgcggcgggccggagcctgctgcgtgacggcgcgcaggtggacgtcgccggtgccgtcggggtgaaggtggcgatggaaagcaacaacatccagatcaatgtccagggcaacgagcagcgcgacgcgccggtcaaccgcgacggcggcggactggccagcaatgatgtctgggtcgatgcccgcgaactggtcctggttccggccggcaccaacggctatgccagcgaccgctggtacaccgccggcggcctgctggaactgggcggttaccttggcacgcgcaaccattcggccggcgagtggatggcccagggcggcatcgtcagtttcaccggcaacgacgtggtgacccaggccggttcgcagatcaacctgtccggcggcaccctcgatgtgcagggcggcctgatccggcagacctggctcaagggcagcgacggacgtctctacgaactcgggtcggcgccgggcgacctgctctacgacggcatctaccgcggttacgaggcacacagcgagcgctgggaccagacacgttatttctacaatccgctgatcgccccgcagagccgttacgagagcggctacatggtcggccgcgatgctggtcgcctggtggtcggcaccgcttcggcggtgctcgagggcgacctgctcggcaaggtattccagggcgagcgccaggtgcgtgcgccgcagccgggcgcggatggctaccagcaggcgcagaacgcagtggcgcgcggcgccgagctgatcgtgggcagctataccccgcgctacgaaagtgccagcggcaacgtgctgtacaaccttgcgccgaccctgcagcaggtgcgcttggccgatggcggcgagccgctggcggtgaacctggatctggataccgcgctggccgacgaacagcggggtgtcctccagctcgacagcgaacggctgtcgggtttcgagttgggggcgctgcgcgtggccgcccaagagcggatctcggtggacaacgccctgcaggtcggcgatggcggcgagattgtcctgtacgcgcccgaggtcgaggtgaatgccgacctcacggcacgcgccggcagcctgcgcctgggcaacgtgctggagcaggtagaggtggcccgtggcgagcggttcgatacctatctcacccccgctgccggccaacgtgccgccctgaccctgggcgatggcgtgacgctggatgcgcgcggtctctggagcaacctggtgcagggcggcgtggatgccgaccgagcttatctcgacggcgggcggatttccctgcgtagcagcggcgacctgtcgctgggcgatggcagccggatcgacgtgtcgtccggagccgcgctgctcgccgatggcaaacaggtgggcggcaaaggcggcgacctgacgctgtcggccaacaccggctcggcggcaggcgacggccgcctgcaactgggcggtgaactggcaggccatggcgtcgccggcgccggcaccctgagcgtccaggcgccgcgggtgagtatcggtgcggcggcgcaggacggcaccctggcgctggccgccgggttcttcgacaagggcttcgccagttaccaggtgatcggcgagcagggactggaagtggcggaaggcgcacaggtgaaggtgcagcgtccgttgtaccgtttccgcgacgccgccgccagcggcgccgacccgctgctcgcgctggagccctggctgacgccgttgtacgaggagctgccggtcgacggcgaactgcggcagcgccccggcgccagcctgttcttgcaggccggcagccgccagagcggtgccgggcaggtggccgatagcgtcctcaacatcggtcgtggcagtctgctggaggttgatcccggccagcgcatcgaactgcgcagcgtcggccagttgaacgtcgatggtcgcctgaacgcctggggcggctcgatcgaattgggcagcgtggcgttgcccgatccggtgcgcgaccaggtcgagagcgtcggccaccagcgcgccatccgcgttggcgagcagggtgtgctcgatgtcgccgcacgcaccgcgaccgcgctggacttccaggggcggcgctacggccaggtggtcgatggtggcagcatcgtcatcggcggcacagttgaccatgccagcggcaaggccgatgccgccgaactgttcatcgacctgcgcccgggaagcctgctggatgcctccggcacccaggcgcttctggacgtgcctggagtcggccagacccgggtcagcagcgccggcggcagtatctccctggcgtcggccaacggcttgtacctggatggtgacctgcgcgccttcgccggcggggaaggtgccgccgccggcagcctgacgctggcgctggccacgccgaactacctgaccagcctggcgaccgaccaggtattgcgccagcgcgagctgatcgtcggccagcagcgcgaagccgccggggaagggagagactatgcctatggccatggccgcctggcggcgagccaggtacaggatggcgggttcggtgacctgaccctgttcagcgacggcctgctgagtttcgctggcgatctggagctgtaccaggcgcaacgtttgcgcctctacagcggggcattggggcttggcgaaggtgccgccggcgatagccgggtcaggttgtcggcaccgtccctgctgttggcgggagcgttcgtcaacgacggaattacggaaaacaacgaaacccggccgctgtcgaccggcctgttcgaggtttccaggcagcccagcgaggcgttcttcgaagccagcgcgcaggtgctggatatccgcgatagcctggtcttcggctcgcgtggcagtttccgcgacgccagtggcgggacgcagacgatcgacctgcgtggcttcgaccgggtcgagctgtccagcacgggcgacatgcgtttgctggcggggaacgcgacgcctgtcagtaacattaacacccaggtgctcagcggcggcgatctgcttatccgcgcggcgcagctctatccgagcaccggcgcgcgcgcgcggattctcgccggctatggctaccaggccgatggcgccgctgcggcgttcgacccggcgcgcagcttgcgtatcgagcgcagcgacgcgacgacgccagagcagcccctggcggtcttcggtcgcttgtcgctgggggcggcgagcgtcgttcagggcggcgtcgtgcgcgctccgttgggctatctggaaatcggccagaacgccgacaaagtcgagttgttgtctggcagcctgacctcggtcagcggtgccggcctgaccttgccctacggcggcacggtagacggccaggtctggcgctatgccggggaggaaatctccctgaccggcgtcggcggtagcttcaacgagagggggataatggataccggggtcgacctgggtggccgctccgtgcgggtggcgtccggagcgacgctggatctttccggcggcggcgaactgctcggcgccggtttcgtctccggccgcggcggctccaccgatgcgcgctacaacccgctggtgcgtttcggcggggacggtcgcttcagcctgccgggactggccgacaatccgatctacgccatcgtgcccggcgttcagcgcatcgcgccggtggccgccgaaggcggtgccgtcgacccgctggtcggccagcagatcagcatcggcagcggcgtgcccggcctgtcggcgggaacctacaccctgttgccgtcgacctacgccctgctgcccggcgcgtaccgggtcgaactcaacggccaggccgggctgggtcgggcagcgcccacccagctcatgcgcagcggctcctggtcgctggccgggcagttgtccctcgtcggcaccggggtgcgcgacgaactgttccgccaggtgctgctgaccccggcggatgtgctgcggcgccattcgcagtacaacgagacgagttacagcgacttcgccatggccgatgccgcccgccgcggcatcccgcggccgatgctgccggtggatgcgcgcagcctgcgccttgacctgctcgccggtggcggtgccgatgcgctggcgttcgacggcaccgggctgttccaggccgccagcggcggctatggcggtagcctggtggtattgggcaacgaccagcggatcgagatcgtcggcgccggcgcgcaggccagcgagggcttcctgggcgtgacgctgcgggccgacgatctcaatgccttcggtgcggcgcgcatggtgatcggctcgacgccagcggtgctctacgggcaaggcggcaattacgtcatcttcgacatcaccgatggcgcgcaaagcatcgtcctgcgcaatggcgccgaactggccgcaccggaggtgttccttctggcgagaaggccgggagaggcgatcagcctcgagcaaggcgccgccatcgtcacccaggggcggggagctgcggcctacgatgcacgggatggcttcctgtatgcgccgggagggcgttccatgctcgccctgtcgaacggcgtgctgaacgtcttgccgccggaagccggaacgccggacagtggtcccggcgacatcctgctcggcgttcccgctgccgatggtgtggccggcgaaacccggctgtattccgagggcagtctggtcgcggccaccgacaagcgcttcgagctcgacggcagcgtgcgttacggcacccgcaacctgaccctggcggcgggcggtttcaatgtcggcgagcaggcgctgttggccgaactggccgagcgcggtgtgctgccgaccgggttggcgctcgaccagcaagtgctcgaccgcctgctgcagggtgatgcgtcggagggcgcgccgcccctggagacgctggtgctgaacgcccgcgacgcgttcaacttctacggcgacgtcagcctcgattcctacgatccgagcagcggtcgctcccgcttgtcgcgcctggtgctgggcaccccggcgatctatggctacggcgacagcgacagcgtcgcctcgatccgcacctccaacctgatctggaacggcgcgcagacgccggccgccggggtcatcaccggcggcgccggcagtggccagggcacgctggacatccgcagcgaacgcctggagttcggctacggtcccttcagccagcccagcgccatcgatagttaccagcgcctggcgctgggcttcgccacggtcaacctggcggccagcgagcggatcaccgccaaccacaagggtagcctcgcggtctatcagagccagggcgagtatcgggctggtagcggctacgcatacagcggcggcgatctcaacctgatcacacccttgctcaccggcgaggccggctcgcgcaacagcctgctggcgggcggtgcgttgcgggtcagcgcggggggcggcggcgcggcatccaccccggtcgaactggccaatggtgcactgggcgccgaactggccctggagggcgccagcctgctgctggacacccatgtcggcctgcccagcggcaagttgagcctgaccgcgcaggaggacctggaactgggcgcaggtgcccagctcgacctgaccgggcgcgcgctgcgtttcgatgacgtgacccgctacagctggggcggcgaagtcaacctgttgagccacggcggcaacatccgccaggccggcgcttcgcgcatcgacctgtcggcgagcaacaaccaggccggtagcctgacggctgtggcgctggacggcgcggccggcgtggtcgacctgcaagggcagatcctggcggcgagcagtggcgaatacgacgctggcggcaccctggtgccgtacgccgcgggcagcgtcgagatccgtgcccagcggctgggcgaggacgggacgccggacagccggttcgccgctctcaaccagcgcctgaatgccggccaggtgttcggcgcgcgcagtttccagatcaagcagggcgacctgaacatcggcaacgacgtcagggcctcgacgatcgaagtgtcgctggatggcggccatctgagcgtgaacggcgtgctcgacgccagcggcgagcaggtcggcagcatccgcctggccgccaagcagggcctgagcatcggtggcgaggcgctgctcgatgcccatgggcggcggctgcgggtggacagctacggcaagatcatcgattcgccgaaccgcgcgctgatcgaactgaacgccggagacgggctgctcagcctcggcgccggtgcccgtatcgacctgcgccacggcaccgaggcggcagcgggaagcgcgcccgggcagaacgacggcgtcgcccgcggcaccctcgacctgtacgcgccgcgtctgggcggggcgacggcgggcgatatcgccatcgacgccggggcgccgctgcagatcctcggtgcccgcgccatcacccttagcgccgtgcagcgctacgacgacgcgccggtcgccgcgctgccggcgagcaacggccggccgtaccaggagatcacccaggcctacctggatggcaagcaccagcagagcgaactgttcatgcaggcggcgttggccaatagcgccctgctcgacggcaagctggccggattgaacgatgccgcctacgcggaagctttccacctgcgccctgggttggagatcgtcagcgccacggccgatggcgacctggtggtgcagggcgaccttgatctgtcgggctatcgctatgccagcctcaacccgcggacggcgaaaacctcagtatacggctccggcgaggccggttcgctggcgatccgcgccggcggcgacctgaacatctacggcagcgtcaccgacggtttcgccccgccgccggaaaccgacgacgatcagggctggttgctgctagccggccaggatcacctgggcggcgatcgggtggtgccgacggctggcgtgcggctggacgacgacagcttcttcccggccggcaagacgctcaacttcgaactgccgatcaaggccatgaccctggccgccggtacccggctgccggtcgaggcggagctcagccagccgctgcaactgccggcggggacggtgctcgagggggcgttgctggatgccgccggcaacctgctccggccggccggcagcctgctcggcgaggctctggacctgcccgccggcacccgcctcggagccggcagccgtctgccgctggcgacgcccgtgacggagatgacctggccgggcggcgtgccgctgcccggccgcgccgcgctggccagcggcgaagtcgacggcgtgcgtctggccggtggactggccttgcgcgccggggccttcctgccgaccggcagcgatatccgcctgcccgatggcgccgcgtcggtggacgtaccggccggtgcggtgtcgcgcaattgggctatcgcgccgatgctggcggccggctcgcagtcctggagtgtgcgcctggtggctggcgccgacctgcaggcggccgatccgcggctgaccgatccgcgttccagcgggcagatgcgcttcgccgatacgcactacggcatgcggcgcataccggcggcgggggggctggtatggacccaggaaggggtggataactggggcgaccccggcatcaagccgggcgatccactggacccggaggccttgggctacccgaccatctgtgacgatttcccgacctggtgcgctgcgtccagcgacgactatgcgctggaagccgaaccctacgcttcgcgcttcagcgtgctgcgcaccggcaccggcgatctcgacctgttcgccgccggcaacctgcgtatggattcgccgttcggagtctacaccgccggtaccgcgagcgcggtcgattccagctacaacctgccgcgcgccagggatggcggcagcgttctgcgcgatccggcgctgggcggctacgagcaatgggtggatggcggcgaacagagcctctacagcgcctggtatccgacccagggcggcaacctgacgctggcggtcggcggcgatctgcgcggcgatgtgctgggccggttgtccagcgccttagtacccaactctggctacgactcggcggccgtcggcaactggctctggcgccagggcagcggttcgaccgccggtacggctaacgatgccaccgcctggtggatcaatttcggtacctatgcgcgccagccgggcggcgatagagcggctgccgccacgcagcaggtgggcttcaccggtatcggcaccttgggcggtggcgatctgagcctgaaggtcgcgggcgatgcgggcgtcatcgaggcgcgcacgtccagcgttccgcaggagtcgcagcgcagccaggggctggtgctggcagtgggcggcagcggtcgggtaggcgccgatggccaactgaccctgagcggcggcggcgatatggacgtacgtatcggcggcgcgctcaatccgttgacgcccttcgttcagaacagttcgctgtacggcgcgatggtcaacctgcgcggcaatgcccaggtccgggcgacgagcctgggcggtatcgatctgatctatggtcgtcaggatagtggtcaggttccgggcgaacggcgcgcctacgatcctttcgtctcgacccttggcctggccaacggcgggccgacgctggtgctgggcgacgccaccttcagcctgaacagcctgggtgacctggtgctgcaaggggtggtcgatcctgggaggacgccgttgatgaacggcaccccctataccagcgccagcggtgtcgagggttacggcctgagcggtttctcgttgtggaccgaacgcacggcgatcgacctgacgtcggcgggaggcaacctgaccccggtttccctaggcaggctggaacaggacaccgattccgcgctggtctatccggcgaagctgtcggccgtggcgctgaccggcagcctctattatggcaacgcgacactccgcgaaaactctcgcagcgacaggaccgcgctggtcctagcgccgtcgagtcagggccgtctcgacctgctggccggcgactccatctacgccggcggctacagcatcagccgttccggcgccagcgccggcagcctggccacgccgctgaatccgagctaccagggctataccgggatcacgcggcaggtcgacaacctgcccagcgacggcagccgcgccaactggaaccacttcccgttgtttgccttcggcgccaacagcgtctccggcgaatgggggggggcgttggaaccgtcgcgcttctacgcccttgcgggcgatctggtcggtgtcgacagtggccggctgctgcgctacaccgggaccagcgatgtgcgtttcggccagttgcgttacgaggggcatggtgcggtgcgcatgatcgccggccgtgacatcgtcagcagcggcaccgggttgggctccgagcggaccgcgagcgacaacatgggggactacgccagcagcggcaatctgttcgtcaatacctcggctaccgacgtgtcgctggtgcaggcggggcgcgacatcctctacggcaacttcaacgtcgcgggaccgggcagcctggagatcagcgccggacgcaacctgctgatgaacgacgaggtggcggtcaccagcctgggggcggtcgccgcgggcgacacgcgctccggcgccagcatcgtcctgcaggcgggcgccagccaggcggactactccggcttcctccggcgttacctggagctcgacaacctggcgcaggcaggaacgcccctggcggaacagcccggcaaggtggtacggacctacgaaaacgaattgatcgaatggttgagcgggcgctatggctccagcggcgacgcccagcaggcgcgggagttcctcgccgatctgccggcggagcagcagcggatcttcgcccgcgaggtgtacttcgccgagctcaaggccggcggccgcgagtacaacgaggtcggtggagtgcgccagggcagctacctgcgcgggcgcaacgcgatcgccgcgctgttccccgagcgcgatccggcgggcaatccgatcagttacgaaggcgatatcgtcatgtacggcggtgccggcgtgcacaccaatttcggtggcgacatccagttgctcactccaggcgggcagcaggtattcggtatcgaaggtgaggcgccgccgtcccccgccggtgtggtgacccagggcgttggcaatatccgttcctacgccttgggcagcatcctgctcggccagagccgggtgatgaccaccttcggtggcgatatccagatctggtcggccgagggcgacatcaacgccgggcgcggcagcaagaccaccgtggtctacaccccgccgcggcgcatctacgacgcctggggcaacgtcagcctgtcgccgcaggtacccagcaccggcgccggtatcgccaccctcaacccgattcccgaagtggcaccgggtgacatcgacctgatcgccccgctcggcaccatcgatgccggcgaggcgggcatccgggtctccggcaacgtcaacgtggcggcgctgcaggtggtcaacgcggcgaacatccagacccagggccagtccagcggcattccgatgacggcggcggtgaacgtcggagcgctgacctccgccagccgggcggccggcagcgcggtgcaggcggcagagcaggtatcgcgccaggcgaagcgcaatcagccttcgacgatcagcgtggagatcctcggctacggcgatgaacgtctggaggcgggaggcaacggcactcccttgacccaccagggatatgatccggcgggtgcggttcaggtggttggcgccgggaagttgacggccgacgagttggcgcaattgagtgaacgggaacgcaatagcctattatcgcaataa

SEQ ID NO: 238401 - DNA, 345 bp, Klebsiella pneumoniae
atgaagaaacgcgcaaatacgcggtggcgcagcatcgtactaccgactttattgttctcaattccactcccggccctgacagccgaaccgcaaccaccgcttcacgccgcttcttgcatagaggttgaggtcaatggttatcgggcattgccttatgattgctatcagcaattgatgtctcctcgcactcagaaaaaagtgacgaaaaacgccggatcgaaattcgacgccgatatcagtaaacgccagcccaatcagatcggtctttacagtcaatcggcgttcaaaaatcgtatgggcaaccattttggcaaatcggcacagccccagcgccaggaaaaataa

SEQ ID NO: 238402 - DNA, 708 bp, Klebsiella pneumoniae
gtgagaaaaattacgcttccgtcgtcggtcggatattggtggtttattttcctgcttgtcgtcgtgccgctcctcggcgttgcgggggaaccgtcgaaagacattcacccggtgaacttcaatattccatcgttgccgctggtgcaggcgttggcgcgttatggcgaagcgtcgggttttgctgtgttggtggatagcggcatggcggccggccggcgatcttcgccggtcaaaggttatctcgatccctacttggcgttgacctatctgctgcacggcagcggattgaccgcgcgttatacgggcgctaatgccttcacgctgatggtgaaaagcgctgaggttacgcgcaagcccggctccgggaatacgggtgacgtatccacgccggggttgggggggcatcgcttcggcgccgctttgcagcaggcgctgcaacgggcgctgtgtcaaacgccgcacacccgtctgggtgattaccgtgcggtaatccagctgtggctaaccaagaatggcacggtagagagacttagacttcttggttcaacaggctcatcgctgcgagatgatgcgattcagaaacaaataagagagctgaggcttgcgatggaaccgaatgtccgtttgccgcagccgctgactattttgatcttacctggggaaggagcctcaatgacgtgtcgaatgcagccagcatcacggcattga

SEQ ID NO: 238403 - DNA, 525 bp, Klebsiella pneumoniae
atgcgccgacatttccttacttattatgatgcattgcgtaaacggcttaaatatcgtctgggttctgaggatctggcgaatgacgtattgcatgaaacctggctgcgcatcgaacagcgtgatgaggaacagcagatacagaatccccaggcttatctgtatcgcacggcgttgaacgtcgcctacgatcggcagaacagcggtccccgtttgctgcaggtagacgaaatcgatgcgctgttacagttggaggacgagacgcaagacccggtacggattgtcaatgccagaaatgagatacatgaactgcaacgcattctgcatcagctgccgtggcggcaacatcagatattggtggcttcgcgtctggaagggatcgcacaccgcgaaattgcccagcgtttccatatatctacgcgcatggtggagaaagaattgcgggcggcgttgaatttttgcgctaaaagtatgcagcgaaacgtcattcagcgattcggtcccggggcgggaaaagcgtctaagtaa

SEQ ID NO: 238404 - DNA, 966 bp, Klebsiella pneumoniae
atgagttattttgcatggcgcgcgaaaatccgtctgacgcgtgaggccactaactggctgattcgcctgacctccgggcgagtgacgaccgaagatgcagatgcttttcggcaatggtgtcagcaaagcccgcagcatcatgccgcgttcgatgaggccaggcgcctgtggcgaaatctggaacctgccatgagtgcggctccgtcttgcgcgcacgagcggcaggcatcggcatgcgcgccgaagtgggggcgaagagcgtttttgggcgccgccgccgcctctgtcggcatgctgtggctgaagccggagctgttgcttaaccccgaagtgggctggtcctcattgtcggggttggcaagcgactaccagacgtcgctcggcgagcagaagaacattgtgctggcgggtaatgtcacggtggaaatgaacacactcacgcgtatcgaccgacggaaagccggcatggcgctgctggcgggggaagcacaaattttgacgcgagcgatggatctcccccggtgggtggtgtatgcggaaaatggtgaagtgcgcgccggagctgcaaatttcaacgtacgcaatgtggaaaggcaggtcaacgtgacttgccttgagggcgaagttgccgtgatttgtcagtcggtgcatcgccagctgcgcgccggtcaacagttgagttacaacgcttccggcgtcggcgaggtggtgcgagccaatctggaacaggttaccgcctggcgacaacagcagttgattttcaatcgccagccgttgtctcaggtgatcgatgaaatcaaccgctaccggccgggcaagatcattcttttgaatagccagttggggcggcgattggtgcaggcgcgcttccggttggatcagttggagagcgtcgcggcgctgattcacgatgcctatggtgcaaaagtgaccgctttgccgggagggatcgtggtgttgagttag

SEQ ID NO: 238405 - DNA, 453 bp, Klebsiella pneumoniae
atgtgtagccagttaaaccccttgttcgcagacgcatacctgaagccacagcagactcataatgtgcagccggtgaaaacaaccccgttgttcgcagtcggataccagaagccacagcagactcattatgtgcagctggtgaatacaaccccgttgttcgcaatcggataccagaagccacagcagactcatgatgtgcagccggtgaaacaaccccgttgttcgcagtcggatacctccagcctcatcagactcccgatgcgtagcaagttaacccccctcagcttgtccgcagtcggatacccgaagccaccacagactcatgatgtgcagctggtgaatgcaaccccgttgttcgcagtcggttaccagaagccacagcagactcatgatgtgcagccggtgaatacaaacccttgttcgcagtcattaggtgaaacctcaactgactga

SEQ ID NO: 238406 - DNA, 297 bp, Klebsiella pneumoniae
atgaaaagagttctcggtagattatcatcaatcaatgtacgtaaagtgctttggacatgtagcgaattgggcttgctgtttcaacatgaagaatgtgatatagatttgattgcatcatcgccgatgcaatcaggctttgtattcaccgaactaaaccccaatgctatagtacctatactgctggataacaagttcgtgctgtgggagtccaatatcatcatacgttacctcgctaatcgttatggaggtactggaccctttttgggtcggtttttagaaccctggcctctggtataa

SEQ ID NO: 238407 - DNA, 1356 bp, Klebsiella pneumoniae; identical to SEQ ID NO: 185379

SEQ ID NO: 238408 - DNA, 432 bp, Klebsiella pneumoniae
atgaaaacggtactgactctggatgtcctgaaaaccatgtcttctgatgagctggaagactaccgcgccgccggtgaagactttcgccgggagctgagtcacgctgtcatgcgcgatctgacctcaccgtccggctggtccgtgaatgccgaataccggtgcgaatttggcggcttctttcctgtccagatccgttttaccccccctcatggtcactttgatgtggcggtatgcagtccgggggagctgaatcctcgctggatagtggtctttgttacccgtgacggtcagccgttctctgtcgttcgcgtgatggatgcattcaaccctgaactcatcacccatactctggatctcatcgagtgtcttgacgccggtggctactcgtttgccagcatcatcagcacgctgtcacaggagggcgcacaatga

SEQ ID NO: 238409 - DNA, 285 bp, Klebsiella pneumoniae
atggtcggggtgatggcaacccattctcatatgctgcttgatgccgcgtttggcggcgtcgccgaaggtgaactgacactggcacagcgactggtctcggctgccccggaccacgccctgaccctgtttgaccgttgctatttcagcgcatcgttcctgatggaatggcaagaagccggcacccagactcattggttgacaccggtaaaaagtaagctccaatataaagtggttgaacgttacagcgactatgacatgttggtcgagatgcccgtatctccgtag

SEQ ID NO: 238410 - DNA, 192 bp, Klebsiella pneumoniae
atgttccccgcccccccctttgccacagactcgtacctgagacaccagtatgttcagcgccgcaataaagcttatccgggttggcagaacctccgcttctgcggcgatgtccgccatctctttcctcagcagattgtaggcgactataacgccccacagctcccccctcaggaaaacggcttcttagtgtag

SEQ ID NO: 238411 - DNA, 711 bp, Klebsiella pneumoniae
atgataactcaacggcattacatccacagggttctgttgcacttcaatatgttttcacttatcggggtgctaggagggacgtgtccgttttttgtcccggcggcgcaggtcgatttgccgccgcaacggcattttactttcgatttgccggcgcaacccttatcgcaggcgctggtcatctatggcgagatcaccgggctatcaattctggtcagggggaatttaaccgctggccgtcaatccagtccggtcagaggcgagctcacggctgatgaagccctacgcgccttgttggccggcacccggctgacggcggtctataccagtggttccgcttttaccctacaaccgcaaaaccggaacagcctggaacgcgatcgggaaatatcatcgccggctttgctgcggggagcttaccgcgcgcaattgcaacgcggcgtgagtcgtttgttgtgctcgttgcagccggccaatttggggcgctatcggttgggcatgcagctatggatcgatgcggcagggaaagtggtcagagttcatatcttgaattctcccggcgccgaacagtggggggcagacgtgaaaagagtgcttgagacgcgagagttggtggcgcctcctataggattgcgccaaccgataacgttgttgctgcgggtgcaaacggacattcgcgccgaatgtcgccgtgtgaacattgggcaggggtga

SEQ ID NO: 238412 - DNA, 552 bp, Klebsiella pneumoniae
atgcctgatgcgataaaaaaaaccatgcgtgaactgtttattgccagctatgctgaatttcggcagcggctttgtcgacgccttggctccggccatttggccgacgatgcactgcatgaaacctggttgcgcatcgacagcgtgagtaatgacggcgttgtccgttatccggcggcatatttgtttcgtattgcgctgaatgtggcggaagaacaaagacggaatcaagcgcgaatcatgagtaccgatgaaatagaagtgctttacaattttgctgatgaactggccgatccggcgcgtatcacctatgggcaaatcgaagtcgagatgtttcatgccatattggccgaactgccgccgcgacgcagagagatgatcatcgcagcgcggtttgacgatctgccccatgtggacattgcccgccgttttggcgtgtctttgcgcacggtggaaaaagagctgaaagcgggactgcagtattgctgcgaacgcatggaaaaacagtatattcaacgttttgggccaaaaacagagaccctgccaaaaccatga

SEQ ID NO: 238413 - DNA, 1002 bp, Klebsiella pneumoniae
atgacaaacccaaatcgaacagagatgcagatccgggagaaaaatgagatcgaacagcgggcaattggctgggtgattctactggcttccgggcgggcgacggtcgccgacggtgaggcttttcgccaatggtgcgcgcacaatcccgggcatgtaaaggcgtttgtcgaatgtcgtaaacattggcaggggctacaacgggccgccagcgatcgcgccccggacgaggcctccgcccggtcacccgcaaaaatcatcggtccatcgtcgtccgcgcgcctgagtcgccgcgcgttattaggcggcgccttggcggcatcgatcggctggctggcgatcagcccgccgctgcagctttggccgagcctggacgcgatatcggcggattatcgcaccggtatcggtgaacagcgcgaagtggcgctcaatgcgcatgtcaaattgcaactgaatacgcaaaccgccatcaatttgctacggcaacaaggggtggtcacgggcatggagctacgcagcggggagacggaggtgctggctcagcccggtaatggcttgccgttcgtcgtcctggccggcaatgggcagattcaggcgcaggaagcgttgtttaacgtccgctatatcgatgaatcgacctgcgtgacctgtctggcgggggaagtcacggtggagcgtgaagggcggcagattttgttgcagcgtcatcaacagctccgctatgacgatcaaatcatgttgccggttgaacgcgtcgatacggcgtcagtcagcgcatggcgtcagcggatgttggtgttcaataatattccgatgtcgcaggtcatcgaagaaattaatcgttatcgcaccgggaaaatcgttctactcaacgcccggttgggcgctagcctggtgcaggcgaggctgtctgtcgaccgtttcaatgacttcacttcgctgattcaacgcgtttatgacgctaaagtgcgttatttaccgggaggcatagtcgtcatcagttaa

SEQ ID NO: 238414 - DNA, 465 bp, Klebsiella pneumoniae; identical to SEQ ID NO: 151389

SEQ ID NO: 238415 - DNA, 201 bp, Klebsiella pneumoniae; identical to SEQ ID NO: 151391

SEQ ID NO: 238416 - DNA, 567 bp, Klebsiella pneumoniae
gtggcggtttttagacaatgcgaaattagagaaaaatatctcgcgatttacaaagagtcattcgatgaagttataacttatcttgagaaggcaggcgctttagagcccggcgttttaaggctcactacaatcgatgacaatgctattcgtgcatggaagagccaatggaaaggcaggtctcgtaagcacgctcatggtgcttgggattggcagaaccttgtatcaaagagagctcgttcttgtaaaagatttgatgtggctgtttggggagaggatgtgctttgtgggctttcagttggaaagctaacccgtggtaaaaagacagttagaatggattatctagaggcttgtccaaccgctcatccgttggagaaacgaatcacaatgattgtggttgctgtggctctgtcagtagctaaaaaagtaggggcacagcacgtagccatattcaacccgataaaagacaaagaagaaaaagtgttaaaacactatcagtcttacgggtttacacaaagaatgttgtatggacgctttttgaaaaacgtgctgtacaaagaagttgtttga

SEQ ID NO: 238417 - DNA, 195 bp, Klebsiella pneumoniae; identical to SEQ ID NO: 36234

SEQ ID NO: 238418 - DNA, 228 bp, Klebsiella pneumoniae
atgaggattaagcttacaatatcgagcaatatctttattatcaaaagatcattaggtatgcatgatccaaggattaataaaatctattttgattattttcaacacgctaaaaaacggccctttaaacagactattatcaaaataatcaatcgcatatacatatttgctactcaatggcgagtctcagaacccaaaagagaaaatgctttagccaaaaaaagtaaataa

SEQ ID NO: 238419 - DNA, 366 bp, Klebsiella pneumoniae; identical to SEQ ID NO: 95550

SEQ ID NO: 238420 - DNA, 159 bp, Klebsiella pneumoniae
atgattgatgttctaggtccagaaaagcgcagacggggcaacgttcaggaaaaaatcgccattattcagcagagctttgagcccggaatgaccgtgtcgctggtcgcccgtcagcatggtgttgctgccagtcagttgttcctgtggcgtaagcagtaa

SEQ ID NO: 238421 - DNA, 891 bp, Klebsiella pneumoniae
ttggctcagaaaaaattcattaataaatatttccctaactatcagtatgttgagattgagaaagagaaaacaatatttataatttctgaactaagaaaaagactgaaacctgatgatattgtttttattcaggggggaggcactctcagtgatttatatccagagcatgaagttccaaggcaaatactgctgaaggagttgaaagattcaccttgtaaaattgttcaattccctgtctcattttattatgaggattttgataagtttcgtgcttctaaatcaatatataactctgtgaaaaatttgaccatttttgccagagagtctaaaagcctaagtgttttgaagtctgaattgtctgtgcccgtgttacatgtgccagatatagtattatcacaggacgaatctagcaatcaacctcgcaacaatgatgttgttattatgttccgtagtgataaagagtgtgttttacctcaatcattagcaaattcaattgtagaccatttttctaagtcaaataatattattttaactgataattatgttaaagattatgttcttacctttgaaaagaatagagacaggttattgaaagaaaaattcgaagagtttagacatgcaaaattgattattactgaccgtttgcatgggatgatattcgcttatataactaagacaccagctatagtctttgataattcttatgggaaagttaaacatagttttgaaaactggctatcagattctaaatatattaaatttattgaaggtgatgatcttaacttagagaacgttattaagatcgcaaatgaattggtcaatacggataaagaatttgtatttaatgttgaggatgtttttgagcctcttataaatattactgataaataa

SEQ ID NO: 238422 - DNA, 312 bp, Klebsiella pneumoniae
atggagattattttttaccatccgacctttgatacccaatactggatctgtgagctggaaaagcagttacccggcgcgcgggtgcgcgagtggaaagcgggcgataaccggccggcggactatgccctggtctggcatccgccggtagagatgctgcagggccgggcgctgaaggccgtgttcgccctcggggcaggggtggactctattctcagcaagctgcgcgaccatccggatatgctgccgctgtcgattccgctgtttcgtctcgaagataccggatgggacggcagatgcaggagtatgccgtga

SEQ ID NO: 238423 - DNA, 837 bp, Klebsiella pneumoniae
atgtcacctgctcccttttatacattgaccgctggcgacctgacggtgactgccgtgagtgatggtctgatgtcagcgccgctgtccttactctcgggtatctcgcgggaggaggcggagcatctgcagcagcattcaggattagcctcgccggagaccattgcgattggcgcctatctgatccgcggtcgcgggaatacggtgctggtggataccggcaccggcggagccaatggcgttggcggcgaacttatcgccaatctggcgcggctcggcgttggtcccgaggagatcgacgccatccttctcacccacgcccatccggaccatatcggcggcctgctgtccgccgctggtacgccagcgtatcccaacgccacggtgttcctgcctacgcgggaaagcgcttactggctggcaacatccacgttcgacaacgccagcgatcgcggccggcgcaacgtgctgcttgttcgccgtgtactggcgaactgcgcggcgcaaatcagcggggttgatgatgaggaggtgatcgccgggatccgcccgtgccctctgcccggccatacgcccgggcataccgggtatcgtctcgaagcgggcgatacctcgctgctgatctggggggatatcgtccatttcccgtccattcagtctgcgcggccagaagcctcggtcgccttcgacgtcgatcctgaacaggcccggcgtaccagggagatcctgctgcgccaggccgccagcgaacggtggttgattgccggtatgcatcttggcctgccgggattcgccagagtggagaacaccgcctcaggctattgtctgcgctcggtgtga

SEQ ID NO: 238424 - DNA, 885 bp, Klebsiella pneumoniae
atgcgtcgtaaaatccccagcagcgctgcgctactggcttttgaggccgcggctcgtcacggcaactttgcccgcgcggcggcggagctcgcgttaacggaaggggccatcagccggcagattgcccgtctggaagcgctcctcgacagtaaactcttcgacaggacggggagccgggtgcggctcaatccggcaggcgcccgctacgctcgtcaggtccgcgagatcctcgctcgtctggaacgggacacccatgacgtcagcgggatgcccgtcgatggccgcagcctggagatcgccgtgctccccaccttcgccagccgctggttaattccccggctcgggcgctttgcggcgcagcatccgcatatcgtggtcaatattgccgcccgcagcgatcccttcattctgccgggaagcggatttgatgccgccatccattttgaacacccggcgtggaccggaatggaggtgacgtttttatttgcggagtatttgctgccggtctgccatgctgcgctgctgacggatgacgatcttccggggctgcttaaccggctaacgcgcattcaccggcggcaaaacccggacgcctggctgcactatgcccgcgagtgcggtctggcgctggataaccccgcccaggggccgcgctacgatctgcatgagatggcgatcgccgcggtacttagccagcagggtgtggccctggtgccgaagatgtatgtggaaagcgagttgagcgccggaacgctggttgccccgtggccgggctccccgacgctggctaagcgcttctgcttgatcaaacccggcggcggggagggggagccagcgctgcagatgtttgagcgctggctgcagacggagattgcggcaggttaa

SEQ ID NO: 238425 - DNA, 906 bp, Klebsiella pneumoniae
atgtataatgcaaatgaattgcgaattattcaaagtttgcaaaaagatatagaaggtgaacttaatcgtattggattactatatcgttttttttcacggactaaatcagaaagttcaataattaagaaatatggaaaagagcctgataaatactccgtggatggtaaaaaaattcaagacttatttggggttagaataatattatattttcctgatgatttatttattgctcaaaaaacactggaaaaattattcgaaattgaatctaaaaccgtagacgaaaccacggctaatctctttgcggcaactcgatgcaattacgtgtttaagttaccagaagtattatcaaatgatagtgtcttattaaagaaatatccttacattgatactacttttgaagtccagttcagaactattttatctgaaggatggcatgaagttgagcatgacctacgttataagtgcaaagaggactgggttgagcataatgacctcagccgtgcgctgaatggaatttacgcctctttagaaacatcggattgggggataatgaaattatttgaggaattggcatatagaaattataaatcaagcgcatggtcagctatgctaagaaataaattaagattgagaatggatgataaacttgatgaaaagataatttcaataattaatgagagggaacttggtaaaaagttttatagaattgatagagatcgtttgttatctttaatgttagattacaatattgatataccaattaatcttaataatatgatttacctttgtaattattttttcattaaatctactgatcttcaggatatagccccttccttgataatgaaaaagcttacagatgctgatgaaaaattcaataaaaaacctattttagcatctaaatag

SEQ ID NO: 238426 - DNA, 2106 bp, Klebsiella pneumoniae
atgttacaaaaaagcaaacttacagagatatatagaagatttggttttactgaagaaaatacaggtaacgaaagcattgctgtatattctattaaaacagggcactatcataatgcggacatacttccattaaatgacgaggtggatgtaaatcaaacctttgaagaatataagcagttaggttatgcatgtcaaattaaaaaatatcagacttatgaaggagctcataaagagttatttaatggcttctttagcgtcgattcaactaaagaaagattgattaaagattataatactttcactgattcaattgtaaagattcactcacctactgcatcttattcctatataaattcaaaatattacttaaacggggttgtcggcgaagctaatgttgttacggaaatattaaagaggatacaacatgggcgtccaattctgtttttgattgaggctgcagccggttttggaaaaacctgcactgcgtatgaattattgagggaaattatagttaacaacataggaaagataccattattttcagagctgtctagaaatagacaagcaaaaatattcaggtatgtactattagatgaaattgatagaagttttcctttgttaagttcagctttagtaaggaatgaaataagagcagggaatgtaccagttattcttgacgggtttgatgaactattgcatgaaagtacaaacggaattgaaaataattatgaaaaaacagaaccaatgcttgaaacgataagtgagcttctaacagatagtgcaaaagtggtattgacaactcgaagaacagctatatttgacggagatgaattccatcaatggatagcatcacatcaagatgattttgatgtgataagaataagaattcatgaaccacaaattgaggactggcttccaggtaaacgtttggatgaaatttcatcgacaggatttcctcttgacaaattatcaaaccctgtactgttatcatttctaagatgcatcgacgacaatgactttagtaaagttataaacgacccaacaactatagttaggaagtattttgattcaatgcttgagcgagagagaaaaagacaagatttattaatgtctattgaagaccaatatactatactaaaaataatagctgacgatatggtcgagggtaactacacatcagagtctagagagtatatatcgttagtcataactgaaaagaatcaacaactcttggaggctacgagaaagctttatactgtagatgaaagaccaactactgacgaattagttaataaattagcatcgcatgctctattagatcggtcaggttcagaaaaccaagggattggatttgttaatgagtttgttcttggcaattttgtttctgaaaatattattgacgataagtcaaatgaatggctcggtgataaacgttttatagaacctgctgtgcaatcttatatgccgagaatcgatgatgaaaaagaattactttggcatagtttagagtttgccttaaattttatgtcaggcaatgataagattctttatagccatttactcataggaagggttccattagatttaaaaaatgatagtattgaacaattgtcaatatcaaagctttctttaggtgatataaatataatacatgatacgatctttgttgactgttctttttttaatagtctatttacctgtgataattacaaaaacgttacattcgtgaactgttcttttatagattgtagttttatcgaattaagtggcagggaagatatttattttctgggatgtgaatgtgacaataatgctattaataaaaagtctgtcgaaataaacaatgaaaatgatcacaatattacagattgtgatatttacatattggagaagttctgtcccagaggaagtgttagctattataagcatcggccaataaaaggcttatgtgctaacaataatcaatttcagttaagtgaaatactccattccttagataaattgaggaaagaaggttttttactcacaccagacaagcgttcattccttgaacttaacatggcaagaatatcagagattaaaacaattcttgggaggactttctga

SEQ ID NO: 238427 - DNA, 1038 bp, Klebsiella pneumoniae
atgaagtatgtgaatctgggtcgtagcgggttgaaagtctcccgtctttgtctcggttgtatgagttatggcgaacctgaacgtttgcctcaaccctggtccctggatgaaaaggcgtcacgaccgctcattcgtcaggcgcttgaagccggcattaatttttttgataccgcgaatatctactcgggcggtagttcagaagaaattacaggaaaagcgctgagagagatggccagacgcgacgagatcgttgtagcgacaaagaccttctttccgtggcgcaactcacccaataccgggtttctttcccgcaaggccatttttcagtctattgacgatagcctgatgcgcttaggcatggattatgtggatctctttcagattcatcgctttgactactccacgcctgttgaagagaccatggaggctctgcatgacgtcgttaaagcaggaaaagcgcgttatatcggcgcatcttctatggaagcctggcgctttgcaaaaatgcagcataccgctgagcgtaacggttggacccgatttatcacgatgcaaccgcaatacaacctgctttaccgggaagaagagcgcgagatgctgcccctgtgtgaagaccaaggcgttggggtgatcccctggagtccgatggcacgcggcaggctcacgcgcgactggagtgtcacgtcccgacgaacgcaaaacgatgcctttgcgttaaaaatgtatgagaacgcagcccttctggataagcccgtgattgatgttgttgccagcattgccgaaaagcacgcggtgccaagagctcatgttgcaattgcctggctgttatcaaaatccgtcatcacagcaccgatcattggcgcaacgaaaccagaacatctttccacggctatcagcgcgctggacttttcacttagcgatgccgaaatcacggaactggaagctcgctatctgccacaccccgttgacgggatcattcccccgcttccggatacgccgccttccctcacgccaccttcagcgatccagaactattaa

SEQ ID NO: 238428 - DNA, 312 bp, Klebsiella pneumoniae
atgcctgcgggggcgctttttgcgcaggttgaggccttccagacagtaaatccggtgtgttttcttgtggttaacaggccagccttcccgccgcagctgaatatgaatacgcgggcaaccgtagcggatccgggtttccgctatttcccggatatgcagggttaccgcccgatcatcccgccggctctgccagtggtaaacggttctgctctgcatcagcagtccgcatccccgccggacactgatacggtaagcctcccgcagaaaatgcaccgcctgacgcttctgagccggcctcagaactttttttga

SEQ ID NO: 238429 - DNA, 2664 bp, Klebsiella pneumoniae
gtgtcaatttataactactggggtaaaactcgccagggagaacccggcgggggtgatgattaccatctgctgtgctggcattcccttgatgtcgccgcaatgggctactggatggtaaagcgagatatctatggtctggcaggttatttcaggcgtttagggattaatgatattgaaaacgccgcgcaattctttgcctggctattatgctggcatgatattgggaaattctcccgttcatttcagcaattatatacccatgataatctctgcatgcagaaggatagtcgaaatacatatgaaaaaatatcccatgcgtcactgggatattggctatggaattcccacttcagcgattgtccagaattatttccgaactcatcactttccattcgtaaacttaagcgtgtaattactctgtggatgcccttaaccactggccatcacgggcgtccgccggtggggatgcgcgctctggataatttccatccatccgatattaaagcagcgcatgactttctgttagctattaaatcgctattcccggacatggaaatcccgtccttttgggatgatgatgcaggtgtggagctgttcagtcacctgtcgtggtttatttcggctgcggtggtactggctgactggacgggctcatcgacccgcttttttccccgggtctcccaacgaatgcagcttgatgtctactggcggcaggcaaacgcgcaggcagagcaggcagtgaatgtttttcctcctgctgcggctgttgcaccatttacgggaatagagacattgtttccttttatccagcatcctacgccgctccagaaggcggtgcttgagctggatatcagccagcctggaccgcagctgtttatccttgaagatgttaccggagcaggcaaaacggaggcggcgttaatccttacccaccgcttgatgtctgccggaaaggcgcaggggctgtttttcggtctgccgacgatggcgacggccaatgcgatgtttgaccggctggcacaatcgtggcttgccttataccagtctgacgcgcgccccagcctggtgctagcgcacagcgctcgcgggttgatggagggctttaatcagcgtatctggcccggcgctgtctccggttcggaagagcctgatgacgaacagccattcagccagggctgcgcggcatggtttgccgacagcaataaaaaagcgcttctggccgaggtgggggtgggcacgcttgatcaggcgctgatggcagtcatgccctttaaacataacaacctgcggttgttgggactcgacaataaagtgctcctggccgatgagatccatgcctacgatgcctatatgtcgcggattctggaaagcctgattgagcaacaggcgcgcagcggcaactgcgttatcttgctttccgctacgctctcgcagcagcagcgcgataagttggttgcttcctttagtcgcggtagcggctgcgcgcttgcggcgccgcttctgggtgatgacgattatccctggctgacgcaggtggcggggcgagaggtgatctcccgctatgtcgccacccgcaaagaggtcgagcgcagcgtgaacatcggctggctggataacgaagaagcctgcctcgcccgtatcgaacaatccgccagcgaaggccgctgtatcgcctggatacgcaattccattgacgacgccgtgcgtatctatcgccaactgctggcccgaggcgcgatccccgccgaaaaaatctcgttattccatagccgctttgccttttatgaccgtcagcgaattgagacggaaaccttatcgcacttcggcaaggacgacagcacgcagcgggcggggagggtgctgattgccactcaggtcatagagcagagcctggatatcgatatggacgacatgatctctgatttagcgccgatcgacttgctgattcagcgcgcgggtcggcttcaacgccatatccgggatcgtcgcggtcggctgaaaatcggcggagaggacgagcgtgcggcgccacagttgctgatcctcgccccggagtgggatgaagcgccgcaagaagagtggctgaccagcgcgttgcgtaacagcgcttatgtctatcccgatcacggccgtctgtggctgacgcagcgcgttttgcgacagcagggggccattcggatgccacaatctgcccgattattgattgaatccgtctacggggaagatatcggtattcccgatggtttagccaaagccgagcaagcgcagttggcaaaatattactgcgatcgcgcgtttgctcaccaaatgctcctgaacttcaagccgggatatagccccgatagcagtgatttcctggctgacaagctctctactcgcctggcagaagagtcgatcacgctgtggctggcgaaaaacgtcgatggacagttgctgccttacgcctgcggcgagcatcagtgggaaatgagcatgctgcgggtgcgggaaagctggtggcgtaaacacaaagctgaattcacgctcctggctgaaaagccgctgcagcagtggtgtgtacaacagcatcaaaacccggatttcgccgtggtgattattgttacagactcgccggattgcggttattcggccagtgaaggactcatcggaacaatggaggtctag

SEQ ID NO: 238430 - DNA, 141 bp, Klebsiella pneumoniae; identical to SEQ ID NO: 102393

SEQ ID NO: 238431 - DNA, 912 bp, Klebsiella pneumoniae
atgaaatattacatcgcaataccaacatataatggtggtgatacttggtacaaagtggcattaaatatacaggcatgtgcatctaaagatttgttggtgcatgttattgattcaggtagtaatgataatacaatttctattgctaaaaatgctaactttgacattgtaggaatttctagttcagaatttaatcacggagggacaagaaatctagcagtttacaagtatattgaatactatgatatagttatttttctgacacaggatgccatacctcaagataattttattaaagagataatagctgtttttgatgataaaagtattgcttgcgcatatggtcgtcagcttccacatgacaatgccaatcctctagcacagcatgccaggaaatttaattactcggataaaagctatatatgtggtaaagaagatatatcccaaatggggttgaaaacggtttttatgtcgaattcattttcagcttatagattatccacttttaaagaattgggtggtttcccatctgatactattctttgtgaggacatgtattatacggctaaagctgtgttagcaggatatcgagtagcatatgtggctgaggctactgtaaaacactcacataattattcaccgattgaagaattcaagcgatattttgatattggtgtatttcatgccgatgaatcatggatccgacaaaattttagtggagctacaaaagaagggcagaaatttatagtgtctgaactaaaatatttgttgaaaaaagcaccattatggattccatatgcatgcataaataatgtaatgaaatttttaggatataaaatgggacaaaattacagtaaactccctagaaaattaattaagaagttgagcatgcataagaaatactggataaaataa

SEQ ID NO: 238432 - DNA, 702 bp, Klebsiella pneumoniae
atggttccttcaacttccctatataaatatcaacccttaaatctatattctttaagtgctttaactaattgtagcttatggttttctggatttgatagactaaatgatccttttgaaagtacctatgagttttctccggaaatgattttttcttattcagaaaaagttcgtgtagcagaagataccattatggcaatagtaaaatcatcgggtgtatgcagctttacacgcattccacctataggtgcagatcaatttagggaaagctccctaatgtggtctcactatgctgcgcaattttctggagtgtgcatagagtttgattatgacatattgatagaatcattaaaaaaacagcctgaagttgatcttatttgtcaaaatgtgatttatacaccatatgcgcataaagtaaataaacctaatgaagcatatgaactagacgttatgtttaaaaaacataaggcatggagttatgaaaaggagtttagaattgtgaatacaaagacaggtaacgacaggctacatacatactccagcaatgctataaaatcaatttatataggtgggagaatgagccgcgaggaaattaaactcattaaggtaattaggaattccatcaatgataaaattaatcttttgcatgtcgatgtaagtaatcagggatatctcttcgaattacgagatttagattttgattaa

SEQ ID NO: 238433 - DNA, 1038 bp, Klebsiella pneumoniae
atgcagaacaccaaaacttttatcctgaaagcagccattagttcgttgctggtgctttccactatgagcctggcggatacgcagaaagttgagaacacaccttttgtttcgggacaatccctgaaaaaaggtttcttctggtataacgataaagaaccggtaaaagatgaagaagaccaaccgcaacagccattaacggggtcgccgtctcaggacaaaaaagaagagcttaagctcgattcacgctggctaaaagaaaacctgctgaatcttcgttatgcggcaatggataacccgaccaacgaaaacctgtcccgctattatactgcgcaacgtttaatgctggatattgccacccgtttctctgaccggacccgcgactatttccttaataacccgatgatgtcagaaaaacgacgacagccaaccgaaactgtcgcgttaaatgcacaccgtgcaggacttgaggaaaatcagcaaaaagcacttacctccatctttcagaaaggtggattgtttttctttttccagagtacctgtgcgtactgtcacgagcaaagccagatactgaatttcatgcagaactattatcacattgacattatgccggtgagtatagacgggcgacctcttcacaatggtttatttccccgttatggacgggcaacaatggagatgattaagcaatacgccatcacagaagttcccactatttatctcatgtccaatgatggttctcaggctacacgagtcagtaccggtctggtttccgctgacgaactgaaaaatacgattattcttgcggccagaggtatgaaccttctcgacgaagcgacattccagaacacgctcgatattaagaaacaatatgccattggcgacagagatgtcctgaccgtgaacaaagagcgctatgaacaggatccttatctgcttcagcacataatggatgaaaaacttagcgggtacgacatgccaacaaccgatcgggttaataccggtatttcagaaagtgaagggggcttaagtggctactga

SEQ ID NO: 238434 - DNA, 939 bp, Klebsiella pneumoniae; identical to SEQ ID NO: 195709

SEQ ID NO: 238435 - DNA, 288 bp, Klebsiella pneumoniae; identical to SEQ ID NO: 188212

SEQ ID NO: 238436 - DNA, 240 bp, Klebsiella pneumoniae; identical to SEQ ID NO: 188211

SEQ ID NO: 238437 - DNA, 816 bp, Klebsiella pneumoniae; identical to SEQ ID NO: 101405

SEQ ID NO: 238438 - DNA, 762 bp, Klebsiella pneumoniae
atgaaactgacaagcaacactatttttatcactggcggcacgtcgggtattggccgcgagatggcagaaaaatttcatcaaatgggtaatcaggtgatcatttcaggccgtcgtaaagctcttcttgacacggttacgtccgccaatccgggaatggattccgtggtactggatgtcaccgatgtatccagcattaaatcggcggcgaaagaggtgctctcccgctatccggccctgaatgtggtgatcaataacgctggcattatgcccttcgataatccagctgccgaactgtatgacgatatggccaccaccttactggacacgaacctgttgggcactgttcgggtcagttcagcctttgttgagcacctgaaacaacaaccggatgcggtattgatcaacaacagttcgattctggcttttttacccttggtgacgaatgcactctactcagcaaccaaagcagcgattcattcttataccctgtcgcagcgttttttactgcgcgatgccggtgtgaatgtgatcgagatttcaccgccttgggtcgataccgatttgatctacaaaagcggtgattcccgtgcgatgccggtagctgattttatccagcaaacttttgacaaactggcgacagattccattgaagtgattgtagatagtgtgctccctgcacgtgcgaatccgggtgtgaacgaacacgagatggtgaacgcgtttaatcagtcaatggtagataaccccattccggttgcctga

SEQ ID NO: 238439 - DNA, 1008 bp, Klebsiella pneumoniae; identical to SEQ ID NO: 101407

SEQ ID NO: 238440 - DNA, 1290 bp, Klebsiella pneumoniae; identical to SEQ ID NO: 188206

SEQ ID NO: 238441 - DNA, 426 bp, Klebsiella pneumoniae; identical to SEQ ID NO: 188205

SEQ ID NO: 238442 - DNA, 477 bp, Klebsiella pneumoniae; identical to SEQ ID NO: 188204

SEQ ID NO: 238443 - DNA, 429 bp, Klebsiella pneumoniae; identical to SEQ ID NO: 101359

SEQ ID NO: 238444 - DNA, 372 bp, Klebsiella pneumoniae; identical to SEQ ID NO: 234816

SEQ ID NO: 238445 - DNA, 243 bp, Klebsiella pneumoniae
atgcccatttttacgcgaatcaaacgtgatgatggctggaagcatttagaggagttgcgcggccagttctatgggcagatgtacaagatcaaccctgaaatcattagccggttcctgattaagtccacccctacaatcatatcggttgaaggaacctacttcaaagtacagcagtttgctcaggcagatgtacgcgagtatacgcgtataaatcagcaatcagaaaaagaggcggctcaatga

SEQ ID NO: 238446 - DNA, 219 bp, Klebsiella pneumoniae
atgctggagaccagtgcttatatttttgcgatgaagcaacctagagggtatacctacattggtctggtgaagaatttaatcaacgaaggtgaaggacatatttggtggaaaatattaataacgatgtaccacagcatcaaccttaccgaaatgaaaaggtatttaattccggtaagacagcacttgagctcaatttttctgagacaaatggcagtgtga

SEQ ID NO: 238447 - DNA, 789 bp, Klebsiella pneumoniae
gtgtcccgtaaaaaaatcagctccgcatttcgttttttccgtaacggtattgaaagccaggttcaggagagtcgtttcacagcttactggtcggcacttgaatcattaacgctaggggttgcccctggcacaccatcacatgaacaacatgtcatcagtgttgtggctccctgcatggtgctggattatattgttaagcaactattttcactgagaaaagttctgcgcttcatcctgcgagagccgagacacaccttgcgcacaccggacattgcttcacttccgctgggacagctctatgcccttcttaaagatgcggatcgggcccgtgaacttcagacagatttacagcactttccctatgtcatgtaccgggtgcgtaagcttgccgggatctgtgcgtcacccgagaaaatggcggataaactggggcagcatgccgagaaagtcacccgacatcttcaccgcctgtacctgctaagaaataccattgtgcacaatgcaggtaccagcccgcacattgacctgctgacggtgaaccttgaacactatctgcgagcaacaatcagcgcgttgtttaatattgtggtgatccacccaaccgtcagtaccgcagaggaggcatttacccggtgccaatttaccagtgagtcagttttcagggaactgaaccctcttcacggtatcactgaaaagaaagtatacacagccattgataatcagctgaaaaatgggacgctttcccgtagcgatgcacgtctgatagcatggctcaatgctcacccctga

SEQ ID NO: 238448 - DNA, 2688 bp, Klebsiella pneumoniae
atgacggtaggatcacgctggtttaaatttgattttcataaccataccccggcctcagatgattatagagtaccggatctccagccccgggaatggctgctggcttacatgcgacagcaggtcgactgtgttgtcatcagtgaccataacagtggggcctgggttgacgtgttgaaagcggaactggcaaacatgtatcgggatgccagttccggtgaactggcagacttccggccgctggctctgtttccgggggtagagctcacggccaccggcaatgtccatatcctcgccgtgttgcacactaagagcaccagtgccgaggtggaacgactactggcacagtgcaacaacaactgccctatttcgcgtgaaacccctaatcatcagcttgtgcttcagctgggatccgcaggcatcatcagtaatatccgtcgtaacccggaagcgatttgtatcctcgcacacattgatgcggcgaaaggcgttctgacaagccttactaatcagggagaactgacagccgcttttcagtcaaagcctcatgcagtggagatcagacaccgggaggaagatattacgaacgggactcaccggcgtctaattgcggatttgccatggctccggggatcagatgcgcaccaccctgaacaagcgggagcgcgcacctgctggctgaagatgtcagcccctgattttgacggtctcaggcatgcattactcgatccggaaaactgcgtgctgttcgatgataatccaccggaggcaccagcttcacatttacgcagcctgacattcagaacccgtctttgcaagccggtggatcagaatggagcctccgttgagtttagccctttttacaacgcggtgattggctcccggggcagtggtaagtccacgcttatcgaaagtattcgtctggccatgcgaaaaaacgaagggctgactgcgtcacaaatcaataagctgaacctgtttagtcagacaggaatgggcatggatacagattctttcatcgaatgtgtgttccacaaagagggcaccgattttcggctcagctggcggcccggtggttgtcatgaattgcatatcttcagcgaaggtcagtgggtgccggacaatcactggtcagcagaccgttttcccctctcgatatacagccagaaaatgctctacgaactggcatcggacacaggggcattcctgcgcgtctgtgacgagagtccgatggtcaacaaacgagcctggaaagagcgctgggatcaactggaaagggactacctgaatgagcaaatcacgctacgtggtcacctggccagccagacgattgcgggaaaactacagggggagttgtctgatgctgaacgggccatcagtcagttgcggtcgagcgcttactatcctgtttgcacccgtctggccacggcccgagctgaactgtctgcggcaacgcttcctctggagcataatgaactgcgtgtcgctggtctgagggcgcaggagaaagaacccgtgcaagtccctgagctccaggtggagtcgtctgcgccactgacagcatttatgacgcgtcttttggacgtacagcaaaagtatgaccagcgtcttgacactctgttgtcgggctatgccgcggaactccgtaccattaagcaggagcccccttttctcgcattggaagaggcggttcgcaaccaggaggaaaccgtacaacgtgaggccatggtgttacgagaacaggggctcaatccggacgtcctcgatgagctgatgacgcgcagtgagtcgctgaaatcggaactgagaaattacgccgatcttgacgggacgatcgcggcctccgcagcgaggtccaaaggattactggctgaaatgcgtaaccatcggatggtattgacggaaaagcgaaaggtgtttctgtcctctctgtctctcagcgcactggaaattaaaattctgccgctctgtgccccgcatgaagacaccgtatctggttatcaggcagtaaccggcatcggaaactttgccgatcgtatctatgataatggtgacggtagcgggctacttcatggcttcatcagcctgcgcccgtatagtccgctaccgtcggctacggaaaacaaatatcttgcgctggatacgcttaaagcgctgcatcttgctatccatcgcgaggagcctggggtcggggctgagctccacggtgctttcagaaatcgccttaaaggtctgaatgaagcgcaactggatgccctgcaatgctggtatccggatgatgggatacacattcggtaccagacacccggaggagggatggaagatatttcctctgcttcgccgggacaaaaaggagctagcatgttgcagttcctcctgtcgtatggcaccgatcccctcctgctggatcaaccagaagacgacttggactgcctgatgctgagcatgagtgtgatccctgccatcatggcaaacaagaaacgccggcagctgattatcgtgtcgcattctgccccaatagtggtcaatggtgatgcggaatacgttatcagtatgcaacacgatcgctctggcctgtacccgggactttgtggagcgcttcaggaaacgccggtgaaggagctgatttgccggcaaatggagggtggggaaaaagcatttcgttcccgctatgagcggatactcagctaa

SEQ ID NO: 238449 - DNA, 426 bp, Klebsiella pneumoniae; identical to SEQ ID NO: 188198

SEQ ID NO: 238450 - DNA, 867 bp, Klebsiella pneumoniae; identical to SEQ ID NO: 188199

SEQ ID NO: 238451 - DNA, 1233 bp, Klebsiella pneumoniae; identical to SEQ ID NO: 195700

SEQ ID NO: 238452 - DNA, 1437 bp, Klebsiella pneumoniae; identical to SEQ ID NO: 107996

SEQ ID NO: 238453 - DNA, 624 bp, Klebsiella pneumoniae; identical to SEQ ID NO: 195702

SEQ ID NO: 238454 - DNA, 870 bp, Klebsiella pneumoniae
atgaaactcgttcagtacagtattcataaccgcagacgttacggcatcatcaaggagaataccggtattattgatctctttctgagactgggggacagatatccgaccctcaaatccttgctggaaaataatgccctgccggaagccgcaacatttcggtatgacaatccggatcacgatattcaggctataccgtttcttcccgtcattgatgagcctgggaaaattatttgcgcaggtatgaactacgcggaaaagcgaaaggaatttaatgaaataaatccggcacccaccttatttattcgttttccggatactcaggtcggtcataattcggtattgctcaaacccaataacacttgtgagtttgattatgaaggcgaacttgctgttgtgataggtcggcgttgttcacatgtttctgaagaacaggctttaagcttcgtggccggatacagctgctatatggatggttctgtaagagactggcagcacacctggtatacagcagggaaaaactggccatcaacgggggcttttggtccttggcttgttacggcagatgaaatcccggaaccacaaaatatacagcttgttacccgattaaatggtcgcgaagttcagcgggactccacggcgaatatgatacacagcatcgcatttctcattgcttatatcagcacatttaccgttctttctgccggtgatgtcattcttaccggatctcccggtggggtcgggaagaaacgtacgccgccactttttctgcatgatggtgatgttgtggaagtggaaattgagcatatcggggtactgcacaatgtcgttcgggatgcaggatatacagatgctgcggctatgctggtataa

SEQ ID NO: 238455 - DNA, 1494 bp, Klebsiella pneumoniae; identical to SEQ ID NO: 13713

SEQ ID NO: 238456 - DNA, 222 bp, Klebsiella pneumoniae
atgagtcttacgtatgaagaagctcttgaagcgtgtaaaaatggcgtggatatcacccgaccgacctggcccgtagggcagcacattacatggaacactgatatttcagagtttcaccctgagccgtcgattgattttgttgatcaggccggggctcagatgtcattcattccagctgacttcgacgagatggcagatgactgggttgaattcttggaatga

SEQ ID NO: 238457 - DNA, 243 bp, Klebsiella pneumoniae; identical to SEQ ID NO: 23436

SEQ ID NO: 238458 - DNA, 255 bp, Klebsiella pneumoniae
gtggtatcaatgttcagctcaatgcttccagaacagtcgcgcgtaatacatggcccatttggttttggcatggatactgagattgaatttattaagaagcgaaacagtgctgacgaaggttatctcgttatttttcttaatcagcaagactcttactcatggttaaaacttatcgcgggtgattcacctgaaaaagcaattgcgtacaactttgacttcatccctgatctggagagtgaacatgaaactaaatga

SEQ ID NO: 238459 - DNA, 1053 bp, Klebsiella pneumoniae
atgcgtatcgaccgacgtctgagcagggatgtactcaccaagcatcagctctattttattgaatgctggtccaacttctgccataaaaacagtccggatactgaccgggtcgggtacagcaatccactcagtactatccgagaactgctgtttctttacgaaatggaagatcgtttcagtgccgataagaaaagactccgggttgccactgaactactcgagttactcgaaaccgatctcgttctcaggagagaggcatttgaggacatccccgctcaactggtgagtcttctggacagagatttactggttgatcccactcgcagcccggtggaaaaacgacctcgtcttatctgtagcctctgtgtacaactggcggatatcatcgaggccagttatatcactgaggctcttgagatgcttgaacaggagttgtttacagacccccctctggatgaaaaccatgcgcgggatatttactcactgacgaacggagtgatgagtttactcctcacccggggaatgacgctgacggaatgttacctgctgtacatcaatattttcagaaatgtgagccctgaaccagacgctttccgggccgcctttcattcgttccggcagaaactggtcacgcctactcgggatgtgacagttcggatgtttatcaccagtgagaaactgcacaccctgcttaacacgcaaggacccacattacagttcaatggatgtgtgttccagccacttgatgaagcccggcaacgcttctccctcgctgtcgatataccggtttgctcaatgtctgacacgtctgcccgtaacatggccggtcagatgcttcgtgaatctctggatgtcattgcctacatggtgggtaagggagatatcaccgtccagaaacagttcatgataatccgggatgaagacgaaaccgaagtgccgcgcttcgataatgaaatcgaggcaaacgcggaccggttaacggacgaggaatttgcgcgcttcatggtggcgatgaacagactattcgtaagcgtacagcgagaaccgtattga

SEQ ID NO: 238460 - DNA, 588 bp, Klebsiella pneumoniae; identical to SEQ ID NO: 101480

SEQ ID NO: 238461 - DNA, 249 bp, Klebsiella pneumoniae; identical to SEQ ID NO: 101481

SEQ ID NO: 238462 - DNA, 192 bp, Klebsiella pneumoniae
atgacgaaacaacagaaaacagcgctgaacatggctaaattcatccagcatcagtctctgctcctgctggagaagcttaacgagcttgatctcgatgttgaggccgacctttgtgagaaactccacgatgatgcggagcatcttttccgtacactgtcctcgagactggatgaattacaggatgataattga

SEQ ID NO: 238463 - DNA, 423 bp, Klebsiella pneumoniae
atggccagagtgtctattagtgaagcggcacggcttgttaaggttagccgtcccacaatttacaagatgattaacagtgggaagttaagttacacctctgttgtaaagcacgggaaggctattaaagttattgatacttcagagcttattaaagtgtttggttctcttgatggtgtcatcgatactgtaaaatatgatgtaaaaagtgacgcagaatctacaagtattaacagcgttggtttacatgatttacaacatagaatcgctctacttgaagctgaaaacgatggtcttaaaggggctgttaaggctcgagatgagcatattgattcccttcgtcaggctatgcagcttctggagcacaagcgcgagccttcttcaccaccccattccccgtggtggaaattctggaaaaaatcctga

SEQ ID NO: 238464 - DNA, 657 bp, Klebsiella pneumoniae; identical to SEQ ID NO: 224605

SEQ ID NO: 238465 - DNA, 1320 bp, Klebsiella pneumoniae
atggttctggtctttttcgtgatgctgcttttccttcacaagatacgctgtacgcttattcctgcgattgtggcacccgtggcgctgctcggcacatttaccgtaatgctattaagcggttattccatcaatattttaaccatgtttggaatgatactggccatcgggattattgttgacgatgctattgttgtggtggagaacgtcgaacgactgatggaagacaaaaaaatgtctccacaggatgcaacgcgagaagcgatgcgtgaaattacgccggcaatcattggtattacgctggtgctcactgcggtgtttataccaatggcctttgccagcggttctgtgggtattatttatcgacagttcagcatttcgatggcgatatccattttactgtcggcattcctggcgctgacgttaacgcctgcgctttgtgcaaccctgctcaaaccacatggtattcatcagggtaaaagcagcgtattttcagcgtggtttaacgctcactttcatcgcctgacttcgttttacgccactggtctgggatttgtactgaagcgtactggccgtatgatgatgatctacgctgcattatgtttggcattgtttgccgggctgtccaccttaccatcatcatttttacccgatgaagatcagggttattttatgtcctcaatccagcttccttctgatgccacgatgcagcggacgcttaaggtcgtcgatacatttgaagaggagatcgcccatcggcaggcggtagaaagtaacattatgattctgggatttggtttttcagggtcaggccaaaattcggccatggcattcaccaccctcaaggactggagacaacgcaaaggaaccacggcacaggaagaagctgaccatattcggtcccaaatggcaaacgtgccggacgccgtaacaatgagtctgctgcctccggctatttctgatatgggaacctcatccgggttcacttattatttacaggacagaggggggaaaggctatcaggcactcaaaaaggcggccaatgagcttattgtacaggcaaatcataatcctcaccttgccgatgtctatattgatggacttggtgagggaacaagcctttccctgcatgtcgacagggaaaaagcggaagccatgggggtttcgtttgatgaaataaatcaaaccatttccgttgcagcaggttccaattatgttaatgactataccaataatggtcgggttcagcaggttatcgtccaggcggatgcgccataccggatgcagcctgaacaacttttggctttgtctgggctttgttga

SEQ ID NO: 238466 - DNA, 141 bp, Klebsiella pneumoniae; identical to SEQ ID NO: 102393

SEQ ID NO: 238467 - DNA, 570 bp, Klebsiella pneumoniae
atgtttggccgtatgctggcggaccaaccgacctataacgttgaagctgcctgccaggtggcgcacgcttttggcgttagcgaaaccattgttgaggacgatttctttacggcggtggatgacttacgcgcggcctctgaagacgccggcgcgggccacttaggggagacaggttttggctcggcgctgttttatacctatatctgcattgataaagatctgctggtgaacaacctcaacggtaatgaagaactggcgaacaaaacgctgcgcgccttcaccgaagcggcgctaaaagtctctccaaccggcaaacagaacagcttcgccagccgcgcctatgcgtcctgggcgctggcggaaaaaggtaccgatcaaccacgctcactggcggcggcattttatcagcccattaatggcggcgatcagctggatgtcgcggtgcagcggattactgtgctgcgggaaaatatgaataccgtctacgggcagcagacggcatttcagcactttgacgtgatgaataagcagggaagcatgaatgacgtgcttgatttcatctgcgcgtaa

SEQ ID NO: 238468 - DNA, 615 bp, Klebsiella pneumoniae
atgcgaaccagccaggttctgccacggggacagcagttctacggcgggactgcgctgtattttgccctgttctgcgatgtcgccggtcgtgatgaacagacgattgaagccttctgggccagtatcgcgcgtttctggggagcctggtatcgtcggcaggattattatcagcagatcaaccagctgcgcggagtcatgggcaaggcgccggcgaatggtctcagcgaggcgcatgcggtgggcgtttacagccgggtcgcagtgtttcaggatgaaagcggccagaaaggacacagtcaggtgctgctgacccttcgcacagagaatacgcaggcgctgccggcaggcgagttcgatcagtttgagttgccgttctgtaatggtcacattctggtgcctgatccgggctatggcgcccccgttgtttttctcaacaatgtactcggcctggggttccgcttccgggaaggaacctgctccatgcactgctacactgtggaggacgcccggctcggggctacccagacactgacggaagtggcggaagcgctcgtcagtaatgttgatgctcccctgcgggcctacgctgcaaccatcccggtaaatcagaggtag

SEQ ID NO: 238469 - DNA, 537 bp, Klebsiella pneumoniae
atggcttttttagattcaatgaaagtagccgcagccgttggtttgctgatgcagcagacaacagctttttgttgccctaaccaaatgccggcggatagtggtgcatcaggtggccgatatgtttctattttaagaaacagcacgttgcaacctgagcaaaaagtgtcagacgcaattcaaaccattgatggtttgagagaaactttagaaaaagcctactggatgctttctaaggctggttacgatcatatccataaggtgatatctgagcttcaacctgaaaccgtgagtctttgcgaactgcagttgcgtggacttgagggcttggtaaaaaatgtttatcgcgaagtcagtgctgagcaacgagaagccatgcgccttacactacttaccgtagcaaaagcgcgttctgcagcatctaacctgaaccatctcattcaccagatgactaaagagccggagtcgtatgtcagtaacataagcatggatggactgcgccaactggccgatcatggcacctctgttatgattcattga

SEQ ID NO: 238470 - DNA, 231 bp, Klebsiella pneumoniae
atgagccgtcgcggtaactgtcacgataatgcggttgcagaaagctttctacagttgctgaaacgcgaacggataaagaaaaagatctacggaacgcgggaagaagcccgcagcgatatctttggttacatcgaaatgttttataacagtaagcgtcggcatggttcgagcaatcagatgtcaccgacagaatatgaaaacgagtattatcaacgactcggaagtgtctag

SEQ ID NO: 238471 - DNA, 279 bp, Klebsiella pneumoniae
atgcgttccagaggaggagcgtcactcaggacccacgaaggctggctgtatcttgctgtggttgttgatctattctcacgcaaaattatcggctggtcaatacaatcccggatgacaaaggacattgtcctgaatgcactgctgatggctgtatggcggcgtaatccccaaaaacaggtgctggttcactcggaccagggcagtcaatacacaagccatgagtggcagtcgttcctgaaatcacaaggcctggagggggagcatgagccgtcgcggtaa

SEQ ID NO: 238472 - DNA, 1065 bp, Klebsiella pneumoniae
atgggttgggggacatggacttttattgatccagatcggcttcttccacataatttgtctcgccatattgggtttgattgtcatattggagtctcaaaaccccatattattcagcatattgccgaatctatttatccgcatgagcccctccctcaggcgatccataaaagtattcttgatgacgatgatgatattgccaaggcagtgaatgaggctgacttagttgtggatgtcagcaccacctttgaggtgccgaggactctagcgttaaaagatgatatacccagaatagttagtctgtttctgactccatcaggtcagtctagcgtgatgttaatggaggatatagacagacaatgccgaattgatgcaattgaggggcaatactatcgggcaattttgagcagtgagtggggaagtactcacctacagcacaattatggcgatcgttgggtcggtggtggatgtcgggatatttctgtacgtatgtccagtgaatgtattcatgttcatgccggtatcctctcacgccaacttcgccagactgcactcaaaggagatgctcgattgtgtatctgggtatctgatgaaatttcaggcgcgatggatgcacatgaaattgaactccattccgtggtatctataatttctggcgaatgggttgttaaatatgaccagggcttagcgcaaaaattgcagcacacccgtttacaggcactgcctaatgaaacaggaggtgcaattgttggcataacagattttaagaacaaaacgattattctggttgacgtgttccctgaacctatcgacagtaaatcctctccagcctcctttgtccggggagaagcgggacaacaagaagcattagaacgggttcaccagttgaccgctcgtgttgtcgattatgttggcgaatggcactcccatcctcaaggtttttcagcaaaagccagtaatgaagatgataatttaatcaaaaaattacatcagaaaatgcgtgtggagggtttacctgccgtgatgctgattgttgcggaaaacgatatcaatattgtagtcagataa

SEQ ID NO: 238473 - DNA, 327 bp, Klebsiella pneumoniae
atgccggcaatactggtgctctttacgcagcttttcagaggcccgctcagcgtgctgacagatagcctagtggagcgactcgtactccgtgatcttcacaccaaaactgcgactgcagacaatttgctgtttcgtcggaggggcttcctcaagcgaaaggcagctttcccgttcagttcacgtaccgttcgctctaggaccacagaaaaatttttgcggatgaaggtcgagtttgtcctgcgcatcttccagcgacagaaaccagtgaatgttcaggcattcatcccgcagactgccgttaaatgggtgatgctgccaacttactga

SEQ ID NO: 238474 - DNA, 126 bp, Klebsiella pneumoniae
atgaaaaagacccgctataccgaggaacagatagcatttgcgctgaaacaggccgaaaccggcactcgggtggaggaagtctgccgaaagatgggcgatacaggtgggaccgtggtcccaggctga

SEQ ID NO: 238475 - DNA, 465 bp, Klebsiella pneumoniae
atgaacccgataattacggcacatcaggaaatcgttatcgagaactcggttcgctatatcgagttactgaaatcggaggcttctaaaattctggatgaatactgggaggcctggaaggcacgaaaccaactgatatcccagaccacgtatgcaaacgggggaaggtttatacctggtcgttttgctcctgtgctgagaaaggttggatcgtcgcaaaaactgacaattgtatggaaagatttttcgcctaggttcaaaaacaaaattgaacatcatggcgtggttgttaaacctaaactcggaggatacagcgttagttgttttaaaaatgctctggactgggaactggagatgatccaggaaacagaaaacaaaattaaaccaatccgtgatctcctcgcggaattccatcaacgaaaactggccgacatcaaaagactggaaaaactgaagaggttaatataa

SEQ ID NO: 238476 - DNA, 321 bp, Klebsiella pneumoniae; identical to SEQ ID NO: 233321

SEQ ID NO: 238477 - DNA, 255 bp, Klebsiella pneumoniae
atgtcgcagtggaatattgcctctttttcaaaagaggagcaggacaaagttgccgttgataaggtggccgctgctgtcgcctggcaggaaaggatgagcaagcccgtcgtgccggaacttgttgagcgggaacagcctgagcacctgcgcgagtatttccgtgaacggctccgcgtacatcgactgaacagtcagcagctgccgcgcgcaaatgcgcccgaatataataaacccggagatgagcagcagaagtga

SEQ ID NO: 238478 - DNA, 684 bp, Klebsiella pneumoniae
atggttagcgcggttgtttttggtatgtgttatgttacgcgatttaaaatcaacgctaaaaggttttttttgatggtcggtgctctactctttgttatcctttttttcagtattcttggagattacagacaaaaacttcatggtgattatgtcattaactatgcccattttgttggtgcatcaacagccgagggagaccacattagcgatgcgttattctggttatggctatatatagctagtccagtatataacatgttttacaactatcattcatataacgaattgctttctccttgctactctatgcttagtacgcagtgtcaggggtattttttgtcatcaaacatattaccgttgaccatttcaaagcttttaggtttacctttatctacagaaagactagtggttgagcatcttaatgtaagtacagcctatgctaggacaatactattatttggtgggtttggcatggtggtgtattctataattcatgttgtattttatataataggaattaaattatgcaccaatgaactgagaatagtttttaacgtgtattattccgcgttatctttttttgtgattttttataatgttttcatttttcctcattttatcgctgttttgtgggttattattttaattgggtggttaaataaatataggtttaaacttcgatag

SEQ ID NO: 238479 - DNA, 144 bp, Klebsiella pneumoniae
atgtatatcggtttgccaaattcagacctgagtgaggaggcctataccttcactaatctggtcattaagccattgatggaatatacacgctggatacatcttttacctgcgtcggctttgttgaataaatcgaacttttgctga

SEQ ID NO: 238480 - DNA, 453 bp, Klebsiella pneumoniae
atgtttttggggggacgttgctacacggctaaacaactcgagaaggactatctctctgaaatggcaggttacagcgacgaccgctgggaagcgccgcaaagagctgcccggctggcggcagcggtaaaacgctacaaaacctctgagatgctgcgttttatttttgccaccatcgcgtatgatcccgacccggatctgaccccgcttgccgtgaggcggctgtgtcaggccttgttcggcagaaccggtagccagtggcttatagtggaaattttcggggtgaagggacggcagcaccgcagcgatgacagcactccggaggccgttgaaaaaatggcaaccagatatcgtcacgccgcagggctgcactgggcggcaactctggcggaaattgagcgggtaaagcgcaactatcagacccaggttaaggcatccaggaagggagaagggtaa

SEQ ID NO: 238481 - DNA, 216 bp, Klebsiella pneumoniae
atgaccatgatgattgtgacccatgagatggggtttgccgcaaaagtctccgatcgtgtgctgtttcttgccgatggctgcattgaagagcagggaccgccggcgcaactgttccatcggccgaaaagcccgcggctgcagtattttttgtcgtcgtggagtgagcgtcagtcggggacgagattacctgaaacggcatttcaggagtcagcatga

SEQ ID NO: 238482 - DNA, 2346 bp, Klebsiella pneumoniae
atggccgaacttaacccgccactgggcacgacgacgccggaaattttcatggacaacgttaagcgcgctgatgaactggtgaacggtccagcggccaccgttcccgatcgtggcggagagccgctggacacctggcgcgagatgatggcgaaaaatgatgaggtgcggcagaacctcatccccctgagcaaacaatacctgacgctggcagccgcgcaggcggatatcgccaatatcccggttggctcgacaacgtattaccgtagccctgatgacagcgcgctggcccttgaggtgatgaacgtttccggtacgctgaccgcaaccggcaggagaatgccctctcaatatgccgtcgccaattcgtccattacttcgggcgatatttttagctcactatcaccgcgtggtgctgcgctgaatggcggctctgtcatcactgacgcatcgaaccgaattattgggctgctggttccggcgggctcaaccggcggatcatcgtatttctgctctgatatccctgctgcagcgctgcgtggccgtagtgttaaaatcacccaaatatatacggtatcagacagctggctggtcacggccagtcttaatgaccttaaggctcagtacagggcaggcagtacagtttcatcactgttggtatcagaatattcaatcacccagagcggaaatgttgtcacacaaacgggtaccgtcgtcgttcctgccaatgctgattacatcggtcttgctattcagtacgcatccaatgcttctgctaaatctgttgctctttctgtgcaactggctcaaacaagctacatcatgctcccggtatcgggcagcgtcgttacgcagaatgacgggatgctggcgctgcgtctcgcgccgatatctgctgctgttgccgccgcacaggccaccgcgaacagcgctttgctgacgtcagggaatgtatggggtgacaatgtttcggccaaaggaaccggatcggcgctgaatggcacagcgaccatccaggactcatccggaaatgttatcggtctgagtattcccgctaacgctggtactgcgcagggaagttacgtcacatcctggctgagcgcagagggtctgtccgggcatacgctcaatatcaccgcgacgtttaccacctcggcagggtggagcactgacccggcaccaaatacactggcactgcaggttcggcgcagtacgggccaggtgaatattgctgtcgggagtggtgcaacgcgaacaattacacagaatggcaccacgatgaccatcgccattcagtacacagttgacccggccgacattgatatcggtgtgtgctaccaggtggcgggcggtaatgccgctaaggcatacgaccgcagcatgcaggcgcagtccatatcgtacacggtggtgccggctgcgggtgaaacactcaataaaacgatgctctcaatatttattgatgaggctatccgccagctgcagaacggcggcgagacaatcaccgttaccgtgaaaccatccggcggcgattatacgcatccgaaactggcgctggaccacataacggatgctacagcactgaagcgatatgttatcgctgtctatccaggggaatacaccggctatgccgaatgggccactaaaaactatgtcgatattattggcatgggccgcaaacaggaaatcattgtcagctatgacagtggcgatagcgctgaccaggcaacggtgcggggtacatccctgttctggatggcctcggaaactctgctcaaaaatttgacgctgaaaatcaaaaacgggcgctactgtatccacatggagggcaacggtgccgcgcctgatgtcacgatggctatcgaggattgctctgtcattcacgaggggaacgccagcaatacatactggtggcaaccgtcgcaatacggtgtaggtgcgggattatctgaaggaaacatagtacgcttccgaaacagttattttgaagggcgtggcggcggttttagtttccatacgccgaataaccgggtttcgtatacgaaaccgatctttgttgatatagagggctgtgtgtgtgtaaacgcccggacgctgtctaatactggctatccgtacgaggcggcgctttcgataaagccaatcacaaaaggcgctgccgatacctgccgactggtgggtaacacgttcattaacgggaaggtgtactactcgacgggtgaatggctggacactgcagataccacaacaaacagggctcaggttcaggtgtggggacatggtaacgccgggtttgagttctacagcgacgtaccgtacaccccaaatatgacagggctaaatagttaa

SEQ ID NO: 238483 - DNA, 3066 bp, Klebsiella pneumoniae
gtgactattcgattatacccgtcgcgtctgcctggtgagccgctggaaacgcatgaacaccgggatatgaccattcatgactggatgtctcaacacgtagaaaattaccgtaatgacatggtgcagcgcgttgcgttcgagattaacggcaaaccgatcccgccggcggagtggccattatgttttattagctctgaaagcgacgtgaaagtttatcccatcccgggtgagggcgtgacagcggcgacaatagctacctgggccgccgcagcgattgctgctgcatcggcgatatatgccattgtcatgatgtcgcagatggataaaagcgggttttcatcaagcaacggttcttctctggacctcaaccctgcaaaagctaaccaggcaaagctgggtgaccccattcgtgagctgtttgggcgctttcgtatctatcccgattatgtcgtacagcccgtgacccgtttcaattccgatgatcccacaatcatgaccgttgagatgttggtttgcctggggaaggggaacttcgcatttacaaatggcgatattcgggtgggttcaacacctgtttcagcattaggggattcgttcagccacaacgtttatcctcccggctccgacgtgtccggggatcggcgtagtgaaaactggttcaactcgaccgaggtcggcggcacgtccagcggcagcggccttgatatggcccagacatcaccaggctcaacagacatcaacgctgacagcatgacagtttctggtgagtcggtgacatttaacgggttagacgatggcaacgatgacgacgacgagggaaattcgctgccggcttcctgggttgagggcgccatagtcacgatcgtcgccccgatgaattatctcgtttcaacctcatcaggttacagcgttctggccagtaacacgctgagtgaaattattccctatccgggtatgccggtgaccctggggatcagcggtgctgaatacgagctggttattgcaacgtatacggcaaaacaggatgcaataccgggtacgggtggaaacgctgccagcctgagagcaaatgcctccccatcaacttacgattattccgccaccggccaaacgttcacgatcacctggcagggacacatatacacaatttccctcgttgcagactatacgaatatgtccggcctgctggcggtgataaacgaggggctgacggggtcaggattactggctcaggatggagggggggttgtgctgattgctgaggaatcgagtccctggctcggcggaaatattacctcatcagcgttgccggtaagcgtctttggcgacacgcctgcgtttacctccggtacggcgtccagcggcggtagtccggcgatcactgctaatgtttctctggcgtacggcagtgcggccggcgtggcattttccggtatccctgagggtacgcagcgactttcgctggctcaccgtggtaacgaatatcgtatagcagatgcagacggcacgaccgcaacggtccagcgtctgattgacggcgttatcgatccctcctggctagggttctctccgcgcacgatgatcgactaccaggctaccggtataaacgacaatgacacctggatgggcccattcctggtttgccctgaaaatgaggtggtgaatgccttcgaggtgaacttctcgttcccgtcggggatctgcggtttcgacagcaaagggaaaaaacgcattcgccactgcgaatgggaaattcagtaccgcgtctacggttctggtgccggctggacgagcaaacagggtgtttatgccctgaaaaacgtcaatggacttggctttactgagcggtttgaactatctgttccgggcctggtcgaggtgcgatgccggcggcgtaacgagcagggtagcaataatgcccgtgactctatgtactggcaggccctgcgcgggaggttactggcgcgcccgtcttcctatgccggggtcacgctaatggggataacggtcgagacaggcgggaaactcgcggcgcaatcagatcgacgtgtaaacgttgtggccacacgtatttatgacattggtgcaacccggagtatttccggtgccctgtatcacgtcgggcgctctctgggtcttgagatggataacgctgcgattgatgcgctggagcaggcctactggagctcgaactctgaaacctttgattttgctacgggtgacagtatttccgcactggagatgctgcagaagattgcggcagcaggaaaggggtattttcttctaaatactcaggctattgcgtccgtaggtagggaaggcatcaaaccctgggtgggcatgataacgcctcacgagatggaagaagagctgcagaccgatttcaccgcacccagcgacgatgattatgacggtgttgatgtgacgtatatcaacgggacgacatgggcggaggaaaccgtgcaatgccgtactacggataacccgacccctgtcaaaatagaggattacacccttgatggcgttcttgatcagaatcacgcctaccagattggtatgcgtagactgatgaaatatcggctgcagcgactggttcacaagaccactacggcaatggatgcgctgtgctacaacgtgggtgatcgcattgtcatggcggatgatataccgggcagtaacaccatttcgtgtctcgtagaagccatgtctacaactgatggtatgacaacgtttaccgtcacagaaccgcttgactggtcattcgaaaatccacgggtatatatcaggtatctggacgggaccgcctcgggactactggaggctactcccggtggcgattatcaggcatcagtgccgtatcaatctgagtttgaagatattttgattgatgatccaatgatcgagccacccagactgatcttctgtagttctgaaaaagatgtgtatcacgccattgtgtccgaagtcgtcccgcaggatgacgggacatgcgaagtcacggcccggcagtaccgcgctgaattttacgactacgacaacgccatataccccggcgacgtcgcgtaa

SEQ ID NO: 238484 - DNA, 420 bp, Klebsiella pneumoniae
atgctcaacattgataaatacctgactgtccgctggcagatgggcggacgcgcttttcctgttctcgactgctacggcattgtgcatgaggttcgtcgcgatctcggcctcactgagtggccagcatttgaggctgtgattaaagagcgcggcagcccggatatgggggagttctgcgagagtttcgcgcgagacctgacccagtgcaggccatgtcccggagcggtagccgcctgctatatcggaaaaatgatcggccatctgggggttgtcgttgaaatggaagggttgctttacgtgatcgaatgcaacccccgccgtaacgtcaccatattgcccctggcgcgttttgagcgccagtttctgaaagtggagtattacagtgactattcgattatacccgtcgcgtctgcctggtga

SEQ ID NO: 238485 - DNA, 483 bp, Klebsiella pneumoniae
atgacagtgattaatcgcctatacgcttcctccggggcggaagtaatcataggtactttacaggttaatattggtggtcagtctcattatttatgtgaaggctacgaagatattttagcaacaacagaagaaggcaacgctgtaatattcaaggcatgtgctatcgccttttctctgccggccagaaatgaggatggcacacagaatctaaagtttacgctgtgtaacattgacggagtggtatccactgctattcgttcagccattgataccattacgaccgccagtattattttcaggaaatatatatcgacagacctttccgcgccagctgaaccgccttatatcatgccggtcaaaggtggatcatggacgccactggcggtaaatattaccgccgggtttaaaaacgtgctcgattatgcatggcctcgcgatcgatacaccttgacgtatttccccggtctccgttacacccggtag

SEQ ID NO: 238486 - DNA, 3498 bp, Klebsiella pneumoniae
atggcaaccttacgtgagttaattattaaggtttctgcgaattcacagtctttccagacagagatcgctcgcgcctcacgtatggggcaagattattacaaaaccatgcagaatggtggtcggcaggctgcaatcacagcaaaggaaagccaaaaagcacttagcgaattaacggatggatttgcttctgctggacgagctgctacggcagcagcggctgcatttgctactggtaaattggtacagattgctgaccaatggaactcggtgaatgcgcggcttaaacaagcctcggtctctacaaatgattttactttatctcagactcgcttaatggcgattagccaaggcactggtactgcctttactgataacgccaatttattttcgcgcgctgcagcctccatgcgcgaatttggttatagctcggatgaagtgctcaaaataactgaagctgtatcaacaggactcaagctgtctggtgcgagttccgaagaggccggatctgttattacccagttcagccaggcacttgcccagggggtattgcgaggcgaagagtttaatgccgttaatgaatcaggtgatcgagtcatccgtgcactagcagcaggaatgggggttgcccgcaaagacctcaaagcaatggctgatcagggccagcttaccatcgataaagtcgtaccagcattaattagccagttaggtgttttaaaaggagaattttcctcgttaccaccgacagtctcggggtcaatacaaaaagtaactaactcgtttatggcctgggttggaggggtaagccaggcaactggtgcgacggacgccctttccggtggccttgatggattagcaaagacgctggattctcttacatcttccgccgtcagtggggctctaagtgatgttgctgataatatgtccttgattaccactgctgctggtggactagttggcatcggattagctcggtatctcggcgggattgttaccagtgcaaccagcgcaaccggtgctcttatttcagctgcaaaatcagaagttgcccttgctgttgcgcaggaaaaagctgctcaatcttccgttgctgcttcccgggcagcggtttatcgtgctcaacaagcgctccagagtgcgaaaagcactgatgtacaggcggcgcagctagaaagagtggtcgttgcagaatctaaagttactgcagcacagagcaggcttactaccgcgcttgctagcggaacggctacagaaaaagtacgcgcaagggcagcgctggaacgtgcgcaagctggccttatggctgcaaagaacgcggacgcccaagctattgcagaaaggaagcttgcagcagctcaagcaacacttaatcgaaatatttccgggcgaacctcggcacaaaataaccttaacagcgttacatctgtcggcactcggttaatgagcggcgcgatggggttaattggcggaattccaggcttggtgatgctgggcgcaggtgcctggtacgctgtatatcagaatcaggaacaggcccggaaatctgcacaggagtatgccagcacgattcaggatgtcagtgctagaacaaaaacgatggcacttactgaggcctcggacaacgaaaacaaaacgcgcaaatcactagaagaacaaaatcgcctgatatctgaacaatccagtaaggttaaatctttaaaagaagaaattgccggttatcaatatgtattggcgaatcgggggccgacaacgagcggtgggtttatgataaaccacctcacaagcgttgaaacagctacgaaaggattggctgcagcgactgaattgctggctgttgagcaagagcgattagctcagatggaggctaaatcacaggaaattcagcaggtgcttgagggccttgagcatcgtcgtgttgccctgatacgacagcaagccgcagaacagaatgtcgcgtatcagtctttgattatgatgaatgggcagcatacggaatttaatcggcttctgggactaggtaataatttgctgatggctcgacaggggttggttaatgctccaatgcgcatgccacaggctgatttaacatcccaacaaaccaacgctctggaaaaaagccgtcaggacctagaattatcaaagctcaaaggagaggtaagggaaagagcccggttaggttatgcagctgatgaattagggcttaaggatgaacctcagtataaaaccaaccgagacctgtacattaatcaggggctggcaaaatggcaaaatgatgaatccaataaaccaacccggaaagcgccaaaaagtgaagaggtaaaagcggctgaaaaaacagaggacgtttacaatcgactcattaaacagcagcaggaacaaattaccctcggtagtcaaaatactgaactggcaaaagtaaaataccaggttactcaaggtgaactggcatcgttgacacaggcgcaaaaaatggagttaatgcgcaacgcgactgcccttgatcatattagtgctgtggaaaagttaaaggatttgaacgaacaacttcttactccagaggaagaactgctcaagaaaactaaagaacggatcaagttattaaaagaggcctcacctgcaaccgctgtctacaaatcgactatggagagaatatccaaagcctcggttcaggatgcccctgatttctcaggaatagacgcctctgttggtggtgctagtggggagttaattaaagttgcagatgctgaagctgagttagaaaagtggcataaaaaacaacttgatatgcaaacagaattactcgctgaaaaggaaatcaacgagcaaacttatgctgacagggtttcggatataaacaaaaccaatgcagataaactaaaggacattcagtcgggatatacatcggcgagtctctctatgttttctgacctggccgggcaatccgcccaacttttgcagagtattggccaagaggggagtattgcctataagacattgttctttgcaagcaaagcggccgcaatcgcgcaagccgtgattaacactgaactggctgcaacgaaggctatggcggaaggtgggcttatttttggcatccccgcagcgaccgccattcgcgctgttggttatgcatcagtggcgttaattgcaggccagtcgctggctggtatggcccatgacggtattgatcgcgtaccagaaacagggacgtggcttcttcaaaaaggtgaaagggttgttactgccagcacctcagcgaaactggatgatacgctctcaaaagttcagcaagccaggcaggattcgggcgctggaggctatatccatatccaaaactcatacaccggtaagcctgacgatgccactctggcagcaattgatcaacgcaacgaaaggctggtgagggatattcgcagagatatggcgcagcaagttttaaagccatcaaatgagtttggtcgcgctctccataatcgatacgtcagagggtataaggagtaa

SEQ ID NO: 238487 - DNA, 606 bp, Klebsiella pneumoniae
atgaaaaaaatactcttgggggcagtaattcttccgctgctctatggttgtgtagctgatatgtcacgggacggtgatcttagcttacttaacggtgtatcttacaaaaataaagggcaatacgagtatttaaaacaatactccaaaacaacaaacatacaaaatccttcaattgataaaataaaaatttgtgtgcttaggaatataactaacagggatgtaatgttaaatgattcatcaaggagttttgtcggtgcatataccggtaattattacaatataaactcatcttcaaaatcaaacggtggggatgtggtttctttgtcaggaaataacgcaattgttgttaatggctctacagattatttatttaactctgggataatatcagtaaagagagttgtcaggtttacgctggatattgttactgccaacaacaaagtttcctatacatttagcaatattcagcaggctcaaacggagacgggaagcataccaaataatggatttaatgatatagggacttggaaaggtgcatcccccgctcaggcaataaaatctatggaagagataacacatgatcttgaatcatgtttaaattcgtaa

SEQ ID NO: 238488 - DNA, 405 bp, Klebsiella pneumoniae
atgtcaaaacagaatcttaaagcgctggcactggccccgatggcgggctttcgcaaaaagtcagtaatcgttccggagtgggaaaacgccgaagttatcattcgtgaaccatcggctgaagcctggattcgctggcaagctatcgccagtccggaagcacaaaaaccaccagaagggcaggaagcgcaagaggcgacagagttgaccccctcagagcgtgcttttcgcacgatgcgggctgatgtcacgctcttcattgatattctgctggataccgatctgcagtacgttttcaccatcgatgataccgagcaggttgaagcgatttacgggcccatccattcccgactactgaaacaggcgctcgatcttgttcatgacgcggatgatgccaaagcaaagtaa

SEQ ID NO: 238489 - DNA, 333 bp, Klebsiella pneumoniae
atgacggtaatagacactgaaacggccatggaacatctccggctggatgatgagattgataaaacgatggtggaaggttatctggcagcagcagaggatgctgctatgcagtttttaaaccgtcgcttttatgctgataaggttgctctggatagtgccattgagaacgaaagcgccggcgagcggccaattgtcatcacgccatctattcacagcgcggttctccttatccttggctggctgtatgaaaaccgcggggacgacctgagccatgatttccctggtccagcgcgttggttgcttaatccctatcgcatagatatgggtgtttag

SEQ ID NO: 238490 - DNA, 252 bp, Klebsiella pneumoniae
atggccaggaaaaatgtggctgaatctactgcatcagctgatgacaacttatcacctgtacccgattccgggactattcaggttcaacctgtccggcgttttatggatggcgatattttcagaacgccaatcgatgatccttttcacgtttctcgcttgcgtgctgccgagctcagaggtaacgggctggtgacgatagttggtgaagtccctgataacaaaatggaccgcgcccccgaaaccaaagggtaa

SEQ ID NO: 238491 - DNA, 237 bp, Klebsiella pneumoniae
atgcgcctgactgttcttgatgacgatccgggcgaacgcatctaccccggacgcgagcgaatcacggtttatctcaatgatgctgaggtaaggtacgttttctctgctgacgatgataaaggtgaggtgattgcagctgtgtttgataaccgcggtcatgtcactgtcgagaacggcgaggtgaagcggcagatattttacggagcagtgaggatagagcgatcacctcaccaatag

SEQ ID NO: 238492 - DNA, 423 bp, Klebsiella pneumoniae
atgactggtaaaactgttgatttagtttttaatggctactggcgcgaaccgaacaagggaaatgtcccagcgcagtcgggcatttactgcgtgtacacttgtacgccggtgaccaaggatggaaagaccacactaactatccataagttagtctatattggtgagtctgctgatgttcgattaaggctggcatcgcacgaaaaacttaccaaatggcaaaagcacctgaaggacgaccagcaactgtgttactccttcgctccaattggttcggaagaccgtgtacgcacggaggccgcgatgattaataagcacacgccgcctgaaaatagtgagtacgtgggggaatacccttacaacaaaattacgattaacaactccggcagggctgcatccttgatgtcaacgctcacagtagagtga

SEQ ID NO: 238493 - DNA, 225 bp, Klebsiella pneumoniae
atgactgtacgtgcaaaatttcaatgcaacagcattcagaaatcacaggataactctaccgctgttgtccatctgatcgcagtgactaccggcagcactgagaacgaaagttggtcgaaatatacccctagcgggcaactccagatggtcatctctaaccctgcggcagcagagcagtttgaacagggcaaagagtattacatcgacatccagcccgctgagtga

SEQ ID NO: 238494 - DNA, 279 bp, Klebsiella pneumoniae
atgaccacgatggaaatcatcgtaggggcaattgctacggtgctggccctgatatacggcgcatttcatctcggcaaaacccagggtaaaaatgtcgccgatgccaaagccgagcagcagcgcaccgaagagaacgccgccgccaccgtcgccgcggcagaacgccgtgctgaagttactaaaggggccagcgatgtacaggaagacgttaagcgtatgggcaatgacgatgttgatcgcgagctgcgcgaaagatttacccgccccggtggtggttga

SEQ ID NO: 238495 - DNA, 237 bp, Klebsiella pneumoniae
atgcaattaattgaaaactggaaatcagcctggaaaatgtggtccgttcgcattctggctgtactcgccatcgtggccacttcgtgggccgcgataccggatagtgtaaaggcgttaatcccggatcagtatctgggctacgtcgttggttttgtttctgtctgcgctgcgattgcccgcatcattaagcaatttagcctgaccgacaacagcaccgatacgagtcagcagccatga

SEQ ID NO: 238496 - DNA, 630 bp, Klebsiella pneumoniae
atgaatcaatcacaatttcagcaggcggctggtatcagcgccgggttagctgcgcgctggtatccgcatatcacagccgcgataaaagaattcggcatcacttcaccggctgacgtggcgatgtttattgctcaggttggccatgaaagcgtcgggtttagtcgtttgattgagagtttcaactacagcgttaccgggctggcgggatttgtgcgcaccgggcgattgacgcaggaccaggccaattcgctcggccgtcggcagggtgagccgtcgttaccgctggtgcggcagcgggcgatcgccaatctggcctacaacaaaaggaacggcaacaaaggccctggtgatggttggctatatcgtggccgcggccttatccagatcaccgggctgacgaattacagggattgcggaacgggtctgaaaatcgatctggtagcacaacctgaactcctgacccaggacgaaaacgcggcacgtagtgcagcctggttctatgccactaagggctgcctgaaatattccggcgacgtggtccgggtcaccctgattatcaacggtgggcagaacggcattgatgaccggcgcgaccgtttccttaaagcaaaatctgtgctggtggtgtga

SEQ ID NO: 238497 - DNA, 396 bp, Klebsiella pneumoniae
atgtccgatcctttaactggtaccggcctgatttttggaggcgggttaattggttccatcgtgtatggcgttatcactcataccgattttggtgtggtatttggtgccttcggtggcgcggtgttttatgtggcaaccaccgcaaatctgacgcgagggaggcagatagcctacttcatgacatcgtttattgtcggtgtcctggccgctggactattaggctcaaaatttactacctggacaggctatacagaccggccgctagatgcactcggtgcggtggtggcatcggctatcaccatcaaagtactgactttcatcaatagccaggacctgagcagcctgttcggattactttcccgattaaggggaggaggttcgagtggtgataaatga

SEQ ID NO: 238498 - DNA, 153 bp, Klebsiella pneumoniae
atgatgcgcaggctgtttttctgggtgctgtttaccgttctgctgctggtggcctggcgcctggccggcatgctcatggatatggtgctgctggtggttatcgtcgctgcgctggtggtgtgccggcgatggccgtttaaaagaaaagcatga

SEQ ID NO: 238499 - DNA, 759 bp, Klebsiella pneumoniae
atgaaacttgaatcattaccgaaattttattccccaaagtcaccaaagcttaatgatgaaactccggctactgggggcacttctctaacgattacggatgttatggcagcgcaaggcatggcgtcagcccaggctcgatttggcttcaatttgtttctcgcaaaaatgggtattcaggatcccgagctggctatcgagcaactaaccagttacgcgatgacattaaagaacccagtaatgtccaaactttccgaaagtgttcgtattgaaatggcttcttgcttagcaacttttgctttcaatgattatgcgcgttcagctgccagcaagagcacatgcccacaatgcaatgggcagcgagtcattcgggaggaaaaggacgttgttaaacacccaggagtgaaaggcatcccacctacgattaaacgtgaagaggttgagtcaacatgcagtcattgcgcagggaagggctggatcagtacagcgtgcagggactgccgtggacgcggcctcgtactcgataaaaaacgcactgagttgcataaagtacctgtgcaaaaattgtgtggacggtgtaatggcaagggttacagccgcttgcctacgacactggtaaaagatcgagtaatacggctggtacctgatatgaccaattatcagtggtatagcggatatgccgaggtgatcaatattctggttactaagtgctggcaagaggagacgttcgctgagcagaaattgaaggaagtgacacgatag

SEQ ID NO: 238500 - DNA, 1059 bp, Klebsiella pneumoniae
gtgcgagcgttgcttactccggaaattgtgccacgtctcggcgttgtgctgtttaagcctgggcgagaactaatgcatctttttgctaacggtcgtgtcctgatagagcgtcagcctgaaaggatgaaacatattccaaccggccggatcccggatgcacgtcagcctcttgcggatcttgatattcttcgcttcttcatgagagatgaaagggtcattaatgctgctggtggcattaacgcgcttgaagcatggctgatgcatcacgttaaacggtgccagtatccacattcacattaccatcaccatgaattcgtcactatgcgccatcctcctggcgcattagttgtttgctggcattgcgataatgagttacgtgaacaaacgacggagacgctctccgagctggcctaccagaatgtggtccagtgggtaatagataccgtgctgatcggtctgggatacaacaaagagcgcgagttatcaatggctgagctttgctggtgggcggtcaaatccggcattgcagatgcgattacagagacgatggctcagcatgccttaaggctacccgtagagccttttctctcggtctacaaggaaagcgatatcgtcccgtcatttcccgcggccgatatgctccaggatcttgttgagcgcgcctggattaaagacgacgccaggtacatagatcccgagctcccgcaagaggtgcaaccgattctgagtcttagaattgatcccgaaagccctgagtcgtttatgttccggcctaagcgtcggcgctgggaatgtccgcaatatacccgttgggtaaaaactcagccatgtgaatgctgtaggcaaaccgcagacgatccacaccatataatagggcatggtctgggaggtaccgcaacaaaggcccatgatctcttcgtgataccgctgtgcagagtgcatcacgatgaattacatgccgacgtctcagcgttcgaacagaaatacggcactcagttagagctgtgggcccgttttctggatcgggttatgggtattggcgtcattttaaaagcatga

SEQ ID NO: 238501 - DNA, 447 bp, Klebsiella pneumoniae
atgctaacccaccttacccacaaagtggcggcgtacagtggcctcaatcgtaaagacaaagagaccctgatcgaaattatccgggaaagcgggatgctctgcgtaatcgatgatggaaggtccacaaccttgcaccacccgaaatatggccaccagtctgtggcgccagttatgacacctcctcagccgacgatggaatgcaaaatgaataaacagatcgaagtaaccccggaagcattacgtaaacaggctgatgccttgatcaaagcggcagaggaagcggagaaaaaagccggggatcgtgcagaaattaagaagcaactcgaccccttgaagttggaaattcttcaggcttacggaatggccagcaggaagtttgacgagttcgtagatgctatggctgaagttggaaaagccgtgcagaagctaaaagatctgacggtttag

SEQ ID NO: 238502 - DNA, 399 bp, Klebsiella pneumoniae
atgaaatttttacttccattcccgcccagcgtgaatgcctactggcgatccccaaataaggggcccgcaaaaggcaaacttcttgtcagtgcggcaggccgcaagtttaagcatgcggtacgtgtagcggtcattgagcaattgcgaacaatacctaaaccttcctcggcgccagcaaccgtagaaataatgctatacccgccggactaccggcggcgagacctggacaactataacaaggcgctgttcgacgctctgacgtttgctggtatctgggaagatgacagccaggttaagcggatggctattgagtggggtgaaaacgtcaagggagggcaagtagaaatcacgatatcggcgtatgaaaaaacgctggatgtttgttcagtggtaggttga

SEQ ID NO: 238503 - DNA, 474 bp, Klebsiella pneumoniae
atgatgaagttaacactgaggcagcaggaggttctgaacctcctgatcgattaccagcgtaagcatggtttccccccgaccacctacgaactgaccggcatgctggggtgccggtcccccaatgcggcggcaacccatctcaaggcgttggagagaaaaggggccatcaagattacccgcggggtttcccgcggtatcagcatcaccaattcgcttttaaccagggaggtatcagttaacctcaacagcatcgtaaaggtgaggctttatgacgtagccctcaggcatttgaaaagccaacacgacgaaaatcgtgctcgcgcacctggaatatttggtgattttgtgccgccggcgacagacgacgatggctattcagcaatgacgctttggagtctcatgtcggacctggggcaactctgctattgcggtggcgacgtgcctttcgaactaaaaatggttctggaggattaa

SEQ ID NO: 238504 - DNA, 132 bp, Klebsiella pneumoniae
atggagttgttccatcaaaacaagctgaaagcacatattaaccagctctggctggagcgtatgcccaccagtgaaatcatcgctattgctggtggactggttgaaagcatgcagggggtgagccatgcgtga

SEQ ID NO: 238505 - DNA, 441 bp, Klebsiella pneumoniae
gtgaatctggatactcaagaaatggtgacggcagaagagccaataatctccctgtactgccaggcgcttaatgatctgcgcaaaatgccttttcacaaactgaaatgggtcggtgaccagtggcgctcgccggatgagctgtggtggggtatcaacgcgctgtttgggccgtttgtccttgatctgtttgccgaggatgacaacgccaagtgcccggcttggtacacctctgaaattaatgcgctgacacagaactggtcagagcgcctgaaagaactcggcggcgcggcctttgcaaaccctccctatagccgatctcaataccatgaaagccaggctgtcaccggaatgagaaacatcatggcccacacgttagcaatgcgtgaattgggcggtcggtatgttttcctgatcaaggcggcgacgggtgaagtctggtga

SEQ ID NO: 238506 - DNA, 462 bp, Klebsiella pneumoniae
atgattattgcgaaatcggcattcgagtttatcgagaaaaaccctggggtgatgatgcgggacatcattgcggccttccctcagtgcaaccccatgtcagtgaagaacgcggtacaccgcctgtattacgagggccgtctggcgattgcccaaacgtcgagtgtatttcgttatcgtgtcgccggtaaccctgacggaaatgaccaaatccagccagaggatacctcagaagcaatgcgcaatcttgaactggtggcgaggagcatggaaagccggcgctacttccgccgggcggcgacggtctggcagcagctgtgcgattcaaactgcagcgttaaatccagagagcgttatatgcggatgaaaaatcagtgtgtgcgcaatgccaaaagtgggacgaatactggcggagtttccatgctggccggtcattactgcggaggtgacctgcgctccgattaa

SEQ ID NO: 238507 - DNA, 201 bp, Klebsiella pneumoniae
atgacacatatgaaagtgaaagagttggttgctgcagctaatgctgcggcacctgacctgccaccagcagcagcccaattaatgcgtaatatcgcgtcgaggctggatgtgaccttcgttgcccttaccgaggcgatggatcagaacacagctatggctgctttgctatcaaaccagagcggagctaacagcaatggctaa

SEQ ID NO: 238508 - DNA, 135 bp, Klebsiella pneumoniae
atgaactttgatcccgaacattacagcaagtataccctgcgccggtttgtggcgttgcttgatgttatctgctgggtggcgattgtcgttgtggcctcgggcattgtccttattgttaagtggtggacagcatga

SEQ ID NO: 238509 - DNA, 567 bp, Klebsiella pneumoniae
atgaacgtatacgaaatggaaggttttctccgtggtaaatgcttacctggtgatctcaaagtcaatgaatcgaacgctgaatacctggtgagaaaactcaatactgtaagcgaattgaaagccgagctaacggctgcactggcaacaatcgagaaatgtcgtgagctatcaggctgcccggctggcgtagacctgcaggaccatcttcggcagttagctgcggagaacgtgacgatgctccgcctgctgaccgatatcagcgagaaccacgtcgaatacttctctgagggcgaagacggcatgtttgcgggagtaccgctggattacgtatctgaaatcaacatgtacgtatctcgcgacgttaacgctgaaaacccgttccccgctaccgatagcatctatgcggctgccgaggcgcgtggagtaagacagtttgccgcagcaatggcagcacagcatgccgagtgtcaggctggggggtattttgaccgccaggtgaaggtttacgcaaaagcccaggagttggccgagtcttacctgatgcaactgtgcggggtggcaaaatga

SEQ ID NO: 238510 - DNA, 717 bp, Klebsiella pneumoniae
atgaaacgcctccagtttgaaaccgatactcgttttttgcttgatacagcatttcaccgtctggaaatcatccgtgatgatggtctgtatcgccacctgcgcatgcagcagccgggaacgtcctgctactactacgacgtcatcacctggcctggctatctaaccgtcaccggcgatatgggtacctggaccttctcccgcatagcagacatgttcgatttctttggtgcctgggaaggcgtgatcaacaccggttattggtctgaaaaactggaggctggcgctggatgttcagcgcgcgaacttctggcgaaagaatataaccacgaggcgttctgcaaaagcctgaaagagtcgctgagtgagtatctggaagacgacgaagaagcagagccagaagacgatcaagactgggacgacgatgacgacgatgacgacacgccagatagcgaaaaggctaaggtgcgcgaaatcgtccgtgaattgtgccgggctgagtttaacaacgactttgaagcctataacgctgtttatgatgccgactggcctgaaggatggagcgcctgggatatctgcgacggcctgacctttaagacgtataccagccatttccggtggattttattcgctatcacctgggcaatcagcaaataccacaacgcgaagcttgttgataaagcgatggttacgtttctggctgtgaagggggcgaaatga

SEQ ID NO: 238511 - DNA, 150 bp, Klebsiella pneumoniae
atgaccgagcaaaccatcaaacatccggccatccgttaccacggtggtaaattccgtctggcgccgtggattatcgagcagatgccggagcatgtctgttatgtcgaaccgttcggcggtgcagctggcaccaaggtagaggctgagtag

SEQ ID NO: 238512 - DNA, 291 bp, Klebsiella pneumoniae
atggcaacacttcaggaattaatcgacctgaccccggaacaacagcgggcatggaagcgacttgagcaggcagtgaaagatttcaaggctgctgggggtaggttctatagcgttctggatacgcttagtggttacaacggtgagcatgttgcctgcattgatgaaaccggcgattaccacaccgcatctgtatacatggcaagcattgatagcgccggttttaccagctttgcggacgactggcacggcatcacgctaaatgatggcgttgaagtggaggaggaccaatga

SEQ ID NO: 238513 - DNA, 204 bp, Klebsiella pneumoniae
gtgaataaccaaatccctgaagccttagccgtggcgatgattaacgcggccagagatatcacggtggcaaaaattaacgccaagggcgcgaggttcgatggttatagcggcaatttcaactggtttaatcagtcaatgaaagaggttcggaacgccgttaaagaggtgattcctgatgtcgcgcgggaggtgaaaggtgagtaa

SEQ ID NO: 238514 - DNA, 240 bp, Klebsiella pneumoniae
gtgagtaaagaagagctcttccaaaagctacaggccctcacaacagattttcactctcttgcctgtgagatggatattggcgacgatcgcattgaagccttcgaaatttatgaagttctgcgacgcattcaacgccgtggcgctgccggcgaaatgctggctgcaactaacccgcttctataccctggcgctccggatgatggggaattgatagactttatagacgaagatgaaggctaa

SEQ ID NO: 238515 - DNA, 948 bp, Klebsiella pneumoniae
atggtggttacacttctccacatagttttcattgtgacaatttcccttggcattgttgcattaaatacttcaaaatgtttcattgtgagattaggatttattttattacagcgttttgttacaggaatgattatgaaaagaatatggctcacactggctgttgtatttgctctaagtggctgtgagcagccaaaaatcgatacctcaagtgaggagagcatgaaggcctcaatccagaaggtaagagactcactgcctgaggataaacgcgcatcttatgatgatgctatcaaagtggtggctttcagcaatttgaacttaaaggatctgatgcaggcaggaatgacgaataatactgctggtattgaagcgcaaatgagaagtgcactttctgggaaaactggcgaagaagtcatcacttatgctgacaagctccgtaaggagcgggctgagaaagaaaagacacaagcccttcaggaaatcgaggagcttgaaaaaaaacagacagaagtacaagaaaacctcacccagcttaagtcattcaaagtcacacgttcacgtttttacttcgagaaaaaagaatacggacctgatcagccaattattgcgttgagtgtagagaatggaacgtcgaaagcggtatctcgtgcctacttccgtggggtaatttcaagtccgggtcgtgaagtgccttggtacactgacactttcaactataaaatttctggcgggctcgagccgggggaaaaagctgactggaatcttgcaccaaatccttactctgactggggcaaagctgatgttcctgcagatgctgttttcacggtcacagtgattcgcattgatgatgctcaagggaacccggtattcggtgatactgactttaccgagcgtgatgctagtcgcctcgcggaacttaaaggccgttatccgggcactaccccatga

SEQ ID NO: 238516 - DNA, 294 bp, Klebsiella pneumoniae; identical to SEQ ID NO: 194935

SEQ ID NO: 238517 - DNA, 282 bp, Klebsiella pneumoniae; identical to SEQ ID NO: 194934

SEQ ID NO: 238518 - DNA, 225 bp, Klebsiella pneumoniae
atgagccagattgatgccgttgttactcgggtgatcgagtactggccgattggcgacttctgcatggtggaagtggaggtgatggtcgatggccagtacctccgcactgatatctccgcgagcacaaaacgtgaggcccgcgctattcaacctggcgacaccgtgctgatccctgtcgtgagtcttgatagcgactttgccgacgaagatgaattgccattctga

SEQ ID NO: 238519 - DNA, 984 bp, Klebsiella pneumoniae
atgaccttatcggattcaatcagtgccatttcttcgccgggatcggcggatggtctctcgcgctgcgtcgcgcaggatggccagacagtcgcccggtatggacagcgtcatgcccctgccagcctttcagccaggcaggcaaagggcttgggtttgctgatgagcggcacttatggccctccgcacattggcttgtcggccagcgccgccctgtcgtggtctttggcgagcaatctggcagcgctgacgcgaatgactggatcgaccttgtacaaaatgacctggaaagcatgggctatgccttcggggcggttgcgtttccgtctgcgagcgtcggtgcgccgcaccagcgagatcgcgcttattgggtggccgacgccgatcgccagcaatgggagaggtgcggggaatttcaaccgacagggggggggtaaaccttcagacagcagcgttattagctggctggacaacaccgagcgcgaacgatggagtgcgcggaggaacggggattacctcgggaatgacgggcagcagccttacgcagatggtgaaaatggcggtatgtccgacaccgacggcaacggatggcaagggcggttatccgggcggcagagtacgggacgggaagttgtcaacggacaggctggatgtggcggcacagcttgcgggctggccgacaccgtgcgcgcaggattcagagcacagcccaaaaaatccaatgagaagaatagcatccaaagagaagaggcaaatcatgctagcgcactgcgcggggctgatgctgccggtccggttaacggcttctggcgagatgctgactggctgtactgccgggatggaaagtggcggccagttagacccggatcattcccgctggctgatgggattcccgccagagtgggaagagtgcgcacctacggaaacgctatcaacattgaagcggcgacagcgttcataaagtcctatatggcagcggcacaatga

SEQ ID NO: 238520 - DNA, 234 bp, Klebsiella pneumoniae; identical to SEQ ID NO: 194931

SEQ ID NO: 238521 - DNA, 2274 bp, Klebsiella pneumoniae; identical to SEQ ID NO: 194928

SEQ ID NO: 238522 - DNA, 186 bp, Klebsiella pneumoniae; identical to SEQ ID NO: 194927

SEQ ID NO: 238523 - DNA, 1158 bp, Klebsiella pneumoniae; identical to SEQ ID NO: 194926

SEQ ID NO: 238524 - DNA, 492 bp, Klebsiella pneumoniae
atgatcgcccccaccgctatcggctcgattattgcgaaatccaccgttacccaggtgctgcgctggtttggctatcgtaagaccctggtggggatcaccgtgtttattggccttatgatcgcccagttctcgctgcagtcgccagagatgccgctgtggatgcttcttctgccgctgttcgtgctggggatggcgatgtccacgcagtttaccgccatgaataccattaccctggccgatctgaccgatgataatgccagcagcggcaacagcctgctggccgtcacccagcagctttcaattagtctcggggtggccatcagcgctgcggtgctacgcttctatgaaggttttgataatgcaagcacggtacagcagtttcactacacctttataaccatgggcgtgataaccattatatcggcgctgatgtttatgctgttaagagcgaaggatggccgcaacctgattagcgagcggcataaacgctaa

SEQ ID NO: 238525 - DNA, 543 bp, Klebsiella pneumoniae
atgatcttttccgatgtgaatatctcaggctcaatgcccttcattgaacgtccagaagcaaaaaaacttttaaactgcctcaacaagggagataccgttgttatagcaaaattagacagaggtttccgagatactgctgattgcctgaacacagtaaatttattgaaaaagaaaaaaatatttctaaaagtattagatatttctctggatctatcttcgcctattggtgaaatgattctcactattatggcttcagttgctacttttgaaagaaaaagaatcggagagcgaataaaagacggttttagtgctggtcgcagcaaagggaaaaagtatggctataataataaaaatacaaaagcaggagtgataaagagaaactcaaaaagacaaatcgaaactctacaacggtacgaatcaatactggaatgccttagaaaattacctgctaaaaaaccatctgaacgagttatgcttgctcatttggagcaggccgggataccggtgagtagaaatactttgcgtaaggctttaggtaaatga

SEQ ID NO: 238526 - DNA, 534 bp, Klebsiella pneumoniae
atgaacttgataattgacacgaaagatgtatacaatcagtgcattcagtcaacaatgatgaaatatcgttcaattcagacgctaaagctctacaagaacgactacataaacttgaagaaaggaaagaagatgagtaatgaatattatttaaatgaacataattgtgaagaaggatgcccatgcgttcttattcgttctggttggaaagatgataaaggcgactggaaggaatctgttttcgcatttaaagaagctaacaaaacagagtttgtgcctcatagcttctttattgatgaggccggacattatgatgttgaagaagataaaaaacatttggatagtgctatgtttaaagtattctgtgttgataataacaatataagtattgaacaaattaatgaatggaatgccaaaccgaactcacaaaagaaatacttcgctggtaatggagcaagagcaatggattgcttcaagttcgttccacgcacaaataatcttgatattaatattgatgatctatttgatgatttataa

SEQ ID NO: 238527 - DNA, 672 bp, Klebsiella pneumoniae
ttgaaatgtcaaaatgactatattaccatgctggatagtgatgatttattaaaggaaaatgcacttaatgatataatatgctttttgatggagaataacgtagatttattattaacaaaattgcatgaggttcgagacatatcattagaaaatgtgaaatggaaaggtttacaaccaaaaaaactattgagggaagatgcgataaaaagatttataatacataaggattttcaggggcatttgattggtcagtttatcaagcgagagattttaactaaatgtagtataccagatttcacatgctatgaggatctttatacttttcctgatgtgcttatggtttctaatgaaattatttactcacaacacagtcattatttgtacataaagaataacaatagcctttcaaatgtaatgtctggagataaagtggagaacttatttctttgtattaagcgaatggaagatatcttcccaaataaatatagagaattgattgcttgccattggatagatttttatttgaaacgtagaaagtggttatcgaacttacaaatacagtatgaactagataatatattgtctcgtgtttatagttttggttttttccttaaccccaatgttaggtttagctataagaaaaaggctatcagattattatggaaaaagtaa

SEQ ID NO: 238528 - DNA, 1200 bp, Klebsiella pneumoniae
atggaaaaagtaagtaagaaaatttatactgctagtttaattttagcaatcctatcgataggatgtacattgcttataggttcgcttcaaagagattttttttacttctcattttatgcagcagtaattggtctcttcctggaacggaggtttgttaaaaattataaaataaacaacataatgtattctctcattttcattggggttataaaaatattatggactatattgctatattataaccttcctaaatttggattcggttggttacaacttgatgctggaaaaaaattagtcgtaggtggggttatcatattctatttaacaaatttcagtgggggctatagcaaagaacaatataaaatagcattattagttggtttttcaattgcttttgtattcgctactatctttggcttaatccaaatgtataatggaatcccaaggattgaattaagtacaaatagagcaaccataacagcttatatctattcaatgttgtcaataattactatctgtttattaattaaccgcgtaagtatatctatttcttatttttatgcttcagtgcttgtttcagttttatctttcgtaatcataactatgactggaacacgagcggcaatattggctcatccgataataattattataatgcttttatttaaatttcgtactttcaatatgcgaacagttattgtggcctctataataattcccgttagcattttactatcttataataagtttatttccccaaaggttgagcaaacgcgtaatgagatcatgctttataataagggggatgatttttcgtctttaggttcacgcttttcgttatggaaagtaggatttgaaatttttaaaatccatccgtttggtaatactgtagaagcaaggcataaacaagctgaaaatgtcatcatatttaaacctgaaaataaaacagcaatggtatatatcgactcccatttacataatgaattacttgaatctgcatcgttacagggagttgctggactactggcagtattgtttttctactacgccattattagtcatgcaataaaaaatataaacacccccttgttaatcataggattatgtatgatcgcatatggtttaagtgatgttttattgattagttcagaagtattaatgttctttatgctatgtactgcattatttacaaaaaattaa

SEQ ID NO: 238529 - DNA, 1068 bp, Klebsiella pneumoniae
atgaacatcattattgcagggtatgcattgagaggatttgggggcatggaaatggtatgtaaacgtttagttcatattatgtccacatacaatccttcgattcacattaagtttgtcttttttaaagaagaaaagaatgtagatcattcttggcattcagggttaaatgttcatattatgcactcttcaattcataatacaaaggcaaggagacttcatttttctttgttgctaactcgatatttattagaaaacaaaccagatttaattattacattggatactatttcttgtttcattacttattatgcaaaaaagttggtttttggcagctaccccattgtgtcttggttgcatttttccgtgtatgatctctataaatatacatatgtattaagatgcgatgcgcatcttgttattagtgatggtataaaagaacaacttaatgaactaggggttgataaaaaacacatccatactatatttaaccctgtagaaaaaactaacaaaatgattagcgttagtgtgggtgtatctaactttgtttttatagggcgagtgattttcaaaggtcaaaaaaatttaaaagaactatttgattcgttattggatttgcatggcgagtggtttttacacattgttggtcagggtgatgatttagatacttgtaaaaaatacactaacaatattggactttcgaatagaataaaatggcacggttggaagttaaaaccgtgggattttatagaaaataatatcggtcatatcaaggcattagttatgacatctacctatgaaggattgcccatgactatattggaggctatgtcatacggcatattttgcgtaagttcggattgcccaacaggaccttcagacataataaatgacacaaatggtagattatataaaacaggggacgtacaacaattgacatctattttacaggatttgattgatgataaaattggaataaaccaattggacattcaaaaatcaataaataaattttatgatgagaattattactacaatcttaccaatgctctcaattgtattattagataa

SEQ ID NO: 238530 - DNA, 432 bp, Klebsiella pneumoniae
atgtcgcagctgccgccgttcctcgtcaaaaatggcggcgtcaactccgggtttatgattgcccaggtcacggcggcggccttagccagtgaaaacaaagcgctgtcgcacccgcatagcgttgacagcctgcccacctctgccaaccaggaagaccacgtctcgatggcgccggcggccggtcgccgcctgtgggcgatggccgagaacacccgcggggtgctggccgttgagtggctggcggcggcgcaggggctggatatgcgcgaaggactgaccaccagtccgctgctggaagaggcgcgtcacttgctgcgcgaacgcgtgccgcactatacgcaggatcgctacttcgccccggatatcgataacgccattgcgcttctggcggcccgtcacctgacgcgtctgctgcctgccgtactgcattaa

SEQ ID NO: 238531 - DNA, 507 bp, Klebsiella pneumoniae
atgggcttatgtagaactgtgattaaaggaatggatatgcgctttttgttaacccttgctttgtgtttgtcgttgttgggatgcgactctaccgatgaaaaagtcattaaggttgcaaaaagtacaattgctgagcaattgatggaccctgatgccgcaaagttttcggatgtgtttgtccatagaggagaaaaaggtactacaaacaaatctaatgactcgaagaaaaaggtgaattaccagttttttactgtatgtggctctgttaatggcaaaaatgcgtttggtgcctatacaggtaagacaagatttatagtgaatcttgtagatgtcgactctgaaagtaaaccatctgttatccattcagcttatgaaaacgaaggccttagatcatcagcagttagcgcaaaaaaaacagaaaaacccgagtctttatttgagtacatttactggaacaaagactgtgcagatgaacatcatcccaagacttatactggaattaagtaa

SEQ ID NO: 238532 - DNA, 189 bp, Klebsiella pneumoniae
atgttttatctatatgaaatacaggaaataaatcatataagccagtacatgttaaccaaaactgagagtggcggggtgataacagcgtttgatgccgccagtgatgaaggggccatggatatggcatcaatttatatcattaatactctcggcaaaaaaaaggagtttggtatttcactgtctctgtaa

SEQ ID NO: 238533 - DNA, 579 bp, Klebsiella pneumoniae
atggcttttgaaatgtctgacaaaactcaggtggtaaccgtttaccatatcagcgacgatacgggggagttagtgggcgttgaagaattgtcgatcccgcctcacactggcttgcctgcctgcagcactcaaagttcaccacccgaaatagcctccggagaaacagcggttttcaatgccgctgcgggccagtggtcccttatcgaggaccatcgcgggcagatcgtgtacagcactgcatctggcgagcctgttgagatttcagcgcttggggaattaccagcaggggtaacgacaaaagcgcctgctggcagctatcaaaaatgggatggagaaaactgggttaacgacgcggaagctaaacaccaggctgaagtgagtagcgctattgagctgttaaccgagttgatgcgagaggcaaacgcaaaaatagcccctctaaacgacgctgtagaacttggtatccagaccgacgaagaagtcatgcaactgactgagtggaaaaaataccgcgttgccttgagccgcattgatacatctaccgctcccgatatcgcctggcctgaaattcctgcctga

SEQ ID NO: 238534 - DNA, 528 bp, Klebsiella pneumoniae; identical to SEQ ID NO: 193107

SEQ ID NO: 238535 - DNA, 333 bp, Klebsiella pneumoniae
atgaaaagtttctgtttggcgttgttcgcggtgatttcaaccccaactatggctgcaattcagtgtggcaattatgtgatgaccggtgatggaatgaccgttatcaacggagaaacagtcacatctcagaagataaaatttttgggtaagaatggcgactacgcgaacatgaaaatggacatgggccttatgcctgcgcgtgatggcaataactatggctttgagttcgtgaaacgtaacgggaaatcattcttgaacgtccaactactgcaaagcagcatggatgcgccaaaggtgattgggtctttcccgtgtaagaaagttgacggctaa

SEQ ID NO: 238536 - DNA, 636 bp, Klebsiella pneumoniae
atgaaaaaatgttcgcgttgtggtgaagagaaaaccctcgataactttgggaaaaataagcgtaaagcagacggcttgcactattggtgtaagtcgtgctgttctgcacacaaaaaagaacattatcagcaaaacaaagagatccttagcgaaaaatcgaagatttattaccagcttaaaggtgacgagattaaatctcgtgttaggcgtcgttattgggaaaatcccgaatctcaccgaaaatcagcaattgaatatcaacgcgaaaaccgtgaggcggcttataaaagacaagcggaatggaatcgtcagcagtcaatagaaaatcctcaattcttgttgaggaagaagataaatcgccgcctttcgcgatggattaaaggaacaggtagatttaaaactattttggcaggctgcaatgaaactcaattcattagtcatattgaatctcaatttgtcggcgaaatgagctgggaaaactacggaatagcatggacctttgaccacatcactcctttaaccgcattcgatttaaccgatgaaacgcaggtagaaaaagcctgtcatttttctaatatccagcctcttacctctgctgaaaacgcgagaaaaggaggtgcgaacaggatgaaataa

SEQ ID NO: 238537 - DNA, 516 bp, Klebsiella pneumoniae
atgctcatgagcaaatcagaatatgccaggcatcgaggtgttagccgtcaaactgtttacgattgggtggcgaaaggtggagttgtcttgtccggaaataaaatcgatgtagaggccacgcaaagcaaaatgcagaacgaacagaaagaccaaggcgaagaacacagccccctcacactgaaaatgacgtgggggcaattctgggccaccgttaaagggttagatgggaaaaccacgttcccgcgcagcgatgaggagataaggaaacgggtagagcttgcggccggagagcttggttggtcggttgagtttctcgacgctggtgggatttacatgtgcgatggcgacgcagattattacgtgatccagtatgagcctattcagaatgctagggtagcaatctggattatccggcgtgacctgtgttacaccgcttgcgaacgccctgatgatgagggggaatggagcaaagaagggctggcagcactcgcagaatggaaagcgggcaatgtgtaa

SEQ ID NO: 238538 - DNA, 177 bp, Klebsiella pneumoniae
atgaacaacatcgaaaaaatgaagcctgaaaaccatgaggcgacaacgggtgagaacgttcgtacatggcaggaggatttagccagtcagccccagcttgacagcaatagcgacattgtagaacggcaattacggggtagcattaacggaatgagcgttaatcatatgttaagttga

SEQ ID NO: 238539 - DNA, 663 bp, Klebsiella pneumoniae
atgccattaattcgaccggcaaacgagcaagatgtcatacaaatggtccaaaagaagggcaaactagaagtaactaatgcattacctggtatcatccgttcttttgaccccgaaactgtcacctgcgaagtagatatagctgtcaaggtaaatcttacaaaggcgggaactttgtatgaggattaccagtatgaatccgccaactatccaattcttgtcgatttacccgtgattttccctcgcggtggtggcgttacgctgacctttcctatcaaagagggtgatgagtgtttgattgtattttcgtcgcgtagcattgatttctggtggcagaatggcggggtacaggaaagggctgatggtaggattttagatttgtctgatgctttcgttatccccggcccgcaatctcaggtaaagaaaataagcggtatcagcaccacggccgcgcagcttcgaaccgatgacggatcggcattcattgaagttgcatcaaacggcgctgtaaccatcaccagcccacaaacaactgttaatggccccttgcatgttaacggtgcaataacctccacaggcgaccagacagcggcaggaatcagccagatagatcacactcatggcggcgtagagtctggcggcagcaatacaggaaaaccacaatga

SEQ ID NO: 238540 - DNA, 345 bp, Klebsiella pneumoniae
atgaaaaaattaatattgctgttcagtttacttagcgcagctggaagtcatgcggcgcaggttatcaccatgcaatgcggaagttttcgatttgagatgatagaaaactcaatggcgagaattaatggtgagtatgtaacctctcagaaaatcacagagtttgggaagaatggggcaagagttgaaatgacgctcatgcctgccagtgacggtaatttgtatgggtttgaatacatccatcctgatggtagcaaaaagcattggctgaacgtcgagcttatccgcaccaacctgaatcaggggcggatcattggtacgtttgattgtaaacgtgttaagggttaa

SEQ ID NO: 238541 - DNA, 1068 bp, Klebsiella pneumoniae
atgtcacaaaactggatgaggcatttcgaactgcagcttgtcggagaaaacgggcaaggaatcagtttgagtgatttcaaagttacttttcaaatagagcgtaacgataacaaatggcctgccgtaggcacagtcaagatttataatctgtccgcgcatacgcagaatcgcataatgcaacgcgagtttgccaaaattattatgattgctggctatgatggccttgcgcccgatatcatggcgagtgaggtaggcattgcccgtgaaatatctgcaagcgaagtcgggcggtttaatggcgcgaactatggcgtaatatttagcggtgatattcgctttactgtgaccgggaaggataatcctgttgattcctggattatggtgcaagcctgcgactcagaagaggcattcacaagtgcatttatcaacacaactatcagtaaaggctacaccacagaaaatatttacgttgagcttatgaaggtactggagccttacggtatttcacgtggcattgtcccagagtttccgccaactgtatttccccgtgggcgctctctgtttggttttgttcatgactatctcgatgaggtggccgcgcaatgtaaagctacctggcaattcaactacggaaaagtcgatatagttccaagggacaaagcgactcatgaagcggtggttctcaatgctaatacagggctgatcggtatgcctgaacagaccataggcgcaggtgtgaatgtgaaatgcttgattaacacgaatatacacctgaacgggcttattcagctggatcaggcttcggtgtaccgtagcaccttacccgccgaccaagtagcacaggccggcggcccgatttcagtagaaagccagaatggaaaccttgttactaccggaatagctcagagtccagcgagcattgcgaccgatggcgtctacaaggtcaggtatatcagttacacgggcgacacgcgcggtaaggcatggtatatggatctggcgtgtgaggcgcgagggaattcagacttattttcaagttcatttatgaataagcagagtcaagaatga

SEQ ID NO: 238542 - DNA, 219 bp, Klebsiella pneumoniae
atgctgaagataaattctggcttaattgccagcgggaaaactcaacctgaaatcctgcccggcgataaatgggaagataaaatcggattaccaataattattgaaagttaccgattcaacagagtgacattttatagagagggctataaatcgccgtgtatttatcctgaacaacgattcgttaaagaattccagccagtgcgggaggttaagccgtga

SEQ ID NO: 238543 - DNA, 219 bp, Klebsiella pneumoniae
atgaacagaaaatccaatgaaagagatgttcttgaggttatcactgatgttgagcgagcgattagtttcacccggcaggggttggccgttcttgaactatggcttgatagcatgggtattgaagacgatatcgaagctaaccgtattgcagcggttcacagccttgtgcatgactccctgacttgccttaaaaaggctgctggcatcaaagaggaataa

SEQ ID NO: 238544 - DNA, 321 bp, Klebsiella pneumoniae
atgagcctgtataacgattttgttcgccgtgagttcgacaaagacgtcaaggataatgagctggaaagcatgatgaacagcacagacgaagccgtcagtaatttgatgctaggtattagtgccattggtagcctgatgttctgggccgcggacagtgaaaattacgccgaggaaaccgcaaaaggagacatgtacaaaataggtgcaatgctgggtacggtttgtgaggtagtaagggcgttgaatgatacctcagagagcgcggctgcatttcgttctgaatgcatgaagcggtcaaaggtgagggaaggtcgctcatga

SEQ ID NO: 238545 - DNA, 180 bp, Klebsiella pneumoniae
atgcgtaaaaccttccagatcgacggatacgccgttaacaggcgcggtcatatagtaggcattcactacaccatgaccagcacaagtccagaaacagctaaatctaccgccaaattactggcgcaaaaaggcgaatataaacacgttcgcattactcgcgttcaggaggtggcagcatga

SEQ ID NO: 238546 - DNA, 186 bp, Klebsiella pneumoniae
atgcttaaggtttccacctcaactcacgaaaagaccgctgatgaaaaactgcaaataatatggacgctggccgttgctgcccggtatttgcgcggcactgaatggtcacacgaaatgcaggtggaaatgctcgatcttatcgaggaaatctcttccagctcgcagggggtggatcatgcagaatga

SEQ ID NO: 238547 - DNA, 288 bp, Klebsiella pneumoniae
atggctaaatcaacctgccctaaatatacctggctgtttctggccacgccgaaaaaacacgactgcgcacccatcgtattgcgcacacaggccgatagcgaagaagctgcacgtaacacattccccggttgggatttaatctttgccgctaaaatccgcaccgaaagcccgtttcaggattgttggactgattccgacagcggaactatctggcagatcattgccgacgacatcccgcctttatcttcatttgctgatagctccctgcaagggggtcgccatgcttaa

SEQ ID NO: 238548 - DNA, 270 bp, Klebsiella pneumoniae
atgacaaaaatgagcaccatttacagcagactttcatacggcaccgggaccgcactgacgggctgcggtgtctcagcaaaggcgtatgccggggcagttaaggcagaggtatggattttggccgacaaaatagcggggatgaccctgagtgactgggcaattattgtcggtatcgcctgcaccattaccacctgtggggtgaattggtactaccggcggaaagaacgcgaggatcggctcaatggctatgacaccaaaactgaggaatag

SEQ ID NO: 238549 - DNA, 3123 bp, Klebsiella pneumoniae
atgacacagcagaccagaaccatcgccgaatccaataacttcatcgtgctggataaatacgttacagaatgggaagccggtgaccgctaccagagtgaggcagagttagagcgtgaactgattcaggatttacgtaatcagggctatgagtttgtgcctgatttaacctcccagtcggcgatgctggcaaatgtcagagtgcagcttcagacactgaatcaggtggtgtttaacgaaggggaatggcggcgatttaccgagcagtatctggataatccaagcgatacaatagtcgataagacccgtaagattcacaccgattatatctgtgactttaccttcgatgacggacgactggaaaacatctacctgattgacaagaaaagccttgtccgtaacaaggtgcaggttatccaacagtttgagcaaaccggcagtcatgccaatcgctatgatgtcacggtgctggttaacggcttacctctggtgcaaatcgaactgaaaaagcggggcgtagcgattcgggaagccttcaatcagatacaccgctacagcaaagagagctttaataccgagaactccctgttcaaatatttgcagctcttcgtgatttcaaacggaaccgatacccgttactttgccaataccacaaagcgggataaaaacagctttgatttcaccatgaactgggcacggtctgataacaccctgattaaagaccttaaagactttaccgccaccttcttccagaaacacaccttactcaatgttctgttcaactacaccgtgtttgatgtcagcaacaatctgctgattatgcgtccctaccagatagcagcgacggagcggattttgtggaaaatcaacggggcttatcaggcaaaaaaatggagctccagagaggggggcggtttcatctggcacaccacaggtagtggtaaaaccttaaccagctttaaagccgcaaggctggcaactgaactggatttcattgataaagtcttctttgtggttgaccgtaaagaccttgattaccagaccatgaaggagtaccagcgtttctcgcctgacagcgtcaacggctctgacagcaccgctggactgaagcgtaatctggagaaagatgacaacaaaatcattgtcaccacaatccagaaactgaacaacctgatgaaaggtgaagccgatttaccggtctatcagcaacaggtggtctttatcttcgatgagtgtcaccgcagtcagttcggtgaagcccagaagaacctgaaaaagaaattcaaacgtttctatcagtttggctttaccggtacgccgatatttgtcggtaaaaatgccttaggggatgaagacaccgccagcgtattcggggcagaactacactcttacatcatcaccgatgctattcgtgatgaaaaggtgctcaagtttaaagtcgattacaacgacgttcgcccgcagttcaaagagctggaaacggaaaccgacgaaaagaaactcagcgccgccgagaataaacacgctttgctgcatccgatgcggattagcgaagtcacgcattacatcctgaagaatttccgtcaaaaaacacaccgggcattctctggtgcaacaggcttcaatgccatgtttgccgtcagcagtgtggatgcagccaaagcctactatgaagcgttcaggatcatacagcagtcggctgttgaacaggataagaactacaagcctctgaaggtggcgaccatcttctcctttgccgccaatgaagagcaggacgcggtcggtgatatcaatgatgaagggtttgatgtcacggcgatgaacagcagtgcgcgggagtttctggaatcggctatcagtgactacaatgccatgtttaaggttaaccatagtactgatggcaacaacttccagaactactatcgtgacctctctgagcgcgtcaaaaagcaggaagtagacctgctgattgtggtcgggatgttcctgaccggatttgatgccccgacactcaataccctgtttgtggacaagaacctgcgctaccacggcctgatgcaggcattctcccgcactaaccggatttataacgccaccaaaaccttcgggaatattgtcaccttccgtgatttagaacaggccacagtggatgccattaccctgttcgggaagagcaatacccgaagcgtggtgatggaaaaaagttatgacgagtacatggaaggcttcacggacacgcttaccggagaggcgcgacgtggcttcacagatatcgtgagcgagctggagacgcgtttcccgaaacccgcagacattgagtccgaaaaagagaaaaaagccttcgttaagctgttcggggaatatcttcgggtagagaacatactgcaaaactacgatgagtttaccacgctgaaagcgctgcaaactgttgacctcagtgacccggtagccgtggaggcgtttaaagccgggcactatctggatgatgaggctttcgctgtgctccagacagtacgcttacccgctgagcgtaaaattcaggactatcgctccagctacaacgatatccgtgagtggcagcgccgtgagcgtgatgcaaacaccaaagacaaaaacaccgttgactgggatgatgtggtctttgaggtggatttgctgaagtctcaggagattaacctcgattacattctggggctgatttacgagcatcatcaaaagagtacggataaagagaccctgaaagaggaagttaaacgcttaatccgcgccagtctggggaaccgtgcgaaagaggggctgatggtcgattttatcgagcagaccagtctcgatgacataccgggtaaagagggcgtcattgaagctttctatacctttgcacaacaggctcagcagcgcgaagccgaggctctcatcaaagaggagaacctgaatgaggaggctgcccggcgctatatcagaaactctctcaagcgcgaatacgccacggagaacggcacagcactgaatgaaacgttgccaaaactcagtccgctaaacccgcaatacaaaaccaagaaaaaaaccgtttttcagaaggtgtccgcctttatcgataagttcaaaggtgtcggtggaagcgtctga

SEQ ID NO: 238550 - DNA, 1200 bp, Klebsiella pneumoniae
atgagcgagctgagttatctggaaaaactgctggatggggctgaggttgaatggttacctcttgacgagataatagaattaaaacgtgggaaaagattagtcaggagtcagcttgcgttagaggggaagtatgctgtataccagaatagcatgacccctttggggtattatcacgaatgcaacacgaatcctgagatggtttttgttatttgtgcaggggctgccggtgaggtgggttatagcattaatcctatttgggctgcggatgatgtctattatgttgcttcatcagggaaattaaataacaagtttttgtatcactttttgctaacgcaaagaaccaaaattttatcacaagtacgcagggctagtattcctcgactatcaaaatcatcgatagataatatagtcatccccatcccttgccccaacaaccctgaaaaatcgctggcaatccagtcagaaatcgtcaggattctggataaatttaccacccttaccgctgagcttaccgctgagcttaccgcacgtaaaaaacagtacaactactatcgtgaccagttgctgagttttgaggagggggaggttgagcatcttccaatggggcaaaaagatataggtgaatttattcgaggaggaagtttacagaagaaagatttcactgaatccggcgtcggttgcatacactatgggcagatttttacgcactatggaacatatacagacaaaacaaaaacatttgtatctgagtcactagccaagaggtgtcgtaaggctcagtcgggtaatttagttatcgcaaccaccagtgaaaatgatgatgatgtgtgtaaagcggtagcatggatgggagatgacgatatcgcggtgagtagtgatgcttgtatttataagcacaaactcaaccctaagtacgtttcttatttttttcaaacagaacattttcaaaaccaaaaaagacagtacatcactggaaccaaagtgagacgtgttaatgctgataatttggcgaaaatactaatacccgtgccatcacgggaagagcaaaatcgtatcgtcaccatcctggataatttcgatactctgaccagctctatcactgaaggcttaccgcgtgaaatcgagcttcgccagcaacagtacgaatactaccgtgacttgctgttcagctttccaaagcctgaagccgtaacagactga

SEQ ID NO: 238551 - DNA, 1557 bp, Klebsiella pneumoniae
atgaccagtttgcaacaacgtgccgagttacaccgccagatatgggcgattgccaatgatgtccgaggctccgtggatggatgggattttaagcaatacgtgttaggggcgctgttctatcgttttatcagtgaaaactttgccagttacattgaagcgggtgatgacagtgtgaaatacgctgagctggatgacagcgtcattactgatgatattaaagatgatgcggtcagaactaagggttactttatctatcccagtcagttgttcagtaacgtggcagcgaaagccaacaccaatgaccgcctgaacgctgacctgaacagtatctttgtggcgattgagagttcagcttatggttatccgtctgaacccgacattaaagggctgtttgctgactttgataccaccagtaaccgactgggtaatacggttaaagacaaaaacacgcgtctggccgccgttctgaaaggcgtggaagggttaaatctcggtaacttcgtcgagcatcagattgacctgttcggggatgcttacgagttcctgatttccaactatgcggctaatgccggtaaatcaggtggtgagttctttacccctcagcatgtttctaagctgattgctcagctggcgatgcacggacagacccacgtcaataaaatctacgacccggcagctggttcaggttcattactgcttcaggcaaagaagcactttgataaccacatcatcgaagacggctttttcgggcaggagattaaccatacgacctttaaccttgcgcgtatgaatatgttcctgcacaacatcaactacgacaagtttgatatccgcttagggaacacattactggcccctgagtttaaagacgaaaagccgtttgatgcgattgtgtctaacccgccttactccgtaaaatggattggcagcgatgaccctacgctgattaacgatgaccgttttgcacctgctggggtactggctccgaaatccaaagctgactttgcttttgttctccatgcgcttaactacctgtcgcccagaggtcgcgccgctatcgtctgcttccccggtattttctatcgaggtggtgcagagcagaaaattcgtcagtatctggtagacaataactacgttgaaaccgtgatttcattagcgccaaacctgttcttcggcaccaccattgcggttaatattctggtgctgtcaaagcataaggccgacaccaaagtacagtttatcgatgccagcagtctgtttaagaaagagaccaacaacaacgttcttaccgatgcccatatagaacagattatggcggtgttcgacagtaaagccgatgcagactatctggctaaatctgttactgctgaagccattgcagctaatgattacaacctgtctgtcagtagctacgtggaagccaaagatacccgcgaaatcgtcaacatagccgaactgaatgctgagctgaaaaagaccgtcaccagaatagaccagcttcgtactgatattgatgcgattgttgctgagattgaaggtagcgaggtacaggcatga

SEQ ID NO: 238552 - DNA, 306 bp, Klebsiella pneumoniae
atgaaacttttcagtaaggtaaaggaattaatcagccgtgcatctgcttatgttctggctacggccatgagcgtttttgctgccagtccggcgttcgctgatggctttagccgggcaaataccatcatggagaaggtatccagcgggctgcatggtctggcggctatcacgatcaccgtggccgtgatctggattggctataagaccctgtggaaaggcgagagcctgtcgcagtgcggctacatcatcattggcggcattttaattggcggaggtagtgaaatcggcgctctgctgatgagctaa

SEQ ID NO: 238553 - DNA, 498 bp, Klebsiella pneumoniae; identical to SEQ ID NO: 119724

SEQ ID NO: 238554 - DNA, 348 bp, Klebsiella pneumoniae
atgaaaatgccaaataacccgagtaactggcctgatctgctggagttgctgcagagctggtggcgcggagatacgccgctgggggccgttctgctctcagttgttatggcgggtcttcgaatcgcttatagcggtggcggctggaaaaagatgcttcttgaggggcttctgtgtggggcgctaacgcttacattcgcatcggcgcttgaatacttagacttccccaaatctctctcaatcaccattggcggtggggtggggttcgttggcgtagatgccataagggcgtttgtaatgaaatatcttggcggccgattcggtatcggtggcggcgataacaaggcttaa

SEQ ID NO: 238555 - DNA, 225 bp, Klebsiella pneumoniae
atgactgtacgtgcaaaatttagctgcatatcaatccataaatcactcgacaacccttctgctgtcgtcaatctgagcgctgtaacgactagtagtagtgagaacgaaacctggtcgaagtatacccccagcggtcaactacagatgctcatctctaacttggcagtcctcggacagtttgagcagggcaaagagtatttcatcgatattagccctgcagactga

SEQ ID NO: 238556 - DNA, 543 bp, Klebsiella pneumoniae
atgaaaaaaaatcaagatgttatcgggcgtagaatcgaaagcacatttaaggcattagtacaaaaagactatgagcaggctcttatcaatctattcccagcaatggataatactgcaagggcaagaaggcctaatgcaaaagttggagaaaggatcaagttgttcatcagtgacgaagaagtcctgatatccggcttggccctgcgcaagatttttaaaggcgttaaatttggcgagtacacccttcctgaagcaatctacataatggcaagaaaccctatgatgcataacggtgagcttgacaaaaggatggaatttgtcgaacagggcatgttgctgattggtgaaaaatggattatgccacaatcgttcatttgggcaatgatgatttcagttattacggctccagaaaactcatcagagtttttattgggaaaggctacttttacactttatggtcaacagtttaatgtgtccgaactttggggagacaagtcgaaaatattcgaaaaattccctcctattggacaagcttacccatag

SEQ ID NO: 238557 - DNA, 306 bp, Klebsiella pneumoniae
atgcctggcatgcagttcctgatggcgctggcgctccggatgggccgcacgctgggcgaactgcgacaaaccatgacggttggcgaattcaggatgtgggctgaatacgatcgtatcagcccaatcggcgatattcgcggcgatattctcaatgctcagctggtatctgcggtttacggagcgcagggcggtaaagtcaccattgaagatgctcagcttcagtggagcgcagaagaggttgaggtaaacgacggcggcgatccctttgcaggcttggaggccgctttgctcgcagcatcagtttga

SEQ ID NO: 238558 - DNA, 327 bp, Klebsiella pneumoniae
gtggatggtctgaagggcttcccggatgcgataaacagcgtcttcccgcaaccccatatccagctgtgcattatccatatggtgcgtaacagtctgaaatacttagccaggaaagactacaaagccgtcaccagcggactgaaagcggtttatcaggccccgaccgaggaggtggctctgatggggctggatgccttcgcgggagagtgggacgacaagtatccacaaatcagcaaaagctggcgtgcgcactgggaaaacctgaatacgttattcagctatccgccgggccatttacaccacaaatgccatagaatcgctgaatag

SEQ ID NO: 238559 - DNA, 603 bp, Klebsiella pneumoniae
atggacgaaaagaaactcaaagcccttgcggctgaactggctaaaggccttaaaaccgaagccgatctcaatgctttttcccgcgtgttgacgaaacttaccgtcgaaacggcgctcaatgcggagctgactgaccaccttgggcatgagaaagatgcgcccaaaagagtctcaaacacccgcaatggctactcgtcaaaaacggtgttatgcgatgacggcgagatcgaactgaacacgccgcgtgaccgtgaaaacaccttacaaccggaactgattaagaagcaccagacgcgcattacgcagatggacagccagattttatccctctacgccaaaggcatgactacccgcgaaatcgtcgcaaccttcaaagagatgtacgacgcagatgtctcacccgcgctgatatctaaagtcaccgacgccgtaaaagagcaggccactgagtggcaaaaccggcagctggatgctctgtatcccattgtttatatcgaatgtattgttgtcaaggttcgtcagaatggctgtgtgataaacaaagctgttttccttgcgctggggatcaataccgaaggccagaaagagttgctgggcatgtga

SEQ ID NO: 238560 - DNA, 762 bp, Klebsiella pneumoniae
atgcttgcacctgagagacgggaaaaaattctttccatgctagtttcaaatggttatctgaatgccaatcaattagcagatttatttgaggtggatagctcaacgatccgtagggatctaatgtaccttgagaaagggcggaagatagtcaggacgcatggtggcgtattgccggtattgtcatctgaagggcaagacacgccttacagcattcgtcgtggcagaaaccatgagcagaaggtgtcaattggcgcttttgcggcttcactgatagctgacggtgactcagttattctggacaatggctcaacggtttatgagctcgctgcgtgtttgatatacaaaaaagatctgacagttatcacgaacgatctcaatatcgctatgctactgagccaatatcccgcgataaacctgaacgtgacgggtggagttgttgttgggaactcatatacccttgtaggacccgatgccacgaggaaattcagcgaagttcatgccgactgggcatttctcggtgctgaaggggtgcatcctgaagcggggatcactaatatcaatgcaattgaaatccccactaagaaagccattctgaattcggcgactaaacgcgttgtattggctgatacaacaaaaataggatatcgggcgctttcacacgtctgtagtatctctgatatagacatgataataaccgatacgaaaaagaaagataaaacagactcgttatacgatgggaaaattaaatacgccagcgtgtga

SEQ ID NO: 238561 - DNA, 1014 bp, Klebsiella pneumoniae
atgaaaaccccatacgaaaacgacatctcaatgcaaccagaagccgctcttgctcaactcaatacgccgttgccggaagggctgaagtccttaaaattagatagttatgaccgaatcatcctgaccggtatggggtcttctgactatggtctgatccctattgagagagcgcttgctgccaggggatatccggtatggagaatagatgcaggccggctgttggatatgccttcactggtaactgaaaatacgcttttgtgggctacatctcaatcaggcatgagcggtgaaattgttgcgctgcttgagcaaggtattcaaccacgcacgcttattggattaaccaatgatccaaatagtgtattgggtaaaaaggctgacattctcatctcactcaacagcggtgacgaagcgactgtaagctcaaaaagctatctcaataccttgatcgccagtcaccgtgctctggctgttttgcttgatgaggatgagcatgtaatttgcagcaccgttaaaaacatcgttccggtaatccgttctcttctggctgctaatcagcatgttgcggggatggcagaatctctttttagccatacgcaccaacgcgtcgcatatattggcaccggctcatacgcctcaagtgcgctgaccggggcactgatcactaaggaagcttcaaaagttagcgcggaaggttttgttggcggagagtttcgtcatggtcctttggaaacgtctggtaaaggaatgcttgccattctccttggaaagccgggcgatgagactctggagcgcctgtctgcagaaatggtggcgaatggcacgagcgtcgtcactattggcgaagcagcttttgcaggatcaacgctgctttccgttcctgaaggtaacgaattgtgccaactgctgtgtggctttatttacatcgaacagctgactgttgaattagccgaacagaatggttttgtaccagggcagttcctgttcggtcaaaaaatcacggtggcggtatga

SEQ ID NO: 238562 - DNA, 921 bp, Klebsiella pneumoniae
atgacagaattaatcaaaatggtacaagctggtgtcgatatcggaggaaccggtactcgcatcattattcacggtgaagagggcactctgagcactaaaaccattcctacggctttatttaatgtggttgaacaggaacagcgctccgagcttctggcctcatacatcctctctttaattcctgagggaacgaaactggttagcttgggaataggtgcaagtggacctgtagatacgagttcaggaattattaataacaaagatactcttgaatgtttttcttttttccctttggttgatgagttaaaaaaattactcaatgtagaagtcggcatagataatgacgcggttgctgctgtacttggtgagtattattttggtgcaggaaagaatagcaaacggcttttaatggttacgcttgggaccggtatcggtgttgctttgcttgataacggaaaacctttccgcaccagtgatggtcaacatcctgaggcaggacatattcctgtctcaggtaacccaacaacttgttattgcggtttacgagggtgttgggaaatgcttgcgtcaagaacatggctccagcaaaacttagaaacgctactgcctgaacatccttttgaaaaaaaggatatcaatttttataaagagatggccaaagaaagagaagatatcgcgagcgtatttcatcgttatggaaattatcttggaagaggtctggtaacgctactgacattatatggcccagatctcaccatcctgagtggaagcgctgctcattattatccattgttcaaagaaggattggaagaatctctcacgcgtgcagatgcgtatgaaattaacatgaaaattgtgccatcagaattaggtgatactgctggggctctcggagcaatcgttattcctgaacttagttaa

SEQ ID NO: 238563 - DNA, 1419 bp, Klebsiella pneumoniae
atggggcaattaaaaagcaaagaagtctcaagcagtcatcgtggaaaaaaaacaagcatatttattatcatgtcggtcataatatcttccataggaggaattatatttggttatgacacgggaattataggaggagtaatccctcttattggtaaagagtttcagatcaacgaccttatgcaaggcattgttgtaagcatgtcactcctcggcgcgatgttgggctctcttgccgcaggcccgcttgctgataaatatggtcgcaaaattaacctactggcttcgggtctttgctttgcagcaggtgctgcgatttcagggtttagtaacagcatcgagctgctcatctttgcgcgtatacttcaggggattggtgttggtgcttcatccgtacttgtacccgtgtatatcgctgagctttcgcctgctaaaattcgtggtgttctcgtcacctcatttcagctgatgatcaccgttggtattgtcatggcttacggtgtaaacatggtcgcagatagctatgctgaatggcgtatgccagttgggattgctggcgtcctgggcgtaattcttgcaataggcgtcatgtttgtaacggaatcccctcgctggttaattgcgacaaaccgtaaagatacagcgaagcatacattaataaaattgcgtgggatcagcgatgtcgataaagaaatcaatgaaacagaacggctgaacactattgaaagtgtggatatgctttggcgtgaccttttcagggggcatgtcagaccaatgattgctatcggggtgttggttgcattcttctccaatgcttgcggcataaatttggttatctactttgctcctcaaatcctccagtccagtgggtttacttcctcggcatcatggattggtacttttgggcttggaattacaaatgttctgtttactattgttggcatgctaatcatcgagaaagttggtagacgtccattgctgattctgggtgctatcggtttgacggttagcctggttattcttgcggttatattctctattcctgcattccccggaagcaactggcttgcatttagttctttagtcttttacatcatcatgtatgcaattagtcctggcatgttaggtttcttgattatttcagaaatcgcacctttaagagccagagctaaggcgacgagtttgtcaatctttgtcatatttgccactaacttagtcatcgctatattctctctgccgatgttaaacggattgggggcgtcgacaacattctggattttttctgcaatatgcatagcttacaccatattcagcttctttgttccagaaactggtggcaagagtttggaggaagttgaactttactttaaatctaaggtagaaggggtgaatactgatgacctcgaagaagcgaaaggctaa

SEQ ID NO: 238564 - DNA, 2655 bp, Klebsiella pneumoniae
atgtatcccgtatttgagaatggatcctgctgggtcaaggtggattttcacctgcatacccgggcagataaggaatttcgctatgccggagaatccgacagatatattcgcgactacgtcagtgcccttaaaggggcggaagtgggcgtcggtgtgatcaccaatcacaataaatttgatcccggcgagtttaaggcactgcgcaaagccgcgcgccgtgaaggcatggaactgcttcccggcgtggagctgtccgttaatgatggccagtccggtgtgcacacgctcgtggtgtttgctgatgagtggttcatcaatccgcagcagacaaaccatattgaaagtttcctgacggccacgtttgcgggcgttgataattttgagaacgaaaatgcccgttcaacagaaaatatcacacagaccatccagcgccttgaccggtacgaacgggattactttattgtgtttgcccacgtggaggcccctaacgggttatggggtggactgagccctggcaggatcggggagctttttgataacgagcttatccgccggcgcgtgtcgggatttcagaaggtgatgacccatgacctgcgggtcaaaattcagggcgtgctcggtaagcgctatcctgctgaagtccagggatgcgatgccaaaacgctggatcacattggtgccagaaaagtcgccagctatctgaaactgggtgattacagttttgaagctgtccgctttgcgctccaggattttccccatcgcgtaagcgtggagaaaccggctctgatccacagccatatccgccagatagcattcgagggagctggttcgctcggtggaaccgtggtgaaattatctccggaactgaacacactgattgggatccgcggcagcggcaaatcctccatacttgaagggatccgttatgccctggacattccgtttggtgagaaggcttctgaccgcgattacaaagaaaatctggtcagtaatttactcaaaagcggggggaaaattaccatagacgccgtgtgccgtctcgggcgggcctatcagataacccggattttcggccaggagccgcaggtcatttttgacggtcagcccacgcaaggtgtcgcgctccgggaaacggttctgcacaagccggtgtattttggccagaaagatctctccaataccggcgcgggatttgaatacgacctgattgaaaaactggtcggggagcgtctggccgccgtgcggaacaaaatccggcagcagaatgaagtcgtcctcgacaggttacgcgagtatcgtcgtctgaaaacatcaggagaaacactcgccgaatggcaggcgaaagagaaggatgtacagttccgcctgcgcttttattcccagcacggtatggaagaaaaactggcgcgtcagaccaccttcggacgggatgagcgctacctcagcagtaccactgaacgggcaacccgggcgctggacagtctgcaggacgggatcagggaaactctcgatgggctgaagcaggagcagaaatatgagtcagcgcataaccaggcagacattgatgattactgtgcgggatatgattgcttcacggcccacctcggctccctgaacaccatcgtagacggcgcccgccggctcctcacagaactcgatacgaagcagcaggcttttctggagaaaaagctggcgctgacggaggaatttgccgaaatagagcgtggcctggctgaagagctgcggctggcaggtgtggaaaaagccgatccggctgactttctgaagctgaaggccgagctggaacttgcggaacagaaaattgacgagctgacccgggctgaaagcagtcaggcgttactggagaaaagtcttacagaggcgctgagccgattgtatgaactgtgggtggaagaatatcaggaaattgaagccgtgttggccggcatcagccaggccgactcgcccctgaagatcgtggcgtcttttgcaaacgacaaaaaagccatgcaggccgttctgaaagaggcctttaccggcagccggctgcgggaaagtacctaccagaccgtggctgacaccttcagagactttggtgaactctggctgaacagggacaaactcccggggattatcagcggctctgcagagacattcagcgagtatctgaaacagcagattgaatcgctgattgcctggcaaatacccaatacctactccattgaattccggggcaaaccccttgaacaacattcgctgggtcagcgcgcctcagctttaatgctgtttgttctgaatcagcaggataatgatgtggtgatcatcgatcagcccgaagacgacctggacaatcagacaatttatgacgacgtgattaaaatcatccgggcgatgaaaccccgtacgcaatttatctttgccactcacaatgccaatattccagtgctgggagatgcagagaatgtctgtgcctgtgaatactcagacggaaagatccaggctgccggtggaggcgtggatgcccctcttgtacaacagcacattatttcggtaatggagggcgggcgggaagccttcgaacgtcgcagggaagtttacggctcatggctcatggctcatggctcagtaaaacctgatgccataatgttcatttag

SEQ ID NO: 238565 - DNA, 1026 bp, Klebsiella pneumoniae; identical to SEQ ID NO: 182266

SEQ ID NO: 238566 - DNA, 594 bp, Klebsiella pneumoniae; identical to SEQ ID NO: 182268

SEQ ID NO: 238567 - DNA, 2724 bp, Klebsiella pneumoniae
atgacttttaaacccggtgaacgcgtcagccattttgaatttggccaaggtgttgttatctcggcagtgggtggctacgcccgtgtcttctttccccagggtgagcgacaagtacccgtcagcaccttggtggcggcacttagccataatgagcgcgtggtagccagcattggcagccatacagatagtgacacgaaagcctggctctcctggaaggcgcatgaattaccccttcaggattcagccagctcgctgacttcagccaagattgatttgctaccccaccaggtggtgctgactcatcgggttgccagcgcgagcccacgtcgctttctgattgccgatgaagtaggtttggggaaaaccattgaaacagcattagtgctgcgggaattggccagtcgtggcgagctaaaccgggctttaatggttgtgccggcaggtctggttaacaactggcaccgcgagctgaatgaagttttcaatttgaattttgaagtattcggccgcgaaggtgatgtcagcgaccgccgcagtaatgcgtttgctaaacataacctgctgattgctagcatcgacaccttaaagcgtccagcaagaatcaagaaaatactcgaagcaccccgttgggatttgattgtttttgatgaagcgcatcactgcactgcctataagcaaggtggcaaaacccgcaagacccagaactacaaattggcggaagccttacgtgaccacagtagggatatgattctgctttcggccacaccacaccagggcgatcattttcgtttctggaagctgattgatttgcttgaccccactttgttttccagtgaaacagagatggtggaagaacgtcaccgcctgaatccaatcatcttccgtcgcaccaaagccgacgcctgtaaagccgatggatccacgttgtttgctaggcgctgggtgcataccgaagccttttcaatgtcaggtcaggagcgcgatttctataacgccctgaatgaatacctgcgcgacggttttgctctggcgaagaagcaaggcggcaaaggaacggctctgggctttgtaatgacgatcttccaaaagattgcggcgtccagctttgcggcggtgcatcgcaccttgagacgaagactgttggccctgactgttcatgagggcttgatgcacgatgaaaacctcgacatcgacgccagagactttgcttttaatgaggcgaaagaacagattcgcgttgagttcgatttaggtcatgaccgtctttctgaccttgagatcgaccgtatattgaatgacatcaagcgtcgcctacttaaaaagatcaatgaagagcagctggccgctgtatccgatacgtttaccgatgagctggaaactgccgccgctgaagatgcggccatggatgctgtggcatacgccctgccagaagagcgattccgcattaaagaactactggggctgttcccttcagcccgtgaaactaaagtagataagctcattggggctttgggtgtgctgtggcaacaaaacccagaggaacgcattgtgatatttgccacctatctgggtacggttgaaatgctgggcgaccagattgaaaaagcgtatccaggccaaggtgtggttgtgcttaaaggtggtgatcacggaagtaaactcgcggcagaacggcgcttcaaacaggccaatggtcctcgcgtaatgatctgtacagccgccggtcgggaaggtatcaacctgcaacatgcacgggtgctgtttaactttgacctgccgtggaatccaatggatatggaacagcgcattggtcgtattcaccgctatggacagcgagatacagcgcaggtttataaccttgtgttgggtgacaccattgaaggtcgcattttcctgctactagatgaaaaactggaggagattgccaaggcgcttggtaaagtggatgaaaagggccaggtggaagaagaccttcgatcacaaattctaggccaattatctgagcaggtgaactatcagcaactttattcgcaggcactgcaagacccagagcttaaacggacccggctggagcttgaagcggctatggataatgcccgtactgctaaggatgcggtattcgaactattccaggacctagatggcttcagtttggatgactacgcatcactctcagatacaagggaatccatagacgatctgatccggtttatgcagaaggccttgccatacgaaggggaagctattgagattcgcggacaaaagcaatgggccctggtaaaagatggtctcgaacaaatgctgtttaccacggttcgagaagacgcgaccaattcggaaaaattgcatttgattggtttggatcatcccgtgattgcaaaacagctcgataaataccgcaatcttgatcctgaataccttggtttctattctagtgagctgaatgctggtgaaaccgtttctttatgggaagtaagggctgccaacgaaaaagggcacaatgttcactccatcatgaaacttgctgtcgattgcaatggtaaccggctacctcatttagaaaagcaaatagacgcagtgtttaaacctaagggaaagaaaggcgctcacgaagtagatttgcataaaattgaagccgtcttggagcgtgaacttcatcaccggaatatcgtgaaacctgagcagtctttctctgccaagctgatctgcttagcgtgtggttga

SEQ ID NO: 238568 - DNA, 507 bp, Klebsiella pneumoniae
atgagcgatgtgctgaccaacgacaaatggaagcgacgcggtgtctcagtgctttggtgtggcaaaacactggctgaattaaatgccgcaagtcaggtgatcagtctgcgtcagttcatcggctattacgaagcgggctggccggacgatatgcctctgctgaatgacgatggcttatacgtcgcagggttggacgtagccgtagacgctttatcaccagaagatgcactggaatggctggaatccgagatttacgaaatgatctacgactttcagaaccatgccgatgccgcgttgattttctggatgccggatcaggggcgctggaaggaagatctgaccaccagtacctacaactggtgcttggctggtaaatacgatgcgcaaatgttcccgttggggcaatgcatctggaacggcgcacaaaaggacgtgcgccggattgaatccgcttttggcggaaaaacgaacgaatggctgggtttatacctagagcggatcagctaa

SEQ ID NO: 238569 - DNA, 3264 bp, Klebsiella pneumoniae
atggcaactaaaaaaacgaaagcggaactaacgactgagttagtcgcagaagctgttggtgcgggtaaaaaggcgcagcttgaaacggttgatttttctgatcccaatcgccccctaacttgccttgaggttgattttcctattctaccaatcaaccagattgcgcaaatcgaaggcaacgcaggtaagccaatatatcaaatgagtaagtggtgggcacgccgtcgctccagtgtgttccgctcgatgttgattgcggctgcgactaaggctcctgaagagccagccgaggcagcaaaactggtatgggacaactactactccaatcatcaagataacaaagcttttaatgatctcaaggtcgctgacatcttcatgggtggtggtaccacgctggtcgaaggtgcccgactaggcatgcagatgacaggcaacgatctcaatccggttgcctggctggttgtaaagaacgaactggctgatgtcgatctgaacgaagtaaacaaactgtttgatcacatcgaacgggaagtaaaaccccagatcatgccgttttacgcctgtgaaggccctagcggtgaaaaaggcaaatggacacagcgttctactggcaaagtcatgggcaatgattttgatccgctggctctgacacctgaagaacgcaaagactacgtatacgaaggtccggaggttatttacaccttctgggctaagcatggcccctgtgctgctcccggttgcggacatcgtacgccattgatgacctccccagttgtggcggtgaagtctctctcggttaaaacctggcaagatgttgagtgccaacactgcggttcgagctttgatcttgagcgccaggaagcccgtatggctccagatgttccgctggtcgtaagcgattcagaagctccttacgccatcatggatgatgctgggaactatcaatgccctcattgccagcatcaatatcgtgatgaggcggcagcgcagaagggagagtcttcgcgcttactcaagaagatgagtaaaaataaaaaggttgatttgtctctgcttgttcatcctgattggctcaaaggttcttcaaaagcagacgaaaaaggaatatttggcggcacctcccttagtgaggtggaagcaacgcagcgttggaatctgcacagaacaaagacacttaagctgctggaagtacggggtaaattgccagaagaaattacctgccctgattcaggtttggtgataaacactcagcaaggaaccattcctaagaagtctaatttcacctgtcaggaaagcacttgcggtcgtcaacaagatgttctcgacagcattaaagcttctggccagaccggcccgatggctgcttacgtattacagtgttattcacctggacgtgatgcaacaggttcaccatacaatggccgctactttgctccagctgacagcaatgctgccaaaagacaaaatttggcggtatctgagtgggcgcaaaggaaaaattcggatttgcggggttattggcccgaatccgaattgccctatggatttatgacacaccatttgcaaggcggcgttcctaatcatggttttacgcactggaacaccatgtttaacccgcttcagcttctgattcatgcacaaattctcaaggctattgacacatcccatggcttcagcgattcaagcaaagagatcgtactgggtgcttttcagcaatatcttcgcaatcagaatctcttttgtttctgggatcgtggttacgacaagcttgttccaatgatgagtaacaataactttcaccctaagtcgaacattgtggaaaattccgttttttctagcttagggcgaggcaattgggattcgtgcagagcaaacaccttgaaaggtcttgaatggtgtaagcaaccatgggaaaccgtttctaacgagatgttaaccaatatgtccgccgacattggcaaattggtgagcggcaaaagctcaaaggccatgccaaacgatcctgtgttgccgggtaccttagtgacctgcggctcgtcgacggagttaaaacagtatgccgatcagtcgtatgatctcgttattaccgatccaccatttggtggcttgctgcactacgccgagttagcggatttcttctatgtgtggctacgtctgctgctgaaggataaatacccagaggtttatgctggggaatacacaccaaagacgctagaagctgtttctaacaaagcacgccatccagatgatccagatgcgttttataagcgcctgctgaccgaatgttggcgggaggcgaatcgcttgctgaaaccagggggcattttggcatttaccttccatcacagcgaagacgagccttggttggatgtattagagagcttatttgacgcaggttactacctggaagcaacgtatcctattcgcagtgatgaaactaaaggaaagggcgagtttggttccaagaccattgaatacgacattattcatgtatgccgtaagcgtactgaagcgcccagtaaaatcagctgggctcgcttgcgtcgcaagattcttgcagatgtgcgtcagttgcaagagttgttggaacatcaccagtcaaaaggtttgccagtagcagatattcaggtcatcaagcgcggtaaggctttagaatatttctcacgccactatggccaggtatatgttgaggaaggccgcgaattcacggttaacgaagcgttggtagggattaaccaaattctggatgaccaatcagaatcagtatcgggtggtaccccggtggtgtgtgagccaaacacacgccaatttctgcgtatttttgcacgccaaccttcagtcgagcgcgatcagatgcagaaattcctacgcggtagcggcatagcaccatcgacttttatcgctttgggctgggctaccgaaaccacacgaccaaaggcttttcattggcgatctccgctagaaattgcgcaagagcgaatggccagcagtcgcagtgtgagccgcgactttgatcaggccatgttgcttgtgggggcctgttatccggaaagcggtatcaataccaagaaaattctggatgataactttaagcctcacccggcattaggtcatctattagattggcttgttcacaacggagctgacttatctatgcgcagtgcctgcactttggcaaggcaattgtttaatagatgggaagcagatcatcagcaggttatgcaggaacaaatatcattgtttggtatggaagatgaaatatga

SEQ ID NO: 238570 - DNA, 999 bp, Klebsiella pneumoniae; identical to SEQ ID NO: 84345

SEQ ID NO: 238571 - DNA, 2682 bp, Klebsiella pneumoniae; identical to SEQ ID NO: 84346

SEQ ID NO: 238572 - DNA, 195 bp, Klebsiella pneumoniae; identical to SEQ ID NO: 84347

SEQ ID NO: 238573 - DNA, 219 bp, Klebsiella pneumoniae; identical to SEQ ID NO: 101445

SEQ ID NO: 238574 - DNA, 627 bp, Klebsiella pneumoniae
atgcgcgacctcgtgcgcgaacacacccgccagctcgcgtgggctcaggctgcgcagcaggccatcggtgagggcgatcgatgcctcctgcttcgatccggtggcgaaggcgttgacgacggcactgggcacatagtgcggcaccggcgtggcgggcaaaccggcacgggcgggcagctcgcgcaacagggcccacatctcgtgggcttgttgcgggtgcaaggcccgtacgcggtacaggcgcaagctcagcgccgacgcggctaccggttccagcaacaacgcacctgcaacggcaaacagcgcgagccacaggcagccttccccaaatggcagtctccctgctgcggcagcgatcccgaccagggtcaggaccaacagcccggtctgcaggcggttgagccagcggtgttgcaagagcgcagtgcgcggatcactcggatgatgacgggtcatgctcagaggtctcggcggcgcggtcgccgcgcttgcgcagcagccagtaggtcgcacccagagccagcgtggcgcctgccagcgcggctatctttgcggggctcgcgtcggagtcgaggatcacgaacttgcgggagagtgcgatcaccgcgatcaggaccaccgtcttga

SEQ ID NO: 238575 - DNA, 474 bp, Klebsiella pneumoniae; identical to SEQ ID NO: 201805

SEQ ID NO: 238576 - DNA, 525 bp, Klebsiella pneumoniae; identical to SEQ ID NO: 133311

SEQ ID NO: 238577 - DNA, 753 bp, Klebsiella pneumoniae; identical to SEQ ID NO: 201803

SEQ ID NO: 238578 - DNA, 765 bp, Klebsiella pneumoniae; identical to SEQ ID NO: 201802

SEQ ID NO: 238579 - DNA, 786 bp, Klebsiella pneumoniae; identical to SEQ ID NO: 201801

SEQ ID NO: 238580 - DNA, 975 bp, Klebsiella pneumoniae; identical to SEQ ID NO: 133330

SEQ ID NO: 238581 - DNA, 813 bp, Klebsiella pneumoniae; identical to SEQ ID NO: 201799

SEQ ID NO: 238582 - DNA, 441 bp, Klebsiella pneumoniae; identical to SEQ ID NO: 201798

SEQ ID NO: 238583 - DNA, 2022 bp, Klebsiella pneumoniae
atggcacagttagtaattagaaatgtaagaagctattctaaagaacgaagcattaacatcgatttgagcaaaaaagttaatctcatatatggtcagaatggaagtggaaaatcaactatatcagggtatttttacagcccctctaatgtggcatacaatgattgctcttttagcaaagaaggtgattataattatgtcgtttataataatcagtttgtagaggactctttttatcataaatcagaacaaccgggagtatttacattaagccaaagtaacaaagaagtgctggacgatataaaacagtcagataaaaaaatagcaagtttgaaaagtcggctcactcggttggatagtgaaataaaagaaaaagatgaaatgcttattaagcttgagaatagctgtaaagaagctgtatggaaaaagacagcacatatcagaacaactgaacttactgagttgatggcaaaaagtttaagaaaagatagtctgtatagtaaaatatgcacacaagatgaaaaagatgaagcaagtacagaagatgttttgaatgaatataagaagttgaaaaataataaaacttcttcttttaattcaatcaaccacccatcaatgcctatcttgaatacacaaaaggaagaattgctcataacaccattaatcccatcttctaatagttacctttcaaatgttattgaagaattaggcaatgcagattgggtcaagtcgggattaggatatgttaatgatacaatgtgcccattttgccagggcgatacaatcaataatgattttttaaaagccataacagatgtctttgacgaaacgtatgaactaagattaaaagatcttaaagatatttataatgattactcaaattcttgtgatgaatacataagagaattagagcattctttgtatgattcgggttatgtttctgatgacgataatatctggggtatgatcaaacagatcgggcaatctcttgaactaaataaaaatgctctaaaagaaaagatagaaaagccatcggcagcaatatcacttattgattcatcaataaattacgatgaagtaaacgaaaaaatcaaagttttgaatggtgaaataaaggagattaatgacagattaaatgcctatgaaacgagcatttataatattacaagtaagctctggaaggtcttgaggaatttatgcagtgatgtaattgataataataacatcaatatggaggagttaaaaggtgaaaggaattcaataatacaaaggaaagatataattgaaggtgaaatacaacaggagaaagttaggctttcaaaccttaggaaacaagtttctaacatggatgaaacggtagataaaataaatgcatcactcaaaaatcttggcctaaatagtttagagattaaaaaatcacatgaaagaaatttctttcaaattcacagagggaacgacaatgttgaaatttataaatcactaagtgaaggggaaaaaacaataataacctttttgtatttcttagagtgttgcgaaggtcaacttgaagatggggaacttaaagataagttaattgtgattgacgatcctatatcgagtttatctcatgactatatttatgagatatcatctttaatacattatcgaattattgaaggaatagcaccagatgctaaaattttaatacttacgcataacttattcttttttcaagagattttaaaactagctcctcctaaaataaaaaattttgataagcaatataatttattgagagtagtgaaaaatgaatatagtgatgttatcgctatgtctaaaggtgatataaaaaacgagtatgaatcctattggatggtattaaaaaatgtgaaggagggcattgtaaatcctgttgttcttcctaatgtaatgcgaaatattcttgaatactatttttcattttcttgtaagctggatagtcttaaaaaagcattagaaaaacttgcagaatctgagagtgatattacatataagtggctttgttga

SEQ ID NO: 238584 - DNA, 486 bp, Klebsiella pneumoniae
atggggctggcggattccgtcagtcgcctcacgtgcctactggcccttatgggacagatcgcgatcctgctcagcctgcccgcgctgctggttggcgcggcggaggtctattggcctggtctattgttattggccgcatcgccccaactggccctgctcgcacagctcggcttgtctcgcgtgcgtgagttcgacgctgaccgccttgcggcggaactgactggcgacccgcaggggctggcgtccgcgctggcgaaaatcgagcgggtcagccgctcctggcgtgcctggctatggccgggatggggcaatcccgagccctcctgcttgcgcacgcgtccggcaacgcaagagcgcatcgcacgcctgctgacgttggcgcctgggccagcatcagcgttgccactccgcgcgccccatttttttccggaatccgctttggcgacgcgcccaccgcgctggcgcctgagcgggctgtggcgctga

SEQ ID NO: 238585 - DNA, 1464 bp, Klebsiella pneumoniae
atgttaagaattgagtcttttgaagttctgatggaaaaaatgaaattttcattagtggatgaatctctggctaaaagtgattatgatcgattaatcacgagttattatggtaagtcttgcaatccactaatattctgcgagagtttgctaatcattggagtaagatctggcttagagtttttaatttccaaaagtgtcaactgcaatgctgttgtacatattattgaggaaaataaaacgttatttgaaagattaaataaacttaaaattgataatgttactgtatattgttcatttgaagaatacataaattctgttgaatctcagacttatgattatgttagggttgatagggttaacttctcattggatttagtgagccagttatattctaagcataatatttcttcaatatgtggggaattgaacgaggctgactgtaagccattaactctttacaggttgagcagagaaaattgtgattcgtttttcttcaacatcaaagataagaattataatgttgcaggagcacgcaagcgtattaaccagcctgaagtgtctgtagtagttgccgcctatggggtggaaaattacttagatgaatgtgtttcatccatagttcatcaatcccttaaaaatattgaaatactcattgttgatgatggatctatagacggcactggaaaaaaagcagacgaatggcaaaacagatttccagatgtagtgagagtaatccacaaagaaaatggtggatgcgcatctgctcgtttagcaggcatgaaggaagcgaaaggcgagtatgtcgcatttgttgatggtgatgattgggttgagcaaccaatgtatgaggatttattcgagtctgctgcattgaataattctgaaatagctcaatgtggtttttatgagtttttcgcggaccaaaccaaaaattactattcaactgcttggggggctgatggtcaaaatgggactaccggattggtcaaagaacctacagaatacctgacgttaatgccctcaatttggaggcgaatctataagacatcttttctgagaaagcatggcattgaatttcctgtgcagataagaagacatgatgatttgccatttgcattcatgactattgcccgtgcaaaaagaataagcgtgatacctgattgctattatgcatacagacttaatcgtccaggccaagatgttggtgcaacagatgaacgtctttttatacactttgaaatttttgagtggctttatgaacaagttagaccatgggcctcaatggcaatcatgagtaatatgcgacttgtcgaaatcggaacacatagctgggttttaagtaggttggataaacatttaaaaagtgattatctaaacaaatctatatctgggattcgtgaaagatataagaattatgagttagatgatggctggctagataggcttaatcaagccagccgttaa

SEQ ID NO: 238586 - DNA, 1167 bp, Klebsiella pneumoniae
atgaaagttaatttagttggtgcagttggcggcagcaattttggtgatgaattcatactgaattgctgtatagctgagtatcttaagaacaatgaaacaaaagtctcagtcagtgggtttagccctaacattgttttaaagggcgaatctaaagttgaacactgctcattaaatttctttagcatacttgatactttaaggataaaggctgcaacgggagaacagatattaatcgatgaccttatgtcacattttgcaagcccccaggggtttgatgcaattcatttcataggtggtggttatatcaattcactttggccaagtaactacgcattacttgcgatagcatatgtttattcaaagattcataaaatacccatttatgcaactggcttgggtctttatccaaatttagaaaatgataatataattagcctctttaacagcctcgacataatcgatgtaagagaccaaaactctaaacgtttcattcctgaagcttcttttacaggggatgacgctcttttagccttaaatgaatcaagcatattggaaaaaaaagaaagccctcctgcattaatactatcattacaaagccatctctttgaagggcaatcactgattgaaaaaatctttaccgatgaaacattcaatgagttaaaaacaaaaaaaataaaaaaaataataataattgaggcagcgccagaggataacatacccttttcaagggaggtatttaatagcgctttggcaaatggtattgatatagaatttgttacgggacatgaaattttaagatgtggcataccttttaattcaaaaagctttgtcatctcctccaggtatcatgtcaacttaatttattcaatgctcaaagttaacgggatagctgtttatcaaaatgaatattacagaaataaacaccagtcaataaccgacatgggcggaaaatggtcaatattaagccacgataagcttagtgaagccctagattattggctgcccctgaacttagaaaaaaaaccttcatcatcaaccatgaaaaaaatggcatatgataaaaaggatttattttcgaaaataattgctaacacgcagactaaagataaaaatagcatttctctagagagtgcattagcaatagtcaatgagtttatttcaaagtaa

SEQ ID NO: 238587 - DNA, 687 bp, Klebsiella pneumoniae
atgaagctatccgacgttaaaagcaccggagacagcatcttcattcctgctcttgagcagaacatgatgggtgccgtgctaatcaatgacaatgacgaggttttatttttcaattctgctgcggaaaaactgtggggataccgtcgtgaagaggtgattggtcaggggatttcgatgttgatcccgcatgatttacgcgcagcgcaccccgattttatccgtcataaccgtgaagggggtcagccccgcgttgaaggcatgagccgggaattgctgctggaaagaaaagacgggaccaaagtctggacccgtttcgccctttccaaggtcaacgttgaaggcaaaattttctatcttgcctttgtgcgtgacgctagcgtagagatggagcaaaaggaacagaaacgcctcctggtattggcggtagaccacctggaccgcccggtaatcgtactcgaccctgagcggcgtattgtgcagtgcaaccgcgcttttagcgagatgtttggttacgacattaccgatgcaaagggtcaacagccggacaacctgctcaacctccccgaagagccgtcggacaatggcctgcgactcacacagttactctggaaaacgacccgcgatcaggatgagtttctggtaatcacccgtgcgggggctttgttgaataaatcagatttcgggtaa

SEQ ID NO: 238588 - DNA, 1383 bp, Klebsiella pneumoniae
atggagatgtatcttaaaagaatgaaagacgaatgggtcgcgctggttgaacagaccgaccctcacattcgcagactcgcttctgagatagcgatcgcccatgcccatgctttaagcattgagttttatcgtattgttctcgccgatccgcatgctgaggagtttttgagtaatgaacaggttgagcgccaactcaaaagcgcacttgaaaagtggattgtggatgtgctctccagtgaagtcgacaatattgatgaactgataaaaatacagcatacggtggctgaagtgcatgcgcgtattggtattccggtggaactggttgaaatgggttttcgcgtactgaagaaaattctctatccgatcatcattgacagccaccatgaagcgacacataagctgcttgtctaccacttctccattaacagtattgatctggcgatggaagtcatgtccagagccttctcctttagtgaaagtaccgcagcaaaagaagatgaaaactaccgtattttttctttgctggaaaacgcagaagaagtgaaagagcgtcaaatcgccgcgttactgtcgtgggaaatggacattatctataaggtcttactcgactccgatctcggcaacagcctgccgttaagccaggcggattttggtttgtggtttaatcataaaggacgtcattatttcagtggtattgcggaagtcggtcacatctcacgactgattcaggactttgacggcgtgtttcaccacaccagtgggacaacgaaaacgttaagcaataaagcatcacgggtgaaattcctgctgcaaatccgcaataccgtctcgcagatcattacgctactgcgtgaattgtttgaggaagtgtcccgccatgaggtagggatggatgtactgaccaaattactcaaccgacgtttcctgccaaccatcttgaagcgggaaatcgcccatgctaatcgcgccggcacccccctctctattcttattattgatgtcgataaatttaaagagatcaatgatacctgggggcacaataccggtgatgagatccttcgtcaggtgtctcaggctttttatgacaacgttcgcagcagtgattacgtttttcgctacggtggcgatgaatttattattgttcttactgaagcgacacaaaccgatacgctacgtattgcggagcgtattcgcagtcgcgtcgagaaaacaaaaataaaatcgcctgcgggggattttattccgctttcattgtccattggggcagcgatgtttaatggtcatccggattatgaacgtttaattcagatagcagacgaagcgttatataccgcaaaaagacggggcagaaattgtgttgaactgtggaaacccgcttcttaa

SEQ ID NO: 238589 - DNA, 267 bp, Klebsiella pneumoniae; identical to SEQ ID NO: 215493

SEQ ID NO: 238590 - DNA, 960 bp, Klebsiella pneumoniae
gtgcgctatgacaaaacctatttcgataagatcgtcgcctcgctgctgccactgctggaaaaactgaccaccagaaaaatctcccaactgctggccccggactacggcgaccttaacgacccgcgcccggtatttaactggcagcaggcgattatttatgtcgggctggatgcattgtatgacgcagaaattgccgccgctgtcggcaactcaatgttcgccgatttggtcagcgtcgccggacatatctacaagcacggcgtgatggatggcctgtcgcagacggaagagaacccggccatcaacctgcactgcgataagttcagtgaactgatgggcgatgaatttattccgctaataaataaaggcggcggcgcaggtgtagaggttacggcctacacccagacgctctccgatatcgaagcccgcatcggcgaccgcgccaaagcggaccaggtcgtcggcaacttcaacaatcggatcatgatgcgggtgcggaaatctgccaccgccgaattgttgacgaagcaactgccgcaggtggatgtgctcagcaacagcatcagttccggcgttgccgacagcgccgacgcacagggcaacatcggtttttccagtaacacccaggatcggatgagcagcatacaggtgccgttactggaacccgcctcactggtacagcttcccaaagggcaggcgttcgctctgctggaaggtggtcagctctggaagctacgcatcccattaccggacgcagcacacgatccgctgatgccggaaagcatcacacacatagcccactatatggaaaaacagtacgacagcacgcctatatggtgggaccgcccggagacagttgtaacggcgaaaaatgaccctattttatggctgaacgacagcgaaaccacggagaaacagaccgatgataccccggacacaccgccagctcgtgagcgttga

SEQ ID NO: 238591 - DNA, 273 bp, Klebsiella pneumoniae
atgtccctgaattttttagatttagatgataaaactagactacatatggcattagaaattcagtatgataaggaacataacaatttttattatagtaattatttaacagaatatggtaaatctttatggccctcattgttagaagaagcagttaaatatgatgatgcatggttggagaatgagatccgatctagaggactgcttgcgcaattttatacaaaaaggaaaccgaaaagcactgagttgatgcaggcacgaggctttgttgaataa

SEQ ID NO: 238592 - DNA, 519 bp, Klebsiella pneumoniae
atgctgcagctcatcacgcagcgtctgcagtcgctgcaatcctctgaccagtggggccagacgatggatgcgtttaagcagcgggttatcgagaacagtcagcgcccggcaccggtggagggcattaagcgtgcggagaaatacgagcagcgctggtttgatcccagcatccgactgaccgaagacctgaaggacaatgaggggcgggtgtttgcccgcaagggcgaagtggtgaacccgcttaaaaccgtaccgtttgtccagaccctgtacttcatcaatggtgacgatgccgaccagctggcctggatgaagcgtcaggtgccggaaaccctgatgagcaaaattatcctggtgcgtggcagtatcccggacacctccgcagcgctggacagccggatctatttcgaccagaacggcgtactgagcaagcgatttggtctgacggcggtcccggcgcggatcacgccggcgccctccggtgaacggctgaatattgagaccttccctgtaaaataa

SEQ ID NO: 238593 - DNA, 993 bp, Klebsiella pneumoniae
gtgaaaaccctgacgcttttcctgagtgccctgatgttgtggggggacagcctcagtgcggctgctgacccctcctgtgagggccggtttgttaacccgatcaccgatgtgtgctggcgctgcatcttccctctgtcgctcggcagtgtgcaggttggtaaaggcgacctgcctgataccagcaatcccggcagtcccctgcagttgtgtccggcgccgccaccgctttttgttcgtcccggcctggccatcgggtactgggagccgatggccatgacggacgtcagccgttcgccaggctgtatggtcaatctggggggcttcagtatcaatctcggcaagaccggcatggggaccgcgagaaaggacgacaagcaggtgaacggcgccttctatcacgttcactggtacaagtacccgctgacgtactggctgaacatcatcacctctgcaggctgtctggaaggcggagacatggatatagcctatctgtccgagatagacccgacctgggtggacagcagcctcaccaccatcctgaatccggaagccatcctgtttgccaaccccatcgcgcagggcgcctgcgcagcggatgcgctggccagtgcattccatatgccactggatgtgctcttctggtgtggtggaagtcacggctcactttacccatttaacggccaggtcagtaatgagtccagcccgctgcagtcgtcggtactggtcagtgagcgtatggccttcaagctccaccggcagggacaaattatggagagtatcgggaaggacaaggcagtctgttacgaatatccctccccgatcatcccgaaagagcgctggcgctatcagatggtgaacatgtatccggacagtggtcagtgccatccgcttggacgcagcgtgatgcgctgggaggccggcaaaaatccacccaacacccgcaagaactacggctatctgatgtggcgtaaacgcaattgtgtctttctctga

SEQ ID NO: 238594 - DNA, 1200 bp, Klebsiella pneumoniae
ttgctcagcgccgaaaccgccctcgatctgctcgatccggcgattgccgcgaaggtgcgactgtgcgccgcgccgctggtggaagggacgctggcggccaccgtcagcgctgcctccggcgccgggatcgacaaggtgatcgccgacgccatgagcgccctggaggccaagcgggttcagctgggtttaccttcgccaacttctgacgccgcgccggcgccgatgcttgccgacgacggcgacacaaaatcggtgtcagtcattattaacaatcataacggcctgcacgtgcgtccggcgtcgaagctggtcgccgcgctggcgggctttaacgccgatctgctgctggagaaaaacgggaagtgcgtcaaaccggacagcctcaaccaaatcgcgctattgcaggtccgccgcaacgataagctgcgcctgctggcccgcggtccggatgccgacgcggcgctggcggcgtttcaggcgctggccgccgataacttcggtgaatcgcctgcggcgcaaccggcagcggctccggcaacgcccgagcgcgtcgaaggcgctgccctgcgctatccgctggccctgatccagccgctccgcccggctgccgccgatgccgcccgcgagcagcagcgcctgcgccaggccattgaccagacgctggcggatcttatcgccctgaccgagctggcggaaaataaatttcacgccgatatcgcggcgatcttcgccgggcaccacaccctgctcgacgatgacgatctgtttgatgccgccaacgatcgtctgctcaccgaacaatgcacggcggaatgggcatggcatcaggtgttgatggagctcagccagcagtatcgccagctggatgacccctacctgcaggcgcgctatatcgatatcgaagatattttgcagcgcaccctgcgccatctgcagggcgttcaggagagagtgccgacgcccggcgagccaacaattattattgccgacaacatttatccctcaaccgtcttacagctggatgccagcttcgttaaaggcctgtgcctgcgcgatggcagcgaacaggctcacggcgcgattatcgcccgcgcggcggggatcgcctggctgagccagcagggcgaggcgctgaacagcgtgcagcccggcgagactatcgtgctcgatatgcgccaccagcgccttatccgtgactaa

SEQ ID NO: 238595 - DNA, 1155 bp, Klebsiella pneumoniae; identical to SEQ ID NO: 233846

SEQ ID NO: 238596 - DNA, 219 bp, Klebsiella pneumoniae
atgcatgcctttatttttctggtgctgatgacgccgagtagtggcggtgggatttgggatattactcccatgcctaatacagatgtctgcataaaaatgctacgggtactcgaagcacgtgggggcagaggttacggaagtaatacaggagagtgcattgaaattaaaacccgcgagcctttaagcagcgtgatagaaacattgaatgagggtgggtaa

SEQ ID NO: 238597 - DNA, 273 bp, Klebsiella pneumoniae
atgttgcttgagcttggtttgcgtgtctacgaagcccagatggaacgcaaagaatccgggtttaatcagatggcattcaatagagcgctgcttgaaagcatggttaaaacacagtttactgtgaataaggtgctggggatcgaatgtttgagtcctcatgttcatggtaacccaagatgggaatggtcagggttaatagaaaacatccgggatgacgttaatgctgtgatagagcaattctttccaaaagtggatgacactgacaatgattag

SEQ ID NO: 238598 - DNA, 702 bp, Klebsiella pneumoniae
atgtgtgcgatggatcgtagtggtgatgacagcttaagtcaatcggttagggatgctcttcttcacataaaggggttgtataacacctcacctgtctctgtttgcgtaagaaaccaacaacgcgatgtcctatattccaacacatcatttgaacaaatgtatgacttttttaaaacagaaggtgtagcaggtagtttctcaggatcatttcatgaactggagttgatgctttcccagttagaacttgattgcatggcgctaggtaaaggttgtgtgttaagtaaaattttttcgtgtggaaaatcaaattttcaaattcgaattgagtttatcagtcttttggatgatgatttttattttttttggcaaatgaatcttctgataacggttccattatccagccgaaaaatgaaattcataaaatcaaaagacattccggattttgatgaggctattgcaaggataagtgatttgaatatcattcctctttcattttatgttcttggttttagctatatggacatatcaaattatatttctgtgcctgagaagattgtaaaaaaaaggatcgatcgtgcgaaagagaaagtattggaggtttatccgtcttttagagcatttgtaacggattgctacaggagcaggaaaatatatttttttattgagaatgtttatgaatatgttatgttaataaattgttaa

SEQ ID NO: 238599 - DNA, 321 bp, Klebsiella pneumoniae; identical to SEQ ID NO: 233321

SEQ ID NO: 238600 - DNA, 192 bp, Klebsiella pneumoniae
atgaaacttgcaccacaaacccgcgatatcctgctacagtacaaagccctgattaatgcccgccgccgcgatgccggtcagcgggaactgaccactgcgcaggtgatggatgacatctgcgaatacatgacctgtcagtgcgccgtctatattggcggccatttcattcttcaggggggaaaggcacgataa

SEQ ID NO: 238601 - DNA, 333 bp, Klebsiella pneumoniae
atggccgactaccgacaaaattctggtcgtatcgatgctatgacgcaagatgcgggtattaaggataatgtggatcagaaagttggtgggatgattacagagaataaacaacagcagcaggaaacccgcgaaaacatacaacggcaaggcgcagaggtgaaaaatgagaatactgaaatggaaaaggaccataaaacaaaagcaaatgagtttaaaggtgattataatgaaagaaagagtaaggtgaaatctttaccaggagctgactcgcctactgagttagaggcaaaagcggcgaaaattcaaaaggattatcttgatggtaaaaggtaa

SEQ ID NO: 238602 - DNA, 291 bp, Klebsiella pneumoniae
atgctgatcgcctatgcagagtgcctgcttgaagcggatattaacccctccatgcacatgttcggcagctgcattgacatcgatccggtggcggcagatatggcattcatccagctgtcactgctggggatagcggcggaagtggtgacgggcaacacgctcacgatgcagttccggcgggtgaggtataccccggtttactacctcaatgattttgaaaaacgactggcagatctgcgccggttcagggctatgcgggacttcatgcgcggaatacaggaggccgcgtaa

SEQ ID NO: 238603 - DNA, 618 bp, Klebsiella pneumoniae
atgagcgaaacaatctggctggaaccttcaaataataagacggtttatctgcaaatcaaaaatacctccgataaggatatgagtggcctgcaggcaaaaattgccagcgccgtcacttcaaagggatatcaggtcgtcagtaacccggatacggcgggctactggatccaggcgaacgtgctcaaggccgataaaatggaccttcgtgagtctcagggctggttaagccggggttatgagggcgctgtgactggcgccgctcttggggcggggattaccgcttacaattccagttccgcgggagcaaccctgggagtagggcttgcagccggtctggtcggaatggcggctgacgcgatggtggaagatgtgaactacaccatgatcaccgatgttcagatcgcggaaagaaccaaaactcaggttcagactgataacgtggccgtattgcgtcagggaacatccggcgcaaaagtgcagacaagtacggaaacgggtaatcagcacaaataccagactcgcgtcgtctctaacgctaataaagttaacctcaagttccctgaagcccagcctgttcttgaagaccagctggcaaaatcgatcgcaaatattctgtaa

SEQ ID NO: 238604 - DNA, 147 bp, Klebsiella pneumoniae
atgaagcttaataaagtcatggctgtgatggtcgtcagctctgcgctggtgttatctggatgtagtgcaatgggaaccgccattaaaaagagaaatctgtgtaaaaacccagatgagcgaaacaatctggctggaaccttcaaataa

SEQ ID NO: 238605 - DNA, 369 bp, Klebsiella pneumoniae; identical to SEQ ID NO: 92424

SEQ ID NO: 238606 - DNA, 291 bp, Klebsiella pneumoniae
atgcgcctgggtgacctgggcggcgcggataaagaaggtgccgaacagcgggccgctggcgccgccgacgttggaaagcagcgtcatcccggtattcttgagaataaaaccgatgtctttatcggcgatcgacggcagcttttcgaccactttgctgaagccgcgatgcatattgaggccgtggtcggcgtcgccgatctctttatcaaggccggtgagaaaatcgctctgtttggtgaaaatgtcgccacagcggtacagccagtcgacgatttgcgttctgttcagtga

SEQ ID NO: 238607 - DNA, 441 bp, Klebsiella pneumoniae
atggagttcggcgtcggcatccatggcgagccgggtatcgaccgccgccgcttcagctcgctcgaccaaaccgtcgatgagatgttcgataccctgctggaaaacggcgcatacagccgcacgctgcgccagtgggataacgtcaagggagcgtggcaggaagtgaaacagagcaaaaccgcgctgcaaaacggcgatcgggttatcgcgctggtcaataacctcggcgccaccccgctttccgaactgtacggcgtttacaaccgccttgcccagcgctgcgaagcgtccggcattgtgattgaacgcaacctcatcggcagctactgcacctcgctggatatggcgggtttctccatcaccctgctgaaagcggatgatgacacgctggcgttatgggacgccccggtccataccccagcgctgaactggggaaaataa

SEQ ID NO: 238608 - DNA, 504 bp, Klebsiella pneumoniae
atgaccggctcgcggaaaacgcggatcaggctggcggtcttttttctcccttttttcccgtctggcaacggtcggcgcatcgccttttttcaagccgacgcgcgctttcatggcgccgatagcggcgacggccagtaccagcgtttcacgctcctggcgcgtgagcaggctgtcatcgcaaatcagggtgttcaggttatcgatcagcttattcagcccgggttcagtgactttcattttatgctcatattccttgtgtggtggcgatcagtcccggctctcattcacctggacggtgaccggcaggcctgcatcaaaacaggtctgataccagctggccacctgcaggggatcgccctcttttatccggcgtatgccgccggcatccgtcagctgcaggcaggtggtaccgtccagacggatcacgtaggccgcttcccgcagggagtaatgaccgtcacccagctgcaactccaccgcgtcaccggcagccgtctggcgtaa

SEQ ID NO: 238609 - DNA, 246 bp, Klebsiella pneumoniae
atgtgcgacgtctggctgccggtggtggaatccctgcgtcattccagcgagcaacatctgtctatccctgccgcgctggatgccgcctgcgaagtggccgagcgcgccgcccacgccaccatcaccatgcaggcgcgtaaaggccgcgccagctatctcggcgagcgcagcatcgggcatcaggatcccggcgcgacctcggtgctgtttatggttcagatgctggctgccgccgccaaagagtaa

SEQ ID NO: 238610 - DNA, 141 bp, Klebsiella pneumoniae; identical to SEQ ID NO: 218064

SEQ ID NO: 238611 - DNA, 144 bp, Klebsiella pneumoniae
atggaggttgatgatggggcactttttgacctgagctaccacagcttccccttcttcgatgctcttctggataaaggggagaaagatgatgatacgggtgtagtcaacatagataaaatagtcgcttttctcagagatccgtaa

SEQ ID NO: 238612 - DNA, 633 bp, Klebsiella pneumoniae
atgacatctcgtgtttatgcctacctcagagcctcgactaaagagcaggacgcatcacgcggcagagagcagcttgatgagttcgctcattctaagggtatgaccatagccacctatttcacagagaacgagtcgggagcatctttgcagcgtcctgagttgttccggctgctggctatcgcacagaagggtgacgtattgctggtggagcaggtagaccgactgagccgcttaaaggccgacgactggcagatactgcggcagattatcagcgacaaggggatcagggttgtcgcgttagacttaccgaccagccaccagctgatccggtccggtgatgagtttactgaccgtatgctggaagcattgaacgggatgatgctggatatgctcgccgccattgcgcgtaaggactacaccgaccgtaagcgtcgtcaggagcagggaatcagtaaggcgaaggcggcgggcaaatacaaaggtcgcccggaagacgcccagcgcaacgagaagatcgccaggttgctgaaagcggatatgtcatacaccgatatcatgggaacggtgaactgttcccgtgcgacggttgccaaggtgagcaagagtctgaaagtgaccggaatcaccgactaa

SEQ ID NO: 238613 - DNA, 669 bp, Klebsiella pneumoniae
atgaaaaagcaccttctggccctcgggctgctgcttgccggggtgtcgccggcgcaggcgctggatgtcggcgatatttcatcctttatgaacagcggcagcagcacgctgagcaaaacgatcaagaacagcacagacagcggtcgactgatcaatatccatctcgaacggctctcttccccgctggacggcgggcaggttatcccgatggacaaaccggatgaggtattgctcactcccgccagcctgctgctacccgcccaggccagcgatgtgatccgcttcttctacaaaggcccggcggatgacaaagagcgctactaccgcattgtctggttcgatcaggcgctcagcgatgcccaacgcgataacgccaaccgcagcgcggtggccactgcttccgctcgcatcggcaccatcctggtggtggcgccccggcaggtgaactatcgctttcagtacgccaacggctctctgaccaacaccgggaatgcgacgctgcggatcctcgcctacggcccctgcctgaaggccgccgatggtaaggaatgtaaagagaattactacctgatgccgggtaaatcgcgccgttttacgcgcgtggacacggcggataaaaaaggacgggtggcgctttggcagggtgagcagtttgttcccgtgaaatag

SEQ ID NO: 238614 - DNA, 1761 bp, Klebsiella pneumoniae
atgcctcaacgatggattaccccaggactgaaaacgcggcttgccttcggcatgatctttttgttcgttcagcccgacgtcagcgctgccgccgcaggcgcgcagcagattggcggggtgattattccgcaggccttcagccaggcgctgcaggacggcatgagcgtcccgctctatattcatctcgccggcagccagagcacccgggacgatcagcggatcggcagcgcctttatctggctggacggcggccagctgcgcgtccggcagatccagctggaggagagcgaaggtaacgccagcgtcagcgaacagacccgccagcagctgatcggcctggccaacgccccgttcagcgaggcgctcaccattcccctgaccgacagcgcacagctggatctcagcctgcgccagctgctgctgcagctggtggtcaagcgcgaggcgctgggcaccgtcctgcgctcgcgcagcgaagatatcggtcagtccagcgtgaacaccctcagcagcaacctgagctataacctcggcgtctataacaaccagatgcgtaacggcgggagcaacacctccagctacctgtcgctgaacaacgtcacggcgctgcgggagcatcacgtggtgctcgacggctcgctgtacggcatcggcagcggtcagcaggacagtgaattatataaggccatgtatgagcgcgatttcgccggccaccgctttgccggcgggatgcttgacacctggaacctgcagtccctgggaccgatgaccgctatttcggccggtaagatttacggcctttcctgggggaaccaggccagctccaccgtcttcgacaacagccagtccgccacgccggtgatcgcctttctgccggcggcgggcgaggtgcatctcacccgtgacggtcggttgctgagcgtccagaacttcgctatgggcaaccatgaagtggatactcgcggcctgccgtacggtatttacgacgtggaagtggaggtgatcgtcaatggtcgggtggtcagcaaacgcacccagcgggtcaataagctgttcagccggggacgcggcgccggcgcgccgctggcgtggcaggtatggggcggcagttttcatatggatcgctggtcagagagcgggaaaaagacccggccggcgaaagagagttggctggcaggcctttcggcctccgggtcgctcagcaccctgagctgggcggctacgggctatggctacgacaaccaggcggtgggggaaacccgcctgacgctaccgctgggcgagtcgatcaacgttaatctgcaaaatatgctggccagcgatagctcgtggagcagcgtcggcagcatcagcgccacgttgcccgggggattcagttcagtgtgggttaaccaggagagaacccgcattggcgatcaattgcggcgcagcgatgccgacaaccgggcgatcggcggcaccctcaacctgaacgcgctgtggtcgaagctggggacgttcagcgtcagctacaacgatgaccgtcgctacaacagccattactacaccgcggattactatcagacggtctacagcggcgcctttggctcgctcggcctgcgggcggggatccagcgctataacaatggcgacagcagcgccaacaccgggaaatacatcgctctcgatctgtcgctgccgctgggcaactggttcagcgccgggatgacccatcagaacggctacaccatggctaacctctcagcgcggcaagcagtttga

SEQ ID NO: 238615 - DNA, 525 bp, Klebsiella pneumoniae
gtgattttcaacaccgggctggaggacgatggtcagattagcgccagggttaacgggcggatcttcccgctcagcggcaagcgtaactacctgccgctctctccctatggtcgctatgaggtggagctgcagaacagcaaaaactcgctcgacagctacgacatcgtcagcgggcgcaagagtcatctgaccctttatccgggcaacgtcgcggtgattgagccagaggtgaagcagatggtcaccgtctccggccgtattcgtgcagaagacggcacgctgctggcgaatgcgcggattaacaaccatatcggccgtacccgcaccgatgaaaacggcgagtttgtcatggacgtggataagaaataccccactatcgatttcagctacggcggcaataaaacctgcgaagtggcgctggagctcagccaggcgcgcggcgccgtctgggtcggggatgtggtctgcagcggcctctcgtcgtgggcggcggtgcagcagtcaggagaagagaatgaaagttaa

SEQ ID NO: 238616 - DNA, 1644 bp, Klebsiella pneumoniae
atgaaagttaatgcactgatggcgctggcgatcctcgcgctgctctggccggtagccgcgctcagggcagcggtgaccaagaccacctggtcggatgcgccggcgcgcgagtttgtgtttgtggaaaacaactccgacgacaactttttcgtcacccccggcggggcgctggatccgcgtatgaccggcgctaaccgctggaccggcttaaaatacaccggctcagggaccatctatcagcagagtctcggctatatcgataacggctataacaccgggctcaatgccaactggaagtttgatatgtggctggaaaactcaccggtttcacaccccttaaccggcctgcgctgcatcaactggtacgccgggtgcgatatggctaccagcctgatcctgccgcagaccaccgacgccagcgggttttacggcgcgacggtgaccagcggcggcgcgaagtggatgcacggcatgatgtcggacgccttctatcaatatctgcagcagatgccggtcggcggcagctttacgatgaccatcaatgcctgtcagacctcggtgaactacgatgccagcagcggcgcgcgctgtaaggatcaggcctccggtaactggtatgtgcgcaacgtcacccacaccaaagccgcgaacctgcggttgattaatacccactcgctggcggaggtgtttatcaacagcgatggcgtgccgaccctcggggaagggaacgccgactgccggacgcagaccatcggcagccgctcaggattaagctgtaagatggtcaactataccttgcagaccaacggcttaagcaatacctcgatccatattttcccggcgatcgccaactcgtcgctggcctcggccgtcggggcgtacgatatgcagttcagcctcaacggcagctcctggaagccggtgagcaataccgcctattactacaccttcaacgagatgaagagctcggactcgatctatgttttcttctccagcaacttctttaaacagatggtgaacctcgggatcagcgatatcaacaccaaggatctgttcaactttcgctttcagaacaccacctcgccggagtcaggctggtatgagttttccacctccaacacgctgattatcaagcctcgtgatttcagcatcagcattatctccgacgaatatacctcggcgccgtcgcgcgaggggtatgtcggcagcggcgaaccggcgctcgatttcggctacatcgtcaccaccagcggtaaaacggccgccgatgaagtgctgatcaaggtgaccggaccggcgcaggtgattggcgggcgttcctactgtctcttcagctccgatgacggtacggcgaaagtgccattcccggcgacgctctcttttatcacccgcagcggcacgacgcagacctacgatgccgggtgcgatgacagctggcgggatatgaccgatgcgctgtggctgaccacgccgtggaccgatatctccggcgaagtggggcagatggataagaccacggtgaaattttcgattccgatggataacgccatttcgctgcggacggtagacgataacggctggtttggcgaagtcagcgcttcaggagagattcatgtccaggcgacgtggcgcaacattaactaa

SEQ ID NO: 238617 - DNA, 711 bp, Klebsiella pneumoniae
atgtccaggcgacgtggcgcaacattaactaaggccctgctgaccgtgggctgcctgctggcagcgccgctggcgcaggcgatctcggtcggcaacctgaccttttccctgccggctgaagcggatttcgccagcaaacgggtggtcaacaacaataaaagcgcgcggctgtaccgcatcgccgtcagcgccatcgatcgcccgggcggcagagaagtccgctcccggccggtggatggcgaactgctgttcgccccccgccagctggtgctgcaggcaggtgagagcgagtattttaaattttactatcatgggccgcgggataaccgcgagcgctactatcgggtctcgtttcgcgaaatccccacccgcaacctgacgaggcgcagcccgaccggcggcgaggtcagcatggagccggtggtggtgatggataccattctggtggtgcgcccgcgcgaggtacagtttaaatggtctttcgataaggtggccgggacggtgagcaacaccggcaatacctggtttaagctgctgattaagcccggatgcgattcgaccgaagaggagggggacgcgtggtatctgcgtcccggggacgtggttcgccagccggcgctgcgccagccggggaaccactatctggtctataacgacaaatttattaagatcagcgatacctgtccgctgaagccccgtcccgcggagtga

SEQ ID NO: 238618 - DNA, 690 bp, Klebsiella pneumoniae
atgaacgctaatctggcggtgatcgccgataacctcgattacctgctgtggggccgactggcggagggccagcccggcggcgtggcgctgaccctgctgatggccatcggcgccaccctgctggcactgccgggaggcattgcgctggcgggcctggcctggcgctacggcgggctggtgcggcgtctgctgtttctgtgggcggaaattatccgcggcatcccgctgatatttgtcatcttctggctgtggtatctgctgccgatgctgaccggcggcgatctgcccggcgcggtgaccgtgaccctggcgctggcgtggtttaccgccgcctcggtgatgcactcggtgctggccgggctgcagtcgctgccgaaaggacagtatgaggcggcgctgacccaggggttcgctcccgggcaaacgctgcgcctggtgctgctcccgcaggcgctgcgcaacgttcagccgtcgctggtggggatctttatcggcctgctgaaggacacttcgctggcgtttatcgtcaacgtcccggagctgaccaccgtggccggccaggtcaacaaccgggtgcagatctatcccctggcgatcttcgtcttcaccggcgcggtgtactacctgctgtgctgcggtctgagcctgctggccagccggcgctttacccgccgcgcggccaccagataa

SEQ ID NO: 238619 - DNA, 753 bp, Klebsiella pneumoniae
gtgacgccgatgcttgactggcacggcgtcctgagcgggcagccgttgcaatggattatctctggttttctcaccaccgtctgggtcagcgtcgccgggatcctgctcgccaccctgctggcggtcctgctgctggccctgcgcctcggcggcggacgcgcggggcgcggactggtggccgcgtgggtctcgttgtttcgcaacactccgctgctggtccagctgctgttctggtactttgccgcctggaacctgctgccgctggcggtgaaggaggtggtgaacgacgaacacgcctggtccattctgccgggcaacgtctggtggctgacgccggagttcctctgctcaatgtgggggctgggggtctttacctccgcctttctggtggaagagatcgcctccggactgcgcgccgtcagccccgggcagcgggaagccgcgctgtcgcagggctttacgccgtggcaggagctgcgctttatcctcctgccgcaggggctggccaacgcctggcagccgattgtcggccagtatcttaacctgatgaaactctcatcgctggccagcggcatcggctttgcggaactgacctatcaggtgcggcagattgagagctataacgcgcacgccctggaggcgtttgccgtcggaaccgcgctgtacctggcgctgggggtggcgatgggcgtggcgctcacgcgtctcggcccgggaagaaaactgcaacggagcgcccgacatgaacgctaa

SEQ ID NO: 238620 - DNA, 819 bp, Klebsiella pneumoniae
atgttctcgggtttactctcccactccgcggccccggccgcggatttttcacgtctgcagcgcgccagcattacgttccgtgatgtggccaagcgctacggcgatcatcaggtgctaaacgccatcaacctgcaggtcgagcccggcgaagtggtggcgatcctcggcccttccggttcgggaaaatcgacgctgatccgcttgatcaaccagctcgaatccttaagcggcggcgagatcctgatcgacggcaaacccaccagccagctgagcggcagcgccttgcgccagctgcgcagccgcgtcggctttgtcttccagcagttcaacctttatgcccacctgacggcgcaggagaacatcactctggcgctggagcgcgttcatggctgggaaaaaagcgcggctcaggcgcgggcgctggcgctgctgcgtcaggtcggactggaagaaaaagcgcagcagatgccggcgcagctctccggcggccagcagcagcgggtggccatcgcccgcgccctggcctcctcgccgcagattatcctgttcgatgagcccacctcggcgctcgacccggagatgatcggcgaagtgctgcaggtgatgaaaaccctcgcccacagcgggatcaccatgctggtggtgacccacgagatgcagtttgcccgcgaaattgccgaccgggtggtgtttatcgacggcggcgacatcctcgaagtcgccccgccggctgagtttttcgcccatccgcagcatgcccgcgcgcggcgttttctgcagaaggtgctggatccgctgcaccaggagagcctcgagtga

SEQ ID NO: 238621 - DNA, 810 bp, Klebsiella pneumoniae
atgcgcaataaaaccacaaaaatcgcactggcgctgggtatgctgctgctcgcctcgcaggcacaggcggaccagctggctgacatcaaagccgccggcttcgtaaaagtcgccaccttcgacgccaacccgccgttcggctctgtggacgccaaaacccaccatatcgtcggctacgacgtcgactttgcccaggcgctggcgaaagcgctcggcgtcaaactcgagctggtggccaccaacccagccaaccgtattccgctgctgcagtccggcaaagccgacctgatcgtcgccgacattaccatcaccccggagcgggcccaggttattgatttctcaacgccgtatttcgtcaccggccagcagttcctcgtgccggccggctctccggataagctcgatgagtacagcaaagcgcgcatcggcgcggtgaaaggcaccaccggcgaacaggccctgcaccagcgtttcccgcaggctcgcgtcctctcctatgacgatattccgctggccctgaccgccctgcgcaacggcaacgtccaggccatcacccaggacagcaccatcctcgccggtctgctggcggaagcgccggataaagccaagtttaaaattctgcccgacctgctcagcaaagaagagattggcgtgggcgtgaagaaaggcgaaccggccctgttgaaagccgttaacgatgagctggtgaagctggagaaaaccggcgaagccgcgaaaatctatgatgtctggtttggccctgccactaaaacgccgcagccgcgcgcctttaccatagaagcgaaataa

SEQ ID NO: 238622 - DNA, 171 bp, Klebsiella pneumoniae; identical to SEQ ID NO: 136789

SEQ ID NO: 238623 - DNA, 696 bp, Klebsiella pneumoniae
atgcttaacgcccgggaactgaaggtcttttacggcgtgatccagggtctgaagggcgtcgatatcgatgtctatgaccgggaaatcgtcaccctgatcggcagcaatggcgccggtaaaacctccaccctgaacgggatcgtcaacctggtgcgctccagtgggcgcgtcagcttcctcaacgacgatatctcacgcagccagacccaccagatcgtgcgtcgcgggctggcgctggtgccggagggacggcgcgtctttaccaacctgaccatcgaagagaacctgcgcatgggcgcttacaataatctcgccggctacgcccgcctgcgcgatcgcatgtacgccctctttccgcggctcaaggagcggcgccatcagatggcgggcaccatgagcggcggcgagcagcagatgctggccatcgcccgggcgctgatgagcgagccggtgttattgatgctggatgaaccgagcctcgggctggcgccgaaaattgtcggcgagctgttcggcatcattaagcaactgcgcgaagagaatatgacggtgctgctggtggagcagaatgcgacggctgcgctggcgatcgccgatcgggcgtatgtcctggagaatggccggatcaccttgtcaggcgcggcgcgggagatgctgactaatccggaaattaagcggatgtatctggggggatag

SEQ ID NO: 238624 - DNA, 1050 bp, Klebsiella pneumoniae
atgctcaacgcgacgacgaccgccggggcgcagctgcgcaacctggtcattattgtcatctgtatcgcgctgctggccggaatcaacgtggttttcaatgactacattgttcgtgtcatcagcaccatttttatctttatgatcctcgcggtcagctacaacctgatcaacggcgtgaccggccagctgtcgctggagccgaacggcttcgtggcggtgggcgcctacgtcaccgccctgctgatcctctccagcgacagcaaggtagacatgtttgaaatggccgcccccagcccgtggatcctcagcctgcacgcgggcttcctccctgccctgctgataagcggcctgtgcgcggcggcgctggcggtgtgcctcgccgtgccggtcttccgggtacgtggcgactacctggccattgtcaccctcggctttgggtttatcatcaagatcctcgccattaacaacccgcaaatcaccaacggcgccatcgggctgaacgatattccgcagcagccgcatctcctgttctggtgcgggctgttcgccctgctggccaccggcatgatcctccagctggtgtggtcgaagtatggccggatgatgaaagctattcgcgacgatgaagatgcggcgatcgccatgggggtcaacaccttccgcattaaaacctgcgccttcgccaccagcgccttcttcgaagggatcggcggcggtctgctggcttccctgctgaccaccatttccccggggctgttcgactttatgctcaccttccagctgctgattattatcgtcctcggcgggctcggcagcaccaccggcgccctgctcggcaccgtgctggtggtcggcagcggcgagtggctgcgcttcctcgatcagccgctgcagttcttcggtcacgatctcggcgcgtatccgggcctgcgaatggtggtcttctctctgctgttgctgatcatcatgctcttcgcccgcgaggggctgttggggaaaaaagagatttggcagaccggaagaaggagcggcggctatggcggaaaataa

SEQ ID NO: 238625 - DNA, 900 bp, Klebsiella pneumoniae
atggacggcgccatttttctccagcaagtggtcaatggaatgagtcttgggggcatgtacgccctgattgccatcggttatacgatggtttatggcgtgctgcggctgatcaacttcgcccatgcggacgtgatgatggtcggcgcgtttagtacgctgtttttattttcttcggttgggctacccttcggggtagccgttttcctgaccctcgggctgtgcggcctgtttggtatgctgattgaccgggtcgcctatcgtccgctgcgtcaggcctcgaaaatctccatgctgatcactgccatcggcgtcagcttttttctcgaaaacctgtttaacgtactgtttggcggcagctcgcgcttcttctccgcccctgactttttcaaccagacccgggccttcggcagcgtcatcattaccaacgtggcgtggattgtgccgctgatcaccgtcctgctgctgctggcgatcctctggctgctgtaccgcacccgctatgggatggcgatccgcgcggtggcctttgacgtcaacaccgtgcgcctgatgggcattgacgccaaccggatcatctccctggtcttcgccctcggcagtagtctcgcggcgctcggcggcgtgttctactccatcagctacccgacgatcgatcccctgatgggcgtgcttatcggcctgaaggccttcgccgccgccgtgctgggcgggatcggcagcgtcaccggcgcggtgctgggcggctttatcctcggttttaccgaggtggtcgccgtggcgatcttccccgaactgggcggctataaagacgctttcgccttcctgttcttgattctggtcctcttgttccgcccggtcggcattatgggcgacgaacgtctggaaaggagccgtttctga

SEQ ID NO: 238626 - DNA, 1137 bp, Klebsiella pneumoniae
atgaaatcgttttccgggaaagcatctttaatggccacgctggttgccgcgctggtcggcgccagcagcgcgcaggcagcggaaattaaaatcggggtggtattacccctgagcggcgccctcagcggctatggccagccgtcgcagaaagggctggacattattcaggccatcaccccaacgttaaaaaatggcgataccatcaagcttatcgttatcgatgataaaagcgacaaagtcgaagcggccaacgccatgcagcgcctggtctccagcgataaagtggatgccgtgatcggggaagtcacctcctccaacaccctggcgatgaccaaaatagccgacgacagcaaaacgccgctggtctcctccaccgccaccaacgaccgcgtcacccgcaaccatccctacgtcagccgggtctgcttctcggacagcttccagggggtggtcggggccaatctggcctcccgcgatctgaaagccaaaaccgccgccatcgtgtttgacagcagcaacgactactccgtcggcctggcgaaagcgttccgcacccagttcctgaaaaacggcggcaccattcccatcgaggtccaggccccgggcggcagcaaggactttaaagcccagctggcgagcgtcaaggcgaagaatgtcgacatgatttacatgccgatctactacaccgaaggggcgctgattgccgtgcagtctaaacaactggggctcaacaaaccggtggtgggcggcgacggtctggccgcggatcaggtcttcttcgatgtcggtaaagacgcggtcaacggctatatgaccaccgattactactcgccgaacgccaaagagcagaccccggcgggggaaaccttcatcaaagcctgggaagccaaataccagcagccgacccatacctggggcgcaatggcggcggacgcctataacgtcatcgtcaacgccatgaaccagtgcagcgatccccacgatcgggtctgcgtgaatgaaaaaatccgcgccaccaaagatttccagggggtgaccggcacgctgacgttacagaacggcgacgccattcgcagcgcggtcatcaacgaagtgaaagatggcaagctggcgtttcgtaccgtggttaacccttaa

SEQ ID NO: 238627 - DNA, 777 bp, Klebsiella pneumoniae
atgaaccgtcccgatgcctggaacccgctgcgtgaatttaccgatgcgcggatcgccctggggcgcagcggcgccagcctgccgacccgcgaagtcctcaactttggtctggcccacgccagagcgcgggatgccattcatcagccgttcgccagccaacaattggtggcgccgctggcggcgctcggcctcgaggccctgacggtgcacagcgccgcgccggaccgtcatacctatctgcggcgcccggatctcgggcggcagctcgccgatgagagtcgcgccgacctcgccgccagcggcgtccgccccgccgacctgctgctggtgatcggcgacggcctctcttcctgggcggtagagcgccaggcggtgccgttgatccgcgccctgctgccctatctgcgggcgctgggtatcggcctggcgccggtggtgctggcgcatcagtcacgggtggcgctgggggatgatattggcgaaaccctgaaagcccgcgcggtggcgatcctgattggcgaacgaccgggtctctcctcgccggacagcctcggcgtctacctcacctggcagccccatcgtcagcgcctggagtctgagcgcaactgtatctccaatattcggccggagggattaagccatgacgccgccgcctttaaactggcctggctgctggagcaggcttttttgcgccggcttaccggggtgggtctgaaagatgaaagcgataatccggcgctgcatggtaaaataaaaccgttgccccctttaaaataa

SEQ ID NO: 238628 - DNA, 1389 bp, Klebsiella pneumoniae
atgtataaaaccacactatcgggccaggtatggcgctttgatagtctgaaaacgctgatggcgaaagcgtcgccggcccgctccggcgacgccctcgcagggattatcgccacctcagccgaagagcggatggcggcgaaaatggccctcgccgaggtgccgctgaccgacattctcgacaacccgcttatcccttacgagcaggacgaagtgactcgcctgatcctcgacacccatgatgcgcagggctttgccgccctgcgtcacctgacggtcggcgattttcgcgactggctgctggatgatgctaccgataccgccacgctgcagcgggtcgcccgcgccatcaccccggagatggcggcggcggtcagtaagctgatgcgcaatcaggatctgatccttgccgccagcaaatgccaggtggtgacgcgctttcgcaacaccatcggcctgcccggccacctcagcgtacgcctgcagcccaaccatcccaccgacgacctgaaaggcatcgccgccagtatgctcgacgggctgctgtacggcgccggggacgcggtgattggcatcaacccggccagcgacagcttaccggtgctggcgcagctgaacatcatgctggacgatattattcagcgcttcgccatccccacccagtcctgcattctgacccatgtgaccaatacgctgcagctgattgagcgcggcgcgccggtggatctggtgttccagtcggtggccggtaccgaagcggccaacagcggcttcggcatcaatcttgccatgctgcaggaggcccgcgaggcggccctgagcctcaggcgcggtaccctcggcaacaatgtgatgtattttgagaccggccagggaagctgcctgtcggccaacgcccaccacggcgtcgatcagcaaacctgtgaggcgcgggcctacgccgtcgcccgccactttgaaccgctgctggtcaatacggtggtcggttttatcggtccggagtatctctacgacggcaagcagattattcgcgccgggctggaggatcatttctgcggcaagctgatgggcctgccgatcggctgcgacgtctgctataccaaccacgcggaagcggatcaggatgatatggacaccctgctgaccttgctgtgcgccgccgggctcaccttcctgatcggcgtgcccggagcggacgatatcatgctcaattaccagagcacctcgttccatgacgcgctgtacgcccgtcgtctgctgggcttaaagcatgccccggagttcgccgactggctggcgaagatgcagattatcgatccgcacggcgcgctgcggctcaccgacgcccgccatccgctgctgtccgtcctgccgcaaggagcctccgtatga

SEQ ID NO: 238629 - DNA, 1380 bp, Klebsiella pneumoniae
atgacagagcacaccaccaccttaaaaagaacgctcggcagttttcgtttatgggggatcgccgtcggactggtgatatccggggagtacttcggctggagctacggctggtcgcaggcgggcacgatggggtttatggtcgtcgccctggcggtcgccgccatgtactgcgcctttattttcagctttaccgagctgaccaccgccatcccgcacgctggcggccctttcgcctatgcctaccgcgccttcgggcccaccggcggctttatcgctggttttgccaccctgattgaattcgtcttcgccccgccggccatcgccatggccatcggggcctacctcaacgtgcagtttccggcgctggatccgaaatgggtcgcctgcggcgcctacgtgatctttatgacgctcaatattctcggcgtcggcatcgccgccaccttcgagctgatcgtcaccctgctggccatcttcgagctgctggtgttcatgggcgtggtcgcccccggcttctcctggagccacttcaccactaacggctgggcgggcgcggacagcttcagcggcctggcgctgccggggatgttcgccgccattccgttcgccatctggttcttcctcgccattgagggggcctccatggcggccgaagaggccaaagatccgcagcgcaccattccccgcgccctgggcggcggcattctgacgctgacggtgctggcgatcggcgtgatggtcttcgccggcggcgtcggcgactggcgcgcgctgtccaatattaacgatccgctgccccaggcgatgaagacggtcgtgggcaacggcagcggctggctgcatatgctggtgtggctggggctgtttggcctcgtcgcctccttccacggcatcattatgggctactcgcggcagatctactccctcgcccgcgccggctatctgcccgccgggctggcctccctcaaccgccgcacgcgcaccccgcatctggcgatccttgccgggggcgtggtggggatcgccgcgatcttctccgactcgctgatcaccatcagcggcatgccgctgaccgcctgcatcgtcaccatgtcggtatttggggctattgttatgtatatcacttccatggcggcgctgttcaaactgcgccgtagcgagccgaagctgatccgtccgttccgcgccccgctctacccgctggcgccggcctttgccctcggcatggcggtgctctgcctggtggcgatggtctggtataacctgctgctggcgctgattttcgcggcgatgatgctcggcggctacctgtggttccgcaaaaccgcagcggcccgtgaacgggcgccagtggatcctcaactgcgcacggtctcctga

SEQ ID NO: 238630 - DNA, 1410 bp, Klebsiella pneumoniae
atgcaaagcacaacacaacaacaaggtgggcagctgaagcgcaccatgaaaacgcgccatctgatcatgctgtcgctcggcggcgtgattggcaccggcttattcttcaataccggctatattatctccaccaccggcgcggccgggacgctgctggcgtatctgattggcgccctggtggtctggctggtgatgcagtgccttggcgaactgtcggtggcgatgccagagaccggcgccttccacgtttacgcggcgcgctatcttggcccggcgacgggctataccgtggcgtggctctactggctaacgtggacggtggcgctggggtcgagcttcaccgcggcgggattctgcatgcagtactggttcccgcaggtgccggtctggatctggtgcgtggtgttctgcgcagtgatcttcggccttaacatcatttcgacgcgcttcttcgccgaaggcgagttctggttctcgctggtgaaagtgatcaccatcgtcgcgtttattattctcggcggcgcggccattttcggcatcattccgatgcaggatggctccccggcgccgggcctgcgcaatatcaccgccgaaggctggttcccgcacggcggcctgccgatcctgatgaccatggtggcggtgaacttcgccttctccgggacggagcttatcggcattgccgccggagagacggaaaacccgcataaggttattccggttgccatccgcaccaccatcgcccggctgattattttctttatcggcaccgtgtttgtgctggcggcgctgatcccgatgcagcaggcgggagtggagaaaagccccttcgtgctggtgtttgagaaggtgggcatcccttatgcggcggacatgttcaacttcgtgatcctgacggcgatcctgtcggcggctaactccggcctgtacgcttcggggcggatgctgtggtcgctgtcgaacgagaagacgctgccggcctgctttgccaaagtcaataaacggggcgtgccggtgaccgccctgtcggtgagtatgctgggcggcgtgctggcgctgttctccagcgtggtggcgccagatacggtgtttgtcgcgctgtcggcgatctccggttttgcggtggtggcggtgtggttgagcatctgcgcctcgcactttatgttccgccgccgccatctgcagcagggtaaggcgctgagcgatctccagtatcgcgctccctggtatccggtggtgcccgttctgggctttgtgctgtgcctggtggcctgcgtgggcctcgcttttgacccgagccagagaattgcgctgtggtgcgggatcccctttgtggccctgtgctatggtgcctggtatcttactcgttcacggaatatgactcaggagccccaacatgtcgcagactaa

SEQ ID NO: 238631 - DNA, 933 bp, Klebsiella pneumoniae
atgtcgcagactaatccgtttaccgccctgcttgacgcccagcctttcgtgctgctggacggcgccatggccaccgagctggaggcccgcggctgcgatctggccgacagcctgtggtcggcgaaagtgctgctggagaacccgcagctgatccgcgatgtgcatcttgactactttcgcgccggggcgcaggtggcgatcaccgccagctatcaggccactccggcgggctttgccgcgcgcgggctggatgaggcgcagtcccgggcgctaatcggcaaaagcgtcgagctggcgcgcaaagcgcgcgaggcgtacctcgccgagaacccgcaggccggtacgctgctggtggccggttcggtggggccgtatggcgcgtttctcgccgacggctcggagtatcgcggcgattatcagcgcagcgcggcagagttccaggccttccaccgcccgcgcgtcgaagcgctgctggatgccggcgccgacctgctggcctgtgaaaccctgccgtcattcgctgagatccaggccctggcggccctgctgcaggagtatccccgcgcccgcgcctggtactccttcacgctgcgcgacgccgaacatctcagcgacggcacgccgctgcgcgaggtgatggccgccctggcggataacccgcaggtggtggcggtggggatcaactgtatcgcgctggaaaatacgcccgcggcgctggcgcatttgcacagcctgacggccctgccgctggtggtctatcctaactccggcgaacattatgatgcggtgagcaagacctggcaccatcatggcgaagcctgcgccagcctggcggattatctgccgcagtggctggcggccggggcgaagctgatcggcggctgctgccgcaccacgccgaaggacatcgccgcgcttaacgcgaagcgctaa

SEQ ID NO: 238632 - DNA, 963 bp, Klebsiella pneumoniae
atggcattcacatcgcgaattactcttctggcggcgctggctgtcgccgccttccaggcgcaggcggtcaacgttaccgtggcgtatcaaacctccgctgagccggcgaaagtcgcccaggcggacaacaccttcgccaaaaccagcggggcgaccgtcgactggcggaaatttgacagcggcgccagcgtggtacgcgccctggcctccggcgatgtgcagatcggtaatatcggctccagcccgctggcggtggccgccagccagcaggtgccgattgaagtgttcctgcttgcctcaaagctcggcaactccgaagcgctggtggtgaagaaaagcattaccaaaccggaagatctgatcggcaagcgcattgccgtgccgtttatctccaccacccactacagcctgctgtcggcgctcaaacactggggcatcaagccgggccaggtacagattattaacctgcagccgccggcgattatcgccgcctggcagcgcggggatatcgatggcgcttacgtctgggcgccagcggttaacgaactggaaaaggagggcaaggtgctgaccgattcttctcaggttggggagtggggcgcgccgacacttgacgtctgggtggtccgtaaggacttcgccgagcagcatccggagatcgtcaaagcgtttgctaaaagcgccatcgacgcccagcagccctacatcgccaacccggaggcatggctgaaacagccggacaacatcagcaagctggcgcgcctgagcggcgtgccggaagccgatgtccccgggctggtgaagggcaatacctatctcaccgccgctgagcaggcgcaggcgctgaacgggccggtcaatcaggccatcgtcgataccgcgcgcttcctgaaagagcagggcaaagtgcctgcggcgggaaccgattatcgtcagtacgttactgaccgctttgtgaagtaa

SEQ ID NO: 238633 - DNA, 768 bp, Klebsiella pneumoniae
atgctgcaaatctcgcatctttccgctgactacggcggtaaaccggcgctggcggatatcaacctgacgctggagagtggggagctgttggtggtgctggggccttcgggctgcggtaaaactaccctgctgaacctgattgccggattcgtgccctatcagcacggcagcatcaccctcgaaggtcagcgggtggccgggccgggcgcagagcgcggggtggtcttccagaatgaaggtctgctgccgtggcgcaatgtgcaggataacgtggcgctgggcctccagctggcgggcgtggataaagcgcagcgccggcaagcggcggcgcagatgctgaagaaggtggggctcgaaggggcggaaaagcgctttatctggcaactgtccggcggtcaacgccagcgggtgggcatcgcccgggcgctggcggcgaatccgcagctgttgctgctggacgagcccttcggcgcgcttgacgcctttacccgcgagcagatgcagacgctgctgctgaaactgtggcatgagaccggcaaacaggtgctgctgatcacccatgatattgaagaggccatttttatggcgaccgagctggtgctgctgtcgccggggccgggacgggtggtggagaggctgccgcttgatttcagccgtcgctttgtcgcgggcgaatcctgccgcagcatcaaatccgacccgcgctttattgaacagcgggaatacattctgagccgggtgtttgatcaacgggaggctttctcatga

SEQ ID NO: 238634 - DNA, 828 bp, Klebsiella pneumoniae
atgagcgtggtactgaacgacaaaccgcgtcagtcgacgctgaagtggcgctggccgctctcccgccagctcaccctcagcgtggcgaccctggcggtattgctggccgtctggtgggcggtcgcggcgctgcagctgattagcccgctgtttctgccgccgccgggccaggtgctgcagaagcttatcaccatcgccgggccacagggctttatggatgcgacgctctggcagcacctggcggcgagcctgacgcggatcgttatcgccctgctggcggcagtgcttattggcgtaccggtggggatcgccatggggctcaactcgacggtgcgcgggatcctcgacccgctgatcgaactctatcgtccggtgccgccgctggcctacttaccgctgatggtgatctggtttggcatcggtgaaacctcgaagatcctgctgatctacctggcgattttcgcgccggtagccatgtcggcgctggcaggggtaaaaagcgcgcagcaggtgcggattcgcgctgcccgttcgctgggcgccagccgggcgcaggtgctgtggctggtgatcctgcccggcgcgctgccggagatccttaccgggctgcgcattggtctcggggtgggctggtcaacgctggtggccgctgagctgatcgccgccacccgcggattaggatttatggtgcagtctgccggcgagtttctcgccaccgatgtggtgctggcggggatcgcggtgattgccattatcgcctttttactggaactgggtctgcgcgcgctgcagcggcgcctgacgccctggcatggagaagtacaatga

SEQ ID NO: 238635 - DNA, 852 bp, Klebsiella pneumoniae
atgagtgaacgtctgagcattaccccgctggggccctatattggcgcgcaggtgagcggggcggatttaacccgtccgctgagcgacaaccagtttgagcagctgtatcacgcggtgctgcgtcatcaggtggtattcctgcgcgagcagaatatcaccccggcgcaacagcgcgatctggcgctgcgttttggcgacctgcatatccatccggtctaccctcacgccccaggggtggaggagattatcgtcctcgatacccacaacgataatccgccggataatgacaactggcataccgatgtcacctttatcgacacgccgcccgccggcgccattctggcggcgaaagagctgccgacgaccggcggggacaccctgtggaccagcggcatcgccgcctgggaagcgctgtcagaacctttccggcagctgctgagcggcctgcatgccgaacacgatttccgcaaatcgttccaggagtataagtacaacaagaccgaagccgagcatcggcgctggcaggaagcggtggcgaagcatccgccgctgctgcacccggtggtgcgtacccacccggtgaccggcaagcaggcgctgttcgttaatgaaggctttaccacgcgaattgtcgaggtgagtgagaaagagagcgcagcgctgctgaacttcctgtttgctcatgtcactaaaccggagtttcaggtgcgctggcgctggcagccgaacgatgtcgctatctgggataaccgggtgacgcagcattacgccaacgccgactatctgcctcagcggcggctcatgcaccgggcgacgatcctcggcgataagccgtattaccgggcggggtaa

SEQ ID NO: 238636 - DNA, 1719 bp, Klebsiella pneumoniae
atgtttagtctcgacaacgtactcgatgacctgtggcctcaggcgaggcccgccccctggcaaaagaaactgttaaaaaagctattttatgaggaagagtttcaacaatttgccgaccgtcaccgccacctgaaggggcttgatacggtcgaacaggtactggaatacctcaatatccgctgtgccatcccggcgcacgatctcgaacaaatccccgaatatggcccgctggtcattatcgccaaccaccccaccggcaccctcgacggcctggcgctcctgtatgcggtatcccgcgtgcgccgcgatgtcaaagtggtcaccaaccgcatgctcacccaccttgagcccctgagctcgctgtttatcccggtagataatattcatggccgcaccgctaaagcggcgctgcagcagatggaccagcagctgcaggccggcggggtgctgatcttcttcccggcgggggaagtctcccgtctgacccgccacggtatccgcgataaaaaatggcactccggctttattaagctggcggcaaaatatcgcgccccgctgctgccggcgtggattaacgcccgcaacagcgccctgttttacgccagcacgctggtctccgacgacctgccgctactcctgctgatgcagcagatgtttcgccggcgcaacagcagcctgccggtgcgcatcggccagcagatcccctggtcgagctggttcgatgcgcagtccagcgctcgcgagcttaccggccgctgctatcagcaccttgaacagctgcgcaaagggctgccggggcggtttaaaaccgaaagcgccatcgcccgtccggaagaccgggcgctgctcaaacgcgaactgcacaaggccgaatgcctgggccgcaccgccgatggcaaagtgatttacctctggcagcgcaacggccaggaggacgcgccgctgctgcgcgagctgggacgcctgcgggaaatcgccttccgcgcggtcggggaaggcagcggcaaaaggcgggatatcgacgggtatgacgacgactatctgcatctgatcctgtgggatgaagaagacctcgagatcgtcggcgcttaccgctttatgccgacggccatccagttggcaaagcgcggcctggaggggatctacagttacagtctgttccattacgacgggcggatggacgatgtcctgcagcacggcattgagctggggcgcagctttatccagccgcgctactgggggcgtcgcgggctggactacctgtggtccggcatcggcgcttatctggcgcgctatccgcactatcgctatctgtttggtccggtgtcgatttctggcggattgccgcccgccgcccgcgatctgctggtggcgttctaccggatgtggttcccggcgacgcatccgctggcggagtcgcgtcgcccttatccggcgtcgctgcccgacgtgctggcgcagtttggcggggaggattacaacgacgacctggcccggctgaagtctctgctcggcaatctcggctgcgcgatccccccgctgtataagcagtactcggaagtgtgcgagccgggcggcgtgcagtttatcgatttcggcagcgacccggatttcaataactgcgtggatggtctggtgctggtggatttgacctatctgaaagcgaaccgctatcagcgctatattggcgcgcatctgggtgcgcaaaaatcggcataa

SEQ ID NO: 238637 - DNA, 975 bp, Klebsiella pneumoniae
atgacagatttaatcactcgcccccgccgcctgcgtcaatccgctgcgctgcgcgccctgtttgaagagacaacactgagtttgaacgacctggtgttgccgatctttgttgaagaagaaattgatgattacaaagcgatagaggccatgcccggcgtgatgcgcattccggaaaaatatctggcgcgcgagatcgaacgcatcgccaacgccgggatccgctcggtgatgacctttggtatttctcatcacaccgatgccaccggcagcgatacctggaatgaaaatggtctggtggcgcgtatgtcgcggatttgtaagtccacggtgccggagatgatcgtcatgtccgatacctgcttctgcgaatatacctcccacggccactgcggcgtgctgtgcgaccacggggtggataacgacgcgaccctggaaaacctcggcaaacaggccgttgtcgccgccgccgcgggggcggatttcatcgctccttccgccgcgatggacggtcaggtgcaggcgattcgccgctcgctggacgccgccggcttcaccaatacggcgatcatgtcctactcgaccaagttcgcttcttccttctacggtccgttccgcgaagcggccggtaccgcgctgaagggcgatcggaaaacctatcagatgagcccgatgaatcgccgggaggccattcgcgagtcgctgctcgatgaagcccagggcgccgactgcctgatggtgaaaccggctggcgcctacctggatatactgcgcgatatccgcgaacgcagcgatctgccgctcggcgcctatcaggtcagcggtgagtacgcgatgatcaaatttgctgcccaggcgggcgctattgatgaagagaaagtggttctggaaagtctcggcgctatcaaacgcgcaggcgccgacctgatcttcagctatttcgccctcgatctggccgagaaaaagatcctccgttaa

SEQ ID NO: 238638 - DNA, 1161 bp, Klebsiella pneumoniae
ttgaaacgtagtttgctcatttttgctgcgctgtgcgcggcgtcgtggacctcggtgcaggccgcacagcctaccgttgacccggttttcgcctcggatgtggtcgatcgttacgccaatcatatctactacggcagcggcgccaccggcatggcgctggtggttatcgatggcaatcagcgtgtttttcgcagctttggcgaaacccgcccggggaataatcagcacccgcagctcgactcggtgatccgtatcgcctccctcagcaaactgatgaccagcgaaatgctggtgaagctgctcgaccagggggtggtgaaactcaacgatccgctgagcaaatacgccccgccgggcgcccgggtgcctgactggcagggaaaaccaatcaccctggttaacctcgcgactcataccagcgccctgccgcgcgagcagcctggcggcgccgctcatcgtccggtgtttgtctggcccacccgccagcagcgctggaactggctctctaccgcgaccctgaagaccgcgccgggctcgcaggccgcctactccaatctggccttcgatttactggcggacgcgctcgccaccgccgccggcaaaccgtatccgcagctgtttgaagaacagatcacccggccgctggggatgaaggacaccacctttaccccgtcaccggatcagtgccagcggctgatgatcccggaaaaaggcgccagcccatgcaacaacaccctggcggcgatcggcagcggcggagtctactcgacgccgggggatatgatgcgctggatgcagcagttcctgtcatccgatttctatacccgcagccagcaggccgaccggatgcagacgctgatttatcagcgtaaccagctgacccgggtgattggtatggacgtgccgggccgcgcagacgcgctgggcctcggctgggtgtatatgaagccgaagaacggccatccggggattattcagaaaaccggcggcggcggcgggtttatcacctatatggcgatgaatccgcaggctaacgttggcgcctttgtagtggtaacccgctcgccgttaacccgcttcaacaatatgagcgatggcatcaacgacctggtcagcgagttgagcggcgcacagcccaacatgcagacggccagccagtaa

SEQ ID NO: 238639 - DNA, 534 bp, Klebsiella pneumoniae; identical to SEQ ID NO: 134652

SEQ ID NO: 238640 - DNA, 1221 bp, Klebsiella pneumoniae
atgtttaaatcttttttccccaaaccggggccgttttttatttctgcctttatctggtcgctgctggccgtgatcttttggcaggcgggcggcggcgactggctgctgcgggtcactggggcatcgcaaaatgtggcgatcagcgcggcgcgcttctggtcgctcaactatctggtgttctacgcttactatctgttttgcgtcggcgtgttcgcgctgttctggtttgtctactgcccgcaccgctggcagtactggtcgattctcggcacctcgctcatcatcttcgtcacctggtttctggtggaagtcggggtggcgatcaacgcctggtatgcgccgttctacgacctgatccagagcgcgctggccaccccgcataaggtcagcatcaatcagttttatcaggaaatcggcgtctttctcggcatcgcgatcatcgcggtgattattggcgtgatgaacaacttcttcgtcagccactacgtcttccgctggcgcacggcgatgaacgagcactatatggcccactggcagcatctgcgccatatcgaaggcgccgcgcagcgtgtgcaggaagataccatgcgttttgcttccactctcgaagatatgggcgtgagctttatcaacgcggtgatgaccctgatcgccttcctgccggtgctggtgacgctctccgaacatgttcccgacctgcctatcgtcggccatctgccgtatggcctggtgattgccgctatcgtctggtcgctgatggggaccggcctgctggcggtggtggggattaagctgccgggcctggagtttaaaaaccagcgcgtggaagcggcctatcgtaaagagctggtttatggcgaggacgatgaaactcgcgccacgccgccgacggtgcgcgagctattccgcgcggtgcgtcgcaactatttccgtctctatttccactatatgtatttcaatatcgcccgcatcctctatctgcaggtggataacgttttcggccttttcctgctgtttccgtcgatcgttgccggtacgattaccctcgggctgatgacgcaaattactaacgtcttcggccaggtgcgcggctcgttccagtacctgatcagctcgtggacaacgctggtggaactgatgtccatctacaaacgtctgcgcagttttgaacgcgagctggacggcaaaccgctgcaggaagcgatcccgacattacgttaa

SEQ ID NO: 238641 - DNA, 1107 bp, Klebsiella pneumoniae
atggccgcacgtttatcgcgcattattcccgtttcattgacgctgctggcggccatggcgctgagcgcctgtaccagccagcaggctccggcgctgaaagagggcgagaagcctgttgacgtggcgtcggtagtgcggcagaaaatgccggccagcgtcaaggatcgggaggcctgggcgcaagccatcgccaccgcgtttgacagccagaagctggcgccgacggaagaaaacgtctgctcggtgctggcggtcgcgcagcaagagtctaactatcagtccgatccggtggtgccggggctgaataaaatcgcctggcaggaaattgaccgccgggcggaaaaaatgcacattccgccgtttctggtccataccgcgctgaagatcacctcgccaaacggtaaaagctatagcgaccgtctggacaatgtgaagacggaaaagcagttgagcgccatttttgatgactttatcgggatggtgccgatggggcagaagctgttcggttcccttaacccggtgcacaccggggggccgatgcaggtcagcattgcttttgccgagcagcatacctccggctacccgtggaaaatgaacggcacggtgcgccaggaggtcttcagtctgcgcggtggcctgtggtttggcacctatcatctgctgaactatccggccagttatagtgcgccattgtaccgctttgccgacttcaacgccggctggtacgccagccgtaacgccgccttccagaacgcggtggtgaaagccagcggggtaaaactggcgctcgacggcgaccttatccgctacgacagcgaggagccgggcagcaccgagctggcggtgcgtcgcctggcgagccagctggggatgagcgacagcgagatccatcgtcagttgaaaaagggcgacagcctggcgtttgagaagaccgatctctatcagcaggttttccgtctcgccgagaaaaagacgggcaaaaccctgccgcgggagatgttgccagggatccagctggagagtccaaaaatcacccgaaatctgacgacggcgtggtttgcgaaacgggttgatgagcggcgggcaaactgtatggcgcggcgttaa

SEQ ID NO: 238642 - DNA, 303 bp, Klebsiella pneumoniae
atggctgaattcagtttttcaaaatcgcttttgggaaataaaaaaaggggcgcgctgaccggcagccatgtcgcctacgggctgttcgtgttgatctgctgctgggccggcgcgcagatgctcagcatgctgatccacgccccgggggtatttgaacgcctgatgcaagcccaggacgccagccgtccgcaagtcgacatcagcctcgccgtgggtaccctctttggtctgatccctttcctgatcggctgcacgttcatcggggtactggcgcttatcgtgcgctggcgtcagcgccgttaa

SEQ ID NO: 238643 - DNA, 204 bp, Klebsiella pneumoniae; identical to SEQ ID NO: 134656

SEQ ID NO: 238644 - DNA, 1098 bp, Klebsiella pneumoniae
atggcaaagatgagggttgggatcgtttttggcggcaagtcggcggagcatgaagtgtcgctgcagtcagcgaagaatatcgtggaagcgattgataaatcgcgcttcgatgtggttctgttgggtattgataaacaggggctgtggcatatcaacgacgccggcaactacctgctcaacgcacaggatcctgcccgcattgccctgcgcccttccacggtgactctggcgcagatcccgggccgcgaagcgcagcagctgattaacgccgaaagcggccaaccgctggcggccattgatgtgattttcccgatcgtccacggcacgctgggtgaagatggctccctgcaggggatgctgcgcatggcgaatctgccgttcgtcggctcagatgtgctgggctctgcagcctgtatggacaaagacgtgaccaaacgtctgctgcgcgacgccgggctcgccgtcgccccgtttatcacactcacccgcgccaaccgcgcgcagttcagctttgccgatgtcgaagcgaagctgggcctgccgctgttcgttaagccggctaatcagggctcgtcggttggcgtcagcaaagttaaaaacgaagagcagtaccatcaggcggtggccctggccttcgaatttgaccataaagtggtggtggagcaaggcattaaagggcgggaaattgagtgtgcggtgctgggtaacgaccacccgcaggccagcacctgcggtgaaatcgtcctcaacagcgagttttacgcctacgacaccaagtatatcgacgatcagggcgcgcaggtggtagtcccggccgctatcgcccctgagctcaacgacaaaattcgcgctatcgcggtgcaggcctaccagaccctgggctgcagcggcatggctcgtgtcgacgtgttcctcaccgccgacaacgaggtggtgatcaacgagatcaacaccctgccgggctttaccaacatcagcatgtatccgaagctgtggcaggccagcggtctcgactacaccagcctgatcacccgcctgattgagctggcgctggagcgccatgccgcggaccgggcgctgaaaacctccatgaactaa

SEQ ID NO: 238645 - DNA, 123 bp, Klebsiella pneumoniae
gtgagaggaaagacgctgctggtgctggccgggctgctcggcgcgggcctgttgggataccgcaatctgccgccgcacctgaatccgctggcgccgctggcgctggacgatcccccaggctag

SEQ ID NO: 238646 - DNA, 468 bp, Klebsiella pneumoniae
gtggccgacagcgagggaagctgccctctgcgtaacgtggtgcgggtggcgaattttggctcggtgcagctgagcagtagttttctcgccagctgcccgctggcgctgagcagtgcgctgtacatcgagcagcaggcgaagccgctgacccggcagctgatggcgagcgatctgcgtcagatcgatcatctcggcagctttgcctgccgcaatatttaccatcgtcaacaggcgcggcgcagtgaacacgccacggcggacgcgctggacgtcagcggtttccgtctggcggacggtagacgcgttagcgtcctgcagggatggcggagcgagacttcgcgcccctggctggcggtgctgttgagcagcagttgccattacttcggtaacgcgctggggccagagtacaacgcggctcacgccaaccattttcatttcggcatgcgcgggcagggcttctgcttttga

SEQ ID NO: 238647 - DNA, 261 bp, Klebsiella pneumoniae
atgaagaatctcattgctgagttactggttaaactggcgcaaaaggaagaagaagcaaaggaactgacggtgcaggttgaagcgctggagatcgtggtcaccgcattattgcgccatatggagcatgatgcccagcaggcattgattcaggatattgaacaggcgattgaccaggtgaccccctgtccgccggtcaacgaccatgatgcgatgctgctgcagcaatatctaaagaagctgttgcggcatcctcgtagctag

SEQ ID NO: 238648 - DNA, 1416 bp, Klebsiella pneumoniae
gtgaaattaagcgccctgtttattgccctgattcctctactgggctcgccggttattcatgcagaaactactgctgcgccggttctggaaaatcgcgctgcgcagggagatatcaccactcctggcggcgcgcgtcgtttaacaggcgatcaaaccgaagcgctgcgcgcctcgttaatcaataagccagctaaaaacgttattttgctgattggcgatggcatgggtgattcggaaattaccgctgcgcgaaactatgccgagggggcgggcggtttctttaaaggaattgatgctctgccgttaaccgggcagtacacgcattattcgctggataaaaaaaacgggaaaccggactacgtgaccgactcggcggcctccgccaccgcctggaccaccggcgtgaagacttataacggcgcgctgggcgtcgatattcatgagaatgcgcatcagaccatcctcgagctggcgaaagcggcggggctggccaccggcaacgtttccaccgccgagctgcaggacgccacccccgcggcgttggtagcgcatgtgacatcgcgtaaatgctacggcccgacggttaccagcgaaaaatgccctagcaatgcgctggaaaaagggggcaaaggctccattaccgaacagctgctgaacgcccgaccggatgtcaccctgggcggcggcgcgaagacctttgccgaaacggcgacggcgggcgagtggcagggcaaaaccctgcgcgagcaggcgcaagcgcgcggctaccagattgtgaccgacgcggcttctcttgccgccgcgacggaagccagtcaggataaaccgctgctgggactctttgccgatggcaatatgccggtacgctgggaagggccgaaggcgtcttatcacggtaatatcgataagccgccggtgacctgtacgccaaacccgaagcgtgacgcctcggtgccgacgctggcgcagatgacggagaaagcgattgacctgctgagtcgcaatgagaaaggtttcttcctgcaagtcgaaggcgcgtccatcgataagcaggaccatgcggccaatccgtgcggccagatcggcgaaacggttgatcttgacgaagcggtgcagaaggcgctggaattcgcgcgaaaagacggtaataccctggtgatcgtcaccgccgaccatgcgcatgccagccagatcatcccggcggatagcaaagctccggggctgacccaggctctgaacacgcacgatggcgcggtgatggtgatgagctacggcaactctgaggaagagtcgatggagcacaccggcacccaactgcgcattgcggcctacggtccgcatgcggctaacgtcgtcggcctgaccgatcagaccgacctgttcacgaccatgaaagctgccctgagtctcaaataa

SEQ ID NO: 238649 - DNA, 318 bp, Klebsiella pneumoniae
atgaaaataactttattgatgaccctactgtttggcttgatctttatcagcgcggttggcgcggcagaaaaaacgcccactcctcagcagcaaaggatgacggactgcaatcagcaagcgtcagccaaaatgctgaaaggtgaggagcgcaaaacctttatgagccagtgtctgaaaaaagagaccacgacctcgcagggaaaggcgctcacccctcagcagcagaaaatgagcgactgcagcaaagcggccacggcgaaatcactgaagggcgatgaacgcagtaccttcatgagtagctgcctgaagaaaacctga

SEQ ID NO: 238650 - DNA, 810 bp, Klebsiella pneumoniae
atggataagaaaattggctttatcggctgcggcaatatgggtaaggccattctgggcgggctgatcgccagcggtcaggtacagccgggacaaatctgggtctacaccccgtcgccggacaaggttgcagctctgcgcgaccagtatggcatcaacgccgccgacagcgcccaggaagtggcgcagattgccgatatcgtcttcggcgcggttaaaccggggatcatgaccaaagtgctgggcgatatcgcctccagcctgaataaagagtcgctggtggtctctatcgccgccggcgttacgcttgagcagctggcgcgcgcccttggccacgatcgcaaaatcattcgcgcgatgccgaatacgccgtcgctggttaacgccggtatgacctccgtcacgcctaacgccctggtgagcagcgaagatgttgccgaagtgctgactattttccgttgctttggccaggcggagcaaattgccgagccgatgatccatccggtggtgggggtaagcggttcggcgccggcctatgtctttatgtttatcgaagcgatggccgatgccgccgtcctcggcggaatgccgcgcgctcaggcctataaattcgccgcccaggcggtgatgggctccgccaaaatggtgctggagagcggagaacacccaggggcgctgaaagatatggtctgttcccctggcgggaccaccatcgaagccgtgcgcgtgctggaagagaaagggttccgctcggcggtaatcgaagccatcacccagtgtatggaaaaatcagagaaactgagccgctcctga

SEQ ID NO: 238651 - DNA, 459 bp, Klebsiella pneumoniae
atggccatttgggtggatgcggacgcgtgtccgaacgtgattaaagagattttgttccgcgcggcagagcggacccagactccgctgacgctggtggcgaaccagccgctgcgcgtgccgccgtcgcgtttcatccgcaccctgcgggttgagcagggttttgacgtggcggataacgaaatcgtccgccagtgcgcggcgggagatttagtgatcactgccgacatcccgctggcggcggaggtgctggcgaagggcggggcggcgctgaatccgcgcggggaacgttacagcgaggcgacgatccgcgagcggctgacaatgcgggattttatggagacattacgggccagcggcgttcagaccggcggcccggatagtttatcgcagcgcgatcggcaacagtttgccgccgagctggagaagtggttgctggcggttaagcgtcgccagggttaa

SEQ ID NO: 238652 - DNA, 696 bp, Klebsiella pneumoniae
atgcaatctgaagaacaacgccttattgatggactgttttcccggctgaaagaggctgaggcgcacagcgcatcgcgcgatgccagcgccgaggagcggattgcccaacacgtgagcgcgcagccggcggccccctactatatggcgcaaaccattcttatccaggaagccgcgattaaacagcttaacgatcgcatccaggcgctggagagtcaggtcagccaactgcaggcggcaaagcccagcagcggcggcttcctctccggcctgtttggcggtggcggctcgtcacgcggttctgaccctatcccgggcgcggagcaatatggtcgcccgcaggccagcgctcagccgcagtatacgccaccaccgcagcagaactatgccccgcaggctgccgcacgcggcggcggctttatggcgggcgcgctgcaaacggccgctggcgtggcaggcggcgtggtgctgggcaatatgctgaccaatatgttcagcggctcgcacccgcaggagatagtcaatatcatcgaagagaagccgcagcctgatgccgcctccgcgcaggacaccaccgcaggtgacgatccgttccgccagggagacgatcagttccttgccgacaatacctggaacgacgacttcgacgccggctttggcgacgatgattttggcagcgatgacgatagctgggtttaa

SEQ ID NO: 238653 - DNA, 534 bp, Klebsiella pneumoniae
atgacacagcctatctttcttattgggccacgcggctgcggtaaaaccaccgtcggccatgcgctggcgcgagcgcggcattttcagttctccgataccgatcatcggctacaggcccatgagcagcggacggtggctgagatcgtgcaggcggaagggtgggcgcgttttcgcgaactggagaccctgtcgctgaaggccgtgaccctgccgaatacggtaatcgccaccggcggcggtattgtactggcggaaggtaaccgtcagtttatgcgggagaatggcgtggtgatttatctgcaggcctcggtgtcggcgctgattgaccgtctggaagcctacccgaaagccgaacagcggccgacgctgaccggaaaaccggtgcgcgaggaagtgggcgaggtgctggcgcagcgcgaagcgttataccgggacgctgcccaccatattgtggatgccacggcctcgccggatcgggtggtggagcagattatgtccatgctatgcagcgcgacggcaaccccggtaagttaa

SEQ ID NO: 238654 - DNA, 192 bp, Klebsiella pneumoniae; identical to SEQ ID NO: 134667

SEQ ID NO: 238655 - DNA, 666 bp, Klebsiella pneumoniae
atggcaattttgaccatcggcgttgtgccgctggcgggagtattgccgctcctgaccgaacatatcagggaagaacagatcgcccacatcagcctgctgggcgagatgacgcctgacgaggtaatggccgagtacgccgtaggtgacggcgagaaaggactcctgaccttgctcagtaataaccagttggtgatggtgtcgcgacagaaaattgaacgcgatgtccgcagcgcgatcgcgatgctggatcgacaacattatgatgtgatcctgctgctcagttccgaacagctgaccggttttaccacccaccacgcgatcctcctcgagccgcagcggatcatcccgccgctggtggcatcgatcgtcgatgggcaccaggtaggggtgatcgtgccggtggaagagatcatgcccatgcagcggcaaaagtggctctcgctggaaaagtcgccatactacgcgctggccaatccgtttaccggcagcgacagcgagttattaaccgccggcaaaacgttgctggagcagggcgccgacgtgctggtcctcgactgtctcggttactatcagcatcatcgcgatgtgttacaaaaagccctcgatgttccggttttgctgtcgaatgtgctggtttcccgactggcggcagaactattggtctaa

SEQ ID NO: 238656 - DNA, 285 bp, Klebsiella pneumoniae; identical to SEQ ID NO: 210352

SEQ ID NO: 238657 - DNA, 912 bp, Klebsiella pneumoniae
atgctgtggttcaaaaatttaatggtttaccgtctcagccgcgatatcgaattgcgcgccgaggagatggaaaaacagctggccgagctgacatttaccccttgtggcagccaggatatggcgaaaaccggttgggtgtcgccgatgggatcgcacagcgacgcgctgacgcatacggcaaacggccagatcattatctgcgcgcgtaaagaagagaagatcctgccgtcgccggtgattaagcaggcgctggaggcaaagatccagaagctggaagccgatcaggggcgcaagctgaagaagaccgagaaagattccctgaaagatgaagtgctgcactcgctactgccgcgcgccttcagccgcttcagccagacaatgatgtggatcgacaccgtcaacggcctgatcatggtcgactgcgccagcgcgaagaaagcggaagatactctggccctgctgcgtaaaaccctcggctcgctgccggtggtgccgctgaccctggagaatccgattgagctaacgctgaccgagtgggtccgctccggcaccgtggcgcagggcttccagctgctggacgaagccgagctgaaagcgatgctggaagatggcggcgtgatccgcgccaagaagcaggatctggttagcgacgaaatcgctgtacacattgaggccgggaaggtcgtcaccaagctggcgctggactggcagcagcgtattcagtttgtgatctgcgacgacgcgtcaattaaacgcctcaagttctgcgatgaactgcgcgaccaaaacgaagatatcgatcgggaagatttcgcccagcgctttgacgccgactttatcttaatgaccggcgagctggctgccctgatccaaagcctggtggaagggctcggcggcgaagcgcagcgctaa

SEQ ID NO: 238658 - DNA, 915 bp, Klebsiella pneumoniae
gtgcgtattggtattgatttaggtggaacaaaaaccgaagtgatagccctgagcgaccagggagagcagctgtttcgccaccggttacccacgccgcggcaggactaccggcaaaccatcgagaccatcgccactctggtggcgatggccgagcaggcgaccggacagcagggtaccgtggggatgggcattcctggctcaatttcgccttataccggggtggtgaaaaacgccaactcgacctggctcaacggccagccctttgataaggacctcagcctgcgccttgagcgggaagtccggctggctaacgatgccaactgtctggcggtgtcggaagcggtggacggcgcggcggcgggggcgcaaacggtattcgcggtgattatcggcaccggctgcggcgccggggtggcgctcaacgggcgggcgcatatcggcggcaatggtaacgctggcgaatggggacataacccattgccgtggatgaacgacgatgagctacgctaccgtgcggaagtcccttgctactgcggcaaacaggggtgtatcgaaacctttatctccggcaccggtttcgccaccgactatcagcggctgagcggccgagggttaaccggcagcgagattatgcgcctggtgggagaaggtgacgaaaaggctgaactggcgctgagccgctatgaacagcggctggcgaaatcgctggcccacgtggtgaatatcctcgacccggacgttatcgtgctgggcggcgggatgagcaacgtcgaacggctgtatcagacggtgccggacctggtgaagcagtgggtcttcggcggcgagtgtgaaacgccgatccgcaaagcgatgcacggcgactccagcggggtacgcggcgcggcctggctgtggccgctccaggggacctga

SEQ ID NO: 238659 - DNA, 3138 bp, Klebsiella pneumoniae
atgaaaatcctcagtctgcgtctgaaaaacctcaactccctgaaaggggaatggaagatagactttaccgccgagccgttcgccagcaatggcctgttcgccattaccggcgccaccggggccgggaaaaccacgctgctcgatgccatttgcctggcgctctatcatgaaacgccgcgcctgaataaagtctcccagtcgcaaaacgacctgatgacccgcgataccgccgagtgtctggcggaagtcgagtttgaagtaaaaggcatcgcctaccgcgctttctggagccagaaccgggcccgtaaccagccggatggcaatctgcaggcgccccgcgtcgagctggcgcgctgcgctgacggcaaaatcctcgccgataaagtctcggacaagctggagcaaaccgcgacgcttaccggcctcgactatggccgcttcacccgctcgatgctgctttcccaggggcaatttgccgccttcctgaacgcgaagccgagcgatcgcgcggagctgctggaggagctgaccggcacggaaatctacggccagatttcagccatggtctacgaacagcacaaagccgctcgccatgcgctggagaagttcgaagcccaggcggcgggcatcgtcctgttgacggaggcccagcagcaggcgctgcaggaaagtttgcaggtacttactgacgaagaaaaagccctgctggcccagcagcagagccagcagcagcagctccagtggctgacccgccgcgacgagctggcgcagcaacagcagcaggccgccacccggcagcagcaggcccgccaggcgctggcggacgccgccccggcgctggcgaagcttgagctggcccagcccgccgctcaactgcgtcccctgtgggagcgccagcaggagcagacggcaggcctggcgcaaacccggcagcggatcagtgaagtaaatgctcgcttacttgccagcacggcgctgcgcgcgcgcatccgccagggcgccttgcgcgctcagcagcagcgtcaggctgaactggccgatctggcgcagtggctggccgcccatgagcgtttccgcttatggggtcaggagatcgccggctggcgggcgcaattctcgcaactgacgcgggataaacaacagctaacggctcagagcacccgcctggccgcgctacgccagaagctggccacgctgccagccagccctctcaccctgagcgcggatgacgttgccgcagcgatagaacagcaaacccaatcgcggccgctgcgccagcgcctgatctccctgcatgagcagcatcagctgctgcgcaagcgtctgcgccagaacgccgacagcgtccagcaggcgcaggcggagcaggtaaaacttaacgctaccctgacgctgcgccgggaacaatataaagacaaaaaccagcactatctcgacctgaaggcgctctgccagcgggaagaaacgatcaaagacctggaaagctaccgcgaccggctcgaggcgggtaagccctgtccgctgtgcggcgcctgtgaacacccggcgattgaacaatacgcctcgttgacgctcacggataatcagcgccgccgcgatgcgctggaaaaggaggtcgccgcgctgaaagaagaaggcctgctgatcctcgggcaggtcaaggccctgacgcaacagcttcagcgtgacaccgaagcggccgggcggctcgcagaggaagagcaagcgcttactaaagcgtggcaggagacctgcgcctctctgcacatcgcgcgggatattgcgcaagagataaacgactggatgcaggaacaggagcgctacgagcagcagctctatcagctcagccagcgcctgatgttgcagagtcagcttaacgatcagcaggcgctggagcgccaggccgagcagcagctggcggccacgcgccagggactggagagcgccctgcaggccctggccctgagcctgccggcagaagggacagaagccgcctggctgcacgctcgcgaaagcgaatttgcccagtggcaggcgcaacagacccaacatgatgccattcagcagcaaatcgctgctctgcggccactgctggagacgctgccgaccagcgacgagacagaggttgaagctgagtcggccatcccggacaactggcgcgaaatccacgaggaatgcctgtcgctgcacagccagcttgtcgcccagcagcagcaggaaacccaggaaaaggcgcgtctggaccagtcgcaggcgcaattcacctccgccctggcctccagccgctttagcgatcgggaggcgttcctcgccgcgctgctggatgacgagaccgcccagcggctgacgcagttaaaacagacgctggagcagcagcttcagcaggcggctgcgctctgcgagcaggcgacccggcaacatgaggcgcacctggcgctgcgtccgcaaggggtggacgctgacgtccccaccctgcaaacccagctgcacgccctggcccagcggctgcgggataacactacccgccagggtgagatccgccagcagctcaggcaggacgcagagagccgtcaacagcagcaggcgctggggcagcagattgcagaggcggcgcagctggcggacgactggggctatctcaattcgctgatcggctccagcaccggcgaccggttccgcaaattcgcccaggggctgacgctggataatctggtctggctggcaaaccagcagctcaaccgcctgcatggccgctatctgctacagcgcaaggccagcgaggcgctggagctggaggttgtcgatacctggcaggccgacgccgtgcgcgacacccgcaccctctccggcggcgaaagtttcctcgtcagcctggcgctggccctggcgctgtcagacctggtgagccataagacgcggattgactccctgtttcttgatgaaggcttcggcaccctcgacagcgaaacgctggacacggccttggacgccctggatgcccttaacgccagcggtaagattatcggggtgatcagccacgtggaggcgatgaaagaccgcattccggtgcagatcaaagtgaagaagattaacggcctgggctatagccggctggacaaagcgtttgcggtggagtga

SEQ ID NO: 238660 - DNA, 1206 bp, Klebsiella pneumoniae
atgcgcctccttcacacctccgactggcacctgggccagaatttttacagcaaaagccgcgcggccgaacacgacgcttttcttacctggctactggaccgcgcgcaggagcatgaagtcgacgccattatcgtggctggcgatatttttgataccggctcgccgccgagctacgcccgcgaactgtataaccgtttcgtcgtccagttgcagcagaccggctgtcgcctggtggtgctggcgggcaaccacgactcggtggcgatgctcaatgaatcccgcgatatcctcgcctttttacacaccaccgtggtggcgaacgccggctacgcgccgattgagctgccgctgcgcgacggcacgccgggcgccatcttctgtccggtgccgtttttacgcccgcgcgagctggtgaccagccaggccggtcactccggtcgggaaaaacagcagcagctgctgcacgccatcagcgactattatcaggagcagtatcagcaggcctgcgcgctgcgcggcgatcggccgctgcccatcattgccagcggccatctgaccaccgtcggcgccagcaaaagcgatgccgtccgcgacatttacatcggcacactggatgcctttccggcgcaacacttcccccctgccgactacattgcgctgggccatattcaccgggcgcagatggtcggcggctgcgagcatatccgctacagcggctcgccgctgccgctgagcttcgatgaaaccggcaaagcgaaatcggtgcatctggtgagctttagcgaggggcgacttagcgccgtggaaaccctggaggtgcccgtgacccagcctctggcggtaatcaaaggcgatctggccgccatcaccgcccagctggagcagtggcgcggcgtcgagcaggacccgccggtgtggctggatatcgaaatcaccaccgaggactatctgcacgatattcagcgtcatattcaggcgctgacgaaggatctgccggtggaagtgctgctggtgcgccgcagccgcgagcagcgcgagaaaatactgctcaacgcccagcgggagacgctcagtgaactgaaggtggaggaggtattcgagcgccggctggcgctgaccgaaattgacgatatgaagcgcgcccggctgcatgagctgttcgcccatacggtgcatacgctcaccgcggaggatgaaaacgcatga

SEQ ID NO: 238661 - DNA, 690 bp, Klebsiella pneumoniae; identical to SEQ ID NO: 134673

SEQ ID NO: 238662 - DNA, 1296 bp, Klebsiella pneumoniae
gtgctggaacggctgtcatggaaaaggctggcgctggagctctttttagcgtgtattccggccctgattctgggggcgtttgtgggtcatctgccgtggtttttactggcggcagtgaccggtttgctgatctggcatttctggaatttgatgcgcctgtcgtggtggctgtgggtggaccggagcatgactcctccgcctggccgcggcagttgggagccgctgctgtatggtctgcaccagatgcagatgcgtaataaaaagcgtcggcgcgagctgggaagcctgattaaacgctttcgcagcggggcggaatcgctaccggatgcggtcgtcctgaccacggaagagggggctattttctggtgtaatggcctggcgcagcagattctaaacctgcgctggccggacgacagtggccaaaacattcttaaccttctgcgctatcctgagttcgccaactatctgaaacagcgcgatttttcaaagccgctcaatctggtgctgaataacgcccgtcatctggaaattcgcgtgatgccctacagcgacaagcagtggctgatggtggcgcgcgacgtgacgcagatgcatcagctggaaggggcgcggcggaactttttcgccaacgtcagccatgagttgcgcaccccactgacggtgctgcagggctatctggagatgatgcaggagcaggtgctggagggggcgacccgagaaaaagccctgcacaccatgcgggagcaaactcaacgtatggaaggcctggtgaagcagctgctgacgctgtcgcgtattgaagccgcgccggcgctggcgatgaatgatcgcatcgacgtgccgatgatgctgcgggtggtggagcgcgaggcgcaaactctcagccaggagaaacagacgctgatcttcaccgtcgatgagcagctcaaggtgctgggtaatgaggagcagctgcgcagcgccatctccaacctggtctataacgcggtgaaccacaccccgccggggaccgaaattcgcgtcagctggcagcggaccccgcagggagcgctgttcagcgtcgaggataacgggccaggcattgcgccggagcatattccccgtctgaccgagcgtttttatcgggtggataaagcccgttcccggcaaacggggggcagtggcctgggactggcgatcgtcaaacacgcggttaaccatcatgacagccggctggaaatcgacagcacggtgggcaagggaacccgctttagcttcctgctcccggaacgattaattgccaaaaatgacgcctga

SEQ ID NO: 238663 - DNA, 1404 bp, Klebsiella pneumoniae
atggccgctgtatcgtccctgagaggggagcgcggtatttttccatttttttacaacaccacatccacaggcagtaatgaatttatgacccatcagttaaaatctcgcgacatcatagcgttgggctttatgaccttcgcgttgttcgttggcgcaggcaacattattttccctccgatggttggcttacaggcgggcgagcacgtctggacggcggcgatcggcttcctgatcactgcggtgggtctgccggtgctgacggtggtggcgctggcgaaagtcggcggcggcgttgaaagcctgagcaccccgattggtaaagtggccggtatcctgctggcggtggtgtgctatctcgcggtaggaccgctgttcgcgacgccgcgtaccgcgaccgtctcctttgaggtcggtattgcgccgctgaccggcgacggcccgctgccgctgctgatctacagcgttatttacttcgcgctggtgattctggtctccctctatccgggcaaactgctggacaccgtgggcaatttccttgcgccgctgaaaattatcgccctgattgtgctggcggtcgccgccatcatctggccagcgggcccgatcagcgacgcgctggaagcgtatcgtacggcgccattctccaatggcttcgtcaacggctacctgaccatggataccctcggcgcgatggtatttggcatcgtgattgttaatgccgctcgctcacgcggcgtcagcgaagcgcgtctgttgacccgttataccgtctgggctggcctgatggcgggcgtcggcctgaccctgctgtatctggcgctgttccgtctgggctctgacagcgctactctcgtggatcagtccgccaacggcgcggcgatcctccatgcctacgtgcagcacaccttcggcggggcgggcagtttcctgctggcggcgctgatcttcatcgcttgcctggtgacggcggtgggcctgacctgcgcctgcgctgagttctttgcccagtatctgccgttctcctatcgcacgctggtctttgttctcggcctgttctccatggcggtctccaatttgggccttagccatctgatccaggtatcgattccggtgctgaccgctatctatccgccgtgtatcgcactggttgtattaagctttacccgcagttggtggcataattcgtcccgcgttatcgcgccggccatgtttatcagcctgatgtttggtatcattgacgggattaagtcatcagcatttgccgcgattctgccggactggaccgcgcgtctgccgctggcggagcagggcctggcctggctgatgcccaccgccgtgatgaccattctcgcggtgatctgggatcgcgcagccggacgtcaggtgacttccagcgcgcattaa

SEQ ID NO: 238664 - DNA, 1374 bp, Klebsiella pneumoniae
atggaaagtagtaacaagcttaagcgcgggctaagcacccggcacattcgctttatggccctgggttccgccatcggcaccgggcttttttacggctcggccgacgccattaaaatggccggacccagcgtactgttggcctacattatcggcggcgtcgcggcatatatcattatgcgggcgctcggtgagatgtcggtgcataaccctgccgccagctcattctcccgctatgcccaggaaaacctcggcggactggcgggctatatcaccggctggacctactgctttgaaatcctgatcgtcgccatcgccgacgttaccgccttcggcatctacatgggcgtctggttcccgacggtgccgcactggatctgggtgctcagcgtggtgctgatcatctgcgccgtcaacctgatgagcgtcaaggtgtttggcgagctggagttctggttctcgttcttcaaagtggccaccattatcatcatgatcctcgccgggttcggcatcattatctgggggatcggcaacggcggccagccgacggggattcataacctgtggagcaacggcggcttcttcagcaacggctggctgggaatggtgatgtcgctgcagatggtgatgttcgcttacggcggcatcgaaatcatcggcattaccgccggtgaggcgaaggacccggagaaatccattccgcgcgccatcaactcggtgccgatgcgcattctggtgttctacgtcggcacgctgttcgtcattatgtccatctacccgtggaatcaggtgggaaccgacggcagccccttcgtcctgaccttccagcatctgggcattaccttcgcggccagtattcttaacttcgtggtcctgacggcttcgctgtcggcgattaactccgacgtgttcggcgtgggccgtatgctgcacggcatggctgagcagggcagcgcgccgaaggtgttcgctaaaacgtcgcgtcgcggtattccgtgggtgacggtgatggtgatgaccattgcgctgctgtttgcggtatacctaaattacatcatgccggagaacgttttcctggtgatcgcctccctggccaccttcgccacggtgtgggtgtggattatgatcctgctgtcacagatagccttccgccgccgtctgtcgcccgaagaggttaaggcgctgaaattcaaagtccctggcggggtggtgaccacggtgatcggcctgctgttcctggcctttattatcgcccttatcggctatcatccggacacccgcatctcgctgtacgtcggtatggcgtggattgtgctgttgctgctcggctgggtctttaagacccgccgtgagcgccgcctggcgcaggctcagtaa

SEQ ID NO: 238665 - DNA, 1818 bp, Klebsiella pneumoniae
atgttgaaggcatggcaccttccggttgcaccctttatcaaggtgcaacaggaccgactgtttattactctgtggttaagcggtgagtcgctgccgcagcggatcacgctgcgcgcggaagaggataacgaagagctgtcgctgccgatgcagcggctccgccaggcgccgcagccaggcgtggtggcatggcgcggcgaaatctctctcgccagcggccagccgcgccgccgctacagctttaagctgctgtgggccgaccatcagcgctggtttacgccacaaggcttcacccgattcccgccggcccgactggagcagttcgccattgacctgccggacgccggcccgcagtgggtggccgatcaggtgttctatcaaattttccccgatcgctttgcccgcagcgccgcgcgtgacgccgaccaggatgcggtctattaccatcacgcggcgggacgggagattgtgcgcaaggcgtgggacgacccgcttaccggcgaggcgggcgggtcgacgttctacggcggggatctcgacggcatcagcgaaaaacttccctacctgaagcagctcggcgtaaccgctctgtatctgaacccggttttcgccgcccccagcgtgcataaatacgataccgaggattatcggcgcgtcgatccgcagtttggcggcgacgcggcgctgctccggctgcgccacaacacccagcgggcgggaatgcgcatgatcctcgacggcgtgttcaaccataccggcgattcccatccctggttcgaccgtcaccagcagggcagcggcggcgccggccacgatccggactccccgtggcgcgactggtttaccttctcagaggaggggcaggcgcacaactggctgggctatgccagtctgccgaagctcgactatcggtcgaccagcctggtcaacgagatctatgccggtgaagacagtatcgtacgccactggctgaaggcgccatggagcatggacggctggcgtcttgacgtggtgcatatgctgggcgaaggcggcggggcgcggaataacctgcagcatatcgccggcattacccaggcagcgaagcaagcgcagccggaagcttttgtctttggcgaacattttggcgacgcgcgccagtggctgcaggcggatgccgaagacgcggcgatgaactatcgtggcttcaccttcccgatctggggattcctcgccaataccgatatctcttacgatccgcagaaaatagacgcccagacctgtatggcgtggatggataattatcgcgccgggctgtcgcatcagcagcagctgcggatgttcaaccagctcgacagccatgatacggcgcgttttaaatctcttcttggcaaagacgtagcgcgcctgccgctggcggtggtgtggctgttcagctggccgggggtaccgtgcatctactatggcgacgaggtgggcgtggatggcaataacgatccgttctgccgcaaaccgttcccgtgggatccggcgctgcaggatacccagctgctggcgctgtatcagcggatggcgaaactgcgtaaggcccaccaggcgctgcgctacggcggctgtcaggtgatttacgccgaggataacgtggtggtgtttgtccgcgtctacaaacagcagcgggtgctggtggcgattaaccgcggggaagcctgcgaggtggttattgaagattccccgctgctgaacgtggccgggtggacgctgcaggagggcgccggcgccttccaggacggggtgctgaccctcccggccatctccgccaacgtctggtccggccgttaa

SEQ ID NO: 238666 - DNA, 903 bp, Klebsiella pneumoniae
atgcgcgtaaactttgatgttttgatgatccttgatgcccttgaccgccacggatccttcgccaccgccgcggagtcgctgtataaaacccccgccgctctgagctatatgatccagaagctggagagcgatctgaacatcgtgctgttggatcgttccggccatcgggcaaaatttaccgataccggccggctgatgctggagaaggggcgacagcttttaagtgccgccagagatctggaaaagcaggcccagcagctgagcgcgggctgggagcgagagctagccatcgcccttgacgcctcatttcccttttcggccctgctgccgctgatcgccgagttttacgcgcaaaacccacagacgcgactgaacttcagccatcacaccctcgccggttcgtgggaagagctgacccatcatggggcggatattatcctcggcgccatcaatgagccgcccacctccgcggagtggtcatggcaaaccctcggcgcgttggataacattttcgtcgtcgccccccatcacccgctggctcaggcgaaggagccactggccaataaacagctcagccagcatcgggccatcgtgatccgcgacagcgcccgctattgccatccgctcaacagcaatctcctcgacgagcagccgcaaatcggcgtcgatgatttcgccagtaaagtcgaactattgtgcgccgggctgggctgcggctttctgccgcgccatatcgctcgcccgtggctggtaaaaggcagtctggtggagaaaagcgtcgcctgctggcgggaaaaggatattacctatatggcctggcgcagcgggaatgatgggctggctcagcgctggtggcgggaggcgctcctccgcggcgacctgctgagccagctctaccattaa

SEQ ID NO: 238667 - DNA, 642 bp, Klebsiella pneumoniae
atgtctattcgtgaactgctcgatcccactaattccgcgcttatctttattgaccatcagccgcaaatgtcctttggcgtggcgaatatcgatcgccagaccctgaaaaataacaccgtggcgctggcgaaagcgggcaaaatttttaatgtaccggtgatttatacctccgtagagaccaaaagctttagcggctatatctggccggaattattggccgtgcatcctgacgtcaagccgattgaacgtacctccatgaactcctgggaagacgatgcgtttgtggcagcggtgaaagcgaccggccgtaaaaagctggtgatctccgctctgtggaccgaagtctgcctgactttcccggcgttgatggcgctggaggcgggctacgaggtctatgtagtgacggatacctccggcggcacctctgtcgacgcccatgagcggtctattgaccggatggtgcaggcgggggcggtgccggtgacctggcagcaggtgctgctggagtaccagcgcgactggtcgcgcaaagcgacctacgatgcggtaatggacctggtgcgcgaacacagcggcgcctacgggatgggcgtcgattacgcttataccatggtgcatggcgcgccggagcgtaaagcgtaa

SEQ ID NO: 238668 - DNA, 546 bp, Klebsiella pneumoniae; identical to SEQ ID NO: 210365

SEQ ID NO: 238669 - DNA, 1869 bp, Klebsiella pneumoniae
atgtcgcaaactgccacactgattctgacccacggtcagattcataccctcgatcgtgcgaatcccctggcggaagccgtggccatcgccgacggaaaaattgttgccaccggaagtcacgatcggatcatgagctttgccgccgaggggacgcaaatcgtcgatctcaaagggcatacggtgatcccgggcctcaacgattctcacctgcacctgatccgcggtgggttgaactacaaccttgagctccgctgggagggcgtcccctcgctggcggatgccctgcgaatgctgaaggatcaggcggatcgcacgccgtccccgcagtgggtgcgggtggtcggcggctggagcgaatttcagttcgccgagcggcggatgccgaccctggaagagctgaacgaggcggcgcctgatacgccggtgtttgtgctccatctctacgatcgcgcgctgttgaaccgtgcggcgctgaaagccgtggggtatagcaaagagacgccggatccggcgggcggcgagatcgtccgcgatagccacggcaacccgaccgggatgctgatcgctaaaccgaacgccatgatcctttacgctacgctggccaaggggccgaagctgccgctggatttgcagctgaactccacccgtcaatttatgcgcgagctgaaccgactggggctgaccagcgccatcgacgccggcggcggcttccagaactatccggaagattacgaaattatcgaacagctgcacgcgaaagatcagatgaccgtgcgcatcgcctacaacctgtttactcagcggccgaagcaggagctggaggatttcgaacgctggaccgacatgctgaagccggggcaggggactgacttctatcgcgccaacggcgccggcgagatgctggtattttcggcggcggattttgaagatttcctgcagccgcggccggatctgccgcaaggcatggaggatgagctggagcgggtggtacgccatctggtggagcatcgctggccgttccgcctgcatgccacctacgatgagtccatcagccggatgctggacgtgtttgagaaggtgaaccgcgatatcccgtttaatggcctgcactggttcttcgatcatgccgagaccattaccgagcgtaacattgagcgggtgaaggcgctggggggcggtattgcggtgcagcatcggatggccttccagggcgaatattttgtcgatcgctacggcaaagaggcggtgaaacataccccgccggtagcaaagatgctggcgctggacgtgccggtggggctgggcaccgatgcgacccgcgtcgccagctataacccgtggaccgcgctgtactggctggtctccgggcgcaccgttggcgggatggcgatgtatgacgacgccaaccgcctgccgcgcgatgtcgcgctggagctgtggacggcgggcagcgcctggttctccagcgagcagggcaagaaaggccgtctggccgccggtcagcttgccgatctggtggtgctgtcgaaagactacttcagcgtcgcggaagaggagatcaaaggcattgagtcggtgctgacggtggttgacggcaaagtggtctatgccgccggtcacttctcgccgctggcgccgccgcctattccggtgctgccggagtggtcgccggtggtgaaggtcccgggccattaccgttccgctccgccggcgacggctaaaatcggcgccatggtgcagatgcaccagtgctgcggtagctgtggcgtccacggccatcagcatgatattgcgcgtaagtcgtcgattccggtctctgacgagcaggccttctggggcgtgctgggctgctcctgctttgccttttga

SEQ ID NO: 238670 - DNA, 1392 bp, Klebsiella pneumoniae
atgcaggctattcttagttttttaacggaaatattcagtcaacccgcctttttaatggggcttatcgcctttgttggtttagtggcgctgcgctcccccggtaacaaactgcttaccggcacattaaagccgattttaggctatttgatgttgagcgctggggcaggcgttatcgttgccaatctcaatccgctgggcggtattatcgaggccggatttaatatccgcggcgttattccgaacaatgaagccattgtctccgtcgcccagaaaatgctgggcgtggaaaccatgagtattttgctgttaggctttattttcaacctgattatcgcccgctgtaccaagtataaatatatctttctgaccggccatcattcgttctttctcgcctgcctgttctccgccgttctgcaggcggcagagttccagggctggatgttgatcctgatcggtggattcctgttgggctcatggtcagccatctccccggccatcggtcagcgttacaccagacaggtaaccgaagacggcgggatcgccatgggccatttcggttctctcggctactacctctcggcatggatcgccagccggaccggcaatccggcaaattccttcgccgataccgaaatttcagaaaagtggggctttctgcgcgataccacggtcaccaccggtatcgtgatgtttgttatctactttgtctgcagcgctgtcgccgggtcggcgtacctgagcaccatcaccgaccaaaacatgctgatcttctcggtgctgaccggtctgcagttcgccgttggcgtagccattgtctataacggcgtgcggctgatcctcggcgatctggtgccggcgttccagggcatcagccagaagctgatcccggactccatcccggccgttgactgcgcggtgttcttcacctttagccccaccgcggtggtggtgggattcatcagctcctttgtgggcgggctggtcgggatgctcttgctcggcgggctgggcatggcgctgattattcccggcatggtcccgcacttcttctgcggcggcacgtccggcgtcttcgccgacaaactgggggggaagcgcggatgtatcatcgcctcctttatcggcgggatcttcctcgccttcctgccggcgatgctgctgccggcgctcggcaacctcgggtttgaaaacagcaccttcgccgatttcgacttcgcggtatggggcatcattatcgggaatgcgttcacccagtttggtcagatcactatctatctgatttgtctggcgctgctcgtcgcgctgctggcgcctttctgcttccgtcacgtccaggtggtgggcaacacgctcagctatgaggagctgacggcgaagcagaaaaatgaataa

SEQ ID NO: 238671 - DNA, 603 bp, Klebsiella pneumoniae
atggttctggtcactcgtcaagcgccggattttactgcagccgctgtgctgggtaatggtgagatcgttgagaaattcaatttcaaacagcacaccaacggtaaacctaccgttctgttcttctggccgatggacttcaccttcgtgtgcccgtctgagctgatcgcgttcgacaaacgttacgaagaattccagaaacgcggcgtggaagtggttggcgtttccttcgactccgagttcgtgcacaacgcatggcgtaacaccccggtagaccagggcggtatcggcccggttaaatacgcgatggttgctgacatcaaacgtgaaatccagaaagcttacggtattgagcatccggacgaaggcgtagcgctgcgcggctccttcctgatcgacgccaacggcatcgttcgtcatcaggtggttaacgacctgccgctgggccgtaacatcgacgaaatgctgcgtatggttgacgccctgcagttccacgaagagcacggcgaagtctgcccggcgcagtgggaaaaaggaaaagaaggtatggccgcctctccggaaggcgttgcaaaatacctgaccgaaaacgtttccagcctgtaa

SEQ ID NO: 238672 - DNA, 582 bp, Klebsiella pneumoniae
atgaattttctcgcccacctgcacctggcccatctcgccgacagttcgctgcccggcaacctgatggccgacttcgtgcgcggcaacccgcagggcgactatccggcggagatcatcgacggcatctttatgcatcggcggattgacgtgatgactgacaacctggcggaagtcaaagaggcgcgggagtggtttcgcccgcagacccgccgcgtcgcccccatcaccctcgacgtcatgtgggatcatttcctgtcccagcactggacgcagctctcccctgacctgccgctggacgagttcgtacgctacgccgagcggcagatcgtccccatcctgcccgactcgccgccccgcttcgtcaatctcaatcaatatctgtggtcggagcgctggctggagcgctatcgggaaatggattttattcagcgcgtgctgaacggcatggccagccgccgtccacgtctcgaggcgctacgcgactcctggcaggatctggatatccattacgaccgtctggagacgcagttctggcgcttttatccgcagatgatgcgcctggcagaaaacaaacagctgtaa

SEQ ID NO: 238673 - DNA, 1065 bp, Klebsiella pneumoniae
atgcgcgttaccgattttgcttttgaactacccgaatctctgatcgcccactatccgatgcctgagcgcagtagctgtcgcttgctctccctggacgggccgacgggcgcgctgacgcatggcaccttcaccgacattctcgataagcttaatcccggcgatctgctggtgtttaacaacacccgggtgatcccggcgcgtctgttcggtcgtaaggccagcggcggcaagattgaagtgctggtggagaggatgctggatgataagcgcattctggcccatattcgcgcctcaaaagcgccgaagccgggcgccgagctgctgctgggcgatgacgagagcattaaggccacgatgctggcgcgtcatggcgcgctgtttgaagtggagtttaacgacgagcgcccggtgctggagatccttaacgggatcggccatatgccgctgccgccctatattgaccgcccggacgaagacgccgaccgcgagctctatcaaaccgtctatggcaccaggccgggcgcggtagccgccccgaccgccggtttgcatttcgacgaaccgctgctggacaaactgcgcgccaaaggcgttgagatggcgtttgtcaccctgcatgtgggcgcgggcaccttccagccggtgcacgtcgacagcattgaagagcacaccatgcactccgaatatgctgaagtgccgcaggaggtggtcgatgcggtgctggcggcgaaagcgcgcggcaaccgcgtgatcgcggtgggcaccacctcggtacgttcgctggagagcgcggcgcaggcggcgaaagacgcgctgatcgcgccgttcttcgacgatacgcagattttcatctacccgggttatcagtaccaggtgatcgatgcgctggtgactaacttccatctccctgaatccaccctgattatgctggtgtcggcgtttgcgggttatcagcacaccatgaacgcctataaggtggcggttgagcagaaatatcgcttttttagctacggggatgcgatgtttatcacgtacaatccgcaggctatttctgagcgtccctga

SEQ ID NO: 238674 - DNA, 1128 bp, Klebsiella pneumoniae; identical to SEQ ID NO: 134690

SEQ ID NO: 238675 - DNA, 333 bp, Klebsiella pneumoniae; identical to SEQ ID NO: 134691

SEQ ID NO: 238676 - DNA, 1815 bp, Klebsiella pneumoniae
atgctggtcgtcgtcattgtcgtcggcctgatctatgcgcttcccaacctgtatggtgaggatccggctgttcaaatcactggcgcgcgcggcgtcgccgccagtgagcaaacgctgatccaggtccagaaaactttacaagaagaaaaaataaccgcgaagtctgtggcactggaagagggcgctattcttgcgcgcttcgacaccactgatacccagctgcgcgcgcgcgaagcgctgcttaacgtgctgggtgacaaatacgtcgtggcgctgaaccttgctccggcaaccccacgctggctggcggcgctctatgccgagccgatgaagctgggtcttgatctgcgcggcggcgtgcacttcctgatggaagtcgacatggacaccgcgttaggcaaactgcaggaacagaacatcgatagcctgcgcagcgagctgcgcgacaaaggcattccttacgcgaccgtgcgtaaagaagacaactacggtctgagcatcgtcttccgcgacagcgcggcgcgcgaccaggctatctcttatctcagccctcgccatcgcgatctggttatttcctctcagggtgacaacagcctgaaagcggtgatgaccgatgagcgcctgaaagaagcccgtgagtacgcggttcagcagaacattaatatcctgcgtaaccgtgtgaaccagctgggcgtcgccgagccgctggttcagcgtcagggcgctgaccgcatcgtggttgagctgccgggtatccaggataccgcgcgtgcgaaggaaatccttggcgcgaccgcgaccctcgagttccgtctggtcaatactaacgtggaccagtccgccgccgcctctggccgcgtgccgggcgactcggaagtgaagcagacgcgtgaaggccagccggtagtgctgtacaagcgggtgatcctgaccggggaccatatcaccgactcgacctccagcatggatgagtacaaccagccgcaggttaacatctcgctggacagcgcgggcggtaacatcatgtctaacttcactaaggacaacatcggcaagccgatggcgaccctgttcgtggagtataaagacagcggtaagaaagacgctaacggtcgcgctatcctggcgaaagaggaagaggtgattaacatcgccaacatccagtcgcgtctgggtaacagcttccgtatcaccggtatcagcaatccgaacgaagcgcgtcagctgtcgctgctgctgcgtgccggcgcgctgattgcgccgattcagatcgtcgaagagcggactatcggcccaaccctgggaatgcagaacatcaagcagggtctggaagcctgtctggccggtctggtggtctctatcctgttcatgatcctcttctataagaagttcggcctgattgcgacctcggcgctgattgccaacctgatactgattgtcggcattatgtccctgatcccgggggcgacgctgaccatgccgggcatcgcgggtatcgtgttaaccctggcggtggcggtcgatgctaacgttctgatcaacgagcgtatcaaagaagagctgagcaacgggcgtaccgttcagcaggcgattgacgaaggttatcgcggcgcgttcagctcgatcttcgacgccaacgtgacgacgcttatcaaagtgatcatcctgtacgcggtcggtaccggtgccattaaagggtttgcgattaccaccggtatcggtatcgcgacctcaatgtttaccgctatcgtcggcacccgtgccatcgtgaacctgctgtacggcggcaagcgcgttaaaaagctgtctatctga

SEQ ID NO: 238677 - DNA, 972 bp, Klebsiella pneumoniae
gtggcacaggaatatactgttgaacaattgaaccacggccgtaaagtctgggactttatgcgctgggactactgggccttcggcatttcaggttttctgctgattgtgtcgatcgccatcatcggcgttcgcgggtttaactgggggctcgatttcaccggcggtacggtgattgaaattacccttgagaaaccggtcgatctggaccagatgcgcgattccctgcagaaagcgggctttgaagagccccaggtgcagaactttggcagcagccgcgacatcatggtacgtatgccgccggtgcatgacgccaacggcagccaggagctgggcagcaaggtcgtgacggtgattaacgaatcgaccagccagaatgcggcagtgaagcgtattgagtttgtcggcccgagcgtcggcgcggacctcgcgcaaaccggcgccctggcgctgattgcggcgctggtctgtatcctgatctacgtcggcttccgcttcgaatggcgtctggccgccggggtggttatcgccctggcgcacgacgtggtgatcaccatgggcgtgctgtcgctgttccatatcgagatcgacctgaccatcgtggcctcgttgatgtcggttatcggctactcgctgaacgacagtatcgtggtatcggaccgtatccgtgaaaacttccgtaagatccgccgcggtacgccgtacgagatctttaacgtgtcgttgacccagacgctgcaccgtaccttgatcacctctggtaccactttgatggtgatcctgatgctgttcctgttcggcggcccgattctggaaggcttctcgctgaccatgctgatcggtgtttccatcggtacggcttcttctatctacgtcgcgtccgcgctggcgttgaagctgggcatgaagcgcgagcatctgatccagcagaaggtcgaaaaagaaggggcggatcagccgtccattctgccgtaa

SEQ ID NO: 238678 - DNA, 366 bp, Klebsiella pneumoniae; identical to SEQ ID NO: 210379

SEQ ID NO: 238679 - DNA, 696 bp, Klebsiella pneumoniae
atgacccgacgcgccgaccgtttatttcagattgtgcagatcctgcgcggcaggcggctcactaccgccgcgctgctggcggagcggctgggcgtgtcggagcgtaccgtctatcgcgatattcgcgatctctccctctccggcgtaccggtggagggcgaagcgggcagcggctaccggctgctggcgggctacgatctgccgccgctgatgctgaccaccaaagagtccgaggcgctgatcgctgcgattcggctgttaaaaacctggggcggtgaggcgctgtcgcagtcgctggagtccgcccaggaaaaaatgctggcgatcctgccggaggcgcgtcggcgccaggcggagcagactcgcctgtttgcccctgaccttggcgcgcatcgctatgctaaaacccattttgacgttatccaccaggccgtatccaatcagcaggtattacagcttcactaccaggatgaatccggtcaggtgacgtggcgtgaagtgctgcccctggggctgtttttctggggcgaacgctggctgctggtggcctggtgcgaactgcgcaatgattaccgcaattttcgcctcgatcgttgcctggaggtcagaaggaccgaacgtcgattcagcgagtgcgccgaccgctcgttaagcgattttctgcgcaaggtccggtgcgaggtgcgggagaaataa

SEQ ID NO: 238680 - DNA, 885 bp, Klebsiella pneumoniae
atgaaaaaaacattactggcagcgggtgcggttgtggcgctctccactacttttgccgcgggcgcggcagaaaacgacaaaccgcagtatctgtctgactggtggcaccagagtgttaacgtggtgggcagctaccacacccgttttggaccgcagatccgtaacgatacctacctggaatacgaagcgttcgccaaaaaagactggtttgatttctacggctatatcgatgccccggtattcttcggcggcaacagcacggcaaaaggtatctggaacaaaggttccccgctgtttatggagatcgaaccgcgtttctctatcgataagctgaccaataccgacctgagcttcgggccgttcaaagaatggtatttcgccaacaactatatctacgatatgggccgcaacgactcccaggagcagagcacctggtatatgggtctgggtaccgatatcgataccggcctgccaatgagcctgtcgctgaacgtctacgccaagtaccagtggcagaactacggcgcctccaacgaaaacgaatgggacggctatcgcttcaaagtgaaatactttgtgccgctgaccgacctgtggggcggttcgctgagctacatcggcttcaccaacttcgactggggttctgacctcggcgatgacaacttctacgatctgaacgggaagcacgcgcgcaccagcaactctatcgcctccagccacatcctggcgctgaactacgcgcactggcactactctatcgtcgcccgttacttccataacggcggccagtgggctgatgatgcgaagctgaacttcggcgatggtccgttcagcgttcgctcgacaggctggggtggttacttcgtggtcggctacaacttctga

SEQ ID NO: 238681 - DNA, 540 bp, Klebsiella pneumoniae; identical to SEQ ID NO: 210382

SEQ ID NO: 238682 - DNA, 450 bp, Klebsiella pneumoniae; identical to SEQ ID NO: 136545

SEQ ID NO: 238683 - DNA, 1104 bp, Klebsiella pneumoniae
atgcaggacgaaatgtacatggcgcgtgcgctgaagcttgccgcgcgcggtcgctttactacccatcctaaccctaacgtcggctgcgtcattgtgaaagacggcgagatcgtcggcgaggggtttcactatcgcgccggcgagccgcatgctgaagtgcacgccctgcgcatggctggcgaaaaggcgcgcggcgccaccgcctacgtcactcttgagccctgcagccaccatggccgtacgccgccatgctgcgatgcgctgattgccgccggcgtcagccgcgtggtcgccgcgatgcaggatccgaacccgcaggtggcggggcgcggtttgtatcgcctgcagcaggccggcattgaggtcagccatgggctgatgatgaacgaagcggaagcgctgaataagggctttctgaagcggatgcgcaccggttttccctgggtgcagctgaagctgggcgcctcgctggacggccgcacggcgatggccagcggcgaaagccagtggatcacctccccgcaggcgcgacgcgacgtgcagcgtctgcgcgcccagagccatgccatcctgaccagcagcgccaccgtgctggcggacgatccggcgctgaccgtgcgctggcaggagctgagcgccgatacccaggcgctttatcccgaagagaatttgcgccagccgctgcgcgtcgttatcgacagccagaaccgcgtcacgcctgagcatcgtattgtgcagcaggcgggggaaacgctgtttgcccgcctgcgcgccgatgaacggcagtggccggaaagtgcccgcacgctgctggttccggagcataacggccatctcgatctggtgctgctgatgatgctgctcggcaaacagcagatcaacagcgtctgggttgaggcaggggccacgcttgccggggcgctgctgcaggcgggcctggtcgacgagcttatcgtctatattgcgcctaaactgttaggcaatgcggcgcgtggattatgcgcgctgccggggcttgaagagctgagccaggccccccattttaaattcaatgagatacgtcaggttggcccggatgtctgcctgcatttaaccactgcgtga

SEQ ID NO: 238684 - DNA, 471 bp, Klebsiella pneumoniae
atgaacattattgaagctaacgttgctaccccggacgctcgcgtcgccatcaccattgcgcgtttcaacaactttatcaatgacagcctgctggaaggcgcgattgacgccctgaaacgcattggtcaggtaaaagatgaaaacatcaccgtcgtttgggttccaggcgcgtatgagctgccgctggcggctggcgcactggcgaaaaccggtaaatatgacgcggtgatcgcgctggggacggtgattcgcggcggtaccgcccattttgaatatgtggcaggcggtgccagcaatggcctggcgcatgtcgctcaggacagcgaaatcccggtagcctttggtgttctgaccactgaaagtattgaacaagccattgagcgcgctggcaccaaagccggtaacaaaggtgcagaagctgcgctgaccgcgctggaaatgattaacgtattgaaagccatcaaggcctga

SEQ ID NO: 238685 - DNA, 420 bp, Klebsiella pneumoniae; identical to SEQ ID NO: 136542

SEQ ID NO: 238686 - DNA, 972 bp, Klebsiella pneumoniae
atggcatgcggcgaattctccctgattgcccgttattttgatcgcgttaaaagcgcccgccttgatgttgaaaccggcatcggcgatgactgcgcgctcctgcatattcccgagaaaaaaacgctggcaatcagcaccgacaccctggtggcgggcaatcacttcttacccgatatcgaccctgccgacctcgcttataaagcgctggcggtgaacctgagcgacctcgcggcgatgggcgcggagccggcgtggctcacgctggcgctgaccttgccggaggtggatgaaacctggctggaagccttcagcgacagcctgtttgtccagctggactattacgatatgcaactgattggcggcgacactacccgtggcccgctctccatgacgctgggtatccacggctttgtgccgccgggacgcgccatgaaacgcgctggcgcgaagccgggggactggatctatgttaccggcactccgggagatagcgccgccggtctggcggtactgcagaatcgtctaacggtggatgaaccgtctgacgccgactacctgctggcccgtcatctgcggccgatgccgcgcgtgctgcagggccaggcgctgcgtgacctggcgacatcggctatcgatctctccgacggcctgatctccgatctgggccatattctcaaagccagcggctgcggcgcacgtatcgatctcgatgccatgccgtactccgatgcgatgctgcgccaggttgattctgagcaggcgctgcgctgggcgctcgccggcggggaagattacgagctgtgctttaccgtaccggagctgaaccgcggggcgctggacgtggctcttggccatcttggcgcgcgttttacctgtatcggacagattgcgccggagagcgaagggctgcagtttatccgcgacggtaagccggtcgcgcttgatttaaagggatacgatcactttgcgtag

SEQ ID NO: 238687 - DNA, 504 bp, Klebsiella pneumoniae
ttgcgtagtcgagacgaggcgcttagccgcctgagtatgcgtaatccgtggcatctgctggcgaccggctttggtagcggcttaagcccggtggtgccggggacgatgggctcgctggcggcgatcccgttctggtatctgatgacctttctcccctggcagctttactcgctggtggtgatgatgagcatctgtatcggcgtctatctgtgccatcgcacggccaaagatatgggcacccatgaccacggcagcatcgtctgggacgagttcgtcgggatgtggatcaccctgatggcgctgccgacccttgactggcagtgggtggccgccggcttcgtgattttccgtatcttcgatatgtggaagccgtggccaattcgctggtttgatcgcaatatccacggcggaatggggattatggtcgacgacatcgtcgccggcgtgatctccgctggcgtgctgtacgtcattggccatcactggcccatcggtctgctttaa

SEQ ID NO: 238688 - DNA, 975 bp, Klebsiella pneumoniae
atgcactatatccccctcggtgatactgccttacgtgtttcccgactctgcctcggctgcatgaccttcggcgagccggaccgcggcagacacgcctggacgcttccggaagagagcagccgcccgcttatccagcacgccattgaaggcggcatcaacttcttcgataccgcaaatagctactccgacggcagcagcgaagagatcgttggccgcgccctgcgcgactttgcccgccgtgacgaggtggttgtcgccaccaaggtgtatcaccaggtcggcgatctggcggaaggactttcccgggcgcagatcctgcgctccatcgacgacagcctgcgccgtctcgggatggactatgtcgacctgctgcagatccaccgctgggactataccaccccgattgaagagacgctcgaagcgctggacgaggtggtgaaagccggcaaagcgcgctatatcggcgcctcgtccatgcatgcccgacagtttgcccaggcgctggcgttccagcagcagaacggctgggcgcgcttcgttaccatgcaggatcactacaacctgatttaccgggaagaagagaatgagatgctgcccctgtgccaacgtaacggcgtagcggtgatcccatggagtccgctggcgcgcggcaggctaacccgcccctggggtgagaccaccgcccggctggtctcagatgagttcggcaaatcgctgtacagcgccagtgaagaaaacgatgcgcagatcgccgggaatctcgcggacgtggcggaagaactcgacgccagccgcgcccaggtcgccctcgcctggctgttaagcaaacccggcgtcgccgcgccgattatcggcccgtcgcgtcaggaacagcttgatgatctgttgcaggcggtggatttgacgctctccgcggaacagatcgacaagctggaggcgccgtatcagccgcatccggtggtgggatttaagtga

SEQ ID NO: 238689 - DNA, 1863 bp, Klebsiella pneumoniae
atgagttttgatattgccaaatacccgaccctggcgctggtagattccacccaggagttgcgcctgttgccaaaagagagcctgccgaagctatgtgatgagctgcggcgctatctactggacagcgtcagccgttccagcggtcactttgcctctggcctcggcacggtggaactgaccgtggcgctgcactacgtgtataacacgccgttcgatcgcctgatctgggacgtcggccatcaggcctacccgcataaaattctgaccggtcgccgggacaaaatcggcaccattcgtcagaaaggcggcctgcatcccttcccgtggcgcggtgaaagcgagtatgacgtgctgagcgtcggtcactcctccacttccatttccgcgggtatcggggtggctatcgccgccgcgaaagaggataagcagcggcgcgcggtgtgcgtcattggcgacggggcgatcaccgccggcatggcgtttgaggcgatgaaccacgccggggatatcaaacccgacctgctggtggtgctgaatgacaatgaaatgtcgatttccgagaacgtcggcgcgctgaacaatcatctggcgcagctgctctccggtaagctctactccaccctgcgcgaagggggcaaaaaggtcttctccggggtgccgccgattaaagagctgcttaagcgtaccgaagagcatatcaaagggatggtggtgccgggcacgctgtttgaagagctgggctttaactacattggcccggtggatggccatgacgtgctcggtctggtcagcacgctgaagaacatgcgcgacctgaaaggcccgcagttcctgcatattatgaccaaaaaaggccgcggctatgagcccgccgagaaagacccgatcaccttccatgcggtgccaaaattcgaccataccagcggcgtactgcccaaaagcagcggcggcctcccttcctactcgaaaatcttcggcgactggctgtgtgaaacggcggccaaagacaacaagctgatggcgatcacgccggcgatgcgcgaaggttcagggatggtggagttttcgaagaaattccccgatcggtactttgacgtcgccattgccgagcagcatgcggtcaccttcgccgccgggctggcgattggcgactacaagccggtggtggcgatctactccaccttcctgcagcgagcctacgatcaggtgatccacgatgtggctatccagaagctgccggtgctgtttgctatcgaccgcgccgggatcgtcggcgcagacggccagacgcatcagggagcgttcgatctctccttcctgcgctgtattccggatatggtggtaatgaccccgagcgatgaaaatgaatgtcgccagatgctgtacaccggctaccactacagcgacggcccctgcgcggtgcgctatccgcgcggtagcggcaccggcgcgacgctcgagccgctggcatcgctgccgatcggcaaaggggtggtgaaacgtcagggcgagaaaatagcgatcctcaactttggcaccctgctgccggaagccgcggcagtagcggacaaactcaacgccaccctggtggatatgcgctttgtgaagccgctggataccgcgctgatcctccagctggccggcgagcacgacgcgctggtgacgctggaagagaacgccatcatgggcggcgccggcagcggcgtgaacgaagtgctgatggcccaccgccgggcgataccggtgctcaatattggcctgccggattattttattcctcagggcactcaggaagagatccgcgccgacctcggccttgatgccgccggtattgaagccaaaatccgcgactggctggcataa

SEQ ID NO: 238690 - DNA, 900 bp, Klebsiella pneumoniae
atggatttcccgcaacaattgcaggcctgtgtggaacaggcaaacgaagcgctgcgccgtttcatcgccccgcagccctttcagaacactccgctggtggaagcgatgcattatggcgcattgttaggcggtaaacgcctgcgtcccttccttgtctacgccaccggcgagatgttcggcgtgtgccgtaccacgctggatgctcctgccgcggcggtcgaatgcattcatgcctactccctgatgcatgatgatttgccggcgatggatgatgacgatctgcgccgcggcctgccgacctgccatattaaatttggcgaagccaacgcaattcttgcgggagatgccctgcaaacgctggcgttctctatactgagtgatgcgccgatggtcgacgttcctgaccgggaccggctggcgatggtttccgaactggcgcaggccagcggcgtggcgggcatgtgcggcggccaggcgctggatctgcaggccgagggacagcaggttgatttacaggcgctggagcgtatccatcgccataaaacgggcgccctgatccgcgccgccgtccggttgggagccctgagcgccggcgaacgcggccgcgctgccctgcccgcgctggatcgctatgcggaaaatatcggtcttgccttccaggtccaggatgacattctcgacgtggtaggggatactgcgacccttggcaaacgtcagggtgccgaccagcaattgggtaaaagcacctatcccgccctcctgggtcttgagcaagcccggaagaaagcgcacgacctgatcgctgatgcccgccggtcgttagatgagctggccgcacaatctctggatacttcggcactggaagcgctcgcgaattacattattcagcgcgataaataa

SEQ ID NO: 238691 - DNA, 243 bp, Klebsiella pneumoniae; identical to SEQ ID NO: 136536

SEQ ID NO: 238692 - DNA, 1449 bp, Klebsiella pneumoniae
atgaagtttatcattaaattgttcccggaaatcaccatcaaaagccaatctgtgcggttgcgcttcattaaaatcttaaccgggaacattcgtaacgttctcaaaaactatgatgagacgctggccgtcgtccgtcattgggatcatatcgaagttcgcgcgaaagatgaaaatcagcgcccggctattcgcgatgcgctgacccgtatccccggcatccaccatattctggaagtcgaagacgtgccgttcacctcgctgcacgatattttcgagcagacgctgccgctgtggcgcgaggcgctggaaggcaaaaccttctgcgtgcgagtgaagcgtcgcggcaaacatgaattcacctcaattgaagtggaacgctacgtcggcggcggcctgaatcagcatattgaaacggcgcgcgtgaagctgaccgacccggacgtcaccgtcaatctcgagattgaaaacgatcgcctgctgctggtgaaaggccgctatgaaggcatcggcggtttcccgatcggcacccaggaagatgtgctgtcgctgatctccggcggctttgactccggcgtctccagctacatgctgatgcgccgcggctgccgcgttcattactgcttctttaaccttggcggcgccgcccatgagattggcgtccgccaggttgcgcattatctgtggaaccgcttcggcagctcacaccgcgttcgctttgtggcgattaactttgagccagtagtcggcgaaatccttgaaaaagtggacgacggccagatgggcgtcgtgctcaagcgcatgatggtccgcgccgcgtcaaaagtcgcggaacgctatggcgtgcaggcgctggtcaccggcgaagcgctcggccaggtctccagtcagaccctcactaacctgcgcctgatcgataatgtctccgatactctgatcctgcgcccgctgatttcgcacgataaagagcacatcatcgacctggcgcgtgagatcggcacggaagatttcgcccgcaccatgccggaatattgcggcgtgatctccaagagcccgaccgtgaaggcggtgaaggcgaagatcgaagcggaagaagaacacttcgatttcagcatccttgataaagtggtggaagaggcgagcaatatcgatatccgcgagatcgcccagcagacggaagagacggtggtggaagtggaaaccgtgaccggctttggcgccaacgacgcgatcctcgacattcgctccatcgacgagcaggaagacaagccgctgaaggtcgagggggttgaggttgtttccctgccgttctacaagctaagcaccaaatttggcgatctcgatcagagcaaaacctggctgctgtggtgcgagcgcggggtgatgagccgtctgcaggcgctttatttgcgcgagcagggcttcagcaacgtgaaagtgtatcgcccgtaa

SEQ ID NO: 238693 - DNA, 477 bp, Klebsiella pneumoniae
atgtcccggagcgcaaccgattctcgcgatcttgtaatcagccgcctgctcagcgcgcccgccccagccctgtggcgcgcgtgggccgacccggcattactccgaacctggtggtgcccgaagccctggcaaaccgaggttctggcctttgattttcgcgccggcggggcctttcacaccgtgatgcacgggcctgacggtgaacgcaacgataaccccggctgttttcttgaggttatcccgcaacaaaaaatcgtcatgacctcgatgctgacggcggattatcgccccgccgtttcccccttcgcgatgacggccatcatcacctttgccgatgaacaggtcgggtgtcgctatacggctacggtgctgcatgccgatgatgaaacccgcgagcagcatgagcagatgggatttttcgagggctggaatattgtcatcgatcagctcaatgacctggcgctgaccctgcgctaa

SEQ ID NO: 238694 - DNA, 594 bp, Klebsiella pneumoniae; identical to SEQ ID NO: 210395

SEQ ID NO: 238695 - DNA, 912 bp, Klebsiella pneumoniae
atgaaagtaaccgtactgggatgcggtgcgctgggacaactatggctgaccgcgttgtacaaacagggacatgaagtccagggctggctgcgcgtaccgcagccattctgtagcgtcaacgtcattgaaaccgatggctcagtgttcaacgaatcgctgacggccaacgaccccgattttctcgccagcagcgagctgctgatcgtcaccttaaaggcctggcaggtgtcgaatgcggtaaagcacctggccgggatcctgccggacaccatgccaattgtgctgattcataacggcatgggcaccgtcgaggagctgcgcggcgtgaaacagccgttgctgctggcctccacgacccaggcggcgcggcgcgatgggaatgtcatcatccacgttgcccagggcaccacgcatatcggaccggcaaaaagctacgagggggactacagctatctcgcagaagttctgcagagcgtgctgccggatgtcgcctggcataacaatatccactcggccatctggcgcaagctggcggttaactgcgtcattaaccctctgaccgcgctcaaagggtgtaaaaacggcgatctgcgcgactatacgcaggaagttgcggccatttgtcgcgaggtggcggcggtgatggagcgcgaaggtattcatacctcggcggaaaacctgctattttatgtcgaacaggtaattgaaagtacggcagaaaatatctcttccatgctgcaggacgttcgcgcccagcggcatacagagatcgactacatcaccggttttctgctcaaccgcgcccgcgcccacggcgtcgccgtaccggaaaacgcccgcttatttgaattgatcaagcgtaaggagaatgaatatgagcgcgtcggcactgatttgcctcgcccctggtag

SEQ ID NO: 238696 - DNA, 492 bp, Klebsiella pneumoniae; identical to SEQ ID NO: 136531

SEQ ID NO: 238697 - DNA, 1365 bp, Klebsiella pneumoniae
atgaacgataacaaaatgacgccaggggaactgcgcgcgacctggggtttggggacagtattctccctgcgcatgcttggcatgtttatggtcctgccggttctgaccacgtatggcatggcgttgcagggtgccagtgaagcgctgattggcctggcgatcggtatctacggcctggcgcaggcggtgttccagatccccttcggactgttatctgaccgtattggccgtaagccattgatcgtcggcggcctgcttatcttcgtgctcggcagcgtcatcgccgcgctcaccgactccatctggggcatcattcttggccgcgccctgcagggctccggcgccatcgccgccgcggttatggccctgctgtccgatctcacccgcgaacagaaccgcaccaaagcgatggcctttatcggcgtcagcttcggcgtcaccttcgccatcgccatggtgctggggccgattgtcacccaccagctgggtctgcacgcgctgttctggatgatcgccatcctggcgaccgtcggcatcctgctcaccctgtgggtggtgcccaacagccataaccatgtccttaaccgcgaatccgggatggtgaagggctgctttagcaaggtgctggcggagccgcgcctgctgaagcttaactttggcatcatgtgcctgcacattatgctgatgtccacttttgtcgccctgcccggacaactggaggccgccggcttcccggccgccgagcactggaagatttacctggtcaccatggttatctcgttcatctcggtggtgccgtttatcatctacgccgaagtgaagcgcaagatgaagcgcgtcttcctgctctgcgtcgccatcctgctgattgcggaaattgtcctctggggcgccggaggctacttctgggagctggtggcgggcgttcagctcttcttcctggcgtttaacctgctggaagcgctgctgccgtcgctaattagcaaggagtctccggcgggctacaaaggcaccgcgatgggcgtctactccaccagccagtttctcggcgtggcgattggcggcgcgcttggcggctgggtcgatggtttctttgattcgcaaaccgtgtttctgctgggcgccctgctggcgatgctgtggctgctggtggccagcaccatgagcgagccgccgtacgtcagcagcctgcgggtggaggtgccggacggcgtggtggtcgacagcgcgctgcaggcgcgtctgctgagcgccagcggggttcatcaggcgctggtggtacccgaggagcgttcggtgtatatcaaaatcgacagcaaggtcaccaaccgcttcgagatagagcagctcatcaaaggggtataa

SEQ ID NO: 238698 - DNA, 1179 bp, Klebsiella pneumoniae
atgttaaacggcctgaaacccttatcccgttccctgcgctggggcatggtcggcggcgggggaaccagtcagatcggctacagccaccgctgtgcggcgctgcgtgacaatgtttataccctgctggccggcgcgcttgacgtcgatgccgagcgcgggcgcgcgttcggtgagcaactgggcatcgcgccggatcgctgctacgccgactaccagaccctgtttcgcgaagaggcgcagcgccctgacgggatcgaggtcgtctcggtcaccaccccgaacaatacccatttcgccatcaccaaagcggcgctggaggcgggactccacgttatctgcgaaaagcccctctgctttaccgccgaagaagcgcgcgagctggtggatctgagcaaaaaacagaacaaaatcgtcggcgtcacctacggctatgccggctatcagatgatccagcaggcgcggcagatgattgccgatggactgctcggcgagatccgcatcgttaacatgcaattcgcccacggcttccataatcaggccgtcgagctgcaggcagaatccacccgctggcgagtaacgccgaagtttgccgggcccagctatgtgcttggggatctggccacccatccgctgtttgtcgccgagaccatggcgccgcagctcaatatcaaacggctgatgtgctcccgtcagagctttgtttcctcccgcgcgccgctggaagataacgcctttgtcctgatggaatatgacaacggcgcggttggatcgatgtggaccagcgcggtcaacagcggcgccatgcactcgcaaaaagtgcgcatcgtcggcgaaaaagcaagcatcgaatggtgggatgagcatcctaaccagctcagctatgaggtgcagggcgagccggcgcgcattctggaacgtgggatgccctacctgtcgccgaatgcgctggcggatgaccgcattggcggcggccatccggaagggttgttcgaagcctgggccaacctctatcgccgctatgcgcaggcgattgacgccacggaccgcgacgatcgcgccttcctgcaagacttctggtatccggacgtcgaagccgggctgcacggcgtctattgggtagagcagtgcgtcaaatcggctgacgctggcagccagtgggttgactttactttaccttaa

SEQ ID NO: 238699 - DNA, 1365 bp, Klebsiella pneumoniae
atgacacagactcaacgcctggatgtcagagagttaataaatcgtaacccgctgagccgatttcagaagctgattatatttctcggcttttgcgtcatcgctctcgatggttttgatatcgcgatcatgggctttatcgccccgacgctaaagctggaatggggggtaagcaaccaccagctgggtctggtgatcagcgccgcgctgatcggcctcgcgctgggggcgattttctccggcccgctcgccgactggctgggacgtaagaaaatcatcatcaacagcgttttcttcttcggtttctggaccatcgccaccgccttctcgcacaacgtagaacagatgatgttctttcgctttatgactggcctcgggctgggcgccgcgatgccgaatatcgggacgctggtgtcggaatacgccccggaacgccagcgttcatttattatcaccgtcatcttttgcggcttcaccttcggcgcggcggcgggaggattttcggcatcgtggctgatcccccagtttggctggcactcgctgatggcgctcggcggtattctgccgctgctgtttgcccccctgctcatctggctgctgccggaatcggttcgttttctggtgatcaaacaagcgcccgcggcgcgcatacgcgccattcttaaccgtctctatcccggacaaatcagcgacaatgtgacgtttatcctaccggcgcagccagcggccggcaacgcgatgcgcattgtcctctcccgccagtacggtttcggctcgctgatgctatggctggtctactttatggggctgttcctggtctatatcctcggcagctggctgccaacgctggttaaagcggtaggaatgaccgttagccaggcggccatcatgacggcgatctaccaggcgggcggcaccctcggctcgttgtttgccggctggctgatggacaggatcaacccccatcgcgcgctggggataatctacgccgttggcggcctgttcaccatggcgatgggctacgccgcgggcagctttgccttgctctgtatgctggcgtttatcagcggcgcctgcctgaacggcgcgaataccggcatgaacgccctctccgcccgctactaccctacacaggcgcgggcgacgggctccagctggatgcacggcgtcgggcgcatcggcgccattctcagcgcctttgccggcgccgagatgatggcgctcaacctgccctttgaaagcgtctttttgatcctcggcatcccggcagccctcaccgtcgcaggcctggcggcgaagggcatctttgcggccggtcatcctcccgtcgcttcaacttcccccgcgtctgtgcgcggagcgtcatag

SEQ ID NO: 238700 - DNA, 819 bp, Klebsiella pneumoniae
atgaacaagcgtaccctatcgctcgccgcgctgaccctgctcgatgtccctccccccgaacaggtgcggattgcggccagaaccggttttacccacgttgggctgcgactgctccccgccacaccgaccgacccggactacgacatgctgggcgataccccggccgtccgggcgacgctcgccgcgttgatggaaactggcatccgcgtgtcggacgtggagatcgtccgcctgacccccgggtttaccctcgacgatcggctgcagcgttttatggagaccgccgcgcgtcttggcgccggacaggtgttagtcgccggcaatgatgacaaccttcagcgcagcgctgacaacctcgccatcctcgccgcggccggtcgtccatttgggctgaccatgaatcttgagccgatgccctggacccagttgcgcaacatcgccgcagcgcaagcactaatcgccgccagcgggcgggaagacatcggcattctggtggacgctctccatttctggcgcgcgggagaatcgctcgccgccctctccagcctgcccgcgcatcatctcaactatatgcaactctgcgatggcgcggcacagaggccggagagcgagcaggaacttatccgccaggcccgctcggcgcgcaacgtgccgggggaaggcggtctggatctgcatggtctgatgtcggccctgccggcgacgctgccggtctctctcgaagtgccgcttgacggcgagcaaggcgccctgccgcctcttcagcgggcgcagttactgttcgatgccgcgcagccctacctgcgcgcctgcgcataa

SEQ ID NO: 238701 - DNA, 1698 bp, Klebsiella pneumoniae
atgagcgggcctgtgaaggtggatgtgctggtggtcggctccggcgccgcggggctctctgccgcggtgactgcggcgatgcacggcgccagcgtcatggtggcggagaaagcgtcagtgctcggcggaaccagcgcctggtccggcggctggctgtggatcccccgcaacccgctggcgcgggcggagggcatcgacgaagcagccgacgcgccgctgacctatctgcagcatgagatggggggcgaagccgccgatattcgtctgcaaaccttcctgcgttacgggccggagatggtggaatttttccatcagcggacggcggtgcagtttctctcgggcagcgccatgccggactttcacccgtcgccgggtgcggcgaacggtgggcggtcggtcaccgcgcaaccctacgatggccgcctgctcggcgactggctccatcgcctgcgtccgccgctggaaaccattagcctgggcgggatgggcatcgccggcggcgcggatatggcgcattttttcaatgccacccactcgccgcgctccgcgctgtatgctgcccgccgcctgctgcgccacggctggcagcggctacgcgccggacgggggcagcatctggtcaatggcaatgcgctggtcgcccgtctgctgcgatccgccctcgacgccggcgtgcgttttcagctcaatgccccggtggtccggctgctgcagggtccgccgggcgtgtccggcgcggtgctgcgcagcgacggcggggagattcacgtcgaagctggcgccgtggtgctggcctgcggcggttttccccacgatcgccagcggctggcgcaggtggtgcctcacgctgcggagggttacggccatttctccgccgcaccgccggacaatcagggcgaggggatcaggcttggcgaatccgtcggcggccagttcgacacttccctgcgccacccgctggcctgggcgccggtgtcccgcgtcactctggccagcggccagcagctaatgtttcctcatctggtggagcgcgccaaacccggggtgatcgccgtcctgcccaacggcaaacgttttgttaacgaggccgactcttatcatgactttatcgccgccctgctggcggccacacccgcgggcgacacgccgcaggcctggctgctggccgatcgtcgcgcgctgcgtcgctacggcctgggccacgccagaccgttcccgttcactcccaccgcctggctgcgtaccggctatctgcagcgaggaaacaccctggcggagctggcgaagcagtgcgctatcgacgccaatgcgctggcggaaaccgttgaacgctttaaccacttcgccagcactggcgaagacgtcgattttcaccgcggggcatcagcctataaccgcgcccagggtgaccatcaggtgacgctcggaccgctgcgcgaagggccgttctacgcggtgcgcattctgcccggctcgctgggcaccttcagcggattgcaaaccgacgaacacgcccgggtgctggatgaacagcagcagccgataccgggtctgtacgccatcggcaacgacatgtcgagcgtgatgcgcggctattaccccagcggagggatcaccctcgggcccgccatgaccttcggctatctggtgggtaaaaatctggcaaaaaaaacaaatataaacaataacataacttga

SEQ ID NO: 238702 - DNA, 321 bp, Klebsiella pneumoniae; identical to SEQ ID NO: 136524

SEQ ID NO: 238703 - DNA, 1677 bp, Klebsiella pneumoniae
atgaagagctgggatgtgatcgtcatcggcagcggcgcggccggttttgccgccgcggtcaccgcctgctgtaaagggctgtcggtgctgatgctggagaaagccggccagttcggcggcacctcggccatctccggcggcgccgtgtggctgcacgataccgaccaggcgcgcgccgagggcaaaagcggtagcgccgaggcgatgaaaacctacctgcgaaccattatcggcgagggccagtaccgcgaagatcttgccgaagcgtttgtcagcgccgggcgggaggcgctggcctttctcgagcgtgagggggcagtaaagtacagcctgcgtccgctctcgcccgattactatccggatgaacccggcgcagtcgacgtcggtcgtgcgctggaggtggtggagtatgacggccgtgaactgggggacgcgtttcgcgacctgcgttcaccgccgccggggatgctgctgtttggcgggatgatggtcaaccgcgtcgatattcaacattttctcgacatgcgccgctcgctgcgctccctggcccattgcacccggctgctgctgcgctatgcccgcgaccgggtgaagtaccctcgcggtacccgcctggcgatgggcaatgcgctgattgcccgcatggcgactacggcgctgcgtaaaggcatgagcctgcggctgaatgtcaatgttctgacgctgtgcgaagcgcaaggcgcggtccgcggggtggagattgagtatcaggggcaaagagagacgctgcacgcccgccgcggggtggtactggccgcaggcggcttcgccgcgggcgcgctggcggcgcgctatcggccacatacccgcgaacacttcaccatgtcgccgccggccaacgatggcgccgcgctgcatctcgcggcggcgcttaacgctcgcgagggagccgatcggccatccaattttttctgggcgccggtatcggtgctgacccgggccgacggcagcgaggagcgcttcccccatctggtaaccgatcgcgcaaaaccgggcgtgattgccgtcaatcagcgggcggtacgcttcgtcaacgagtccagttcctatcaccatttcgccagcgcaatgcaggatgcagcggaaaatgccccctgttttttactctgcgacgcccaggcgatgaagcgttatggcctcgggctggcacgcccggcgccggtcaataatgacgccctggtcgccgccggctatctgcacaaagccgataccctggccgcgctggcgcaacagcttggtctggatgcccaaaccctgagcgagacggtagcccgctacaaccgcgacgccgcgcagggcgtggatcgggaatttgctaaaggcggcaacagctataaccgggcgatgggcgatccgggccatcagcctgacgcctgtaatgcccccctgctcagcgcgccgttctatgccatcaaactttataccggcgatctggggacctcacggggcctggtcaccaccgccgatgcccaggtcgtcaataccgaaggacaccccatcccggggctgtacgcggtgggaaacgacatggattcgctgatggccggcacctatccgggccccggtatcaccctcggcccggggctgacgtttggctatctcgccgcctgccatctggcacaacactccacccactaa

SEQ ID NO: 238704 - DNA, 822 bp, Klebsiella pneumoniae
atggtcagtggaactacccaggttgtcgccgtgattggtcatccgatcgcccaggtgaaatcgccagataacttcaaccgctactttgccgaacagcacatggacagcgtcatgatcccggtggatatcgtcccggacgcggtggccgcctacctcaacgccctgcgcggctggcagaacatgaccggcgtgctggtgacggtgccgcataaacaacgcgccgccgcgctggtcgacgacctcacgccgcgcgcccgccgactcaacgccgtcaatgtgatccgcaagctggcggatggccgcctgcagggcgatatgctggacggcgtcggctttcagctcgccgccgaggcgcagggttttcagccggcaggtaagcaggcgctgctctccggttgcggcggcgtcggcagcgccatcgcctggggactgtgcgaggcggggatccgtcggctggccctgcacgatcaaaccccggccacccggcagcgcctgcatgaccttctggctgaggcctttccggcggtgcaactgagcgcgctgccagacaccctttacggcctcgatctactggttaatggctcaccggccggcatggccggatttgatgagctgcctctaccgcaggcgcttctggatacgctcgacagcaccactcatgtggccgacgttgtcaccgccccggtgatgacgccgttgctcactttcgccgccgcccgtggttgcaaagtacagaccgggccggaaatggcgctggcgcagatgaggctgatgggccagtttatcggcgccatcccgcaggcgcagggagcggcggcatga

SEQ ID NO: 238705 - DNA, 759 bp, Klebsiella pneumoniae
atgcaaaacaccattcatccacgcgatctgatcgtcggtttacaaaaagggctggcgctaattcagcttttttccaaaacctgcccaaagctcaccgtcgcccagacggcgaaaatgagcggcctgacgcaaagcgccgcgcgacgttttctgctgacgctcctgcatgagcgctatctgcaaaccgacgggcgctattactggcttaccccaaagacgctgcggcttggccaggcctatgtcgattcggcgcagtttcctcgcatggtacggccgattgtcgaatacatcgccagtcggacggaagagcacgcctcggtgggggtggtggatgaagatgaactggtctatatcgcccgcagtcggcatacgccgttcaactctacgtcggtgcggcttggggagcgggtgcccattttctgtaccgccggggggcgattgtggctggcttcgctgccggaagcagagtgtgagaccgtcctgcagcgcataacccgggaacaacgtaccccctatacggtgaccgatattgcgtcgctgatggagaaaatcgcccaggtacggcgccagggatacgccactattgagcaggagtttgagattggcatgctggtgctggcggtgccgttaaccgacagggaagggacctggtggggggcgctgagtctgaccagtcatcaatcgcgcacttcgctggaagcgttatgccgcgatcacctcgatctgctctatagcgcgcaggcgatgctggtgggttaa

SEQ ID NO: 238706 - DNA, 333 bp, Klebsiella pneumoniae
atgaaagagttaacactgaacgaaatggagtatatctccggtggctttaatctgttcggcgcagccagcggcttcgccagctttgtcgccaactctggcgtcggcttcacctcttttgttctgacctccggcaccgcatttgcctccttcgtcggcgacagcgcgatggcgtttggttccttcctgaccggacagtcaaactgggaaacctttgtgaccgccggaaaggaaaactggggaagctttgttaacaccgccggcaacagctggaatactttcgtgaataacgcggccagcgactggaacacctttctgaccaaagcgtcggcctaa

SEQ ID NO: 238707 - DNA, 888 bp, Klebsiella pneumoniae; identical to SEQ ID NO: 210408

SEQ ID NO: 238708 - DNA, 330 bp, Klebsiella pneumoniae; identical to SEQ ID NO: 138995

SEQ ID NO: 238709 - DNA, 612 bp, Klebsiella pneumoniae
atggcaactgatactcttgcgcatactgcccacgcgcatgaacacgggcaccatgatacaggaccgatgaaggtattcggtttctggatctacctgatgagcgactgcattatcttcgctacgctgtttgctacctatgccgttctggtgaacggcacggccggcggaccgacgggcaaagatatttttgaactgccgttcgttctggttgaaaccgcactgctgctgttcagctccatcacctacggcatggcggctatcgccatgtacaaaaacaacaaaagccaggtggtttcctggctggcgttgacctggttgtttggcgccggattcatcgggatggaaatctatgaattccatcacctgatcatggaaggctttggtccggatcgtagtggcttcctgtccgcgttcttcgcgctggtcggcacccacggtctgcacgtgacctccggtcttatctggatggcggtgctgatgttccaggtttcacgtcgtggcctgaccagcactaaccgcacgcgtatcctgtgcctgagcctgttctggcacttcctggacgtcgtgtggatctgcgtgttctcggttgtctatctgatgggggcgatgtaa

SEQ ID NO: 238710 - DNA, 1992 bp, Klebsiella pneumoniae
atgttcggaaaacttacactggatgcagtgccctaccacgaacctattatcgtggtaacggtggctgcgattatcattgggggactggcgcttctggcagccatcacttacttcggtaagtggtcctacctatggaacgagtggctgacttctgtcgaccacaaacgtctcggtatcatgtacgttatcgtggcaatcgtcatgctgctgcgtggctttgctgacgccatcatgatgcgtagccagcaggtgctggcttcggccggggaagccggcttcctgccgcctcatcactacgatcagatctttaccgcccacggcgttatcatgatcttcttcgtggcgatgccgtttgttatcggtctgatgaacctggtggttccgcttcagctcggcgcgcgcgacgtagccttcccgttcctcaacaacctgagcttctggttcaccgttgtgggcgtgattctggttaacctgtctctgggcgttggtgagttcgcgcagaccggttggctggcctatccgccgctgtcgggaattgagtacagtcctggcgtaggggttgattactggatttgggcgctgcagctctccggtatcggtactaccctgaccggtattaacttcttcgtgaccattatcaagatgcgcgccccgggcatgaccatgttcaagatgccagtattctcctgggcatctctgtgcgctaacatcctgattatcgcctcgttcccaattctgaccgtcaccatcgcgctgctgaccctggatcgttacctgggcacccatttctttaccaacgatatgggtggcaacatgatgatgtacatcaacctgatttgggcctggggtcacccggaagtgtacatcctggttctgccggtgttcggggtcttctccgaaatcgccgcgaccttctcgcgtaagcgtctgttcggttacacctctctggtatgggcaaccgtctgtattaccgttctgtcgttcatcgtttggctgcaccacttcttcaccatgggtgctggcgcgaacgtaaacgccttcttcggtattactaccatgattatcgcgatcccgaccggggttaagatcttcaactggctgttcaccatgtatcagggtcgcatcgtcttcaactcggcgatgatgtggactatcggctttatcgtgaccttctccgtaggtgggatgaccggcgtgctgctggcggtaccgggcgcggacttcgttctgcacaacagcctgttcctgattgcgcacttccataacgttatcatcggcggcgtagtgttcggttgcttcgcaggtctgacctactggtggccgaaagcctttggcttcaccctgaacgaaacctggggcaaacgcgctttctggttctggatcatcggcttcttcgtggcgtttatgccgctgtacgtgctgggcttcatgggtatgacccgtcgtctgagccagcagatcgatccgcagttccacccgatgctggttattgcagcttgcggtgcggcgctgatcgcctgcggtattctgtgccagctgattcagttctacgtgtctattcgcgaccgcgatcagaaccgtgacctgaccggtgacccgtggggtggccgtacgctggagtgggcaacctcttctccaccgccgttctacaacttcgctatcgttcctcaggttcacgaacgtgatgccttctgggaaatgaaagagaaaggtgaagcgtacaaacagcctgctcactatgaagaaattcatatgccgaaaaacagcggcgccggcatcgtgattgccgccttcgctacggtatttggtttcgccatgatctggcatatctggtggatggcgatcgccagcttcatcggcatcgtagcgacctggattattaagagctttgacgaggacgtggattactacgtaccggttgcagaagtcgaaaaactggaaaaacagcatttcgatgagattaacaaagcagggctgaaaaatggcaactga

SEQ ID NO: 238711 - DNA, 945 bp, Klebsiella pneumoniae; identical to SEQ ID NO: 230393

SEQ ID NO: 238712 - DNA, 1476 bp, Klebsiella pneumoniae
atgtccagtcattacttacgcatttttcagcagccgaaatcagccattttgctgatccttggcttcgcctccggtctgccgctggccctcacctccggtaccctgcaggcctggatgacggtggaaaatatcgatctgaaaacgatcggttttttctcgctcgtcggccaggcctatgtctttaaattcctctggtccccgctgatggaccgctacacgccgccgtttcttgggcgtcgtcgcggttggctgttgaccacccaggtattactcctgctggcgatcgcgacgatgggctttcttgagccggtcacccaattacgctggatggcggcgctggcggtggtgatcgccttctgctcggcgtcgcaggatattgtgttcgacgcctggaaaaccgacgtgttgccagcagaagagcgtggcgccggcgccgcgatcagcgtgctgggctatcgcctggggatgctggtctccggtggactggccctgtggcttgccgaccgctatctcggctggcaggggatgtactggctgatggcggcgctgctggtgccctgcattatcgccacgctgctggcgcccgaaccgagcgacgttatcccggtccccagatcgctcgagcaggcggtagccgaaccgctgcgcgattttttcggccgcaacaacgcctggctgattttgctgctcatcgtcctttataagcttggcgatgcgtttgccatgagcctgaccaccaccttcctgatccgcggcgtgggatttgacgctggcgaagtgggaatggtgaacaaaaccttaggcctgttcgccaccattctcggcgccctgtacggcggcgtcctgatgcagcggctgacgctgtttcgggcactgctcattttcggtttgctgcagggggtctctaacgccggctactggctgctgtcgattaccgataagcacctctattccatggcgaccgcggtattctttgaaaacctgtgcgggggaatggggacggcggcatttgtcgcgctgctgatgacgctatgtaataagtcgttctccgccacccagttcgcgctgctctcggcgctctctgcggtcggtcgcgtatacgttgggccgattgccggctggtttgtcgaggctcacggctggtcgaccttctatctcttctctgtcgttgcggcggtgccggggattgccctattgctgctgtgccggcaaacgcttgagcatacccaacgcaccgcaagctttatgccgcgtagtgagttcccgcaggcctatgcgctggcgctggggctcctgactctgggctgcctgctgctcgcggtgtggctggcgctgctgatcctcaacgcgctggattatacgtcgttctccttcctgtccggcctgctggaggttgccgcgctcaccgccgtcggcgggattttgttcggcggcctgcttgactatctggcgctgcgtaaaacccgcctgatttaa

SEQ ID NO: 238713 - DNA, 579 bp, Klebsiella pneumoniae; identical to SEQ ID NO: 210414

SEQ ID NO: 238714 - DNA, 315 bp, Klebsiella pneumoniae; identical to SEQ ID NO: 210415

SEQ ID NO: 238715 - DNA, 1299 bp, Klebsiella pneumoniae
atgcaagtttcagttgaaaccactcagggccttgggcgccgtgtaacgattactatcgccgctgacagcatcgagaatgctgtcaaaagcgagctggtcaacgtagcgaaaaaagttcgcattgacggcttccgtaaaggcaaagtgccgatgaatattgttgctcagcgctatggcgcttccgttcgccaggacgtgctgggcgacctgatgagccgtcatttcgttgacgcgatcatcaaagaaaaaatcaatccggccggcgcgccgaactacgttccgggcgaatacaaactgggcgaagacttcacctacgcggtagagttcgaagtgtatccggaagttgaactgcagggtctggacgcgatcgaagttgaaaaaccggttgttgaagtcaccgacgctgacgttgataccatgctggaaactctgcgcaagcagcaggcgacctggaaagaaaaagaaggcgcggttgacgctgaagatcgcgtaaccatcgacttcaccggttctgttgacggcgaagagttcgaaggcggcaaagcctctgacttcgtactggcgatgggccagggtcgcatgatcccgggcttcgaagacggtatcaaaggccacaaagcgggtgaagagttcaccatcgacgtgaccttcccggaagagtaccacgcagaaaacctgaaaggtaaagcggctaagttcgttatcaacctgaagaaagtcgaagagcgtgaactgcctgagctgaccgaagagttcatcaaacgtttcggcgtggaagatggttccgtcgctggcctgcgcgctgaagtgcgtaaaaatatggaacgtgagctgaaaggcgctgtgcgtaaccgcgtgaagtctcaggctatcgaaggtctggttaaagccaacgagatcgacgttccggctgccctgatcgacagcgaaatcgacgtgctgcgtcgtcaggctgctcagcgtttcggcggcaatgagaaacaggctctggaactgccgcgcgagctgttcgaagagcaggctaaacgtcgcgtcgttgttggtctgctgctgggcgaagtgatccgcaccaacgagctgaaagctgacgaagagcgcgtaaaagccctgatcgaagagatggcttctgcgtacgaagatccgtctgaagtcgttgagttctacagcaagaacaaagagctgatggacaacatgcgcaacgtggcgctggaagagcaggctgttgaagccgtgctggcgaaagccaaagtgtctgaaaaagccacttccttcaacgaactgatgaaccagcaggcgtaa

SEQ ID NO: 238716 - DNA, 624 bp, Klebsiella pneumoniae; identical to SEQ ID NO: 139494

SEQ ID NO: 238717 - DNA, 1275 bp, Klebsiella pneumoniae
atgacagataaacgcaaagatggatcgggcaaattgttgtattgctctttttgcggcaaaagccagcatgaagtgcgtaagctgatcgccgggccatccgtgtatatctgcgacgaatgcgttgatttatgtaacgacatcattcgcgaagagattaaagaagtggcgccgcaccgcgagcgcagcgcgctgccgacgccgcacgagattcgccaccaccttgatgactacgtcatcggtcaggaacaggcgaagaaggtgttggcggtcgcggtatacaaccactacaagcgtctgcgcaatggcgataccagcaatggcgtagagctgggtaaaagcaacatcctgctgatcgggccgaccggttccggtaaaacgctgctggcggaaacgctggcgcgcctgctggatgtgccgtttaccatggcggacgccactaccctgaccgaagccggttatgtgggtgaggacgtcgaaaatatcattcagaaactgctgcagaagtgcgattacgacgtgcagaaagcgcagcgcggcatcgtttatatcgacgaaatcgacaaaatttcgcgtaaatccgataacccgtcgattacgcgcgacgtctcaggcgaaggcgtgcagcaggcgctgctgaagcttatcgaagggaccgttgccgccgttccgccgcagggcgggcgtaaacatccgcagcaggagttcctgcaggttgatacctccaagatcctgtttatctgcggcggcgcgttcgctggcctggacaaagtgatttcccaccgtgtggaaaccggctccggcattggttttggcgcgacggtaaaagcgaagtccgacaaagcgagcgaaggggaactgctggctcaggtcgagccggaagatctgatcaagtttggtctgatcccggagttcatcggccgtctgccggtagtggcgaccctgaacgagctgagcgaagaagccctgatccagatcctgaaagagccgaaaaacgccctgaccaagcagtatcaggcgctgtttagccttgaaggcgcagagctcgaattccgcgacgaagcgctggacgctatcgccaagaaagcgatggcgcgtaaaaccggcgcccgtggcctgcgctcaattgtggaagcggcgctgctggataccatgtatgacctgccttcgatggaagatgtcgaaaaagtggtcattgatgagtcggttatcgccggtcagagcaaaccgctgctgatctacggcaaaccggaagctcagcaggcatctggtgaataa

SEQ ID NO: 238718 - DNA, 2355 bp, Klebsiella pneumoniae
atgaatcctgagcgttctgaacgcattgaaatccccgtattgccattgcgcgatgtggtggtttatccgcacatggtcatacccctgttcgtagggcgggaaaaatctatccgttgcctcgaagcggccatggaccatgataaaaaaatcatgctggttgcgcagaaagaagcgtcgacggatgagccgggtgtaaacgatcttttcaccgttggaaccgtggcgtctattttgcagatgctgaagctgccggacggcaccgtgaaggtgctggtcgaagggctgcagcgtgctcgcatttctgcgctgtctgataatggcgagcatttctcggcgaaagcggagtatctcgactcgccggcgattgacgaacgcgagcaggaagtgctggttcgcaccgctatcagccagtttgaaggctatatcaagctgaacaagaagatcccaccggaagtgctgacgtcgctgaacagcatcgacgatccggcgcgcctggcggataccatcgcggcgcacatgccgctgaagctggctgacaagcagtctgtgcttgagatgtccgacgttaacgaacgtctggaatatctgatggcgatgatggaatcggaaatcgatctgctgcaggttgagaagcgcattcgcaaccgcgtcaaaaagcagatggagaaatctcagcgcgagtactatctgaacgagcaaatgaaagcgattcagaaagaactcggcgagatggacgacgccccggacgaaaacgaagcgctgaagcgtaagatcgacgcggcgaaaatgccgaaagaggcgaaagaaaaaaccgaagcggaactgcagaagctgaagatgatgtcgccgatgtctgcggaagcgaccgtcgtgcgtggctacatcgactggatggtgcaggtgccgtggaatgcgcgcagtaaggtcaaaaaagacctgcgtcaggcccaggagatcctcgataccgatcactatggcctggagcgcgtgaaggatcgcatccttgaatatctcgcggtgcagagccgggtgaacaaaatcaaggggccaatcctttgtctggtgggaccgccgggggtaggtaaaacctcgctgggtcaatccatcgccaaagcgaccggacggaaatacgttcgtatggcgcttggcggcgtgcgcgatgaagcggaaatccgcggtcatcgtcggacctacattggctcgatgccgggcaaactgatccagaaaatggcgaaagtgggggtcaaaaacccgctgttcctgttggacgagatcgacaaaatgtcttccgacatgcgcggcgacccggcttccgcgttgcttgaggtgctggatccggaacagaacgtggcctttaacgaccactatctggaagtggattacgatctcagcgacgtgatgttcgtggcgacttccaactccatgaacattccggcgccgctgttggaccgtatggaagtgattcgtctctccggctataccgaagatgaaaaactgaacatcgccaaacgtcatctgctgccgaagcagatcgaacgtaacgcgctgaagaaaggcgagctgaccgtcgacgatagcgccattatcggcattattcgttactacacgcgggaagcgggggtacgtagcctggagcgtgaaatctccaagctgtgccgcaaggccgttaagcaactgctgctggataaatcgctgaaacacatcgaaattaacggtgagaatctgcatgattatctcggcgtacagcgcttcgactatggccgcgccgatagtgagaaccgcgtcggtcaggtgaccggtctggcgtggacggaagtgggcggcgatctgctgaccatcgaaaccgcctgcgtgccgggcaaaggcaagctgacctacaccggctcgctgggcgaggtgatgcaggagtcgattcaggctgcgctgacggtggtacgttcgcgggctgacaagctgggcattaacgccgacttctacgagaagcgtgacattcacgtgcacgtgccggaaggggcgacgcctaaggatggtccgagcgcgggtattgccatgtgcacggcgctggtctcctgcctgaccggcaacccggtacgcgctgatgtggcgatgaccggtgaaattactctgcgtggtcaggtgctgccgatcggcggtctgaaggaaaaactgctggcggcgcatcgcggcggcattaagactgttctgattcctgatgagaacaaacgcgaccttgaagaaattccggataacgttatcgccgatttggatatccatccggtgaaacgaatcgaggaagttctgacacttgcgctgcagaacgaaccgttcggcatgcaggttgtgaccgcgaaatag

SEQ ID NO: 238719 - DNA, 273 bp, Klebsiella pneumoniae; identical to SEQ ID NO: 138268

SEQ ID NO: 238720 - DNA, 1875 bp, Klebsiella pneumoniae
atgatggacaacctacgcacggccgccaacagcgtcgtgctcaagattattttcggtatcattatcgtctcgttcattttgaccggggtgagtggttacctgattggcggtggcaaaaactatgccgcaaaagtgaatggccaggagattggccgtgggcagtttgaaaacgccgtcgccagcgaacgtaaccgtatgcagcagcagcttggcgatcaattctccgagctggcggcgaacgaaaactacatgaaaaccatgcgccagcaggtgctgaaccgcctgatcgatgagtcgcttctggatcagtatgcccgcgagctgggcctcagcatcagcgatgagcaggtgaagcaggcgatcttccagacccaggcgttccagacgaacggtaagttcgacaaccagcgtttcagcggtattgtcgcccagatggggatgaccaccgatcagtacgcccaggcgctgcgtaaccagctgaccacgcagcagctgattaacgccattgcgggtaccgacttcatgctgccgggcgagtccgatcagctggcggcgctggtatctcaacagcgggtggtccgcgaagcgaccatcaacgtaaatgccctggcggcaaaacagaccgccagcgatgaggaaatcaacgccttctggcagcagaatcaggcccgttttatggcgccggagcagttccgcgtcagctacatcaaaatggatgccgccagcatgcaggagagcgcctctgacgaagagattcagtcatggtacgaccagcacaaggatcagttcactcagccgcagcgcaaccgctacagcgtgattcagaccaaaactgaagccgatgcgaaagcggtactggccgagctgcaaaaaggagcggacttcgccacgctggcgaaagaaaaatcgaccgatattatctctgcccgcaacggtggcgatatggggtggatggaagatgcctctaccgtgcctgagttgaaagatgccgggctgaaagagaaaggccagctgtctggcgtgatcaaatcctcggttggcttcctggtagctcgtctggacgacgtccagccggcgcaggtgaagccgctggctgacgtgcgtaatgacattgcggcgaaagtgaagcaggaaaaagcgttggatgcttactacgcgctgcagcagaaggtgagcgatgcggccagcaacgataatgaatcgctggcgagcgcagcgcaggtcgccgggatgaaggtcgtagaaaccggctggtttggccgcgataacctgccggaggagctgaactttaaaccggtcgctgacgctattttcaacggcggtctggtgggtgagaacggcgcgccgggcagcaactccgatatcattaccgttgacggcgatcgcgcttttgttctgcgcattagcgaacacaaagccgaggcggtgaagccgctggccgaagtgaaggcacaggttagcgatatcgttaagcacaataaagcggaacagcaggcgaaactggaggccgacaagctgctggcggcgctgaaagacggcaaaggcgatgaagcgatgaagtcggctggcctgagctttggcgcgccgcagacgctttctcgtaccggccaggatccgctgagccagctggcatttaccctgccgctgccgcagcagggtaaaccggtctacggcgtgggcagcaatatgcaaggcgatgtggtgctggtagcgctggatgaggtgaaagccggcagcatgccggaagagcagaagaaggccatggttcaggggatcacccagaacaatgcccaaatcgctttcgaagcgctgatgagcaacctgcgcaaggcggcgaaaattaagctcggcgacagcatcgaccagcagcagtaa

SEQ ID NO: 238721 - DNA, 369 bp, Klebsiella pneumoniae
atgaaatatggaataaaagcactgatggccgcgggcgttctggtttttgcggtaggggtacagggggcgctggcggcacccgccagcggcaaagcggcggtgaataaagaaaatgtgcaggcgtcctcttcggcgaaggcggaagcggtgcccggcgagtctgacaacggggcgacaaaggtcagcattaaccgcgccagcgccgaacagctggcgcaggcgttgaatggcgtaggattgaaaaaagcccaggctattgtcagctaccgcgaagagtacgggccgttcaaaaccctcgatgatctgaagcaggtcccgggaatggggagcgcgttggtggagcgcaatttagcccatctgacgctgtaa

SEQ ID NO: 238722 - DNA, 402 bp, Klebsiella pneumoniae; identical to SEQ ID NO: 210423

SEQ ID NO: 238723 - DNA, 702 bp, Klebsiella pneumoniae
atgaaacgcgccgtagttgtcttcagcggaggacaagattcaaccacctgtctggtgcaggctctgcaacagtatgatgaagtgcattgcgtcacttttgattatggccaacgccaccgcgcggaaatcgacgttgcgcgcgaactcgccctgaaactgggcgccgtcgcgcataaagtgctggacgtcactctgctcaacgaactggcagtcagcagcctgacccgcgataacattccggtaccggactatcagcctgatgccgagggtattcccaacacctttgtccccgggcgtaatattctgtttttaaccctgacggcaatctacgcctatcaggtaaaagccgaagccatcatcaccggcgtgtgcgagaccgacttctccggctacccggactgccgcgatgagtttgtcaaagcgctgcaccacgccgtcagcctggggatggcgaaagacattcgctttgagacgccgctgatgtggctgaataaagccgagacctgggcgctcgccgactactggggtcagctggatctggtgcgccgggaaaccctcacctgctacaacggcattaagggcgatggctgcggccagtgcgccgcctgtaacctgcgcgcaaacggactcaaccagtatctggcggacaaggtcggggtaatggcggtgatgcagcaaaaaaccggactggcgcaggcataa

SEQ ID NO: 238724 - DNA, 1701 bp, Klebsiella pneumoniae
atgcgactcttacaccgtttaaatcagtaccagcgattgtggcaaccctcagccggggcgccgcagcaggtcaccgtcggcgaactggcggagcgctgtttttgcagcgagcgccacgtccgtactctgctgcgtcaggcgcaggaggccgggtggctaagctggcaggccagctccgggcgcggcaaacgcggacagctctcatttcacaaaaccccggaaagtctgcgcaacgagatgatggagcaggcgctgaacaacggtcagcaacaaatcgcgctggagctggcgcagcttgccccggtggagctgaaagccctgctccatcccttcctcggcggtcagtggcaaaacaatacccccacgctgcgtattccttactatcgcccgctggagccgctgcgtcccggctttctccccggccgcgccgagcagcatctggccggacaaatctatgccgggctgacgcgcttcgacgaaggcgacaatatgccgatcggcgatctggcgcaccactggcaggtctccccggacggcctgcgctggcatttttatatccgctccacgctgtgctggcacaatggcgatacggtggaaaccgtgcagttgcgacagcggttactgctgctgcttgagctgcccgccttgcggaccctcttcgccagcatcagccgtatcgatgtcacccatgcccagtgtttaacaataaccctgcatcgccctgactactggctgccgttccgcctcgccagctactgcagcgtgctggcgcatcccgacgatccggccattggctgcggaccgttccgcctgaagcggtttagtccggaactcgtccgcctggaaaaccatccccgctaccacctgcagcatccgctgatccaggcggtggagtactggatcactcctcagctctttgaccgcgatctcggcaccagctgccgccatccggtgcagatcaccatcggcgatcgcgaagagctgcataatctgcgtcaggtcagcaaccgtatcagccttggcttctgctatttgaccctgcgccacagccctcggcttagcaaagcgcaggcccagcggctggtgtcgataatccatcactcgtcgctactggatacgctgccgctggaggaggatctgattacgccaagccatgaggtgctgccgggctggtccatcccgcagggaccggcaaacaacgcggtaccgctgccggccaggctcaccctgctctatcatctcccggtcgagctacatgcgatggccgaacagctgaggcaacgtctggctctgctgggctgcgagctgacgctcctgttccacgacgctaaaaactgggaaggctgccagcatctggggcaggccgacctgatgatgggcgaccgtctgatcggcgaagcgccggagtacgccctggaacagtggctgcgctgcgatatgctgtggcctaatttgctgaccggggcgcaatatgctcatctgcaggcgacattagacgcggtgcagtctcagcccgacgctcgcagccgcaacgatgcgctgcgcaacgtatttaacagcctgatggaagacgccatcatgacgccgctgttcaagtataactatcggatcagcgcgccaccgggggtcaatggtctgcgcctcaacgcccggggctggttcgacttcgccagcgcctggctgccggcctcgtcgacgtga

SEQ ID NO: 238725 - DNA, 819 bp, Klebsiella pneumoniae
atggcaaaactggcggcatttgatatggacggcaccctgctgatgccggaccatcgtcttggagaaaagacgctttccgcgctgaaacggctgcgtgagcgcgatatcaccttgaccttcgccaccggccgccatgtgctggagatgcaccatgtgattggcgaattttcccttgatgcatttctgatcaccggcaacgggacgcgcatccattcgctggaaggggaggagctttatcgccaggatctcgctcccgaagcggcggaagcggtgctgcacggcaaatgggatacccaggccagcatgcacgtctttaacgatggcggctggttcaccggccaggcaaggcctgaattgttgcaagcgcatgtattcagcggctttcactatcaactgtgcgatctgaagcgtatgtcggcgcagcatgtcaccaagatctgtttctgcggcgatcatgacgatttgcgccgtctgcggatccagctgaatgagacgctgggcgatcgcgcatttctctgcttctcggcaatggactgtctggaggtgctgccggttggctgcaataaaggcgcggcgctggcggtgctcagccagcatttaggcttcaccctgcaggagtgcatggccttcggcgatgcgatgaacgaccgcgagatgctgggcagcgttgggcgggagttcatcatgggcaacgcgatgccgcagctgaaagccgagctgccgcatttgccggtaattggcgactgccggaatcaggcagtctcccattttttaactcattggctggataatcctgatcttccttattcccccgaatag

SEQ ID NO: 238726 - DNA, 1053 bp, Klebsiella pneumoniae
atgaatagcgcctgggttaaacatgccattagcgaaatcaacgctgactatcagcgctccgccgacacgcacctgatccgtctgccgctgcccgcttttccgggcatccacctgtatctgaaagatgaaagcacccaccccaccggcagcctgaagcatcgcctggcgcggtcgctgtttctctatggcttgtgcaacggctggatcaaagaaggcacgccaattatagagtcctcctcagggtcaaccgccgtttcggaggcctatttcgcccgcctgctggggctgccgtttatcgctgtgatgccttcctgcaccgccaagcgcaaaatcgaacagatcgagttctacggcggacgctgccattttgtgcagagcgccggcgaaatctacgcggcttccgaaacgctggcccgcgagctgaacggccattatatggatcagtttaccttcgccgagcgggccaccgactggcgcggcaacaacaatatcgccgacagtattttccgccagatgagccatgagccgcacccgcagccgtcatggatcgtcatgagcgccggcaccggcggcacctcagcgaccattggccgctatattcgcagccagggctacgagacgcagctgatggtcgttgatccgcagaattcggtgttcctcgattactggcagacccgcgacgccagcctgcgcagcccggtcggcagcaaaattgaaggcatcggacggccgcgcgtcgagccgtcgtttattcccgacgttgtcgatgagatgctgcgcgtgccggatgcggcgagcgtagccaccgccctgtggctggaaacgcagcttgggcgcaaggtcggcgcctcgaccggcaccaatatgtggggcgtattgcagctggccacgcggatgcgcgaggaaggtcgcaccggctcgatagtgacactcctgtgcgacagcggcgagcgttacctggaaagctattacaacccgcagtgggtggcggacaatatcggcgatattgcgccctggcaggcggagatcgccggtctggtcgaaaggcgataa

SEQ ID NO: 238727 - DNA, 459 bp, Klebsiella pneumoniae
atgctagataaaattgaccgtaagctgctggcgctactgcaggaagattgcaccctctctttgcaggcgctggccgatgccgttaatctgaccaccacgccctgctggaaacgcctgaaacggctcgaagacgagggtattctccgcgggcgcgtcgccctgttggacgcggaaaaggtggggctggggctgacggcgttcgtcctgatcaagacccagcatcacagcagcgactggtactgtcagttcgtgagcgaagtgacgcagatggcggaagtgctcggcttctggcggatggcgggggagtatgactacctgctacgggtgcaggtggctgatatgaaacgctatgacgacttttataaacgtttagtgaacagtgtgcccggtctgtcggatgtcacttcgagttttgccatggaacagataaaatataccaccgccttgcctgtcgaataa

SEQ ID NO: 238728 - DNA, 1773 bp, Klebsiella pneumoniae
ttgcgattatttgctcaactcagctggtacttccgccgggagtggcgccgctatcttggcgcaattgccctgctggtcattattgccgtcctgcagcttattccgccgaaggtggtgggcattgtggtcgacggcgtgacgcaacaacattacaccgcggagaaggtgtggatgtggatcggcgcgctggtgctgatcgcggtgatggtctacctgctgcgctatgtctggcgcgtgctgttgttcggtgcttcttaccagttggcggttgagctgcgggaagatttttaccggcaactgagccgccagcatccggcgttctatttgcgccatcgcactggggatcttatcgcccgcgccaccaatgacgtggaccgggtggtgtttgccgctggcgaaggagtattaaccctcgtggattccctggtgatgggctgtgcggtattgattgtgatgtcgacgcagattagctggcagcttactctgctggcgctgctgccgatgccgctgatggccctggcgatcaaacgcaacggcgatgcgcttcacgaacgttttcgcgttgctcaggcggccttttccagcctcaacgatcgcacgcaggagagcttgaccagcatccgcatgattaaggcgtttgggctggaggatcgccagtcggcgcagtttgctgccgatgctgccgataccggcgcgaaaaacatgcgcgtggcacgcattgacgcccgcttcgaccccaccatctatatcgccatcggggccgctaacctgctggccatcggcggcggcagctggatggtgatccacggcagcctgaccctgggccagctgaccagcttcgtgatgtatcttggcctgatgatctggccgatgctggcgctggcgtggatgtttaacatcgtggagcgcggtagcgcggcctatggtcgtatccgcacgatgcttgaagaggcgccggcggtggatgacgggaccgaggcggtgccggcaggccgcggcctcctgcaggttgctatccgcgatttcatctatccgcaggcgagcaaaccttcgctggagcaggtaaattttactctccagccggggcaaatgctgggcatctgcgggccgacgggcgccggcaaaagcaccattctggcgctgctgcagcgccattttgacgtcactcacggcgagatccgctttcacgatctgccgctgccgattctgcagctcgacagctggcgcgcccggttggcggtggtcaatcagacgccatttttattctccgataccgtcgccaataatatcgcgctgggaaaaccggacgcgacgcaggcgcagattgagcgggttgcacaactggccagcgtgcatgacgacattctgcgtctgcctcagggctacgagaccgaagtgggcgagcgcggcgtgatgctctccggcggccagaaacagcgcatctctattgctcgcgccctgctgctggaggccgaaattttgatcctcgacgatgccttatcggcggtggatggccgcaccgagcaccagatcctgcataacctgcgccagtggggggaggggcggacggtcattatcagcgcccaccgcctgtcggcgctcaccgaggccagtgaaattttggtactgcagcatgggcatattgcccagcgaggccgccacgaggcgctggccgtgcagcccggctggtaccgcgacatgtatcgatatcagcagctggaggccgcgctcgacgaggtcccgcagacgcaagaggaggccctggatgcgtag

SEQ ID NO: 238729 - DNA, 1779 bp, Klebsiella pneumoniae
atgcgtagctttaccgaactctggccgacgcttaaacgcctgctggcctatggttcaccgtggcgcaagccgttggccatcgcggtggcgatgatgtggattgcggcggcggcggaagtgagcggcccgctgcttattagctatttcatcgacaacatggtggcgaaacatacgctgccgctgaagctggtggccggcctggcggtagcctatatcggcctgcagctgctggcggcgctcctgcactataaccagtcgctgctgtttaaccgcgccgcggtcggcgtcgtccagcagttgcgcagcgacgtgatggatgccgccctgcatcagccgctcagcgagtttgatacccagccggttgggcagcttatctcacgggtaaccaacgatacggaagtcattcgcgatctgtacgtgacggtggtggctacggtactgcgcagcgccgcgctgatcggcgcgatgctggtggcgatgtttagcctcgactggcggatggcgctggtggcgatcgcgattttcccagcggtgctgatcgtgatgattatctatcagcgctatagcacgccgatcgtgcggcgggtgcgcgcctggcttgccgacatcaacgatggcttcaacgaagtgatcaacggcatgggcgtcatccagcagttccgccagcaggcgcgctttggcgaacggatgcgcgaggccagctatgcccactatctggcgcggatgcagacgctgcgcctggacggttttctgctgcgcccgctgctgagccttttttcctcgctggtgctgtgcgggctgctgatgctgttcggctttagcgcggtgggcacgatcgaggttggggtcctgtacgcgtttatcagctatcttggacgccttaacgagccgcttatcgagctgaccacccagcagtcgatgctgcagcaggcggtggtcgccggcgagcgcgttttcgagctgatggatcgcccgcgccaggcgtggggtgcggatgacgcgccgctgagcagcggtcgggtggaaattgaccatctctcctttgcttaccggggggaccgtctggttctccaggatatcacgctggatattccctcccgcagcttcgtggcgctggtcggacataccggcagcggaaaaagtaccctcgccagtctgatgatgggctattacccgttaacccacggcgagatccgcatcgatggtcgaccgctcgcatccctcagccacagcgcgttgcgtcggggcatcgcgatggtgcaacaggatcccgtagtgctggcggataccttttacgccaacgtcgcgctgggccgggacatcagtgaggcgcaggtttgggaagcgctggaggcggtgcagctggcggcggtggcgcgcagcatgagcgatgggctgtacacccaactgggcgagcagggcaataatctctccgtcgggcagaagcagctgctggcgctggcgcgcgtgctggtggacaccccgcaggtactgattttggatgaggcgacggcaaacatcgactccggtaccgagcaggcgatccagcaggcgctggcgaaggtccgccagcataccaccctcgtggttattgcccatcggctttcgaccattgtggaggccgataccatcctggttctgcatcgaggtcaggctgtcgagcggggcacccatcagcagctgctggcggcgaaaggccgctactggcagatgtatcagctgcagctggccggcgaagagctggcggccagcgccagagaggagtcgctcagcgcctga

SEQ ID NO: 238730 - DNA, 339 bp, Klebsiella pneumoniae; identical to SEQ ID NO: 210431

SEQ ID NO: 238731 - DNA, 1287 bp, Klebsiella pneumoniae
atgaaaatggcaacaatgaaatcgggtctgggggcattagcccttctgccggggctggcgatggccgcgcctgcggtggcggacaaagccgataacgcgtttatgatgatttgcaccgcgctggttctgtttatgactatcccggggattgcgctgttttacggcggcctgatccgcggtaagaacgttctgtccatgctgactcaggtgattgtcacctttggcctggtctgcgtattgtgggtgatttatggctataccctggccttcggcaccggcggcagcttcttcggcagctttgactgggtgatgctgaaaaatattgagctgaaagcgctgatgggcaccttctatcagtatatccacgtggcattccagggctcgttcgcctgcatcaccgtcgggctgattgtcggggcgctggcggaacgtattcgtttctccgcggtactgatcttcgtggtggtatggatgacactctcctacgtgccgattgcgcatatggtttggggcggcggtctgctggcgacccatggcgcgctggacttcgccggcggcaccgttgtgcacatcaacgccgcggtcgccgggctggtgggcgcctatatgatgggcaaacgcgtgggcttcggcaaagaagcgttcaaaccgcataacctgccgatggtgttcactggcaccgctatcctctacgtgggctggttcggcttcaacgccggctctgccagcgcagcgaatgaaattgcggccctggcgttcgttaacaccgtcgtggcgaccgctgcggctatcctggcgtggacctttggcgaatgggctctgcgcggcaaaccttcattgctgggcgcctgctccggggcaattgccggtctggttggcgttacgccggcgtgtggttatatcggtgtcggcggggcgctgatcgtcggtatcgcctctggcctggcgggtatctggggcgtgactgcgctgaaacgctggctgcgtgtggatgatccttgcgacgtcttcggcgttcacggcgtctgcggcatcgtcggctgtatcctgactggtatcttcgcggcgacttctctgggcggcgtcggttatgcggaaggcgtcaccatgggccatcagctgctggtgcaactggaaagtatcgccatcaccgtggtctggtccggcgttgtggcgttcatcggctacaaagtggcggatatgaccgtcgggctgcgcgtgccggaagagcaggagcgcgaagggctggacgtcaacagccatggcgaaaacgcctataacgcctga

SEQ ID NO: 238732 - DNA, 864 bp, Klebsiella pneumoniae
atgagtcaggcactctctaacctgctggcattattagatctggaaaaaattgaggaagggttgtttcgcgggcagagcgaagacctggggttacgtcaggtttttggcggccaggtagtgggtcaggcgctgtatgcggcaaaagagaccgtgcccgttgagcgtctggttcattcgtttcacagctactttcttcgccccggcgatagccagaagccgatcgtttacgatgtggaggtgctgcgcgacggcaacagcttcagcgcccgtcgggtcgccgccatccagaacgggaagccgattttctatatgaccgcctccttccaggcgccagagaatggctatgagcatcagaaagcaatgccggccgccccctcccctgacggcctgccttcggaaaccgatatcgctcgcaagctggcgcatctcctgccgccgcaggtgaaagacaaattcctctgcgataaaccgctggagatccgtccggtggagtttcataacccaatgaaaggccatatcgccgaaccggtgcgccaggtctggctgcgcgccaacggcgccgtccctgacaatctgcgtattcatcagtatctgctgggctatgcttcagactttaacttcctgccggtggcgctgcagccgcacggcgttggtttccttgagcccggcatgcaggtcgccaccatcgaccactctatgtggttccaccggccgtttaatattaatgaatggctgctgtatagcgtcgaaagcacctcggcctccagcgcccgcggcttcgttcgcggcgaattctacacccaggatggcacgctggttgcctcaacggttcaggaaggggtgatgcgcaaccgcaacgcataa

SEQ ID NO: 238733 - DNA, 492 bp, Klebsiella pneumoniae; identical to SEQ ID NO: 210434

SEQ ID NO: 238734 - DNA, 312 bp, Klebsiella pneumoniae
atggctccgcacgacacatttccccaacgcgtctggcacatcgtggcgtcgataccggaagggtatgtcacgacctacggcgaggtcgcccggctggcaggttcaccgcgcgcggcgcgccaggtgggcggcgtattgaagcgcctgccggaagggtccaccctgccatggcatcgggtggtcaatcgccatggcgatatctccctcaccggccccgatctacagcggcagcgtcaggcgctgctggccgagggtgtgcaggtctccggcagcggccatatcgatctccagcattatcgctgggtttattga

SEQ ID NO: 238735 - DNA, 408 bp, Klebsiella pneumoniae
atgactgactcatcaccacagaccatcactctgcctttacctgctattgaagggatgaccatcgcctttcagggcgtaaactacctgcgtcctgaaaaaatgctcgacttcgcgaccatcagtcccgcgccggtgcgggcggttacgccgctggcgctgctctattccaccgtcggcgtgctgcgccaggtggagctacgcaagctgccggtctatatcagcggtcgggtggtgtaccctatctcgtcgttaaccatgccgggcctgcgcgcgaggctgatcatcaacgccacttcgcagcggttgaaatttcttgagagtctcatcgccagctcagcctccgacaatgtccatggcatgcagatcctcggcctcgctctgacgttcaccgtcgaacaggccgcctga

SEQ ID NO: 238736 - DNA, 258 bp, Klebsiella pneumoniae; identical to SEQ ID NO: 210437

SEQ ID NO: 238737 - DNA, 216 bp, Klebsiella pneumoniae; identical to SEQ ID NO: 135670

SEQ ID NO: 238738 - DNA, 1428 bp, Klebsiella pneumoniae
atgtcagcccgacgctttggaacccaatcgctggtacgcctgctcggcaactggcaggagaccagctcacgcacgccgctatggcgccagctggcggaagcgctccgcctgctgatccttgatggtcgcctgacgctgcaaacgcgcctgcccggcgagcgcgagctggcggcggccctgaacgtcagccggaccaccatcgccagcgccctcggccagttgcgggaggagggctttctctacagccgccaggggagcgggtcacgcattgttttgccggaacgccccgccgatcttcctctgcctgccggcatctcatctacgcttaatctatctaccgccgccctcagcgccgggccggaggtccatcaggccttccagcacgctatgaccctgctgccgccctctctcgcacagactggctatgaccagcaggggctgccggtgctgcgggaggcgattgcccggcgctacagcgaacgcggtctgccgacgcggcccgatgaggtgatggtggtcaacggcgccctcagcgccttcgcgctgatcctgcgcctgttcaccgggccgggcgatcgggtggttattgacgcccccacctatccgatggccatcagcgccattcagggcgcctcctgccgccccgtcggggttgcgcttccgcagcagggatgggactgcgatggactggcggcgactattgcgcagactgcgccgcggctggcgtggctgatgccggattttcacaaccccaccggacgctgtatggatgcccccacccgccagcgggttgcggacatcgccgccaggacgcgaacaacgctggtaatcgacgagaccatggccgacctttggtataacgcgccgccgcccccgccgctggccagcttcaatcccgatgccgcggtgctcaccattggttcggccgggaaaagcttctgggggggactacgtatcggctggatccgcgccagcgcgcggaccatcgcctcgcttattcaggcccgcgattcgctggatttgggtacgccgctgctggagcaactggcctgcagctggctactggaaaatgccgccacactgctgccgccgcggcgggatatgctcaaggcgcgccgggacatgtgcgaaacgctgatggcggaatattttccccgctggcggttttcgccaccggaaggtgggctctctttttgggtggaacttcctgacatgctggccaccctgttctctgcgcgtgcggaaagccaggggatccatatcggcaccggtacgcggtttgggctggaaggggcgttcgatcgctatttacgtctgccgtttacgctgccggatgaagcattgcgccgggccttctccacgctacaaccgctgtggcaaagccttgctgaacagaaggaaaatacacgtttgcgaaaaataatataa

SEQ ID NO: 238739 - DNA, 615 bp, Klebsiella pneumoniae
atgcttcgtcgcctgctgcagttatatattggtctggtgctttacggcgtgtccacggcgctcttcgtgcatgccaatctcggcgccgatccgtgggatgttttccatctcggggtggctaaacagctgggtatcagtttcggtacggtgattatcctgaccggcgcggcggtactgctgctgtggatcccgatccggcaaatgccggggctcggcacggtgagcaatgtcatcgtgctgggactagcggcggacgccacgctggccgtcctgccgccgctggagtcgatggtggcgcgcagtgcgctgctggtaggagcgattgtgctgaacgctatcgctaccggaatgtatattggcgcgggctttggccccgggccgcgcgatggcctgatgaccggtctgcatgctcgcactggttggtcactgcgcggtatccggacggcgatcgagctttccgtactgctgattggctggctgctggggggcaaatttggcgtcggaaccgtcatctacgcgctgtcgattgggccgctgatccagctgtgcctaccgtggttcagccagcccgtcagccgcaacgcggtcagccctccccgggaaatagtctcctga

SEQ ID NO: 238740 - DNA, 882 bp, Klebsiella pneumoniae
atgaacgatttcacttcccttctgcagcagggcaatgcctggctgtttatacccagcgcaatactgctcggcgcgctgcacggcctcgaaccgggccattcaaaaacgatgatggccgcctttatcgtggcggtacggggaacgttaaaacaggcggtactgctggggctggcggccacggtttcccatacggcggtggtctggctgatcgccatggccggcctgtggtttggccgcggctggaacgcccaaacctctgaaccctggtttcagctggtctcagggattgtcattgtgctgattgcctgctggatgctctggcgcacctggcgcgaatcgcagcctcacacgcaccatgagcaccaccatgaacatgagcaccaccatgaacatgatcaccaccatgaccatgatcaccgccatgaccatgatcaccgccatgaccatgatcaccgccatgaccatcaccatgcgtcctcatccgccgcgccgctggtggcggagaagtggcaggacgcgcatcagcgggcccatgctcaggagatcaaccggcgctttgatggccgccaggtgacgaccgggcagatcgtactgtttggcctgaccggggggctgatcccctgcccggcgtccattaccgtgctgcttatctgtttacagctgaagaaattctcgctgggcgccacgctggtgctgggctttagcgttggtctggcgctgacgctggtggcttccggggccatcgccgccctgagccttaaacatgccacccgccgctggccgtggcttaacgacttctcgcgcaaggcgccctggttctcaggcttactgattattgtggtggggatctacatgatgcttcatggcctgagcggcctgtaa

SEQ ID NO: 238741 - DNA, 273 bp, Klebsiella pneumoniae
atgtcacatacagttcgacataaaaagatgttactgacccggttgaagaaaattcaggggcagagtatcgcgttagagaaaatgcttaatcgcgagcatgagtgcgctgaaatattacagcagctggcggcgatccgcggcgcggtcaacggcatgatgctgcaggttattcaggggcatcttaccgaccatgtggtgaaagagcctgacgagacgcagcgcgaagcggatctggagacggtgatgcaggtgattaaatcctatctgaagtag

SEQ ID NO: 238742 - DNA, 1560 bp, Klebsiella pneumoniae
atgaggacccggcatctgatggcgctgtttacaggagtgctgatactggccatcatcctgcccatttcactcagcatctggcaggcggcgcggcaggccaaaatgcagttctatcgtgaactggatgactattccaaccgtatcgtcgttcggacgctgcaggttgccgaccaggcccgggaagcgttacgagaggctgacgcacacaccgccgcctcctgtagccctgaacatctgcttacgctccgccgcatcgcctatacccatcgctacattcaggaagtgctctggctgcgtgattccgtgccgcaatgctcctccctggaagaccatagcgtcgcggtcaccttccccccgccggaccatattgcccccgacggctatcgcacctggctgacctcaattaacgatcttggcctcgatcatcagatgacggccatgggcagccggcagcacatggtgatgatcgaccccgtctcctttattgatgtcgttcccgccagcgaagagaagatccataccatgctgtttggcctggaccaccagaaaatggtgatcagcagtcagccgctgccggcgaaagtctggcaacgcattaaagatccgcatgtggatatgcttactctggataacacggtctaccggatccagcgcattcccgagctgggctctggcatcgtaacctggtcttcaaccttgccgctgcagcagcgcattcgacagcagctgttcttctggctccctgccggcattttcaccagcctgctcgccacctggctgctgctgcgtctgctaaggcacctgcgctcaccgcgcaacagcatgctggacgccctcaattccgaagcgattcaggttcactatcagccgattatttcgttgcaggaagggaaaattgccggggcggaggccctggcccgctggcagcagcccgatggcacttttttatcgccggatatctttattcccctggccgagcagaccgggctcatcacgcagctgacggaagatatcgtcaggaaaatttttgccgatctcggcccctggctgcggcagcggccggaagtgcacatctccatcaacctgtcggtagatgatttacgctcgcccaccctgccgacgttgttgcacaatcagctacagcactgggggatcgccgccgaacagatcatccttgaaatcaccgagcgcgggtttgtcgacccggagaccaccatgccggtgatcgctcactaccgtcaggctggccatcggatctcgattgacgatttcggtaccggctactccagcctgagctatctgcagaaactggacgtcgacacgctgaaaatcgataaatcttttgtcgataccctcgagtaccggccgctgacgccgcacattattgaaatggccaaagcgctcaatctggccaccgtcgccgaaggggtggaaaccgaaagccagcgcgactggctgcgccagcacggcgttcagtacgcccaggggtggctgtacagcaaagcgctgccaaaagagcagttcattctgtgggcagagcataacctccatgcgcattaa

SEQ ID NO: 238743 - DNA, 1110 bp, Klebsiella pneumoniae
atgtccaatatacgactgaggaatgtcaccaaaaggttcggcagcacggtgacgctgcaccaggtcaatctcgatattgaagatggcgagtttgccgtcttcgtcggcccttccggttgtggaaaatcgacgctactgcgcatgattgccgggttggaagaggtcagcgaaggagaagtactgatcggcgatgaggtgatgaatgatgtcgtgcccgcccgccgcggcgtggcgatggtcttccagtcctatgcgctctatccgcacatgacggtggcagagaacatgggctacgggctgaaggtgaataaagtgccgaaaacggagatccgtcgccaggtggaaatggtggctaaaacgctgcagctctcgcacctgctggatcgtaaaccgaagcagctctctggcggccagcggcagcgcgtggccattggccgggcgatcgtgcgtaatccccgggtgtttatgttcgatgagccgctctctaaccttgatgcggagctgcgcgtcgatatgcgcctgcatattgcccgtctgcaccaggagctgaagaccactatggtgtatgtcacgcacgatcaggtggaggcgatgacgctggccgataaaatagtggtcatgaactacgggaaagtcgaacaaatgggttcgccgatggcgctttactacaatccggtcaacaaattcgtcgccggctttatcggctcgccgaagatgaactttctgccggctatcgtcagcgactggcagccggaacgcttaacggtcaccctcgcgcaggaccatcagctggccctgaatatcgccacccagccgctgaagcccggcgctgcggtgacgctggggatccggccggagcacctcaccccggaagtcgccaccggtaccgtagtggagtttcaatgtgaagtggtggagcgtctgggcaacaatacctatctgttcggccagtgctacggccacgataacgtcaaggttttgctgcccggcgacgtccatttccgcccgtggcagaagattaatctggccttcgacgaccgcttctgcatggtgtttgatgagaacgatctgcgcatcagcgccgacatcacggctccggatgctcactag

SEQ ID NO: 238744 - DNA, 1233 bp, Klebsiella pneumoniae
atgaaaaagaacacgcttgctgcactgatccttaccaccctggcggcggggcaactcgccagcctgcaggcgcatgccgccgggcagctcaacgtctgggaggacattaaaaaatccgctggcatcaaaaccgcggttagcgattttgaaaagcagtacaacgtgaaggtcaatctccaggagatgccctacgcccagcaactggaaaaactgcgcctcgacggcccggcgggcattgggccggacgtgctggtgatcccgaatgaccagctcggcggcgccgtggttcagggactactctcgccgctcagcgtcgatcaggcgaaacaggatgcctttacgccagcctccatcaatgccttccgcatggacaacgcgctgtatgggatcccgaaggcggtggaaaccctggtgcttatctacaacaaggacctgatcgacaagccgctggacagcctgcaggcctggctggactactcgaaaacccagcgcgagcagaacaaatacggcctgctcgccaagtttgaccagatctattacagctggggggcgattggcccgatgggcggctatatctttgctaaaaacgacagcggcggctttaacccgcagcaggtgggtctcaatacccccggcgccgtggaagccgtcaccttcctgaaaaaattctatgccgagaaggtctttccggcggggatcctcggcgataacgggctgaatgccatcgattccctgtttaccgagaaaaaagcggcggcggtgatcaacggcccctgggccttccagccgtatgaagccgctggcattaactatggcgtggcgcccctgccgaccctgccggacggcaagccgatgagctccttcctcggcgtcaaaggctatgtagtatcgacctggagtaaagacaaagcgctggcgcaacagtttatcgagttcatcaaccagccgcagtatgtgaaagcccgctatgtcgccactggcgaaattccgccgctgaaggcgatgattgacgatccggtgattaaaaacgaccaaaaggccagcgccgtcgccatccagtcggcgcgagcggtagcgatgccgggcattcccgagatgggggaagtgtgggggccggccaacgccgcgcttgaactgagcctcaccggtaagcaggcgccgcaggccgcgcttgataacgcggtgaaacagatcacgatgcagatcgaagcgatgcaggccagcaatcagtaa

SEQ ID NO: 238745 - DNA, 1308 bp, Klebsiella pneumoniae; identical to SEQ ID NO: 233518

SEQ ID NO: 238746 - DNA, 852 bp, Klebsiella pneumoniae
atggctcaatcacccagtattaaacgcgaaaagtggatccggctctctctcacctggctggtggttattctggtctcggtggtgattatctatccgctggtctggacggtcggggcgtcgctgaacgccggcaatagcctgctcagtacctcaatcattccggaaaatgtgtcgttccagcactatgccgatctgttcaatggcaatgtgaattacctcacctggtactggaactcgatgaaaatcagcttcctgaccatggtgctgaccctgattagcgttagctttaccgcttacgccttctcccgcttccgctttaaagggcggcagaacgggctgatgctgttcctgctgctgcagatgatcccgcagttttccgcgctgattgccatctttgtcctgtcgcaactgcttggcctgattaatagccatctggcgctggtgctgatctacgtcggggggatgatcccgatgaatacctggctgatgaaagggtatctcgacgcgatccccaaagatctggatgagtccgcccgcatggatggcgccagcagctttcgcatctttatcgagatcatcatgccgttgtcgaggcccatcctcgcggtggtggcgctgttctcgttcactgggccgctgggggatttcatcctctccagcaccatcctgcgtaccccggataaatacacgctgcctatcggtctgtataacctggtggcgcaaaaaatgggtgccagctacaccacctacgcggcgggggcggtgctgatcgccgtaccggtggcgatcctctacctggcgctacaaaaatacttcgtctccggcctgacctcgggcagtactaaaggataa

SEQ ID NO: 238747 - DNA, 1203 bp, Klebsiella pneumoniae
atgaaaagattcacacccgcatggcttgcggtttgtctggcatgcagtttctccacctcttctctggccgcggacgcgcttgcaacccgcgcgtttcagggcatgccggcggactttatcaaaggcgcggatatctccacgctgctggacgccgaaaagcacggggcgacgttctacgatcagaataatcagcgcaaggatccgatcgctattctgaaagagaacggcgtcaactatgtccgcctccgtctgtgggtggatccgcaatcggcgagcggcgaggactatggcggagggaataacgatctggccaccaccctggcgctggcgaaacgggcgaaagcccaggggatgaagctgctgcttgattttcactacagcgatttctggaccgatcccggcaagcagttcaagccgaaagcctgggaaaagctggattacccgcagctgaaaacggcgattcatgactatacccgcgataccatcgcccgctttaagcaggcgggcgtgctgccggatatggtgcagatcggcaacgaaatcaacggcggcatcctgtggccggaagggaaaagctgggggcagggcggcggagagttcgaccggctggctggcctgctgaacgcggctatcgctggcctgaaggagaacctgcgccagggcgagcaggtgaaaatcatgctgcatctggccgaagggaccaggaacgataccttccgctggtggtttgatgagatcgacaagcgccatgtaccgtatgacgtgattggtctgtcgatgtacacctactggaatggcccgatcagcgccctgaaggccaatatggatgacatcagcaaacgctataacaaagacgtcatcgtcgtcgaggcggcctatgcctataccctggccaactgcgataacgcggaaaatagtttccaggcgaaagaggaaaaggatgggggatatcccgccagcgtacaggggcaatataactatattcacgatttaatgcaggcggtggttgatgtgccagaccagcgtggtaaaggtattttctattgggagcctacatggattgccgtgccgggaaatacctgggccaccccggcggggatgaaatatatccacgacgagtggaaagagggtaatgcacgtgaaaatcaggcgctatttgattgccagggaaaagtattgccgtcggtaaaagtttttaattaa

SEQ ID NO: 238748 - DNA, 2058 bp, Klebsiella pneumoniae
atgaataaatttgcacctttacatccgaaggttagtacgctgctgcatggcgcggattataatccggagcaatgggagaatgaccccgatattattgataaagacattgccatgatgcagcaggcaaaatgcaatgtgatgtcggtgggaatatttagctgggcgaaactggagccacgcgaaggggtatttaatttcgcctggctggatattatcctcgataaactgtatgccgccggcattcatgtctttctggccacgccgagcggcgcgcgtccggcgtggatgtcgcagcgctatccgcaggttctgcgggtggggcgcgatcgggtgccggccctgcacggcggccgtcacaaccactgtatgtcgtcaccggtctatcgcgagaaaaccctgcaaatcaataccctgctggcagaacgttattcctcacacccggcggtgctgggctggcatatttccaacgaatatggcggtgaatgccattgcgatctctgccagaaccgttttcgcgactggctgaaggcgcgttaccagaccctggagaacctcaaccaggcctggtggagcaccttctggagtcatacctataccgactggtcgcagattgaatcgcctgcgccgcagggcgagatgtcgatccacggtcttaatcttgactggcatcgctttaacaccgctcaggtgaccgatttctgccgccatgaaattgctccgctgaaggcggcgaatgcctccctgccggtgactaccaactttatggagtatttctacgattacgactactggcagctggcggaggcgctggatttcatctcctgggacagctatccgatgtggcaccgcgataaagacgaaaccgcgctggcctgctacaccgcgatgtatcacgacatgatgcgcagcctgaagggcggcaaaccgtttgtgctgatggagtccaccccgggcgccaccaactggcagccgaccagcaaactgaagaagccgggaatgcatattctttcctcgctgcaggcggtggcgcatggcgccgactcggtgcagtatttccagtggcggaaaagccgcggttcggttgagaaatttcacggcgcagtggtcgaccacgtcggacatattgatacccgcattggccgcgaagtctgccagctcggcgagatcctcagcaagctgccggaggtgaggggctgtcgcaccgaggcgaaagtagcgattatcttcgaccagcagaaccgctgggcgctggatgacgcccaggggccgcgcaatcttgggatggaatatgagaagacggtcaacgagcactaccgcccgttctgggagcagggcatcgccgtcgatgtgattgatgccgatgtcgatttaacgccgtatcagttagtgattgccccgatgttatatatggtgcgcgacggctttgccggtcgggcggaggcgtttgtcgccaacggcggccacctggtgaccacctactggaccggtatcgtcaatgagtccgatctctgctatctcggcggcttcccgggcccgctgcgcaatctgctggggatctgggcggaagagatcgactgcctgaatgacggcgagtttaatctggtgcaggggcttgccgggaatcagtgcggtctgcagggcccttatcaggtgcgccatctctgcgaactgatccatatcgagagcgcccaggcgctggccacctaccgggatgatttttatgccggacggccggctgtgacggtgaacgcgttcgggaaaggcaaagcctggcatgtggcctcccgcaacgatttagccttccagcgcgatttctttaccgccctgagcaaggagctggccctgccgcgggcgatagcgacggagttaccacccggcgtggtggcgactgcgcgcaccgacggtgacaacgcatttatcttcctgcagaactacagcgcgcaaaaccataccctgaccctgccgcaagggtattgggattgcctgaccgacgcggcggtatcggctccactgaccctgtcggcatgggattgccgtattctccgtcgtcacgcgtaa

SEQ ID NO: 238749 - DNA, 315 bp, Klebsiella pneumoniae
atggtgagtttaaaatccttcctgcactatttctccccagcgcgtccggcacagccattaagcgaggcggaaaaacagcaaatcgaggcgcttattcaggcctttggtggcgaagcgaatattacgcaagtggacgcctgtattacccgtctgcgggttagcgttcgccatcttgcggccgtggactccgaagcattacagcagcagggcgcgctgggggttattattcttggtcagcaggtgcatgctattttcggtaaacagtccgatgcgctgcgtcagcttctggatgaacattttgccgcccggaaataa

SEQ ID NO: 238750 - DNA, 1272 bp, Klebsiella pneumoniae
atgaacactacactgcgcgccctttcagtcgcgttagccgctgcgctaatcgctccttccgcgtttgcggccaccgccgcgatcccaacgatcgatttccatggctatatgcgcgccggggttggggtctccggcgacggtagcgaagcggaatggcaaaaaaataagctgggccgtttggggaacgagtcggatacctacggcgagctggaactgggctctgaggtctataagaaagatgacgtcagcttctatctcgacagtatggtcagcatggtctccgacggctctaacgataatgaaaccacgctgaacgatgatgcacagttcggcttacgtcagttgaacctgcagataaaggggctgatccctggcgatccgaatgcggtgatctggggcggtaaacgttactaccagcgccatgatctgcatatcatcgataccaaatactggaacatttccggctccggagccggggtggaaaactacaccctcggcccgggcgccgtctcgctggcctggatccgcggcgatgccaacgatgttgactatcgcgtcgatggcgacagcaacgtcaatatcaactatatcgatttacgctacgcgggctggaagccatgggcgggctcgtggaccgaattcggtatcgactacgcgatgccaaacaccaccaaaaaacaggatagctacggcggactgtacgatgctgacaacggcgtcatgctgaccggtgaaatcagtcaggatatgctgggcggctataacaaaaccgtgctgcagtacgccaacaaaggcctggcgcagaacatggtctcccagggcggcggctggtacgatatgtggaactacgtgaacgacgccaccggttatcgcgtgattaacaccggcctgatcccgattactgagaagttttctatcaaccacgttctgacctggggctcggcggatgacattaccgactataccgacaaaacgcggatgctgtcgctggtcgcccgcgggcagtaccagttcaccgactacgtgcgcctgattggcgaagtcggcggtttctatcagaaagacagctacaacaatggcaccagctacaaacaggccggtgagaaatacaccattgcgttgggcctggcggacgggccagactttatgtcacgtccggaattacgcatttttgcttcatatttgaatgattccgaagatggtaaaccgtttgaagaccagacggcgaataatacctggaatttcggcgtgcaggttgaggcctggtggtaa

SEQ ID NO: 238751 - DNA, 264 bp, Klebsiella pneumoniae
atgaaagcctatatccatcctccctatcgtacggtggtgtttcacgacaccagcgcgaatgagtattttaaagtcggctcaactatccgcaccgatcgcgtgattgaactcgatggcgaaacttttccgtatgtgacgatcgacgtctcctcgaaatcgcatccgtactacacgggcaaacaaaaaaccttcgccaatgaaggcagtgcagcccgattccgccagcgcttcggcggctttattgatgcgaaaaggaaagcatga

SEQ ID NO: 238752 - DNA, 141 bp, Klebsiella pneumoniae; identical to SEQ ID NO: 210454

SEQ ID NO: 238753 - DNA, 699 bp, Klebsiella pneumoniae
atgtgcgaatataatcagtttggccaggcgctcggcgtcgcgctgcctgactggcagccgcgcccctggccgacacgacaggtattacagggcagccgttgtcgactcgaaccgctgactcttgctcatgccagcgatctgttcgccgctcaccagctggcgccagacgcccgcagctggacgtggctgctgcgtgaacctgagagcaaccttgcagaattcagtgcctgggtggagcaggtcgccacgctggcagacccgattcattttgccgtcgttgaccagcagcgagggaaagcggtcggctcgctggcgttaatgcgtatcgatatcgctcacggtgtggtagaggtggggcatgtgcatttttcaccgttactgagccgaacggccatggccaccgaagcgcactggctgttgatgcagtatgtctttgatacgctcggctaccgtcgctatgaatggaaatgcaacagtcttaatatcccatcagcccgggcggcaaggcggctggggtttcagtacgaaggacgttttcgccaggcgctggtgagtaaaggacacaaccgggacacggactgtttttcggtgatagacggcgaatggccggagctggataacgccatgcgccaatggctggccgccgacaattttaccgccgacggccaacagcgccgctcgctggagagtttccgttaa

SEQ ID NO: 238754 - DNA, 1452 bp, Klebsiella pneumoniae
atgaatataccggacgaggggttttttacgctgttgacgcaggggatgcggaaccgcacggtcgaaaccttacagcgcgccctttaccacaccttacgtgacgctatcctgcagggaaccctgacggcccgctgccgtttacccggatcgcgggtgatggccgaacggctacacctgtcgcggaatacggtcaatgccgcactggaacagctggcgctggaggggtacctgacacggagccgtcagggaacgcaggtggcaccactcgcctcctgccgccaggaggcgggtcagatgccgcccgtcgtgctgcctgagcggctgcaaaggctgccagccgcgatgcgccgcgactcaccgacgctggcatttacgccaggcatgccggcggtaaactatttcccgctgccgctgtggcggcgactgatggataacgtgctacgcgaagatggtagcgcgctgctgggttatggcgaagccgcgggcgatcctttgctgcgagaggctatcgctcgtcatctggcgctctcccggggcatccggtgcgatatccggcagatcgtcatcaccgaaggcgcgctggaaggcgtcaacttatgcgcctcgctactgaccaacccgggcgacagcgtgtggctggaagaaccggggtacctgggggcgaggagtggctttcagcgggcgggactgcgggtcagaggaatggctgtcgacgatgaagggatgtgtattgccaacggcgtcgcggagccgccccggctcattttcacctctccttcacaccagtatccctgtgggagcatcatgagcgccgggcgccgtctggcgctcgtggaatatgcccgccggcacggggcgtggattgtggaggatgactacgacagcgagtttcgccatagcggagaaccgatcccggcgatgctgggaatggtgcctgatgccccggtggtctatctcggcaccttcagcaaaacgctgtttccggcgttgcgtatcggttttatggttatgccgcccgcgctggcggatgctgctcaggacgccattggcgcgctgctgcgcgggggacaccgtgctgaacagcgggcgctggccagctttatcgagaagggacactatgcgcgccatctggcagcgatgcgccgcctgtaccgtaaacgtcagcaacagctgcgcgaggcgctggcgcaagagataaccgtgccgtgcgacgttctcggcgggggaggggggatgcacctgacggtggcgatggagggcgttaatgaccggacgcttgcgcagcaggcgcgccagtttcagctggcgcccgccgcgttaagtcatttctatctcgacccgcagcgagcgcggagcggactggtgcttgggtatggcaatacctctgcttctcgctatctcccggcgctgcggaccctaaatcgccttattgcgcagcaccggcgcgcgtga

SEQ ID NO: 238755 - DNA, 471 bp, Klebsiella pneumoniae
atgacagaaatacaacgcctgctgattcacaccattgacgaactcaacgtccaggaaaaacgcgataatcgcccgcgttttagcatcagttttatccgcaaccatccgggactgtttgttgccatgtatgccgcgtttctggcgacgctggtggtcatgctgcgctctgaaacgctggtagactcggtctggttgctggtggtgctgttcattctgttcaacgcctttttcttctttgacgtctatccacgctatcgctacgaggatatcgatgtcctcgactttcgcgtgtgctacaacggggaatggtacaacacccgctttgtcccccggcagctgatcgaccgtatcctgcagtcgccagacgtcgatagcgagcagaaggcgcagctcaaaaagatggtcgccaccaaaggcgagctctccttctacgacgtctttaccctcacgcgcgccggtgctgcgcaataa

SEQ ID NO: 238756 - DNA, 567 bp, Klebsiella pneumoniae
atgagtgaagaaaaacgcaaaatgatcgccggtgagctctatttatctggcgacccaacgcttcgcgccgatcgcctgcgcgccagacagttgttgcaccgttataatcattccgccccggatgaccaggaacaacgtcagcatattctggccgagctgttcgctcgcgccggcgatgcgtatatcgagccaagctttcgctgcgactatggttataatatttttctcggcgccggtttttacgccaattttgactgcgtgatgctcgacgtctgccctatccatattggcgataactgtatgctggcgccaggcgtccatatttataccgccactcatccgctggacgccgatgcgcgtaatagcggccaggaatacggcaagccggtaactattggccacaatgtgtggattgggggtcgggcagtgatcaatcccggcgtgaccattggcgataatgcggtcattgcgtccggcgcggtggtcaccaaagacgtccctgcctgtaccgtcgtcggcggtaacccggcacagatcattaagcgccttccgccgacaaatccgtaa

SEQ ID NO: 238757 - DNA, 219 bp, Klebsiella pneumoniae; identical to SEQ ID NO: 135688

SEQ ID NO: 238758 - DNA, 375 bp, Klebsiella pneumoniae; identical to SEQ ID NO: 135689

SEQ ID NO: 238759 - DNA, 3147 bp, Klebsiella pneumoniae
atgcctaatttctttatcgatcgccccatatttgcatgggtgatcgccattatcatcatgctggctgggggattatcgatcctcaaattgccggtggcgcaatatccgacgattgcgccgccagcaatttccattaccgccatgtaccccggtgctgacgccgaaacggtgcagaacaccgtaactcaggttatcgaacagaatatgaacggtatcgatcacctgatgtacatgtcctcaaatggcgactccaccggtacggcaaccattacgctgaccttcgaatccggtaccgatccggatatcgcccaggttcaggttcagaacaagctggcgctggcgacgcctctgctgccgcaagaagtacagcagcaagggattagcgttgagaaagcgtccagcagcttcctgatggttgtcggcgtcattaacaccaacggcaccatgaaccaggacgatatttcggactacgtggcggccaacatgaaggatccgattagccgtaccagcggcgtcggcgacgttcagctattcggttcccagtatgcgatgcgtatctggatggatccaaacaaactgaacaacttccagcttacgccggtggatgtgatcagcgccctgaaagcgcagaacgcccaggtggccgcgggccagttaggcggtacgccgccggtgaaaggccagcagcttaacgcctcgatcatcgcgcagacgcgtctgaccaatacggaagagtttggcaacatcctgctgaaggtgaaccaggacggttcccaggttcgtctgcgtgatgtcgccaaaattgagctgggcggcgaaagctatgacgtagtggcgaagtttaacggccagccggcatccggtctgggtattaaactggctaccggcgccaacgcgctggataccgccaacgctattcgcgctgaactggcgaagatggagccgtttttcccgtcggggatgaagatcgtttacccgtatgacaccaccccgttcgtgaaaatttctattcacgaagtggttaaaacgctggtggaagcgattatcctggtgttcctggtcatgtatctgttcctgcagaacttccgcgccaccctgatccccaccatcgcggtaccggtggtcctgttaggcaccttcgcggtgctggcggcgtttggcttctcgataaacaccctgacgatgttcgggatggtgctcgccatcggcctgttggtggatgacgccatcgtggtggtagagaacgtcgagcgcgtgatggcggaagagggtctgccgccgaaagaagcgacgcgtaaatcgatgggacagattcagggcgcgctggttggtatcgctatggtgctgtcggcggtatttatcccgatggcgttcttcggcggctcaaccggggccatctatcgccagttctccatcactatcgtttccgcgatggcgctgtcggtactggtggcgttaatcctgacgccggcgctgtgcgccacgatgctgaaacccattcagaaaggcagccatggcgcgaccaccggcttcttcggctggtttaaccgcatgtttgataagagcacgcaccattacaccgacagcgtaggcaacattctgcgcagcaccggtcgttatctggtgctgtatctgatcatcgtggtgggtatggcatggctgttcgtccgtctgccgagctcgttcctgccggacgaggaccagggtgtattcctgagtatggcgcagctgcctgccggcgccacccaggagcgtacgcagaaagtgctggatgagatgacgaattactatctcaccaaagagaaggacaacgtggaatccgtgtttgcggttaacggcttcggtttcgccggccgcggccagaacaccggtatcgcgttcgtttcgctgaaagactggagccagcgtccgggtgaggaaaacaaagttgaagcgatcaccgcgagagcaatgggctacttctcgcagattaaagatgcgatggtcttcgcctttaacctgccggctatcgttgaactgggtaccgcgaccggctttgacttcgagctgattgaccagggcggtctgggccacgaaaaactgacccaggcgcgtaaccaactgtttggcatggtggcgcagcatcctgacgtgctgaccggcgtgcgccctaacggtctggaagatacaccgcagtttaaaatcgatatcgatcaggagaaagctcaggcgctgggcgtctccatcagcgacattaacaccacgctgggcgcagcctggggcggaagctatgtcaacgactttatcgaccgcggccgcgtgaagaaagtgtacatcatgtccgaagcgaaataccgtatgctgccggaagatatcggcaagtggtatgttcgcggcagcgatggtcagatggtgccgttctctgctttctcgacctcgcgttgggaatacggttcgccgcgtctggaacgctacaacggtctgccgtcactggaaatcctcggtcaggccgcgccaggcaagagtaccggtgaggcgatggcgctgatggaagagctggcgggtaaactgccttccggtatcggctacgactggaccgggatgtcttatcaggagcgactgtccggcaaccaggcccctgccctgtatgccatctcgctgattgtcgtcttcctgtgtctggcggcgctgtatgagagctggtcgattccgttctcggttatgctggtcgtccccttgggtgtggtcggtgcgctgttagccgccaccttccgcgggctaaccaacgacgtttacttccaggtgggtctgctgaccaccatcggcctgtcggcgaagaacgcaatattgatcgttgaattcgccaaagacctgatggagaaagagggcaaagggctgattgaggcgacgcttgaagcagtacgtatgcgtctacgtccaatcctgatgacatctctggcgttcatcctcggggtaatgccgctagttatcagctccggcgccggctccggtgcgcagaacgccgtcggtacaggcgtaatgggcgggatggtgaccgcgacgatcctggcgatcttcttcgtgccggtgttctttgtggtggttcgtcgccgctttagcaaaaaatcggaagatatagagcacagccatcaggttgagcatcattaa

SEQ ID NO: 238760 - DNA, 1194 bp, Klebsiella pneumoniae
atgaacaaaaacagagggttaacgcctctggcggtcgttctgatgctctcaggcagcttagcgctaacaggatgtgacgataaaccggctcaacagggagcccagcacatgccggaagtcggtattgtgacgctcaaatccgcacctctacaaataaccaccgaactgccaggccgcaccagcgcctatcgcattgcggaagtccgtcctcaggtcagtggcattattttaaaacgtaacttcgtggaaggtagcgatatccaggccggcgtctccctgtatcagatcgatccagccacctatcaggccagctatgacagcgccaaaggcgacctggcaaaagcccaggcggcggcaaacatggatcaactgacggtcaagcgttatcagaaactgttgggcaccaaatatattagtcaacaagactacgataccgccgttgcgacggcgcagcagagcaatgcggccgtggtcgcggcgaaagcggccgttgaaaccgcgcgcatcaatctggcctacaccaaagtcacctcgccgatcagcggccggattggtaaatccgccgtgaccgaaggggcgctggtacagaatggtcaaacgaccgccctggcaaccgttcagcagctggatccgatctatgttgacgtcacccagtcgagcaatgatttcctgcgcctgaagcaggagctagccgacggccgcctgaaacaggaaaacggcaaagcgaaagtggagctggtgactaatgacggtcttaagtatccgcagtccggcacgctggaattctcggatgtcactgttgatcagaccaccggctcaatcacgctacgcgctattttcccgaacccggatcacaccctgcttccggggatgttcgtccgtgcccgtctggaagaagggattaaccctgacgccctgctggtaccgcaacagggtgttacccgtacgccgcgcggcgacgccagcgtcatggtagtgggggaaggcgataaagtcgaagtccgccaggtcactgcttctcaggcgatcggcgataaatggctggtcactgacggtctgaaatccggcgatcgcgttatcgtcaccggcctgcaaaaaatcaaaccaggtgtgcaggtaaaagcgcaggaagtagcttctgatgataaacagcaagccgcaggcaacgcgccatcagaacaaaccaagtcttaa

SEQ ID NO: 238761 - DNA, 651 bp, Klebsiella pneumoniae; identical to SEQ ID NO: 138154

SEQ ID NO: 238762 - DNA, 3348 bp, Klebsiella pneumoniae
atgctgcacacgatctccaggcaacgcgccacgttcatctttattatcacgctgctctgttttattggccttttcagcccagtccagggccgcgccgcggatctccccgatcgggcagaggtgcagagccagctcaatacgttaaacaagcaaaaagaactgactccgcaggacaaactggtccagcaggatctgactcagacgctggaaacgctggataaaatcgagcgtatcaaaagcgagacggcacagctgcgacagcaggtcgagcaggcgccggcgaagctgcgccaggcggtggagagcctcaataacctgagcgatgtcccgaacgacgacgcgacgcgcaaaacgctaagtacgctctccctgcgtcagctggagtcgcgcgtcacccagacgctggacgatctgcagaatgcgcaaaacgatctggcgacctataacagccaactggtttccctgcaaacgcagccggaacgcgtgcaaaatgcgatgttcaacgcctcccagcagctgcagcagatccgcaatcgtctgaatggcacctcggtgggcgacgagaccctacgcccgacccagcaggtgctgttgcaggctcaacaggcattgctcaacgcgcagatcgagcaacagcgcaagagcctcgaaggcaacactatcctgcaggataccctacagaagcagcgtgactacgtcaccgcctggagcaaccggctggagcatcagctacagctgctgcaggaggccgtgaacagcaaacggctgaccctgaccgagaaaaccgcccaggaggcggttacccccgacgaaacggcgcgtattcaggccaacccgctggtcaagcaggagctggatattaaccatcagctcagcgagaagctgatccaggcaacagagaacggtaaccagctggtgcagcgcaatatccaggtcaaaaactggctcgaccgcgcgctgcagtctgaacgggatattaaagagcaaatttcagttctacgggggagcctgctgctgtcgcgtattctttaccaacagcaacagacattaccgtcggcggatgagctgcaggatatgaccaaccgcatcgccgacctgcggcttgaacagtttgaggtgaaccagcagcgcgacgcgctgttccagagcgatgcctttgtcgccaaactggaggaggggcacagcagcgaagtgaacgatgaagtccacgccgcgctactggaagtgatcgacatgcgtcgcgaactgcttgatcagttcaacaaacagttgggcaaccagctgatgatggccatcaacctgcagatcaaccagcagcagctgatgagcgtctcgagcagtctgaaggaaattctgacccagcaaattttctgggtgaacagcaataaaccgatggactgggagtggattaaggccttcccggaggcgctgaaaggtcagtttaaggcgatgaaaatcaccgtgaactgggaaaaagcgtggcctgcggtgtttgtcgctttcctggccggtttaccgctgctgttgattgccggcctcatccgctggcgtctgcagtggctcaaggattatcaggcaaagcttgcttcccaggtgggacagctgcgcaacgatacccaactgcatacgccgaaggcgatcctgatcgatctgatccgcgccttaccggtggtgctgttgattctggctatcggtctgatcttactcaccatgcagttaaatattagcggactgctgtgggcatacagtaaaaagctggctatgttctggctggtgtttggcctgtgctggaaagtgctggaaaagaacggcgtcgcggtcaaccactttaatatgccggcgcagttgaccagccactggcggcggcagattgttcgcgtcagcctggcgctgctgccgctgaatttctggtcggtgatttccgaactgtcgccgctgaacctgatggacgacgtgctggggcagttggtgattttcttcaacttactgctgatcgcggtgctggtttggccgatgtgccgggaaagctggcgcgataaagagtcgcacagcctgcgtctgctgacgatcacggtgttgtctatcgttccggtggccctgatggtgctgacggcaaccggctacttctacacgacgctgcgtctggcgggacgctggatcgagaccgtgtatctggtgatgatctggaacctgctgtaccagacggtgctgcgcggcctgagcgtggcggcgcggcgtatcgcctggcgccgcgcgctggcgcgccgtcaacatctggtgaaggaaggggcggaaggcgccgagccgcaggaagagccaactatcgctctcgagcaggtcaaccagcagacgctgcgcatcaccatgttggtgatggtcgcgctgttcgcagtgatgttctgggcgatttggtctgatttgatcaccgttttcgcctacctcgacagcattaccctctggcactacaacggtaccgaggcgggggccagcgtggtacgcagcgtgacgatgggcagtttgttgttcgccattgtggcgtcaatggtcgcctgggcgctgatccgcaacctgccgggtttgctggaggtgctggtgctgtcgcggctcaacatgcgtcaggggacctcctacgccatcaccaccattctcaactatgcgattatcgctatcggggcgatgacggtattcggggcgctgggtgtctcctgggataaactgcaatggctggcggccgcgctgtcggttggtttaggttttggtctgcaggagatcttcggtaactttgtctccggcctaatcattctgttcgaacgtccggtgcgcattggggatacggtcactatcggaaccttctcggggacggtaagcaaaatccgtattcgcgccaccaccatcaccgatttcgatcgcaaagaggtgattatcccgaacaaggcgttcgttaccgagcgcttgatcaactggtcgctctccgacaccgtgacccgggtggtgatccgcctcggcgtcgcctatggctcagacctggataaggtgaaagaggtgctgctgaaggccgcgcacgatcatccgaaagtgatgcaggagccggcgccagcggttttcttcaccaccttcggggccagtaccctggatcatgaactgcgtctgtatgttcgagaactgcgcgatcgcagctacacggtggatgagctcaaccgcgccatcgaccgcctgtgccgggagaatgacatcaacattgcctttaaccagctggaagttcatctgcgcaatgaaaaaggcgatgaagtcaccgaagtgaaacgggacgggaaaggcgacgatctggcgcccaccaccgcgtcctga

SEQ ID NO: 238763 - DNA, 900 bp, Klebsiella pneumoniae
atggaaaaagtcagtcaaaccccacacgacgcggtgtttcgccagatgctcatgcatcaggcggtcgcgaaggattttttgcagttgtacctccccgcgccgtttctggcgatctgcgaactggattcgctgcagctggtctccggtagctttgttgaagaggacctgcgcgccagctattccgatatcctttactcactgcgcacgcgtcatggagcgggctatgtgtacgcgctgattgagcatcagagtaccccggacaagctgatggcgtttcgcctgctgcgctatgcgctggccgccatgcagcgtcatctggacgccggccacgacacactgccgctggtggtgccgattctgttttatcacggcaaagtgagcccctggccctgggctcgcaactggcaacagctattcgccgatccggcgctggcgaaggcgctctatagcaatgattttccgctggtggacctcaccgtaatgccagataatcagatcgcccgtcatcggcggatggccatgctggagctgctgcaaaagcatatccgccatcgcgatctggccgagctgcaggtgccgctgattgcgctgatgacgcaaggctatctgacagaagcgcagctgaatacgctgctgcgctatatgttgcaggcgggaactacggaacatccgggggcgctgatccgcacgctggcggcgcagtcgcccaggcataaggagctgatgatgaccattgccgaatggctggaagagaaaggccgtaaacagggacagcaagagggtgagcaggaagctacccgcagcatcgccgccagaatgctggcgcgcggcctcgaacgtcaaaccgtgcaggagctcaccgggctgagcgatgaagaactcgccgcgctggcgccctga

SEQ ID NO: 238764 - DNA, 174 bp, Klebsiella pneumoniae; identical to SEQ ID NO: 210466

SEQ ID NO: 238765 - DNA, 528 bp, Klebsiella pneumoniae; identical to SEQ ID NO: 210467

SEQ ID NO: 238766 - DNA, 378 bp, Klebsiella pneumoniae; identical to SEQ ID NO: 138159

SEQ ID NO: 238767 - DNA, 552 bp, Klebsiella pneumoniae
atgaccgcaactgcacagcagcttgaatatctgaagaacagcatccagagtatcgaggattatccaaaacctggcattcttttccgcgatgtcaccagcttactggaagacccgaaggcctacgcgcttagcattgaactgctgaccgagcgctacaaagacgcgggtattaccaaagtggtagggactgaggcgcgtggcttcctgttcggcgccccggtcgcgctggcgctgggcgtgggctttgttccggtacgcaagccgcgtaagttgccgcgtgaaaccatcgccgagacctatgagctggagtatggcaccgatcagctggagatccacgttgacgccattaaaccgggcgataaagtgctggtggttgacgatctgctggcgaccggcggcactatcgacgccacggtcaaactgatccgccgcctcggtggcgaagtgcacgatgccgctttcattatcaatctcttcgatctgggcggcgaacagcgcctggagaagctggggatccactgctacagtctggtgccgttcccgggccactaa

SEQ ID NO: 238768 - DNA, 1908 bp, Klebsiella pneumoniae
atgagttatcaggtcttagcccgtaaatggcgcccacaaacctttgctgacgtcgtcggccaggaacatgtgctgaccgcactggcgaacggcttgtcgttagggcgcattcatcacgcttatcttttttccggtacccgcggggtcgggaagacctccatcgcccgtctgctggcgaaagggttaaactgtgaaaccggcatcaccgccaccccctgcggcgtgtgcgataactgccgggaaattgaacaggggcgctttgtcgatctgattgagattgacgccgcctcgcgaaccaaagtcgaagatacccgcgatctgctggacaacgtccagtacgcgccggcccgcggccgctttaaggtctatctcatcgacgaagtccatatgctgtcgcgtcacagcttcaacgcgttgttaaaaacgctggaggagccgccggcgcacgtcaaattcctgctggcgacgacggatccgcagaagctgccggtaacgatcttatcccgctgcctgcagttccacctgaaggcgctggacgttgaacagatccgccatcagctggagcatattcttggcgaagagcagattgcctttgagccccgcgcgctgcagctgttgtcgcgggcggccgatggcagcctgcgcgatgccttaagcctgaccgatcaggcgattgccagtggggaagggcagctgacggccgcatcggtgagcaccatgctcggcacccttgatgacgatcaggcgctgtcgctgattgaagcgctggttgctgccgacggcgagcgggtcatggcgggcgtcaatgacgccgccgcacgcggcgtcgagtgggaggcgctgctggtcgagatgcagagcctgctgcaccgcatcgccatggttcagctgtcgccttcggcgctgggcgccgacatggccacggtcgaagtgcggatgcgcgaactggcgcgaaccgtaccgcccggcgacgttcagctctactaccaaacgctgctgattggccgcaaagagctgccttacgccccggaccggcggatgggcgtcgaaatgacgctgctgcgtgccctggcgtttcatccgcgtaagccgctgccggagccggaggtgcagccggcacaggccgccgcgcccgcgccgcgtcagccggttgcccccgccgcgccgccgccacagtcgccgcagagtttgccgccgaccaccagccaggtgctggcggcccgcagccacctgcagcgcagtcagggagcaaccaccccaaaaaagagtgaaccggcagccgcttcccgcgcgcggccggtgaataacgctgcgctggagcgactgagttcgattaccgagcgcgtccaggctcgtccggccgcggccgcgctggagcaggccccggcgaagaaagaggcctatcgctggaaggcgacgacggtggtggaagagagcaaagtcgaagtcgccacgcccaaagcgctgaaaaaggcgcttgagcatgagaagacgccggagctggcggccaagctcgccgaagaagcggtcgatcgcgacagctgggcggcggaagtgagccagctggcggtaccgaagctggtcgagcaggtggcgctcaacgcgtggaaagagcaggagggcagccgcgtctgtctgcatctgcgtcccagccagcgccacctcaattccgccagcgcgcagcaaaagctggctgaagcgctgggggtgttgtacggtacgccggttgaattgaccatcgtggaagacgataatcccgcgatgcgtacgccgctggagtggcggcaggctatttatgaagagaagctcgcgcaggcgcgcgaagccattatcgcggataataacattcagaccctgcgtcgtttcttcgacgccgatctggatgaagagagtattcgccccatttga

SEQ ID NO: 238769 - DNA, 333 bp, Klebsiella pneumoniae
atgtttggtggaaaaggcggcctgggtaacctgatgaagcaggcccagcagatgcaagaaaaaatgcagaagatgcaggaagagatcgctcagctggaagtaaccggcgaatccggcgcgggtctggtgaaagtgaccattaacggcgcgcacaactgccgccgtgtggagatcgacccaagcctgctggaagacgacaaagagatgctcgaagatctggtggctgccgcgttcaacgacgccgcgcgccgtatcgaagagacccagaaagagaagatggcttccgtttctgccggtatgcaactgccgccaggcttcaagatgccgttctga

SEQ ID NO: 238770 - DNA, 606 bp, Klebsiella pneumoniae
atgcaaaccagcccgctgttaactcagcttatggaagcgctgcgctgtctgccgggcgtcggcccgaagtcagcgcagcgcatggcgtttaccctgctgcagcgcgatcgcagcggcgggatgcgcctggcgcaggcgctgacgcgtgcgatgtcggagatcggccactgcgccgattgccgcaccttcaccgagcaggaggtgtgcaatatctgcagcaacccgcgtcgccaggaaaacggccagatctgtgtggtagagagtccggcggacatctatgccattgagcagaccgggcagtattccggccgctacttcgtgctgatggggcacctgtcgccgctcgacggcatcgggcctgatgacatcgggctcgatcgcctggagcaacggctggaggcggagtcgatcaccgaggtgatcctcgccaccaacccgaccgttgagggcgaggcgacggccaactacatcgcagagctgtgcgcgcagtatggcgtcgacgccagccgaatcgcccacggcgtgccggtgggcggcgagctggagatggtcgacggcaccacgctgtcccactccctggccggtcgccacaagattactttctga

SEQ ID NO: 238771 - DNA, 1875 bp, Klebsiella pneumoniae
atgaaaggacaagaaactcgtggttttcagtcagaagtaaaacagcttctgcacctgatgatccattccctctattccaacaaagaaatctttctgcgtgagctgatttccaacgcctctgatgcggccgataagctgcgtttccgcgcgctgtcgcagccggatttgtatgagggagacggcgagctgcgcgtgcgggtttcgtttgataaagacaaccgcaccctgaccatcgccgataacggtatcggtatgaaccgggaagaagttatcgaccatctcggcaccatcgccaaatccggcaccaaagcgttcctcgaatcgatgggttccgaccaggcgaaggatagccagctgatcggtcagttcggcgtcggcttctattcggccttcatcgtggcggacaaagtgaccgtgcgtacccgtgcggcgggcgacaagccggaaaacggcgtgttctgggaatccgccggcgaaggcgaatataccgtagctgatatcaccaaagccgatcgcggcaccgaaatcaccctgcatctgcgcgaaggcgaagatgatttcctcaacgactggcgcgtgcgctctatcatcagcaagtattccgaccatatcgcgctgccggttgagattgaaaaacgggaagagaaagacggcgaaaccgtggtttcgtgggaaaaaatcaacaaggcgcaggccctgtggacccgcagcaaatccgaagttaacgacgacgaatacaaagagttttataagcatatcgctcacgactacagcgacccgctgacctggagccacaaccgcgtggaaggtaagcaggagtacaccagcctgctgtatatcccgtcgcaggcgccgtgggatatgtggaaccgcgatcataaacacggcctgaagctgtacgtccagcgtgtgttcatcatggacgacgccgagcaatttatgccgaactacctgcgcttcgtgcgcggcctgatcgattccaacgatctgccgctgaacgtctcccgtgaaatcctgcaggacagcagcgtgacccgcaacctgcgcaccgcgctgaccaaacgcgcgctgcagatgctggataagctggcgaaagacgacgctgaaaaataccaaaccttctggaaacagttcggcctggtgctgaaagagggcccggcggaagatccgagcaaccaggaagcgatcgccaaactgctgcgtttcgcaaccacccataccgactcctccgcgcagaccgtgtcgctggaagagtatgtctcgcggatgaaagaaggccaggagaagatctactacatcactgccgacagctatgcggcggcgaagagcagcccgcacctcgagctgctgcgtaagaaagggattgaagttctgctgctctccgatcgcatcgacgagtggatgatgagctacctgaccgagttcgacggcaaagcgttccagtctgtcgctaaagccgacgagtcgctggacaagctggcggatgaagtggacgagtccaccaaagaagccgaaaaagcgctggagccgttcgttgagcgggtgaaaaacctgcttggcgaccgggtgaaagaggtgcgtctgacccatcgtctgaccgacaccccggcgatcgtcaccaccgacgccgacgagatgagcactcagatggcgaagctgttcgcggcagcgggccaggcggcgccggaagtgaaatacatcttcgaactgaacccggcgcatcagctggtgaaacgcgcggccgatacccaggacgacgcccagttcggcgaatgggtggaactgctgctggatcaggcgctgctggccgagcgcggcacgctggaagatccgaaccagtttatccgccgtatgaaccagctgctggcttcctga

SEQ ID NO: 238772 - DNA, 645 bp, Klebsiella pneumoniae
atgcgtattattctgcttggcgctccgggcgcgggtaaaggaactcaggctcagttcatcatggagaaatacggtattccgcaaatctccaccggcgatatgctgcgcgcggcggtaaaatccggctctgagctcggtaagcaagcgaaagacattatggacgcaggcaagctggtgaccgatgagctggtcatcgcgctggtgaaagagcgtatcgcccaggaagattgccgtaacggcttcctgctggacggcttcccgcggaccattccgcaggctgacgccatgaaagaggcgggcattaccgttgattacgtgctggaattcgacgtgccggacgaactgatcgtcgaccgcatcgttggccgtcgcgtccacgcggcatccggtcgcgtataccacatcaaattcaatccgccgaaggtggaaggcaaagacgacgtgaccggcgaagagctgaccacccgtaaagacgatcaggaagagaccgtgcgtaagcgtctggtagaataccatcagatgacagcgccgctgatcggctactacaccaaagaagcgcaggcgggcaacaccaaatacgccaaagtcgacggcaccaaagcggtagctgacgtgcgcgccgaactggaaaaaatcctcggctga

SEQ ID NO: 238773 - DNA, 963 bp, Klebsiella pneumoniae
atgcatcagacgaaaacaggtatcttgctggccaatttaggcactcccgatgcgcccacccccggggcggtgaagcgctatctgcgacaattcctcagcgacaaacgggtggtggatacgtctcgtctgctatggtggccgctgctgcgcggcgtcatactgccgattcgctccccgcgcgtggcgaagctctatcagtccgtgtggatggaagagggatcgccgctgatggtgtatagtcgtcgccagcagcaggcgctggctgccaggctgccggataccccggtggcgctgggcatgagctatggttcaccgtcactggccagcgcggtggatgacttactggcgcagggggtggagcacatcgtggtgctgccgctgtatccgcaatattcctgctcgacggtggccgccgtctgggacgagctggcgcggattctggcgaaaaagcgcgccattccgggtatctcgtttattcgcgactatgccgaacatccggactatatccatgcgctggcggccagcgtgcgcgcttccttcgctgtccatggggaaccggatctgctgctgctctcctatcatgggatcccgcagcgctatgccaaccagggcgatgattatcctcagcgctgtcgcgatacgacgcgggaactggtttccgcgctggggctgccgccggagcgggtgatgatgactttccagtcgcgctttggccgggaaccctggctgacgccgtacaccgatgaaacgctaaagatgctcggcgagaaagggacgaagcatattcaggtgctgtgcccggggtttgccgccgactgtctcgaaacgctggaagaaatcgctgtccagaaccgggaaatattcctcgaagcgggcggcaagcaatatgaatatattccggcgcttaatgcggacgcagcgcatattgagatgatggtcaatctgacggcgccttatcgctga

SEQ ID NO: 238774 - DNA, 1305 bp, Klebsiella pneumoniae
atgaaatttcccggtaaacgcaaatctaaacactattttcccgttaacgcccgcgatccgctgctgcagcaaattcagccggagaatgaatccagcgtctcctgggtggtcggtatcgaccagacgctggtggatatcgaagcgaaagtggatgaggcgtttatcgtgcgctacggcctgagcgcgggccattcgctggtgattgaagatgacgtcgccgaggcgctgtaccaggagctggtgcgcaacaatctcattacccatcagtttgccggcggcaccatcggcaataccatgcacaactactcggtgctggcggacgatcgctcggtgctgcttggcgtgatgtgcagcaatatcgaaatcggcggctacgcctatcgttacctgtgcaatacctccagccgcaccgatctgaactatctgcagggcgtcgacggcgccattggccgctgctttaccctgatcggtgacagcggcgagcgcaccttcgccatcagcccgggccacatgaacaagctgcgtccggaaagcattccggaagcggtgatcgccggcgcctcggcgctggtgctgacctcttacctggtccgctgcaagccgggcgagccgatgccggacgcgacgatgaaggctattgagtatgccaaaaagcacgatgtgccggtggtgttaaccctcggaaccaaatacgtgattgccgataacccggcgtggtggcaggagttcctgcaggagcatgtctctattctggcaatgaacgaagaggaaggggaagcgctgaccggctttgccgatccgctgtcagcggcgaataaggcgctggactgggtcgacctggtgctgtgcaccgccggcccggcgggcctgtatatggcgggcttcaccgaagaagaggcgaagcgtaaaacccagcatccgctgctgccgggggcgatcccggagtttaaccagtttgaattcagccgcgcgatgcgtcaccaggattgcgttaatccgctgcgcatatattcccatatcgctccctatatgggcggccccgagaagatcatgaacaccaacggcgcaggcgacggcgcgctggcggcgctgctgcatgacatcaccgccaataactaccaccgcaataacgtccccaactccagcaagcacaaatgcaaatggctgacctactcctcgctggcgcaggtgtgtaaatatgccaaccgcgtgagctatcaggtgctgaaccagcactcgccgcgtttaactcgcggcctgccggagcgtgaggacagcctggaagaggcgtactgggatcggtaa

SEQ ID NO: 238775 - DNA, 1677 bp, Klebsiella pneumoniae
atgcaccacgcaacaccgcttatcaccaccattgtcggcggcctcgtgctcgcctttattctcggcatgattgccaataagctacgtatttctcctctggtgggatatctcttagcgggcgtgctggccggacctttcacccctggctttgttgctgacaccaaactggctccggaactggcggaacttggcgtcattctgctgatgttcggcgtcgggctgcatttctcacttaaagacctgatggcggtaaaatcgatcgccatccccggggctatcgcccagatagccgtggcgacgctgctgggtatggcgctctccgccgccctcggctggtcgctgatgaccggcatcgtctttggcctgtgcctctccaccgccagtaccgtagtgctgctgcgcgcgctggaggaacgacaactgattgacagccagcgcgggcaaattgccatcggctggctgattgtggaagacctggtgatggtcctgacgctggtcctgctgccggcgattgccggtatggcggagaaaggcaacgtcggcttcgcgtccctggccctcgacctcgggatcaccattggcaaagtggtggcctttatcgccattatgatgctggtcggccgccggctggtgccgtggatcatgtcgcgcagcgccgccaccggctcacgcgagctgttcactctgtcggtgctggccctggcgctgggcatcgccttcggcgccgtggagctgtttgatgtctcttttgccctcggcgccttctttgccggcatggtgcttaacgaatccgagctcagccaccgcgccgcccatgacaccctgccgctgcgcgacgccttcgcggtgctgttcttcgtctccgtcggcatgctgtttgacccgatggtgctggtccaacagccgctggcggtgctggcgacgctggcgattattatctttggtaaatccgcagccgcctttttccttgtgcggatgtttggtcactcgccgcgcactgcgctgaccatcgccgccagcctggcgcagattggcgagtttgcctttattctcgccggcctgggaatggcgcttaacctgctgccgcaggccggacaaaatctggtgctggccggggcgatcatctcaattatgctcaacccggtgctgtttaccctgctggaaaaatatctcgataaaaccgaaaccctcgacgagcagacgctggaagaggtcctggaagacgagaagcaggtgccggtcgatatctgcaaccacgcgctgttggtaggcttcggccgcgtcggcagcctgctgggcgagaagctaatggcccaggggatcccgctggtggtggttgaaacctcgcgcacccgcgtggatgagctacgcgagcgcgggatcagcgcggtgctcggcaatgccgccaatgaagagatcatggagctggcgcatctcgattgcgcccgctggctgctgctgacaatccctaacggctacgaggccggagagattgtcgcttccgcacgggaaaaatgtccgaatatcgagattatcgcccgcgcccattatgatgacgaagtggactacattatcgatcgtggagccaatcaggtggtgatgggcgaacgggaaattgcccgcgccatgctgcggcttctggaaacgccaccggccggcgaagtggtcaccggctga

SEQ ID NO: 238776 - DNA, 1221 bp, Klebsiella pneumoniae
atggcaatcaatcagaccgctcaacccttgtccggccccgctgcgccgccgcaaaaagcacgcacctcgtttggcatcttaggcgcgatcagcctgtcccatttgcttaacgatatgatccagtcgcttattctcgctatctacccgctgctgcaggcggagttctcccttaccttcgtgcagatcggcatgatcaccctgaccttccagctcacctcatcgctattccagccggtgattggctacatcaccgataaacgctcgatgccgtggtcgctgccggtgggcatgtgcttcaccctctgcggtttgattctcctcgcgctggccggtagcttcggcatggtgctgctggccgccgcgctggtaggtaccggctcctcggttttccatccggaatcatcccgcgtggcgcggatggcctccggcggccgtcacggcctggcccagtcgctgttccaggtgggcggcaatttcggcagctcgcttggcccattgctggcggcggtgatcatcgccccgtacggcaaaggcaacgtcgcctggtttgtgctggccgctctgctggctattgtcgtgctgtcgcaaatcagccgctggtatgccgcgcagcatcgaatgaataagggcaaaccgaaaccggccatcgttaatccgctgccgcgcaagaaggttattctggcggtaggcattctgctgatgctgattttctcgaaatatttctatatggcgagcattagtagctattacaccttttatctgatgcataaattcggcttaacggtgcaaaacgctcagcttcatctgtttgccttcctgttcgcagtggctgccgggacggtaattggcgggcctgttggcgataaaattgggcgtaaatatgtgatttggggctctatcctcggcgtagcgcctttcacccttgttttaccctacgccagccttgaatggacggggattttaacggtgatcattggttttatcctcgcctcggccttttccgctattctggtctatgcgcaggaactgctgccgggacgcatcggcatggtttctggcctgtttttcggcttcgcctttggcatgggcggccttggcgccgcggtgttaggcctgctggcggaccataccagcattgatctggtttataaaatctgcgccttcctgccgctgctgggattcctgacgatattccttcctgataaccggcaaaaagcctga

SEQ ID NO: 238777 - DNA, 1653 bp, Klebsiella pneumoniae
atgcattatttcaaacacagcgtagcgctggcgctattcgccgctttatcgctgggcagcctgtcggcacaggcctatgagcaggataaaacctataaaattaccatcctgcacaccaacgatcaccacggccatttctggcgcaatgactacggcgaatatggcctggcggcgcagaaaacgctggtcgatggcatccggaaagaggtggcggcggaagggggaagcgtcctgctgttatccggcggcgatattaataccggcgtaccggagtctgatttacaggatgcagagcccgattttcgcggcatgaacctcatcggctacgacgcgatggcggtgggaaaccatgaattcgataatccgctgagcgtactgcgccagcaggaaaagtgggctaagttcccgttcctgtcggccaatatttatcagaaaagcaccggcgaacggctgttcaaaccctgggcgttgtttaagcgcggtgggctgaaaatcgcggtgattggcttaaccaccgacgatacggccaagattggcaatccggaatatttcaccgatatcgaattccgcaaaccggcggaagaggcgaagctggttatccaggagctgcagcagaatgaaaagccggacgtgatcctggccaccacccatatgggccattacgacaatggcaaccacggctctaatgcgccgggcgatgttgaaatggcgcgaagtttacctgcgggatcgctggcgatgatcgtcggcggtcactcgcaggatccggtatgcatggcggcggaaaataaaaagcaggtcgattatgtgccaggcaccccgtgcgctccggatcgtcagaacggcatctggatcgtccaggcgcatgagtggggcaaatacgtcggccgcgccgattttgagttccgcaacggcgagatgaagctggtgcactatcagctgatcccggtcaacctgaagaaaaaagtgacttacgataacggccaaagcgagcgggtgctgtatacgccgcagatcgccgagaacccgcagatgatgtcgctgctgacgccgttccagaacaaaggcaaggcgcagctgcaggtcaaaatcggcagcgtgaatggtcatctggagggcgaccgcagtaaagtgcgctttgtgcagaccaatatgggccacctgctgctggcggcgcaaatggcgcgcagcaacgcggatttcgcggtgatgagcggcggcgggatccgcgactccattgaggcgggggatatcacctacaaagatgtgatgaaggtccagccgttcggcaatgtgctgacctatgtcgatatgagcggcaaggaggtagtggattacctgaccgccgtcgcgcagatgaagccggattccggcgcttatccgcagtttgccaacgtcagtttcgtggccaaagacggtaagctgaacgatctgaaaatcaaaggcgaaccggtggatccggcgaagacctatcggatggcgacgctgagctttaacgccaccggcggcgatggctatccgaacatcgccgataaacccgggtatgtgaataccggctttatcgatgccgaagtgctgaaagagtatatcgagaagaactcgccgctggatgccgccgcctatgagccgaaaggcgaggtgagctggcagtaa

SEQ ID NO: 238778 - DNA, 480 bp, Klebsiella pneumoniae; identical to SEQ ID NO: 134872

SEQ ID NO: 238779 - DNA, 795 bp, Klebsiella pneumoniae
atgggcctgttaaaccggataaaaatgctgtggcgagccgccgtcggctcgtcttattcctggcctgcgatggatatcgtcctgcccggcgaacgctatttgcacctcgtcggcagtatccatatgggcacccgcgacatggcgccgccgccggcgaagcttctgaaaaaaatacgccaggccgatgcgttaatcgtcgaggccgatatcagcggcaatgaaaccccgtttagcaatctccccacttacccaccgctggcggaacgcctgagcgatgcgcagctgagcgagctagaggcgcgagccggcgagctgggcctgtcggtcgggctgttcgacagccagccgctgtggcaggtggcgatggtcctgcaggccacccaggcgcagaagctggggctgcgaccggattacggcatcgattatcagttgctgatggccgcccgcgagagcaacatagcggtgatggagctggaaggcgccgacagccaaatcgcgctgctgcgcgatctgcccgacggggggatggcgctgctagaggatacgctgacccactggcgcaccaacgcccgtttactgcaggtcatgatcggctggtggctggagcaaccgccgtcgcgcggcgcggtatcgctgccgacgacctttagccagtctttatatgatgtgctgatgcaccagcgcaacctcgcctggcgcgagacgctgctggccttgccgccggggcgctacgtggttgccgtcggcgcgctgcacctgtatggcgaagggaatctgccggatatgctgacataa

SEQ ID NO: 238780 - DNA, 2502 bp, Klebsiella pneumoniae
atgtctaacactatcgacctgacgctggatggcctctcctgcggccactgcgtcaaacgcgtgaaagagagtctggagcagcgtcctgacgttgagcaagcggaagtcaccctcactgaagcccatgtgacgggcagcgccagcgcgcaagcgctgattgataccgttaaacaagccggatacggcgcggagctcagccacccaaaggctaaaccgctggcagaatcatcaatcccgtcggaagcactgacagcggccactcctgagcttccggcagcccatgacgaagatgacagtcaacagctgctgatcaacggcatgagctgcgccagctgcgtctcccgggtacaaaacgcgcttgccgcggtgccgggcgtctcacaggcacgggttaacctggcggaacgcacggcgctggtgatgggcagtgcgtccgccgcagaattagtgcaggcggtggagaaagccggctatggcgcggaggcgatcgaagacgatctgcaacgccgcgaacgccagcaggaaaccgccctcgccacgatgaagcgttttcgctggcaggcgattgtcgccctgctggtcggcgtgccggtgatggtctggggcatgatcggcgataacatgatggtcagcgacgacaaccgttcgctgtggctggttatcggccttgtcaccctcgccgtcatggtcttcgccggcggccacttctaccgcagcgcgtggaaaagcctgaaaaacggcaccgctaccatggatacgctggtggcgctcggcaccggcgtcgcctggctgtactcgatgagcgtcaacctgtggccgcagtggttcccgatggaagcccgccatctctattacgaagccagcgcgatgattatcggcctgattaacctcggtcatatgctggaggcccgcgcgcgtcagcgctcctcgaaagcgctggaaaaactgctcgacctgacgccgccttcggcgcgggtcgtcacgcccgagggcgagaaagatctgccgctcgcggaagttcaggccggcatgacgctgcgcctgactaccggcgaccgcgtcccggtcgacggcatgataagccagggcgaagcctggtttgatgaagcgatgctcaccggcgaaccggtgccgcagcaaaaaggcgatggcgacgccattcacgccgggaccgtggtgcaggatggcagcgtgctgtttaccgccagcgccgtcggcagccagaccacgctggcaagaattatccgcatggtgcgccaggcgcagagcagcaaaccggagatcggccagctggcggataaaatctccgccgtatttgttccggcggtggtcgtcattgcgctgatcagcgctgcgatctggtacttcttcggcccggcgccgcagatcgtctataccctggtcattgccaccacggtactgattatcgcctgtccgtgcgccttaggcctggcgacgccaatgtcgattatctccggcgttggccgggcggcggagtacggcgtgctggtgcgcgatgccgatgcgctgcagcgcgccagtgaactcgacaccctggtgttcgataaaaccggcaccctgaccgaaggcaagccgcaggtggtggcggtgaaaactttcgctggcgttgatgagcataccgcgctgcgtcttgccgccgcgctggagcagggctcaagccatccgctggcgcgagcgatccttgataaagctgccgacggcccattgccggaagtcagcggcttccgcaccctacgcggccttggcgtcagcggcgaggcggaaggtcatcgtctgctgctcggtaaccaggcgctactcaacgagcagcatatcaataccgctgaggtggaaagcgagatgacagcccaggcctcacgcggcgccacgccggtgctgctggcggtggatggtcaggccgccgcgctgttcgccatccgcgacccgctgcgcgaagacagcgtcgacgccctggcgcgtttgcatcggcagggctaccggctggtgatgcttaccggggataaccccaccaccgcgaaggctatcgccaaagaagccggcattgatgaagtgatcgccggcgtgctaccggacggtaaagccgatgccattaagcgtctgcagagccaggggcacaaagtggcgatggttggcgatgggattaacgacgccccggcgctggcccaggcggatgtcgggatcgccatgggcggcggcagcgatgtcgctattgaaaccgcggcgatcaccctgatgcgccatagtcttcacggcgtggccgatgcgctggcgatttcgaaagcaacgttacgcaatatgaagcagaacctgctgggcgcgtttgtctacaactcgctgggtatcccgattgccgccgggatcctctggccgctgaccggcaccctgctcaacccggtggtcgccggcgcggcgatggcgctgtcgtcgatcaccgtggtgagtaacgccaaccgcttgctgcgctttaaaccaaaagagtaa

SEQ ID NO: 238781 - DNA, 411 bp, Klebsiella pneumoniae
atgaatatcagcgatgtggcgaaaaaaaccggcttaaccagcaaagcgattcgtttttatgaagagaaggggctggtgacgccgccgttgcggagcgaaaacggctaccgcacctatagtcagcagcatctcgatgagctgacgctgctgcgccaggcgcggcaggtggggtttaacctggaagagtgccgcgagctggtggccctgttcaacgacccgtcgcggcacagcgccgatgtgaaaaaacgcacgctggagaaagtggcggatatcgagaaccatatccgcgagctgcaaaatatgcgcgcgcacctgctggcgctggccgaatcctgtcccggcgacgacagcgcggagtgcccgattatcgataatctttccggctgctgccatcgcaaggcgcaggcttaa

SEQ ID NO: 238782 - DNA, 459 bp, Klebsiella pneumoniae
atgatcggcatgatcctcgcacacccccatctgttctggctaagcctcggcgggctgctgctggcggccgagatgctgggcggcagcggatacctgctgtggagcggcgtcgccggcgtggtgaccggcgccctgacctggctcctgccgctgagctgggaatggcaaggcacgctgtttgccgttctcaccctgctggcggcgtggctgtggtcgaaatggctgcgcaagcgcgtcaaaacgcagcgcccggccgatgcccagctcaaccagcgcgggcagcaactggtgggccgccgcctgacgctggatgccccgctggtgaacggccgcggccacgtccgcgtgggcgacagctcctggccggtgattgccgatgaagacttcgcggcgggcagcaaggttgaagtgattgccgtagaagggattacgctacgaatcagacccgccgtccgttaa

SEQ ID NO: 238783 - DNA, 918 bp, Klebsiella pneumoniae
atgctaatttttattcctatccttattttcgtcgcgctggttattgtggccgcggcggtgaaaattgtcccgcagggctaccagtggacggtggagcgcttcgggcgttttacccagacgctgcagccgggattaagcttagtcgtgccgtttatggaccgtatcggccgcaaagtgaacatgatggagcaggtgctcgatatcccctcgcaggaggttatctcccgggataacgccaacgtcaccatcgacgcggtctgctttattcaggtgatcgacgcgccaaaggccgcctacgaggtcagcaatcttgagcaggcgatcgtcaacctgacgatgaccaacatccgtaccgtgctcggctcaatggagctggacgaaatgctctcccagcgcgacagcattaacacccgcctgctgcatatcgttgacgacgccaccaacccgtggggggtgaaaatcacccgcgtcgaaattcgcgacgttcgcccgccggcggagcttatcgcctcgatgaacgcccagatgaaagccgaacgtaccaaacgcgcgtacatccttgaggccgaaggggtgcgacaggcggaaattctgaaagcggaaggggaaaagcagtcgcagatcctcaaggccgagggcgaacggcagtccgcgttcctgcaggcggaggctcgcgaacggtccgccgaagcggaagcccgcgccacccaaatggtctcctcggcgatcgcctcgggcgatattcaggcgatcaactacttcgtggcgcagaaatacaccgatgcgctgcagcagattggcgccgctaacaacagcaaagtggtattgatgccgctggatgccagcagcctgatgggatcgatcgccgggatcagcgagctgatcaaagaaggcgctggcgatcggaaaaaatcatga

SEQ ID NO: 238784 - DNA, 678 bp, Klebsiella pneumoniae
atgaaggaaaataacgcgcttttgcgtctcgacggtgtggggtttaagaccgacgacgccgttattttacacaatatcaattttcagcttcgcgccggagaattcaagttgattaccggcccttccggctgcgggaaaagtaccttgctgaagattatcgcctcgctgctcagcccaacctccgggcgcctgttcttcgacgatgcggatgtcgcgacgctgtcgccggaaaggtatcgccaacaggtctcttactgcgcgcagacgccggccctgttcggtgattcggtttacgataatctgatttttccgtggcagatccgcaataaacaaccggatccgcaggcgctgctggccgacctgcagcgctttggccttgacgaaaatatgctggaaaaatccattaacgaactctccggcggggaaaagcagcgcgtatcgctgatccgtaatctacaatttctgccgcgcgtgctgctgctggacgaaattaccagcgcgctggatgaaagtaataaacagaatgtgaatgaaattattcatggctacgcaacggaaaaacaggtcgctgttctgtgggtcacccacgatcgcaatgaaatttcgcatgccgatgaagtgattacgctgcaacctgccggcggaaatatgcaggaggtacagcatgaacgggcataa

SEQ ID NO: 238785 - DNA, 783 bp, Klebsiella pneumoniae
atgaacgggcataacattacgaacgaatcgctggcgctgtcgatggtgctggtgctggtcgctattctggtcagctatcgggaaaagctggcgctggaaaaagatattatctggagtatttgccgggcgatcgtgcagctgataatcgtcggctatgtgctgaaatatatctttaacgtcaatcatgcggttctgacgctgttgatggtgctgtttatctgctttaacgcggcgtggaatgcgaagaagcgcagtaaatatatcgacaaagcttttatctcgtcgtttatcgccatcactactggcgctggactaacgctggcggtactggtgttttctggctcgatcgccttcgtgccgatgcaggtgatcccgattgccgggatggtggccgggaacgccatggtggcggtagggctgtgctacaacaatatgggccagcgcttcagcagcgagcagcagcagattcaggagaagctgagcctcggcgcgacgccgaagatggcctcagcgcggctgattcgcgagagcattcgcgcgtcattgattcccaccgtcgattcggcgaaaacggtcggtctggtgagcttgcctgggatgatgtcggggctgatttttgccggtattgacccggtgaaggcgattaagtaccagatcatggtgacctttatgctgctgtcgaccgccagcctgtcgacgattatcgccggctatctgacctaccggaagttcttcaacgcccgccatcagctggtggtgacgcagctgaaaaagcgcccgtga

SEQ ID NO: 238786 - DNA, 855 bp, Klebsiella pneumoniae
atgtccgaacagaatattgtcaacattagcgaagcgaacctgcagcagacgctacagcagtccatgaacgttccggtgctgttttatttctggtctgcccgcagccagcactgcgaacagctgaccccggtgctcgagcgcctggcagcccaatacaacggccagttcacgctggcgaaggtcgattgcgacgccgagcagatgctcgcctcacagtttggtctgcgcgccatccctacggtttatctgttccagaacggccagccggtggatggttttgaaggcccgcagccggaagaagcgatccgcgccctgctggataaagtcctgccccgtgaagaggagctgaaagctcagcaggcgctggccctgatgcaggaagaaaaatacgccgatgccctgccgctgctgaaggaagcctggcagctgtcgaatcaggaaagccagattggcctgctgctggcggaaacgctgattgctctgcaccgttccgatgaagcggaaagcgtgctgaaaaccattcctctgcaggatcaggatacccactatcagggtctggtggcgcagattgagctgctcaaacaggccgccgacaccccgcaaatccagcagttgcagcagcaggtggaacagaatcctgaggatgcgcagttggcctcccagctggcgctgcagctgcatcaggtcgggcgtaatgaagaagcgctggccctgctgttcagccatctgcagaaagatttaggcgccggcgatggccaggcgcgcaagatgctgcaggagatcctcgccgccctcggtaccggcgatgcgctggccgccaaatatcgtcgtcagctctattcgctgctgtactaa

SEQ ID NO: 238787 - DNA, 771 bp, Klebsiella pneumoniae
atgcaaaaaacggttttagtgacaggctgttccagcggaattggtctggaaagcgcgctggatttaacccgccagggctttcgcgtgctggcggcctgccgcaaagcagaggatatcgcgcggatgcaggatctggggctaaccggtattttgctcgatctggatgacccgcagagcgtggagcgcgcggcagcggaggtgattgcgctgaccgataatcgtctctacggcctgttcaataacgccgggtatggcgtctatggcccgctgaacaccatcagccgccagcagatggaacagcaattttccgctaactttttcggcgcgcatcagctcaccatgctgctactgccggcgatgacgccgcacggcgaagggcgcatcgtgatgacctcctcggtgatggggcttatcgccagtcccggccgcggagcctatgccgccagtaaatatgccctcgaggcgtggtccgacgcgctgcgcatggagctgcgccacagcggtattcaggtcagcctgattgaaccgggcccgatccgcacccgctttaccgataacgtcaaccagacgcaaagcgataagcccgtagaaaatccgggtatcgccgcccgctttaccctcgggccggaggcggtggtggaaaaagtgcgccatgcttttaccagcgataaaccaaagctgcgctatccggtcaccctggtcacccacgcggtggcgctgcttaagcgcctgctgcctgcccgcgcgatggacaaaattatccacggctga

SEQ ID NO: 238788 - DNA, 594 bp, Klebsiella pneumoniae
gtgcctttcctgttgttgttcctgtttacctgccgcgcgatggcggcggacacgctgctgatcctcggcgacagcctgagcgctggctatcggatggcggccaacgccgcctggcctgcgctgctcaatgagcagtggcaggcgaaaacgccggtggtgaacgccagcatcagcggcgatacctcgcagcaggggttggctcgcctgccagcgctgcttaagcagcaccagccgcgctgggtgctggttgagctcggcggcaatgacggactgcgcggttttccgccgcagcagaccgagcagacgctgcgcaccattattaaagatatcaaagcggccaacgccgagccgctgctgatgcaaattcacctgccggcgaactatggccgccgctataatgaagccttcggcgcgatttacccggccctggccaaagagttcgctattcctctcctgcccttttttatggaggaggtctatctcaagccgcaatggatgcaggacgacggcattcatccaaatcgcgacgcgcagccgtttatcgccgactggatggcgaagcggctggctcccttagttaatcatgactcctga

SEQ ID NO: 238789 - DNA, 687 bp, Klebsiella pneumoniae
atgccagcggaaaacatacttgaagttcatcatcttaagaagtccgtcggtcagggggagcatcagctctccatccttaccggagttgagctggttgtcaaaccgcggcagaccatcgccctgatcggcgagtcgggttccggtaaatcgaccctgctggcgatcctcgccggcctcgacgatggcagcagcggggaagtatcgatgctgggcaaaccgctgcaccggatggatgaagaggcgcgggcggcgctgcgggcgcagcacgttggttttgtttttcagtcgtttatgctgatcccgacgctcaacgccctggagaacgtcgagctgccggcgctgttgcgcggcgccagcgatagccagagccggggcgatgcccgcgcgctgcttgagcagctgggacttggcagacgcctgcaccacctgccggcgcagctctccggcggcgaacagcagcgggtggcgctggcccgggcctttaacgggcgcccggccattctgttcgccgatgagcccaccggcaacctcgatcgccagaccggggacaaaattgccgatctgctgttctcgcttaatcgcgaacacggcaccaccctgatcctcgtcactcacgatccgctgctggcggcgcgctgcgatcgccgtctgcgcctggtggatggccagctgcgggaggaagcatga

SEQ ID NO: 238790 - DNA, 2415 bp, Klebsiella pneumoniae
atgatcgcccgctggttctggcgcgaatggcgctcgccgtcgctgctgatcgtctggctggcgttaagcctcgccgtggcctgcgtgctggccctggggtcgataagcgatcggatggagaaaggccttagccagcaaagccgtgagtttatggccggcgaccgtacgctgcgcagttcgcgcgaggtacccgccgagtggatcgcacaggcgcggaagtcagggctgaccgtcggcgagcagctgagctttgccaccatgacgttcgccggggatacgccgcagctggcggacgttaaggcggtggacgaccgctatccgctgtatggcaccctcgagacgcagccgccggggctgaagccgcaggcggggagcgtgctgctggcgccaaggctgatggcgctcctgaacctgaaaaccggcgatacgattgacgttggcgatgccacgctgcgcattgccggggaggtgattcaggagccggatgcagggtttaaccccttccagatggcgccgcgactgatgatgaatatggccgacgtggcaaaaaccggggccgtgcagcccggcagtcgcgtcgcatggcgctataagttcgccggcgacgctgaacagctggccaattatgagcagtggctgctgccgaagctcggcccggagcatcgctggattggccttgaccaggacgacagcgcgctgggcaaatccctcgaacgctcgcagcaattcctgttgttatccgcgctgttgacgctgctgctggccgtcgccgcagtggcggtagcgatgagccactactgccgcagccgctatgatctggtcgccatactcaagacgctgggcgccggacggtcgcagctgcgcaagcttatcgtcggccaatggctgctgctgttgacgctgtcggtgataactggcggggtggcgggcctggcgctggagcgtctgctgctgctggtgctcaaaccggtgctgcccgccgcgttacccgctgccagcggttggccgtggctgtgggctatcggggcgacaggcgtcatttccctgctggtgggcgtgcgaccctatcgactgctgctggcgaccctgccgctgcgagtgctgcgtcaggatgtggtggctaacgtctggccgttgaaaatctggatcccggcggttagcgtcgtggtggtgggcctgttggcctggctgctgggcggcagcccgctgctgtggtcggtgctggccggggcggtagtgctggcgctgctgtgcggcctggtgggctggggattgctgtggctgctcaaacgcctgacgctcaaagccttgccgctgcgtctggcggtgaaccgcctgctgcgccagccgtggtcgaccctcagccagctggcggcgttttccctgtcgtttatgctgctggcgctcctgttggtgctgcgcggcgatctgcttgaccgctggcagcagcagttgcccccgcagagcccgaactactttctgatcaatatcgcccctgagcagatagtgccggtgaagaccttcctcgccgaacaccagacgcgggcggcggaattctatccgatcgtccgggcccgtctgacgcagatcaacggtcaatccacggacgggaacaaagacgaagcgctgaatcgcgagcttaatctcacctggagcgaacagcgtccggatcataatccgctggtggccggcagctggccgccgaagccgggcgaggtatcgattgaggaggggctggcgcagcggctggggataaagatcggcgatacagtgacctttaccggcgatacccaggagttcagcgctaaggtcagcagcgtgcgcaaagtagactgggagagcctgcggccaaacttcttctttattttccccgccggggcgctggacgggcagccgcatagctggctcaccagcttccgctgggataacggtcccgcgatgttgacccagctgaaccgcgagtttcccaccgtcagtctgctggatatcggcgccatcctgcgtcaggtcggccaggtgctctcccaggtcagccgggcgctggaggtgatggtaggcctggtgacggcctgcggcgtgctgctgttgctggcgcaggtgcaggtcggtatgcgtcaacgccatcaggagctggtggtctggcgcacgctgggggcaggaaaattgctgctgcgcgctacgctgtgggcggagtttgccctgctggggctggtttccggcctggtggcggcgataggcgcggaagtggcgctggcgatgctgcagacgaaagtctttgattttccctgggcgccggactggcgcctgtgggtgttgctgccgctgacgggagcggtgttgttatccctgtgcggcggcgggctggggctgcgtctgttaaaaggaaaagcgctattccgccagtttagccagtaa

SEQ ID NO: 238791 - DNA, 1146 bp, Klebsiella pneumoniae
atggcacacacaataaaagcgctggcgatctcgatcggcgcagcattagcgttaacgtcattgccttcccacgcggagattacgctgctgaaacaagatccgcaggcgggcgatccgttaagccggcttaactttaccgtcggcggcagtatccggccgcagttcaacatgatgaccggcgatggcgacaaaggctcctataagcgtaacggttttgacggcggcacccgcttccgcttcgcggcggattactacctgttcgatgatattagctggatcagctactatgagctgggcgtgaacattccggcgctgtttgactgggataaccactacgcggaaggcgcgaacaataccacccgccgcatgctgtataccggcctgaaaagcgatacctggggtacgttaacctacgggcagcagaacagcatttactatgatgtggtgggggtgaaaaccgatatctgggactacgatatgatcggtcaggccccggggaatggtattaatggcgattacgatggctcctatcgttcacgtaatatgctgaaatataagaaaactgtaggtgatgtcgatctttacggctcttatctgttcgaagacagcgaatacctgccgggtaacggcctgcgctacaagcgtaaaggcggtggttctgttggcgcggactaccacatcatgaaggatctgacctggggtaccgcgtggaactacacccgcgcggaaatgcgcgacccgtcaagcgccgacagcaaaacctatgaccagaatatcgtcggtaccgcgctgagctggaccccggataactggaccttctccttcggcggcggctggtatcagaacttcctcaccaccaagaaaaccgatgtgcataattactttgccggtgacgcctgggggattgaatattttgcgggctataaattcccgatcaatcaatacgctgttaaatctattcagccgtactttatgggcgaccgtctggaatatgtgaacggccgcaactatcagcgtatcgataacggtctggggattagcttccagctggattacggtttccgcgttgactacgaacacgtgtttacctccagcaccgacaaccttggcgatatgaacctggtccgtctgcgctacgacttctaa

SEQ ID NO: 238792 - DNA, 1077 bp, Klebsiella pneumoniae
atgaccaatgggacggattatcgcgccattctcgccagcgatacgccactgattgacgtacgcgccccggtggagtttagccaaagcgcgatgccggcggcgatcaacctgccgctgatgaatgatgaagaacgcgccgcggtcggcacctgctacaagcgccaggggccggaagcggcgctggcgctcggccataaactggtccagggtgacctgcgcgccagccgtactcaggcgtggctggaagcgtgcgcccgttacccacacggttacctgtgctgcgcccgcggcggccagcgctcgcatatcgtccagcagtggctgaaagaagctggcgtggattaccccctgatcgtcggcggctataaagcgctacgccaggcggcgatccaggccaccgacgaactggtgcagcgcccgatcgtgctgattggcggctgcaccggcaacggtaaaactcagctggtctgctcacgcccggacggtatcgacctggaagggcttgctcatcaccgcggttcttcattcggtcgaaccctgcaggatcagcatccgcaggccacctttgaaaaccacctggcggtcagcctgcttaaaaaagccgaacagcagacccgctgggtgctggaagatgaaggccatatgatcggcgccaatcatctaccggagagcctgcgcctccgcatggcgcagtcgccgctggcggtggtggaagatccgtttgacgttcgcctcgaacggctgcgcgaagagtatttcgatcgcatgtatcgcgactttatcgccgcgtatggcgaagagaaaggctggcaggcatacggcgagtatctgcatcacggcctgtttgccatccgccgtcgcctggggctgcagcgttttgctcagctcactgaacggctcgatgaggcgctggtgcagcagcagcgcaccgccagcaccgaggcgcactttgcctggctggtaccgctgctggaagaatactacgacccgatgtatcgctatcagttggggaaaaaagccgggaaaattctctttcgcggcagctggcaggaggtcgcagcctggctggcgaagtaa

SEQ ID NO: 238793 - DNA, 1068 bp, Klebsiella pneumoniae
atgaaacaggtatgcgtgctcggtaacggccagttaggccgtatgctgcgccaggccggcgagccgctgggcatcgccgtctggccggtggggctggaagccgacccggaagcggtgccgttccagcagagcgtcatcacggcagaaattgaacgctggccggaaaccgccctcacccgcgagctggcccgccacccggcgttcgtcaaccgcgatgtcttcccgattatcgccgaccgtctgacgcaaaagcagctgtttgacaagcttggcctcgccaccgccccgtggcagctgctggcggataaaagcgagtggccggcggtgtttgcccgccttggcgaactggcgatcgttaagcgtcgcgttggcggttacgacggccgcggccagtggcgtctgcgggaaaacgagatcgatcagctaccggccgataactacggcgagtgcatcgtcgaacaggggattaacttctccggcgaggtatcgctggtgggcgcccgcgctcatgacggtagcaccgtcttctacccgctgacccgtaacctgcatcaggacggtattctgcgcgccagcgtcgccttcccgcaggccaacgctcgccagcaggaacaggcggaaagcatgctgacggcgatcatgaacgagctgaactatgtcggcgtgatggcgatggagtgcttcgttaccgccgaggggctgctgattaacgagctggcgccgcgggtgcacaacagcggccactggacgcagaacggcgcgtctatcagccagttcgagctgcatctgcgggcgatgaccggcctgccgctgccgccgccggtggtcaacagcccgtcggtgatgatcaacctgatcggcaccgatcttaactacgactggctgaagctgccgctggtgcacctgcactggtatgacaaagaggtgcgcccgggtcgtaaagtcggccacctgaacctcaccgacagcgataccgatcgcctgagcgcgacgctggaagcgatcaagccgctgctgccgccggagtacaccagcggcctgttctgggcgcaatcgcagctcagctaa

SEQ ID NO: 238794 - DNA, 510 bp, Klebsiella pneumoniae
atgtcttcccgcaataattcggcgcgtatcgccatcgtgatggggtccaaaagcgactgggctaccatgcaatttaccgcagaaatccttgatgccctgaacgttccgtaccatgtcgaagtggtctccgcccaccgcacgcccgataagctgttcagctttgctgaaagcgccgaaagccacggttatcaggtgattattgcaggagcaggcggcgcggcgcatctgccgggcatgattgcggcgaaaaccctggtgccggtgctcggcgtaccggttcagagcgcagccttaagcggtgtcgacagcctctactccattgtgcagatgccgcgcggcattccggtcggtaccctggccatcggcaaagctggcgctgcgaacgccggcctgctcgccgcgcagatccttgcccagcatgatacagaactgcaccagcgcctgagcgcctggcgtcaggcgcaaaccgatgaagtgctggataatccggatccgcggggtgcggcatga

SEQ ID NO: 238795 - DNA, 339 bp, Klebsiella pneumoniae
atgagcaggaaaaagtggagtcagccgctgacgtggggaatgatcatcgcgatcctcaatccgttaggggtaagttatatcgccttaatcggcgtcgttatcggcaacacgctgacgtttgtctggtgtgcgatgctggcgtgggctatctatttttatgccatttatttgctctgcacccgccctcacgatagccggctggtacaaatctatttactgcttatgggcaccctgatgctcccgtggggggtagtgctgcttatcacctgtatcatgagggagataaaggtcaatcaggcacccacgccaccacctccaggcgagacaaaagacggctaa

SEQ ID NO: 238796 - DNA, 723 bp, Klebsiella pneumoniae
gtggcgacactttttattgcagatttgcacctgcaaacagaagaaccggcgatcaccgccggttttctgcgttttttacagggcgaagcccgccaggcagacgctctgtatatccttggcgatctgtttgaggcatggatcggcgatgacgatcctaacccgctgcaccaacaaattgcctcggcaatcaaagccgtcgtcgacgccggcgtgccgtgctacttcatccatggcaaccgcgattttctcgtcggccagcgctttgcccgccagagcgggatgatcctgctcgccgaagaagagcgactggacctctatggccgtaaagtcttgatcatgcatggcgacacactgtgcaccgatgaccaaggctatctggcgtttcgcgccaaagtccacaccccgtggatccagcgtctgttcctggccctgccgctgtttatccgccgtcgcatcgccgcccgcatgcgcgccgacagcaaagccgccaacagcagtaaatcaatggaaattatggatgtgaatccacaggcggtagttgacgcaatggagcggcatcacgtgcagtggctgatccacggccatactcatcgcccggcggtccatgaactgcaggccaacggccaacccgcatggcgtgtggtacttggcgcctggcacagcgaaggttcgatggtcaaggtgacgccggtcgacgtcaaactaatccactttccgttctaa

SEQ ID NO: 238797 - DNA, 495 bp, Klebsiella pneumoniae; identical to SEQ ID NO: 210498

SEQ ID NO: 238798 - DNA, 1386 bp, Klebsiella pneumoniae
atgttaaaaatttttaatacactgacgcgccagaaagaggaatttaaacctatccatgccggggaagtcggcatgtacgtgtgtggtattaccgtttacgatctctgtcatatcggccatggacgtaccttcgtctcctttgacgtcgtggcgcgctatctgcgttttctcggctataagctgaagtacgtgcgcaatatcaccgatatcgacgacaaaatcattaagcgcgctaatgaaaacggcgaaagctttgtcgcgctggtcgatcgcatgattgccgaaatgcacaaagattttgacgcgctgaatattctgcgtcccgacagcgagccgcgcgcaacgcaccatattgcggagatcattgagatcaccgagcagctgatcgccaaaggccatgcttacgtggcagataacggcgacgtgatgttcgacgtgccgacggacccgaactacggtctgctgtcgcgtcaggatctcgatcaactgcaggcgggggcgcgcgtcgacgtggttgacgtcaagcgtaacccgatggacttcgtcctgtggaaaatgtcgaaagagggcgagccgagctggccgtcgccgtggggcgcgggccgtccgggctggcatatcgagtgctcggcgatgaactgcaagcagcttggcaaccacttcgatattcacggcggcggttcggatctgatgttccctcaccatgaaaacgaaatcgcccagtccacctgcgcccacgacggtgaatacgtcaactactggatgcactccggcatggtgatggttgaccgcgagaagatgtcgaaatcgctgggtaatttctttaccgtccgcgacgtgctgaagtattacgatgcggagacgattcgctacttcctgatgtccggccactatcgcagccagctgaactacagcgaagagaacctcaagcaggcgcgttcggcgctggagcgtctgtacaccgcgctgcgcgggacggacaaatccgtcgacgcggcggggggcgaagccttcgaagcacgctttatcgaggcgatggacgacgacttcaacaccccggaagcctattcggtgctgttcgatatggcgcgtgaagtaaaccgcctgaaaaccgaggacgcggccgcggcgaacgccatggcggcccacctgcgtaagcttgctgcggtactgggtctgctggagcaggagccggaggcgttcctgcagagcggcgcgcaggttgacgacgcggaagtggcggagatcgaatcgctcatccagcagcgtctggacgcgcgcaaagcgaaagactgggcggcggcggatgcggcgcgcgaccgtctcaacgagatgggcattgtgctggaagatggcccgcagggcaccacctggcgccggaagtaa

SEQ ID NO: 238799 - DNA, 213 bp, Klebsiella pneumoniae; identical to SEQ ID NO: 210500

SEQ ID NO: 238800 - DNA, 867 bp, Klebsiella pneumoniae
atggcagcaaaaattattgacggtaaaacgattgcgcagcaggtacgctctgaggttgcggaaaaagtgaaggctcgcgttgcggccggaaaacgcgcccctgggctggccgtcgtgctggtcggcagcaacccggcctcgcagatttatgtcggcagcaagcgcaaagcatgtgaagaagtgggcttcgtctcccgctcttacgatctcccggaaaccaccagcgaagccgagctgctggagcttatcgacactctgaatgccgataagaccatcgacggtattctggttcagctgcccctgccggcagggatcgataacgtcaaagttctcgagcgcatcgcgccggataaagacgtcgacggcttccatccttacaacgttggccgcctgtgccagcgcgcgccgcgcctgcgtccgtgcactccgcgcggtatcgtgaccttgctggaacgctacaatatcgacacctacggcctcaatgcggtggtcattggcgcttccaatatcgtcggtcgcccgatgagcatggagctgctgctggccggctgcaccaccaccgtcacccaccgctttacaaaaaacctgcgccatcatgtcgaaaacgccgacctgctgatcgtcgcggtgggcaaaccgggctttattcctggcgagtggattaaagaaggggcgattgtggtcgatgtcggcatcaaccgtctggaaagcggcaaagtggtcggcgacgtggtgtatgaagatgccgccgaacgcgcgtcctacatcaccccggttcccggcggcgttggcccgatgaccgtcgccaccctgatccagaacacgctgcaggcgtgcgaagagtatcacgacgttgaggaggcctga

SEQ ID NO: 238801 - DNA, 402 bp, Klebsiella pneumoniae
atgaaattagttatcgcctccgtaatttctctgctcagcttcagcgcgctggcggcgccagaggggacgctcagcgtacacattcttaatcagcaaaccgggctcccttcaccgggggtgcagattgagctggataaacagcagggggagagctggcagcatatcgccaccggtaaaacggatgccgatgggcggattaaatcgctctatccgcaggcggagaatatggagccgggggtgtataaagtgacgtttaaaactggtgactattttaaaagccaaaatatgaatacgttcttcccggtgattccggttattttcaatgttacaaagcaaaatcaaaaactgcatatcccgcttctgctcagtcagtacggatactctacctaccgcggcagctga

SEQ ID NO: 238802 - DNA, 171 bp, Klebsiella pneumoniae; identical to SEQ ID NO: 134896

SEQ ID NO: 238803 - DNA, 1305 bp, Klebsiella pneumoniae
atgagcactacaccgttaacgctttcttttgccgggcaacaaccgcccatcgccctgccgcaggtgccgggaacgcgggggccggtgggagtcgacatgcgcgggctaaatcagtccggattctgcagctatgaccccggcttcgccaataccgccggatgccagtcggcgatctcgtggatcgatacggaaaacagcgtgctgctgcaccgcggctatccggtagatcagctggctcgccagtgcgattttctcgaagtggcctacctcatgctgaacggtgacgcgccggatgaggccagctatcaaacctttcgcgagaccatcacccgccatactctggtccacgagcagatagcccgcatgtgcagcggctttcgtcgcgattcgcacccgatggcgctgatgtgcgccctggtgggggcgctggcggcgttctatcatgatgtactggatgtggaaaatccgcagcaccgggcgctggccgccacccggctgctgtcgaaaatgcccactatcgccgccatgagctacaagtacaccattgaacaacccgccgcgtatccgcgcaacgatctctcctatgccggaaatttcctgcagatgctgtttgctatcccggcggagaaatatgttctgaatccggtcatcgagcaggcgatgaaccagatcctggtgctgcatgccgatcacgggcagtgcgcctcgaccactacggtgcgcgcggcgggctcctccggggcgaacttattcgcctgcgtcgccgccgggctggcgtcgctgtgggggccgatgcatggcggagcaaatgaatcgagcatgcgaatgctggaggagattgaaagcgtcgatcaggttccggcgtttctgcgccaggcgaagcgcgatccgcaggcatttcgccggctgggttttggcaactcgcgctaccgtcaccgtgacccgcgcgccgatatcctgcgtgaaaccagccatcgggtgctggcggaggtaggcatgtctgaccgcctgctgcaggtggcgatggcccttgaggacgtggcgctgaccgacccctattttgtggacaatggcctgtcgccaagcgtggatttctataccgcggtgatccttaaagcgatgaatctgccttcgtcgatgtttgcggtggtcaccgcggtcggtcggacggtcgggtgggtggcgcactggaacgagatgcaccaggcgccgctgaccatctaccggccacggcagatttacgttggcgagggttatcgggattacgtctcccgacgcggcgagcggtctgctgagctaaggtaa

SEQ ID NO: 238804 - DNA, 306 bp, Klebsiella pneumoniae
atgaaatcgtatctctacgctaaaaatcgcctcatgttgattatcctgagctggctaagcgcagacgaggcgttgccatctcgtcatgatttccagcagactgaaaccatcctcagcaccctgcatataccgtatgtgctgaagcccgaccttgatcaactgagagctacgctacagccattactcgccacgcccaggccgcaggcctgtgaggtaggcgcttttctcagcgccctgttggcgctgtatacccggttaaccgaatataccgccgtcgagcactatctgctctcccggcatctctga

SEQ ID NO: 238805 - DNA, 663 bp, Klebsiella pneumoniae; identical to SEQ ID NO: 212693

SEQ ID NO: 238806 - DNA, 561 bp, Klebsiella pneumoniae
atgaaaaaatacagcagaggaatggcatctttcgtggtgattatgatgctttctccggtagcggcacaggctgctgatggcaaagtcacctttaatggtgaagtcatcgaaaatacttgtacggtagtgaataaagacaagacggtaaccctaccgacggtccagcgttcagcgctcagcagcgcgggtgaaacggcgggcgtggttcccttcaccatcgatctgacgagctgcaccccaggggctgatgtctcggtgtacttcgagaaagatcaatacgtttccacggagggtcgactaaaaaacactctgtctgacggcacggaagcagaaaacgtcgatgtggagctgctgaacactcggtttacgccgattaacctcgcggagaccccggcggtcgctgcagacggcaccattgctcgcccggacgtgatcccggtggcggtggctgagcaggatggttccgcctcgctgcctttctatgcccgctactatgcgaccgacgccgctacggctggaaaagtcgctacctacgtcaactttacggtggtctatccgtaa

SEQ ID NO: 238807 - DNA, 696 bp, Klebsiella pneumoniae
atgcggcgtatggttctggcactgctgctgtccagctatttaccctcggcggacgccagtatggttattgacggcacacggattattttttccggcgacaaaaaagagatcgccgtccgggccaccaatatgggggagaccccctctctgacgcaggtctgggtcgacgatggccgcgtgcaaaatcaaccggaaaaggatgcggcgccgtttattgtgctgccgccgattgtgcgcatcgaaccgggaaaaggccagagctggcgcctggtgtttaacggcagccgcctgccgcaggatcgggaatcgctgttctggttcaatcttctggatatcccacctgagccgaaaaatggcaagactgacaattacctgcagctcgcgatacggtcgcgtatcaagctgttttaccgtccggcaggcgtggcggcggaaaaaatagccgcggaaaaagccctgagctgggcgctggctcctacgggcaacgggctgcgggtgagcaatgcctcagcgcgctatatcaccatcgacagcatcacccttaacggacaaaaacacgctgtcggcatggtcgccccgttttcctcgctggagatcgcgcctaaaggggtcgcgctgcgcacgctgccagccaaattcagcttcaccaccatcaatgattacggcgcggtagtgaatcataattatcctcagtaa

SEQ ID NO: 238808 - DNA, 2436 bp, Klebsiella pneumoniae
atgaaactcagggagatcaaggttgggttgatgctgctccttccctggcaggaggcatgggcggcagaggcgtttagttttaaccgcgcccatttgcacggcgccgcgcaggttgatctccagaaatatcaatacggtaatccactgcacgccggacagtaccgcagcacgctctcggtgaatggccgggacctgggggaagaaacgtttgttatccaggaacacgatggccagcttgagccctgcatctcaccctcgctgttcgacgctctgcagctgaaggatgcccagtggccaaccgcggccacctgcctgcgtttttcgcagatcgataaggcgatcggctgggagtatgacagcggggaaaacgtcctgcgggtaaatatgccccaggcgctgctgcaaccccattatcggggggcggtgaacctgaaaaaggtggatagcggcgtgcccgccgcggtgctgcgctaccaggccaatagctatcagagcatcgtcgacggggatagcagcagccatcattatctcgggctggatgccagcctgcgcgcctttggctggcggttacatcaccagtccagctaccaggcgcaggaagggaatacgcactgggatagcattgccacctgggctgagagaagtgtagtgaactgggcgtccacgttacggctgggtcagggatggaccgacggaaccttctttgacagcgtcagttttatcggcggcaggctggctaccgatgtgcgcatgctgccgggctctcgccgcggttttgcgccgtcggtcagcggcgtggcgcgcaccaacgcccgcgtaacggtcacccagaacggcgccctgttgtacgaggcaacggttccgccgggcaaattcaccttcgacgatctctatcccaccaacgccggcggcgatttacaggtgacgatccacgaggcggatggcagtcaggacacctttaccgtgccgtacgccacgctgcctggcctggtgcgggcaggcgcggtctattatgatctgtcgctgggctatctggatgaggacgggatcgccgggcggccgggatttggcgaagccacgctgcagtacggcttcaatgactatatcagcggctataccggcgctaacgcgacgacagattattactcgacgctggtcggcagcgccttcaatacctactggggcgcgctggcggtcaatctttcccgttctgcggcgaagggcagggagcacggctggcaggagggctaccgctggcgggtgtccgcatcaaaatcgtttacatccgatacgcgaatgctgctctcgatgagccacagcaacgacggcaattatcgctccattcgcgatgccgcctgggagcacgaccggcaccccaacgactggcgggagatgacccgctacagcgcgacgttgtctcagcaggccggcagcggcagtctgtcatttaacggaatctggagtgagaatgtccgccaccaccgctggcgctcatatcagctgggctatgccaaccgctatggtcagctcaattattatctgtatgcccagcagagccaggatatccatcaccgcaataatcaggtggtgggcgtctccttttcgctgccgttcgggcaggcgggcagcctgaccacccgctttaaccacgataaaaactacggcagccagctgcagtccagctataccggcagcgcaggcgagaaaaacgccttcagctacggtttgaccgccagctacgacatgccgcgggagaacccaaatgaagccagcgttgcggccaacggtagcctgcggacggattatgcgtacctgaacgccagcgccagcgccggtcgccatcagcagcagtactcgctgggggcatcgggcgtcctggtagcgcatcagggcggcatgaccgccacccccgaactgggggaaaccttcgccattgtggaagcgcccggcgcggtgggggcccgggtggctaaccgccttggacagccgattaaccgccagggttttacgatcatcccttacctcgatccctttaccgctaactggctggatctcgatccgcagggtctgaacgaccatgtggagattgtctccagcagcacgacggtggtgcccgattcgggcgcggcggtgaaggtcaaatttgtcacgcgtaccggctatccctggtttgcccatgtcacgctgccggatggcgcggcgcccccgctgggcgcggaggtgttcgacgacaacggtcgggcggttggcgccgtcggtcagggcgggctgctgtatgcccgagtgccgcaagaccacggcagcgtctcggtagtatggggcgaacgcagcgggcaacgctgccggttggcctatgccatccgcgacgacgcggtgcagcaggttagcagcggcacgccgcatcaggtctgccggccgggaataaaggagaagtaa

SEQ ID NO: 238809 - DNA, 1026 bp, Klebsiella pneumoniae
atgaaaaaaatcatcgcatcaggggtacctcttctgctggccggcgggtactgcgcttcgctgtcggcagcgtgccagatggtcagtggcaaaactatcgagtattcagtgaacgtcagccaggccagtatcaaccttgacgtcagcgatctccccatcggctccctgctatacagctacggagggatgattatcactaataacgaacgctgggagatcgcctgcagcggcagcgagcccggcgggtttcagagcattggcggttcccgggtcggcccggcgggagacggcaagccgggggatatctacagcatcgaccgcctgccgggcatcggctacagctttcagatgggggaacaggatggcattaatttcgatcccctgttcacggcctggccttccgcgccggtattttccggccagcgcgcatttcaggcggaaaataaaaaaccgaccatctatttctggcggattgccgataacggcggtctaccgccgccgggcgaatattgccttaatgattaccttggcgatatttatcttggcggagtacaggcgatgcgcttcagcgtcagcgggctctgtattcaggtcaaatcacccacctgcaagattactgacgacagtaaaaacattaacgtcttcctcggacggcataacaaaaccgcatttaccgggctcaacagcaccaccgccccggttccttttaacatcaacctgacgaactgtgaaaatgtcggcagcgtgtttatgcagtttaacgcgacggtggacagcgctgtcgccgccaacgaagtgattaaaatcgatgaccaacctgaaggggcatccggacttggcgtgcagatcctcagtgccggcggctcgctggtgccgctaaaccaggtgagccaggtctggtccgggaaaaaaggcagtcagacgaactatcgtttatcctatcaggcccgctatatccagacgcagcccgcagtgactgcgggcgaagcgaacgccagcgcgaccttcgtggtgacttataactga

SEQ ID NO: 238810 - DNA, 867 bp, Klebsiella pneumoniae
atgaattatcaattagtgaagcaagtcagagaaaataacccattaagaaaaagcttcattgaccttgccgttaagacttttgacctgtcttttgaagagtggtatcagcaaggttactggaccgacgcctatatcccctatgcttttgtcgaacgcaataaagttatcgctaacgcttcggccaacatcatcgacctgcgctggcagggcgagccccggcgttatattcagattggcaccgtgatgaccgaaccggaccaccgtaataagggattagccggccagcttatccatcacatcctgcaggactggcagcaggaggcggacgccttctttttattcgccaatcccaccacggtggatttttaccccaaatttggcttcacccgcagcgaagagtatcaatatattatgccggtctccccgcgagccggtgattttcgtaaactggatatggacagccctgacgatgtcgccctgctccgccattactatgaaaaatccaacccgttctcaccgctgcgggtggagcataactttggcctgctgatgttttactgctcagcctttatgaagcattttgtctattactcggcaaaaaatgaggcggtggtcatcgccatgcaaaacggtccggtgctgatctgctttgatctattctgcgacgtgggcaagagcctgtcgacgctggtcaacgaactggccgatgaccacgtttaccaggccatcctcggttttacccccagtgaagaccggctcggcgagtatgagaagatagagggagaagatatcctcttcgtctatgaccagaaggaaaacctgtttaaagacaggaagttgatgtttcctttactggcgcatgcctga

SEQ ID NO: 238811 - DNA, 921 bp, Klebsiella pneumoniae
atgtcaaatttacccaaattttcccgcgcgctgttgcacccgcgttactggctgttgtggctgggaattggctttttgtggctgctggtgcaattaccgtatccggtgatctaccgtctgggaacggcgcttgggcggctggcaatgcgggtgatgaaaagccgcgcgcggattgccagacgtaatctcgaactctgctttcccgagatgagcgccgccgaccgcgaggcgctgctggtgaaaaactttgaatcgctgggcatggggctgatggagaccggcatggcctggttctggccgacgcaccgggtagcgcgctggaccgagaccagcggcgttaacgaggtggtggagcttctggaagaaaagcagggcattttactgatcggtatccattttctgaccctcgaaatgggtgcgcgaatgtacggcatgtttaccccaggcattggcgtctaccggcccaacgataacccgctgattgactggctgcaaacctggggacgcttgcgctctaacaagaccatgctggatcgaaaaaatctgaaagggatggtcagggcgctaaaagagggggaaattctctggtacgcgccggatcatgactacggtccggccagcagcgtcttcgccccgctgtttgccgtcgaacaggcggcgaccaccaccggtacctggatgctggcgaaaatgtccggggcgacgattgtgccgtttgttccgcggcgcaagcccaacggcatggggtatgaattgatctccctgacgccggagcgcacgccgccgctggcgagcgccgaggttacggcggcctggatgaatcagattatcgaacagtgcatcctgatggcgcccgagcaatacatgtggctgcaccggcgctttaagacccgcccggaaggagtaccgccgcgttactga

SEQ ID NO: 238812 - DNA, 273 bp, Klebsiella pneumoniae; identical to SEQ ID NO: 134900

SEQ ID NO: 238813 - DNA, 1569 bp, Klebsiella pneumoniae
atgctacaacctgttgttcgcgtcggtgaatggctggtaaccccctctgtaaaccaaatcagcaggaaggggcgccagcttacccttgaaccgcgtttaatcgatcttctggtcttttttgcccgccatccgggggaagtgcttagccgggacgagcttatcgaaaacgtctggacccggaacgttgtgaccagccacgtcgtcacgcagagtatttctgaactgcgcaagtcgctcaaagacggcgacgacgttagccttgagtacatcgcgacggtacccaaacgggggtataagctcacggtgccggtgatctggtgcaccgaagagggggaggagctagccccgtcgatggaggcgctgacgccttcgccgtcgaccgccgttcctgcgccgccggccgccggtgcgccatccgacgtctctgtccctctccctgatgccgccgcgccgccaccggctcctaccgtggccagcgcgccgtcaggccgcaagcgcctcactaccgccctggtgtgggggctgttcctgttggcgctgggcacctgcgtggcgctggtggcgctgtcgagcatggaatcgcggccgccggtcaacaaggcgcgtctgctgctcaatccgcgtgatatcgatatccacctggtgaatggcaactcctgcgctaactggtcgtcgcagcactcctacgccgtaggactggccagcctgatcaccacctcgctgaacaccttctcgacctttatggtgcatgataaaacggactacaacatcaatgaaccaagcagttccggcaaaacgctgaccatcgagttcgttaatcagcgccattatcgggcgcagcagtgctttatgtcggtccagctggtggacaacgccgacagctcgacgatgctggataagcgctactttgtgaccaacgataaccagctgaccatccagaacgatctgatgaacagcctgtcggatgccctggcgcagccgtggccggcgcgaatgcaggcgatgctcaggcaatatcagccctcgcaaagcgtggcgttaacctatttctaccagtcgcatcagctgttaatgaagggcgacgtcgattcattaagtaaggccagtagcctgctggatgatgtgattcagcgggcgccggattttatttacgcctatgccgaaaaaacgctggtggatgtattgcgccattcgcaacagcctctggacgataaacagctggccgccctctacagtgaagtcgagcgggtaggggcgatgccgggtataaaagacatggcgatttattatcaaataaaagcggtggattcattggggaagggcaaagtcgacgaagcaaataccgcaattaatagtgcgattgatttagagatgtcatggctaaattatgtgctgttaggcaaagtctatgagatgaaaggtgagaaccgtctggctgccgattcttacatcacggcgtttaatttacgtcctggcgaagataccctgtactggattgaaaatggggttttccagacgtcggttaaccgagtcgttccatatctcgacaactttctctcttcagaataa

SEQ ID NO: 238814 - DNA, 1335 bp, Klebsiella pneumoniae
atgagttctgccaagaagatcgggctatttgcctgtaccggtgtcgtcgccggtaatatgatggggagcgggattgcattattacctgcgaacctggccagcatcggtggtattgccatttggggctgggtaatttcaattattggtgcgatgtctctggcttatgtttatgcccgactggccactaaaaacccgcagcagggcggtcctattgcctacgctggcgaaatatctccggcgttcggtttccagaccggtgtcctttattatcatgcaaactggattggtaacctggccatcgggattacagcagtttcttatctctctacgttcttcccaattttaaataacccggtgccagcaggtattgcctgtattgccatcgtgtggatctttactttcgttaatatgctcggcgggacctgggtcagccgtctgaccaccattggtctggtactggtgcttattccggtagtcatgaccgcggtcgtgggctggcactggtttgatgtcgccacctatcaggcaaactggaacacctccagcaccactgatagccacgcggttattaaaagtatcctgctctgcttgtgggccttcgttggcgtagaatccgccgccgtgagtaccgggatggtgaaaaacccgaaacgtaccgtgccgctggctaccatgctgggcactgcgatggccggtatcgtctatatcgccgcgactcaggttatcgccggtatgtatcctgcttctcagatggccgcgtccggtgcgccgttcgcaattagcgcctctaccatcctcggcggctgggctgcaccgatggtatccgctttcaccgcctttgcctgcctgacttctctgggctcgtggatgatgctggttggccaggccggtgtgcgtgccgccaacgacggtaacttcccgaaagtgtatggcgaagttgataacaacggtattccgaaaaaaggcctgctgctggccgcagtgaaaatgaccgcgctgatggtgctgattaccctgatgaactccgccggtggtaaagcctctgacctgttcggcgaactgaccggtatcgcggtactgctgaccatgctgccttacttctactcctgtgttgacctgattcgtttcgaaggcatcaacatccgtaacttcgttagcctgatttgctcggtactgggttgcgtgttctgcttcatcgcgctgatgggcgcaagctccttcgaactggccggcaccttcatcgttagcctgattatcctgatgttctacggtcgcaaaatgcaccagcgccagaacaacgcatcggataacaacaccaccgctaacgcgcactaa

SEQ ID NO: 238815 - DNA, 2148 bp, Klebsiella pneumoniae
atgaacgttattgcaatcatgaatcacatgggggtttacttcaaagaagaacccatccgtgaactgcatcgtgctctcgaacgcctggacttccgtattgtctacccgaacgaccgtgacgacttattaaaacttattgaaaacaactctcgtctgtgcggcgtgatcttcgactgggataaatacaatctcgaactgtgcgaagaaatcagcaaaatgaacgagtacatgccgctgtatgcgttcgctaacacctactccactctggacgttagcctgaacgatctgcgcatgcaggttcgcttcttcgaatatgcgctgggcgctgcggaagatatcgcgaacaaaatcaaacagaacactgacgaatacatcgacaccattctgccgccgctgaccaaagcgctgttcaaatatgtccgtgaaggtaaatataccttctgtaccccaggccacatgggcggtaccgcgttccagaaaagcccggtaggcagcatcttctacgacttctttggctccaacaccatgaaatccgatatctccatttcggtttctgaactgggttccctgctggaccacagcggcccgcacaaagaagcggaagagtatatcgctcgcgtgtttaacgcagaacgcagctacatggtgaccaacggtacttctaccgctaacaaaatcgtcggcatgtactccgcgccggccggcagcaccgtgctgattgaccgtaactgccacaaatcgctgactcacctgatgatgatgagcgacattacgccgatctacttccgtccgacccgtaacgcctacggtatcctcggcggtattccgcagagcgaattccagcacgcgactatcgccaagcgtgtgaaagagacgccgaatgcgacctggccggtacacgcggtgatcaccaactcaacctatgatggtctgctgtacaacaccgacttcatcaagaaaaccctggatgtgaaatccatccactttgactccgcgtgggtgccttacaccaacttctcgccgatctatgaaggcaaatgcgggatgagcggcggccgcgtcgaagggaaagtgatttacgaaacccagtccacgcacaaactgctggcggcgttctcccaggcgtcgatgatccacgtgaaaggcgacgttaacgaagagaccttcaacgaagcctacatgatgcacaccaccacctctccacactacgggatcgtggcctccaccgaaaccgcggcggcgatgatgaaggggaacgctggtaagcgtctgatcgacggctctattgaacgttccatcaagttccgtaaagagatcaaacgtctgaaaggcgagtctgacggctggttcttcgacgtctggcagccggagcatatcgatggtcctgaatgctggccgctgcgttccgacagcgcatggcacggtttcaaaaacatcgataacgaacacatgtacctcgacccgatcaaagtcacgctgctgactccggggatgaagaaagacggcaccatggatgacttcggtattccggcaagcatcgtggcgaaatatctcgatgaacacggcatcgtggtagagaaaaccggtccgtacaacctgctgttcctgttcagtatcggtatcgataagactaaagcgctgagtctgctgcgtgcgctgaccgacttcaaacgcgcgttcgacctgaacctgcgggtgaaaaacatgctgccgtcgctgtaccgtgaagatcctgaattctatgaaaacatgcgtattcaggacctggcgcagaacattcacaaactgattgagcatcacaacctgccggatctgatgttccgcgcgtttgaagtgctgccatcgatggtgatgaccccgtatgccgcgttccagaaagagctgcacggtcagacggaagaagtgtatctcgaagagatggtcggccgcgtcaacgccaacatgatcctgccgtatcctccgggagtgccgctggtgatgccgggtgagatgatcaccgaagagagccgtccggtgctggagttcctgcagatgctgtgcgaaatcggcgcccactatccaggcttcgaaaccgatatccacggcgcctatcgtcaggcggatggtcgttacaccgttaaagtgctgaaagaagagaataacaagtaa

SEQ ID NO: 238816 - DNA, 1476 bp, Klebsiella pneumoniae
atgaaaacaccctcacagccgcgcgcgatttactacatcgttgcgatccagatctgggagtacttcagcttttacggcatgcgcgccttactcatcctttaccttacccaccagcttggcttcgacgacagccacgccatcagcctgttcagcgcttacgcatctctggtttacgttacccctattctcggcggctggcttgccgaccgcctgctcggcaaccgcacggcggtaattgccggggcgctgttgatgaccctcggccatgtggtgctgggcgttgagtcgacctccgcatggagtttgtacgtcgcgctggcgatcatcatctgcggctacggcctgtttaaatccaatatcagctgcctgctcggcgaactgtacgctcacgacgacccgcgtcgcgacggcggtttctcgctgctgtacgccgccggcaacatcggctcgattgccgcgcccatcgcctgcggactggcggcgcagtggtacggctggcatatcggcttcgcccttgcggggatcggtatgtttatcggcctgatgattttcttaagcggcagccgccacttccggcatacccgcggcgtcgataaaccggcgctgcgggcggtgaagttcgtgctgccgacctggggctggctgctggtgatgctctgcctggcgccggtatttttcacgctgctgctgcaaaacaactggtccggttatctgctggcgatcgtctgcctgttcgccgcccagatggtggcgcggatcatgatcaaagccccggagcatcgtcgcgcgctgtggcagatcgtcctgctgatgctcgccggaacgctgttctgggtgctggcgcagcagggcgggagctcgattagcctgtttatcgaccacttcgtcaatcgtcgtctgctgaactgggacgtgccgaccgcgctgttccagtcagttaacgcgatagcggtgatggcggccggcgtggtgctggcgtggctgatgcgcccggaaggcagcgtgcgttctgtgctgcgcgtctggctgaaattttctttcggcctgctgctgatgggcggcggctttatgctgctggcgctcaatgcccgccatggcgcggctgacggtcaggcctcgatgggcatgatggtcgccgggctggcgatgatgggctttgccgaactgtttatcgacccggtggcgatggcgcaaatcacccgtctgaacatgcccggcgtcaccggggtgttgaccgggatctatatgctggccaccggcgcggtggccaactggctggcgggcgtggtcgcccagcaaaccaccgaatcgcaaatcagcgatacggcgattgccgcctatcagcatttcttcgcgcagatgggcgaatggaccctcggctgcgtggcggtgatggtcattatcgcctttgccgcggcctgtagcgtcggcaaacgccgtgcggctgccggtgaaattaccggcggcggcgcctga

SEQ ID NO: 238817 - DNA, 1518 bp, Klebsiella pneumoniae
atgtctgaacaacaagcacaaggtgccgatgaggccattgaccttaataatgaactgaaagctcgtcgcgaaaaactggctgcgctgcgtgagcagggcgtagctttccccaacgatttccgtcgcgatcatacctctgaccaattgcatgctgaattcgatgcgaaggacaacgatgaactcgcttccctgaacgttgaagttgcggtggctggccggatgatgacccgtcgcgtgatgggcaaagcctccttcgtcaccctccaggacgtcggcggccgcattcagctgtacgtggcgcgcgatgacctgccggaaggcgtctacaacgaacagtttaagaaatgggacctcggcgatatcatcgccgcccgcggcaagctgttcaaaacgcaaaccggcgaactctcgatccactgcaccgagctgcgcctgctgaccaaagccctgcgcccgctgccggataaattccacggcctgcaggatcaggaagttcgctatcgccagcgctatctggatctgatcgccaacgaagagtcgcgtcatacgttccgtatccgttcgcagatcctcgccaccatgcgccagttcatggtggcccgcggctttatggaagtcgaaacgccgatgatgcaggtgatccctggcggtgcgtcagcccgtccgttcattacccatcacaacgccctggatctcgatatgtacctgcgcatcgcgccggaactgtatctgaaacgtctggtggttggcggttttgaacgcgtgtttgaaatcaaccgtaacttccgcaacgaagggatctccgtacgccataacccagagttcaccatgatggaactgtatatggcgtatgcggactacaaagacctgatcgaactgaccgagtcgctgttccgcaccctggcgcagacggtgctgggcaaaaccgaagtgccgtatggcgaccaggtgtttgatttcggcaagccgtttgaaaaactgaccatgcgggaagcgatcaagaaacaccgtccggaaaccaacatggcggatctggataacttcgacgcggcgaaagcgctggcggaatctatcggtattcaggtagagaaaagctgggggctgggacgcatagttaccgaaatctttgacgaagtggcggaagcgcatctgattcagccgaccttcatcaccgaatacccggcggaagtttctccgctggcgcgccgtaacgacgtcaacccggaaatcactgaccgctttgaattcttcatcggcggccgcgaaatcggtaacggtttcagcgagctgaacgatgccgaagaccaggcgcagcgcttccaggatcaggtgaacgccaaagcggcgggcgatgacgaagcgatgttctacgacgaagactacgtgaccgccctcgagtacggcctgccgccgaccgcgggtctgggtattggtatcgaccgcatggtgatgctgtttaccaacagccataccatccgcgacgtgatcctcttcccggccatgcgtccgcagaagtaa

SEQ ID NO: 238818 - DNA, 426 bp, Klebsiella pneumoniae; identical to SEQ ID NO: 138775

SEQ ID NO: 238819 - DNA, 921 bp, Klebsiella pneumoniae
atggcgacagagcaactgcggtggggcgtgagccccctgtgctggaccaacgatgtactcgaggatttaggcggtgatattcccctggatacctgcctgcgcgaggcgcgggaggcgggctatcagggcattgagttaggacggaaatttccccgccaggcagcaaccctgggcccgctgctggcggcggctgacctgcgcctggcgtccggctggtacagcggcatgctggccgaccgcagcgtggaagcggagctggaggcggtgcgggagcacgcccagttcctccggcagctcggcgcgaaggtgatggtttacggcgaatgcgggcaactgccaggtgaaaccccgcttgatgagcctatttcgctctcgccgccgttaagccgcgtcagcctggcggtgtattgccacaagctgaatacctttgctgacctgctgctgcgcgactatgacctccagctggcctatcaccatcatctgatgatgctggtggagcacgatgacgagctggagcggtttctgtctcacacccatgacaacgtcgggctggcgtttgataccgggcacgcctttgtcgccggggtcgagatcccgcgcgtactgcacaaatatggccaccgtatccgccatctgcatctgaaagacgtgcgtccgcaggtgctggggcgtctgtatcgggaaaacctgagctttaacgaggcggtgcgcgccgggctgtttaccatcccaggcgacggctgcatcgactatgcgccgatcctcgactttgtacgggacagcgactaccgcggctggctgattatcgaagccgagcaggacccggcgatggcgccgccgctggccaccgccagccgcgcctattgctggctggcgcaccatttatcttccccttcatcgtcagaggagtacgcatcatga

SEQ ID NO: 238820 - DNA, 1173 bp, Klebsiella pneumoniae
atgagcgcgcggttaaatatcggccttatcggctcaggttttatggggcaggcacacgctgacgcttaccgtcgcgcggcgatgttctatcccgatctgcccaagcgcccgcatctctacgcgctggcggatcaggatcaggcgatggccgaacgccacgcggcgaaactgggggcggaaaaggcctacggcgactggcgcgagctggtaaacgatccgcaggttgatgtggtggatatcacctcgccgaactatctgcactacacaatggcgatggcggcgatcgcggcgggtaaacatgtctattgcgagaagccgctggcggtcaatgagcagcaggcgcaggagatggcgcaggcggcacggcgcgcgggggtgaagaccatggtggcctttaacaacatcaaaacgccggcggcgctgctggcaaagcagattatcgcccggggcgatattggcgaaccggtgcgctttcgcggcacctttgatcaggggttttataacgacccgaacctgccctggtcctggcgctgctcgaaaaccctcggcggcagcggggcgcttggcgacctcggcgcccataccctgtccgtcgcccagtttttgctgggcgggatccgtgaagtgaccgccagcgcgcaaacctgcctgcgccagcgtccggtgccgcagaccgatgccgggtatgccagccgggtcgcggccgatgccgagtggcgggaagtggaaaatgacgatcaggttcagtgcctggtcaatttcgacagcggcgccgcgggggtgattgaggcctcgcgcatcgccgccgggcggatcttcggcgtgttctgggaggtctccggcaccgaaggcacgctgtatatggacggggagcgctttaacgagctgcaggtgtatcgcttcaacgatgataaacatgaccgcggctttaagacgctgtatgccgggagccagatcccggcctatgccggcttcttcggcttcgattttggcggcggcgggctgggctattttgacatcaaggtgatcgaagtgcatgacctggtgcaggggatttgcggggagggcgactgctatcccaactttgaatttggtttgcagaatcagcgcgtgctgtcggcgattgaagcctcgatggccagccgtcgctgggtgaacgtggttaaagactaa

SEQ ID NO: 238821 - DNA, 1032 bp, Klebsiella pneumoniae
atgtttccgtcacacttaccaaccccgcgccgcccggcggcgcagagcattcccatcctgcgctggggcattatcggtcctggctggatcgccgagcgctttgtgcactcattgaaaacctacagccggcagcaggtggtggcggtggcttcccgcagccaggcgaaggccgaccgggtggccgcggaatgggggatcccccaggcttacggccaggtggaggagatgctggcgcgtccggatattgatgcggtgtatattgcgacgccgcacaaccatcactttcccgacggcatgcaggcgctgaaggcgggcaaacatgtgctgatagagaaacccttcgccctcaacctcggcgaaggacgtgagctgcaggccgaagccgcccgccaggggaagctggcgctggaggcaatgtggtgcgattacgcgccgaaatatgatgtgatccgccagctgctggaggatggggcgctcggcgacctgcataccctgctggccgatcacggcgagtatttcacccgcgaccaccgcatcttcaatgccgatcttgccggcgggccgatgatggacctcggcagctatgtgacctcgtttgcgctgatggtgggcggcatgccgcaggagattgtcgcccgcggcagcgccacggcggaggggcttaacggtcagacgtcgatgctgtttagctggcagaacgggatgcaggggttgtttaacaccactttgttcagcaacacgccgggcggggcggtggtggccggacgccaggcgaccctgacgatcgacggccagttttacgcccccggcggcttcacgctcgccgccagccagggcgggcaggtgctgcgctgggaagagccgcgcaatcgttacgaccagctgttctggcaggcggagcattttgcctggtgcatcgggcaggggttgcaggactcgccgctgcggccgctcagtcgggtgctgcagaatctgcaggtgatggatgaggtgcggcgccaggtgggcgcggtgtttaacgaagaacgctaa

SEQ ID NO: 238822 - DNA, 1110 bp, Klebsiella pneumoniae
atgatctgcaaacgttttgccctggtaggcagtggttttatcggtcaggttcatgccgccagtcttgcccgtcatgaaggaagtgcgctgacgatggtggccgatgccgccccggagcgcgcccaggcgctggccgcccgctatggcgcccgggcggtgaccgtgagcgaggcgatccatagcgacgccatcgacgcggtgctgatcgccagttcaaccccgtcgcatgccgaactgctggaagccgccgccagggcgggcaaggcggtctattgcgaaaaaccgatcgacctctccctggcgcgcgcccgtgaggtggtggagcgggtgctccccctgaacgtgccggtcactgtcggctttaaccggcgcttcgatagcagccatcagcagctccgccgccagctggagcaagggctgatcggccgggtcgagctggtgcagatggtctgccgcgcctccagcatgccgccgctcgactatctgcgcagctccggcggccagatgcgcgatcaggcgatccacttcttcgatctcctgcgctttctcactggcgatgaagtgcgcaccgtagcagcgatgggcgcggcgctggccctgccggacattgccgaatttggcgatgtcgacacctccatcctgatgatgcagatgcgcggcggcgcgctggcgcagctggacaatacccgccgcaccggccacgggtacgatgaacggatcaccctgctgggcgccgaaggcgcgctggagtccggtagccagtcgccggcgggccctaccctgtggcgcggcaatcagcgcattgagccgggcctgtggccagactggttcagccgggtacagggatcttattaccagcatcttgacgcctttattcgctccctgaatggtgaaaccgtcgccgacctgcccggcctgctggacggcctgcaggcgcaggccattgccgaagcggcggttcagtccctacagcatggccagtttgtcgccgtcgacgactgtcgcagagcgggtgcgatgcaaccgctatcaggcgctgtacctgcctttatgccgggcggcggcaacgccttgcccggcctacataacacaggcattaatctgatttaa

SEQ ID NO: 238823 - DNA, 924 bp, Klebsiella pneumoniae
atgaatattaagaaaacgattgttgcctctttgttagcctgcatgctgcctgcggtggttatggcaaaagatgtctccattggcgtctcgatggcgctgtttgacgataacttcctgacgatcctgcgtacctcgatgcaaaaagagatgaaaaaagatggcgttaaatcgcagatcgaagacgcgaaaggggatgtctcccagcagctgcagcaggtgcagaactttatcggccagggggtggacgccattatcgtcaacccggtggataccaacgcggtgaaaccgatcatggatcaggccaccaaagccgggatcccgctggtgtttgtgaaccgccgtccgcaggcggagctgaccgacaagatggcctatgtgggatcggactctattctcgccggccgtctgcagatggaagcgctggcgaaagcgatgaacggtaagggcaatgtggcgatcctgctcggcgacctggcgaatgaatccactcgcgaccgcaccaaaggggtggaagaggtggtagcgaaatacccgaacatcaaaatcgtccagaagcagaccgcgaaatttacccgcaatgacgcagtggatgtggtcagcaactggatgaccagcggtgaggatatccaggccatcgcctccaacaacgatgaaatggcgatcggcgccctgcaggcgctgggcaaaaacccgaaccatattctcatcgccggcgtggatggcaccccggatgccctgcagatgctgaagagcggcaagatgatcgccaccatcttccaggatgcgaaaggccagggtgaaggcgcagtcgacgcggccatcaagctggcgaacggcgagaaagtggaaaaaatcatcgatgtgccgtatcagctgatcaccaaagagaacatggctgaatttaccaaccgtaatcagaaatag

SEQ ID NO: 238824 - DNA, 1485 bp, Klebsiella pneumoniae
atgaacgcttttgcccttgaagccgaaggtatcagtaagttcttccccggcgtgaaggcgctcgataatgtctcattgcgcgtgcgtccgggaacggtgcatgccctgatgggcgagaacggcgccggtaaatccacgctgatgaaatgcctgatcggtatctatcgccccgataaagggtcgattcgcgtgaaaggggagccggtggagtttaccgacaccatggatgcgctgcgctcggggatctcgatgatccaccaggagctcaatctggtgccgcatatgacggtggcggagaatatctggctggggcgcgagccgatgaagtacggctttgtcgaccacggccagctgacccgccagacccaggcgctgctggataagctcaatatccgcttaaccgctgaccggctggtgggcgacctgagcatcgccgcccagcagatggtagagattgccaaagcggtttcatggaacgcggatatcgtgatcatggatgagcccacctcggcgctgaccgaaggcgaggtggctcacctgttcaccatcatccgcgacctgcgcgcccagggtaaagcgatcatctatatcagccacaaaatggatgagatctttgccatcaccgatgagatcagcgtctttcgcgacggcacctgggtagggagcaaaaacaccaccgaatttacccggcagtcgctgatcacccagatggtgggccgcgaattaacccagctgtttccgaaatttaataacaccatcggcgaagaggtgctgacggtgcgcaacctgacgcgtcagggcgtgttccatgacgtcagctttagcgtacgccgtggcgaaatcctgggcgtggccgggctggtgggcgccgggcgcagcgaggttatggaaagcctgttcggtatggagcgcttcgacagcggcgaagtgctgatcgacggggcgccggtgaccatcgattccccctccgtggcgattgaaaaggggatggcattattaaccgaagaccggaaaaagtcgggcctgtttctggtgctgtcggtgctggaaaatatgagtatcgtcaaaatgccggaatatatcggcaagagcggttttgtccagcacgtgaaaatggccgaagactgcatggagcaaatacgccggctcaatattaaaacgccgacgatggatcaaattattaataacctcagcggggggaatcagcaaaaagtcctgattgcgcgctggctgttagcgcaaccgaaaatcttaattctcgatgagccgacccgcggtatcgacgtcggggcgaaggcggagatttatcatcttatcagtgaactggcgaatcggggggtggcggtgattatggtctcctctgaactgccggaaatccttggcatgagcgatcgggtcatggtgatgcatgaaggtcgtatcaccggcatcctggaaaaagacgaagccgaccaggaaaccattttgtcgttggcatcccattga

SEQ ID NO: 238825 - DNA, 1032 bp, Klebsiella pneumoniae
atgagtaatatgaaattaacggcggctccggccagcgagggttcctccctcttcgctaatttgcggcataaaatgccgaaagataccggcatctttgtggtgatgctggtgattgccctgacctttgaaatcgccggctggtatgttcgcgaccagtcgttcctgctcaataccaaccggctggtgctgattgtgctgcaggtggcgattatcggcatcatcgccgtcggcgtcacccaggtgatcatcaccaccgggattgacctctcctccggctcggttattgcccttgcggcggtggtggcggccagcctggcgcaaacctccgacagcctgtcgccaatgttcccggcgctggtcaacctgccggcggtgatccccatttgcgcggggatcggcgtcggcctgctgtgcggcctgaccaacggtttcctggtgacgcggaccggtattccgccgtttatcgccaccctcgggatgatggtttcggcgcgcggtctggcgcagtattacactcagggcaacccgatcagcttcctctccgacagctttacggcgataggccagggtgcgatgccggtgattatcttcttcgtgatcgccgccgtgtttcacattgcgctgaagcatacccggtatggcaaatatgtgtatgccatcggcggcaacatgacctcggccaaagtgtccggcatcaacgtgaataaatatctggtgatcgtctacaccatcgccggggcgctctccgggctggcgggggtggtgctggcggcgcgcgtcagcagcggccagtcgagtatggggatgtcctacgagctggacgcgattgccgccgcggtgatcggcggcagcagcttaatgggcggagtggggcgcattaccggcaccctgattggcgcgatgatccttggcctgatcaaaagcggttttacctttgtcggcgtcgatgcctatgtgcaggatattattaaaggcatcattatcgttgcggcggtaaccatcgatatgcgtcgcaaccggaaaaaacactaa

SEQ ID NO: 238826 - DNA, 642 bp, Klebsiella pneumoniae
atgaatacaccatcctttggcaaattctcgccgcgctggctagcgggaaaaaggggccttatcgtcacgctgctcgcggggctggcgatcctggcgctcggtcggggcatgaatttgccggccagagaggtttaccgtgagaggcagatccgccagctggaggaggatgcgcagtgggtggcggaacgccttgagcggcggatgaacattccggcgccgcagcgggaagcgacctggccgctggcggcgatgcgcgccgctctccagaccctcgcccaggagcggcattatcagctgctgctggtgaatggcgacgggcatctgctggcggcatcgcacgcgctgccggccagcgtgctggcccaggtgcaggcgcagttcccgcgagagatgcagcccccgctgttcggcagccactaccagaccattcagccattcgccccgcatcaaaggatgttaagccgggcgctgaacggcaacgcggggctggcgggctggaatctggtgatgctggcgccggatggtggattgccctcgttgctggtggcttaccgctggccggtgactatcggccttggcgcggtgctcgccagcgcgctgctggcgctgaggcaggcggcgcgcgccaggcgaaaacgctaa

SEQ ID NO: 238827 - DNA, 1005 bp, Klebsiella pneumoniae
atgaaaaccaaacgcgtaactatcaaagatatcgccgaactggcgggcgtctccaaagcgaccgccagcctggtactcaacggtcgtggtaaagagctgcgcgtggcgcaggagacgcgcgagcgcgtactggcgatcgctcgcgaacagcactatcagccgagcattcacgcgcgctcgctgcgcgataaccgcagccataccattggtctggtggtgccggagatcaccaactacgggtttgccgttttctcccacgagcttgagacgctctgccgggaagccggcgtgcagctgcttatctcctgcaccgacgaaaacccaggtcaggagagcgtggtggtcaataacatgatcgcccgccaggtcgacggcctgattgtcgcctcttgtatgcacagcgatgccgactatcagaagctcagcgaacagctgccggtggtgctgtttgaccgctcccccagcgacagcgccctgccgctggtgatgaccgactcggtcaccccaacggccgagctgatctcccgtatcgcgcctcagcatgcggacgagttctggtttctcggcggccagccgcggctgtcgccgtcgcgcgaccggctggcggggttcacccagggcctggcccaggcggggatcacgctgcgccctgagtgggtgatcaacggcaactaccaccccagctccggctatgagatgttcgcggcgctctgcgctcggctggggcgtccgccgaaggcgctcttcaccgcggcctgcgggctgctcgaaggggtgctgcgctatatgagccagcatcatctgctggattccaatattcatctcgccagcttcgacgatcactatctgtatgattcgctttccctgcgcattgataccgtgcagcaggataatcgccagctggcctggcactgctatgatctgctcagccagctgatcgacggtcaggccccggagccgcttcagcgctatctgcccgccaccctgcagattcgccatccctga

SEQ ID NO: 238828 - DNA, 1401 bp, Klebsiella pneumoniae
atgtcattaccgtcacgtctgcctgcgatcctgcaggccgttatgcagggccagccgcaggcgctggccgacagccattatccgcaatggcatctggcgccggtcaacggactgctgaacgatcctaacggcttttgccaggtcgccgggcgttaccacctgttttatcagtggaacccgctcgcctgcgaccatacctataagtgctggggacactggagctctgccgatctgctgcactggcggcacgaacctatcgccctgatgccggatgaagagtatgaccgcaacggctgctactctggcagcgcggtcgagttcgagggcgccctgactctgtgctacaccggcaacgtgaaattccccgacggcgggcgcaccgcctggcaatgtctggcgaccgagaatgccgatggcaccttccgcaagctggggccggtgctgccgctgccagaaggctataccggccatgtgcgcgaccctaaagtgtggcggcaggacgggcgctggtacatggttcttggggcgcaggatgtgcaacagcgcggcaaagtgctgctgtttaccgccagcgacctgcgggagtggcgcctggtgggcgagattgccgggcacgacgtaaacggcctggcgaacgccggctacatgtgggagtgcccggatctctttccgctggcggacacccacctgctgatctgctgcccgcaggggctggcccgcgaagcgcagcgctttctcaatacctatccggcggtgtggatggcaggccgcttcgacgccgaacgcgggatcttcgaccacggcccgctgcacgagctggacagcggatttgagttctacgcgccgcagaccatgcaggccgatgatggccgccgcctgctggttggctggatgggcgtccccgacggggacgagatgcatcagcccacccgcgcgcagggctggatccatcagatgacctgcgtgcgtgagctggagtggcaggctggcactctgtatcaacgtccgctgcgcgagctggtcgccctgcgcggggaagcccagggctggtgcggacagaccctgcccctcgccccgatggagctggcctttgacatcgcccccaacagcacgctggggctggactttgccggcgccctgcagctcaccgtcaatcgcgacggcctacgtctgtcgcgccgcggcctgcagacggcagagatgcatcaccgctactggcgcggcgaggcgcgacgcctgcggatctttatcgaccgctccagcgtggagattttcatcaacgatggcgaaggggtgatgagcagccgcttcttcccgggctatccggggcagctcatcttcagcggtgcgacgccggtggcattctgccgctggctgctgcggccatgcatggtagaataa

SEQ ID NO: 238829 - DNA, 1371 bp, Klebsiella pneumoniae
atggattttgaacagatttcccgctcactgcttcccctgctgggcggcaaggaaaatatcgccagcgccgcgcactgcgccacccgcctgcggctggtgctggtcgacgacgcgctcgccgatcagcaggcgattggcaaaatcgacggggtgaaaggctgctttcgcaatgccggacagatgcagatcatcttcggcaccggggtggtcaataaagtctatgccgcctttatccaggccgcaggcatcagcgaatcgagcaaatccgaagccgccgacctggcggcgaaaaagctgaacccgttccagcgcatcgcccgcctgctgtccaacatcttcgtgccgattattccggccatcgtcgcctccggcctgctgatgggcctgctggggatggtgaaaacctacggttgggtcgacccgagcaacgctctctatatcatgctggatatgtgcagttcggcggcgtttatcattctgccgatcctgatcggctttaccgccgcccgcgaatttggcggtaacccctatctgggcgcgaccctcggcgggatcctcacccatccggcgctgaccaacgcctggggcgtcgccgccggcttccacaccatgaatttcttcggcatcgaagtggcgatgatcggctaccagggcaccgtcttcccggtgctgctggcggtgtggtttatgagcatggtcgagaagcggctgcgccgcgtgatccctgacgcgctggacctgatcctcactccgttcctgacggtgattatctccggctttatcgccctgctgctgatcggcccggccggtcgcgcgctcggcgacggcatttcgtttatcctcagcacgcttatcagccacgccggctggctggcgggcctgctgttcggcggcctctattcggtgatcgttattaccggtatccatcacagcttccatgccatcgaggccggactgctgggcaacccatcgattggcgtcaacttcctgctgccgatctgggcgatggccaacgtcgcccagggcggcgcctgctttgcggtgtggtttaaaaccaaagatgccaaaataaaagccatcaccctgccgtcggcgttttcggcgatgctggggatcaccgaggcggcaatcttcgggattaacctgcgctttgtgaaaccgttcatcgccgcgctggtgggcggtgccgccggcggcgcctgggtggtgtcgatgcacgtctacatgaccgcggtgggcctgacggcgatcccgggaatggctatcgtgcaggccagctcgctgctgaactacattatcggaatggcgatcgccttcgccgtggccttcgcgctctctctgacgctgaaatacaaaacggacgctgaataa

SEQ ID NO: 238830 - DNA, 1518 bp, Klebsiella pneumoniae
atgtataaaaaacggaagttagccattcttattgctttgctaaccggcaccgccgccgcccatgggcagacagacctgaacagcattgaagcgcgtctcgccgccctggaaaaacgcctgcaggacgccgagacccgcgccagcactgccgaaagccgcgccgcctcagcggagcagaaagttcagcagttaacccagcagcagcagcaaacccaggccaccacccagcaggtggccaggcgcaccactcaactggaagaaaaagccgaacggcccggcggctttgagttccatggctatgcgcgttccggggtgatcatgaacgactcggccgccagtaccaaatccggcgcttatatgacccccgccggggagaccggcggcgccattggtcgcctgggcaaccaggccgacacctatgtggaaatgaacctcgaacataaacagcccctggacaacggggcgaccacccgtttcaaagtgatggtggccgacggacagaccacctataacgactggacggcaagcagcagcgacctgaacgtacgccaggcgttcgtcgagctgggcaatctgccgaccttcgaaggcccgttcaaaggctcgaccctgtgggccgggaaacgctttgaccgcgacaacttcgacatccactggattgactcggatgtggtgttcctcgccgggaccggcggcgggatctacgacgtgaaatggaacgacagcctgcgcagcaacttctcgttatacggccgcaactttggcgatatcgccgacagcagcaacagcgtgcagaactatatcgtcagcatgaataactttgccggcccggtgcagatgatggtcagcgggatgcgggcgaaagataatgacgaccgccaggacgcgaacggcaatctggtgaaaggcgatgccgctaacaccggggttcatgccctgctgggcctgcacaatgagagcttctatggcctgcgcgacgggaccagcaaaacggccctgctgtacggccacgggctgggcgccgaggttaaaggcatcggctccgacggcgcgctgcgcccgggggccaatacctggcgcttcgccagctatggcactacgccgctgagcgatcgctggtttattgccccggccgtgctggcgcagagcagtaaagatcgttatgtcgatggcgacagctatcagtgggccaccctcaacctgcgtctgattcaggaagtgacgcagaacttcgccctcgcctgggagggcagctatcagtacatggatctgcagcctgaaggctacaacgatcgccatgcggtcaatggcagcttctacaagctgaccttcgccccgaccttcaaggtgggcagcatcggcgacttcttctcgcggccggagatccgcttctatacatcgtggatggactggagcaaaaaactggacaactacgccaacgatgacgcgttaggcagcaacggattcaaatcgggcggcgaatggtcgttcggtatgcaaatggagacctggttctga

SEQ ID NO: 238831 - DNA, 924 bp, Klebsiella pneumoniae
atgaatggaaaaatctgggtactcggcgatgcggtcgtcgatctcctgcccgatggagagggccgcctgctgcaatgccccggcggcgcgccggccaacgtggcggtcggcgtggcgcggctcggcggtgacagcgggtttatcggccgcgtcggcgacgatcccttcggccgttttatgcgtcacaccctggcgcaggagcaagtggatgtgaactatatgcgcctcgatgcggcgcagcgcacctccacggtggtggtcgatctcgatagccacggggagcgcacctttacctttatggtccgtccgagcgccgacctgttccttcagcccgaggatctcccgccgtttgccgccggtcagtggctgcacgtctgctccatcgctctcagcgcggagccgagccgcagcacgacattcgcggcgatggaggcgataaagcgcgccgggggctatgtcagcttcgaccccaatatccgcagcgacctgtggcaggatgcgcaggaccttcgcgactgtctcgaccgggcgctggccctcgccgacgccataaaactttcggaagaggagctggcgtttatcagcggcagcgacgacatcgtcagcggcatcgcccggctgaacgcccgcttccagccgacgctactgctggtgacccagggtaaagcgggggtccaggccgccctgcgcgggcaggttagccacttccctgcccgcccggtggtggccgtcgataccaccggcgccggcgatgcctttgtcgccgggctactcgccggcctcgccgcccacggtatcccggacaacctcgcagccctggctcccgacctcgcgctggcgcaaacctgcggcgcgctggccaccaccgccaaaggcgccatgaccgccctgccctacagggacgatcttcagcgctcgctgtga

SEQ ID NO: 238832 - DNA, 768 bp, Klebsiella pneumoniae
gtgagccaggcggaatatttcgccactccagatctggacttttccttccccacccgcttaggtatagttcaccaggtcgcggttagccccgccgcggtggccaaaggtaaaggagtgcgtagcgcgatgaaccccagttttggcgatatttacgatcggtaccagaagctgacgctgactacacatctgccggcggtgatcgcctgcagtgaaacgctgagtttgggcaaagaccagggctttattccgcagccgggctatctctactttctgctgcaggggcaaatgacattggcctttggcgatgagcagaacctggtcgggattgttatcgcgcatatgccgttaggattactggaacattattgtccgtcggtcgcgctctattatcagtgtctgggcgagtgccagctggcgaaaatagccgccagcgattttgagcgaatattctttcattcgtcgccgggctatatgcaagagctgaccacgatcctggcctatatgggcatatttgcccttgatgcccactatgaacgcggcagccagaccagctttcagaccattaaatcgatgctgtcgcgctatttatatcgcggcgaaattgatgggggtcagcatgagagcctgtcggcatttattattaaacgaaccaatctctcgcgcagctatgtgtaccaggtgctggccgcgctgcgcgaggggggatatatcacggtgaaaaaaggcaagctgatctccatcgaccgtcatattcctgagaaattctaa

SEQ ID NO: 238833 - DNA, 345 bp, Klebsiella pneumoniae; identical to SEQ ID NO: 212722

SEQ ID NO: 238834 - DNA, 1143 bp, Klebsiella pneumoniae
atggaaacgttaatgttgctgacctacgccgcgctatgcatcgtggtgtttaaagtttttcgcatcccgctcaataagtggaccgtaccgacggcggtgctcggcggtatcgccctgattggcgcggtgatcttcgggatgaactacaacttcccttataccgacgtcggtaaccaggtgtttcgcaccgtgccgattgtgtcgcaggtgcgcggccgggtgcagagcgtaccggtgaagcctaaccagatgctgcataagggcgatgtgctgtttaccctcgacccgacgccgttccaggcgaaagtggacgatctgcaggcgcagataaaagcagccagtcaggatgcgctctccttaaacgcggcgttaagccaggcgcaggccgagctgagccgtgcgatggcccagcgcgaccagtcgcggcgggagtatgcccgctatcgggagggccatgcccagggcgccttctccgatcaaatggttgatacccgtctgcagacgtggaaagccgatgaagccagcgtcagcgcggctcaggcgaaggtggttcaggcgcgtaatgcgctggactcggtggtgaagggcaaaaacaccaccgtggcctccctgctggcgcagctgcaaaaggcgcagtttcagctggagaacaccgtcgtccgcgccccggaggatggctatgtcagtaccgtcggcttacggccgggcaccatgtccactgcgctggggacgatcccgctgatgacctttgtgccggtggagggcgccgcctcgcgggagtacgtcgcggcatttcgccagaacgccctgcagcgtctgcacaaaggcgagcccgcggagctgatgtttccggctatcccgggcaccgtctttcgcggagaagtggccgacgtgctgccggcgattggcgagagccagttccaggggcagggcaaattgctgaccacagacgcgctcaatacccatggccgggcgctggtggtgctgaaggtgaccgatccgcgttttgccgaatacgctctgccgcagggggctaccctcgaggcggcggtctactcggatcatctgaaagagctgtcgctgatcaggaagatcttgatccgcatgaagagctgggaaaactatatctatctcgatcactaa

SEQ ID NO: 238835 - DNA, 798 bp, Klebsiella pneumoniae; identical to SEQ ID NO: 212724

SEQ ID NO: 238836 - DNA, 1083 bp, Klebsiella pneumoniae
atgcgtttaacctccgactccgtgctcgacgggctgcccgccgggacctctggcgtgatggatcactatcgccgtatcgtgcgtcgccgtctactgctgatcctcctgctggcgctgttgattgtcgcgtcgctgctgctcgattttatgctcggcccctccggtctgccgctgcagagcctgtggcagacgttaaccgatccggccagcgccgatccgggcacgcgcgccatcgtctgggatatccgcctgccctatgcggtgatggcgattatcgtcggtctggcgctgggactggccggcgccgaaatgcagaccatcctcaataacccgctggccagcccgtttaccctcggcgtctcctcggctgcggcgtttggcgccgcgctggcgattgtgctcggtattggcctgcccggtattcccggccagtggtttatctcggccaacgcctttatcttcgccctgctggcggccctgctgctggacggcatcacccgctggacccaggtggccacctccggcgtcattctgttcggcatcgcgctggtctttacctttaacgctctggtctcgatgctgcagttcatcgccaacgaagacacgctgcaggggctggtgttctggaccatgggcagcatcgatcgcgcctcctggagcaaagtcgccatcctgctggtcgccctggcgctggtgatgcccctgtcgctgcgcagcgcgtggaagctgaccgccctgcggttgggcgaggaccgggccatcagctttggcattaacgttcgccgtctgcgcctgaccacgctgctgcggatcagcatcctgtcagcgctttcggtggcctttgtcgggccaatcggctttatcggcctggtggcgccgcatattgcgcggatgctcttcggcgaagaccatcgcttttacctgcccgccagcgcgctgatcggcgccctggtgctctccctggcctccatcgcctcgaaaaacctgatccccggggccattattccggtggggatcgtcacttccctggtcggggtcccgttctttttgagcatcattttacgtcatcgggggcaggtatga

SEQ ID NO: 238837 - DNA, 1119 bp, Klebsiella pneumoniae
atggcaagaaaatcagtaagatcgctgttacttactgcgctgctcgcgacgcccctcctcagctatgcaacccaatatcccctgacggtcacggaccttgacggccggcaggtcaccctcgccaaagagccgcagcgtattattttgcaggatggccgcgacattatgaccctcgccctgctggatcgggacaatccgtttaaacggctggtggcatggaataatctggcgaaaaagcaggatgttgccacctggcagatgctgaaaacgacgtggccccagtcggccacgatccttgacatgggcttcagcgataaagggaacgtcgatcttgaaagcgtcatcgcccgtcagccggatctgatgatcgcccagctgcgcgccaggccagcgctgatggagagcggcgtcatcgacaagctcagcgccctccacgttccggtgctgtttgtcgactatgagatcgccccggcgaaagataccgcccccagcatcgacctgctgggcaaagtccttaaccgcgagagccaggccaaagcctttaccgattactatagtcagcagctgcagacgattcgccagaaaaccgcggccatcacgccgaaggccaacgtcttcgtggaagcgctggccggcaacagcgacgcctgctgctttactcatggccacagcggctggggcgggctggtggaggcggtcggggcgaacaatatcggttcgcagctgctgccgggcgcctccgggttcgtttcgctggagaaaatcatcagtatgaagcccgacgcctggatcatgaccggctcgaagcgcggcaacagccaggtgttgcccctgggttatgcggttaagccagaggcggtgaaggcccaggcgcagacgctgctggcgcgacctggggtcagccagatcccggcggtacaggaaaagcgggcctatggcgtttatcaccacttctataaccacccgtggaatattgtcggcatggaatacctggcgaaagatatctacccgcaggccttcggcgatctcaacccggatgagacgtaccattatatcgtgcgccatttcaccgacctgccggaccagccgttcgtcttctcctggcagcaaagcgagtaa

SEQ ID NO: 238838 - DNA, 390 bp, Klebsiella pneumoniae
atgaaaaaagcaatgattgcgttatcggctattctggttgcggctccggtttttgctgcgacaacacatgcaacagatgataccgtcgcggcggcgaatgccaacgccaacaccgctaaagagaagctgcatcaggcccagcacgagggcgaagagcagcagctgaaggcgaaacacgccgccgaaggcaagcaggacagcgtcggcagccaggtgagcgaaggcgcgcagaaaacctggaacaagaccaaagaaggcaccgagaaggggtgggataagaccaaagaggtcagtgaaaaaggctggaacgccaccaaatccggtgcggaaaagggctgggataaaaccaaaaccggcgccgaagagttaaaaaataaagtgactgaataa

SEQ ID NO: 238839 - DNA, 456 bp, Klebsiella pneumoniae
atgaaaaagatgatttctctggcagtaattttatcctgtgtgctgagcgtcccggcctttgccgatggcccgaacgacggccatcgtccggggcaacccacggtgtggcagaacggtccggaccatgacgggcatgcaccgcagggcggacctgacgcgcatcatcagggcgaccatgaccagcgtggcccggatcgcgacggccatgacaaacgcgatctggcacgtcatgagcaggaccatttcgcctggcgcgggaacgatttccgcaaaggccacccggctccggcgccgttccgtggcgatgaatatcgcgtccgcgactggagcgaccgcggcctgccgcccccgccggaaggccatcactggtcctatatcgacggtaactatgtgctgatcgccgcggcgaccgggatcatcacctcgattctggtaagtggcgccctcggccactaa

SEQ ID NO: 238840 - DNA, 1179 bp, Klebsiella pneumoniae
atgagtgattatgtaattccagaaattaaagcgacggaagcggaaatgatttctatccgtcattatttacatgccaatccggaattaagtcttgaagagtttaataccagcgaactggtcgccagcaagctgacggagtggggctatcaggtgacgcgcggtctcggcaagaccggcgtggtcggcagcctgagcaaaggcgattctccgcgcaccatcggtttacgcgccgatatggatgccttgccgatcgaggaaaccaccggtttaccctgggccagcacggcgccaggaaaaatgcacgcctgcggccatgacggtcacaccaccattctgctggcggcggcgaaatatatcgcctcgccggcctgtcagttcaacggcacggtgcatctgatttttcagccggcggaagaggctatcggcggcgcggatttaatgattaaagacggcctgttcgagcagttcccctgcgaacgcatctttggcttgcacaacatgccaggcctgcctgtaggcaagctgggcttctacgccggcaacttcatggcctcggcggacaccgtcaaaatcacgattaccggctacggcggccacggcgcccaccccgagcgcaccgtcgacccgatcgtcgccggtgcggcgctggtgatggccctgcagagcatcgtggcgcgcaacgtgccgccgggggaaacggcagtggtcagcgtcggcaccttccaggccggtatcgcctccaacgtcattccggagagcgcggtgatggagctgagcgtgcgggcgatgaagccggaaatccgcgacctgctgatcaagcgtattcacgagctcgctgactttaccgccaaaagctatggcgccagcagcgtagtggaggtttacgactcctatccggtattaaccaacagtcctgaagagaccgatttcgcccgggcgctggcgctggaggtgtttggccgcgaaggggtcctggagtcggtctcgccgatgaacgccagcgaggatttcgcttttatgctgcgtgaacgccctggcagctacttcctgctcggcaatggcgagaaaggggagaagggcggttgcatggtgcacaaccccggctacgactttaacgatgacattatcaccatcggcgcgacgctgttcgcccgtctggtggaaaaacactgtcgctaa

SEQ ID NO: 238841 - DNA, 777 bp, Klebsiella pneumoniae
atgaaaaaatcactgttgctatggctggccttaatggcgtcgacgtcggcgctggccgaagggggaaaggagatccgcttcggcgttgacccgactttcgcgccgtttgaatggaaagatccgcagggcaaggtggcggggtttgatatcgatttaggcaacgccatttgtcagcagctgcaggcgaaatgcgtgtgggtggaaagcaatttcgacggcattatcccggcgctgaaggcgcgtaaattcgacgcgatcctttccgggatgtatatgaccgagaagcgcaaagcgcagattgcctttagcgacaagttgtataacgggccggtgttcctcgtggcgcgtaaaaataccctgcaaggcaatacgccggaacagctgaagggcaaaaccatcggcgtggagcagggctcggcgcaggagacgtatgttaaccagcactggcggccgcaggggataaacattgtggcctaccagggggccgatagcgtggtgcgtgacctggagtcggggcgcatcgacggcgcggtgctctccgggatgatggccgactacagcttcctgcagcagccgcagggtaaggaattcgcctttgtcggcggccatctgcaggacgatacgctgtttggcgccggggcggcgataggtttgcgtaaagacgatgaggcgctgcgtcaggaaattaacggcgcgattgcgaagattcttgccgacggcacctataaaaaattagctggcaaatattttagctttgatgtttattccgggacataa

SEQ ID NO: 238842 - DNA, 954 bp, Klebsiella pneumoniae
atgatgacacgtcctttgggcaaaaccggattttccatcgccccattagtctttggcggcaacgtctttggctggaccattgatgaaaaaaccagttttgctcttcttgatgctttcgttgaccacggttttgacgctatcgatacggcggatgtttattcccgctgggcggagggcaaccagggcggcgaatctgaaaccataatcggccgctggctacaggcgcgccccggcatgcgcgataaagtcaaaattttcaccaaagtcggctccgatctcggcctccccggccataaagggctcagcaaagcctggatccaacaggcggttgacgactctctgcgtcgcctgaataccgattatatcgacctctacttctcccactggccggatccgcaaaccccggtggcggaaacgctggaggccttccatagcctgcagcaggccggaaaaatccgcgcgatgggggcttctaacctcgatgcgatgcagctggcgggggcgctggaggtggcgcgcaagggcggcttgcctgcctggcaggtgctgcagccggaatataacctctaccaccgctccgcctttgaaggcgcgctgtgcgatctctgcgtcagccgcgatatcggggtggtgacctactacagcctggcctcggggttcttaaccggtaagtaccgtcagccgtcggatctggcgcagagccagcgcggaggcaagattggtaagtacctgaatccacgcgggatgcgaattatcgataccctggcggcggtcgcggaggagcagggggcgaagccggcggaagtggccctcgcgtggctgatcggccgcgaaggggtgaccgcgccgatcgccagcgccaccagcgtggctcaggtggagagttttgcccgcgcggcggcgctgagcctgagcgcggagcaagtggcgcggctggacggcgccagcgcctga

SEQ ID NO: 238843 - DNA, 792 bp, Klebsiella pneumoniae
atgacttcagaagccgtatttatccaggtcggcgcgctggccgatggttttgcgccgcacggtaacctgctggctaccgccagcctgcccgcaggcgaaaactttaccttttatgtcgccgggagcgagccgcagcagctggttatcgaagatgagcagacgctaagctggaacggcaagcacgccccctggcgggcgaccgccctgcgcccggacattctgtttatcgacttccttgacccggagcgggataacgccagcattagcgcggtatgcaacctgacgcagcgcaatgccacgctggtatacggccagctgccggacgaagccgccgcgcggctggacgccttcagccgggtagaacaagggttgccgctgaccgccgtcgaggcgcgatttgtcttcgcccgcctggatacccagccggggccgctgccggactttaccaccgcgctggtcggcatgcgcaatcagtacacctatagcccgaccgagcgctatgagcacatctatctcaacgataatttttacgcctggcagtgtctggacggcgtggaaaaggggctggcggatgtcgatcgctgccactatgtgcaggtggcggaggatctctatttgttcgtctggcgggagaaaatcatccccacgctgggggtgatcctcatcgatctgcagcagatgcgcactgacggcaagatcatgggctatcagggcagcgatttcggcgccctcagcaattttccggtcggcgccagcgcgaagatcctcaacgtcacccgccatcaggaatag

SEQ ID NO: 238844 - DNA, 777 bp, Klebsiella pneumoniae
atggcgagagtcgtggtgataaccggtggcggaaccggaattggcgccgcctgcgcgcggctgatgcgcgccgcgggcgaccgggtgtttattaccggacggcgcgaagcgccgctgcaggctgtcgccaatgagaccggcgccacggcgctggtgggcgatgccgccgacggcgaggtgtggcgccagcggctgctgccggccatcctcgaccagaccggcgggattgatgtcctcatctgcagcgccggcgggatgggcaacagccccgccgccgagaccagcgaccgccagtggcgcgaggcgctggacggcaatctcaccagcgccttcgccagcgttcgcgcctgtctgccttcgctgattgcccgccgcggcaatgtgctgtttgtcgcctccatcgcctctctggccgccgggccgcaggcctgcggctacgtcaccgccaaacacgctttaatcggcctgatgcgctccgtcgcccgcgattatggcccccagggggtacgcgctaacgccatctgtcccggctgggtcacgacgccgatggcggatgaagagatgcacccgctgatgcaggcggaagggctgtcgctgactgaggcttatcagcgggtctgtcgtgacgttccgctgcgccgccccgccagccccgaggagatagccgaggcctgtcagtttctctgttcgccgcaggccgccatcatcagcggcgctacgctggtcgccgacggcggggccagtatcgtcgatgttcccactctggcgtttgcctaa

SEQ ID NO: 238845 - DNA, 1734 bp, Klebsiella pneumoniae
gtgaacaaaaaagccatggccgcggcggtcagcatgatcctcgccggcggcgcgcacgccgcgcagcaggagcgtccaaacgtcatcgtgattatcgccgatgatatgggctactcggacatcagcccctttggcggcgagatccccacccccaacctgcaggcgatggccgagcagggaatgcgcatgagccagtattacacctcgccgatgtcggccccggcgcgctcaatgctgctcaccggcaacagtaaccagcaggctgggatgggcggcatgtggtggtacgacagcaccattggcaaggaaggctacgagctgcggttgaccgaccgcgtcaccaccatggccgagcgctttaaagacgcggggtataacaccctgatggccggtaaatggcacctcggttttgttcccggcgccacgccgaaagatcgcggctttaatcacgccttcgcctttatgggcggcggcaccagccactttaacgacgcgataccgctggggaacgttgaagccttccacacctactacacccgcgacggcgagcgcgtctccctaccggatgatttttactccagcgaagcctacgcccgccagatgaacagctggattaaagcgacgccgaaggaacagccggtcttcgcctggctggccttcaccgcccctcatgatcccctgcaggcgccggacgagtggattaagcgcttcaaaggccagtatgagcagggttacgccgaggtctatcgccagcgcatcgcccgcctgaaagcgctgggaattatccatgacgataccccgctgccgcatctggagctggataaagagtgggaggcgctaacgccagagcagcagaaatatacggcgaaagtgatgcaggtgtatgcggcgatgatcgccaatatggacgcgcaaatcggcaccctgatggagacgctgaaacaaaccgggcgcgataaaaacaccctgctggtctttttaaccgataacggcgccaacccggcgcagggtttctactacgaatctaccccggaattctggaagcagttcgataacagctatgacaacgtgggccgcaaaggatcatttgtctcctacggcccccactgggccaacgtcagcaacgccccctacgccaattatcacaaaaccaccagcgcccagggcggcatcaataccgactttatgatctccgggcccgggatcacccgccacggtaaaatcgacgcctcgacgatggcggtgtatgacgtggcgccgacgctatatgaattcgccggcatcgatccgaacaagtcgctggcgaagaagccggtgttgccgatgatcggcgtcagctttaagcgctatctcaccggcgaagtacaggagccgccgcgcggcaactacggggttgaactacatcatcaggcggcctgggtcgatggcgaatggaagctgcgacggctggtgccgcgcggcctcaccgccggcgacgcgccgtggcagctgtttaatctgcacgacgacccgctggagacgcatgatgtcgcggccgaacatcccgatcgggtcaaagtcatgagcgaggcctacgaggcatttgctaagcgcaccatggttaccaaagcgcagggcaaaatgatcgactacgtcggcatcgacagcaaaaccgggcgctatctggcggtcgaccccgccaccatgaagccggtgcctgcgccgcaggcgatccctgtgagcgagatccattaa

SEQ ID NO: 238846 - DNA, 1188 bp, Klebsiella pneumoniae
atgctgaatatcgccgccctgcgccagcagcaaattccgctggccgctgagccgcgctcgccggtgccgtttcatattctgatgaagccgattggccccgcctgcaatctcgcctgccgctattgctattacccgcaggacgaaacgccggtcaacaagatggatgacgcgcggctggagcagtttatccgccgctatattgccgcccagcccgccggcgcgcgggaaatcaactttgtctggcaggggggcgagccgctgctggccggcctgagcttctacaaaaaagcgctcgccctgcaggcgcgctatgcccccgacggcgtgactatcagcaacagcctgcagaccaacgggacgctgatcaacgacgcatggtgccgactgttccgcgaacatggctttattatcgggttgagcctcgaaggcaacgaagcgctgcaggactaccatcgtccggataaacgcggccggtcgacctggtcggcggcgctgcgcggcattgacctgctccatcagcatcaggtggactttaatctgctggtggtggtgcataacgagatggcggcccacgcggcggcgatttatgaccggctggtcagcctcggcgcgcgctatctgcagtttcagccgctgatgagcgaaggcgcggccctgcgcgaaggataccagctcagcgccgataactggggacgttttatggtcggcatctggcgacagtggcggaaacgctgcgatagggggcgggtgttcgttatcaatatcgaacaggcgtgggcgcagtatttcactcataccagcggcagctgcgtgcacagcgcccgctgcggcagcaacctggtgatggagcccgacggacagctctacgcctgcgaccacctgatcaacgccgaacatcggctgggccgcctcgatgagcagacgctcgccgccgcggtcgacgcctcggtgcaactgccgttcggtcagcagaaaagtctgcgccgcgaatgccagacttgctcggtaaaaatggtctgccagggcggctgcccggcgcatctcaacgccgcaggcaacaaccgcctctgcggaggctactaccgcttctttagcgacatcctcgcaccattacgccccttttcccgcgaccttaatggcctgaaggcctggcgggccgcgtttgttgggactgcgcatactgcgtag

SEQ ID NO: 238847 - DNA, 684 bp, Klebsiella pneumoniae
atgtctgctttgttaaaagccagccgtaatgatgcgataatagcccgttgtttacagactatttcccagttaattccactaacttcagcggtgttttatcgagtaaataatcgtttaaaacccgaaaactatatattgcataatatttccgataatacgcaccaacaatatctggaaaactttcagccgctggatccgcttctgccgtcgcactttagccaccagaacaccaccgtggcggcgatgacgccgcggctctgcgaccgcaaccggcattactatcatgaatttatgttgccgaataacgtgcgcgacatgaccgagatctttatccgccgcgagcggcggatcgtcgccggtatctcgctgatgcgcgacgtgcctttctccagcgaagagcgccagcgggcccaggcggtgctgccgctggtagagctggccattcgcgactgcctgcaggaagaagatgatctgcccgccatcctgacggcgaaagagcgggaaatcgtcggcatggtgcgcgaaggcgccagcaataagctgattgcccgccagctggatatctcgctctcgacggtgaaaacgcacctgcgcaatattttcgccaagaccgaagtggtcaatcgtaccgaactggtttcccgaacctggatgccggccgctcagcgtacgctgcatctgtaa

SEQ ID NO: 238848 - DNA, 1173 bp, Klebsiella pneumoniae
atgtcgagtacacctctcactgataatgcgctttcccggcccgccgggctggtggtgtccctgcgtttgctggcggcgatcgtgatttttgccgctattgcgccgggtattctgatgaccgcgccggcggtggcggcgcagctggccagcgaatggcagctaaaacccgggcagatcggctggctgttctcagcggagctgggggcgatgagcctggcgacgctcccggcgtggtggtggatgagccgcctcgactggcggcgggttgccctgacggccggggtggtgtttctggccgccaacctcgcctcggcggtggtcacccagtacgagacgctgctggcggcgcgctttatcgcctcgctggcgggcggcacgttgatgattttgtgcatcagctgcgcggccggaacgccgaacccgtcccgggtctacgccttctgggtgctcgggcaactgctgttagggatgcttggcctgctggcgctgcccggcctgttcgcgacctttggcctgaaggtggtgtatctgatcctcgctgccatcatgctctgctgtttgccgctggtatccgctttccctccgcgctttcaaccgctttcagtctcccgccagcagccgtcgacggcgctgtggcgtcaggcgctggcggtgctggcggtgctcactttctatatcagcctcagcgccgtgtggacctttatcggcaccatcggcagcgcggcggggctgagcccgacgcaggtcggtctggtgctggcggcggcgacggtttgcggcattatcggcgccggcggcgcggccctgcgcggcacccggcgggccgatcgtttaccggtgtggctgggctacggcctgttgatcgtcagcgttgggctgctgatcggccagccgctgctggtgcgttacgccatcgcggcgctgctgtttaagttcacctggaccttcgtgctgccctttattctcgcccgcgtggccgggctcgataacagcggtcggctaatgaacagcatcaatctggtgatcggcggcggcatggcggctggcccggcgcttgcgggggccttactgcaacacttcgccagcgccgacccgctgctggcggcggcaggcgtctgcgcgctgctgtcactgattttaattgtggcggcgtccgccgccgggaaggcttag

SEQ ID NO: 238849 - DNA, 1116 bp, Klebsiella pneumoniae
gtgaaaagaaaaaccggtttcttctttgatgaacgttgtttctggcacagtaccggtctgcacgcggtgacgctgccggtgggcgggtgggtacagccgcccgccggcggcggtcatgctgaatcgccagagaccaaacggcggatgaaaaacctgatggatgtctccgggctgacgccgcagctggcgctgcgcagcgcggcggcggcgagccttgaggacctgtggcggatccatcccgatagctatcttgagcgttttaaggcaatcagcgataacggcggcggcatgctcggcaaagaggcgccgctggggccggggagttatgaaatcgcctgcctttccgccggactggcctgtgcggcggtggaagcggtgttgaaaggggagctggataacgcctattcgctgtcgcggccgccaggacaccactgcctgccggatcagtcgatggggttttgtttcctcgccaatattcccattgccgttgaacgggcgaaagtgttgctggggctcggcaaggtagcgattattgactgggacgttcaccacggcaacggtacacagcatatctatctgcagcgcgatgatgtgctgactatctcattgcatcaggacggctgcttcccgccgggctactccggggaggacgatcgcggcgttggcgcgggcgaaggttacaacatcaatattccgctgttggccggggcgggcgacgacagctggcgctatgcgctggaaactatcgtcattcccgcgctggcgcgttttgaaccggagttgatcattgtcgcctgcggctatgacgccaacgcgatggatccattagcgcggatgcagctacatagcgacagcttccgggcgatgaccgaacaggtccagcaggcggcggatcgcctgtgcggcgggaaactggtgatggtgcacgaaggcggctacgccgagtcctacgtgccgttttgcggcctggcggtgatggaaacgctgagcggcgtgcgcaccgaggttcaggatccgctgctggaatttattcagcagcagcagccgcgcgccacgttcgcgcagttccagcgccaggccatcgatcggctggcgcagcagtttggtctgctataa

SEQ ID NO: 238850 - DNA, 594 bp, Klebsiella pneumoniae
atgtcctccgtcccctggtttgaaacgccgttaatgaacgcggtgcagcgcgatctggcgggctggcccagcgaaaagctgagcgaacgcagcgcgctgctgcgcttgaacgacgccaccgccgtcatcttcagcgtgcgtcagaagcggctgtttatggccagcattcacagctgcgagtttgtcgtcgaggggccggtgacccggcccgtgcgcggtaacattcgcgcccatcaatccggctggtggaaacgccagccgatccgctttatcggcggcaaagacagcgcggaactcgccggctatctcaacggttttcctaatctccagcagaccttaagcgagctggattaccgccgcttttcgctgacctttgatagtagcggctggcgctgcagcattgaaccctgggccgccagcgaagtggtctgtaaaatgccgccgctgcgccgttatctgcggctggaagcgcagcagcggatgctgctgctcagcgtgctggcgatgattaatcaggcggtaagtcagtggatgcgcggtgaaatcgcagaagagaaagcattgacttccccgccatcaccgcggggaagctga

SEQ ID NO: 238851 - DNA, 1500 bp, Klebsiella pneumoniae
atgtttagtaacagactcgccagccatcttgagcgcggcgtcgtcggcttcccgaccaccctcgccagctccgtcgggctgatcatggccagcccggtgatcctgacggtcaccagcggcttcggcatgggcggtgataccttcgcgctggcggtgctgctggcctttattatgatgcaggcgcaggtcaccacctttgccgaggcggcgacgctcattcccaccaccggttcggtgtacgactatatctcctgcggcatgggccgcttcttcgctatcaccggcgcgctgtgcgcctatctgatcgtccatatcttcgccgggacggcggagacgatcctggcgggcattatggcgctggtgaacttcgagtcgattaacgcccagatggccgcccaccagaatacctggatggtgggcgtcggcatggtggtaattttcggcttactcaacgccatcggcgtggaaatcttcggcaaggtcgaagtggtgctgaccttcggcatgtggaccacgctgaccattttcggcctgtgcggcatttttatggcgccggtcacccatctttccggctggttcggcacgccgctgaacgttagcgatatcaacggcctgttcggctatatcggcatggcgatgtttatgttcgtcggttgcgaactggtgacgccgatggcgccggagatcaaacaggcccaccgcaccataccgcgggcgatggcgctgggcctgctgggggtcgccagctgcatgtttatctacggcgcggcgatcaaccgccaggtggagaataccgtgctcgacgcggccaacaacgtccatctgctggatacaccgatggcgatcccggccttcgccgaacgggtgatgggccacgccggccagtactggctgggggttgggctgctgttggccggctgcgccaccatcaatacgctgatggccgccgtgccgcgtattatctacggcatggcgctggacggcgcgctgccccgtttcctgacctggctgcatccgcgctttaagacgccggtgatcgccattgccatcggggtggcgatcccttgcctgcacgcctggtatctgaacggcgatctggaccgcatcgtgccgcagatcctcgccgcggtctgcgcctggggcgtcgcctatctgctggttactctgtcggtggtgatgctgcgcattcgccgcccggacctgccgcgcgcctaccgctcgccgtggttcccgctgccgcagattatctccagcgtcgggatcatcatcgctatcgtcaatatcacgccgcccgggatggacagccgccaggtgctggtgccgttcggcataatgctcggcctgaccgccgcttacgccctgttctggacggtgtgcgtgcagcgcgtcaatccgttcaagctgctggtagtggaagaggtggtggagcgcgccatcaacaattatgaaaaacagacccgcggggagatgacgccagatgtcctccgtcccctggtttga

SEQ ID NO: 238852 - DNA, 366 bp, Klebsiella pneumoniae
atgcacgcttttaaacttaaacacccggtacctgatctgcagccgatcggcagcgtcagcctgctcggcgcgacgccgaccgccggcgacccgcaggtagcgggcgcgatgatctacggcgagccgcaggacgcctttacctgcggactgttttcgtccactgaggggagctttaccatgacctatccgtttaccgagcacgccaccgtgctggagggcgaagtggagctgaccgtcgccggcggcgagccgcaacgctttgcgccgggcgacagctggtttgttaaacagggcaccgaagtggagtggaaaattctgacgccgcgctttgtgaagcactacctggcgaacgtcgagacccgctaa

SEQ ID NO: 238853 - DNA, 1302 bp, Klebsiella pneumoniae
atgaacatcaagatcgatgcgctgaactactacggcgcgacgaagaaatatcacctccatttcccggcgctacgggaagatattgaagccgatgtggtaattatcggcggcggcttctctggcattaacaccgcccttgagctggcggaacatgggatcaccaacgtggtggtgctggaggcgcgccatctcggctacggcggcaccgggcgcaacggcggccaggtgatggccggtatcggccacgatatcgaagcggtaaaaaagcacgtcggcaaagaggggctggagacgctgtttaaaatcgccaacctcggcgcgggcatcattcgcgaacgcatccgcaaatacaacatcgacgccgatttcgtgcccggctacggctatctcgcctataaccaacgacagcttaaaacgctgcgccagtgggagaaggagtttaaagccgctaccccggatgaagagatcgaactgtataccggaaaagaggtgcagcaggtggtgggctccgaggtctactgcggcgcgctgaaacatatgggcggcggccagatccattcactcaatatgctgctcggttcggcgcaggccgcccactcgctgggggtgaagattttcgaatcctcgccggtggtggaggtgagttacggcaaacagatgcgggtacgcaccgcgatgggcagcgtcaaagccgccaaactgctgtgggcctgcgacagtttcctcaacaatatggagccggagatctacaacaagacgctggtcacttactcctaccaggtgtcgaccgagccgctctccgatgaactgatcgagcgcatcagcccgctgcgcggcgccttcagcgatattcgcccggtaattaactactaccgcgtcacccgggaaaaccgcctgctgttcggcagcgccacccgctttgtggagtatacgccgaacgatttcgccgcctggaaccgcaccttactggcggaggtcttcccctatctcagggatgtgaagatcgattttgcgtggggcgggccgatggcctgtagcgccaatctgttcccgcagatcggcaccctacgcgatcacaataacgtcttttacgtccaggggtactccggcttcggcgtcaccccgtcgcacatcgtgtgcaaaatcctcgccgaagggatcaacggcggttccgaccgctatcgcctgctgagcagcatcccccacgcgaccatccacggtcgtgacagtctgcgcttgctattagtcacggccggaaaactgatgcatcaaaccgccggtttctggaaaggccggagttaa

SEQ ID NO: 238854 - DNA, 1485 bp, Klebsiella pneumoniae
atgagcgagataaccttactggcggaagtgaccgccttcttacgccagccgcacgggcagtttattgccggtcaacgtgaggcgggccgcggcgcgccgttcgcggtgatcaacccggcgaccgggcgggcgattgccgaggtcaccgcggcggatagtgaccaggcggatcgcgctatggagagcgcccgccaggcgttaagtcagtggcgcgagatgccgacgctggcgcgcggcgcgctgctgctgaagctggcggacacgctggcagagcatcgcgaagcgctggcgcagctggaaagtctctgttccggcaaaactatcacgctggcgcggatgctcgagctggaccagtcggtggcgttcctgcgctacttcgccggctgggcggggaaagtcaccggtgaaacgctggatgtctcgctgccatcgatggccggggagaaatataccgcctttacccgccgccagccgctgggggtggtggttggcatcgtgccgtggaacttctccatcatgattgccatctggaagctggcggcggccctggtctgcggctgcaccatcgtcctcaagccgagcgaatatacgccgctgacgctgctgcgcgtggcggagctggcaaaagcggtgggtatcccggatggggtgattaacgtggtcaacggcgccggcggcgagattgcccagcggctgattacgcatccggcctgcgccaaggtgagcttcaccggctcggtggccaccggggaaaaagtccagcagtcggccagtgcgtcaggtaaacgggtgacccttgagctgggggggaaaaacgccgcgctgttcctcgatgacctgacgccggaggcgatggtcaacggcattattaaagctggctacctgaaccaggggcagatttgcgccgctgcggaacgtttttatctgccgcagggaaaactggatgcggtactggcgctgctgaaagacaagctcagcgcttttgcgccggggtcgccgctggatgaacggacgctgatggggccgctggccaaccgccagcagtatgacaaagttttgcggctcattcagaccgcccgcgacgagggcgataccatcgtctgcggcggcgaagcgctgccgggggagggctatttcctgcagccgaccgcggttaaagtgcgcagcgaagagagtactctgatgcgcgaggagaccttcggcccggtatgcagctttatcggctatcgcagcgaagaagaggcgctggcacgaattaatgcttcgccgtatggactggcggccagcgtctggtcggataatattcgtcaggcgctacgctactcggaggcgattgaggccggcatcgtatgggtcaatatgcataccttcctcgacccggcggtaccgttcggcggcatgaagggctcgggcatcgggcgcgaattcggcagcgcgtttatcgatgattatacggagctgaagtcggtgatggtgcgatattaa

SEQ ID NO: 238855 - DNA, 2199 bp, Klebsiella pneumoniae
atgcacaccacgcactattcatccttcccgctgcgtaaaacgctgctggccttagccatcggcgccgccagtcaaacggcgatggccgcggacgctgccgccgcgaagcagcctggcgaagagaccctcatcgtcgaggctaacgaaaccagcgattttaaatccggcggcgacctggtggttccggcattcctcgatggccagatcgcccacggcggccgtctggggatgcttggcgaacaaaaagcgatggacgtcccgtttaacgtcatcggctatacctcgaagctgattcaggatcagcaggcgaaaactatcgccgatgtcgtcagtaacgacgctggcgtgcaggccgtacagggctacggcaacttcgccgagacctatcgaatccgcgggtttaagctcgatggcgatgacatgacgatgggcggcctggcgggcgtggtgccgcgtcaggtgatggacacccagatgctggagcgcgttgaaattttcaaaggggctaacagcctgcttaacggcgcggccagcagcggcgtcggcgggatgattaacctcgagccgaagcgggcggaagatctgccgaccgcacgcgttggcgtcgactatacctctgattctcaggtgggcggcaccctcgacctggggcgccgtttcggcgacaacaaccagttcggcgcccgggtcaacctggtgcaccgcgagggtgaaggcgctatcgataatgataaacgccgtaccacgctggcttcgctggggcttgattaccgcggcgaccgtttccgctcctcgctcgatttcggctatcagaagaaaacgttccacggcggtacgatgggcgtcaatatcagcggcgtggatttcgttccggcgctgccggacaacagcaaaaactacagccagaagtggggctatagcgatattgaaagcgagttcggcatggcgaaggcagaatatgacctgaccgatagctggacggtatacagcgccctcggcggccagcattcgcatgaaattggtacctacagcgcgccgaagcttctgaataaaaacggcgatgcgacggtgggccgcctggatactaaccgcattatcgacgcgatcagcggcatgggcggggtacgcggcgatttcaataccggcgcgatttcgcataaggtgaacctcggctatgcggcgcaggtgcataccgatgcgaccgcctggcggatgtcggccaggaacccgaccactaatatctatgacaaccatgatgtggcgatgccggataacgcctattttggcggcaactaccacgatccgctggtcacctcgcgcagccgtacgcagggctggctgctgagtgataccctcggcttctttaacgataaagtgctgtttaccgccgctgctcgtcatcagaaagtggttgtgcgcaactacagcaacgccaccgggctggaagatacctcttcgcgttatacccaaagccgctggatgccgacgtttggcctggtgtacaagccgtgggagcagctgtcgctgtatgctaaccataccgaagcgctgcagccgggctctgtggcgccgacgacggcggccaatgccgggcagagtaccgggatcgcgcactcgaagcaggacgaagtgggcgtcaagatcgactacggtacgatcggaggatcgctggcgctgtttgaaatcaaaaaaccgaacgccatttccgataccgctggcaattacggcctcgacggcgagcagcgtaaccgcggcgtagagatgaacgtctttggcgaaccgatgctgggactgcgtcttaacgccagtaccgtctggctggatgccaaacagactaaaaccgctgaaggcgcaaccgacggtaaagatgccatcggggtggctaacttctacgcggtactcggcgccgaatatgacatcaagccggtggaaggcctgaccgccaccgcgcgcgtcaatcatagcggctcgcagtatgccgatgcggccaataccaagaagctggatagctacaccaccctggatttaggcctgcgctatcgtatgcgtctgaacgccgaccagaacgaaatgatctggcgcgtcggggtgaccaacgtgaccaacgagaagtactggtctggcattgacgataccggtacttacctgttcgaaggcgatccgcgtaccgtccgcgtctcaatgagctacgacttctga

SEQ ID NO: 238856 - DNA, 1377 bp, Klebsiella pneumoniae
gtgaaagacgcgtcaacgtcgtcggagaccgtcacggaaagtggcccgacgcttcatcgcggtttacagaaccgacacattcaacttatcgcccttggcggcgcgattggcaccggcctgtttctcggcattggtcccgctatccagatggccggtccggcggtcttactgggctacgccgtggccgggattgtcgcttttctgatcatgcgtcagctgggcgaaatggtggtggaagagccagtatccggttcctttgcccactttgcctataaatactgggggccgttcgccggctttctctccggctggaactactgggtgatgttcgtgctggtagggatggcggagctgaccgccgccgggatctatatgcagtactggcttcccgacgtgcccacctgggtttgggcggcggctttcttcatcattattaacgccgtcaacctggtcaacgtacgcttgtatggcgaagcggagttctggttcgcgctgatcaaggtgctggcgattatcggcatgattgccttcggcctgtggatgctgttcggcggccacggcggcagcaaagccgggttcgacaatctgtggaaacacggcggcttcctcgccaccggctggcacggacttattctgtcgctggcggtgatcatgttctccttcggcgggctggagcttatcggcatcaccgccgccgaagcgcaaaacccggaaaagagcattccaaaagcggtcaatcaggtggtctatcgtatcctgctgttctatatcggttcgctggtggtgctgctggcgctctacccgtgggtggagatcaaatccgacagcagcccgtttgtgatgattttccataatctggacagcaacctggtggcctccgcgctgaacttcgtcattctggtggcctcgctgtcggtgtataacagcggcgtgtactccaacagccggatgctgttcggcctgtcggtgcagggtaatgcgccgaaatttctcgcccgcgtcagcaagcgcggcgtgccggtgaactccctgctgctctccgggattatcacttcgctggtggtggtgctgaactacctgctgccgcatgaagcgctggggctgctgatggccctggtggtggcgacgttgctgctgaactggatcatgatctgtatggcgcacctgaagttccgcgccgcccagcgccgcaaagggcgcgaatcgaagttcaaagcgctgctggcgcccgccagcaactacttctgcattgctttccttgggctgatcctggcgctgatgtgcactatcgacggcatgcgtctgtcggcgatcctgctgccggtgtggatcctgttcctgtttatcgccttcaaactgctgcgccgcccggcgtaa

SEQ ID NO: 238857 - DNA, 1023 bp, Klebsiella pneumoniae
atgaaaacgattaagggaccgggcatttttctggcgcagtttatcgggccgcaggcgccgttcaacaccctggcggggatagcgcagtgggccgccggcctggggtacaaggcattgcagatcccctgcaaccacccggcgatttttgatgtcgagcgggcggcggcgagccagacctactgcgacgaggtcagcggcatcctggcggagcatgggctggtgatcagcgagctgtccactcaccttgaaggacagctggtggcggtgcatccagcgtatgacgcggcgtttgatgcctttgccccggcggcgctgcatggcgatccgcaggcgcgccagcgctgggcggtggagaaagtgcgccaggcggcggtagcctccggccgcctggggctgcaggcgcacgcgaccttttccggggcgctggcatggccctttttttatccgtggccgccgcacaatcagccgcttctggatgaggcctttgccgagctggcccggcgctggcggccgctgctggacctcttcgacgagcagggggtcgatgtctgctatgagatccaccccggcgaagacctgcacgatggcgtgacctttgagcgttttcttacgctggtggataaccatccgcgctgcaatatgctctatgacccgagccacctgcatctgcagcagatggactacctgacctatatcgatatctatcatgcgcgtattaaagcgtttcacgtcaaggacgccgaatttcgccgcaacgggcgcaatggcgtctacggtggataccagccctggcagcagcgggccgggcgtttccgctctcccggcgacgggcagatcgacttcaaaggggtgttcagtaagctgaccgaatatgattttgccggctgggcggtgctggagtgggagtgctgcctgaaggatagtgagaccggcgcgcgcgagggcagcgagtttatccgccgccatatcattcccgttgccggacgggccttcgatgactttgccgccggcgggagggagtaa

SEQ ID NO: 238858 - DNA, 1152 bp, Klebsiella pneumoniae
atgattcaggttgcgattatcggggcagggtttattggcccggcgcatctggaggcgctgcggcggctgggagatgtcgaggtggtggcgttgtgcgacagccgccttgaggcggcgcagcgcaaggcgcgagcgctgaacattgcccatgcctacgacagcgtggaggcgctgctggcccatccggggctgcaggtggtgcataactgtacgcccaaccatctacatgcccagattaaccggcagatcctcgccgccgggctgcacgtcttctccgaaaaaccgctgtgtatgacggcggaggaggcgcgggagctggtggcgcttgccgcccgggccggcgtggtgcatggcgtcagcttcgtctaccgccagttcgctatggtccagcaggcggcggcgatgatccgccatggcgaggtcggcagaatcttcgcggcccacggcagctatttacaggactggatgctgctggagaccgactacaactggcgggtcgattcggcgcagggcggcgcgtcgcggacggtggccgacatcggctcccactggtgcgataccgtgcagtttatgaccggtcggcggattgtcgaggtgatggcggatctgtctatcgtctggccaacgcgtaaagcgccggtcaatggcaaagcgaccttcagcgccgttcacgaggcgcaggcatatgaaacgcggcctgtcgataccgaggactttggctcggtgctgttgcgttttgacgatggcagcaaaggcagctttatggtctctcaggtgagcgccgggcggaaaaaccgtctggcggtggagattaacggcagcctctgttctctggcctgggatcaggaagtgccccagcggctgtggatcggccaccgcgagcagccggatcgcctgctcagcgatgagccgagcctgctgcggccggaaatcgctgacagcgcccattaccccggcggccatattgagggctggccggacgcctttaagaatatgatggggcatttttatcaggcggtgcgcgccgggaagatgccggcggccggggtccggcgcttcgccgctttcgacgacggcgccgatgtgatgtacatcatcgaggcgatcgtcaaaagccatcaggaacagcgctgggtcagcgtcgaacgctga

SEQ ID NO: 238859 - DNA, 417 bp, Klebsiella pneumoniae; identical to SEQ ID NO: 137787

SEQ ID NO: 238860 - DNA, 981 bp, Klebsiella pneumoniae
atgtctattcagaaaattgctcgtctggccggcgtctcggtggccacggtgtcgcgggtgctgaacaacagcgatacggtaaaagccaaaaaccgtgagcgcgtgctgcaggcgatcaaagagagcaactatcagccgaacctgctggcgcgtcagctgcgaaccgcccgcagcaatatgatcctggtgatggtctccaatatcgctaaccccttttgcgccgaggtggtgaaggggatagaagaagaggcggagaagaatggctatcgcattctgctgtgtaactccgggtcggatctggcccgctcgacctcgggcctgcagctgctctccggcaaaatggtcgacggcattattaccatgaacgcgctctccagcctgccggaactgaccaccatgattggcgacgcgccctgggtgcagtgcgcggagtatgccgacaccggcagcatctcctgcgtcgggattaacgacgttgaggcggctcagggggcggtatcccggttggccgatagcggccgccgccgcatcgcgctcattaatcacgacctcagctatcgctatgcccgtctgcgcgagcgcggctataaaagcgtgctgcacgtgcacggtctggcgtatcagcaggtgacctacgcgcaggatcttagcgcggcggccggtaaacgggcgatggagcaactgctgtcgcaagacgagaagcccgatgcggtgtttgccgtttcggactccctcgccgccggggcgctgcgggctatcgcccaggccggactgcgggtgccggaggatatcgcggtgatcggcttcgatggcaccgagctggcggaagtggtctccccgcagctgaccaccgtcgaacagccctcccgggcgatcggccgtacggcggtgtctctactgatgaaacgcatcgacgatcccgacgctgccgtcgagcgggtgatgatggactggcgcgtgatagaccgcgccagcgtctga

SEQ ID NO: 238861 - DNA, 1428 bp, Klebsiella pneumoniae
atgaatacgtctgctgtttcacccggccgcgccggtctgttgctgctgctgagcggccagatgctgccgcttattgatacctcgatcaccaatgtggcgctggacgccatcacccacaccctggcggccagcgccacgcagctggagcttatcgtcgcgctgtacggcgtcgcctttgccgtctgcctggcgatgggcagtaagcttggcgataactatggccgccggcgcctgtttatgtggggcgtcgccctctttggcatcgcttccctgctgtgcgggatggcgaacagcatcggcgccctgctggcggcccgcaccctgcagggcgccggggcggcgctgattgtgccgcagatcctcgccaccctgcacgtcaccctcaaaggccccgcccacgcccgggccatcagcctgtatggcgggatcggcgggatcgcctttatcgtcggtcagatgggcggcggctggctggtgtcggcggacatcgccgggctgggctggcgcaacgccttttttatcaatgtgccgatctgcctgctggtgctggctctgagccgccgctatgtgccggaaacccgtcgcgagacgccgtcgcggattgactggcagggcacgctgtacctcgcgctgatcctctgctgcctgctgttcccgatggccctcggtccggagctgcactggccgctgtggctgcagctgatgctggtggcggtcctgccgctgctgttcgccatgcgtcagagcgccctgcgccagcagcagcgtggcgaccatcctctgctgccgccgcgtctgctgcagttaaccagcatccgcttcgggatggccatcgccctgctgtttttcagcgcctggtccggctttatgttctgcatggcgctgaccatgcaggaggggctggggatggcgccgtggcagtccggcaatagcttcatcgccctcggcgtggcctattttatttcggcgctgtatgccccgcggcttatcgcccgctacagcatggggcggatcctgctgaccggtctggcggtgcagatcgccggactcctgctgctgtgcgccaccttctcccgcttcggcgtcgccaccagcgccctgacgctggtccccgccacggcgctgatcggctatggccaggcgctgatcgtcaacagcttttatcggattggtatgcgcgatatcagcgccagcgacgccggggccgggagcgcaatcctcagcaccctgcagcaggcgaccctcggtctcggaccggctattcttggttcgctgttcctggcgctggcccgtcgcggcggcggcaactatccgcaggcgctgattgattttctgctggtcgaggtggccatgatgctgttgctgggggcgatagcgctgtggctacgccatcatctcaaccgacagccggcgacggtggcctcgtaa

SEQ ID NO: 238862 - DNA, 210 bp, Klebsiella pneumoniae
atgaccacgatgccgcaacgggagtcgacgatcgccgtgccggacgatcgacgcaaacagctgggggcctttctgcgcgcccgccgtgaaagcctcgatccgcagcgcctggggttgccccgggtgggccgccggcgcacgccgggtctgcgccgggaagaggtggcgatgctcgccgacgtcggcgttacctggtacacctggctgtaa

SEQ ID NO: 238863 - DNA, 507 bp, Klebsiella pneumoniae
atgactacaaaaagacaggctcagagagccgctgagagcgatttacaggcattcctgaacgaagccgccgaccggttcaaacccgacgccgccgtattagccgcgcgtatagataccgccgtccaacgttacgaagtaacgagcaccacacagcgtttcaacgctccagcgccgctggcaatccagcaactccaggagaggatattggaaggctggcggtacgatatcggcatccctcaatccgtttacgttgccggtactggaaacatgagcatcaccctccgtaaaccggcgtcgctggtggaacaggagatagctgacctgaaaagacaggtggaggatgcatatcataacgagctggctgccgcgatcgagagagaagtggacaagctggtacaggacgccgccaacgaagcccagcaacgtgcagaggaggcagcagcagcagaacacgacgctatgcgccagcgtctccgcgatatgctgctgaatggggcgactgtatga

SEQ ID NO: 238864 - DNA, 147 bp, Klebsiella pneumoniae; identical to SEQ ID NO: 224583

SEQ ID NO: 238865 - DNA, 198 bp, Klebsiella pneumoniae; identical to SEQ ID NO: 224584

SEQ ID NO: 238866 - DNA, 1296 bp, Klebsiella pneumoniae
atgccaaacccgaacaacgaaaaaataaagaaacagattctcagcgcctttatcgactacctgaaagatcacggatgggtgatgaaagcgacaaataacctctcagtcctgttcaacatccgtgatggttccaccctcaatgatgacagtatcagcggcctgttttaccagtgggccaaccggaactcatatgctgagattgagtacgaggatcgttggtggaacaccatacgccaccggttaacgttcgtcatcggtgaagccttccagccagcggtagacccggaattatttgtgccgttgagttccggggtgcttgcagtcaatacgtacaaaagatacgtgaaggacgaaccagccaatggttttaaccctgacccggccccgtggattgaatttatcgagcgtctgtttccgcaggaaactgaccgggaaatagtgtgcgactggatggcgcatatgctccagcgccccgatcagcgtccgtcatggcacctgttattcacgggtgatactggcaccgggaaaggcgtgatctttgagcatatcctcaccccgctgctttctggtcagactgcctcgctggactcattcgccaaactgacggagaaacacagtacaacgctggcctccaatatgctgatccacctggatgatgtctccaccaacagcgacagccagatgacccggttaaaatccattcttagcgaggaatggcagcagatacgcccgctttatgaaaaagagcgtagcgcacgggtttacacgcggatcattctctcaagcaaccagccccgccccctgcgactggatgagaacgaacgccgctggtacgccccggagtttatgacgcacaaagctgaccggcaggagacgcaacaattcatccagaaccgtctcttgccgtgggtatccagcggcgggctggacgtgatttatgagtggcttatggcgcgtgacctgtgtcagttcaaccataaatacgtgccgcagtccgattgcctgcgccggatgatatcggattcagtttcaatcctggaaatgcaagtccgtgaatgggtggcagataacccggcattccgactggagacgctgcaggcccagttccccgatctccgaaactgccagatagcttccagctacctgacggcgatgaagtaccggaagtgccagccgtaccagagaaacccagatccgaccggcaaaacgtcaaaacaatggtggtggatacctgatggctggacaccagccagcttgcgggagcaccttgcaaccgtcgaggagttcacattctga

SEQ ID NO: 238867 - DNA, 633 bp, Klebsiella pneumoniae; identical to SEQ ID NO: 238612

SEQ ID NO: 238868 - DNA, 1800 bp, Klebsiella pneumoniae; identical to SEQ ID NO: 224589

SEQ ID NO: 238869 - DNA, 645 bp, Klebsiella pneumoniae
gtgaatccgtcggaggcggtgctggtgggggtggcgaatgccctgcagtgcagtccgctggagacccggcatctgttcgtgctcgccgggctgaccccgccggaagccacccaggtgacggtgtgcgaaggcatcagcccagggacccgccggatgctggacagcctgatgccgcagccggccagcattcagaaaccgaactttgatattgtggcgtggaacgacagcttctgccgcctgatgggcatcgatttcgccaccctcccggaagaagatcgcaactgcatttatctctatctgacccatgagacctggcgcagccggatcgaaaatcgcgatgtgctgccgaccttcgtctcctatttccgcgccgcgatggccgagcaccgcggcgatccggcgtgggaaaacaaactggcgcgctttttcgccgcctcgtcggagtttgaagcgctgtggcatcagcgctacgaggtgcgcggcgtggaaaaccagattaaacattttaaccacccgcagctcgggcgattcagcctacagcagatgtactggtattcggcgccgcgcaacggctcgcgcctgctggtctacctgccgatggacgaggcgggcgagcaggcgctggcgtggctggaccaacattaa

SEQ ID NO: 238870 - DNA, 1035 bp, Klebsiella pneumoniae
atgaacgtaacccgaaaagagcagcgcattattcagcgcgcgctgaatgcctggcaggccagcggggagttaaccccctcggacagccagcggctggcgcaaacgatgcgcgtctccccctttgactggcggcgcctgagccgctatgccttctggaccgcgctggcctgcgtgctgatttccctgggcagtctgttcgccgacagcgagctggtggcgtggctgctgagcctgttcagccactcggcgctgatgcggatcctgctgcctgcgctgctggcagtcgtctgctacggctggggttttcgccgccagcggcgggagacgcagtggcactacagcaccgaggcgattttgtttctgggcgtcgtctttaccgcggtggcgctatggcagcttggcgaacggctggataacggcagcggccatatcgcaccgctgtttctggccggatgcgtgatttacggtgccattggctatattgcccgctccgggctggtgtggctcttttttctgctggcgctgggcaactggttcggcgcggaaaccggctacgtctcggggtggggcgcctactggctgggcatgaactacccgattcgcttcgtcctgttcggcggcgcgctgctggcgctctgctacggcgcgcaatccctgcttcgccagcggcagctgtttaccgtcagcaaggcgatgggcctcacgtatctgtttattgcgctgtggatcatgtcgattttcggcaattacgacgcagacagctggtaccaggtgagccaggcgcgactcctgccgtgggggctgctgtttgccgtagcggccggcgtctgcatttttatcagcctgaaaaccgatgacggaatgctgcgcggcttcggactaaccttcctggcgatcaatctctatacccgtttctttgagtttttctggaacgggatgcacaaagtgctgtttttcctgatccttgccgtctcgctggcggtgattggccgctatgccgagcgcatctggcatgcggggaacgttaagccatga

SEQ ID NO: 238871 - DNA, 2730 bp, Klebsiella pneumoniae
atgaataaggagtcgatttttcgccaactagaacaacggatcgccgggcgagcgctgacggcggaagcgctgggcgagtttaacgctatggccatcgccgatagcttgaagcaaaaacgcagcatcatcagccatcatctgaataatctccatcgcgagcagcgggtggtcaaagtgaacggtcgcccggtgctgtttttacccgttaccgttctgcgcgatcatcaccgcctggcggttcggcacggcgaatacgcctccattcaggcgctgtgcgcggatcgtcaggatagtctggcgcagctgattggcgcgcagggcagcctgcaggaagcattgcgccagtgcaaggctgccatcagctaccctggcgcaggtctgccgctgctgctgcggggccctactggcaccgggaaaagttttctagctcgccagctctggcactacgcaatagatgaaggtattttacctgccgatgcgccttttaccgtatttaactgcgccgagtacgcgaataatccagaactactgacctcgaagttatttggtcatgcgaagggggcctttaccggcgccgataaggccgttcctggtcttatcgagaccagcaacggcggggtgttgtttatcgatgaggttcatcggctgccgcccgaaggccaggaaaagttgtttcattttatggataacggtagctggcgccggctgggggagagcgccgacgagcgcagcgccacggtgcggctaatttttgcttcaaccgaggatctggaaaaacacttcctggcgacctttattcgccgtattccggtgattgtaaaaattctgccgatcgctgaacgcggccaattcgagcggctggcgtttatccaccactttttccgccgtgaagcccagcgtttgaaccacgatctggcgctggatggcgaaatcgtcagccagctaatgcgtgaaacgcttgaaggaaatgtcggtgggctggaaaatttgattcgcaatatttgcgccagcgcctggacatttggcgaacgtgatagcggtcttttacatataaaagcgggtttgctgcccgaccgattactggcggatgcgccttttacccttcagcaaaatagcgagcgggttatgatttaccgcgatggcgacgcgcagcctcttttttctggtcgtcaccatgaataccaacggctaacggaaaatatttgtagcctgtgcgaggagttggctcaggataatattagcgtgcggacctttgaaaagcttatttatcagaacgtgacgctctatcttgatgcgctgatgaatcaggagagtacggtctctctgcaggacaaacggctgcgctttattgaagatgtgggcaaagcaatcgctgtcaattatgaccttcagctaaatgtcgaattcgcttatcttaccggccgctacctcaccagcctccctctggcgccgcgcagcgttgctgagcccgtgcgtctggtgatgcagcgctggctggactcctcggcggggctggcgcaacgcatcgcggagaaactactggatgtcgtcaataataaatacgatctgctcatcgatacgcttgaccgtctggcgattaccgccattgtcagtaatgctatcgatgcgaccagcggcggaaaagtgaaagcgctgataatcgcccacggttattcgaccgccagcagcattgccggcgttgccaaccgcctgattggcgagaagatctaccaggccatggatatgccgatggaggtggcgtttaacgatgtcagtcgcgccgtggttgattatctccagcatacggacacgcgtgcgggtgtgatggtgcttattgatatgggctacaccaaggagattgccgatgcgcttttgtcggtgattaacggcccgctggtagtggtggataacgtcacgacccgcatggcgctgaacgttgccagcgagatcgcgttgggaaaaaacatcgaacaaatcgccgaagagatcgtgccgcttaatcagtcgcgttgggatgtgttctggcccgcagaaaaaaaagagcgtgtgctgctggtgacctgtattacaggtatcggtaccgcatttaaatttaaaaatctgatggagaagagcctgctcaacgattttgatattaacatcatcgcctgcgagtatacgcgcttaaaaaacagtcgtacggcggtatcgttgctccaccagtatgaagttattgcggtcgtgggtacccacgacccgcagctggccggagtgccctgggttggcattgaggaactacttggcgagcaggggcatcgacatctgagtcagctcttaagcggctatcttaatgaaaagcaaattgcgctgattaataaaaatatggttcgtgagttttcactgcataacgttgtcaactctctgacgatactgaatgctggaaaaaccatgggccatatcgaaaccattatcgctgagtggcaaaatacgcttggttttcattttaataataacttaattatcagtttatatgtgcatctcagctgtatgattgagcgtctggtaatgcgtaatgaaattagccattataacgatcttgagcaatttacccgccagcatggtgaatttattgccatggtgaatcactcgttccagcgcctgaaaatactctataacgtggcgctaccggtagcggaaattggctatattcacgatatttttgaattacgtattgaagattttagctggtaa

SEQ ID NO: 238872 - DNA, 1062 bp, Klebsiella pneumoniae
atgcacgtagaagactatatgaatgaaacacccgcctgtctgctcgctatgctgacgcagacgcgggaagatctctggcaggcggcaaaagcgctaacggagcgcggcgtcacgcgtattatcctgaccggctccggtacctcttatcacggcgcgctgaccgcccgctcgtttatgcagcagtggtgcgggctacccgttgatgtctactggccttttctgctggatgattcggcgctgaccctcagcgacaaagcgctggtcatcggtatttctcagggaggcggcagcctctctaccctcgccgcaatggaacgcgcccgggcagccgggcatcttaccgcttccatggccggggaagcgccagccgttatcgaccgggcggcagatttggtcttaacagtaccctgtggagaagagcgggctggcgccaaaaccaaagggtatcactgcaccatacttaatctgatgctgctggggcttgctgtcgccagtcgccagcggcgcctgagcgatgaggagcgcaaggcgctactcatccgcatggataccacgtttaatcatttgccgacgctcattgaggcctcgcaggcgtgggttctcaatcatgcccgaccgcttatcgacagcgcggacattcgcctgaccggtccggcaaggctgtttggcaccgttcaggaaggtgcgctaaagatgcttgaaacgctacgctgtccggttgccggttacgaatttgaggagttcatccacgggatctataacgccttcgacgagcgctctaccctgatcatgctcgatccgtttcccgatgagcgtcaggatcgcctggcggaaatacttggcggctggactcagcatatttatcgcattggtccacaagtcgaaaataacggcaaaaatatgcccttcgcatttattaacgatcccgactttgcggtctttgaatatattattccgttacaaatggtttgtgcccgactgccgccagtgaagggcatcgatcccgcaataccgaaggatccgcagttccaccagaaaatgaaaagtaaacaactcaattaa

SEQ ID NO: 238873 - DNA, 855 bp, Klebsiella pneumoniae
atgagcgaaatgacgcaaactgtgactggcgctacccagccgcaaagcgatgatgcaagccgcatcaccgcccgcgatttacgcagcgtgttctggcgctcctttacgctacagggctcctggaactacgagcgccagcagcatatgggctatgccttcgcaatgtcgccagccctgaagcgcatctatcaggacccaacggagctggggcgcgccctgcagcgtcatctggtgctgtttaacaccacgccccatctctcgacctttatcttcggcctgtcgattgccatggaagaagagaaccagcgtaaccccgaatttaatgaggagtcgataaacgcgattaaaaccagcctgatggggccgctggcgggcatcggcgactccatattctggggatcattaaaggttatcgccgccgggatgggtatctatttcgcccagcagggcagcctgctgggaccgatactggcgctgttagtttataacctgccgcatcttttgtgccgctggtatggcctgaagctcggctaccgggcgggtacgacctggctgatgagaatttaccaaagcggccttatggaccgggtgacctatatcgcatcaattgttggcctcatggtcgtcggcgcgatgaccgccagcatgatagatatcaccaccccgctcagctttaccgccgggcagaccaccatgaaggcgcaggagtttattgacaaaatacttccttcgctgctgccgctgcttttcacccttgggatgtacaagttgatccgcaagggagtcaatattaactggatcctgctaggaaccgtcgcgtttggcatggcggccagcgcgctaggcctgctttaa

SEQ ID NO: 238874 - DNA, 744 bp, Klebsiella pneumoniae
atgttgctcaccgcaacgttactcggactgatcgctgccctggggatacttgatggtcgcctgcttggggtatcaatgatcgatcgaccgctggtgatgtgcgccctcaccggtctggtctgcggtaatttacatgaggggattctgattggcgctacgctggagcttattttcctcggcaacgtcgccatcggcgccgcgcacccgccagatatcgtgaccggctccgtattggccaccgcgttttcgatcatgtccggtcgtggtccagaggctgcgctcaccatcgccatccctgtctcaatgctggcgcagacgctgggaatcctggtgcgcgtggtgaacgcccgctttggtcatctggcggaccgctatgcggcacagggtaatacccgaatggtcggcctgatgcacctcgccggtccgacgctactctattttttaaacggatttctaccggtattttttgccattctgcttggttcttcggcggtaagctggttcctggaggccattccgccggtgataaccaatggattgatcgtcgccagtaagatcctgccagcgctcggcttcgccctgctgatcagcatgatgctcagcagcaaactgatgccgtacctcggtctgggatttctgatagcggcatataccaaactggatatcatcgccatcgcgctgttcgctgtggtgttggcatttatcatcagccagttccttaatcttaagcagcaggagagctaa

SEQ ID NO: 238875 - DNA, 471 bp, Klebsiella pneumoniae
atgattaaactcgtgcgcattgattatcggctgctgcacggccaggtggtttttgcctggacccgagcgctggatatcgaccatatcatcgtcgccaacgccaaagccgcggcggatgccttcattacgatgtcgcttaacctggcaaagccagcgggcgtcacgctggacatcgccaccgttgaacaggcggcggaaaagcttaacagcggcaagttggatcataaaaaagtcatggtggtcctgggcaatactgcggaaaccctcgcgctagtggaaaaagtcccgggaattagcgcaattaattacggcggtctgccacagaaggaaggggcaagacaattcggcaaggccatctatctgaccgaagaggaaatcgcccatagcagagcgctaaaagaaaaaggtattcggctggagatgcgtcaggtacccgcccactcggctgaactccttaacgaccaactttaa

SEQ ID NO: 238876 - DNA, 435 bp, Klebsiella pneumoniae; identical to SEQ ID NO: 212770

SEQ ID NO: 238877 - DNA, 654 bp, Klebsiella pneumoniae
atggatatcgtatcggtcgctttgaagcgctattccaccaaggcctttgacgccacgaaaaagctgactgccggggaagcggaacagctgaaaacgctgctgcagtacagcccgtctagcaccaactcccagccgtggcactttattgtcgccagcaccgatgaagggaaagctcgcgtggcgaaagccgccagcggcacctacgtgttcaacgaacgtaaaattctcgacgcctcgcacgtggtggtgttctgcgcgaaaaccgcgatggacgacgcctggctgcagcgcgtggtggatcaggaagaggccgatggccgtttcgccaccccggacgcaaaagccgctaaccacaagggtcgcaccttctttgccgatatgcaccgcaaagagctgaaagatgacgatcagtggatggcgaaacaggtgtatctcaacgtcggcaatttcctgctgggcgtggcggcgatgggtctcgacgccgtgccgattgaaggggtcgattttgcgatcctcgatgaggaatttgacctgaaagcccagggctacaccagcctggtggtggtcccggtcggccaccatagcgtagaagatttcaacgctaccctgccgaagtcgcgtctgccgcagtcgacgaccattaccgagatttaa

SEQ ID NO: 238878 - DNA, 369 bp, Klebsiella pneumoniae
atgacgccggaaacactgcatccctgcgctcaccgtatcgccctgacctacccgtttaccgaacactgctggccctttgggccagagtacgacgtgtttaaggtcgacggccgcatctttatgatcaccatgactattcgcgggcgggcgctggtcaatctcaaggccgagccgcagaagtcgctgctgaatcagcaaatttatcgcagtatcgaacccggctaccatatgaacaagaaacactggatcacggtggtgccaggagaggatattagcgaggatctgctggccgagctgattgacgattcgtggcatcaggtggtgaacaagctgagtaaaaaggcgcagcagcgcctgcgtccgcgctga

SEQ ID NO: 238879 - DNA, 582 bp, Klebsiella pneumoniae; identical to SEQ ID NO: 137819

SEQ ID NO: 238880 - DNA, 1101 bp, Klebsiella pneumoniae
atgaaccgtgtcactttcagcgtggtcgccatcatgttactcgcagcagcaacgacattgccgtttgttcttaatgccggttttggtaaggcgccgcagggggcacagcttagccaggtggaagcgtctccccactaccgggacggccagttccataaccagttgcccacgccagggttcaccgggcagaaaaatatgctggcggcgtggtgggatttcctgatgaccaaacgggaaaacgcccgtcccgcgcaaccgctgccgctggtgaagaccgatctggcgacgctgcccctcgggcaggacgtgatggtctggctcggccactcctcctggtacctgcagctggcgggaaaacgcatcctgatcgacccggtgttcagcgattacgcggcgccgttctcctttatcaataaagccttccccggcgactatccgtggcgggcggaagggatgccggagatcgatctgctgatcatctcccacgatcactacgaccatctggattacgccaccattcgcgccttactgccgaaaattaagcgggtcattacgccgctgggggtcggatcgcatctgcgctactggggaatggacggagcgctgattaccgaagcggactggcagcaggcggtaccggccagcgacgagctcaccgtccacgtgctgccggcgcggcacttttccggccgtgggctgaagcgtaaccagacgctgtgggccagttttctgttcgttaccccgcagcaaaagatttattacagcggcgacagcgggtatgggccgcactttaaagcgataggcgatgagttcggtccggtcgatctggcgatcatggagaacgggcagtatgaccaggactggaaatatatccacatgatgccggatgaaacggctcaggctgccgacgatctgcgcgctcgcgcggtgctgcctgggcatgcaggacgattcgttttggcgaaacacagctgggatgaaccgtatcaacggctggcggctgccagcgaaggaagggcctggcgtctgctgacgcctgtgcagggcgagccggtgtgggtcgccgataagacgcaatcatttaacgcctggtggcgctaa

SEQ ID NO: 238881 - DNA, 342 bp, Klebsiella pneumoniae; identical to SEQ ID NO: 212775

SEQ ID NO: 238882 - DNA, 249 bp, Klebsiella pneumoniae
atgaaacatccactggaaacgctgctctccgccgccgggatcttactgctggccctgctctcctgtctgctgttgcccgcgccttcgctgggcctgacgctggcgcaaaagctggttgagacattccatatgatggatctcaaccagctctatacggtgctgttttgtctgtggttcttagcgctgggcgccattgagtatctggtgctgcgctgggtgtggcgtcgctggttttccctcgagcggtaa

SEQ ID NO: 238883 - DNA, 2724 bp, Klebsiella pneumoniae
ttgaccaagatgaataacccaaagtttacgacgccctcgggcgacaccgcgccacggcaggtctggcagcagaccgttgacgcagtgctggcgcagaccaaaagccaggccgctgggttaagttccgcagacgccgccgagcgcctgaatacctgtgggccgaatgcgctgccggaaaagaaaggcaaaccgggctggctgcgctttctcgcccactttaacgacgtactgatttacgtgctgctggccgccgcggcgctgaccgccatcatggggcactgggtcgataccctggtgatcctcggcgtgacggtgattaacgccctgatcggccatatccaggagagcaacgccgaaaaatcgctgcaggggatccgcaacatgctctccagcgatgcccgcgtccagcgtaacggcaagcatgagactatcccgacgcgcgacctggttccgggggatatcgttatcctgcgcgccggcgaccgcgtgccggcggatatgcgcctgattgaaacccacaacctgcgggtggaagaggcgatcctcaccggcgagtcgacggtggtggataaaatcaccgacgcgctggagggcgatctgccgctgggcgaccgggtgaacatggtcttctccgggaccaccgtcagcgccggcggcggcgtcggcgtggtgaccgccaccggcgcgcagaccgaactcggccatatcaaccagatgatggcgggtattgagaagcaccgtaccccgctgctggtgcagatggataagctcggcaaagcgattttcgccattattctcgccatgatggtggcgctgtttatcttcagcctcgcgctgcgggatatcccgatgggcgagctgctgctgtcgctgattagcctggcggtagccgcggtaccggaaggactgccggcgatcatctcgattattctgtcgctcggcgtgcagacgatggcgcgcaagcgggcgattattcgtaagctgccgaccgtggaaaccctcggcgccatgaccgtggtctgctcggataaaaccggcaccctgacgatgaacgaaatgaccgtcaaagcgatcatcaccgccgactgctgctatcgggtggaaggcgacagctacgagccgcaggggcggatcttcctcgaggggagcgatgagcccgtgcaggttcagcccggcaccgtgctggagacctggctgcgcaccatcgacctgtgtaacgacagccagcttacccaggatgagcgcggtctgtgggggatcaccggcgggccgaccgaaggggcgcttaaagtgctggcggcgaaagcgcagctcccggcggtggaggcccgtctggtggccaagatcccctttgactcgcagtacaaatatatgtcgaccctgcagcacatcgatggcaatgcccgggtgctgatcaccggtgcgccggacgttatcttcgccatgtgccgcgagcagatgagccgccacggcgcggtgccgttcgaggcgcagtactgggaagaggagatggcgcgcttcgcccgtcagggactgcggatggtggcggcggcctgtaagccggccagccttgatgccaccacccttaaccatgaggacctgcaggagggactgattttcctcggcatcgccgggatgatggatcccccgcgtccggaagccattgacgccatccacgcctgccagaccgccggcatccgcgtgaaaatgatcaccggcgaccacccgcagacggcgatgagcatcggccagatgctggggatcaccaacagcagccaggccatgaccggctaccagctggagcacatggacgatgcggcgctggcaaaggcggcggtggagtacgacatctttgcccgtaccagcccggagcataagctgcgcctggttaaagccctgcaggataacggcgaagtggtcggcatgaccggcgacggcgttaacgacgcgccggcgctgcgccaggccgacgtgggtatcgccatgggtatcaaaggcaccgaagtcaccaaagaggcggccgacatggtgttgaccgatgataacttcgcgaccatcgccagctcggtaaaagagggccgtcgggtctatgacaacctgaagaagaccatcctcttcatcatgccgaccaacctggcgcaggggctgctgatcatcatcgccctgctggcggggaacattattccgctgaccccggtgctgatcctgtggatgaacatggcgacgtcggcgacgctctccttcggcctggcctttgaggccgcagagcgcaacgtgatgaaccgtccgccgcgtaaaaccggccagcatgtgatggatggtttcgccgtgtggcgagtggctttcgtcgggtcgatgatcgcgattgccgcctttatccttgaggcctggctggcgccgcgcggccacagtccggagtttatccgcaccgtgctgctgcagatgctggtgacggcgcagtgggtctacatgatcaactgccgcagcagcgacagcttctccctgagcatgggtctgctgcgcaacaaaggcatctggctggtgaccggcgtcctgctgctgatgcagctggtcattatctatgtcccgctgatgcagagcatgtttggtacggaagcgctgccgctgcgctactggtttgtcactctggtcatcggcgtcgccatgttcctggtggtggaaatcgagaagcgtctgacgcgccggttccgcaaaacggcctga

SEQ ID NO: 238884 - DNA, 1080 bp, Klebsiella pneumoniae
atgattaaaaccttccgctttgctctgctggcctgcggtctggtcgtcggcgccctgacggcgaccgccgcgccggcggtgccggtccgcgtcgccacggttgaactggctcctcatgctgaagaacgcgctatccccgggcgggtcgaggcgatccgcgccgtcgacattcgcgcgcgcaccgaaggggtgattgttcagcgccacttccaggacggccagtatgttaccgaaggcgacctgctgtttaccctcgacgacgcgcagccccgcgcggcgctggctctggcgcaggccgagctgaaaagcgccgaagcctcattacgtcagtcgcagcagttgctcactcgctacgagcggcttatcaacaaccactccatcagccgcaacgacgtcgatacggcccggatgcagcgcgacgtcgccgccgctgccgtacagcaggccaaagcccgcgtcgaggcccagcagattgtgctcagctacactcagattgcggcgccggtgaccggtcgcgtgggccatagcgcctttcacgtcgggacgctggtcaattcgtccagcggcgtgctggtggacattgtgcagttggatccggtgcgggtctcgttcgccctcgacgaagccgcgtttttcagcaaaaccggccagcacgccgatatccacgctctgaagcaggcgtggctggcgcagattgaggttgatggtaaacggcgcgacggggtgttgacctctatcgataaccggatcgacgcccgcaccggcagcgtagcggtgcgggccgagtttgccaatccgcagcaccgtctgctgccgggcggcagcgtgacgatcctgttccgtccgcaggaactgccgtcgcgagtgatggtcccggccgccgccgtgcagcaggatccgcagggctttttcagctgggtgctgaagccggaccacaccgccgggcagcatcgtctgaccctcgcggggcagcaggggcagcagtttgcggtcgagaaagggctgcaggcgggcgagcaggtgatcaccgacggcgcgcagcggttgcgcgaaggcgccgcggtgcaggtgctgaactag

SEQ ID NO: 238885 - DNA, 720 bp, Klebsiella pneumoniae; identical to SEQ ID NO: 211390

SEQ ID NO: 238886 - DNA, 1116 bp, Klebsiella pneumoniae
atgcctttagccgattttcaccgctccgatccttttaccctcggtatcgaactggagctgcaggtggtgaacccgccgggttacgacctcagccaggatgcctcgacgctgattgccgacgtccagcatgagctgaccgtgggagaagccaaacatgacatcaccgagagcatgttggagatcgccaccggggtgtgccgcgacatcagccatgcgcaaatccagctcagcgccatccagcaggcggtccagcgcgcggcgctgcgccatcatctgcagatctgcggcggcggttcccacccctttcatgcctggcagcgccagcaaatcagcgataacccgcgctatgtcaaaaccgtcgagcattttggctatctggcgcagcaggcgacggtctttggccagcatgtgcacgtcggctgccagagcggcgacgacgccatctatctgctgcatggcctgtcgcgctttgtaccgcacttcatcgcccttaacgccgcctcaccgtggtttgacagcaccgacagccgcttcgcctgttcacgcctgaaccgcttctcctcctatcccgacaacggtccgatgccgtgggtggccgactggcaggggtttcgtcgcctgttccgccagctgagctacaccagcatgatcgatagcatgaaggatctgcactgggatattcgccccagcccgcagtttggtaccgtcgaggtgcgggtgatggacacccccttgacccttgcccaagcgatccacatcgccggctttattcagaccctggcctgctggctgttgacggagcgtccttttaagcaccagcctgatgattatctgctgtacccctttaaccgctatcaggcctgccgctacgggctggacgggaccctcaccgacgtgcgcagcggggagcagcgcagcatccgccaggagatcctgcagctcgccgaccggctggcccctttcgcccatcagctgaaggcgacggcagcgctggaggcggtggttcgccaggcgaaatcgccgcaaagcgaggcgcagcagatgcgcgactttatcgccaacggcggttcgctttccgggctggtgcaaaaacactgtgagatttgggcggcataa

SEQ ID NO: 238887 - DNA, 1668 bp, Klebsiella pneumoniae
atgcacaaaaagacgttattttcgcgtgccggtcgtctcgccgtggcggtgagcggcgcactggccctggcgggcgccgccttacctgccaacgcctccacgctgcggatcgccatgaccgccgcggatattccgttaacccttggccagccggatcaaggctatgagggcaaccgctttaccggcatcccgctgtacgacgcgctggtggagtgggatctgtcgcaaggtgaaaagcccagcggtctggtgccggggctggcgaccgagtggcacatcgatccgcagaataccagccgctggattttcaccctgcgtccgggggtgaagtttcatgatgggacggaggtgaacgccgacgccatcgtctggaacgtggataaggtactgaataaagcggcgccgcagtacgccccgggtcagatcggcaacaccctgtcgcgcatgccgaccctcaccggcgcagagaaaattgacgaccacaccgtggcgctgaccacctcggaaccggatgcgctgctgccgtacaacatcaccaacctgtttatcgtctcgccgacggcgtggcagaagcagtatgacgcggtgccggccagcgtgggagatagcgccgcgcgcagcaaacaggcgtggaccgccttcgccgcccacgcggtgggtagcggcccgttcaaactggagaagctggtgccgcgtcagctgctgatcctcgataaaaaccccgactactggaacaaagatcgcattccccgggtggataaagtggtgctgatccccttgccggaggccaacgcccgtaccgcggcgctgttgtcgaagcaggtggactggattgaagccccggcgccggacgccatcgatcagatcaagtctcagggttttcacctctacgccaacacccagccgcatctgtggccctggcagttctcctttgaaaaaggatcgccgtggcaggacatccgcgtgcgcaaagcggccaacttgtgtctgaaccgtgctgagctgaagagctacctcggcggctatatgaccgaggccactggggtctacgaggctgacagcccgtggcatggcaaacccaccttccagatcaaatatgacccggacgccgcccgccagctaatgaccgaggccggatacagtgccagcaaaccgctgcacgtcacggtggctacctcggcctccggctccgggcagatgcagcccttgccgatgaacgagtatatccagcagagcctgaagagctgcttcttcaatgtggatatcaaagtggtggaatggaacaccctgtttaccaactggcgcctgggcgcccgggacccctcggcgaaagggatcgatgcgatcaacgtcagcgccgcggttaacgatccttactttggcctgatccgcttctcgacggccaaagcgtttccgccggtggcgaccaactggggttacttttccacgccggagacggagaagctggccgccgccgtcaagcacgcctttaccccggcggagatgaacaaagcggccggtgagttgcacgccgcgctggtggatcaggtgccattcctgtttgtcgcccacgacgtcgggccgcgtgcgatttcccctgcggtgaccggggtggtgcaaccgcagagctggtttatcgacctcagcctggtgagcaaaaaagagtaa

SEQ ID NO: 238888 - DNA, 954 bp, Klebsiella pneumoniae
atgatcaatacgctgctataccgcattctgctggctatccccaccatgctgggggtggcggtgatctgtttcatgctggtgcagatcgccccgggcgacccgctggtgtcggtgatgccgccggacgcctcggaggcgctgcgtcagacattaatgcaggcttacggctttgataagccgctgcccctgcagtttatccactggctgtggcgggcgctgcacggcgaccttggtatgtcggtcgccaccggccgcccggtgatagacgaagtgatgaccgcggtggcttactctctgcgcctggcgctgctggcgacggcgatcggttttgtcctcggcagcctgttcggctttgtcgctggctattttcgcaacagcgtcattgaccgtctggcctcggtattgtcggtgtttggcgtcagcgtgccgcactactggctggggatgctgctggtgatcctctgcagcgtcaagttcgcgctgctgccggccaccggcggcgggccgataggcgaggtgggctggcaatgggactgggcgcacctgcagttcatgctgctgccggccctcaccctgtcggtgatcccgaccgggattatcgcccgcaccgtgcgttcgcaggtggccgatatcctcagccaggagtttatcgttggcctgcgcgcccgcgggctcaacgagtcgcgcatctttgtccatgtcatgaaaaatgccgcgcccaccgcgctggcggtgatggggctgcaggtgggctatctgatgggcggctcgatccttgtggagaccgttttctcctggccgggaaccggattgctgctcaataccgccatttttcagcgcgacctgcccctgctgcagggcaccatctgggtgctggcgctgtttttcgtgctgctcaacctgctggtggatattctgcagaccaccctcgacccgcgtattaagaggagctga

SEQ ID NO: 238889 - DNA, 894 bp, Klebsiella pneumoniae
atggtggatacggcaacgacgaaagcggtcccggccgcagcggcccacgctacccggcaaggttactggcgcggcgtgctgcgccgcctactgcgcgaccccggcggggtggttgtgggcgtggtgatcctcctgctgctggccctggcgctgttcggtccgtggcttatcgtcaaagatccctatcaaacgtcgatgttcctgcgcctgaaacccatcggcagcgacggcttcccgctgggctcggatgagctgggacgcgacatgctgtcgcggctgatccttggcacccgactgtcgctgtttatgggaattgtcccggtggtgttcgccttttttatcggcggggccatcgggattatcgccggctatacgggcggcaaaaccaataccgtgattatgcgcaccgtggatgtgttctatgcctttccctccgtcctgctggcgattgcgctgtcgggagcgttgggggcgggcatcggcaatgcgctgttgtcgctgaccctcgtgtttgtcccgcaggtggcgcggattgccgagagcgtgaccgcccaggtgcggcatatggactatatcgacgccgcccgggccactggcgccagcgcgttgaccattatccgcgtccaggtgttgggcaacgtgctcgggccgatcttcgtcttctccaccgggctgatttcggtgtgcatgatcctcgcctccggcctgtcgtttctcggcctcggcgtgcggccgccggagcccgagtgggggctgatgctcaatacgctgcgcacggcaatctatacccagccgtgggtggccgccctgccgggcctgatgatttttatcacctccatttcgttcaatatcctcgcggaccgcctgcgtgcggcaatggcgattaaggagtaa

SEQ ID NO: 238890 - DNA, 1038 bp, Klebsiella pneumoniae
atgcaaccctttatcaatatcgaccttggcgggccggcgcagccgctgctgaaggtcaatcacctgctgaagtactttcgcggcggcaaaggccgggaggtggtgcaggcggtggacgatatcagcttcacggtgatgaaaggcgaaaccctgggggtggtcggcgagtcgggctgcggcaaatcgaccaccgcccggctgctgatgcagttgctcacccaggacagcggcgaactgatcttcgacggacagggggtcggctcgtcacgtctgccgctgaaagcctaccgtcgccaggtgcagatggttttccaggatagctatgcttcgctcaatccgcgcctgaccatggaggagagcatcgccttcggccagcgcgtccacggcgtcagcgccagagaggccagcgaatatgcccgctatctgctggcgcacgttggccttgagccggcgcgctttgccgaccgctacccgcatgcgctctccggcggccagcggcagcgggtgaatatcgcccgcgcgctggcgatgaagccgcggctggtgatcctcgatgaggcagtgtcggcgctggataaatcggtggaagcccaagtgctgcagctgctgcaggagcttaaacggactctcgagctgacctacgtgttcatcagccacgatctgcacgtggttcgctggctgtcggatcggatcctcgtcatgtaccttggcgaagtggtggagattggcccggcggagcagctgtttaccgcctccgcccacccctatacccgggcgctattaagctcgatgccctccatggacccggaaaaccgcaccctgacctcgccgctaagcggcgatccccccagccccatcgcgccgccgagcggctgccgctttcacacccgctgcccgcatgcgaaggcggtctgcgccgaggtgaaaccgcggctggaggcggtcggggaggggcaccagagcgcctgcctgatggcgcagccggcctcgccctggcatcaaagcatcccccttaaggaggtcagccatgtcggataa

SEQ ID NO: 238891 - DNA, 1011 bp, Klebsiella pneumoniae
atgtcggataacgcctttgtccatgtgcgcgacctgcgggtcgtctttcgccgcgacggacagaccatcaacgcggtcaacggggtctcctttgaggtacaaaagggggaggtgatggcgctgattggcgagtcgggttccggcaagagcgtgaccctgcgggcgctgatgcgcctgcacccgccagggagcagtgagctctccggcaccctgcaggtgggggacgacgaggtgctgacgatgagcgccagccagctgcggcgctaccgcggcggacgctgcgcgatgatttttcaggagccgctgctggccttcgatccggtctacaccgtcgggcagcagattattgaagggctgcgccgccacgaagggctgtcgcgccaggcggcccgggacagggcgctggaggccctgcgccaggtgcgtattcccagccccgagcggcggctggatgcttacccgcacgagatgtccggcgggatgcgccagcgggcgatgatcgcccttgcgctctcctgtaacccgcagctgctgctggcggatgagccgaccaccgccctcgacgccacggtgcaaatccagatcctgatcctgctgcgcgagcagcaaaagcagcgcgggctgtcgatcgtgtttgtgacccacgatatcggcgccgcggtggagatcgccgaccgggtggcggtgatgtacgccgggcggatcgtcgaggaagcgtcgatgagcgagatcctgctccacccgcgccatccttatacccaggtgctgctgggcagtcggccgaaagaggggcttaagaaaggtgatgccctgcactgcattcccggcgcgccgccggatctggcgcgcttgccgcccggctgcgcatttgccgagcgctgcccgcaccgtcgcccggtctgtgagcagagtctgccgccgacggaatccgtcgcggaacgccacgcggtgagttgccaccgctggcgcgagctggcgattgacgctaacgcccaggccctggccgtctga

SEQ ID NO: 238892 - DNA, 1269 bp, Klebsiella pneumoniae
atgagcagtgatgtactttttacccccgcgaccgacaccaccggctggcgcatcaatggcgaccgcctgtgggcgtcgttaatggatctcgcgcagatcggcgccacgccgaagggcggctgccgccgtctgaccctcaccgacctcgaccgccaggggcgggacaaggtaataggctgggcgcgggaggccgggatgagcgtcaccatcgataaaataggcaatgtatttatgcgccgggaaggccgcaaccccggcctgccgcccatcgtctccggcagccatatcgacactcagcccaccggcggcaaatttgacggcaactacggcgtgctggcggcgctggaggtggtgcgcacgctcaacgatctgcagattgccaccgaggcgccgattgaggtggtgttctggaccaacgaagaggggtcgcgctttgtaccggtgatgatgggctctggggtctttgccggcgtcttcccgctggaggagacctgggccgtcacggataaagagggtgtcagcgtcggcgaggcgctggcgcagatcggctatattggcgagcagaccccgggggaccatcccatcggcgcctattttgaggcgcacattgagcaggggccgattctcgaagatgaagcgaaaaccatcggtatcgtgcagggcgtgctggggatccgctggtacgactgcgtggtcaccggccaggcctcgcacgccggacccacgccgatgcgcctgcgtcaggatgccctgcaggtggcgacccgcattatgcaggaagtggtggccattgccgggcgcagcgaagagggacgcggcacggtcggtagcgtgcaggtgtggcccaacagccgcaacgtggtgcccggggaggtcaccttctccattgatatgcgcaatctcagcgatgcgctggtggacgagatggatcgccagctgcgggcgtttatcgcggaggttgagcgggagagcggtctgcaggtggccctgaagcaggtaagccactatccggcggcgccgttcgatgccgaatgccagcaggccattgccgatgccgcgcagcggctgggctatccggcgcggccgatcgtctccggcgccgggcatgacgcagtgtatatgagctacctggcgcccaccgggatgatttttatcccctgcaaggacgggatcagccataacgaaattgagtatgcctcgccggagcacgtcgccgccggcgccaacgtgctgctgcaggtgatgcttcagtacgcgcggccggtgtag

SEQ ID NO: 238893 - DNA, 924 bp, Klebsiella pneumoniae
gtggtagattcaataatggataaatcggcgcccggcccctggtccggatggcttcatggtttactgggggtgatcattttcagcggttcgctgcccgcgacgcggctggcggtgcaggatatggatccgttgttattgacctttctgcgcgcctctatcgccgggctgcttgccatcgcgctgctggtgggctttcgccagaaacgcccgcgcctggcgcagcttgtgtccctgatcatcgtctcatccggggtggtgctcggctttccgctactcacggcgctggccctgcagcgcatcacctcggcgcattcgattgtgtttattggcctgctgccgctgatgaccgccctctttggcgtactgcgcggcggcgaacgcccgcggcgggctttctggatcttttcgctgctgggcagcctgctggtggtgggattcgccctgacgcaaaatgcggcggcctcactcagcggcgatctgctgatgctggcggcggttatcgtctgcggcctcggctatgcggaaggggcgaagctgacgcgggagctcggcggctggcaggtgatctgctgggcgctggtgattgccctgccgttgatgctccccgcctcgctgctggttcagcccgcgtcctggcatgccatctcggcctcctcctgggtcgcgctcggctatgtgtcgctgttcagcatgctgatcggtttcatcttttggtacaaagggctggccgcaggcgggatcgccgccgtcggccagctccagctattacagccgttcttcggactaggcctgtcggcagcgctgttgcacgaaaccgtcagccccttgatgctggcggtcacgctgggcgtggtgctgtgcgtggtgggctcgcgcaaatttggccgccagcgggttggcgcagggagcccgagccgtgattga

SEQ ID NO: 238894 - DNA, 1335 bp, Klebsiella pneumoniae
atgaaagcccgatataaagccgttgtcgaccgatatgcgcaggcgatccgcagcgggcagctgcccgccggcagccgtctgccgacgcaccgtacccttgccgccggggagcgcatctcgctggccaccgccacgcgcgtctaccgtgaactggaagagatggggctggtcagcggcgaaaccggccgcggcaccttcgtgcgcgacctctcgctgcctccggggcacggggtcgatcagcaggtggtcgccgccgatgtcgtggatctcaatttcaactacccttcgctgccggagcagggcgatgcgctgcgcgaggcgctcaggcagctggcgatggcgggcgatattgactcgcatctgcgctatcagcctcatgcagggcggctcgccgagcgggacattatcgcccgccatttgacctgccagcactttgcgccggacgcggaaaatgtcctgatcgtcaacggcgcacagcacgggctggcggtgaccgtcatggggctgttacgtccgggggatgtggtggcggtggatgcgctgacctattcgggcttcaaagttctggcggcgctgtatcatctggagctggcggcgatcccctgtcggccggagggaccggatcttcaggcgcttcagacgctgtgccagcagcggcgggtgcgggcggtgtataccatgccgacgctgcacaatccgctgggctgggtgctcaacaccggtcagcggcaggcgctggccgatcttgcgcgccagcacgatctgctgattattgaagatgccgcctacgcccggctggtgagccatccgccgccgccggtggtcagctatgcgccggaaagaacggtgtatgtcaccggattttcaaaaaatatcgccaccggactgcgcgtgggggtggtgatttctccgccgcgctatcgcccggagattgagcgcgccatccgggccacgacgtggaatacgccgacgctgataagttcgctgatctgcgcctggattgaagatggcacggtggcccgctttgaaacgcagaaacgccaggatgcgcgacagcggcagcaggtggcccgcgaggtgctttgcgggcttcccgtcgtcagtcatcccgattcgtacttcgtctggctgcctctgggtgaagagagccgggccgatcggctggcgaatgcgctgatggaacgccgcatttcggtatcgaccgccgagccgttctgcgtctccgccacgatcccgcaggcgttgcgcattgcgctcggatcggtgcctttcgacagcctgcgcccggcgctgctcagcgtgcgcgacgccgttgagtatgaacaataccgctaa

SEQ ID NO: 238895 - DNA, 1464 bp, Klebsiella pneumoniae
atgatccgtcacctgttacacgttgattttcagcctggccgcggtttgcaggaacaggtgcgagagacgctggtgaatgccattctcagcgggatcttcgccgccgacaccccgctgccctcctgtcgccagctggccagccagcttcgcgtctcgcgtaacaccaccgcgctggtgtttgaaagtctggtcaacgagggctacctgattagccgcccacgcagcggttactacctgcatcccgactatcatgaagcttcgcctgccgccgtcgagagtgcaccgcagcgcgaagcggctgcaccacgctggggcgaccggctgcagatgacccccagccagcaggagtcgatcctcaaaccggcgggctggatgcactaccgctacccgtttatctacggccagcccgatacccggcaattcccgctggccacctggcgctcggcggcgaactggctgcacggcggggtgcgcgacccggcgtgggtcatcgaccatattgaccaggatgtgccgatgctgatcgagcagatccgcacccgggtgctgcccaagcgcggcattgtcgccgcgccggatgaaattctcatcacccttggctcgcaaaatgccctctacctgctgacccgactgctgctctcttccaccacccgcattggcgtcgaaaacccctgcttccgcgaagccatcaacacctttctgctcgccgacgccgaggtggtgccgcacccggtggatgaagaggggatcgtgcttaatgagcgtccctgcgattactactatgtcactccaggtcatcaggtgcccaccggggtgaccatgagcagtgcgcggcgtcgccagctgctggagcatgccgcccgccatgacgcggtcattattgaagatgattatgactcggagagtaactttaccctcaacccgctgccggcgctgaaggccagcgatcgcagcggccgggtggtgtatgtcagcagcctgtcaaaagcgctgtcaccggggttgcggttggggtttatggtcgccgacccggacctgattgacgaggcgcgcgccctgcgccggctggtctatcgccatccgccgaccaacattcagtaccagatggcccacttccttgcccagggccattatgagacccatctgcggcgctaccactatgactccgcccagcgctgggagcgtctgcatgccgccctgcagcgctatctgccgtcgtgtcgcgcgctggcggggagcgaacatgctaacgccttctggctgcagaccccggcgcagatcaacacccagcagctcacctggcgcgccgcccacgccggcgtgctgattgagcccggggcgcgccattttctcagcgccgcgccgccggataactattttcgcatgggattccacgccattaaccccgacgccatcgcccagggggtggaggtcctgcgcggccagctggagcagatgggttag

SEQ ID NO: 238896 - DNA, 852 bp, Klebsiella pneumoniae
atgaaaaaatcattggcatcaatgtgtctgagcgctgtattaacggtcgctttttcttatcacgccgtcgcggccgatcttccggaaatagaaaaatccggcaccctgaaagtggcgacggaagatgattatgcgccatttaactttatgaataatggccaggccgatggctttaacaaagatatgcttgaggaattacgtaagtacgccaaattccatgtcgaccagagcatattaccgtggaccggattattagcggctgtctccaccgggcaatacgatatggccttaaccggggcggttattaccgatgagcggctgaaggtctttgatttcaccccaccgtgggcctccgcgcagcactatttcgtcaaacgcgctggcgatacctcgctaaataccattgccgatctcagcggcaaaaaagtgggggttcaggccgggagcgcgctgctggcgcgtttgccggagctgaaggcgatgctggagaagaccggcggcaagctgggaccggtggtggagtatccctcctatccggaagcctacgccgacctggcgaacaagcgactggattacgtgattaacgtggtgatctcggtaaacgacctggcgaaagccaaaccgaaggtcttcgccaaagggctggccgtctccggaccggggtatatggcgtggccgatcccgaaaaactcgccgcagctgctggcctatatgaccaggtttatgaaccacatgaaggagaccggcaagctcgccgagctgcagaaaaaatggttcggcgaaacctatgacaacctgccgaccgaggcgatcaccagcccggaacagtttcacaaactcgccggactgtaa

SEQ ID NO: 238897 - DNA, 642 bp, Klebsiella pneumoniae
atggatgcaatttcctggcagttattaatcgaaggcgcatggacgaccctctggatttcggccatcgctatcgccttcggggtggtggctggcctgctgatcgccctggtacggatgctgcgcctgccggtgatcgaccagctgctggtggtctatatcagtctggcccgcgcgacgccgctggtgacgctggtgctatttctgttcctttccctgcccacgatgggcattaacctcgacaagaacgtggccgccatcgtggcgctgacgcttaacacgtcggcgtttaacgctgagatctggcgcaatgccttccgcacctttccgcgcgaacagcgggaggcggcggagtcggtggggatgcgccgctggacctacttccgctacatcatgctgccgcagatgtggatcgagagcctgccggcgctggtcaatgagatgtcctttttgatcaaaggtagcccggcgatcgccgtgattggcgtggtggatctcacccgggtcaccaaccgtatatcctcggtcacctacgagccgctgtcgccgatcctcgccgccggcctgctgtatgtggcgatcatcggctgtttgttgaagctgcagggtatcgcggaacgtaaagccaggcgtctggcgcgctag

SEQ ID NO: 238898 - DNA, 666 bp, Klebsiella pneumoniae
atgaatcagtggggcgttatctggtcggttcgcgatagctttattgccgggttattcgcgaccctcgaactgtttattaccgccgccctggcggcgctgattatcggtattgcgctgtgttattttagcgaatatcaaaagaaagtgattaaccggattattattggtttcgtcagcctgatgcgcgcgatcccttttttgatcctcgcttatcttctgtattacggactgccgcagctcggtattagcatggagccgtggaccgccggtttactggccttgattatttatcatggcgcctatttctttgaaatattgcgcagccagcggcgggtattttccggcggatatattgaagcggcaattgctcagggcttttctcgctatgccatttttcggcggattattttacccaatatcgtctcttccgccttaccgctgatcggcaatcagctgattatttgcctgaaggacaccgctttcctgagcattattaccgttcaggagatcaccgccgctgccaacagcgtccaggcgacctattttattccgtttaacgcctttatcgtcgccattgggctttactgggcgatcagcattctgctggagctgctgattaagcgcctgaccgcctggggagccaaaagaggaatgagccatgcctga

SEQ ID NO: 238899 - DNA, 762 bp, Klebsiella pneumoniae
atgcctgagtctattgccgtaagcgtcaaaaacgtctccaaacagttcgataatgtggaagtcctgcgggatattaacctgacggtggagaaggggaccgtggtgagtattctcggctcgtccgggtcgggaaaatccaccctgctgcgctgtatgaactggctggaacagccggaccgcggtgaaattcatatcggcggtcagcggctggggattgatgaacagcgcggccgggcgatgtcgcaccgccagctggccaaaatccgcgagcgggtggggatggtcttccagagttttaacctgtggccgcacctgaccgtgcagcagaacgtcagcgaggcgctgctgcgcgttaagggcatgaaacgagacgaggcgaaggccatggccatgcagcagctggagaaagtcggcatggcgcacaaagccgatgtttacccgatcactctctccggcgggcagaagcagcgggtggcgatcgctcgttcgctggcgatgtcgccggaagttattctcttcgatgaaccgacgtcggcgctggatccggagctggttaatgaggtgttgggggtaatgaaagcccttgccgccgagggctacaccatggtggtggtgacccacgagatggattttgcccgccaggtgtccaatgaggtggtgtttctggagaagggactgctgatagagaaggcgccgccggagaagttcttcactcagcctgactccgaacgcgtcaggcagtttctgcaaagcagccgttag

SEQ ID NO: 238900 - DNA, 765 bp, Klebsiella pneumoniae
atggcaacgagcaacgtagtgtttatcaccggggcgacctcgggttttggcgaagcggcagcgcaggtgtttgccgacgcgggctggtcgctggtgctgagcgggcgccgctatccgcgactgaaggccttgcaggacagactcgccgccagggtgccggtgcatattattgagcttgacgttcgtgacagcgaggcggtggctgccgccgtggcgtcgctgcccgccgatttcgccgatatcaccaccctgatcaacaacgccgggctggcgctgtcgccgctgccggcgcaggaggtggcgctggaggactggaaaacgatgatcgacaccaacgtcactggtctggtgacgatgacccacgccctgctgccgacgctgatccgccatggcgccggggcgagcattatcaatatcggctcgatcgccgggcagtggccctatcccggcagccatgtgtatggcgccagcaaggcgtttgtgaagcagttcagctataacctgcgctgcgatctgcttggcaccggcgtgcgggtcaccgatctggcgccggggattgccgagaccgaatttaccctggtgcgaaccaaaggcgaccaggcggcatcggataagctctatcgcggcaccacgccgctgagcgcgcgcgatatcgccgagcagatgttttatatcgccacgctgccggcgcatatgaacattaaccgggtggaggtgatgccggtgcgtcaggcgtggcagccgttcgctatcgaccgggattaa

SEQ ID NO: 238901 - DNA, 1338 bp, Klebsiella pneumoniae
atgaagctggcaattcacaacgaggtcgcggtaagcaatgacgaagttcggcaattagatcgcgcctatgtgtttcattcatggtcgatgcagggcaatctcaacccgctggtcatcgccggggcgcaaggctgcgagctatgggattatgaggggaacacctggctcgatttcagcagccagctggtgaacgtcaacattggctatcagcacccccgggtactggcggccataaaggcgcagctggagaccctggtcaccatcgcgcccgccaccgccaaccttgcccgcggagaagcggcgaagcgcatcgtcgacctggcgccggcgggcttcagtaaggtgttcttcactaacgccggggcggatgccaatgagaacgcgattcgcatggcgcggctctataccgggcgcgacaaggtgctgtcggcctatcgttcctatcatggcaacaccggcagcgcgatcgccgctaccggcgactggcgccgggtgccgaatgagttctcccgcggccacgttcactttttcaacccctacctttaccgcagcgagttcaacgccgcgactgaggaagaggagtgccagcgcgcgctggcgcatctgcggcggatcattgaatgcgaggggccgacggccatcgcggcgatcctgctggagtccatccccggcaccgccgggatcctcgtgccgccggcaggctatatgcagggcgtgcgcgccctggccgacgagtttggcatcgtgctgatcctcgatgaggtgatggccggctttggccgcaccggcagctggttcgccttcgagcaggatggcgtggtgccggatctggtgacctttgccaagggggttaacgccggctacgtgccggcgggcggggtgctgattagcgagccgattgcccgctattttgacgaccacttctttgccggggggctgacctactccggccatccgctggcgatggcggcgattgtcgccaccattgacgcgatgaaagaggagaaggtggttgagaacgcggcctctatcggcaacgaggtgctgcgccccggtctcgaggcgctggcggagaagcacgccattatcggtgaggtgcgcggtcgcggcctgttccaggcgctggagctggtgagcagccgtgaacaaaaaacgccgctgaccgccgccgacatggctgcgatcaaaggggccttaaccgaggccgggctgctggcctttgtggtggagaaccgcattcatgtggtcccgccgtgcaccattactgctgagcaggtggcgcaagggctggcgatttttgatgcggtctttgctcgctttgccagcctggcgaagtag

SEQ ID NO: 238902 - DNA, 705 bp, Klebsiella pneumoniae
atggcgatcgttaatcttcaggatttacaggttacattcggcgcgaagacggcggtctccgccgccagtttccgtgtcgacgccggggaaaccttcagcctgatcggcgcctcgggctgcagcaaatcgacgattttgcgcgtgctggccggattgcagcgcgaatggcgcggcagcgtggatctgctcggccaggccattacgccgggcgcccgctttcagggcgatctgcgacgcaacgtgcagatggtgtttcaggatccgtacgcctcgctgcatcccaaccataccctgtggcgcaccctggcggagccgctgcagatccacggcatccgcgacgttgccccgcgagtaaccaccgcccttgagcaggtggggctggccgccgacgccgtccgccgctatccacaccagctctccggcgggcaacggcagcgcgtggccattgcccgcgccctgctgctgcgcccgcagatcctgctgctggatgagccgacctcggcgctggatatgtcggtgcaggcggaaattctcaatttgcttaatcgcctgaaacaggagcacggcatgacctatctgctggtcagccacgatgccgacgtcatcgcccatatgtccgatcgggcggcgtttatggcggagggcgtgatccagcgctttttcgatcgcgaagcgttggtcaacggagagcaccggatgaggtga

SEQ ID NO: 238903 - DNA, 837 bp, Klebsiella pneumoniae
atgactgacatccgactcaccgtccagggactcgccgtcgactatcccaccgcccgggtggtggacaacgtcagcttcaccctcggcaacgagcggctggcgctggtgggcgaatccggctccggcaaatcgatgaccgcccgggcgctgatgggcctggtgcgcaagcccggggtggtgagcgctgaacggctggaggtgctggggcgcgatgtgctgaccctcagcgcccgcggctggcgcgcgctgcgcggcaacgatatcgccatggtgctgcaggacccgcgctatgcgctgaatccggtgcagtccattcagacgcagctggaggaggcgttaaccctgcatcagcgtctgagccgccgtgggcgcgctgaggcggtcaaagacgccatcgccgccgtcggtctggatctgccggtcctcagccgctatcccggcgaactctccggcgggatgggacagcgggtgatgatcgccctcgcgctgctcaataacccgaaggtgctgatagccgacgagccgacctcggccctcgacgcccgcctgcgcaaccagatcctcgagctgctggtggagcagtgcgcgcagcggcagatggccatgttactgatcagccacgatctaccgctggtagccgcgcattgcgatcgcgtgctggtgatgtaccaggggagacaggtcgacgagatgccggcgcgggcgctgccgagcgcgacgcacccttacacccgcaccctgtggacctgccggccaaatgcgcacacctacggccagatgctgccgaccctcgacagaacccaggactttacggagacagcccatggcgatcgttaa

SEQ ID NO: 238904 - DNA, 834 bp, Klebsiella pneumoniae
atgccgacttatctgtttttacgccgtctgcgccgctcacccgccgccttcagcggcctgaccctggtgatcctgctggtgctgaccgcgctgttcgccccgtggctggcgccgcacgatcccaactggcaggatgccgccgctcgtctgcaggggcccggggcgggacactggctcggcaccgacagctacggccgcgacctgctgtcgcgcttgctctacggcgcccgcccggcgctgggtctggtggcgctggtgaccgccattaccctgcccgtcggtctgctggtgggtatcctctccggctactatggcgggtggctggagcggatactgatgcgctttaccgacgtggtgatgtcgatgccgcgcctgatcctcgccttcgcgttcgtggcgatgcttggcccggggctggtcaacggcgcgctggcgttagccctgaccacctggccggcctacgcccgtcaggcgcgaagcgaaattcagcgcctgcgccatagcgactacctcgccgcggcggagatgctgggcattcgcggcgggcggctgctggtcggccatattctgccactgtgtctgccgtcggcgattgtccggctggcgctcgatctggcgggcattatcctcgccgccgccgggctcggctttctcggcctgggcgcccgcccgccgatggcggagtggggagcgatgattgccgacgggatgcaggtgattttcgaccagtggtggatcgccgccatccccggcgcggcgatcctgcttgccagcctggcgtttaacctgctgggcgatggcctgcgcgatattctggagccgcaacatgactga

SEQ ID NO: 238905 - DNA, 1023 bp, Klebsiella pneumoniae
atgccatcgttttccactcaccttacccgcctgctgcaggggctgtttacgctgctgctcacgctgttcgggctgttgctggtcaccttctcgctctccgcgctgtcgcccgtcgaccgcgtactgcagatcgtcggcgaccatgccagccagtcgacctatgaccaggttcgccatcagctgggtctcgaccatccgctgccggtgcagttctggcactacctggtcaacctggcccatggcgatcttggcatcgccagcgctaccggccagccggtgctccacgacctgctggcggtctttccggcgacccttgagctggcgaccctggcgctgatcgtcggcgcggtactgggcatcgtcgccggggtgctgtgcgcccgttacgccggttcgccgtgggatctggcggttcgcacctttaccctgttgggcaactcggtgcccattttctggctcggcctgctgatgctggccctgttctacgcccggctgcagtgggcgccaggcccgggtcgcctcgacgatatttatcagtacaccgtcgagccacgcagcggttttgcgctgatcgacacctggctctccggcgataccgcggcgtttaaaaatgcgatcggccatctgacgctgccggtgctggtgctggcctattactcgctggcgagcatcacccgcctgacccgctccgcctgcctgagcgagatgaacaaagagtacattctgctggcgcgggccaaaggggccggagagatgacgattctgctgcgccacgtcctgcccaatatccgcggcactctgctgacggtgaccgccctcgcctggacctccatgctcgaaggggcggtgctcaccgaaaccgtcttctcgtggccggggatcggccgctacctcaccacggcgctgttcgctggggataccacggcgatcatgggcggcacgctgctgatcggcgtgagttttgtgctgatcaataacctgaccgacctgctggtacggttaaccgatccgagggtgcgctga

SEQ ID NO: 238906 - DNA, 1569 bp, Klebsiella pneumoniae
atgaccaaaaaactgttgcctttactgctactgtcggcgctctccgccgccgcgcatgccgccacgccgcccaacacgctggtggtcgcccagggtctcgacgatatcgtcagcctcgacccggcggaagcgaacgaactctccagcattcagacggtccccagcctctatcagcgtctggtgcagccggaccgcaacaaccctgaaaaaatcgtaccgatcctcgccgaaagctggcaggccgatccggcggcgaaaaccctgaccattaaactgaagccggatgccaaattcgcctccggtaatccgctgcgcccggaagatgtgattttctcttacacccgcgcggtgacgctgaataaatcgccggcgtttattctcaacgtgctcggctggcagccggacaacatcgccagccagctgaaaaaggttgatgaccataccctgacgctgcactggaccgccgacgtcagcccggcggtggcgctgaatattctctccacccccatcgcctctatcgtggatgaaaaacaggtggcgccgaacgcgaaaaataacgacttcggcaacgactggctgaaaatgcactcggcgggcagcggggcctataaaatgcgcgtctaccagccgcatcaggccatcgtgctggaggccaacgccagctccccaaccggtgcgccgaagatcaagagcatcattattaaaaacgtccccgacccggcttcccgccgcctgctgatccagcagggggatgccgacgtggcgcgcgatctcggcgctgaccagatcgccgccctgcaggataaacccggcgtgaaggtgctgagcatcccgtccgccgagcagaactacctggtgtttaataccgccaacagcgccaacccgctgctcaataatccggtcttctgggaggcggcgcgctggctggtcgattatgagggcatcaccaaaaatctgctgaaaggccagtactttattcaccaaagcttcctgccggccggcctgccgggggcgctggagactaatccgttcacctttgacccgcaaaaagctaaggctatcctcgataaagcgggcattaaggatgcccacttcaccctcgatgtggagaacaaaccgccgtttatcaccatcgcccaatcgctgcaggccagctttgcccagggcggggtgaaggtggatctgctacccgccgccggcagccaggtctatgcccgggtgcgcgcgaagcagcatcaggcggcgatccgcctgtggatcccggactactttgatgcccactccaatgccagcgcctttgcctggaacgatggtaaatccagcaccgtggccgggctcaacggctggcagatccctgagctgaataaagccaccctcgccgcggtggcggagccggacccggcgaaacgcctcggcctgtacaaaacgatgcaggaaaccctgctccagcattcgccgtacgtctttattgaccaggggaaaacccagatcgtggtgcgtgacaacgtgaagggctatcagcagggactgaacgccgacatggtctggtacgataacgtgaccaagtaa

SEQ ID NO: 238907 - DNA, 696 bp, Klebsiella pneumoniae; identical to SEQ ID NO: 211374

SEQ ID NO: 238908 - DNA, 1665 bp, Klebsiella pneumoniae
ttgcaatttgactacatcattattggtgccggctccgccggcaacgttctggcaacacgactgactgaagatccaaacaccaccgtcctgctgctggaagccggcggccctgactaccggttcgatttccgcacccagatgcccgccgcgctggcttatccgctgcagggcaagcgctacaactgggcctacgagaccgaaccggagccgtacatgaacaatcgccgcatggagtgcggacgcggcaaagggctcggcggatcctcgctgatcaacggcatgtgctacattcgcggtaacgcgatggatctggataactgggccaaagagccgggtctggaacactggagctatctcgactgcctgccctactaccggaaagcggaaacccgcgatatcgggcctaacgactaccacggcggcgatggcccggtgagtgtgacgacgccgaagccgggcaataatccgctcttcgaggcgatggttgaagccggggtgcaggcgggctatccgcgtaccgacgatctcaacggctaccagcaggaaggctttggcccgatggaccgcaccgtgacgccgcagggccgtcgcgccagcaccgcccgcggctatctcgaccaggcgcgcggtcgcccgaacctgaccatccgcacccatgcgctgaccgatcacattatttttgccggcaagcgcgcggtgggcgtcgagtggctggagggagagagcacgatcccgtcaaaagcgacggccaacaaagaggtgctgctgtgcgccggggcgattgcctcgccgcagatcctgcagcgctccggcgtgggtaacccggagctgctcaggcagttcgatatcccggtggtgcacgatctccccggcgtgggtgagaacctgcaggaccatctggagatgtatctgcagtacgagtgcaaagagccggtatcgctctacccggcgctacagtggtggaaccagcctaagatcggcgccgagtggctgttcggcggcaccggcatcggcgccagcaaccagttcgaagcgggcggttttatccgcagccgcgcagagttcgcctggccgaacattcagtaccacttcctgccggtggcgattaactacaatggctccaacgcggtgaaagagcacggcttccagtgccacgtcggctcgatgcgttcgcccagccgcggccacgtgcgcctgaagtcgcgcgacccgcacgcccatccggcgatcctgtttaactatatgtcccatgagcaggactggcaggagttccgcgacgccatccgcattacccgggagatcatgaaccagccggcgctggataagtatcgcggccgcgaaatcagtccgggaatagaatgccagagcgatgccgaactggatgagtttgtgcgcaaccacgccgagaccgcgttccacccgtgcgggacctgtaagatgggttacgacgagatggcggtggtcgatggcgagggccgcgtccacggtctggaaggattgcgggtggtcgacgcctcgatcatgccgcagatcatcaccggcaacctcaacgccaccaccattatgatcggcgagaagatggccgacgccattcgcggccgccagccgctgccgcgcagcaccgcgacgtattatgtcgctggcgacgcgccggttcgccgttaa

SEQ ID NO: 238909 - DNA, 1473 bp, Klebsiella pneumoniae
atgtcccgaatggcagaacagcagctttatattaatggtggttatacatcggccaccagcggtcgcaccttcgagaccatcaaccctgccactggcgaggtgctggcgaccgttcaggctgccggacgcgaggatgtcgaccgcgccgtcgagagcgcacagcgtgggcaaaaaatctgggcggcaatgaccgccatggaacgctcgcgtatcctgcgtcgcgccgtcgaccttctgcgccagcgcaacgacgagctggcgcgactggagacgctggataccgggaaacctctcagcgaaaccgccgccgtcgatatcgtcaccggcgccgacgtgctggagtattacgccggattgatcccggcgctggaaggcagccagatcccgctgcgcgacagttccttcgtctatacccgtcgcgaaccgctgggggtggtagccgggatcggcgcgtggaactacccgatccagatcgccctgtggaaatcggcgccagcgctggccgctggcaatgcgatgattttcaaaccgagcgaagtcaccccgctgaccgccctcaagctggcggaaatttacagcgaagcgggcctgccggacggggtgtttaacgtcctgccagggatcggcgcggaaaccggccagtatctgaccgagcatccggacatcgccaaaatctccttcaccggcggcgtcgccagcggcaaaaaagtgatggccaactcggccgcttcatcactgaaagaggtcaccatggagctgggcggcaaatcgccgctgattatcgccgatgatgccgacctcgacctcgccgccgatattgccatgatggccaacttttacagctccggccaggtctgcaccaacggcacccgggtgtttgtcccggcgaaacagaaggcggaattcgagcacaagatcctcgagcgggtggcccgcatccgcgccggcgatctgtttgccgacgacaccaacttcggcccgctggtcagcttcccccatcgcgacaacgttctgcgctatatcgagagcggcaaacgcgaaggcgcgcgcctgctgtgcggcggcgaggcgctgaaaggcgacggtttcgataacggcgcgtgggtcgccccgacggtgtttaccgattgcagcgacgagatgaccatcgtgcgcgaagagatcttcggcccggtgatgtcgatcctcagctatgccgacgaagcggaggtcattcgccgcgccaacgccaccgaatacggcctcgccgccggcgtggtgacgcccaacctcaaccgcgctcaccgaattatccaccagctggaagccggcatctgctggatcaacagctggggggaatccccggcggaaatgccggttggcggctacaaacactccggcattggccgcgagaacggcgtgatgacgctgcagagttacacccaagtgaagtccatccaggttgagatgggtaaattccagtccatattttaa

SEQ ID NO: 238910 - DNA, 588 bp, Klebsiella pneumoniae
atgcccaaactggggatgcagccgatccggcgcaggcagctgatcgacgccacgctggacgcaataaatgaagtcggtatgcacgacgcgaccatcgcgcaaattgcccggcgggcgggcgtatcgacggggatcatcagtcactatttcaaagacaaaaatggtctgctggaggcgaccatgcgcgacatcaccagccagctgcgcgacgcggtgctcaaccgtctacacgctctgccggacggcagcgccagccagcgcctgcaggcgattgtcggcggcaactttgatgagacgcagatcagcagcgcggcgatgaaggcctggctggccttttgggccagcagcatgcaccagccgatgctttatcggttacagcaggtcagcagccgtcgcctgctgtcgaatctggtgtacgaattccgccgcgagctgccgcgcgagcaggcgcaggaggccggctacgggctggcggcgctgatagacggcctgtggctgcgggcggcgctcagcggcaaaccgctggataaaacgctggcgcagtcgctgaccagccactttattcgtcagcatttaccgaacccataa

SEQ ID NO: 238911 - DNA, 2034 bp, Klebsiella pneumoniae
atgacagatctttcgcaaagcagagaaaaggacaaaatcaatccggtggttttttatacctcggccggactgattttgttgttttccctgatgacgatcttttttcgcgatttttctgccgagtggattgggcgcaccctcgactgggtgtcgaaaaccttcggctggtactatctgctggcggcgacgctgtatatcgtcttcgtcgtctgcattgcctgctcgcgcttcggctcggtgaagctcgggccggagcagtcaaagcccgagttcagcctgctgagctgggcggcgatgctgttcgccgccggcataggcatcgacctgatgttcttctcggtcgccgagccggtgacgcaatatatgcagccgccggaaggggcggggcagaccatcgaggcggcgcgccaggcgatggtctggaccctgtttcactatggcttaaccggttggtcaatgtatgccctgatgggcatggcgctgggatactttagctatcgttataatttgccgctcaccatccgctcggcgctgtacccgatttttggcaaacggatcaatgggcccatcggccacagcgtcgatattgcggcggtgatcggcaccatcttcggcatcgccaccaccctcggtatcggcgtcgtgcagctcaactacggtctgagcgtgctgttcgatattccggactcgctggcggcgaaagcggccctgattgcgctgtcggtgatcatcgccaccatctcggtcacctccggggtggacaagggcatccgcgtgctctccgagctgaacgtcgccctcgcgctggggctgatcctgttcgtgctgttcatgggcgatacctccttcctgctcaatgcgttagtgctcaacgtcggcgactacgtcaatcgctttatgggtatgacgctgaacagcttcgccttcgaccggccggtagaatggatgaacaactggacgctctttttctgggcgtggtgggtggcctggtcgccgtttgtgggcctgttcctggcgcgcatttcgcgcgggcgcaccatccgccagtttgtgatgggcaccctgattattcccttcacctttaccctgctgtggctgtcggtgttcggcaacagcgcgctgtatgagatcatccacggcgacgcggcctttgcccaggaggcgatggcccacccggagcgcggcttctacagcctgctggcgcagtatccggcgtttacctttagcgcgtcggtggcgaccatcaccggtctgctgttttacgttacctccgccgactccggcgcgctggtgctggggaacttcacctcgaagctgaaggacatcaacagcgacgccccgaactggctgcgcatcttctggtcggtagccatcggtctgttgaccctcgggatgctgatgaccaacggcatctcggcgctgcagaacaccacggtgatcatggggctgccgttcagctttgtgattttcttcgtgatggccggactgtataaatctctgaaagtggaagattaccgccgggtcagcgccagccgcgacaccgccccgcgcccgatgggcctccaggatcgtctgagctggaagaagcgcctgtcgcggctgatgaattacccgggcacgcgttataccaaactgatgatggagacggtgtgctacccggcgatggaggaggtggcccaggagctgcggctgcgcggcgcggcggtggaactgaagagcctgccgccggaagagggtgagaaccttggccacctcgatctgctggtgcacatgggcgacgagcagaactttatctacaagatctggccgcagcagtactcggtgccgggctttacctatcgggcgcgcagcgggaaatccacctattaccggctggagaccttcctgctggagggcagtcagggtaacgacctgatggactacagcaaagagcaggtgatcaccgatattctcgaccagtacgagcggcacctgaactttatccatctgcatcgggaagcgccggggaacagcgtgatgttcccggatggctaa

SEQ ID NO: 238912 - DNA, 447 bp, Klebsiella pneumoniae
atgtttaaagctcttaccgctatcgtcgccttagccgcctccgccagcgttatggcgcaaggcgatgtcacgctgaacagtctggctcacgatgccgccacccgggcgtcgtttaaccagatggtcaaaggccatcagctgcccgcctgggtgaccaccggcggcaccggttcgcccgcgcagacggtgaaactgggtagcgaatcctggcaggtgttaagcgcctgcaaaccccacgactgcggccatgaacgtatcgcggtgatctggtcggaaaaaagcaaacagatgtccggcgtttactcggtggtcgatgaaaaaaccgaccaggagaagctgacctggcttaacgtcagcgatgccctgtccatcgatggcaaaaccgtgctgtttgccgccctcagcggcagcctcgacaaccacccggacgcctttaactaccagtaa

SEQ ID NO: 238913 - DNA, 1257 bp, Klebsiella pneumoniae
atggcgtatgtgaatcatctactgacgtttattgagagtaatccggcgctggcggtggggtttaatcttattctgctgctgctctccggcatatttgcccatcttttatgcaagttcttgctgattaaagtggtgcgtaaggtcttctttagtagccacaaacaggatgtgccgctggagaaggatcgacgcatcgccgaaaagctgtccaatttcattccggttattattgtctattacgttctgcagtttatgccggcgatgccggcatcgctggtgacggcgattaatactatctgcgggatcttgttttttatttttatgtcggtgtttttcaacgagatgctggatattgtcaacagctcctatctgcgaaagaccaaacgtaaaaatcattccattaagggctatatccagataggcaaaatcttagtccacatcctggcggcgatcatgatcctcgccgtgatgtcgaacaaatcgccgatcattatcatctccagtctgggggccgtggcggcggtactgatgatcgtgttccagcatactctgctgtcgctggtggcgaacgttcagctgtcgtccaacgacgtgctccagctgggggactggattgaaatgcctgacaagaatctcagcggtgaggtgacggatatcgcgctgcacaccattaccatccgcaactgggacaataccatctcccgtatcccgaccaagaatttcctcaccgagacctataccaactggcaggcgatgttctcctccggggcgcggcggatcatgcgcagtatcgccatcgatcagcactcggtgcgttttctcgaccaggagatgctctcctcgatgctgaccatccgcggggtgagtgagcctctggcgacgctgcttgacggccgggatcccggcggcgtggccgaccgctggtttgtcgataacgggctgaccaacctgaccctgtttcgccactatctgatgcactatctcgccgagcggccggatattattaaagagatgtacattgtggcgagaacgctgaaaccgtcgccctcgggcattccgttggagatttactgcttcacctcctcaacgctgtggaaagactacgaaaacacccagtcggcgatatttgagtacattactgcggtggccggacagttttccctgcgcctctatcagtatcccgccgggcacgatttctggcgtctctcccaggagcacgccgcccgggcgggcctgccgccgtcggccgaaggctaa

SEQ ID NO: 238914 - DNA, 894 bp, Klebsiella pneumoniae
atggcagattttccccctgtcgccagcctgcgcagctttgaggcggtggcgcgcctcggcagcgtaacgcaggccgcccacgagatgagcgtgacccattcggcggtcagccagcacatcaaacagctggaagccctggtcggcgtcacgctctttatccgccacggccgcggagtgcgcatcacggaagaaggacggctctatgccctgcaaatccgcgaggcgttacagcacatcgccgacgccacgcgcatggtgcagatcaaaccccgcaccctggaagtgtccctggcgacgctcccctcctttggctgtcactggctgctgccgcggctggcgcgctttcaggcgcggcatccgcagatcgcggtgcgcctgctgaccagcctggcagtggttaacctgcaacaggagggtatcgatctggccatacgcatggggcaaggcgactgggaggggatggaaagccggcatctgtttgccgatgaacagctggtggtcgccgcccccggctatcgcggcggtaacctgccgaccaccccgcaggcgatcgccgccagcgatattattttttccatggagtcctggcatgcctggtgcagccaggcggggctggaaaagccgatcgtcccctcaggcctgcgcctgaacgactccaatctggtgctggaggcggttcgtctgggggccggcgtggcgctggagcggcgctccctggtggcgggggcgatagcccgcggcgagctggtgcagctcaccgccgtcaccgtcccctacccctggcactactggctaaccgtctccccgcaggcggagaaccggccggaagtcgcccggttcatcgcctggctggaggaggagatcgccctctggcgccagcagatcagcgcttag

SEQ ID NO: 238915 - DNA, 606 bp, Klebsiella pneumoniae
atgaaactcattggtatgatggattcaccttatgtaagacgcgtggcggtttctctggcgctctatggcgtggaattcgagagcctgccgctatcggtctttagcggctttgacgaattttcccgcattaatccggtggtcaaggcgccgacggtggtgctcgataacgggacgcagctgatggactccacgctgatcctccactatttcgaaacgaccaatccggccgggcgccggctgcttcccgtgcatcccgaggcgctggcccgcgttctgcacctgctgggggtgatcctcgccgcctgtgaaaaagcggtccagcatgtttatgagcaccgtctgcggccggaagagaagcagcatcagccgtggatagcccgggtgaccggccagctgctggccgcctgtcgggagtgggacgcccggctggcagaccgcgccgccgccgcgcagccggatcaggtgatggtcaccagcacggtggtctggtcctttatccagttgatgatcccggcggtggtgtcggccgcggcgtttccacatattcgcgcgctggcggagaagggagaggcgctgccggcgtttcaacagtatccgctgggttaa

SEQ ID NO: 238916 - DNA, 786 bp, Klebsiella pneumoniae
atgatcggtaaagattttgcacagcagctgtttaacctgcgggatcgcgtcgctttcgtcaccggcgccggcagcggcatcggacagaccatcgcctgcagcctcgccagcgcgggtgcacgggtagtctgttttgatcttcgcgacgacggcgggctggcggaaacggtcagccatattgaatccatcggcggtcaggcttgttcttttaacggcgatgtccgccagattgccgacctgcgcgccgccgttgcgctggccaaaaaccgctttggccgcctcgacatcgccgtcaacgccgccgggatcgccaacgccaatccggcgctggagatggagagcgagcaatggcagcgggtgatcgatgtcaatctcaccggcgtatggaactcctgcaaagcggaagcggaactgatgctggagtccggcggcgggtcgattatcaatatcgcctcgatgtcggggattattgttaaccgcggcctcgaccaggcgcattacaactgctccaaagccggcgtgatccatctgtcgaaaagcctggcgatggagtgggtgagcaaagggatccgcgtcaattccatcagtccgggatataccgccacgccgatgaatacccgtccggagatggtgcaccagacccgcgagtttgaaagccagacgccgatgcagcggatggcgaaggtggaagagatggccggcccggcgctgttcctcgccagcgacgccgcctcgttctgcaccggcgtagacctggtggtcgacggcgggtttgtctgctggtga

SEQ ID NO: 238917 - DNA, 798 bp, Klebsiella pneumoniae
atgcaacgagatttccagaacaaaacggtggtgatcaccggcgcctgccgcggcatcggcgcaggcattgccgagcgctttgcccgcgacggcgcaaacctggtgatggtctccaacgccgagcgcgttcacgagaccgccgaaaccctgcgtcagcgctatcaggcggatattttatcgctgcaggtcgatgtgaccgacgaagcgcaggtgcagtcgctgtatgagcaggccgccgcccgcttcggcaccatcgacgtctccattcagaacgccggggtgatcaccatcgattactacgaccggatgccaaaagccgatttcgaaaaagtgctagcggtcaacaccaccggcgtgtggctgtgctgccgcgaggcggccaaatatatggtgaaacagaatcacggcagcctgatcaacacctcttccggccaggggcgacaggggtttatctacacgccgcactacgccgccagcaaaatgggcgtgatcggcattacccaaagcctggcgcacgagctggcgccgtggaatatcaccgtcaacgccttctgccccggcatcattgagagcgagatgtgggattacaacgaccgcgtgtggggcgaaattctcagcaccgagcagaagcgctacggcaagggcgaactgatggcggaatgggtcgaagggatcccaatgaaacgcgccggtaagccggaagacgtggccgggctggtggccttcctcgcctccgacgacgcgcgctatctcaccgggcagaccatcaatatcgatggcggtttgattatgtcgtaa

SEQ ID NO: 238918 - DNA, 1545 bp, Klebsiella pneumoniae
atggcgccgcacgatctcgtcgctccccagcccgttgagtccgaagtgattatcgaaacccgcggcctgtcgcgcgtctatcccggcgtaaccgccctggataatgtcaattaccgggtctatcgaaataaggtcaacgtgctgatcggagaaaatggtgcgggtaaatccaccatgatgaaaatgcttgccggtgtggaaacgccctcctccgggcaaattatcctcgatggtgaagcagtttcattacagtcgacgcatcaggcagaaaaactgggcatcagtattatttttcaggaactgaatttatttcccaatatgaatgtgatggacaacatcttcatggcgaatgaattctttcagaaaggacgcattaacgaaaaataccagtacgcgctggccaaatcgctgctggaacggctggagctggatgtcgatccttacgctccgctgggtgaactcggtatcggccaccagcagttagtcgagattgcccgcgccctgtcgaaagacacccgcgtgctgatcatggacgagcccacctcggcgctgagccagtctgaggtcaaagtgctgttcaaggtgatcgcgcagcttaagcgccgcggcgtgaccatcatctatatctcgcatcgcctcgaagagctgatggagattggcgacaacatcaccattttccgcgacggtcgctttatcagcgagcgtcacgtcagcgacgccagcgtaccgtggatcatcgagcagatggtcggtgataagaaaaaacactttgattatcaaccggcgccaaaaggcgacgcagtgcttgacgtcaaagggctgaccgcgctgcatcccagcggcggttacaagctcaatgacgtcaccttcaccctcagcaaaggcgaagtgatcggtatttacggcctgctgggcgccgggcgcaccgagctgtttaaaggcctggtcggcttgatgccctgccagcgcggcgaggtgcatcttaacggcgaaagcatcggcaaatctcgctttcaacagcgcctgaaaaaggggctggcgctggtgccggaggaccgtcagggcgaaggcgtggtgcagatgatgtcgattcaggccaacatgacgctctctgatttcagcctgcaggggttccgccgcgcctggcgctggttgaatccgcagaaagaagagtcctgcgtgaaagagatgatccagcagctggcgatcaaggtcagcgacgccacattgcccatcacctcgctgagcggcggcaatcaacaaaaagtggtgctgggtaaagcgctgatgacccagccgcaggtggtgttcctcgacgaaccgacgcgcggcatcgacgtcggcgcgaaaaccgacgtctatcacctgatcggcaaaatggctcagcaggggctggcggtgatgttctcatcttcggaactggatgaggtgatggccctggccgaccgcatcctggtgatggccgatggccgcattaccgccgatttaccgcgccatgcggtgacccgcgaacagttaatcgcggcttcaacacctcaagattaa

SEQ ID NO: 238919 - DNA, 936 bp, Klebsiella pneumoniae
atgaaattacgtataacccttttaaccgctgctaccctgaccgccttctcctttgccgcgcacgccgcggagaaaggcaccattatgatcatggtcaactcgctggataacccgtattacgcctcggaagccaaaggcgccagcgaaaaagcgcaagctctcggctacaaaaccaccgtgctgtcccatggcgaagatgtcaaaaagcagaatgagcttatcgacaccgcgattggtaaaaaagtgcagggcattattctcgataacgctgactccaccgccagcgtcgccgccattgaaaaagccaaaaaagcgggcattccggtggtcttaattaaccgcgaaattccggttgatgatgtggcactggaacaaattacccacaataacttccaggccggctctgaggtcgccaacgtcttcgtcgagaaaatggcggagaaaggcaaatacgccgagctgacctgcaaccttgccgataataactgcgtcacccgttctaaatctttccatcaggtcattgaccagtatccggatatggtcagcgtggcgaaacaggatgccaaaggcaccctgatcgacggcaaacgcatcatggacagcatcctgcaggcgcaccccgacgtgaaaggcgtcatctgtggcaacgggccggtagcccttggcgcgattgcggcgctgaaagcggccaaccgtagcgatgtgattgtcgtcggcatcgacggcagcaacgatgagcgcgacgccgtgaaagccggcaccctgcaggcaaccgtgatgctgcaggcgcaggccatcgccgctcagggcgtcaccgatctggataactacctgcaaaaaggcgagaagccggcgaagcagcgcgtgatgttccgcggcattctgattactcaggataacgccgataaagtccaggatttcaacattaagtcctga

SEQ ID NO: 238920 - DNA, 1338 bp, Klebsiella pneumoniae
gtgatcgccagcgcggtggcccacgttggcgcggaaaacgtcgccgcgctggctatcagcaaccagcgggaaaccgccatcggctggtatcgcgacagcggcgaaccgattaacgcggccattacctggcaatgcacccgcagcgccgcgttctgcgacacgctgcgtcacgatcgtcaggaacagcacattaagcgtgccaccggcctgccaatcgccccgctgttctcggcctccaaaatgcgctggctgctggatgcgactgtcgatggccacctgcgcgccgaacgcggtgagatttgcctcggcaccatcgacagctggctgctgtggaatctgactgctggagaagccttctgctgcgactactccaatgcctcccgcacccagctgctgaacctgcaccgcggcgagtgggacgacgagatgctggcgctgttcggcattccgcgcgcggcgttgccggaaattaaaccgtcgagcggcctcttcggccataccaaaggactggccgccattccggacggtattccgatcatgtcgatgatcggcgactcccacgccgcgctgttcggccacgcgctcggcgaggcaggctgcgtcaaagccacctacggcaccggctcttcggtcatggccccggtcaaatcggcgcagtgcgatatcgacgcgctggcgaccaccgtcgcctggcacgatggcgaccagctggtgtggggcctggaagggaatattccccacaccggcgatgctgtcgcctggatggcggacagcaccggactgagcgaactctctgccgccgagctggcccatgagctgaataccctccccgcctccgtcgactcaaccctcggggtctacttcgtgccggcgctgaccggtcttggcgcgccctggtgggatgacagcgcccgcggcgtgatttgcggcctgagtcgcggggtgaaacgcgcgcatctgatccgtgcggcgctggagtccatcacctatcagatagccgacgtggtggtggcgatgcgtcagcatgaggagttcaccctgacggcgttgatggtggacggcgggccgaccaacaatgactggctgatgcaataccaggccgatctgctcggctgcccggtgatgcgcagcgacgtgccggagctgtccgccatcggcgcggcgttgctggcacgcaaagcgctccatccgggatcgaccgccgatctgcaggccttcttaaccgaacatagcacctttcagcccgacatggcccgccaccagcgcttacaaacgcgctggcaggagtggcgccatgcggtcgaccgaacattatggaaaccggactcgccagcctga

SEQ ID NO: 238921 - DNA, 951 bp, Klebsiella pneumoniae
atggctaagcaggatgaacaacggctattggttaagattgccacgctttactatctggaaggacgaaagcagtctgatatcgcccaacttctctcgctgtctcagtcatttgtctcccgcgccattacccgctgccagaaagaaggcgtcgtcaagatcagcgtcgttcagccgtccaacatctttctgaagctcgaaaaagggcttgaggatcgctacggccttaagcaggcggtggtggtggataccgaggaagaggccagcgatcataccatcaagcgggcgattggctccgccgccgcccactatctggaaacccggctgcggccaaaagatctgattggcgtctcctcgtggagctcaaccattcgcgcgatggtcgatgaagttcatgcgcaaaacctgaaagccagcggcgtgatccaactgctcggcggcgtcgggccaaacggtaacgtgcaggcgacgattcttacccagaccctcgcccagcgcctgaattgcgacgcctggctgctgccgtcacagagcatcgaaggatccatggaggagcgcaaccggctgctggccagcaaagacgtcgctgacgtggtgtcgcgctttgatgaagtggatatcgccatcgtcggcatcggcattctcgaaccctctcaactgctgaaaacctccggtaactactatcacgaagatatgctgcaggtgctggcggcgcgcggcgcggtgggtgatatctgcctgcactactacgacaaaaacggccatccggtgttacgcgatgatgaagatccagtgatcggtatggcgctggagaaggtcaaaaaatgcccgaacgtggtcgcgctggccggcggtaccgacaaagtcgcggccatcaaaggcgccctcaccggcggctacattgatgttttaatcaccgattaccctaccgctcgcatgctggttagcgactaa

SEQ ID NO: 238922 - DNA, 831 bp, Klebsiella pneumoniae
atgaatccctacagatatgatattcagacgctggagcgtaaagcccgcgcggtgcggcgccatattgtgcgcttaaacgccaatagtccggccggcggccacaccggggctgacctttcgcaggtcgaactgttaaccgcgctctatttccgcgtccttaacgtcgcgccggaccggctcgacgacccgcagcgcgatatctacatccagtcgaaaggccacgccgtgggctgctactactgcgtcctggcggaagcaggcttcttcccggtcgagtggctggagacctaccagcatgccaattcccatctccccggccacccggtgcggcaaaaaacgccgggcatcgagctcaacaccggcgcgctgggccacggtttgcctgttgcggtggggctggcgctggccgcgaagaaaagcaacagcacccgccgcatttttttgatcaccggcgacggcgaactggcggaaggcagtaactgggaagccgccctggcggctgcacattacggcctggataatctggtcattattaatgataagaacaacctccagctggccgggccgacgcgcgaaatcatgaataccgatccgctggccgataaatggaaggccttcgggatgacggtaacagaatgccagggtaacgacatgtcctcggtggtcgcggccatcgaggggttgaagcaggaaggtaaacccaacgttattattgccaacaccacgaaaggtgccggtatttcctttatccaggggcgcccggagtggcaccaccgggtgccgaaaggcgaagaaattgcactggcactggaggaactgaaagatgagtaa

SEQ ID NO: 238923 - DNA, 936 bp, Klebsiella pneumoniae
atgagtaatgcagaacacctggctaacgtcatggtcgaagcctttatcgccgccgtggagcgcggcgtcgatctggtgccggtggtagccgactccacgtcaacggccaaaatcgcgccgtttattaaacagttccccggccggctggtgaacgtcggcatcgccgagcagagcatggtcggcaccgccgccggtctggcgctgggcggaaaagtggcggtgacctgtaacgctgcgccgtttcttatctcgcgggccaatgagcaaatcaaagtagatgtctgttacaacaacaccaacgtcaagctgttcggccttaacgccggagccagctacggcccgctggccagcacccaccatgccattgacgatctggcggtgatgcgcggctttggcaatatccagatcttcgccccctccacgccgcgcgaatgtcggcagatcatcgactatgctcttgcttatcagggcccggtctatattcgtctcgatggcaaggcgctgccggagctgcttgacgagtcgtatcgctttgttcccggcgccgtgttgaccctgcgcgaaggcgaggacgtcgcgctggtggccaccggttcgacggtgcatgaggtggtggaggcggcgcagcggcttgccgacctcggtatccaggcgaaagtggtcagcgtgccgtcgatccgaccctgcgataccgcggcgctgctggcggcgctccggccgtgcggctcggtgatcaccgtcgaagagcataacgtcaacggcgggctgggcagtctggtggcggaggtgctggcggaagcgggggtaggcattgccctgcagcggttggggattccggacggggagtacgccgccgccgccgatcgcggctggatgcgtcagtaccatgggtttgatgccgccgccatcgttgccctggtgcaaaaaagagactga

SEQ ID NO: 238924 - DNA, 630 bp, Klebsiella pneumoniae
atgcgccaccatcgcaccgttttgcctctggccggctataccatccagcagatcgacttcgacccggcgactttccagcctgaagatctgttctggctgccctatcacgccagcctgaccgggtggggccgcaagcggcaggcggagcacctggccggacgcatcgccgcggcatacgccctgcgcgaggtgggggagaaacggcttcccgccatcggcgatcggcgccagccgctgtggcccacgccctggttcggcagcataagtcattgcggccagcgcgcgctggcggtgatcgccgatcggccggtgggcgtcgatatcgagcgccggtttaccccacagctggccgcggagctggagagcagcattatcagcccggcggaaaaaacggcgctgctgcacagcggcctgcccttcccgctggcgctgacgctggcgttttcggcgaaagagagtgggtttaaggcgacgcctgcggcaaatcagcgcgcgctggggttcgccgattttcagatcgtggaaataacggcaagcaccttagcgcttatgtttgcggagcagcgctatctcttgcactggatagcgtcggaggagcaggtcattacactttgcgcattgcagcagtaa

SEQ ID NO: 238925 - DNA, 2229 bp, Klebsiella pneumoniae
atgaataacaggatcaaatccctggccttgctggtcaatctgggaatttacggggttgcttttccgttaagcgcagcggaaaccgccaccgacgataaaaacagcgccgctgaagagaccatggtggtcaccgccgccgagcagaacctgcaggcgccgggcgtctccaccatcaccgccgatgagatccgcaaacgccccccggcgcgcgacgtctcggagatcattcgcaccatgccgggagtcaacctgaccggcaactccaccagcggccagcgcggcaacaaccgccagattgatatccgcggcatgggcccggaaaataccctgatcctgatcgacggcaagccggtcaccagccgcaactccgtgcgccttggctggcgcggcgagcgcgacacccgcggcgataccagctgggtgccgccggagataatcgaacgtatcgaagtgattcgcggcccggccgccgcccgctacggcaacggcgccgccggcggcgtggtgaatatcatcaccaaaaaaaccggcgatgagtggcacggctcatggaacacctatatgaacgccccggagcacaaggatgaaggctccaccaaacgcactaacttcagcctcagcggcccgctgggcggcgattttagcttccgcctgttcggtaacctcgacaaaacgcaggccgacgcctgggatatcaaccagggccatcagtccgagcgtaccgggatctatgccgatactctgccggccgggcgcgaaggggtgaaaaacaaaaacatcgatggtctggtgcgctgggaattcgctccgatgcagtcgctggagtttgaggccggctacagccgccagggcaacctctacgccggcgatacccagaacaccaactccaacgacctggtaaaagagaactacggcaaagagaccaaccgtctgtatcgcaacacctactcggttacctggaacggcgcctgggacaacggggtgaccaccagcaactgggcgcagtacgagcgcacccgcaactcgcgcaaaggcgaaggcctggccggcggcaccgaggggatctttaacagcaaccagttctcggatatcgatctgtcagatgtgatgctgcacagtgaagtcagtattccgttcgactacctggttaatcagaacctgacgctgggcagcgagtggaatcaacagcggatgaaggataacgcgtccaacacccaggcgctgtcgggaggcgaaattccgggctacgacagcaccggccgcagcccgtactcgcaggcggaaatcttctcgctgttcgccgagaacaacatggagctgaccgacaccaccatgctgactccggcgctgcgtttcgatcatcacagcattgtcggcaataactggagcccgtccctcaacctgtcgcagggcctgtgggatgacttcacgctgaagatgggcatcgcccgcgcctataaagcgccgagcctgtatcagaccaacccgaactacattctctacagtaaaggccagggctgctacgccagtaaagacggctgctatctgcagggtaatgacgacttaaaagccgagaccagtatcaacaaagagattggcctcgagtttaaacgcgacggctggctggcgggcgtcacctggttccgcaacgactaccgcaacaagattgaagcgggctatgccccggtctatcaaaacaataaaggtaccgatctctaccagtgggaaaacgtgccgaaagcggtggtggaaggtctggaggggacgttgaacgttccggtgagcgagaccgtcaactggaccaacaacatcacctatatgctgcagagtaagaacaaagagaccggcgatcgtctgtcgattatcccggaatacacgctgaactccaccctgagctggcaggttcgcgatgacgtttcgctgcagtcgaccttcacctggtacggcaagcaggagccgaagaagtacaactacaagggtcaaccggtctccggcagcgagaagaacgaggttagcccctacagcatcctcggcctgagcgcgacctgggacgtcaccaaatacgtcagtctgaccggcggcgtggataacgtcttcgataagcgccactggcgcgcgggcaacgcccagaccaccgggggcgccaccggcacgatgtacggcgccggcgccgagacctacaatgaatcgggccgcacctggtacctgagcgtcaacacccacttctga

SEQ ID NO: 238926 - DNA, 1209 bp, Klebsiella pneumoniae
atgttaaggacaggaagcgaggagtggtggcaaaccctgcgggggccgcagtgccgcgcagtggatgacgccatcgaggtaacgttctggtggcgggacccggcgggggatgaaacccgctctccccatcgtcgggtatggctctatatcaccggcgtgaccgaccaccatcagaatgcgcgtccgcaatcgctgcaacgtctccccgggaccgacgcctggttctggcgcactacgctgtcgccgacctggcgcggcagctactgttttattccctccgaccgtgacgatgatttttcccctgaggtgttcagcgctgatgcgcccgaccgcgcgctgctacgcgaaggctggcgcaaactgctgccgcgggcgatagccgatccgctgaacccgcacagctggcggggcggacgcggccatggcgtgtccgccctggagatgccgcaggcccccgcgcagcccggctgggacccgcttaatgaggcgcatcctgccgcccgttgccttgagtggcgcagcgcgcgtctgggcaaccatcgccgggtctggatctacaccaccggcgaggctgtcgacccgcaaacgcggccgctggcgatcctgctcgacggccaattctgggccgagagcatgccggtgtggtcgccgctggccgccctgacccgcgaggggagactgccgccgtcggtctacctgctgatcgacgcgatcgacaaccagcgccgcggggttgagctgccctgtcaccgcgatttctggctggcggtgcaggaggagctcctgccgctggtccacggctatgccccgttcagcgaccgcccggatcggacggtggtggccgggcaaagcttcggcggtctggcggcgatgttcgccgctctcaactggccgcagcgctttggctgcgtgctcagccagtcaggctcctactggtggccgcaccgtgatggccgcgggacgggctttatcggcgaacagcttcgccagggtgaggtgtccgcggccgggctgcgcgtctggctggaagcgggccaacgcgaaccgatcatttttcgcgcgaaccaggcgctactggcgcaactcaccacaacacagcagacgattttctggcgtcaggttgacggcgggcatgatgcgctttgctggcgcggcgggctgacggcagggcttatccagctctggcagcctctgctgtcgcacccttag

SEQ ID NO: 238927 - DNA, 204 bp, Klebsiella pneumoniae
atgcaattcagtaaccccttcgacaatccgcaagggcagttttacattctgcgcaatgatcaacagcagtacagcctgtggccggcgcactgcgacctgcctgccggctggacggtggtgtgccccccgcagtcggccgaggcctgcaacgcctggctggcggccaactggtcaaccctgacccccgcccatcatgcgtcataa

SEQ ID NO: 238928 - DNA, 3882 bp, Klebsiella pneumoniae
atgaccactcgtttaccgctggttgccgcgcagccggggatctggatggccgagcgcctctccactctgccaggcgcctggagcgtggcccactatgttgaactgcgcggcgccctcgacccgacgctgctgggaaaagcgattgtcgccggtctgcagcaggcggacaccctcagcctgcgctttgaggaagaggagggggaagtctggcagtgggtggcggccgaccgcacctttgccgaaccgtcgatcattgacctgcggacggcgccggatccgcatcgcgccgctacggagcggatgcaggcggatctggcgcaggatctgcgcgtcgacggcggcaacccgctggtgtgtcatcaactgctgcgcgtcggcgacgactgctggtactggtatcagcgttatcaccacttgctggtggatggcttcagcttcccggcgataacccggcagatcgccgccatttaccgcgcctggcagcggggggaagccactcctgagtcgcctttcacccccttcgccgaggtggtggacgagtaccagcgctacgccggcagcgaggcctggcagcgggataaagctttctggcaggcccagcgccaggcgttaccggcgcctgcctcactctctgccgcgccgctgggcgggcgcgccgccgggagcgatatctggcggatgaagctggagatgaacgccgacgccttccgccgcctggccagccatgcgccgcagtgtcagcccgctgacctggcgctggcgctcaccacgctgtggctgggccgcctgtgcaaccggatggactacgcggcgggctttatctttatgcgtcggatgggttcagccgcgctgacctcgacggggccggtgctcaatgtcctgcctctggcggtgcatattgacgcccgggagacgctggcggacctggcgatgcgcctcgccggtcagttgaaaaagatgcgccgccatcagcgctatgacgccgaacagatcgttcgcgacagcggcaaagcggcaggggacgaaccgctgttcggcccggtgctgaacgtcaaagtctttgattaccagctagatatcgatggtgtgcaggcagtgacccacaccctcgccaccggcccggtcaacgatctcgagctggcgctgttcccggatgagaccggcgggctgtcgctggaaatcctcgccaacaaggcccggtacgacgaagccgagctccgtcgccacatggcgcgactgaccgcgctgctggcgcagttcgccgccgatccggcgctgcgctgcggcgaagcagagatgctctccgccgacgagctggcccggctggcggcggtcaacgataccgttgtgccgctgcctgccaccaccctcagcgcgctggtggccgaccaggcgcggaagaccccggatgccccggcgctggcggacgcccgctggcagttcagctatcgcgagatgcgtcagcaggtggtggcgctcgcgcagctgctgcgtcagcgcggcgtgaagcctggggacagcgtggcggtggccctgccgcgctcggtgttcctgaccctggcgctgcacggcattgtcgaagcgggggccgcctggctgccgctggacaccggctacccggacgaccgcctgcggatgatgctggaagacgcccggccgtcgctgctgatcacctcggaggaccagctggcccgcttcagcgatattccggggctggaaagcctctgctaccagcagccgctggccgccggggatgacgcgccgctggcgctgtcaaaaccagaccataccgcctacatcatctttacctccggctccaccgggcggccgaaaggggtgatggtcggccagaccgccatcgtcaaccgcctgctgtggatgcaggatcgctatccgttatctgccgacgacgtggtggcgcagaaaacgccgtgcagtttcgacgtttcggtgtgggagttctggtggccgtttatcgccggcgcgcagctggtgatggccgagccggaggcgcaccgcgacccgcaggcgatgcagcagttcttcgcccgctacggcgtgaccaccacccactttgtgccgtcgatgctggcggcgtttgtcgcctcgctggatgccgacagcgtggccgcctgccgcacgctgcggcgggtattctgcagcggcgaagcgctgccgacggaattgtgccgcgagtgggagcgcttaaccggcgcgccgctgcataacctgtacggcccgacggaggcggcggtggacgtcagctggtacccggcctgcggatctgagctggcggcggtgaccggcagcagcgtgccgattggctggccggtgtggaacaccgggctgcgcattctcgatgccgcgatgcgcccggtgccgccgggggtggcgggggatctttatctcaccggcatccagctggcgcagggctatctggggcgcccggatctcaccgccagccgctttatcgccgacccgtttgcccccggcgagcggatgtatcgcaccggcgacgtggcgcgctggctggcgaacggcgcggtggagtaccttggccgcagcgacgatcagctgaagatccgcgggcagcgcatcgagcttggcgagattgatcgggtgatgtcggccctgccggacgtggggcaggcggtgagtcacgcctgcgtcttcaaccaggcggcggcgaccggcggcgatgcccgacagctggtgggctatctggtctctgactccggcctgccgctggataccgcggcgctgaaagcgcggctggcggaacagctgccgccgcatatggtgccggtggtgctgatgcagctcgctgagctgccgctgagcgccaacggcaaactggaccgcaaagcgctgccgctgccgaccctcggcggcgagcgcagcggccggccgccggagcccggcatggaaactcttgtcgccgccgccttcagccagctgctgggctgcgaggtgaacgatatcgacgccgatttcttcgcccttggcggtcattcgctgctggcgatgcgcctggcggcacagctcagccgccagctggcgcggcaggtgaccccggggcaggtgatggtggcctcgacggtgggcaaactgagcgcgctgctggccgccgatctcagcgatgagcaggcccagcgcctggggctggatacgcttctgccgctgcgcgagagcgacggcccgacgctgttctgcttccatcccgcctccggcttcgcctggcagttcagcgtgctggcgcgctatctcagcccgcgctggtcgattaccggtattcagtcgccgcgcccgcaggggccgatggccagcgccgccagcctcgacgaggtctgcgagcatcatctgcgcacgctgctggcgcagcagccgcacggcccttattacctgttcgggtattcgctgggcggcaccttagcccaggggattgccgcccgcttgcgccagcgcggcgaagcggtggccttcctcggcctgctggatacctggccgccggagacgcaaaactgggcagagaaagaggccaacgggctggatcccgaggtactggcggagatcgaccgcgagcgcgaagcgttcctcgccgcccagcaggggcaagcctccggcgagctgttcagcgccatcgaaggcaactatgccgatgcggtgcggctgttaaccaccgcgcatagcgcgaagtttgacggcaaggcgacgctgttcgtggcggagaagacgcggcaggaggggatggatccgcaggtcgtatggggcccgtgggtgggggaactggaggtgttcagccagaactgcgcccacgtcgatatcatctccccgcaggcctttgaggccatcggtccggtggtcagggagattctggggtaa

SEQ ID NO: 238929 - DNA, 795 bp, Klebsiella pneumoniae
atgagtgctgtcccctcccgtttgcgcggcgagcagttaaccctggcctacgggaacaagaccatcgccgagtcgctgaacgtgaccatccctgacggtcacttcaccgccattatcggccccaacggctgcggcaagtcgacgctattgcgcaccctcagtcgcctgatgacgcccgccagcggccacgtctggctcgacggcgcgcagatccagcagtacgccagtaaagaggttgcccgccgcatcgggctgctggcgcagaatgccaccacccctggcgatatcacggtgcaggagctggtggcccgcgggcgctatccgcaccagccgctgtttacccgctggcgcaaagaagatgaagaggcggtgaacaaggcgatgcgggcgaccgggatcagcgatctggcgctgcagagcgtcgacacgctttccggcggccagcggcagcgggcgtggattgcgatggtgctggcccaggaaacggcgattatgctgctggatgagccgaccacctggctggacatcagccatcagatcgacctgctggaactgttgagcgagctgaatcgcgagaagggctataccctggcggcggtgctgcacgatcttaaccaggcctgccgctacgccacccacctgatcgccctgcgcgacggcaggatcgtcgccgagggggcgccgaaggagatcgtcaccgccgatctgattgaacggatttacggtctgcgctgcacgatcattgaagatccggtggcgcatacgccgctggtggtcccgctgggccgccggtaa

SEQ ID NO: 238930 - DNA, 993 bp, Klebsiella pneumoniae; identical to SEQ ID NO: 211349

SEQ ID NO: 238931 - DNA, 1008 bp, Klebsiella pneumoniae
atgtcgttttctacgaccgcggtacgctctgtcgccgtgcccggattgttgctattactcgccttagccgccgcgcttagcctgaccatcggcgccaaatcgttgccgatcggcacggtattcaccgccttcagcggaacctgtcaaagcgctgattgcactatcgtgctggacgcgcgcctgccgcgcactctggccggtctgctggccggcgtcgccctcggcctcgccggcgcgctgatgcagacgctcacccgcaacccgctggccgaccccggcctgctgggggtcaactccggcgccagcttcgccatcgtcctcggcgcggcgctgttcgggatcacttccccgcaggagcagctgctgctggcgttctgcggcgcgctctgcgcctcgctgctggtagcctttaccggcagccagggcggcggtcagctgagcccggtgcgcctcactctcgccggggtcgcccttgcggcggtactcgaggggctgtccaacggcatcgccctgctcaacccggacgtctacgatcagctacgcttctggcaggccggttcgctggatatccgcaccctgcaaacgctgaaaattgtcctgctgccggtagtcgtggcggggatcgccgctctgctgctgagccgggcgctgaacagcctgagcctgggcaacgataccgccaccgccctcggcagccgcgtcgcccgcacccagctgatcggcctgatcgtcatcaccgtcctgtgcggcagcgccaccgccgtcgtcggccccatcgcctttatcggcctgatgatgccgcatatggcgcgctggctggtgggggccgatcatcgctggtcgctgccggtcaccctgctcgccaccccggccctgctgctgtttgccgacgtgattggccgcctgctggtgcccggcgaactgcgggtatcggtggtgagcgcctttctcggcgcgccggtgctgatctggctggtgcgccgccagccgcggggaggtggcctgtga

SEQ ID NO: 238932 - DNA, 1242 bp, Klebsiella pneumoniae
atgaaccgacaatcctggctgctcaatctcagcctgctgaaaactcacccggcgtttcgcgccgtttttatcgctcgctttatctctattctgtcgcttggcctgctgggcgtggccatcccggtgcagatccagatgatgacccattcgacctggcaggtcgggctgtcggtgacgctgaccggggcgtcgatgtttgttggtctgatggtggggggcgtgctggctgaccgctatgaacgtaaacgcctgatcctgttggcgcgcggcacctgcggcgtgggctttgtcggcctgtgtctgaacgccctgttgccggagccgtcgctggcggcgatctacctgctggggatctgggatgggttcttcgcctcgctgggggtgacagcgctgctggcggcgaccccggcgctggtggggcgggaaaacctgatgcaggccggggccatcaccatgttgacggtgcgccttggctcagtgatttcgccgatgatcggcggcctgctgctggccaccggcggcgtggcgtggaacttcggcctggcggcggcggggacctttatcaccaccttaaccctgctgcgtctgccgcagctgccgccgcctccgcagccgcgcgagcatccgctgcgctccctgctggcggggctgaccttcctctgccggagtccgcttatcggcgggattgcgctgcttggcggtctgctgaccatggccagcgcggtgcgggtgctctatccggcgctggccggtagctggcagatgtcggccggacagattggcctgctgtacgccgctattccgctcggtgcggcgctgggggcgttgaccagcggccagctggcccagacggtgcggccgggcgcgctgatgctggcgaccacggtgggatcgtttgtcgccattgcgctgttcagcctgatgccgcactgggcattgggcgcgctgtgcctggcgctgtttggctggctgagcgctattagctcgctgctgcagtacaccctgatccagacccagacgccggaacatatgctcgggcggattaacggtctgtggaccgcgcaaaacgtcaccggcgacgccatcggcgcggcgctgctcggcggcttaggggcggtgatgacgccggcggcatccgccagcgccagcggctgggcgctggcgcttgtcggtgtgctgctggttgggttgctacgcgagctgcgccgtttccagcgcccggaaattgtcaacgaaagttaa

SEQ ID NO: 238933 - DNA, 960 bp, Klebsiella pneumoniae
gtgaacttcttttctttctgccgccgcggtgcgctgaccggcatgctgttgcttttaggaattacctcagcccaggcggcggactggccgcgccaggtcaccgacagctacgggacgcataccctgccgagtcagccgctgcgcattgtctccaccagcgtgacgcttaccggttcgctgctggcgattgacgctccggtggtcgccagcggcgcgaccacgccgaacaaccgcgtcgccgatagccagggctttctgcgccagtggagcgaggttgccaaagcccgcaagctggcgcggctgtacatcggcgaaccaagcgccgaagcggtggccgcccagatgccggatctgatcctggtgagcgcgaccggtggcgactccgccctgccgctgtacgatcagcttaaaaccatcgccccgacgctggtcatcaactatgacgataaaagctggcaaaccctgctcacccagctggggcagatcaccggtcatgaacaacaggccagcgcgcgcattgccgacttcaataaacagctcgtttcgttaaaagaaaaaatgaaactgccgccgcagccggtgaccgccctggtctataccgccgccgcgcacagcgccaatatctggacgccggaatcggctcaggggcagatgctcgaacagctgggctttagcctggcgacgctgccgggcggcctgcccgccagccatagccagggtaaacgccacgatatcgtgcagctgggcggggagaacctcgcggccggtctgaacggccagagcctgttcctgttcgccggcgaccagaaagatgcggatgccatctacgccaacccgctgctggcgcatctcccggcggtcgcaggcaaacgcgtctacccgctgggcaccgagaccttccgccttgactactacagcgctctgctggtgctccagcgtctctccagcctgttcggctaa

SEQ ID NO: 238934 - DNA, 1176 bp, Klebsiella pneumoniae
atggaaacgtcactggctgaggatgtaaagaaaccgacccggaccctgtcgccggacagcttcttctttatgtcgccgtaccgcagttttaccacttcaggctgcttccgtcgcttctcacagcccgccgttggcggcgatgcgctgaacggcgagttccagcagcagatggcggccgcctttgccgaggcccgggcggcggggatccgcaagccggtgatggtcggggctatcccgttcgacacctgtcagccttccgagctctatatccccgagcgctgggaagcgttctctcgcccggaaaagcagcgttccgcccgctatgccgcgccgctggaggcgatggaggtggtggagcgtcgggagatcccggagcaggacgcgtttttagccatggtggaacgcgccgccgcgctgaccgccaccccggaagtcgacaaagtggtgctatcaaggcttatcgatattaccacccgcgaccgcgtcgacagcggcgcgctgatggagcgactgatcgcccagaaccccgccagctttaacttccacgtgccgctctccgacggcggcgtgctgctgggcgccagcccggagctgctgctgcgtaaagaaggacagcacttcagctctctgccgctggccggctccgcccgtcgccagccggacgatgtgctggaccgggaagcaggcaacaggctgttggcctccggcaaagatcgccacgagcacgagctggtgacccaggcgatgaagagcgtgctgggcccgcgcagcagtcagctgtcgctaccggagtcgccgcagctgattaccaccccgacgctctggcatctggcgacgccgatcgcaggcaccgcgctggcggaagaaaacgccatgtcgctggcctgtctgctgcacccgacgccggcgctgagcggtttcccgcatcaggcggcgaagcgcctgattgctgaactggaacccttcgatcgccagctgttcggcggcatcgtcggctggtgcgatgacgaaggcaacggcgagtgggtggtgactatccgctgcgcgcgtctgcagcagcgtacgctgcgcctgtttgccggcgcgggcattgttccggcctcctcgccgctgggcgaatggcgcgaaaccggcgtcaaactgaccaccatgcttaacgtatttggcttgaactaa

SEQ ID NO: 238935 - DNA, 1608 bp, Klebsiella pneumoniae
atgattgcatttacccgttggccggaagagtttgcggcccgctatcgtcaaaaaggctactggcaggatctgccgttaaccaatctgatcacccgtcacgcggacaatgacgccgtggcgattatcgatggcgagcggcagattagctaccgccagtttaaccagctggtggacaacctcgcctgctcgctgcagcgccagggactgaagcgcggggagaccgcgctggtgcagttgggcaatgtcgccgagttttacatgaccttctttgcgctgctgcgcatcggcgtcgcgccagtgaacgctttgttcagccaccagcgcagcgaacttaacgcctacgccgcgcagattaaaccggcgctgctgattgccgatcgcgagcacgcgctgtttgctgacgatagctttctccacgcgtttatcgcggaacatccttccctgcgcgtcgcactgttgcgtaacgacggcggcgagcgcgatctggcgacggagattaaccgcccggcggataactttatcgccaatccaacccctgccgacgaagtggcctttttccagctctccggcggcagcaccgggacgccgaagcttatcccacgcacccataacgattacgactacagtatccgccgcagcaacgagatctgcgggattaacgctgaaacgcgctacctcaacgcgctgccggcggcgcataactatgcgatgagttccccgggttcgctcggcgtcttcctcgccggcgggcgggtgatcctcgccgccgacccgagcgccacgctctgtttcccgctgattgaacaacatcagatcaacgttgcctcgctggtgccgccggcggtcagcctgtggctgcaggcgattcacgaatggggcagcaacgcccagctgcaatcgctgcagctgttgcaggtcggcggcgcgcgcctgtcagcgaccctcgccgcgcgcattccggcggaaatcggctgccagctgcagcaggtgttcggcatggcggaggggctggtgaattacacccgccttaacgatagcccggagcggatcatcaatacccagggctgtccgatgtgcccggacgatgaagtgtgggtagcggatgccgacggcaacccgctgccgcgcggcgaagtgggccgcctgatgacccgcgggccgtacactttccgcggctactacaacagcccgcagcataacgcggaagcctttgacgccgaggggttttattgctccggcgatctgatttcgatcgacgaagatgggtatatcaccgtccagggccgggaaaaagatcagatcaaccgcggcggcgagaagatcgccgctgaagagatcgaaaacctgctgctgcgccatgaggcggtgatccacgccgcgctggtcagcatcgaagacaatctgctgggcgagaaaagctgcgcttatctggtggtgacctcgccgctgcgcgccgtcgccgtgcgccgcttcctgcgcgagcagggggtggcggaatttaaactgccggaccgcgtggagtgcgttgccgcgctgccgctgacgccggtgggcaaagtcgataaaaaacaattacgtcagtggctggccgaaggcaagctgggctga

SEQ ID NO: 238936 - DNA, 852 bp, Klebsiella pneumoniae
atggcaatccctaaattacaggcatatgcgctgccggaagccagcgatatcccggcgaacaaggtcaactgggcctttgagccgtcgcgcgccgcgctgctgatccacgatatgcaggagtatttcctcaacttctggggcgaaaacagcgcgatgatggagaaagtggtggctaatatcgccgccctgcgcgacttctgcaaacagaacggcattccggtgtactacaccgcccagccgaaagagcagagcgatgaagaccgcgccctgctgaatgatatgtgggggccgggtctgacccgctcgccggagcagcagcaggtgattgccgcgctggcgccggatgaagacgataccgtgctggtgaaatggcgctacagcgcgtttcatcgctcgccgctggaggagatgctgaaagagaccggtcgcgaccagctgatcatcaccggcgtttacgcccatatcggctgcatgaccaccgccaccgatgctttcatgcgcgatatcaaaccgttctttgtcgccgacgcgctggcagatttcagccgtgaagagcacctgatggcgctgaaatacgtcgccggccgctccggccgcgtggtgatgaccgaagagctgctaccgctcccagcctccaaagcggcgctgcgtgagctaattctgccgctgctcgacgaatccgatgaaccgttggatgatgaaaacctaatcgactacggtctggattcggtgcggatgatggccctggccgcccgctggcgcaaagtgcacggcgatatcgacttcgtgatgctggcgaaaaacccgaccatcgacgcctggtgggcgctgctctcccgcgaggtgcactaa

SEQ ID NO: 238937 - DNA, 756 bp, Klebsiella pneumoniae
atggcggcgctggattttcgcggtcagaccgtgtgggtgaccggcgcaggtaaagggattggctatgccaccgcgctggctttcgtcgaggccggggctaacgtcaccgggttcgacctcgcctttgacggcgaaagctacccgtttgccaccgaaacgctggacgtcgccgatgccgaccaggtacgcgaggcatgcagccggctgttggcgaacaccgagcgtttagatgtgctggtgaacgccgccgggatcctgcgcatgggcgctaccgaccagctgagcgcggaagactggcagcagaccttcgcggtcaacgtcggcggggcgttcaacctgtttcagcagacgatggcccagttccgtcgccagcggggcggggcgatcgtcaccgtcgcctccgatgccgcgcacacgccgcgtatcggcatgagcgcctatggcgcctcgaaggcggcgctgaaaagcctggcgctgaccgtcggccttgagctagcgggcagcggggtgcgctgtaatctggtgtcgccgggctccaccgataccgatatgcagcgcaccctgtgggtcagcgacgatgcagagcagcagcggatccgcggcttcggcgagcagtttaagctcggcatcccgctgggtaaaatcgcccgcccgcaggagattgccaataccattctgttcctcgcctcttctcacgccagccatatcaccctgcaggatatcgtggttgatggcggctcgacgctgggggcgtaa

SEQ ID NO: 238938 - DNA, 414 bp, Klebsiella pneumoniae
atggcctggaagcgagagcttacgctggcggcgctgaacgccagcagcgaaaataccatggtggcgcatcttggcatcatctacacccgactggaagaggggctgctggaggcggagatgccggtgtatgcgcgcacccatcagccgtttggcctgctgcacggcggcgcctcggcggcgctggcggagacgctgggctcgatggccggttggctgatgaccgaagaggggcagtgcgtcgtcgggactgagcttaacgccagccatcaccgggccgtctccagcgggaaagtgcgcggcgagtgccgtccgctgcatcttggtcgccagagccagagctgggagattgtggtgtatgacgagaaggggcggcgctgttgcacctgtcgtctgggcaccgcggtgctgggctaa

SEQ ID NO: 238939 - DNA, 2106 bp, Klebsiella pneumoniae
atgaataattcagggaaataccttatctgggcgctgctctccgtcatcggagccttcgccctcggctatatcgctttaaaccggggtgagcagataaacgcgctgtggattgtcgtcgccgcggtctgcgtttatttgatcgcgtatcgtttctacggcctgtatatcgctaaaaccgtgctcggcgttgacccgacgcggatgacgcccgcggtgcggcataacgatggcctcgactacgttccaaccgacaaaaaagtgctgttcggtcaccattttgccgccattgccggcgcggggccgctggtgggcccggtgctcgccgcgcagatgggctacctgccggggatgatctggatcctcgccggcgtggtgctggctggggcggtacaggactttatggtgctgtttgtttcgacccgccgcgatggccgttcgcttggcgaactggttaaagaggagatgggaccgaccgctggcgtcatggcgctggtggcctgctttatgatcatggtgatcatcctcgcggtcctggcgatgattgtggtgaaagcgctgacccacagtccgtgggggacatacaccgtcgcctttaccattccgctggcgatctttatgggcatctacatccgctatctgcgtccgggacgcatcggcgaggtgtcggtgataggcctggtgatgctggtgttcgccatcatctccggcggctgggtggcggaaagcccgacctgggcgccgtggtttgattacaccggcgtacagctgacctggatcctggtgggctacggatttgtggctgcggtactgccggtctggctgctgctggccccgcgcgattatctctccaccttcctgaaaatcggcaccatcgtggggctggcgattggcatcctgattatgcgcccgaccctgacgatgccggcgctgaccaaattcgtcgacggtaccggcccggtgtggagcggcaacctgttcccgttcctgtttatcaccatcgcctgcggcgcggtctccggcttccatgcgctgatctcctccggcaccacgccgaaaatgttggccaacgaaagccaggcctgctttatcggctacggcggcatgttgatggaatccttcgtcgctattatggcgctggtggcggcctgtattatcgatccgggcgtctacttcgcgatgaacagcccgatggcggtgctggcgccggcgggtaccaccgatgtggtcgcctcggcagcgcaggtggtgagcggctggggctttagcattacgcctgatacgctgcatcaaatcgccagcgaggtcggcgaacagtcgattatctcccgcgccggcggcgcgccaacgctggcggtggggatggcctacatcctgcacggctcgctgggcgggctgatggatgtctcgttctggtaccacttcgccattctgtttgaggcgctgtttatcctgacggcggttgacgccggcacccgcgcggcgcgctttatgctgcaggatctgctgggcgtgattagcccggggctgaaaaaaaccagctcgctaccggccaacctgctggcgaccgcgctgtgcgtcctggcttggggctacttcctgcatcagggggtggtcgatccgctgggcgggattaacaccctatggccgctgttcggtattgccaaccagatgctggcggggatggcgctgatgctctgcgcggtggtcctgttcaagatgaaacgccagcgctacgcgtgggtggcgctgctgccgaccagctggctgctgatctgtacgttgaccgccggctggcagaagtcgtttagcccggacaccaaagttggtttcctggcgatcgccaataaattccaggcgatgatcgacagcggcaacattccgccgcaatataccgaatcacagctggcgcagctggtgtttaataaccgtctcgatgccggactgaccatcttctttatgatcgtggtggtggtgctggcgctgttctcgattaaaaccgcgctggcggcgctgaaagaggataaaccgacggcgaaagagacgccgtatgagccaatgcctgaaaacctggacgcgattgagacccaggcgaaaggggcgcattaa

SEQ ID NO: 238940 - DNA, 198 bp, Klebsiella pneumoniae
atgtttgacaccctctccaaagcaggaaaatatttaggccaggccgccaaaatgatgatcggcgtgccggattacgataactacgtcgagcacatgcgaataacccacccggatcagacgccgatgacttatgaagagttctttcgcgaacgccaggacgcgcgctacggcggcaagggcggggcgaagtgctgttaa

SEQ ID NO: 238941 - DNA, 405 bp, Klebsiella pneumoniae
atgactattcagtacatcaaggatgaagaaggaaaagaccagtatgtcgtcattccttacagcgattactttcgtatgcgcctggctctgctggagtacgacgacgaggatgaaagcgaatgggaagatattccttatgaatcagatatctatgatgacgtcatgctgccgggcgaagtatgcgacgtgatgcataaagaaaacgtcagcctgcaggccgcgtggcgcatcctgcgcgggatgtcccagcaggaggtagccgaaaagcttggcatcagccagtccgcggtgtcacagctggaagcgctggactcccgtccgcaaaagcgcacccgcgagaagctggcggcgatttacggctgtactcaggagcagatcagcctctatctgccgaaagagggttaa

SEQ ID NO: 238942 - DNA, 303 bp, Klebsiella pneumoniae
atgaaaattgtctggtcaaaaacggcagataagcaattttctaaaatcgatactcggtataagagccgcattaaatccaggctggagaagatggatgataaagcttcacctatctcggatatcaaaaaattgtcctctcccgaaaaccactaccggctgcgattaggtgattacagaatcatctacacctttggggatccgccgggcgatacctgctacgtcgtggcggttaaacgccgaaccaccaccacctaccttcatgaggaagataccgaatatgactattcagtacatcaaggatga

SEQ ID NO: 238943 - DNA, 744 bp, Klebsiella pneumoniae
atgcagatcgatttaacaggtaagaaggcgctggttaccggcgccagccgtgggttgggtcgcgccatcgcgctgtcgctggcgcgcgccggcgccgatgtggttattacgtatgaaaaatcggtcgataaagcccaggcggtcgccgatgaaataaaggccctgggtcggtacggcgaagcggtacaggccgacagcgccagcgcgcaggcgattcaggatgccgtcacccatgcggcccggtccctcggcgggctggacattctggtcaacaacgccggaatagcccgcggcggtccactggaatccatgacgctggcggacattgacgcgcttatcaacgtcaatatccgtggagtggtcatcgccacccaggaagcgctggtgcatatggccgatggcggacggatcatcaatatcggcagctgtctggctaaccgcgtggccatgccgggcatctcggtttacgccatgaccaagtccgccctcaacgccctgacccgtggcctggcgcgtgatttaggccctcgcgggatcaccgttaaccttgtccatccagggccgaccaacagcgatatgaacccggaagacggagaacaggcggaagcccagcgccagatgattgcggtcggccactacggccagccggaagacatcgccgcggcggtaaccttcctcgccagcccggccgccgggcagatctccggtacggggctggacgtggatggcggattgaacgcctga

SEQ ID NO: 238944 - DNA, 1089 bp, Klebsiella pneumoniae
atgagcaacagcgatatccgcgtcgtgcccggcccggccaactatttctcccatcctggcagccttgagcggctgagcgactttttcagcgccgaccagctctcgcgagcggtgtgggtctatggcgagcgcgccctggccggcgccgaaccttttctgccggcggccttccacctgccggaggcgaaaaagatccgctttaccggccactgcagcgaacgcgacgtggcggggctggtgcaggcctccggtgacgatcgggcggtagtgattggcgtcggcggcggcgcgctgctcgacagcgcgaaagtgctggcccgccgcctgggggtaccgctggtggccatcccgactatcgccgccacctgcgcggcgtggacgccgctgtcggtgtggtatagcgacgccggacaggccctgaattttgagatcttcgatgacgccaacttcctggtgctggtcgaaccgcgcattattctcaacgccccggcggagtacctgctggcgggcattggcgacaccttagccaaatggtatgaggccgtggtgctggcgccgcagccgaaggcgctgccgctcaccgtgcggctggggattaacggcgcgcaggcgatccgcgatgtgctgctggccagcagcgaaacggcgctggcggaccagcgccgcggcgatctgacccaggcgtttcgcgatgtggtggaggcgattatcgccggcggcgggatggttggcgggctgggggaacgttacacccgggtcgccgccgcccatgcggtgcacaacggactgacggtgctgccgcagacggataaattcctccacggtaccaaagtggcctacggcattctggtacagagcgccctgcttggtcaggacgatgtgctggcgcagttagtgcaggcgtatcagcgctttaacctgccgaccaccctggcggcgctggaagtcgatatcaataaccgcgcagagctggaccgggtcattgcccataccctgcgcccgggcgagtcgattcactatttaccggtgacgttaacccctgaggttctgcgcgcggcgtttgagaaggtggaatacttcagccgttaa

SEQ ID NO: 238945 - DNA, 1503 bp, Klebsiella pneumoniae
atgagcgcgaatcgccttgagatgcataacattagcctggccttctccggctttcaggcgctgaacaaggtggactttaccctccatggcgggtcggtgcatgccctgaccggggccaacggcgcgggtaagtcgacgctgatggccgtgctgtgcggcacccacgcccactatgagggcgaagttacgatcaacaaccagccggtcatcattcgttcgccgcgggatgctaaacagctggggatccacctggtgcagcaggaggtggacgtggcgctggtgccgggcctgagcattgcggaaaacattatgctggacaggctggcggagccgggcatgaccttccgctggtcgcgggttcggcagctggcgcgcgaggcgctggcgcagctggatgtggcgctggacgtccggcgctccattgacagctgcacgctcgccgaaaaacagcaaatcctgttggcccgcgccctgtcgcaccattgccgctttttgatcctcgatgaacccaccgcgccgttggatcagcatgaaagtgagcgtctgtttgcggtagtacgccgtctgcagcatcaggggatcggggtggtgtttatttcgcatcgtatccatgagctgaaggcgatctgcgacaccctgacggtgctgcgcgacgggcggctgattgagagcggcccgatggcgccgctgagcggcgaacagatcgtcgaaaagatgctgggccacgagctgagcgatatcttcccgccgccgcgcccgccgcacggcgaagaggtgctgttgcaggttgacggtctgcatgatgaggcgctgctgcaggatatttcgctgcacctgcggaagggggaaattcttggtatcgccgggctggccggcgcgggcaaaaccgagctgtgcaaagcgctgttcggcgccagcaaaagccgggtgcagcgtggcgagctgaacggccagccgtggcgaccgcgcgatccggccgactcggtggggcgcggcctggcgctggtcccggaggagcgacgcaaagagggcattttcattgaagagccgatcgcgatgaacctggcggtcagcgccgataacagcttttcgcgctggagcctgtttggccatcggcaggcctggcgctgggcggaggaggtgattgcccgcctcggcgtgcgcgctaccggtcccggtcagacgctgcgccgtctttctggcggcaaccagcagaaggtggccattggcaaatggctgcgcggtgatgccaacgttttgatttttgacgaaccgaccaaaggggtcgatgtgaaagcgaaaaccgatctgttcatgctgatcgatggtctggcacgggaaggcaaaggggtgatttatgcctcgggtgaattcgccgagctggtcggtttatgcgaccgcatctgcgtgctatgggacggacggatcgtagcggagatccccggcgcggatgcccgggaagagacactgctttattattcaaccggaggagcggcagcgtga

SEQ ID NO: 238946 - DNA, 1065 bp, Klebsiella pneumoniae
atgaaaaagatcgcactctctctgatgacgctgggtctgttgcagtcgacggcggcgctggccaccgccccgacgccggtgccggcggcgattgccgaacacaacggcccgatccgcattgccgtgatccgcaacctcgggtctgacgataacaccacccagtttgtcgccggggcgctgcaggaaggcaaaaagctcggtttcaaaatcagcaccttcctgagcaacggcgatgacgccaaattccaggacttcgtcaaccaggccatcagccagaaatacgatggcattattctctctcaggggcgtgacccgtattccaccgccctggtgaagaaggcggtggacgccgggatcaaagtggcggtgttcgataccgcggtaagcggtgagatccccggggtgacggtcagccagcaggatgatgcctcactgaccgagctctcttttggccagctggtgaaagatttcaacggcaaggccaacatcgtcaagctgtgggtggcgggcttcccgccgatggagcgccgtcaggcggcttaccagacgctgctgaagcaaaatccggggattaaagagctggagtcgatcggcgccgtgtcatccgatgtgcagggcgacactgccaacaaggtgggggcgatcctcgccaagtatccgaaagggaaaattgacgcgatctggggcacctgggatgcctttagccagggagcctataaagcgctgaaagagaacggccgcaccgagatcaaactctacagcattgatatttccaaccaggatttgcagctgatgctcgaagccggcagcccgtggaaggtgagcgtggcggtggatccgaagcttatcggcgcgaccaacgtgcggctgatcgccaacaagatcgccggcgagccgacgccagccacctacgacttcaaggcggcagcgattccccaggcgctgctggcggcccagccgggagcggtaaacgtggcgtcgctggggaaaattatccctggctggggccagaccgaagactttatcgcgccgtggttcgcgacgctggaagcgaagaacaaataa

SEQ ID NO: 238947 - DNA, 1200 bp, Klebsiella pneumoniae
atgtcgcaataccataccttcaccgcccacgatgccgtggcttacgcgcaacagttcgccggcatcgacaacccatctgagctggtcagcgcgcaggaagtgggagatggcaacctcaatctggtgtttaaagtgttcgatcgtcagggcgtcagccgggcgatcgtcaaacaggccctgccctacgtgcgctgcgtcggcgaatcctggccgctgaccctcgaccgcgcccgtctcgaagcgcagaccctggtcgcccactatcagcacagcccgcagcacacggtaaaaatccatcactttgatcccgagctggcggtgatggtgatggaagatctttccgaccaccgcatctggcgcggagagcttatcgctaacgtctactatccccaggcggcccgccagcttggcgactatctggcgcaggtgttgttccacaccagcgatttctacctccatccccacgagaaaaaggcgcaggtggcgcagtttattaacccggcgatgtgcgagatcaccgaggatctgttctttaacgacccgtatcagatccacgagcgcaataactacccggcggagctggaggccgatgtcgccgccctgcgcgacgacgcccagcttaagctggcggtggcggcgctgaagcaccgtttctttgcccatgcggaagcgctgctgcacggcgatatccacagcgggtcgatcttcgttgccgaaggcagcctgaaggccatcgacgccgagttcggctacttcggccccatcggcttcgatatcggcaccgccatcggcaacctgctgcttaactactgcggcctgccgggccagctcggcattcgcgatgccgccgccgcgcgcgagcagcggctgaacgacatccaccagctgtggaccaccttcgccgagcgcttccaggcgctggcggcggagaaaacccgcgacgcggcgctggcttaccccggctatgcctccgcctttctgaagaaagtctgggcggacgcggtcggcttctgcggcagcgaactgatccgccgcagcgtcggactgtcgcacgtcgcggatatcgacactatccaggacgacgccatgcgtcatgagtgcctgcgccacgccattactctgggcagagcgctgatcgtgctggccgagcgtatcgacagcgtcgacgagctgctggcgcgggtacgccagtacagctga

SEQ ID NO: 238948 - DNA, 1029 bp, Klebsiella pneumoniae
atgcagacattacagaccaccagcctgcgggtgagtgaaaatcagctttttattctcgaccagcaggccttgccgcaggaaaaacgctggctggcggcggataacgttgcgctgctggtggaccatattcataccctgcgggtgcgcggcgcgccgctgattggcctgtccgccagcctgctgctggccctgctggcccagcgcggcctgaaccgggatgcactccagcaggcgctggagacgctgcgcgcggcgcggccgacggcggtcaacctgatgaataatctggatcgcatgaagcaggcgctggcccgggaggattacccgcaggcgctggaagcggaagccttgcgtctggtcgaagaagataaacagctgtgcgaccgcatcgctgaggcgggcagtgcgctggtgaagcccggcagtcgactgctgacccactgcaacaccggtggcctggcgaccgccggggtagggaccgccctcggcgttatcgcgctggcgcaccggcagggaaaagtgaccaacgtatgggttgatgaaacccggccgctgctgcagggcggtcgtttaaccgcctgggagctgggcgagctgggcgtgccctatcagctgatcgccgattcaatggccgccagcctgatggcgcaggggcaggtggatgcggtgtgggtcggcgccgaccgtatcgccgccaacggcgacgtggcgaataaaatcggcacctattctctggcggttttggcccattatcaccagatcccgttttacgtcgctgccccgcagaccaccctcgaccgccattgcccgaacggggcggcgatccccattgagcagcgcgcggcggcggaagtgaccggagtggcgggcagcttcggcgcggtacagtgggcgccgacgggggccgccgtttacaatccggcgttcgacgtcacgcctgctgggctgataagcggctgggtgctggacagcggggtggtcaccccggcgcaggtcgccgccggggcgtttgcgccggacaacggataa

SEQ ID NO: 238949 - DNA, 1269 bp, Klebsiella pneumoniae
atgatgcctgcaagacatcaggggctgttacgcctgtttatcgcctgcgcgctgccgctgctggcgctgcaatctgccgccgccgcggactggcagctggagaaagtggtcgagctcagccgccacggtattcgtccgccgacggccggcaaccgggaagccatcgaggccgccaccggacgaccgtggaccgagtggaccacccatgacggggagctcaccggccatggctatgccgccgtggtcaacaaagggcgtgcggaaggccagcattaccgccagcttggcctgttgcaggccggatgcccgacggcggagtcgatatacgtgcgcgccagcccgctgcagcggacgcgagcgaccgcccaggcgctggtggatggcgccttccccggctgcggcgtcgctatccattatgtcagcggggatgccgatcccctgtttcagaccgacaagttcgccgccacgcaaaccgaccccgcccgccagctggcggcggtgaaagagaaggccggggatctggcgcagcgtcggcaggcgctggcgccgaccatccagctattgaaacaggcggtttgtcaggccgataagccctgcccgatcttcgataccccgtggcaggtcgagcagagcaaaagtgggaagaccaccattagcggactgagcgtgatggccaatatggtggagacgctgcgtctcggctggagtgaaaacctgcctctcagccagctggcgtggggcaagatcacccaggccaggcagatcaccgccctgctgccgctgttaacggaaaactacgatctgagtaacgatgtgttgtataccgcgcaaaaacgcgggtcggtgctgctcaacgctatgctcgacggcgtcaaaccggaggcgaatccgaacgtacgctggctgctgctggtggcccatgacaccaatatcgccatggtgcgcacgctgatgaactttagctggcagctgccgggctacagccggggaaatatcccgccgggcagtagcctggtgctggagcgctggcgcaacgcgaagagcggagaacgctatctgcgggtctatttccaggcccagggcctcgacgacctgcgtcgtctgcagacgccggacgcgcagcacccgatgctgcgtcaggagtggcgtcagccgggctgccgtcagaccgacgtcggtacgctgtgtcccttccaggcggctattaccgccctcggtcagcgtatcgaccgatcatccgccccggcggtagccatggtcctgccgtag

SEQ ID NO: 238950 - DNA, 1359 bp, Klebsiella pneumoniae
atgtctggaattatcgcttttttccgggcgtcgccgccgaaagcgggcgccgcgtttgatgaacaccgttttcgccgggtgcgctggcaaacctttatcgccatgaccctggcctacgtcaccttttacgtctgccggttatccttcaccgtcgccaaaagcgcgctggtggagctggggatcaccccgacggagctcggcatgatcggctctaccctgttcttcagctacgccatcggcaaactggtcaatggttttatcgccgatcacgccaacgtggtgcgctatatgagcctcggtttattgctcagcgccgggatgaacctgatgatggggatgaccaccaacgccctgctgctggccatcttctgggggatcaacggctgggcgcagtcgatgggcgtcggcccctgcgcggtctcgctggcgcgctggtacggcgttaaggagcgcggcaccttctatggcatctggtcgacggcgcataatatcggcgaggcggtgacctatatggtgatcgtcgcggtgatcgccgggtttggctggcagatgggctacctgtccaccgccgcgctcggcgccgccggcgtggtgctgctggtgctgttcatgcacgattcgccgcagagcagcggcttcccgtccatcaacgtcatccgcgatgaaccgcaggaggaggtcgaagcccgcggctcggtgtttaaaaaccagctgctggcgctgcgcaacccggcgctgtggaccctcgccctcgcctccgcctttatgtacatcgaccgctacgccgtcaactcatgggggatcttctttctggagcaggataaagcttattccacgctggaggcgtccgggattatcggcgtcaacgctatcgccggcatcgccgggaccatcatcgccggcatgctctccgaccgctttttcccgcgcaaccgcagcgtgatggccggattcatcagcctgctgaacaccgccggcttcgccctgatgctctggtcgccgcacaattactacactgatattctggcgatgattatcttcggggccaccattggcgctctgacctgcttccttggcgggctgatcgccgtcgatatctcttcgcgcaaggccgccggggccgcgctcggcaccatcggcatcgccagctacgccggcgccggcctgggcgagtttctcaccgggatcattattgataaaacggctatccttgagaacggcaaaacgctgtatgatttcagcacgttggcgctgttctgggtgggtaccggtctgggttccgcgctactctgttttaccactgccgccatcgtcgcccggcgccatgccgtcgaacggcagacctcgttctcctcataa

SEQ ID NO: 238951 - DNA, 810 bp, Klebsiella pneumoniae
atgcaatctcaggaatcagaagcgctacaggcccgctaccgtctggcctgcgagctggcgaaagcgggggctgagctggcgtttgaatactatcaacagcgcgaggcgctgaccgtcgaccataagggcgacgacctgcaggatgtggtcagcgtggccgataagcgggtggaggcctttgtcaaacagcgcattcagagcgcgtttccggaggatggttttctcggcgaagagagcggcgcccgcctgcccgacgcgcgagtgctgtgggtggtcgaccccatcgatggcaccagctgtttcctcaacggcctgcacacctggtgcctgtcgctggcgatcgtcgccgacggcgaaccggtcatcggcgtggtctacgaccccaaccatcgcgagctgtttcacgccctgcggggccatggcgcctggctcaacgacgctccgatccgtccgcaccccgcgacgacggtcaaagagggcgtgatgggcgtcggcacctcgcatcgcgtcaccccggcggactttctgccgtttctgcaggcgctgctcagcgacggcggcatgtttatccgcaacggctccggggcgttgatgagcgcctgggcggcggcgggccggttgattggctactacgagccgcacatgaacccgtgggacgccctgccggggctggtgctgatgcgcgaagcgggcggcgccagcaacgattttctggcgcaggaggggatccagcgcggcaatccgctgctgctggccagccagacgctctacccgcagctgaaaaagatgatcccacaaccattacattaa

SEQ ID NO: 238952 - DNA, 1041 bp, Klebsiella pneumoniae
gtgaccgacgcccgcccgggcgtcggcttcctggaaaacagacggcgcgaaacgacgatgagcgataaaaaatggattaaggccgaggacgtggccagactggccggggtctcgcgctcggcggtctcccgcaccttcacccccggcgcctcggtgtcggagaagacccggcagaaggtgctgagcgccgcggaagccctgggctatcaggtgaatatcatcgcccggacgatgatcaccggcagcagtaattttatcggcatcgtcaccgccggtttcgacaacccgtttcgcagcaaactgctggcgccgctggtccatcagctggcgctcaatggctttatgccgctgctgatgaacgctgacgatccgcagcagctcgccccctcgcttaaacaactgctgagctatcacgtcgccggggtgatcatcacctccggcgcgccgccgctgtcgctggcggaggagtatctggcgcgcaagatccccgtcaccctgatcaaccgccatgcggacctcgccggctgcgaccgggtgtgcagcgataacgcccagggggcgaagctggtggcggatctgttcagtcgtcgaggctggcggcaggttggctttattggcgaaaatcgcgagaacttcagcacccgccagcgctatgaggcttttatcgcccggacgtcggatatggcggtgagcagccgcttctgcgacggcggcggctatcaggccggctaccaggctgccagagaattggttgctgaaaaccccgggatgcaggcgctgttttgcgccaccgatatgctggcgctgggcgcccaggacggcctgcgggacgccgccgccccgctgccggccatcgtcggctttgacgatatcccgcaggcggactggcagccctatcagctcaccaccgttcagcagaataccgccctgctggcccaccacgcggtggatttgttaatgacgcggatcgcccgcttcagcctgccctcgcgccatcgcgaagtgccggtgaaactaatcattcgtcatagtgcgaaatga

SEQ ID NO: 238953 - DNA, 1239 bp, Klebsiella pneumoniae
atgaaaattattaacgctcgcctgcgccgccaggaggcgctgtttactcttgacctgcaggacgggatgattcaccgcatcaccgcccaggccgcgatgcagactgccgacgcaggggatatcgacgcccagggccggctggcgatcccgcccttcgtcgagccgcatatccatcttgacgccaccctcaccgcgggcgagccggagtggaaccgcagcggcaccctgtttgaaggcatcacccgctggagccagcgcaaagcgagcattaccccggaggacacccgccagcgggcgctgaaaaccatcggcatgctgcgcgacttcggcgtccagcacgtccgcacccatgtggatgtcaccgatccgtcgctgtcggccctgaaggcgctgctggcggtgaaacaagaggccgccgatctcatcgatctgcagattgtcgcctttccgcaggagggaatcgaatcgtatcccaacggccgggagctgatgacgcgcgccatcgagatgggcgccgacgtggtgggcggcattccgcactatgagaacacccgcgacaaaggggtcagctcagtgatgtttttgatggacctcgcccagcgttacggccgcctggtggatgtccactgcgatgaaatcgacgatccgcagtcgcgtttcctcgaagtgctggcggaagaggcgcgggtgcgcggcatgggggcccaggtcaccgccagccacacctgcgcgatgggctcttatgataacgcctactgctcaaagctgtttcgcctgctgaaagcctcaggcatcaacttcatctcctgcccgaccgaaagcattcatctgcagggccggtttgacagctggccgaaacggcgcggcgtcacccgggtggcggagctggatcgcgccggcatcaatgtctgctttgctcaggactcgattcaggatccgtggtatccgttgggaaacggcaatatcctgcgcattctggatgccggactgcacatctgccatatgctcggctatgacgatctgcagcgctgtctcgactttgtcaccgacaacagcgcccgggcgctgtgtctgggcgataactacggcctcgccgaaggccgcccggcgaacctgttgatcctcgatgcggaaaacgactacgaggccgtccgtcgtcaggcacgggtgctgacctccattcgccacggcaaggtgattttgcagcgtgaggtggagcacatccgctacccggcatag

SEQ ID NO: 238954 - DNA, 1236 bp, Klebsiella pneumoniae
atgagcctgacggtcagcgaactgctggcccttgagggactctccgccctgcgtctgcgggcgggaaagcaagggctgcagcgggccgtacgctggtactatgtggcggaaaatgaacatatcgccgagtggatcatgggcggcgagctggtgtttatcaccggcatcaaccatccccgggatgaagccaacctgatccagttgctgatggagggcaaacagcgcggcatcgccgggatggtgatcctcaccggcgaggcctatatccacgccattcccgccacgctgatcgcccttgccgacgagctgggcatgccgctgatcgagcagccctacctgctgaagatggtgattgtcaccgagcgcatcggcaccgcgctggtccgcagcgaaaacgtcctgcagtcgcagcgcgacattctgatgcagctggtcaccggcgactatccggacctgcagatgctccatcagcgcgccctgcaccagcagctcgattttacccgtccgctgcggctggcggcgctgcgtctggaggggttgtcccgcctgtttcgccagttcccgcccgagcaggccgaagcctggctgctgcaggcccaccgcagcgtgcgtcagcagctgcagcagcagctcaaccagcagggcaattcctttccgctgctggagcgcagcaacatgttccttttcctgctgccggatgaggagggggaaggctttcagcagaaaaaatggctacagcagtggctgcaggcgctggctgacggagaggagagtttgtcgctgctctgcggcctctccgcgccggtcaggcagctgcagggttacccgcgggcgctgtcgcaggcgcgccaggcgctggatctgtgcgataccctgcggccgacccagcgcatcagcgactatcagcagctggggtttatcaaactgctgtccgcggtcagcgacccggcgctgctcaacgattttatgcacgacaccctcggctgcctgatcgagccgggccgtaaagcgccgtggctgctgctggagaccctcgagacgctgctgcaggagaacggcaacgtggtgcgggccgccgaccggctgggtctccatcgcaacacgttgcatcagcgcatccagcgcattgaaaaactgaccggctacccggtcagccaccctcagtttcatctcaacgcctcggtcgcgctggtgatctggcgtttatcgcaaaaccatttacaggacccaccatga

SEQ ID NO: 238955 - DNA, 609 bp, Klebsiella pneumoniae
atgtggcaagaaagactcgcgcaactggtcaccacctgtcattggatcggcgcgaaaggctgggcgccggcgaccggcggcaatatgtcggtgcgtcaggatgatacctggtgctggctaagcgagtctggccgcgacaaaggcagcctgacaaccgaggattttctgcaggttgagatcgccaccaaccaggcgccttccggacggaagccgtcggccgagaccggtctgcacaccctggtgtatcgcctgttcccggaagccaacgtggtgctgcatgtgcataccgtcaacgccaccgtgctgtcgcgcatcgaaaaaagcgacacgctggcgctgcaggggtatgaaatgcagaaaacccttagcgggcagcatagccatctcgataccgttccgatcgccatcttcgataatgaccaggatattgacgccctggcggcgcggattgccgattatgcgcaaacccgcccgctgcgctacggctttctgctgcgcggccacggcctgacctgctgggggaaagatattcaggaggcccgccgtcaactggaggggctggagttcctgttcgagtgcgagctgatgcgccgccgctacgagccctga

SEQ ID NO: 238956 - DNA, 1497 bp, Klebsiella pneumoniae
atggatttttatcttggtatcgatattggcacctcgcgggtgaaagcggtgctgtttgatcagcatttcaccgcctgcgccagcgccgcggaaaatacctcaccccgcctgtcggccaatggctacgcggaacaggatatgacccagctgtggcattcggtgctggctattctgcgccagattgcccgccatccggcgctacaggcggggcggctgcgggctatcggcctcgccgggcaaggggagggggtctggctcagcgatgagcagggcgaaccggtgggcccggggatcctgtggagcgatacccgcagccacgagctaatgagcgacctgctgcgccgacccggcttcgaccgccgctatttcgccgataccggcacccacctgcagccctgcaataccagcctgcagctgtactggctgaaacagtatcagccggcgcggctggcggccgcgcgctatctgtttttcgccaaggactggatccgctttcgcctgaccggcgtggcggcgctggagctgacggacgccagcagctcgttactcaatcagcagaccggcagctggtcctcggtggtgatgaacgagatggggctgaacgaactgctgccgctgtttcccccgctgctggccccggatgccctggccggcacgctgagcgacgcggtggcggcgctgaccgggctgcccgccgcgacgccggtggccgccggggcgctggatgtctgtagcgccgcgctgggctgcggcgcggtcaacgaaggggatatctacacgatcctcggcaccacctgctgcaccgggatcgtctgccgcggcccgcagacggtgaacgaggcgacgcgctttgtcacccataccgaagccggacaggtgatctccctgtttccgatgcaggccggtacgccaaacattgactggctgcagcagcatatttcgctggacgccgatctggggcgcctggagcaggcgatcgcggcggtggagccaggcagcggcggcgtcttctggcagccgtacctcaatggcgaacgtgcgccgttttacagcccggacgcgcgggccggctttttcggcattagcccgcacaccacccgcgccgaactgcagcgcgcggtgtttgaaggcctggccttcgccattgtcgatgcgctgcagggttatccgcagggcggcgagctgtatctgaccggcggcggcgcagcctcggcgacctggctgcagattatcgccgactgtaccggacgcacggtggtctccagcgcctttaacgaactgagcgcgcgcggcgcggcgatcctggcggcccgtagcgtcgcggcgctggccgagacgcctccgctggcgcagacccgctatcagccgcgccctcaggcgcatgcccgctacgcggcgctgtatcccgtttaccgcctgctgcgcgagcagatgctgccggtatggcaggccagacaggccgcccttcaacctctttctcaggacctacaaccatga

SEQ ID NO: 238957 - DNA, 1029 bp, Klebsiella pneumoniae
atgaaaatcgtttttaccgccgagcatgctggcgaccttagcgccttccaccagctgggcgagctgctggtggaggggtgggcgctgggcaaaccgaaactcagcgccggtcagctgattgagctggcccacgacgccgaggtgctggtgaccagctatgatgaggtgacggacgcggtgatggccgcctgtccgcgcctgcaggtgatcgcctgcacccgcgcgaatccggtgaatattgatacccaggccgcccaggcgcgcggcatccgggtgctctacaccccggggcgcaatgccgatgccgccgcggagctgacgcttggcctgatgctcagcctggcgcgccatattccgcaatcccatgcggcgctgaagcggggggaattcacgcaggctgacaatgccgccgccgccactcagcagggtctgcggcgggatgtggtctgggacgtgagcccggaaagcccctatgaagtgtttaaaggcagtgaactgcgcaataaaacgctggggctggtggggtatggcaacattggccgccgggtggcgcgtatcgcccgggcgttcggcatggcggtgttggtggtggatccgttcgtcgccgcagaggatatcaatgagccagggttacagaaaacgaccctggaggcgctgttccgcgaggcggatatcgtcagcctgcacctgagcagcgggccgcacagcgacgggctggtgaatgccgcgctgttaaacagcatgaagcccggcgcgctgctgatcaatacctctcgcgcggcggtggtcgacgaggcagcgctgattgatgccctgcgccacggcccgctgggcggcgcggcgctggatgtctatcaccgcgaaccgctgtggcgcgatcatccttttgtcatcgagttcgataacgtgattatcacgccgcatatcgccggagccacccgggagagtatcgccaaacacacggcgatgattgccgccgatcttcagcgctatgtcgccggggagccgctgctgtaccagtggcgttaa

SEQ ID NO: 238958 - DNA, 942 bp, Klebsiella pneumoniae
atggcaacctttgacgccgtatttgtcggcctgactattctggatatcgccgggcgcccggtggtggcgatcccgccgcgcggcggcgtcgcctttattgagcaaattcgtctcaaccccgccggcaccgccgccggggctaatatcaacgccgcgaagctcgggatccgcaccgcagcggtggcctgcctgggcgaagatgaaaaggccgactttatcctcgccagctatgcccggctgggcatcgactgctcgcttatccagcgcaccgcgctgaaggagacctcggcgacgatcctgccgattcgccccaacggcgaacgtccggccctgcactgccggggcgcgtctgacgccctgtttgtcagtgaagcggaatttgacgccgtccttgactgtcgtttcctgcatcacggcgggaccgggctgctggcggcaatggaccagggacagagcgcgcggctgttgcaggcggccaaagcgcgcggagtcaccaccagctttgaccttatcgccccgaatgaagagaccctcgaactactgcggcccctgttgccgtcggtggattatttcatgccttcgctggaggaagccgcctttctctccggagagacgcagccggaggccatcggccacttcttcctggcgctcggcgtgggcacctgcattctgaaagacggcgagaacggctcctggcttatcggccgcgatggcgggccgcagcatattgcgccgtggccggtcgaggcggtggataccaccggctgcggcgacagctactgcggcgggtttattgccgcactggcgcgcggactcagcgtgaaagcagcgtgtgacgtcgcctcggcggtggccgcgctggtggcgaccgggatgggatcggatgccggggtagtggactgggaacagacccaggcttttatggcggcccatcgcccctga

SEQ ID NO: 238959 - DNA, 1005 bp, Klebsiella pneumoniae
atgagtcaaatcaccctgaaaacctctgcgtcggtggaacagacggccagcagcccgctggcctggctgtcgcgggccggatttggcgtcatcaccctgctggccatcgccctgtttggctgggcgaatccggtatttttaaccgtggataactgggccaacctgctgcagggcagcgcgatcctgctgattgtggcgatggcgatgaccctgatcgtcagcgccggggcgattgatctgtcggtgggcgtcgcgctcgatttcggcgccgccttcgccctcgtcgccctgaaaacctggcatctgccgtggcaggccgcggtgggctgcgccctgcttggcggcgtgctgattggcctgctcaatgcctttctgatcctcatctgccggatccgtcccttcctcgccacgctcggcacctggtttatcgccagcagcgccgagcgcatctataccgacggcggcggcgcgatagcctatcggcggatggctccggagtatcacgacctggcggtgggcaaccttggtgggatccccacgccggtagcgatcgtgctggcgctgtggctggcggcctggctggttaccgagcgcaccctgtggggcaaatatgtccgcgccatcggccagaacagcgaagcggcgcgtatcgccgggatccgcgatcgcctgaccatgctcggcgtgctggtgaccgcctcggcgctctgcgccgtcggcggggtgatcctctccgccaacctgcggcagtttaccccgctggccgggcagtcttacctgatggacgccattgcggcagtatttatcggcactgcctttacccgtctgggccgggtcagcatcctcggcaccctcggcggcgtgctgttccttgccattattgataacggcctgaacctgatggggctcaattatctggtgaaggacgcgctggtcggcgtgattctggtggtggccctcgccctatccttctggcaggcgcgcctgcgccaaacgcatcgctaa

SEQ ID NO: 238960 - DNA, 990 bp, Klebsiella pneumoniae
atgagtactgctatccagcgtcgcggccgtccgggcctggcgacgctgattgaaaaatttcccctgatcctgtttctggcgctgctggtatggctgagcgtacagtcgccctactttctcagctggcaaaatatcagcctgatgctggtccagagcgttccgctggcaatcctctgtttcggcctggtctgcgttatcgccgtgggcggagatgacgtggtctccggcggcatcgacctctccctgccggcgacggcggtgctcggcgtcgcgctgctcagcctcgggctggccgaatggcacacgccgtatctcctgctgctggcgctgctggcggcggtttgcctgctgtgcggggcgatcaacggcttgctggtgctggcggccggcctgccgccgctgctggccaccctctcgacctcggtggcgtttaccggcctgacagatctgttgaccggccagcggcgcatcgcggtcagcgatccgctgatggtcgcctttcgcgacaacagcgtgctgggcctgccctggccgctggtctacctgctgggggtgtttatcctgttccagttcctgctccaccactcccgcttcggccagcatgtgcaggcggtgggcggcaatcgcgatatggcgcagatgagcggcctgaacgtgcgccgcttgaccctgctggtctggctgttagcgggcattgccgccgggctggctattctgccgctgctcagccagggctccggcagctccagcgggacggccacgccgctgctgctggagaccgtgctggcgacctttatcggcgccgccttctcgcgccgtcgggtggtcaccatctggggggcgctgctgggggcaatcctggtcaacgccctctctaacgggctcggcctgctgggggtcaatatcttctggatgggcgccattaaaggcggcctgatcctggtggtgctggcggcctcggcggtcagacacaaaggaggcgaggcatga

SEQ ID NO: 238961 - DNA, 1551 bp, Klebsiella pneumoniae
gtgattaatcaacatcctggcggggaacgccccgccgctggtctggtcatggagcagatcggtaaacgttttgccagcgtcaccgcgcttaatgcggttaccctgcgcctcaatccgggggagattcatggcctgattggcgagaacggcgccggtaaatcgacgctgatcaagatcctcgccggtgtctatcaggccgacagcggcagcgccaccctcgacggtcacccgctgcccctcggcaatccggcagccatcgaagccgccggcatccgcgttatccaccaggagttgaacctgatcccgcactttaccgtcgcggaatcggtgtttctgggccaggagtatcgcacccgctggggggcgctggatcgccgacggatgaaggccgccacggcgcaatttttccagcaaaactggcagctggcgatcgaccccgaacggctggtgcgcgacctgagcctggccgagcgcaagctggtgcagattgcccgcgcgctgatcgacggcgcagcgcggctggtggtgttcgacgaacccaccgcccccctggaggcgcaggaggccagtctggtctcctccgctatcctgcgcctgcgcgaccagggcattgccattctgtatatttcccactacctcaatgagatagccaccctctgcgaccgcggcaccgtgctgcgcaacggggaagtggtcggctacccggaccgcgacctgctgcagaataccgaagcgctgatcgccatgatggtcggccgggaaatcgaccagctgtatactccgcgccagcgcccggcggcagacaatggggcaaccccgctgctctcggtgcgccagctgagcgacgggcggcagctgcaggatctttcttttgatattcagccgggcgaaatcgtcggcgtcgccggcctgctgggcgccggacgcgatgtgctggtcgacttactctacggcttacgcccggcggaacgcggcaccatccacctcgagggccggccgcggcgcattcgtacgccaaagcaggcgatccgcgccggcatggcgctggtgccgcgcgaccgccgccatcaggggctgatcctgcccttcaccaccgccgacaatattaatctcgcctcgctgccggaaaccgccacctttggctgggagcggcggggtatcgccgagcagaaagcgcgcgactggatagaacagctggcgatccgcccgggacgaccggggctgccggtacgctacatgagcggcggcaaccagcaaaaagcgatcctcgcccgctggctggggaccgatgcccggctgtttattctcgatgaacccacccttggggtcgatatcggcgcccgtcgcgatatttatcaacggacgcgccagctggccgatcaaggacgggcggtgctggtctcctccagcgatgcccccgaactgctcggactatgcgaccggatcctagtcctctggcgcggcgcgctggcggccaatctgcccacccgcgggctaacgctggacgccctgctggtggcgatcaacggcggacaggagccttcaccatga

SEQ ID NO: 238962 - DNA, 981 bp, Klebsiella pneumoniae
atgtcgcagaaaagaaaattattgcctgccgcgctgggactgctttcccttgcctcgctgagcgtcgctgccgcagacgccctctccttacagggaaaaaccattggcgttgccgtggtcggcactcagcatttctgggatcgcgaggcctttaaaggcgcgacagaggaggtggagaagctggggggcaaagtcattggcgtcgatggcggccgcgataatcaggtgcatgccaataaccacgatattttactgtcacgcaaggtggacgcggtaattagtattctcggcgatagcgccgtcgaaccaaaatttaaagcattgcgtgatgccggtatcccggtatttaccgtggatcatgtttctcaatattctgtcaacaataccacctccgataactacaccttaggctcaaccatcggccgctacatggcggatgaattaggcggcaaaggcaacgtcgccgtatttaacgccttctccagcgcgctgcgtatttgcggaattcgctacgatcagtggaaatatgtccttaaggattatccggatattcatattatccagcccgagctcgcggaacagttcgccaactcgccggaagacgcgcgcaagaaaaccctcgaattactcagccagtatccgaaaggcaaactggacgccatccatgtcgcctgctgggatcaaccggccatcggcatcgtccaggcgctggaagagaccggtcgcgataaagacgtgaaagtgacggccatcgacgccggtccggagaccctggagatcatggcggagcccggcagcccgttcgtggctaacgtcgcgcagcagccgcatctgatcggccagacctcggctgacaacgtggcccgctactttgccggccagaaactaccggtgcaaacctttattccggtggttccggtgaaaggtccgcaggaagcgaaagcggtgtataaacagttgggatacggcgagctgcagtga

SEQ ID NO: 238963 - DNA, 2310 bp, Klebsiella pneumoniae
atgaagaaacagcataattatacggtgatgcactggggaacctggcaggtggagagccgtgagggcgagatcgtggcggttaagccggtgccctgggataaaaatccctcacgcatcggccagtcgcttcccgacgcggtgaccagccaaacgcgcattcgccgtccggcggtgcgcgccggctatctccagcacgggccggcgtcacgagaagggcgaggtaaagagccctttgtcgaagtcagctgggaggtggccctggacctgctggcgcgcgagctgcgctcggtcaaggcgcgctgcggcaatgaggcgatctacggcggctcctacggctgggccagcgctggacgctttcaccatgcgcagagccagctgcaccgctttctcaagggctttggcgggtacaccgccagcaccaatacctatagcagcgccgcgggcgagcgtattctgccgcatattctcgggccgctgagcccgctgcaccggcagcatacccatttttccgagctggcccgggagtgtcagctgtttgtcgccatcggcggactgccgctgcgcaatgcccaggtcaacggcggtggcgccaatgaccatatgctccagtactggctggataagatgcaggccaacggcacccggtttatcaatatcagtccggtgcgcaatgacctcagcgcggtgcccgacgccgagtggctggccattcggccgggcaccgataccgcactgctgctggccctgagctatgtgctgatcgctgagtctctctacgaccaggcgtttgttgccagccataccgtcgggtttgccccctatcgcgcttatctgttgggcgagcacgatggcgtggcgaaaaccccggcgtgggcggcggcgattaccggcctggacgcccagcgcatcgccgacctggcgcgggagatggcccgccaccggacgatggtgaatatctcatggtctatccagcgcgcccgtcaaggggagcaggcctactgggcgacggtggccctgactgcgctgctgggacagatcggcacgccgggcggcggtctcgggtttggctacgcctgcactaacctggcgggcgcggtacgaaaagcgttttccggcccgcgcttacccgccggagagaatgcggtggacagcgttatcccggtggcgcggctgtccgatatgctgctgcacccgggagaaacctatgagttcgacggtcagcagcggcgctatcccgatatccgtttagtctactgggcgggaggcaatgtgtttcgtcatcatcaggacatcaaccgactgtgcgaggcctggcgccgcccggagacggtggtggtgcatgagcagtactggaccgcgcaggccaaattctccgatatagttctgccggccaccacctcgctggagcgagaggatatcggcagcggcggtcacgacgggtttatgatcgccatgagcgcgcagatcccgccggtgggcgaagcgcgtgacgattacgccattttctgcgatctcgccgatcggctgggattcggagaagcgttcagcgaagggcgtgacgccgggcagtggctacgtcatctctatgaggagtcaagaccgcgggcgcaggaggagggtattgcgctgccctcgttcgatgacttctggcagcaaggggtgctggaatacagcgcgccggagcggccgcaaatttttctcgccgattttcgcgccgatccgcagcgctatccgctctccaccccctccggcaaaattgaactcttttccgccaccgtcgccgggtttggctatcgcgaatgccctggccatccgtggtgggatgaacaggaggccgcccggcagcgacaggaggcggcgcggtggccgcttcatctgctctccagccagccgcgcgcccgcctgcacagtcagtacgaccacggcagcgtcagccgggcgacgaaagttcagggacgcgagccgctgtggatgcatccgagcgatgcgcaggcaagggatatccgcgaaggcagcgtggtgaaagtctataacgaccgcggggcgattctggcgggggtgcacctgagcgagcagattttgcccggcgtggtacagatgtccaccggcgcctggtatgacccgctggatccgaaggaagaacggtcgctcgataagcacggtaatcccaacgtgttaaccgaggatcgcggcagttcgcgcctggggcaaggctgtagcgcccagagctgttgggtggagatcgccccgtggcgtgaggaactgccgccgatcaccgcctttgatccgccgaggtttattgaggtttag

SEQ ID NO: 238964 - DNA, 543 bp, Klebsiella pneumoniae
atgagcgcattaactcttttttccgtgaccgatccgcaaacgccggtctggcacagcaccgacgccaaagcgattcaggatcaacttaacgccaaaggcgtccgcttcgagcgctggcaggccgaccgcgacctcggcgcaaatcccagcccggaaacggtgattgccgcctatcagcatgcgattgataaactggtcgccgaaaagggctaccagagctgggacgtcatcagcctgcgcgccgataacccgcaaaaagaggagctgcgggaaaagttcctgaacgagcacacccatggcgaagacgaggtgcggttttttgtcgagggcgctggcctgttttgcctgcacattggcgacgaggtgttccaggtgctgtgcgaaaagaacgatctgatttcggttcccgcccacactccgcactggtttgatatgggatcagaaccgaacttcaccgccattcgcatttttgataacccggaaggctggatcgctcagtttaccggcgacgatatcgccagcgcctacccgcggctggcgtaa

SEQ ID NO: 238965 - DNA, 690 bp, Klebsiella pneumoniae
atgatccgcgccatcgtgaccgacatagaaggcaccaccagcgatatccgcttcgtgcataacgtgctgttcccctacgcccgcgaacgactggccggctttgtgaccgctcagcagcacgctgaaccggtcaaaaccattctcgacaacctgcgccgcgaaacagacgcccccgccgccagcaccgccgaccttatcactaccctcttcgcctttatggatgaagaccgtaaatccacggcgctgaaggcgctgcaggggatcatctggcgtgacggctatctcaacggcgactttaccggccatctctacccggacgtactgccggcgctggagaaatggaaagcgcagggtattgatctgtatgtatattcctcaggttccgtggctgcgcagaaattgttatttggctacagcgatgaaggtgatattactcatctgttcacgggctatttcgataccctggtaggcgccaaacgtgaggtgcagtcctaccgtaacattgctgaatacctgggccatgcccctggcaccatcctgttcctgtcggatatccatcaggagctcgacgccgccgaggccgcgggtttgcgcactgtgcagctggttcgcggcgaccgcgacccggcaagccatcaccctcaggttcagcgttttgacgacattcatccggagcagatcccagcatga

SEQ ID NO: 238966 - DNA, 1161 bp, Klebsiella pneumoniae
atgaacaataaccccttgattccagagagtaaacttcctgcgctcggcaccacgatttttacccagatgagcgccctggcccagcagcatcaggccataaacctgtcccagggctttcccgattttgacggcccgcgctatcttcaggagcgtctggcgtaccacgtggcgcagggggcgaatcagtacgccccgatgaccggcgtgccggcgctgcgcgaggcgatcgccgggaagacggcggagctgtatggttaccagcccgacgttaacagcgagatcacggtcaccgccggcgcgacggaggccctgtatgcggcgatcaccgccctggtgcgccgcggcgacgaggtgatctgtttcgatcccagctatgacagctacgcccccgcggtggcgctggccggcggcgagttacgtcgtattgcgctgcagccgccgcattttcgcgtcgactggcggcaatttgccgccgccctgagcgagaaaacccggctggtgatcctcaacaccccgcacaacccttcggccaccgtctggcagcgcgaggattttgccgccctgtggcaggcgatcgccgaacgcgagatctatgtcctgagcgatgaagtctatgagcatatctgctttgctgagggcggccacgccagcgtgctggcgcatccccagcttcgcgagcgggcggtggcggtctcctcgtttggcaaaacctttcatatgaccggctggaaggtcggctactgcgtggccccggcggccatcagcgccgaactgcgcaaggtgcaccagtatctgaccttctcggtgaataccccggcgcagctggcgatcgccgacatgctgcgcgaagcgccggagcattatcgtgagctgccggcgttttatcgggaacgtcgcgatctgtttattgaagcgctgcgcccaagccggctggaaatcctgccctgtgaagggacctatttcctgctggcggactacagcgccatctccgatcttgacgatgtcagcttctgccgctggttgaccactgagatcggcgtggcggcgatcccgctctccgtcttctgcgccgatccgttcccgcacaagctgatccgcttgtgcttcgccaaacagccggcgactctgctggccgcggcggcgcgtttgtgccagctgtag

SEQ ID NO: 238967 - DNA, 627 bp, Klebsiella pneumoniae; identical to SEQ ID NO: 211309

SEQ ID NO: 238968 - DNA, 1224 bp, Klebsiella pneumoniae
atgtcgtttattaaatatcccttaccggaatcggtgctgcaggcaactgagcagcggatccagtgggtcatggataatttttcgcgcatctgtgtctctttttccgggggaaaagattccaccgttatgctgcatttaaccgcccaggcggcgcggttacaggggaaaaaaatctgcgtgttgtttattgactgggaagcgcagttctcctgcaccatcgcccactgtgaaaaactgcgtgcgctgtatgcggatgtcatcgaaaccttttactgggtcgccctgccgctcaccacccaaaatgccctgacgcagtataagccgcaatggcaatgctgggagcccggaaccgagtgggtacgccagccgccgccctgggccattacccacccgggctatttttcattttatcaacccggaatgagctttgaagccttcgtcagccacttcgccgagtggttttcgcagcgtcgtcccgccgccgtgctggtgggcattcgcgccgacgaatcgctaaatcgctttatgacgatttcttcacagcgtaaacagcgcttcgccgacgataaaccatggaccacttcagcgccgggcggccacgcctggtacatctacccgctctatgactggaaaaccgccgatatctggacctggtttgccaaaagcggcgagccctataacccgttgtacgatctgatgtatcaggccggggtgccgctgcgctatatgcgcatttgcgaaccgtttggtcccgagcagcgccaggggctgtggctgtatcacgtgctggaacctgagcgctgggccgcgatgtgccagcgagtgagcggcgcgcacagcggcggggtctatgccgggcatgataatcagttctacggtcatcggaaaatcgacaagcccgaccacctgacgtggaaaagctacgccctgttcctgctcgacagcatgccggaaaccaccgccgagcactaccgcaataaaatcgccgtctacctgcgctggtaccagaaaaaaggtatggaggatattccggatacccaacctgcggacattggcaccaaagatatcccatcctggcggcgagtctgcaaagtactgctcaataacgattactggtgccgtcagctttcgtttagcccaaccaaaagcagccactatcagcgctaccgtaaacgcatggaaaaacatcgccaacaatgggggattttatgcaacaacaactga

SEQ ID NO: 238969 - DNA, 933 bp, Klebsiella pneumoniae
atggcaaatctttacgatctgaaaaagttcgatttgaatttattggttattttcgaatgtatctatcaacatttgagcatcagcaaagcggcggcgatgttatttatcaccccctcagcggtgagtcagtcgttgcagcgtctgcgccagcagttaaacgatccgctatttgttcgtgttggcaaaggaatgacgcccaccaccgcctgcgtcaatcttcattatcatctacagcaaaatctggagcagctggaaaaaaccatcaatctaaataatcgctcagaactgcgtaaacgtattgtgatatatggccccccgctgttctgttcagtcaatagccacgttatgattaaccagctctgtcatcaggcgaacttgcaaattgagcaccataacctgaccaccaccgaatcggctgaggagctgctggcgtatcgccaggcggacctggtgttcacccgcatgcccattaccaaccgcgccacgatctgtcagccctatcagacggtgcagacgctggcggtttgccgggcgggccatccgcgacgcgaaacgattacctcggtagagtcactggcgcaggagtttttcactcactatattaccaacgatcccgttattcagcgcgtgcagcaaagcagcatcgcctggctgaatccgcgcaatattgcctttcgcagcgactcttttatgaccattcttaacatgattaataaaaccgacttaattggctttttgccttcctatttatatgattttatctcacccactatgcagcttcacgccatcaacatagataatctttttccggatatcacgatctacattaattaccaccatgcatcttcgcaaaatcattttttaactgaattaatcaccatattaatgaatgatcgagaggcatcacggccccaatttaatcacagcgaataa

SEQ ID NO: 238970 - DNA, 750 bp, Klebsiella pneumoniae
atgttaaagcgtctgctgttactcagccttttgccgttatgcagccatgcggaggaactccccgctccggtaaaagcgattgaaaaacagggcattaccattataaaaccctttgaggcgccggggggaatgaaaggctggctgggcaaataccaggacatgggggtcgccatctacctaacgccggatggtaaacacgcgatctccggctatatgtatgatgagaacggcagcaacctcagcgagcagctgtttcagaaagaactctataccccggcgggacaagagatgtggaagaagatggccagcgcccactggctgcaggatggtcgcaaggacgcccctatcgtgctgtatgtctttgccgatcccttctgtccctactgcaagcagttctggcagcaatcccgcccctgggtagaggccggtaaagtgcagatccgcactctgctggtgggggtgatcaagccggagagcccggccaccgccgcggcgattctcgccagcaacgatccggcgaaaacctggcatgattacgagcaatcgaatgggaaaatggctctgacgatcccgaaagcaattccgccggagaaaatgaaaatgctcaacgtcaaccagcagctgatggacgatctgggagccaacgtgacgccggcgatttattatatgaataaagataatatgctgcagcaggtggtcggcctaccggataaagagaaactgcatattatgatgggtgaaaaagagtaa

SEQ ID NO: 238971 - DNA, 564 bp, Klebsiella pneumoniae; identical to SEQ ID NO: 137844

SEQ ID NO: 238972 - DNA, 1566 bp, Klebsiella pneumoniae
atgctcgacaccaacatgaaaacccagctcaaggcctaccttgagaagctgaccaagcctgttgagctgattgccacgctggatgacagcgctaaatcggcagaaatcaaggaactgttggctgaaatcgctgaactgtcagacaaagtcacctttaaagaagacaacacgctcgcggtacgtaagccctcgttcctgattactaacccaggttccgaccaggggccgcgttttgcgggctcgccgctgggccacgagtttacctcgctggtgctggcgctgctgtggaccggcggtcatccgtcgaaagaggcccagtcgctgctggagcagatccgcgatcttgatggcgatttcgaattcgaaacctactattcgctctcctgtcataactgcccggacgtggtccaggccctgaacctgatggcggtgctcaacccgcgcatcaaacacacggcgattgacggcgggaccttccagaatgagatcaccgagcgtaacgtcatgggcgtgccagcggtgttcatgaacggtcaggagtttggtcagggacggatgacgctgactgaaatcgtcgccaaagtggatactggtgcggaaaaacgcgcagcggaagagctgaatcagcgtgacgcttacgatgtactgatcgttggctccggcccgtccggcgcggcggcggcggtctactctgcacgtaaagggattcgtaccggcctgatgggcgaacgcttcggcggccaggtgctggataccgtggatatcgaaaactatatttcggtgccgaaaactgaaggccagaagctggcaggcgcgctgaaagcgcacgtcaatgactataacgtcgacgtgatcgactcccagagtgcgaccaaactgacgccggcggcgacagagggcggcctgcatcagatcgaaaccgcctccggcgcggtgctcaaggcgcgtagcgtcatcatcgccaccggggcgaaatggcgcaatatgaacgtgccgggcgaagaacagtatcgcaccaagggcgtgacctactgccctcactgcgatggtccgctgtttaagggcaaacgcgtagcggtaatcggcggcgggaactccggcgtggaagccgccattgacctggcgggcgtcgtagagcatgtgaccctgctggagtttgccccagagatgaaagccgaccaggtgttgcaggataaagtccgcagcctgaagaatgtcgacatcattcttaatgcgcagaccacggaagtgaaaggcgatggcagcaaagtcaccggcctgcagtatcgtgaccgggtgagcggcgatgagcatcatatcgcgctggcggggatcttcgtccagattggcctgctgcctaacaccacctggctggaaggcgccgttgagcgcaaccgcatgggtgagatcatcatcgatgcgaagtgcgaaaccaacgtcaaaggcgtgttcgccgcgggcgattgcaccaccgtgccgtacaaacagattattatcgcggcaggggaaggggcaaaagcgtcgctgagcgctttcgactacctgatccgcacgaaaaccgcataa

SEQ ID NO: 238973 - DNA, 429 bp, Klebsiella pneumoniae
atgtataagactatcattatgccggttgatgtctttgagatggcgctgagcgataaagccgtccggcacgcggagtttctggcccagcaggacggggtgatccatctgctccacgtcttaccgggttccgcgagctttaccatgagccgttttaccgccgacctgcggcggtttgaggaacatctgcagcatgaggcggagactcgcctgcagacgatggtcagccacttcagcattgacccgtctcgtatcaagctacatgtccgttttggcagcgtgcgcgatatggtcaacgagctggccagcgaaattaacgccgacgtggtagttattggctcacgcaatccctccatcagtacccacctgctcggctccaatgcctcaagcgtgatccgccatgcccatatcccggtaatggtcgtcaggtaa

SEQ ID NO: 238974 - DNA, 411 bp, Klebsiella pneumoniae; identical to SEQ ID NO: 137847

SEQ ID NO: 238975 - DNA, 798 bp, Klebsiella pneumoniae; identical to SEQ ID NO: 137848

SEQ ID NO: 238976 - DNA, 1374 bp, Klebsiella pneumoniae
atgctgacgtttattgagatcctgatagggatcgtggtcattgtgggcgtagcccgctatatcattaaaggctactcggccaccggggtcctgttcgtcggaggcttaatcttactgatcgtcagcgccctgctgggacataaagtgttaccgggtaataccgcgagcaccggctattccgctaccgatattattgaatacattaagattctactcatgagccgcggcggcgatttgggtatgatgatcatgatgctatgcggcttcgccacctatatgacccatattggcgctaatgatatggtggtcaaattagcgtcgaagccgttgcgctatattaattcgccctatctgctgatgattgccgcctattttgtcgcctgcctgatgtcgctggccgtctcctccgcgaccggccttggcgtactgctgatggcgacgctgttcccggtaatggtgaatgtcggtatcagccgcggggccgccgccgccatctgcgcctcaccggcggcgattatcctctcgccaacctcgggtgacgtcgtcctggctgccaaagccgctgaaatgccgctgatcgactttgcttttaaaaccacgctgccgatctccatcgcggctattatctgcatggcaatcgcccactttttctggcagcgctatctggataaaaaagagcacatttctcacgagatgctcgatgtcaacgacatcaccaccaccgccccggcgctgtatgccattctgccgtttaccccgatcatcggcgtgctgatctttgacggtaaatgggggccggagcttcacattatcaccatcctcgttggctgcatgctgctggcggcgatcctcgagttcctgcgcggtttcaacaccaaaaacgtctttagcgggctggaagtcgcctaccgtggaatggccgacgccttcgccggcgtagtgatgctgttggttgccgccggcgtctttgcccaggggttaagcactatcggctttatcaacggtctgatctcaatcgccacctccttcggctcggccagcattattctgatgctggtgctggtgatcctgaccatgctggcggcgatgaccaccggttccggtaatgccccgttctacgccttcgttgagatgatccccaagctggcgcactcctccggcatcaatccggcctacctgtcgattccgatgctgcaggcttctaacctcggccgcacgatatcgcccgtctccggggtggtggtcgccgttgccgggatggcgaagatttccccattcgaagtggtcaagcgcacctcagtgccggtgctcgttggcctgctggtggtgatcgttgctactgaaatcctggtgcccggcagcgcgctccactaa

SEQ ID NO: 238977 - DNA, 519 bp, Klebsiella pneumoniae
gtgtccggaaacgccagcgcgtcgttttcatcgacccttagcgaaggttaccataccttaagtaataacgtagcgcagacctggaatgagccggagcactatgatttgtacgttccagccatcacctggcatgcgcgctttgcctatgacaaggaaaaaaccgataagtataacgaacgtccgtggggggcaggtttcggcgtctcgcgcagggatgagaaagggaactggcatggcctgtacctgatggcgtttaaagactcttttaataagtgggagcccatcggcggctacggctgggagaaaacctggcgcccgctgacggaccagaatttccacctcggccttggctataccctcggcgtcacggcgcgcgataactggaactacatcccgatcccggtgatcttgccattggcgtcaataggttacggtccggcaactttccagatgacctatattcccggcacctacaataacggtaacgtttacttcgcctgggcgcgcattcagttttaa

SEQ ID NO: 238978 - DNA, 210 bp, Klebsiella pneumoniae; identical to SEQ ID NO: 137117

SEQ ID NO: 238979 - DNA, 384 bp, Klebsiella pneumoniae
gtgtttcaacttctttgcgccgtttttattggcggcggcaccggcagcgtattgcgctggtggctcggcatgaagctcaatcctgtgcaccatgctatcccgattgggactctaacggccaacctgttaggcgcctttgtgattggcgccgggctggcgtggtttaatcgtctgaccggtattgacccgatgtggaaactgctgattaccaccggtttctgcggcggcctgaccacgttctccaccttttctgcggaagtggtgtttctcctgcagcagggccgggtaagctgggcactgctcaacgtcgcggtgaatttgctgggttcgtttgcgatgacggcggtcgccttctggcttttctcgcaggcggccagccgctaa

SEQ ID NO: 238980 - DNA, 207 bp, Klebsiella pneumoniae; identical to SEQ ID NO: 137114

SEQ ID NO: 238981 - DNA, 966 bp, Klebsiella pneumoniae
atgagtaaacccattgtgatggaacgcggtgttaagtaccgcgacgccgataaaatggcccttatcccggtgaaaaacgtggcaactgagcgtgaagctctgctcagaaaaccggaatggatgaaaatcaaacttccggcagactcgtcccgtatccagggaatcaaagcagcgatgcgtaagaacggcctgcactctgtgtgcgaagaggcctcctgcccgaaccttgcagaatgcttcaaccacggtaccgcgacctttatgatcctcggcgcgatctgtacccgccgttgcccgttctgtgacgtcgcgcatggacgcccggtcgcgccagatgcaaacgagccacaaaagctggcgcaaactatcgccgatatgggtctgcgctatgtcgtagtcacctcggtagaccgtgacgacctgcgtgatggcggcgcacagcattttgccgactgcatcagcgccattcgcgagaaaaacccgtcgattaagatcgaaacgctggttccggatttccgcggccgcatggatcgcgcacttgatattctgacggtgaccccgccggatgtcttcaaccataacctcgaaaacgtgccccgtctttatcgtcaggtacgtccgggcgcggattacaactggtcgctgaagctgctggagcgttttaaagaagcgcacccggagatcccgacgaaatccggcctgatggtaggtctgggcgaaaccaacgacgagatcatcgaagtgatgcgcgacctgcgtcgccatggcgtcaccatgctgacgttaggccagtatctgcagccgagccgtcaccacctgccggtgcagcgctacgtcagcccggaggagtttgaagagatgaaagcggaagcgatggcgatgggcttcacccacgccgcctgcggtcccttcgtccgctcttcctatcatgccgacctgcaggctaaagggatggaagttaaataa

SEQ ID NO: 238982 - DNA, 897 bp, Klebsiella pneumoniae
atgtttcgcatcctgcgtaatattgacctcaatctgttgacgatctttgaagcggtatacgtacataaaggtatcgtcaacgccgcgaagatactcaatatcacaccctcggcgattagccagtcaattaacaaactgcgggcgctgttccccgatccgctatttatccgcaaaggacagggcgtcacccccaccgcctatgccacccatcttcatcaatacatcagccgcggcatggaagctttcctcagcgcgctggatatcaccggtagcccgcaccagcagcgggtgatcactatcgccactacgccagcgatgggagcgctgctgatgcctggcctggccagcgcgctgaagccgacctttccgcagatcctgttgcacaatatcgccatcgtcgacgccgcgcggcagcttgaccagcgccaggtggatctgctcattgatacccacctgcacagcggccaggcgataagccatcatgtgctgtatcaggatcgggtacagatgtactgccgcgcagggcatcccgcgctggacggtccgcaggatgaaacgaccctcgcggagtacgaatttgcgctgctgctgccggaaggccagcgctaccccaccctccatcgccgactacaggaagagatgggcgagcgccgctgcggctttagcacctttaacctgatgacccaggcggcgatgatcgccgggagcgatatgctgggtctgaccaccgaacgcctgttcgccatggtgtcccgtctctggccgctgcagaccctggatctcccttccctcggtgaagagcagattgacgttgcgctgcactttaataagctgagcgggaaagagccattgctgaaagagatcatcgagacggtgatccgctcgtttaaggcgtag

SEQ ID NO: 238983 - DNA, 645 bp, Klebsiella pneumoniae
ttgcagcacaataaaattcttatccggcagcttggcctgcaaccttacgaacccgtctcgcaggcgatgcatgaatttaccgacgcccgtgatgaagataccctcgacgagatctggctggtggaacatcaccccgtattcacccagggtcaggccggcaaagcggaacacgtgctggtgcccggcgatattccggtgatccagagcgatcgcggcggccaggtcacctatcacggtccgggacagcaggtgatgtacgtcctgttggacctcaagcgccgtaagctgggcgtgcgggagctggtgacgctactggagcaaacggtcgtcaataccctggctgaatatagtatcgagtcgcacccccgcgccgacgcccctggcgtctatgtcggcgaacgcaaaatctgctctctgggattgcggatccgtaaaggttgttctttccacggtctggcgcttaatatcgccatggatctcacaccgtttctgcgtatcaacccctgcggctatgccggtatggagatgacgcaaatgcgccagtggcagccggcagcctccccggagacggtcgctccgcggctggtcgccaatctgctggcgctgctaaatcatccaccgcacgaatatcttccccgggattaa

SEQ ID NO: 238984 - DNA, 264 bp, Klebsiella pneumoniae; identical to SEQ ID NO: 137110

SEQ ID NO: 238985 - DNA, 1272 bp, Klebsiella pneumoniae
atgctggcccgcagagcatttgctatagtaaggcacttttttaactccatcacggatgccgttgttctgaccatgaagacctctttcaccgctcgtttactcattacggcgctctccgttgcagcgctctcctccgctgcccgcgccgatgacctgaatatcaaaacgatgatcccaggcgccccgcagattgacgccgaatcctggatccttatcgattacaactctggcaaggtactggctgaaaacaatgccgactcccgccgcgacccggccagtctgaccaaaatgatgaccagctatgttatcggtcaggcgatgaaagcgggcaaattcaaagagtccgatctggtcaccgtcggcaacgatgcctgggccaccggcaacccggttttcaaaggctcttctctgatgttcctcaagccgggcatgcaggtgccggtttctcagctgatccgtggtattaacctgcagtccggtaacgatgcctgcgtggcgatggccgactacgtcgccggcagccaggacgccttcgtcagcctgatgaacaactacgtcaacgctctgggcctgaaaaacacccatttccagaccgttcacggtcttgatgctgacggacagtacagctccgcgcgcgacatggcgctgattggccaggcgctgatccgcgacgtaccgaacgagtactccatctatcgtgagaaagagttcaccttcaacggcatccgccagctgaaccgtaacggcctgctgtgggataacagcctgaacgtcgacggcatcaaaaccggccataccgacaaagcgggttacaacctcgtcgcttccgccaccgaaggccagatgcgcctgatctccgcggtaatgggcggccggacgttcaaaggccgtgagtcagaaagcaaaaaactgcttacctggggcttccgcttcttcgaaaccgtcaacccgattaaagctggcaaagaatttgcctccgaaccggcctggttcggcgacagcgatcgcgcttcgctgggggtggataaagacgtctacctgaccattccgcgcggccgaatgaaagatctgaaagccagctacgtgctgaataacactgagctgcacgccccgctgcagaaaaaccaggttgtcggcaccattaacttccagttggatggtaaaaccatcgaccagcgtccgctggtggtcctgcaggaaattccggaaggtaatttcttcggcaaaattattgattacattaaattaatgttccaccactggtttggttaa

SEQ ID NO: 238986 - DNA, 1149 bp, Klebsiella pneumoniae
atgcgtaagcaatggctggggatctgcatagcagcggggctgctggcggcatgttcgagtgatgacgtgcaacaaaaaacggtcagtactccacagccggccgtctgtaatggcccgacggttgagatcagcggcgccgatccgcagtatgaaacgccgaacgccacggcgaatcaggattatgagcgcgacggtaaaagctacaaaatcgttcaggatccggccaactttactcaggccggtttcgcggcgatctatgacgcagaacccaacagcaacctgaccgccagcggcgaagccttcgatccgactcagttgaccgcagcgcacccgacgctgccgatcccgagctacgcgcggatcactaaccttgccaacggacggatgatcgtcgtgcggattaacgatcgcggtccctatggcaacgatcgggtcatctcgctttcccgcgcatccgctgaccgcctgaacacctccaacaacaccaaagtgcgcatcgaccccatcatcgtcgcgcctgacggttcgctttccggcccggggatggcctgtaccaccgtcgccaaacagacttacgccctgcccgcccgtccgaatctggacggtggggacgccgctggcatgagccaacccgcacccactgacgttcgcccgatcagcaacagcacgctgacgccggcagacagcgtgggcgcgccggtgaacagcggcggtttcctcggcgcgccgacgcccctgaacaacggcgtgctggagagtagcgaaccagcggcagccgccgcgacggctcctgccgccggcgccacgccaacagcgccagtgaccgcgcctggctccattcagggtaatgtggcgcccgctgcggccaccgccgcagccgctggcgccgtggcggcctcgtcctccgcgacctccagcgccagcggtaattttgttgtccaggtgggcgcagtaagcgaccagacgcgggcgcagcagtatcagcagcgcctgagccagcagttttctgtgccaggccgggtcatgcaaaacggcgcggtctggcgtattcagctgggtccctttgctgataaagcacaggccagcgccgtgcagcagcgcctgcaaagcgaagcgcagctgcagtcctttattactcgcgccaactaa

SEQ ID NO: 238987 - DNA, 1113 bp, Klebsiella pneumoniae
atgacggataatccgaacaaaaaatcgctatgggataaaatccatcttgaccccaccatgctgcttatcctgctggcgctgctgacctacagcgcgctggttatctggagcgccagcggtcaggatgtcggcatgatggagcgtaaaatcggccagatcgccatgggcgtggtgatcatgatcgtcatggcgcagatcccgccgcgggtctatgaaggctgggcgccctacctctatattttctgtatcatcctgctggtagccgttgacgccttcggcgccatctccaaaggggcgcagcgctggctggatctcggtattgtgcgctttcagccgtcggagatcgccaaaatagccgtgccgctgatggtggcgcggtttattaaccgcgatgtctgtccaccgtcgctgaagaacaccggcattgccctggtgctaatcttcctgccgacgctgctggtggcggcgcagcctgacctcgggacctcgatcctgatcgccctatccgggctgtttgtgctgttcctctccggcctcagctggcgcctgattggtatcgccgtggtgctggtcgccgcctttattccgatcctgtggttcttcctgatgcacgactatcagcgtcagcgcgtgatgatgctcctcgatccggaaaccgacccgctgggcgccggctatcacattattcagtctaaaattgccattggctccggcggtctgcgcggcaaaggctggctgcacggcacccagtcgcagctggagtttctgccggaacgccacaccgactttatcttcgccgtcctcgccgaagagctgggcctgattggcgtactgatcctgctagcgctttatattctgctgattatgcgcggactgtggatcgccgcccaggcgcaaaccacctttggccgggtcatggccggtggtttaatgttgattttattcgtttatgtcttcgtaaatattggtatggtgagtggtattttaccggtggtgggcgtaccgttgccgctggtgagctacgggggctccgccctgatcgtactgatggccgggtttggtatcgtaatgtcgatccatacccacagaaaaatgttgtcgaaaagcgtttaa

SEQ ID NO: 238988 - DNA, 1902 bp, Klebsiella pneumoniae
atgaaattacagaattctttccgcgactatacggctgaatcctcgctgttcgtgcgccgggcgctggtcgcttttttggggattttgctgcttaccggcgttctgatcgccaacctgtacaatgtgcaaatcgttcgcttcgacgactatcagacgcgctcgaacgaaaaccgcatcaagctggtgccgatcccgccgagccgcggcattatttacgatcgcaacggcaccccgctggcgcttaaccgcaccatttaccagctggagatgatgccggagaaagtcgataacgtacagcagacgctggatgcgctacgcgacgtcgtcgatttaaccgacgatgacatcgccggtttcaaaaaggagcgcgcccgctcccatcgttttacctcgattccggtaaaggtcaacctcagcgaagtgcaggtggcccgctttgccgtcaaccagtaccgctttcccggcgtggaagtcaaaggctacaagcgtcgttattacccctataattcggcgctgactcacgtcattggctatgtctcaaaaattaacgataaagacgtcgaccgcctggataaagagggcaagctggccaactacgcctcgacgcacgacattgggaagctgggtatagagcgttattacgaggacgttctgcacggtcagaccggctacgaagaggttgaagtgaacaaccgcggccgcgtcattcgtcagctgaaagaggtgcctccgcaggccggacgcgacatttacctcaccctcgacctcaagctgcagcagtatattgaaacgctgctggccggcagccgcgccgccgtggtggtgaccgacccgcgtaccggcgctattctggcgctggtttcaaccccgagctatgacccgaacctgttcgtcgacggcatctccagcaaagattactccgcgctgctcaacgacccgaacacaccgctggtcaaccgagcgacgcagggggtctatcccccggcgtcgacggtcaaaccgtacgtcgccgtctcggcgctgagcgccggggtgatcacccgcaacaccagcctcttcgaccccggctggtggcagttgcccggctcagagaaacgctatcgtgactggaaaaagtggggccacggccatctgaacgtcaccaaagcgctcgaggagtctgcagatacctatttctaccaggtcgcctatgacatgggcatcgaccgtctctcagagtggatgagcaagtttggctacggccactacaccggtatcgacctctccgaggagcgctctggcaacatgccgacccgcgaatggaagctcaagcgctttaagaaaccctggtaccagggggacaccattccggtgggcatcggccagggttactggaccgccacgccgatccagatgaacaaagcgctgatgatcctgattaacgacggcgtggtgaaggtgcctcatctgctgcagagcaccgtggaagacggcaagcccgtaccctgggtccagccccatgagccgccggtaggcgatatccattccggctattgggaaatcgccaaagacggcatgtacggcgtggccaaccgcggcaacggcaccgcgcacaaatacttcgccagcgcgccgtataaaattgcggccaagtcaggtaccgctcaggtgttcggcctgaaggccaacgaaacctataacgcgcaccggatctccgagcgcttgcgcgaccataaactgatgacggcgtttgcgccttataacaacccacaggttgccgtggcgatgattctggaaaacggcggcgccggcccggcggtcggtaccattatgcgccagatcctcgatcacatcatgctgggcgataacaacactacgctgccaagcgaaaacccggcggtaaccgcaggggaggatcaataa

SEQ ID NO: 238989 - DNA, 468 bp, Klebsiella pneumoniae
gtgaagttgcagctggtggccgttggcaccaaaatgccggactgggtacagaccggctttagcgagtatctgcgccgttttcccaaagatatgccgttcgagctggtggagatccctgccggtaagcgcggtaagaacgctgatatcaaacgcatcctcgaaaaagagggcgagatgatgttagccgctgccggtaagaaccgcatcgtgaccctggatattccgggtaaaccatgggatacaccgcagctggcgcgcgaactggaacgctggaaacaggacgggcgcgacgtcagtttactggtaggcggcccggaaggtctctctcccgcctgtaaagcagcggcggaacagagttggtcgctctccaccctcaccttacctcacccgctggtgcgcgtactggtggccgagagtctgtaccgggcgtggagcatcaccaccaaccacccgtaccaccgtgagtaa

SEQ ID NO: 238990 - DNA, 318 bp, Klebsiella pneumoniae; identical to SEQ ID NO: 137104

SEQ ID NO: 238991 - DNA, 630 bp, Klebsiella pneumoniae
atgaaattgtggttagttcgccatggcgaaaccgaagccaacgttgccgggttatacagcggccatgccccaacgcccctgacgccgcgcggcgtcgctcaggcgcgcgcgctcggcgaacggctgcgcctggcgcctttcgataaagtattctgtagcgagctggcgcggaccgggacaacggccgatctgctgcttggcgaccgcgctattccgcgtgagcgccatcccgcgctcaatgagatgtttttcggcgactgggagatgcgtcatcatcgcgacctccagcgagaagatgcggaaaactatgccgcctggtgtgccgactggcagcatgcggcccccaccaacggcgaaagctttcagaattttgcccgccgcgtcagcgagtttatcccaacgctgaccgactgccgccatcttgaccacctgctgatcgtcggccatcagggcgtcctgagcctgctgaccgccctgctgctgcagatgcctgcggcggcgatgtggcactttcccattgcccatggcgcctggagcctcctcgaaatccgcgacgatttcaccaccctgcgggtattaaatagccaggccgtctggcggccgcaagaagaattcccgccagaccattga

SEQ ID NO: 238992 - DNA, 651 bp, Klebsiella pneumoniae; identical to SEQ ID NO: 137102

SEQ ID NO: 238993 - DNA, 1035 bp, Klebsiella pneumoniae
atgatgattcggttgtacccggaacagctccgcgcgcagctcactgaagggctgcgcgcggcctatctgctgcttggcaacgatcccctgctgttgcaggaaagccaggacgccattcgcgaagctgctgccgcgcagggctttaccgagcaccatactttttcaatcgacaacagcaccgactggcaggcgattttcgccttaagccaggcgatgagcctgtttgccagccggcaaaccctgctgttgatcctaccggaaaacggccccaacgcggcgatcaatgaacagctcgccacgctggttggcctgctgcacgacgacctgctgctgatagttcgcggaaataagctgaccaaagcccaggagaatgccgcatggctcaccgccctggctcagcgcgcagtccaggtcagttgccagacgccggaatacgcgcagctgccgcgctggctggccgcccgggccaaacagcatcagctgcagctcgacgacgcggccagtcagctgctgtgctactgttacgaaggcaatctgctggcgctggcgcaggcgctggagcgtctggcgctgctctggccggacggtaagctaaccctcccccgcgttgagcaagcggtaaacgatgccgcgcactttacgccttaccattgggtcgatgccctactggcaggcaaaagtaagcgcgtgctgcacgtcctgcagcagttacgccttgaaggctgcgagccggcgatcctgctgcgtactctgcagcgggagctgctgctgctggttaccctcaagcgccaggcgacgcacacgccgctgcgctcgctgtttgataaacatcgggtctggcaaaaccgccgtcagttgctcagcgacgccctcacgcgcctgagcggggaacagctgcgccaggcggtgacccttctgacccgcgcggagctcacctttaaacaggattacgggcacgacgtctggcccgaactggaaagtctttcgttgttgctctgccacaaagccctggcggacgtttttattgatggttga

SEQ ID NO: 238994 - DNA, 591 bp, Klebsiella pneumoniae; identical to SEQ ID NO: 137100

SEQ ID NO: 238995 - DNA, 2583 bp, Klebsiella pneumoniae
atgcaagagcaataccgcccggaagagatagaatcgaaagtccagcttcactgggacgaaaatcgtacatttgaagtaactgaagacgagagcaaagagaagtattactgcctgtcgatgcttccttatccttctggtcgactacacatgggtcacgtgcgtaactacaccatcggcgacgtgattgcccgctaccagcgcatgctgggcaaaaacgtcctgcagccgatcggctgggatgcgttcggtctgccggcagaaggggcggcggtgaaaaacaacaccgcgccagcgccgtggacctacgacaacatcgcctacatgaaaaaccagctaaaaatgctgggcttcggctatgactggagccgcgagctggcgacctgcaccccggaatactaccgctgggagcagaagttcttcaccgagctgtacaaaaaaggcctggtgtacaaaaaaacctccgcagtgaactggtgcccgaatgaccagaccgtgctggccaacgaacaggttatcgacggctgctgctggcgctgcgataccaaggtcgagcgtaaagagatcccgcagtggtttattaaaatcaccgcctacgccgatgaactgctgaacgatctggataagctggaccactggccggacaccgtgaagaccatgcagcgcaactggatcggccgttcggaaggggtagaaatctcctttgacgtcaacgactacgctgacaaactgactgtctacaccacccgtccggacacctttatgggttgtacctacctggccgtcgcggcgggtcacccgctggcgcagcaggctgcggcgaacaatccggcgctggccacctttatcgacgagtgccgcaataccaaagtggccgaagccgacatggcgacgatggagaaaaaaggcgtcgataccggctttaaagccattcatccgctgaccggtgaagaaattccggtctgggcggcaaactttgtgctgatggaatacggcaccggcgcggtaatggccgttccgggtcacgaccagcgcgactacgagttcgccagcaagtacggtctgaacattaagccggttatcctcgctgccgacggctccgagccggatctctccgagcaggcgctgaccgagaaaggcgtcctgtttaactccggcgagttcagcggtcttgattatgaagcgggcttcaacgccattgccgacaaactggctgccatgggcgtgggcgagcgtaaagttaactaccgtctgcgcgactggggcgtatcccgtcagcgctactggggcgcgccgatcccgatggtgaccctggaagatggcaccgtgctgccgactccggaagatcagctgccggtgatcctgccggaagacgtggtcatggacggcatcaccagcccgatcaaagccgatcctgaatgggccaagaccaccgtcaacggccagccggcgctgcgcgaaaccgacacctttgatacctttatggaatcctcctggtactatgcgcgctacacctgcccgcagtatcaggaaggaatgctggattcgaaagcggccaactactggctgccggtagatatctacatcggcggtatcgaacacgccatcatgcacctgctctacttccgcttcttccataagctgatgcgcgacgcgggcatggtgaactccgatgagccggcgaaacagctgctgtgccagggcatggtgctggctgacgcgttctactatgtgggcgaaaacggcgaacgtaactgggtttccccggttgacgccatcgttgagcgcgacgaaaaaggccgcatcgtgaaggccaaagacgcggcgggccacgagctggtgtacaccggcatgagcaagatgtccaagtcgaaaaacaacggcatcgacccgcaggtgatggttgagcgctacggcgcggataccgtgcgtctgttcatgatgtttgcgtccccggcggatatgaccctcgagtggcaggaatctggcgttgaaggggcgaaccgattcctgaaacgcgtctggaaactggtctacgagcacaccaccaaaggagaggttgcggcactgaacgtggcggctctgagcgaagatcagaaagcgctgcgtcgcgatatccacaaaaccatcgccaaagtgaccgatgacatcggccgtcgtcagaccttcaacaccgccatcgcggcaatcatggagctgatgaacaagctggcgaaagcgccgcaggaagatgagcaggatcgtgcgctgatgcaggaagctctgctggcggtggtgcgtatgctcaacccgttcactccgcacgccagcttcaccctgtggcgtgagctgaacggcgaaggcgatatcgacaacgcgccgtggccggtagcggatgagagcgcgatggtggaagacagcaccctcgtcgtcgtccaggtcaatggcaaagttcgtggtaaaattaccgttgcggtagatgcaactgaagagcaggttcgcgagcgcgccggccaggaacatctggtggcgaaatatctcgacggtaaaaccgtgcgtaaagtgatttacgttccgggtaaactgctcaatctggtcgttggctaa

SEQ ID NO: 238996 - DNA, 486 bp, Klebsiella pneumoniae
atgatgaacaaggttgctcaatattaccgtgaactggtctcctcgctcagcgaacggctccgccatggagagcgcgatatcgacgcgctggtgacgcaggcgcgggaaaaaatcgtccgcgccggcgatctgacgcagagcgagatcgagtcggtgattgcggcggtcaagcgcgacctcgaggagtttgcccgcagctacgaagagagtcacgaagacgagagcgacagcgtgtttatgcgggtgatcaaagagagcctgtggcaggagctggctgatatcaccgacaaaacccagctcgagtggcgggaagtctttcaggatctgaatcatcacggcgtgtaccacagcggcgaagtggtcggtctgggcaacctggtctgcgagaagtgccactatcacctggcggtatacaccccggacgtgctgccgcgctgtccaaaatgtggccacgatcagttccagcgtcggcccttcgagccctaa

SEQ ID NO: 238997 - DNA, 1671 bp, Klebsiella pneumoniae
atgttaattcgatctcgcacgctcaccgggctgctgtttatcacgctggcgggcacctcagccgccggggccgcgccattggcctcttctactcaccagacggagcaggataaagcccgccaggaggcgctggcgccgcagcaacaggattttcagtcttcacaacagcgcgtggcgccgcagggtatcccttttcctgaggaaacgcattgcaaattgatcaaccgggtcgatatcgactccgataaccaggcgctcacccggaaattactggcgaaaaccgcacggcaggcgcagggacgctgtctgggtagcgaaggcattcgcctgctggcctataccttgcaaaatgagctgatcgcgcaaggctacatcacctcgctgattgatgtgccctcccagtcgctggagcacggcatactcaggttcacgctgcactatggcaaagtgggcgctatcgactatgccgacggctcggacaccacccgcctgtggaattccctacccacctcttccggtactatcctgcgcttaagcgaccttgagcaagggatggccaacctgcagcgtctgcccggcgccaccgcgcacatgaaactgctgccgggccagcacgagggagaaagcgatatccagatcgcccgcagcctggcgaaaaaatggcagcttggcgcctggcttgacgacgccggcagcaaagccagcggacgctaccaggccggcggggccctctatctctatgacctgaccaccctcaacgatatcctgtacctttccggcgggggcgatattgaattcaatcagcataacgacggcaaccacaacggcagcctttattactccattccctttggctactggacactaagcgcctacggggcatacagccagtatcgtcagcagtttaacggcaactggtcgacgatggattataagagtaaaaatcgctactacagcgccacgctgagtcgtctgctctctcacacccggcagcaaaaaaccaccgctgacctgcggatcgccaagagcacctcgcattattacttcggcggcagtgagctactggtgatgcgcaagcagaacccctcatgggaattcaccctcaaccaccagcactactttaacaaaaagattgttgatgccagcatcggcatccagcgcagcctgccgtggctcagctcgacagcaacgccggaagagcaggccgggctgtatagcccgctgtcgcggattgtgcatggtaatctgcaggcaatgatgaaatttgacgccaccggcgacaaatttacctgggctccccgcctcagcgcccagttcagcccggacaaactcgcttccgataataaattcaatattggtagtcgctggagcgtgcgcggttttgacggtgaaaacagcctgtccggcaatcagggatggtactggcgcaacgattttatctgggatctggccacccacgagcggcaattctatttgggcgcggatataggccgtcttatcggcgccgatctatatcaaaaaggcaaagtgctctccggcgccgtcagcgggctgcgcggtcagctatggtcaacgcagtacgatctgtttattagtaccccgctgagtaaaccggataagtttcatagcgacgccctgaatatgggcttttcattacagtggaggtattaa

SEQ ID NO: 238998 - DNA, 726 bp, Klebsiella pneumoniae
atgattaccctgaaaaacgtttcaaaatggtatggtcactttcaggtgctgaccgattgctccacggaagtgaaaaaaggcgaagtcgtggtggtctgcgggccgtcaggctccggtaaatccacgctgattaagactgtgaacggccttgagccggtacagcaggggcagattattgtcgatggcaccgtggttaacgataaaaagaccaacctggctaaactgcgctcgcacgtcggcatggtgtttcagcattttgaactgttcccgcatctgtcgattatcgacaacctgacgctggcgcaggtcaaagtgcttaaccgcgataaagcctcagcgcgcaagaaaggcctcaagttgctggagcgcgttggcctggcggcgcatgcggaaaaatacccggcgcagctctccggcggccagcagcagcgcgtggccattgcccgtgccctgtgtatggacccaatcgccatgctgtttgatgagcccacctcagcgcttgacccggagatgattaacgaggtgctggacgttatggtcgaactggccaacgaggggatgaccatgatggtcgtgacccatgagatgggctttgcccgcaaggtggcgaaccgggtgatctttatggatgaagggaagattgtcgaggatgccgataaagaggccttctttgccaatccgcaatccgagcgtgccaaagatttcctcgccaaaatactccattaa

SEQ ID NO: 238999 - DNA, 675 bp, Klebsiella pneumoniae
atgtacgattttgactggagttcgatcgttccctccatgccctatctgctggcagggctggtgatcacccttaagattacggtgatcgccatcgtggtcggcatcgtctggggcaccctgctggcggttatgcgcctgtccagctttatgccgctggcctggtttgctaaatcctacgtcaacgtattccgctcaatcccactggtgatggtcctgctgtggttctacctgattgtcccgggcttcctgcagaacgtgctgggactgtcgccgaaaacggatattcgcctgatctcggcgatggtggcgttttcgatgttcgaagccgcctactattcagagattatccgcgccggcattcagagcatctcccgcggccagtccagcgccgcgctggcgttggggatgacccactggcagtcaatgcggctggtgatcctgccgcaggccttccgcgccatggtgccgctgctgctaacccaggggatcgtcctgttccaggatacctcgctggtgtatgtgttgagtctcgccgacttcttccgtaccgcctccactattggcgagcgtgacggaacccaggtcgaaatgatcctgttcgcgggcggcgtctattttgtgattagcctcagcgcctcgctgttggtcagctggttgaagaaaaggactgtgtaa

SEQ ID NO: 239000 - DNA, 741 bp, Klebsiella pneumoniae; identical to SEQ ID NO: 137594

SEQ ID NO: 239001 - DNA, 912 bp, Klebsiella pneumoniae
atgcaattacgtaaactggccacggcaatgctggtaatgggaatgaccgctggtctggcgcaggcggaagatgctgccccggcggctggccagaacaccctggataagatcgccaaaaacggggttatcgttgtcggccatcgtgaatcttcggtcccgttctcttactacgataaccagcagaaggttgtgggctactctcaggattattccaacgccatcgtcgatgccatcaagaaaaaactgaacaaacccgatctgcaggtcaaactgatcccggtcacctcgcagaaccgtatcccgttgttgcagaatggcacctttgatttcgagtgcggctcaaccaccaacaaccttgagcgccagaaacaggcggccttctccgataccatcttcgtggtcggtacccgtctgctggtgaagaaaggcggtccgatcaaagatttcccggacctgaaggataaagcggtcgtcgtcacctccggaaccacctcagagatcctgctgcataagctgaacgatgagaaaaaaatgaatatgcgcattatcagcgccaaagatcatggcgactctttccgcaccctggagagcggacgcgccgtggcctttatgatggatgatgccctgctggctggcgaacgcgccaaggcgaagaaaccggataattgggaaatcgtcggcaccccgcagtcgaaggaagcctatggctgcatgctgcggaaggacgatccgacgttcaaggcgctggttgatgaaaccgtcgcccaggctcagacctctggcgaagcggaaaagtggtttgacaaatggttcaaaaacccgattccgccaaaaaatcttaacctcaacttcgaactgtcggacgacatgaaagcgctgttcaaatcacctaacgacaaagcactgaactaa

SEQ ID NO: 239002 - DNA, 1539 bp, Klebsiella pneumoniae
atggtatttgcctctcttcttgaacgccagcgcatacgtctgttgctggcgctgttgtttggagccagcggaacgctggctttttcaccttatgacttctggccagcggctatcgtttcgctgatcggtctgcaggcgttaaccctcaaccgacgcccgctgcaaagcgccgggatcggctatttctggggactcgggctgttcggcacgggtatcaactgggtctatgtcagcatcgctcagtttggcggaatgcccggcccggttaacgtcttcctcgtcgttctgctggcggcctatctctcgctctacaccggcctgtttgccggcctgctcgcccgtctgtggcctaaaactaactggatacggatggctatcgctgcccctgtcgtctggcaaatcaccgagttcctgcgcggctgggtgctgaccggctttccgtggctacagttcggctacagccagattgacggcccgctgaaaggcctcgcgccggtgatgggcgtcgaggcgattaacttcttgctgatggtagtcagcggcctgctggccctggccctcgtccagcgcaactggaagccgctggcgattgccgcgctgctgttcgccctgccgttcccgctgcgctatatccagtggtatcagctgctgccggcgcgcgcgacccaggtctcgctggtgcaaggcgatatcccacaggccatgaaatgggacgaaaagcagctggtcaataccctgaaaacctacctggcgctgacccaaccgcatatcggccactcgcagctgattatctggcctgaatcggcgatcccggatctggagatcaaccagcagcagttcctcagcatgatggacgatctgctgcgcgcaaaagacagctcgctgatcaccggcattgtcgatgcgcgtctcaacaagcagaaccgttacgatacctacaacaccatcattactctcggcaaagataacccgtaccgctacgactcgaccaaccgctacaacaagaaccatctggtgccgttcggcgagtttgtaccgctggagtcgattctgcgtccgctggcgccgttctttgacctgccgatgtcctccttcagccgcggcccctacgtgcagccgcagctgatggcgcataacctgaagctgaccgcggccatctgctacgagatcatcctcggtgaacaggtgcgggataacttccggccggacaccgacttcctgctgaccatctccaacgacgcctggttcggcaagtccatcggcccgtggcaacacttccagatggcgcgaatgcgcgccctggagctggcccgcccgctgctgcgcagcaccaacaacggcattactgcggtgatcggcccgcgcggcgagatccagaagatgatcccacagtttacccgcgaggtgttgaccaccaccgtgacccccgccagcggcttaaccccttacgcccgcaccggcaactggccgctatgggcgctgacggcgctgtttggtttcgccgcgctgctgatgagcctgcgccagcgtcgccgataa

SEQ ID NO: 239003 - DNA, 948 bp, Klebsiella pneumoniae
atgccgtccggcgctgagtttacgcgcgacgagcgacagttaaatcaacatgagaacccaaacgacgccatgagcgacgacaattcacacagtagtgacacagtaaacagcaaaaagggatttttctccctgttactcagccagctttttcacggggaaccgaaaaaccgcgatgaactgctggcgctgatccgtgattccgggcaaaacgaccttatcgatgaagatacgcgtgacatgctcgaaggggtaatggatatcgccgaccagcgggtccgcgacattatgatcccccgttcacaaatgataaccctgaaacgcaaccagacgctggacgagtgcctggatgtcatcatcgaatccgcccactcgcgtttcccggtcatcagtgaagataaagatcacatcgaagggattctgatggccaaggatctgctgccgtttatgcgcagcgacgccgaagccttcagcatggaaaaagtgttacggccggcggttgtcgtcccggaaagcaagcgggtcgaccgcatgctgaaagagtttcgctcacagcgctatcatatggcgatcgttattgacgaattcggcggcgtctctggcctggtgaccatcgaggatatccttgagctcatcgtcggggaaattgaagacgagtacgacgaagaagaagatatcgatttccgccagctgagtcgccacacctggacggtgcgcgccctggcctccatcgaagacttcaacgaggccttcgacacgcactttagcgatgaagaagtggataccattggcgggctggtgatgcaggccttcggccatctgccggcccgcggcgaatctatcgacattgatggttaccaattcaaggtagcaatggcagatagtcgtcgtatcattcaggtgcatgtaaagctgcccgatgacgctccccagccgaagctggaagagtaa

SEQ ID NO: 239004 - DNA, 474 bp, Klebsiella pneumoniae; identical to SEQ ID NO: 211270

SEQ ID NO: 239005 - DNA, 1425 bp, Klebsiella pneumoniae
atgacaaaaaaactccatattaaaacctggggctgtcagatgaacgagtatgattcatcaaagatggccgatctgctggatgcgacacatgggtatcaactgaccgaagtggcggaagaagcagatgtgctgttgctcaatacctgctcaattcgtgagaaggcccaggaaaaagttttccatcagcttggccgctggaagctgctgaaagagaagaacccggacctgattattggcgtcggcggctgcgtggcttcccaggaaggcgaccatattcgccagcgcgcgcactatgtcgatattattttcgggccgcaaaccctgcaccgcctgccggagatgattaactccgtgcgcggcaaccgcagtccggtagttgatatcagcttcccggaaattgaaaaattcgatcgcctgccagagccgcgcgccgaagggccgaccgcctttgtctcgattatggaaggttgcaataaatactgcacctactgcgtggtgccgtatacccgcggagaagaagttagccgtccgtgcgacgatatcctgtttgaaatcgcccagctggcggcgcagggcgtgcgtgaggtcaatctgctggggcagaacgttaacgcctggcgcggtgagaattacgacggcaccaccggcagctttgccgacctgctgcgcctggtcgccgccatcgacggcatcgaccgcattcgcttcaccaccagccacccgatcgaatttaccgacgatatcatcgacgtttatcgcgatacgccggagctggtgagcttcctgcacctgccggtgcagagtggctccgaccgtgtgctgaacctgatgggacgcacccataccgcgctggagtataaagcgattattcgcaagctgcgtgaagcgcgcccggatattcagataagctccgactttatcgtcggcttcccgggcgaaaccacggaagatttcgaaaagaccatgaagctcatcgccgacgtcaatttcgatatgagctacagctttatcttctccgctcgcccgggcaccccggcggccgatatggtcgacgacgtgccggaggcggacaaaaaacagcgtctgtatatcctgcaggaacgcattaaccagcaggcgatggcctggagccgtcgcatgctcggcacggtacagcgcatcctggtggaaggcacctcgcgtaagaacataatggagctctccggacgtacggagaataaccgggtggtcaacttcgaaggtaccccggacctcgtcggtaagtttgtcgatgtcgaaatcgtcgatgtatataccaactcgctgcgcggtaaaatcgtgcgcaccgaagcggagatgggtctgcgtatcgctgaatcacccgaatcagtgattgcccgcacccgtaaagagaacgatcttggcgtgggaatttaccagccatga

SEQ ID NO: 239006 - DNA, 1176 bp, Klebsiella pneumoniae
atgacaattcacgtaacagatgtcgccatcgtgggcggcggcatggtcggcggcgccctggcgttagggctggcgcaacagggatttaccgtgacggtgcttgagaaagcggcgccaccggcgttcgatccggcatccgccccggatgtgcggatctcggcgatcagcgcggcttcggtcggcctgctgaagagtctcggcgtctgggatgccatacgggcgatgcgcgtccacgcgtatcgccgtctggagacctgggagtgggagagcgcgcacgtagccttcgacgccgcggagctcaagctgccggagctgggctatatggtcgagaacaaggttctgcaatggggcctgtggcaagcgctggcggcgcatgaggcggttaccctgcgcgtcggtagcgaactgaaaacgatgcagcgcggcgagacgcagacggcgttgcatttgcgcgagggggagacgatccacgcccggctggttatcggcgccgacggcgctaactcccaggtgcgggagatggccggcatcggcgtgcacgcctggcaatatcagcagtcctgtatgctgatcagcgtcgaatgcgccgacgatcccggcgacagcacctggcagcagtttactcccagcggcccacgcgccttcctgccgctgttcgaccactgggcttcgctggtctggtacgacgccccggcgcggatccgtcagctgcagagcatgaccatggcgcagctccagcaggagatcgccagtcactttccggcgcggctgggacgggtgacgccgcaggcggccggcgccttcccgctcacccggcgtcatgcgctgcagtatgttcagcccggcctggcgctggtgggcgatgcggcgcacaccattcatccactggcggggcagggggttaaccttggctatcgtgatgtcgatgccctgctggagattctggcggaagcgcgcggccgcggcgaagactgggccagcctgccggtgctgaagcgctaccaggcgcggcggcgagcggataattttatcatgcagtcggggatggatctcttttatgccggattcagcaatgacctggcgccggtgcggatgctgcgtaatattggcctgatggcggctgaacgcgccgggatgctgaagcgtcaggcgctgaagtatgcgttaggcttgtaa

SEQ ID NO: 239007 - DNA, 219 bp, Klebsiella pneumoniae
atgacgccggtcatcctgtcgcgacaacaactggaccagctctgggagatagaccgcagcgaaattatcgatacgctctaccgtctcgataacggtcagctgcgggcttatcgggaatattatgacgtgcgtggctgggaccctcacgatcgtcaggtttatactccgattcacgaggcctgttacgatcgcggcggtattttttttcgccttttttga

SEQ ID NO: 239008 - DNA, 1176 bp, Klebsiella pneumoniae
atgtccgcagttactgaaacaacatccaattcttcggcgaatttttcgcttttccgtattacgtttgccgtctttttgacctatatgaccgttggtttgccgctgccggtgatcccgctctttgtccatcaggagctggggtttggcaacaccgtggttggcgtggcggtagggatccagttcctcgccaccgttctgacccgggggtacgccgggcgcctggcagaccagtacggcgccaaacgttccgtcctgcaggggatgctggcctgcgccctggcgggcgcggcatggctggccgctgctctgctgccgctgccgttgctcgccaggctcggcctgctgctgctgggccgcttgatcctcgggtttggcgaaagccagctgctgaccggaaacctgagctgggggatgggcctggtgggtccggcccgttccggcaaagtgatgtcatggaacggcatggcgatgtacggctcgctggcggtgggcgccccgctgggattattgatctatagccattttggcgtggcggtgctggcctgtgtcaccatgggactaccgctcgtcgcctggcttattaacggtaccgtgcgcaaagtggcggcccacggaggcgagcggccttcactctggagcgtcatcggcatgatctggcgcccgggcattggcctgggcctgcagggtgtcggctttgcggtgatcggcaccttcgtctccctctatttcgccagccatagctggccaatggccggctttaccctgacggcgtttggtggcgcctttgtgctgatgcgagtgctgttcggctggatgccggatcggtttggcggcgttaaggtggcgatggtctcgctgctgatagaggcggttggtctgacgctgctgggactggcgccgaatgcctggctggcgctggccggtgcggcgctgaccgggtgcggctgttcgcttattttcccctcacttggcgtggaagtagtgaagcgcgtcccggcgcaggtgcgcggcaccgcgctcggcggctatgcggcctttcaggacatctcctatggcctgaccgggccgctgaccggcctgctggcgacctcgctgggctactcgtcggtgttccttgccggcgccctctgcgcggcgctggggatcctcgtcacccttatctcatttcgccgctag

SEQ ID NO: 239009 - DNA, 903 bp, Klebsiella pneumoniae
gtgaaacaaaacgccatacaacccgccaacctggaattcaacgctgagggtacacctgtttcccgagatttcgacgatgtttacttttccaatgacaacggtctggaagagactcgctacgtttttctcggcggaaatcgcctgccggagcgcttccccagccaccctcgcccgctgatgatcgtcgcggagagcggcttcggcaccgggctcaatttcctcaccctctggcaggcgtttgacgtttttgttcgtgataacccggacgttaccttgcaaaggttacatttcatcagttttgaaaaatatccgctgaaggctgaggatctccgcctggcgcaccagcgctggccagagctggctccgtgggcgcagcagctgcaggcgcaatggccgtcggccttcgacgggtgccatcgtctgctgctcgacggcgggcgggtgacgctcgatctgtggtttggcgatatcaatgagctgaccagggagctggatgattcgctgaaccagcaggtggacgcctggtttcttgacggctttgccccggcgaaaaatcccgacatgtggactcaggatctgttcagcgccatggcgcgcctggcgcggcccggcgggacgctggccacctttacctccgccggttttgtccgccgtggcctgcaggaggccggctttaccatgcgtaaaagcaaaggcttcggccgcaagcgggagatgctgaccggcgagatggcgcaaacgctgagctttcctgcgcgcgccccctggttcgctcgcagtagcagcgatgcccgcgaggcggccatcatcggcggcgggatcgccagcgccctgctctccctggcgctgctgcgccgcggctggcaggtgaccctttactgcgccgatgaggctccagcgtag

SEQ ID NO: 239010 - DNA, 825 bp, Klebsiella pneumoniae
atgaaaaacaccgttatcgcactgcttgcgctgttggctagcgccggtagcctggccgccacgccatggcagaaaataacccaaccgatcggcggcagcgcccagtcaatcggcgcgttttccaatggctgtatcgttggcgccgaggcgctccccctgagtgcccccggctatcaggtgatgcgtaccgatcagcgtcgctacttcggtcatccggatctggttcagtttattcagcgcctgagtaatcaggtgcacaataaaggaatgggaaccgtgctgattggcgacatggggatgccggcgggcgggcgctttaacggcgggcacgccagccaccagacgggcctcgatgtcgatatcttccttcagctgccgcaaacgcgctggacatcgtcccagctgttgaagccgcaggcgctggacctggtcgccagcgatggcaagcatgtggtgccgtcgctatggagcccgcaaatcagccagcttatcaagctggcggcggaagatagcgaagttacccgcatcttcgtcaacccggcgattaaacagcagctgtgcctggacgcgggcagcgaccgccagtggctgcgtaaagtccgtccctggttccagcatcgcgctcatatgcacgtccgactgcgttgcccggcgggaagtctggagtgcgaggatcaggcgccgccgccgcccggcgatggctgcggagcggagctgcagagctggttcgaaccacctaaacccgggtctaccccccctgtgaagaagacgccgccgccgctgccgccttcctgccaggcgctactggatgagcatgtgctgtaa

SEQ ID NO: 239011 - DNA, 471 bp, Klebsiella pneumoniae
gtgcagagccactacaacctgatcatgcgtgaagatgaacgagagctgttcgggctgtgcgcggaagatgatatcgccatgactccctatagcgcgctggccagcggccgtctctcccgcttagaaggccacacgcggcgagcggtagaagatgagtatgcgcggggaaaatacgacagcacggcagaacaggaccggatcattattgcccgcgtcgccgaacttgccgaacgacatcaggtttccatgaccgaaatttcgctggcctggctgctgacaaaagtgacgtcgcctgtcgtaggggccacaaaaaaagatcacgtcgatggcgcggtaaacgcagtcaatcttcacctgagcccggaggaaatccattttcttgaagaaacctaccagccgcacgttctgacggggatcatggcgcaaaacacgccgcaaacgaaggacgttaagcaggtctggacgcggtaa

SEQ ID NO: 239012 - DNA, 432 bp, Klebsiella pneumoniae
atgtctatcaataccagactgcctgtattcaatatctccactcaaaagctatcgcttagtgctgacaccgagtctgtcctgtggtgtggcgttgagtaccctaccgtgaactttgtaagtgttgttgtccctagcttattggcgtacctgcccccttatagcgctggctcgatccacctgctgtctgaaatggatgccaacggatttagcattcgtggttacggtaagcacgccactgcatggggtgaaaccatagtccagcgtcgagaagaacatgagcggcgcatcaaggaagttcaggagcaccaagagcgactgtctgcaatgtatgcgactcctgccgagattgccgaagatagagccgccaaggcacgtaaagcggaagaagctcaacgtaagttcggacgtaaaggcgctgcttttggtctgtaa

SEQ ID NO: 239013 - DNA, 681 bp, Klebsiella pneumoniae
atgccactttacaagtttttggaagagcaacatttagaatctttttttgataaaggctgcttacgtcttggtacaatctatgattttaaagatattgtaactcacagtttaggcagaggtgattctaaggaaggaagaagacaaataaatagagatgtcacagaaaatctttatcttaatagctcatccaatgagaatgttatctcagattcactagaagttacaggtaatggtagtgtcaacataacaaatagcacattttatgtaataagaaatagccctaatgcatttattttttgctcaagtaacgcctatagcaacgaattattcaaaaaatggaacgaacatcataatgaaattaacgcttgctatgaaatttctgatcctaatggattcctccgagaaataagcaatgcgattaaaaactctgccaattttattacctgcaaggacatcgtatactctacagatccaattccttacaaccatcactcatcctctgtacttccaatgtttgtgaaagaaattacacaatatgaatggcaattagaaaatcgtgctgtatggtacccgaaagaaccctctccgcaattaaagccatggattatatttgctcctgaagccagaaaatattgccgccccttctcaaagttagtgggtaatacagttagttttttttga

SEQ ID NO: 239014 - DNA, 2091 bp, Klebsiella pneumoniae
atggcctttgatccgccacttgggagcacgtcgcccgcagtgctgctcgataacgccactcgcctggacgaacttattaacgggccagcggccaccgttcccgaccgtgccgggcaaccgctggacacctggcgccagatcgtgacgatgatgcttgctgctgtcactgatgcgcagaacagcattaccgctattgggctcccctttaatacgctctctgatgctcaggctgcagtagctgctggaaaaataccagaggggtccgtgacatgggttagaactacggacagcgctgcccttgcggatgagtacaaaaacataaatggggttctgacggctaccggacgtcggatgccttctcaggatgccgtggacgcactttcgcgccagttgctggattcgattgttaccggagatgtaccagggttctggctggcactgaaagactctgcgggctggatttcatggggagtggatgatcaggggggatttggatccaggtctgcttacctcgggacagacaatattctggcgggaaatattaaaatcctgtttaccgatgatgttggattacgatttcaggatcccgaggggttctacatcgatgtactggataatttcggacgctatctgctgggagattccggcggcggcggttcttcatcggttgacgtagtcagcatccaggatttgaaaaacaaggcttacgcggcggaggtttcgcggcgcgtactgacccgccttaaattcccgacggatgcctacaaccattttattatggagtgccagagcctgggtatgggatttatgagctggcccgccgtcagtaaggcaccgaaatacggcaatctaatgcttggtggctcggtgcgtccagccagtacctccgctaatgcgtttaccccactcggtgtaaacgcctggcagccgcttaaagctgtcgtacagtctgtcgctggcggggaaatcctgacggatgcggatcagcaagctcttgccagagccgcggtcaatgatggggagtcccctgtagtggctgcagttaacggtttccggcgtcacttcctggaggcacattgccttaactctgaccccagccgcctctttgtcgcctcgaccgttggcgtatcaaatcagtccatcgagagcctgatggacgataccaaatactacaatcgcgtcgttgagtgcgtaacgaaggcaaaggcacttgctgatgcagaagggaaatcctattcagtaaccgccattgagtttgttcagggggagcggaattacgaacttggaacatctaaagcatcgtataaaacgctactgggtcagttgcgtagtaaattgttttcgaccataagaggcattacggggcagaccacggaccctgcgtggttcatgtaccagacgggattcacctacaccccaaacccagccacgcagccgctaaacgcggttgaattatgggtcggcatggcgcaatacgagttttgtcaggaaaatgaaaactgcttcatgatcgggccaaactatcagttaccagacaaaggaggccacctgatgacaaacggcagccgctggctgggctgctattttgctaaggtaaaagaccgcgtactaaatcagcgtcgtcctttcaagcccttggcgcctatcggatttaaatgcattggcgcggatatttttggcagttactacgtcgattacccaccgctcaagttccagagtccgttccggggcggcgcccgcactgctattgcgaataaaggttttcgcgtatttagcaatgtccagaacgacccggcaggaattggggaagaggtcacggtcgtatcagttgaaattgcggctgacactattgtcaaaatctcctgtgagacagaaccccaaggtttaatccgtgtggtctacggaatgtatgcgcaatacgggcagggcatggttacggattccgacccgtatgtcccggatgaggtatacgaatatgacccgcagttcacccagtggccggaagagaatattccggaactggtcggcaagccatatccgatggaaaactggtctattgccttttccatgaccttcactaaggatgaataa

SEQ ID NO: 239015 - DNA, 531 bp, Klebsiella pneumoniae
atggcatccctgaaaacaaaactcagcgcggccatgctggcgcttatcgctgctggtgcatcagctcccgttatcatggatcagttcctgaatgagaaagagggcaatagcctcacgtcataccgcgatggcgcgggcatctggacgatatgccgcggagctactagggtagatggaaggcctgtaacgcaggggatgaagttaacccaggctaaatgcgatcaggtaaatgccgtagagcgcaataaggcgctggcttgggttgatcagaatgtgcgggttcatctgacgcctcctcaaaaggtcggaattgccagtttctgcccctataacatcgggcccggtaaatgcttcccttccaccttctaccgcaagctgaatgccggtgaccgaaaaggcgcctgcgctgaaattcgcaggtggatttttgatggcggaaaagattgccgggtgcgttccaacaattgttacggccaggtctctcgccgtgatcaggaaagtgcgctggcatgttgggggatagatgaatga

SEQ ID NO: 239016 - DNA, 1044 bp, Klebsiella pneumoniae
atgaatggagcatatgcactattaaatctactaccaggaatgcacgcaagcatcctttcaattgttgccgcaattattacttcttggttcttttatgcttttccaaagctagttgaagcaaaaagcaatcttgaattacttctgtccaactctagcaatttatttacaccagaaatctgtagtaaaaccgaacttgacatcagagattctgatggtttgatttcttttgaaaaaatacatcaacaattgaaccaccaaaactttatcccaaaaaactcaggtgctaatgataaagttcttttagaaaataccatccattacttattgataatggcatctataacaggtgacaacaccttccaaaaatggtgcaacccaaagcttcgagaaaaagattataacttattcgataatatcaatggtagaaacattgcaatccttaaagactatataaatatgaccattgcaagttatgaatttaggggcgaccaaatgaaacatctcttcaatacagcttatgaaatacaattaaaagaaacaatcaacccacacgaaattggatacaataatttcatggcaagacataaaaaaaatatagagcaatttcaaaaagatggcgacatggacggtctacaggattacataaaaaaagcggaacctttcaaacagagttacatatctgacatggaaaaacatgaacaagaaataatgaagaatccttcattcagccaaatatatgattcaatagcttcaaggttatacgcgattagagatatattaattccccaacttgaaaattccttggcgcaagtaagatattccgaaaacttactcaagcagggtgggttaataaaaaatgtggtacgtataatatttttcaatgttgttcttggtatagtggcaccacttttttttatatcaatcgaatcaaatatgattgattggaattctactccggtaacatggtttacatttacactagcactgataactattattccatatcttaccatctgtgcaaaagcaataaaggcaataaggtag

SEQ ID NO: 239017 - DNA, 198 bp, Klebsiella pneumoniae
atgccggttgtcgctgaagtggtagccagagagcagcctgaacatctgcgcgagtatttcatggagcgcgtccgctactaccgcgagcagagcatccagctcccccgcgcatccgatccgcgctatctggaaatggccagtcagaacgaaaaaaatagcctatgctcgttttgcaattctggatttagcccgtcataa

SEQ ID NO: 239018 - DNA, 867 bp, Klebsiella pneumoniae
atgggtaaagtggcacatgaaaataaaaatacagatgaacaggttgaagcacaagatcaaagacctgtatgcggaattataatgcctattgcagataccgatggctatccaaaagggcattggcaggatgtatatgctattctgtctgaggctgcgaatgcagctggttttaaacctaatttagtcagttttgattctgatgtgggggtaattcagaaacgtatagtacagaatatctactcaaatcctattatcatttgtgatattagtagccgtaatccaaatgtaatgttagaattaggtatgagacttgcatttgataagccagtaattatcgtaaaagatataaaaacagatattagtttcgatatctcacctattgagcatcttaggtatcctgatgacctaagatacaaaataataaatgagttcaagtcaactttgagctataaattggtagaaacacataaaaaatctataagcaaccccgattacactacttttttaaagcattacgggacgtttgaagttgtaaagatacagcaaaaagaagtttctgaggctaggtatattctttctgagcttgaagagataaagaaaataattcgtcaaaaagactacaaaagtgaatctcatagacgcttatcatctgtgatggattacggtacttttatatatcctttgaatgatgctaacagacacaaaatagaaaaccttacatggcttaaaactttagaaaaagactctgattttattataacatctctagagataaaggatgatactttggttttagtggtcacttcgaacctagatgagggacctaaaaattatgatatcatccttgaggctttaaatgaaaaataa

SEQ ID NO: 239019 - DNA, 177 bp, Klebsiella pneumoniae
atgactgatatcaccgaactggcgcagtgccacgaattgctgattgcaaacgggcagcagacagccgacctgctacgccacctggcagataacgaaatcgactccgactattttgccgttgtctcggaatgcgaaagctacgggcaagaaactgacgcagagctatcaatcacgtag

SEQ ID NO: 239020 - DNA, 300 bp, Klebsiella pneumoniae
atggacaaccaggaactgaaacacgtgatagcccttctgctcgaagactcaaaacgtttgcaggagttagagccaaacgtaggtacagaggcccgtattttgttagcaaaacaggcgttaaagactgacgaggcaaaaagccatacccgagccaatttagtgactcacaagatcactcccctgccatgcaagggagacggcgtggaccgcgtttatcacgaaacgatggttaagtgtttaagaatcgagcttgaaaggcttaggagtcagatcgtgatacacgaaatcgttaccaactaa

SEQ ID NO: 239021 - DNA, 378 bp, Klebsiella pneumoniae
atgctggagttctcacacagccagcaaggaaaactaatgaatcagttttatgttcacgttcgacttttcgaagccacagccgaacagaccaaaaaatttgaagaattcatgcttaactttctgtaccagaagacaatcaaagactctgacgatagctactgcagacttcctccggaagggtacatcctcaacagcacaatgaactgccaacaaatcgttgatcaaacatttgcaattgctaacagtgctggtgttaatgcaaatatctttgtctgtaaatttgaacaaagtgcatccttgcttccgtcagctgctttagttggtaacgatttcgtgtatcacgatctgactcctaagcctttcaagctcgattcttaa

SEQ ID NO: 239022 - DNA, 726 bp, Klebsiella pneumoniae
atgaaagagcgcggaatgatttttaacgctgagatggtgcgggccatcctcgacggccggaagacgcagacgcggcgcgaagtaaagctgaatctcgatatagcgtgcctagccacaacctatgactgggccgcttccctcgcggccaatcattatcagggtctgacagaagaacaaattcagcagaaagctgaatctcttcgtggcgttattcaccctgtaattttgggtaatggccagatggtctcgattatctgccctcatggcaagtcaggcgaccgcatctgggttagagagacgttcgcagcgcttgagcctggtagttacgagcaggtgaagcctcaggaggggcattgccaagatttgcgttacgccgccactgatcgactagctaaatcagatgctgatattcgcggttacaaatgggttccttctatccacatgccgcgctgggccagccgcattctgctggaaatcaccaatgttggtgtgcagcgcctgcaagacatcagctcaggcgatgctgtccgcgagggtatttgtcaactaccagcatctggtcgctactgcataagcccaggtgaccagtatttcggaggagcaagccatagcgctaaagaggtttattcttggctgtggtcatccatctacggcgaggaaagctggaaggctaacagttgggtttgggttattgagttcaaacgcgttgaaggcggtacagcatga

SEQ ID NO: 239023 - DNA, 954 bp, Klebsiella pneumoniae
atgctgacagtgactccgattcggacagcgattccgacagcgactctgactcggacagcgactcggattctgacagcgattccgactccgacagcgactcggattccgacagcgactccgattccgacagcgactcggactcggacagcgactcggactccgacagcgattccgactccgacagcgactcggattccgacagcgactctgactccgacagcgactctgactccgacagcgattcggattctgacagcgattcggattctgacagcgactcagactcggacagcgactcggactcggacagcgattccgacagcgactcggactccgacagcgactctgactctgacagcgactcggactccgacagtgattcggactctgacagcgattcggactctgacagcgactccgattccgacagcgattctgactctgacagcgactccgattcggacagcgattctgactctgacagcgactctgactctgacagcgattcggattccgacagcgactcggattccgactccgacagcgattcggattctgacagcgactctgactctgacagcgactcggacagcgattccgattcggacagtgactcggattctgacagcgactccgactctgattccgacagcgattcggattccgacagtgattccgatgctgacagcgattcggactccgacagcgactcggattctgacagcgactcggactctgacagcgattcggattctgacagcgactcggactctgacagcgattcggattctgacagtgattcggactctgacagcgactcggattctgacagtgattcagactctgacagcgattccgactccgacagcgactcggactctgactccgattccgattcggataccgaaccgcaggcaaataatgatacccatacggcggctatcgataccgtag

SEQ ID NO: 239024 - DNA, 294 bp, Klebsiella pneumoniae
atggactatcccgatattgttcagtgggtaacggaccataaaggagggtttgaaaaaccaatttataaaacagccttatcgcacgcgcagcaaatctggtttgagggtgagtttgaagtgggtcttcagttactctcgttccctgaagtccagctggccgttgctacctactgggaccgcgcattaacaaaatacgattatagtcttcaggcgaagtatcataaccggatggcagttgaggagatcttcaaacagttacaagtacaacggcagcgagaatcgagcgcaatgtaa

SEQ ID NO: 239025 - DNA, 2364 bp, Klebsiella pneumoniae
atgtacaaatcaactccgtcagcagcatggtgtaaaaaacgcctgctggtgacctctttgtttgcagcaatttatcagacttctgccatcgcagcagatacttccgccgttagcggcgaggcggtggatgacacctcggaacaaatgaccgtcaccgcccccgcgccggtgcagaaagccggtagcgaacacagcatcagcgcccgggagctggagaataaaggcgctaacgatttcggctcaatcatgcgctatgagccgctcattagcgccaccggggccagcggcggctccggcaacggcaaaagcggcttcgaccgcggaggttacaccggctacaacattcgcggtatggagagcaaccgcgtcggcatcgacgtggacggtatcgcgcaacccaacgccaccggccgcggctacgtcggccgcgccgggctcaacaccttcggcatcggccgcgattatatcgacccgtatatgtacggcagcgtggatatccagtccggcgccacctcgacggaaacggccaacagcgctatcggggggaatgtctccttccgcccgaaatcagcggatgattacctgcgcccgggcaagaccagcgccttcggctaccgcagcggttacgactctgcggatcgcagctggcacaacggggtgaccgtcgccggcggcgatgagttcctgcgcgggattttggtctatagccgccgtgacggccaggaaaccgaaaacaacagcggcaccgtcgacgcctacccggcgaactggcactccgatgcttttctggcctccgggatctggcagcctaacgatgagcacaagctgaccagcaccttcgactattaccataaaaccaaccacacccactacgatacctgggactccagcggcaacagcaccatcggcaccgccaaccagaccagccagacccggcgctggggcctgagcctgaaggatgactggacgccgatgaacgactacctcgacagcgtctccacaaaaatctactaccagcataccgaagcccatgactggacttatatgccggacagcgtcacccgcagaatgcagacggtgaactctaactacgataccgacacctggggcctgcagactgcgctggcgaaaaccctgggccgccacgatctaagcgccggtttcaacgccagcaccagcaaaacccagcggccgttcagccagtcgccgatccccagcgtttacagcgagatcatgcagccggaggcagacagccgcagctacaccctcggcggctttgtccaggataagatcaacttcgatctcgacagccacaacttcgccgttattcccggcgtgcgcgtggtgcatcaatcgactaagccggaaaatctgtccgatctcgccgccaacagcagcgtgctgagcgaatcgtcggtggcgaatctgtacggcaaaaacagcgatacccaggttctgccgtcgttgaccttccagtacgacctcaccccgcgcctgatgacctacctgcagtaccagcgcggggcgcagttccccaacgccagccagctgtatggctcctggaacctcggctccagctacgccggcagccagcagtatgccctgatcggcaataccgatctgaagacggaaaccagcgataatctcgagtgggggctgaaaggggaagttaccgaaggcatcaccctgcgcacggcgctgttctacaacagctataagaactttatcgcctatacccgctatacccgcgccaacaatccgggccagttcacgaatgtgccgtcgaacatctacaccatttatcaggcggaaaaccgcgataaagcctatatctacggcggtgagattagcaccaaatttaactttggcacctggtttgagcaggtggacggcctgagcgccaccctcgccctcggctatagcgaagggaaatcgaaatccagctacagcggcgataaatacgtcgacctcgacagcgtggcgccaatgaaagccatcgtcggcgtggcgtgggacgatccggcgaaacgctacggcaccgccctgacggcgacctttgtcaaagggaaacaggcgaccgccaccaaccgcgaaagctacagcaacagcggatccgccatcaccgatgccagcagcgactatatgcgcgtgccgggctacggcatgctggactggaccgcgtactggcaggtggcgaaaaacgtgcgcctcaatggcggggtctacaacctcaccgatcgtaaatactgggattacctgagcagccgcaatatcgagaccggcaccaaccaggacgccaacgataaagcgctggcggtgatgccgggccgcacctggcagctgggcgtcaacgtcgacttctga

SEQ ID NO: 239026 - DNA, 1617 bp, Klebsiella pneumoniae
atgcgtatctctgtgattagcgcagcggtttgctgcgccctttttccgctcatcagcgtcagcgccgccggcttgagcgtggagcaacggctggcgcagctggaagcgcgcctcaatctcgctgaacagcaggccagcgaggccagccgccgcgcgcagcgggcagaacagcaaactgccgccgccgagcagcgcgccgcggcggcggagcagcaggtgcaggcgctcagccagcagaccacggctcgcgaacaaaaacagcaggccactaatcagcaactgagcgagcagctggcgaagcgcgccccggacgatgggtttacctttaacgcctacgcccgttccgggatgttagtcaacagccatggcaaaggcgcccgcggcgggccaggcgtctccccggccagttcgctcaacggcgatgcccatgtcggtcgtctcggtaacgaaaaagataattacgctgagctgagctttggcaaaaagctcaccttcaacgatggttcatgggcgcgctttaagaccatgctcgccgacggggccaccaacccggatccgtgggttcaggataacgacagccaccatctgaacattcgtcagctgtacgtcgagatgggtaactttgccgaattcaccggtccgttaaaacgcgcctcaatttgggccggcaagcgcttcgatcgggataacttcgatatccactttaccgatagcgacatcatgttcctcggcggtaccggcggcgggatcaatgatgtcgactggggaagcggcctgcgcggcgactattcggtgtatgcacgtaacttcggcgaccttggcagcgataattacgcggataatgacatccagaatctgctgttcaccgccaaccatttttacggcaactggcaactgatgaccacggtgatgaccgcccagggcaacgatgacctgaaagataatacctcgaccaccgggagctatgccctgcgcagcgataacaccgctaaaaacggctactacgcgatgctggcccaccacgacaaacagcagttctacggcctggcgccgggggtgtctgagagcgccctgcaatacggcgtcgggctgggcgccgaagcgcgtcagccggggagcgatggcgatctgaccgagaacgcggcctccctgcgctttgcgtcgtatggcatcctgccgttggggaaaaactggcagctggcgccgtcggtgatagcccagcatagcgaagaccgctatcgcgacggcgaccgctacgactgggcgacgtttaacctgcgggtatcacaggggatctccgctcacttcgccctgctgtatgaggcctcgtggcagtatatggatctcaatccgaacgggcgcagctatcgctataatgacaatgtttatcagtatcaggcggtgcgcggtgatttctacaagctgaccttcgcccccacctttaaagtgggcgatgtgctggatatcaaggcgcggccggaaatccgcttctttgccacctggatgaactgggataaagcgctggatcgctacgcgataaatgacgatttcggcagcaaaggctttaccgccggcgggacatggaacttcggcgtgcagacggagatttggttttaa

SEQ ID NO: 239027 - DNA, 1680 bp, Klebsiella pneumoniae
atggataagccactgcggttgaagttaaaaaagtgctaccacctggctcgcccggcgcatgtggttaacgcttgttttatcgcagtgctgtttttctccacgctgctgatctggcgtgaaatcaatgtcctggaagaggcctacgtggccaaccagcgtaacaatctggctaacgtcgctcatgaaatggatgggctgttgcagttcaacatcgacagaatgatgttttttcgccatgggatgcaggcggcgctcgaacagccgcttgatatcgatgcattgcgtaaggccagccaacgctatctgagccagcgccatcagcaggcctggcgggtggcgctaccgaatcggcgtacgctgccggtgtttggcatctcgggcagcgtcgctggcgacaaccctatcctgctggtggacgatccgctggcggctgatgaactaatggcgacgctcgagctgggctatctgctaaatctgacgcagcacgatcgcgatttcgccgagcggatgcagtatatctctcgtagcggcttttttacctcgaccctgccgctgcgggatgagtcgcaggtgataacgcactattcccaagccctcagcgctccgtggtttacccgccagacccagcgaaataatccggggcgaggcgttatctggcaaacctttcctgacgatgacccgcagctggaagagcaggtggtcaccgcttcgataccgttggattttgccggttactggcgtggcgtgctggcgatggatttctcagtcagtgaaatcaaagcgtttttggttagcgccatgcaggggggacaagagggagagtaccaactttatgatagccatttgaacctgctggcttcttccgcgccggggaatgtcctgaccctgctgtcgccgcgcgagcaggagctgctgagccgcgcgtttgtccatgataaccagggagggctgcgtctgctgacgcgctatatcagctgggccaaactgcgcaattttgacggcgtgctgctgcggatccacactctgcgggaaggcgtccgcgggaactttggcaccatcaccatcgccctgaccctgatgtgggtcctcttcaccttgatgctgttgctctcctggctggtgatccgccgcatggtccgcaacatgagcgttctgcaaacctctctggagtggcaggcatggcatgatgccttgacccgcctgctcaatcgtggggcgctgtttgaacaggcgatggcggtagccagcgactgccagcgcagcggacggccgctggcggtgatccaactcgatctggatcattttaagcacatcaacgatcgctatggtcatcaggcgggggacagggtgctgtcgatggtggccagtacgctgtccagcgcggttcggcagggcgatctgctgggcagagtgggcggagaagagttttgtatcgtgatgccgaataccaccctgcaggaagcggcggcggtggcggagcgattgcgccagcgtatccagggacgggaagtctttttgcataacaacgtgacgctgcgggttagcgcctcgttaggggtgagcgccagcgaagagcggggggagtatcagtttgaagcgctgcagtcggtggccgatgggcgactctatctggccaagcaaaatgggcgtaaccaggtctgttttcgcagcgcagcgtga

SEQ ID NO: 239028 - DNA, 774 bp, Klebsiella pneumoniae
atgagagatggaaagaaagcttaccatctcagtgaaggtgaatgtagtcttctggcattttgttattttcttgctaaattggacgatattgaaacacgtgattccaagccaattatttggattgatgatccaatttcctcacttgatggtaatcatatattttttatttatagtttgttaaatgctgggattgtatctactggaatatttaaacagttatttatctcgacccataatttggattttttgaaatatttgaaaaggttgaaagatagctttattgataatgttggcaggaaaattagtttccaaaaatcttactttgttgttataaggagtgaaaaaacgtctaccattcaagttatgccatcgtacttgaaggaatatgttacagaattcaattatctttttcatcaaatatataaatgctctactattgatgtcattgatgatactaattacattacgttctataattttgctaataacgctagaaagttctttgagatatatttgtactataagtaccctgaccaggggatgagcgaatcaacactcaatttattttttggggaagacaaaattccggccattctatctgacagaattaataacgaatactcacatttgtgtggtgtatttgaacgggctgcaacgcctgtggaagtacctgagatgaaaacagcagcatgccaaataatcgaaaagcttaaggaagatgaaggccagtactcagcactgcttaaaagtgttggagagtatatagagcaatag

SEQ ID NO: 239029 - DNA, 1593 bp, Klebsiella pneumoniae
atgctaaaaaaattcaaccacattaaaaaaatgggagtgttcgataacttcatttgggatactcaggttttaagtaaaggaggtgcagttcaaagctttgttgatattaatataatatatggtaggaattactcgggaaaaacaacactttcccgcattgtccgtgctttagaaaagggagagatttctaataaatatggcacgccttcatttaatttaaaattttcagataatgttgaagttactaatcttaacttatccacacatgataaaaaaatacgtgtttttaatgaggactttattcgagataacttgcgattcatcagtaatcctgaagagagtattgagtctttcgctatccttggtgacgataataacaaaatagaaatggaaatatcggaattaaattctgaattaggaacaaatgaagaaggaaaagaaacaggtctatatgcaagaaaaaaaacggcaactgcaacctataataatgctttcatgaagcataaaagtgctagcgataacttggataagcagctaacaaataaggctacaggaaaggatattggaataaaatacaaaccagagcgttttggtgaccagaattacactatagtaaagcttaaaaatgaaattgcggaagttaataaaagtagttataagccactaacagaagaacagttgggacaatacgataagttgattacagagcgagtattgccaaatttgcctcaatttaaacctcctactcttaatctcaaatcatttgagatagacgctgagaaactaattacaaaaataatcagtgcgtctgataagattgaggaattagttaaggatgcaatcttaaatagatgggtgaatgaaggtagaacacatcatagagatcaccatgataaatgtgcattttgtgataatatcatttcgcaggaacgatggataaaactagacaaacattttgatgaagagtcagaacaactggaaaaagatattgatgttctgaccaagaaaattgcagaagaaagaaaatcaataaaaacggttttgtcagtcaataaatcgttcttttactctaggtttcataatgaattagatgaattagttttaaatcttgaaattgcgggtaaaaattatgaggtatcgctggatagccttattcagcaacttcatgataggaagaaggatactttaaatgctaaaaaatttgatactcctctcgactctacacctgagttgatcgatgcatgggacaagtatttagatatttgcagtaagaatgatacatttactagttccttgaattctgaaaaaactaaggcgatgaaacttcttagatatagcgaggtttttaattatctaattacgatagattaccaaaatctgaccagttcaatagctgaattgaaaaataagtccgatgaagcaagtagtgaactatcgctcattaccgggatgatttcccaaaagcaatcattgatcattgaaaagaaacgtgagttaaatgatgaggaaaaaggggcaaaaaaagtcaatgaatatttaaataatttttttggtcataagtttctatctcttgtgacctgcccccagagttag

SEQ ID NO: 239030 - DNA, 2025 bp, Klebsiella pneumoniae
atgggcgagatatttcattttgtgcctaagactggatgggatgctgaggcgaatgttaatgaatttataaggcgatgccgtgatgatttaactgtattcgggaaaaatatcaattgggatagttggaactggaaaggggttgtcaactatacgaaagttggtgcaccaagtcgtggtataagttctgaacacctgctggatgataaaattcaggattttgcgaaggcttatattcgctaccagcaaggacataatccgacaaagaatattcaagaaattaaagctatccgctgtatcgaacctgcattgctcaaagttaaaggtattacagatattacccaaatagatgtgttagtgcttgatgaggcagcagtggtcgccagagagcagtatggtagttctggttatcatgctggagcgcatttggagaggttggcgaaatttatttctgacaaaggaatggttgtatctccaatcaattggaaaaacccaatccagaggtatatggaccgaaatctaactggtgaaaagggtcaagctcttagggaaaagaaacttccgaaggaccatcagctggactatatggctgaaatgtttgcaaatgattttcttgatccgcgtgaccgtttcacgacctctatgtttgcattaagtatgtgcgctcctgggagagtttcagaatttcaggacttatcaattgattgtattcatgaagaaaatgatagaaaaggagtgccgaggctagggctacgtttctacgcggggaagggttatggtgcggatataaaatgggtcagtacaccgtttgtttcgattgctaaagaagcaattaggcgacttaaggatctttccatagaaggcctgaagatcgccaaatggttggagactaatcctgatgaattttatcgacatccgaaatgcccaaatgtcggtgaagatgatccattaacggctgttcaaatatgtcaggctatgggatgggtggtccaggaaggtaggtccgctatgtctgtagcgttcaatccgagtaaaaatgaaatattatcaattcggcagagtaagggagaagttactcttagagaccttaaccagattgtgcattccaatctacctgctggttggccttggaaaaataaagaacgtggtgtgaagtattctgaggcattgatttgtttaagaaaggatgagcttcatggcaacagaggtgtttcacctgtaatgctttggacaccagacaatgctacttttacttatgacctaggccccagaaaaggcacagatcagagaagtatttgggagcgtcatggctacaaaaatccagatagttcagagataaaactaacttcgcatcaactgaggcatttgttaaacacagtagcccagcgtggggacctcggacaattcgatatagcgatgtggtctggacgtaccaatatccatcagaaccgcacctataaccatatttctgaatatgaagtattggataaggtgaaagctattccaagtgttgtggctatgatgggcccactcgataaggtgaaaagccatataccagtgaccctcaaggatctggatgctattggagagggcattgcccatgtcacggaatatgggttttgtgttcatgatttttcaatgattccttgccagaagcatcttgactgtatcaattgcactgagcaagtatgtgtaaaaggcgatagagaaaaactgaatcgtctcataatacaaagagataaaaccataacacagttagcgaaagcatccacaggaatggcaaaaggtttttatggcgctggacgatggtttgagcatcaaaagcgaactctagaacgaacggtagaattgattagacttcttgagtcagatgatatcgaggacggttccgtgattcgtttacgcaataagaaagagtttagctcgttaaagcgcgagttggatgcacaaattgcgcagcagaaattagagtctgaagtgcagattaaaaatgaaatgagagctcttttgggaggggattttggctaa

SEQ ID NO: 239031 - DNA, 1545 bp, Klebsiella pneumoniae
atgattaactctgaaaaaattgatgtcagctacggggaaacagcgtttatttcctgggatggaagagcatttaatataaatgatgattcgtggaaattaaataaaaatgtcgtagttgttgttaaatggatatcaaagttgaagccaatagtagcgtcttcacttaaaattgtgctggcgcgctttgctgaagaatacgcagcggaaacagtaagaggactgaatgaccaggcgagacagtattttaatctcacaggagattgtgagtttttggttgactcactaatttcgtatcgctcatctctatcacgcgatgaggaacaaaaactatctaaaataagaatgctggtgcgaaattggactaaatggggatacccaggagtatcacaagaagcttttgaatttctcgatagtctgcgtttaaaaggactggaaaaaggaaaagcaataaagaggttagatcctgaggaagggccattaactgaaattgaaatgagtgctttgattgatgcaatgctacaggcgtatacttctaataagataactatttctgattatacactatcggcaattcttgtttataccggtaggagaccaatacaaattactagtctaaagataaaagatatctgctcgcatagggttggtgaacttgatgaatactggataaatttcccaagagctaaacagagattttcaaaatggcgtacggagtttaactcttaccctattacccaagatctttggagcctcttaagtcagcatataactaaagtctcaaacaaaattcttaaattaataaatttccaattaacacctgaagtaatgcaggaatttccattattcccagacttttccgaaatacgtaaatgcaggggttataaatcatttattgctgcattggatagcgatgctctacatattgaacgggatttctgtaatgaagtaatgaaaaagttgaagggcgttcttaatgtttattctgagcgaacaggaaaaaggttaaatctttctactcggagatttagatacacgctcggaagtaatattgcacgcgagggtaaaggagagctaattatcgctgaagctctggatcattctgatacacagaatgtcggtgtatatgtgaagaatctaccagatgtagtggagcgtatagataaggcagttgctttacagttagcaccactcgcgcaggcatttcagggaactttggtagattcagaagctgatgctgaacgtggaggggataagaatagtcgaatagggaatgcagacgtaaatataggtaattgtggaagctacggtttctgtggggctatggcaccaatagcctgttatacatgtaaatatttccagccttgggtcgatgggccgcatgaaataattctggatggattgatcgaaaaacgtgacgaagtattgcgcaatacaaaagatataaaaattgcctcttctaatgacagattaatacttgccgtcgcacaagttattcgaagatgtaatgctaaaaaacttgagcgttcgcgtgtggaggggggctaa

SEQ ID NO: 239032 - DNA, 1248 bp, Klebsiella pneumoniae
atgattacattagtgactaggcatattgtgagtaagacgggagagaggctaaagcttcttgtcgatgcttcttcaggtatcccgttgttttaccctaacttatactgcacgtcccaaatacgtggggcctctaaatctgtagctaccattcaaagttacataacttcaatgaaagtgctttattcttgggctgctgaatattcggtcgatattgaagatcgatggaagaaagcagaatggtttaagatttgggaaattgattctttaagggattattgttctttgccattgagacctccttcggaacggaaagaaaaagttgtaaatataagacaaggtcgcccagttatttctgcaggtgttaattcatcaaccaaatacactcgtattactttcattgcggattatctgagatggcttgctaaaattttgaatagaacttccagcaagagcataaatattgaaatagaggcaatgtatcaaaatattaagtctcatcgtcccaagatgaaagggagatcagtaacccctcgagaagataaggggcttgattctgacttaattaagaaagtaattgaagtatctaaaccagggcatgatagtaacccttatcaaggttatgctttacaagtgcgcaatgctgcaatcatagccctgctacattatttaggcattcgtagaggtgagctactcaatctgagagttgatgatataaactttgtcaccaatgagctgaggattgttagacgtgctgataactctatagattatcgtgtttatcagccattagtaaaaactgaagagcgaatcttacctataaatagcagattggctgagataataagtgaatacattataaagtatcgttcaacttttccacacgctcgtaaacatccttatttatttgttacacataaaaaaggaggctatcaaggtgagcctctttcaaatagtggatttgggaagttgatgtcagctttacagggtatagctgaaaatttttcaccgattcacgcgcatgcctttaggcatagttggaactataatttttcaaaagtcttagatcaggtggaaaacaagcatagccctgagaaagaagaacaaatgagatcttaccttatgggttggaaagaagcctcgggtacagcggctacatataatagacggcatataaaagaaaaagccaaagaagcaattttggactttcagcgtagtattagaggttcaggagtaagctctgatgattaa

SEQ ID NO: 239033 - DNA, 1080 bp, Klebsiella pneumoniae
atggataatattgacgatatcataaaggacgctattcaaaaggccaccacggagcggggcaatatttcgatactgattgctggccgttctggggtagggaagagcacattaatcaacgcggtattccagcagaaaatggccgaaacgggccagggtaaaccagtgactcaaaatacgcgtgagattacgaaagagggtgtaccactcactatttttgatacccgtggtctggaaatgtctcagttcaaggagactcatgctgatcttgaaaaactgataacagaacgctcgtctgacagagattcaaatcgccatattcatgtcgcatggctttgcatacaagaagacgggcgtagggtcgagcaggcagagattgatttacacactatgctggctcgtcatatgccggtgatttgtgtggtcaccaaggcgagaagtgacaatggtttcaaaaacgaagttcagcgcttgcttcctgaatccaaaaatgtaattcgagtccgtgcgattcaggaagagatggatgatggttacgtcctaaaatcaatgggattagaaagcctgatagaactgacatcagaggttatccctgagggaaagcgtagagcgttggctgcagcgcaaagggccaatattaactataggaagacacagtcgcataaaattgtagcggcttccgcgacggccgcagccgcagcgggcgcgagtccgatccctttttctgacgctgtcatccttgcacctattcaggttggtatgattgcgggtattacatccgtatttggccttgagctatcaaagggaacccttaccacgctggtggcatcggcgatcggcgtcgggggcgcgacgtttttaggccgcaccgttgttgttaatattctgaagtttttcccgggagtcggaacggttgctggtggggcaatatcagcagccactgccagcgcaatcaccgttggtctgggggaggcttacatcaccgtgctggctgaaatttttactcaagatcctgatgcagagccaactgcaacggaaattggcgaaaagcttaaagaaaaaatgataaagatgggctcatga

SEQ ID NO: 239034 - DNA, 1890 bp, Klebsiella pneumoniae
atgctccagggaaaaacgacatcaacgaaagagctggtaaaggttctggacttgattattgaagcaggaaggcctgttacggatgactcattatgcatctttgccgactgctgctggaatgccttatcgtcatcctcaagcatgtattcggcaggagacgccctttgccaggtgtcaacgtatagctgggatgttgtaagggaaaaggtgagagcgaaccttcattctcatgatggctggctttggctggtttcctgggcatgtattctctctggtagcccctcagaggttagctaccaggatgcaataattgcattgaatagtattaagtcaaagtggccaaagcagctaagggaaaaacattctctgtttgatttcataggcgggaggaaagtgcaggattgtatcattcttggcgctgcaaaaattatcctccaaaaccctgaggaggtcgggcttagtacacttgacgccatcgtagataaaggacgaggggtgtccgccagctgttttgttgggttaatggaatgctatgcaaaagcaggtattgagttaccggatgaagtcactcgctatccgggaagagagaaagatttttatagcgtttacgctgaaattgatgtgaattgcatcggtctcctctctgtgctggctggaaacgataaccatcaggttttggatgagattttacctgaacacatgcttgagctcggcgcgtttttgaatataagtcgctttcatcacctcagcctggaagacctgctacatcttgaaacaacggataaagatattgatagaagcaagtttttgtaccagatagctaaagcttcaggccttgaaccagataaactcagacagcaggctgccagtttaaaaaggcagtgcgagggaaaaacgcttgtactggtttcagcctttggcaggcttcctgctgtcgatgcagacatgtctccagaaagggtcgatatcgatccagacgatttcgatgatttaatttcaacaattctgcacgccagtcagttctacagtgttttagccgccactgttctttatcagcacaaaacacatccaaaagtcatagacggaattaaacgcatccttatgcaaggagagggaacagctttgtttataggtacccggtttattacggatatgccggaccaggattggcagcaattactcctgcaacgactggaaacctctatgcctgagcagggtgcttcacacttgtttgaggcccttaccgaacctttcaattcacgacatgaaagtattgcaaaactggggttacggagtgaaatgctggatgtagcacttccggcggcctcatttgcagccaggcttccccagtctgatgaattatctcaggatattcgtctcatatatgaagactggaagctgcgggagaaaccctatccagagaatggtggtgttatcccggacagccctcgtgatgccttgtctggtattttggtcaaggataagggcgacgctaatctggcacttattcttgagatggtgcaggaaaaacgaacaaaaattcgtgggaatggtgagaaggcactcaagaatatgctcgatggatctgccgaattacagagaaacatttccaaatggatcagggatggcgtttgcaaacccacgctgttacgacagattattactgaagttaccttgcacccagaagctgttatgacgcttatacctttcctcaaagatgagtcatccggtattcgatatgctgctaccgcacttcttaacacgcggttcatgacactcgagcaaatcgaattgcttgcccgcgatctttcaaatgacactgaaattgagattagagaaatcgcatctgcaacactctcttcacttatgcccggaaagggggtgatgtaa

SEQ ID NO: 239035 - DNA, 1167 bp, Klebsiella pneumoniae
atgaagaaagatttaaagagtataactcaagtattgagtgtaggctttagtaatgtgctattgactttctttcaagccatattacttacaaggctattaactattgaggatcgtggccatgtccagttatttatagttagcacaacaatattttcgtcttttttcatttcaggcgcaggaaacacaattgcgtattgtgtccgagatgggaagaaaaaaggatatgtagccattttggctacattatcgttatttttattaatagggcttgtcgtaaaatttttattaagtaatcaaacatatcagcttttattttttattacacaagtggttatgctttgtgtgatgcaacttacaatagagttgttaaaaatccagggtagtctgaaatactataagttgttttcttttttatctccttttttcttttttgtgatcacaactattgtatttatgactcacaagttagtaagttcagattacgcaattttgatggttattttatctaatacgttatcaagtatcatgggagtgtatttcatatataaagttatgaatgaaaataacgcaaatgatgatataccccgtttagtgtttataaaatattatattaaacagtatgcaatgcaagtatttggcattgtgacgaataatatggataaatatttaataggtaactttacaggtatttcagcgctaggtttatactcaacagcagcagcttttaacacattacccctcaaattttataatgtcttatcggattatttattctcaggttatgttaataaaaaaaataatgaaaaaatcgttttacaagttgctatatttggaggggttattggttgtttatgtgcatttgcattttctgaactactaataaaaatagcgttcggtgaaagatatttatcatcgcatgtatatcttccttatattatcatcaatatggtaattagtgggattgcatgggtgttaacacaaaaagccttaatatcaggtagccaggtattaatcataataaggcaactaattggattgattgcatttgcagctattttcttctttttgcaaccttatgggttgtggggagcgatcattgcattaatgactggtagtattattagactgataatatcaattcttttctttataaaaattaaaatataa

SEQ ID NO: 239036 - DNA, 384 bp, Klebsiella pneumoniae
ttgcaacagtgcctgcgcgagcagcctgaagcggtgctgaagcgcctggagcaggcggtgctgcgtggccaccgtatcgtggtctcggccatcacttattctgaaatgcgcttcggtgccaccggcccgaaggcctcgccgcgccacgtccagctggtcgacgcgttctgcgcccgcctcgatgccatcctgccctgggaccgcgctgcggtggacgccaccacggagattaaggtggcgctgcgcctcgccggaacgccgataggcccgaacgacacggcgatcgccgggcatgccattgcggccggcgccgtactggtgacaaataatgtgcgggagtttgagcgggtgccggatctggtgctggaagactgggtaagataa

SEQ ID NO: 239037 - DNA, 426 bp, Klebsiella pneumoniae
atgaaactacaacttttcagcaccgggaaagaactcccgccacaggcccatccattgtttgccgatctggccagctgcggttttcccagccctgctgctgactatgtcgagtccgatctggatctccatgattactgcatacggcatccgagcgcgacgtactacctgcgtgccagcagagacagcatggccgacggcagtctgtacaatggcgatctgctggttgtggacagtgctgaaaagccgcggcacggcgatatcgttgtcgccagcatgcagggggagtttacggtgaaacggcttctgctgacgccgcgactgacgctgcagcccatgaatgcctcctggtcgccgatttatcctgatcccgacgagctggatatctttggcgtcgtcacgcatatcatccggcactgttgcaaatag

SEQ ID NO: 239038 - DNA, 426 bp, Klebsiella pneumoniae
atgagcaagcgacgctacaccaacgaaaaaccacgcattgagaaaaaaattaataccgctgctatgaagattttgattgctctcatgccacggcaatacccacaggaagcgtggtcacgcggcgaggggatgatttattcaaactgcatgtggtatcagacatgggaagtcgtcaccgttgactactggggggaggcagatagccgagaagcgtttgatattctccacgaccagctaatcaatgaaaccactgattgggatggcattgggtatgtgtatgacgccgaaagcgcaaccggggaagaaattgataaagagcagttttattcaccgtggaggcttagcaacaaaattggccgtgctgaaattattcgtcactgccgccagttggtaaaagaaggcgtgaaatgggagcgtgcagcatga

SEQ ID NO: 239039 - DNA, 264 bp, Klebsiella pneumoniae; identical to SEQ ID NO: 195890

SEQ ID NO: 239040 - DNA, 927 bp, Klebsiella pneumoniae
atggcgacgaagaagacgaagccgccgattctaccgcgtaactatcaggatccgaccggggccgatgcgctggaacgccgggcaatgaaagacttcgccaggcggatgaataagattggcaaagcgtacaaatcagcactcgacaaaataccttcctccctcgcagtaaacgccagatacgaataccagctaaacccaacgctgctctccatcatcctgaatgacgccagttacctggtggatcaggtgctgcttgacggtggcgattatgacctgtggttttatgagtatgttgacttagcagctgagaaaggaactggtcaggcatacgcaaacctgagtcagcaatcgccggtgtacgcggctggtagagaatcactatctgcaatccttattagcgagccatatcaacgcagaatggccttggttaacgcgcgaatgttcgaagagatgaaaggcctatctgctgaggttaagcgtgatatggcaagggtgcttactgagggcatcggtagaggactcaatccgcgtgaagtatcccgcaatctcaccgagcagattggcatagaaaagcgacgtgctaatcgcatagccagaacagaaatcactacagctctgcgccgtgctaaatgggaagaggaccaggaagccagtgagctctacgggcttaaaacaaaacttcttcatatctccgcactgtcaccgacaaccaggcacacacatgccgccaggcacgcacatctctacacaaatgaggaggttcgcgactggtatgcgaaggatgcaaacagcattaactgcaagtgtactcagcagtcagtgttggtcgatgaagagggcaagccgatttatccggacaccatcaccaaactcaaacaggaatacaaaacgatgcaggcgcgcggttacgcctgggcggagaaataa

SEQ ID NO: 239041 - DNA, 450 bp, Klebsiella pneumoniae
atggcacgttatcgtcgcgttaatatcgacggtcagtctctgtacaagaccgaaaccaaactcgccgccaccgcacttcttcctggcaccgcggcggtaatcaactcttctggagcctttgctcaggcagtagctctaactggccgactctatatcatcgactgcgcttatcaccagggtcttggcatccgtgatgcggtgcctgccggcgactctgctgtgggtaactacgtagaggaaggtcgtgaactggctttgctctgcgcgcctggtgcgtacaagaaagacagcccgattaagctcggctctaatgggcagttcaccctggcaaccgctgacactgattcggtgattggctacagccaggatgaattcaccattgctgccagcactaccgaattcatccgcgtgcgcatgcgcgttggcaccgtggccgccgctggcgaataa

SEQ ID NO: 239042 - DNA, 2637 bp, Klebsiella pneumoniae
atggcagaagtaccgttaccaactccaaccgacaacccggtgcccagtactgatatccgggacgcagtttatgccggcgccatgctggataaggttgtcaccagtaccgacctgacatacaccgatcgcctgggcggcgagcactacaccgtagacggaatgaaggcggaaggggataaagttgttgaggaaacccggcagaacctgatccctctcagtcgtcagtatatgacattggctgatgctcaggcagacatcgcgaatattccagaaggcagcagcacctatgttcgcagtcaggacggaagctctctggccgatgagtacatcaacaatggtggcaccttacagcctaccggacggaagatgccatccggggccgcagttgaactcatgtcagataccgtccagcgtttaatgacggcgctgcacgttatggcggagggcggcacaagctctggttcaggtattgaaagcagcgatacagtgcagaatctgatgaccggatttaacgtgctggctgagtcaattaataatctgtcagtgggaaaccagcaaaatgccagcggattatcaaggctggtctcatcagtccagatttgcactgaaatgctgaacactctcgcggctgagatcgtaacccctgacggcgcatcacagtatggctatgcggcattttccgtgcccggcacagtcagcgcatccaatggatcatttggcaccgatacacgctaccgcaggactggtctgatcccggttcgcaagggtgacgttgtgcgcctcacggtgtacaccacatcggcaaccgcaggtcacgcagctgcgctgtacgatgcatccggagcatatgtgggtccgctggggatcatgtgcgcgtcatatgcggggtatcaggcacggcattaccagtgcgaaatttcgcaggacggctttgttgtcgcgaacacgctggaccagagcgcatcttcttctgctgatgtgactggtgcggccctgacgattgaccaccgcttccgtggccgggcagcggatgcggttattaaactgacgaaggcggatttaatcccagtccgtctggacaacggcaacattaacgccagctcaatcacacaggacgggatcgttaactattccaccgggctgtattcctgcaccggcggcaggctcctgttcagtggtctgcctgtagcctcatcgccggggcagagcagtagtctgtataacgttgttttctacgatgcaaacaaggcgcttattgcgtatcgtcctgtattctccagttcggggtatgtggtcattcccgaagaggccgcgtactgggcgcagcagataatcaccgacagaacaccggactggtctgctgtctcaatcgtttattacaattatgtctataaagacgagctgcataagttgctgtcgtcagagcgcgatcgcctcggactggaatatccgaatgaatactggctgcaggatttcagcggcgctacggatatcgaatggatccagaacgcgatggactgggtgcatgacgcgggcggtggctggctaatcctgtcctctgactatgtgaaaaagcagttcatcatctccgaagccgtcatccaccgcagtaacgtatgggttgtactggatggcgttgaaattaaattgcaggacggcgtgcatgacaacctgtttcgcgctgccggtgttattgtcaatcctgacgaccccttcggtctgtgcctggacctggaaataacgaacaacgtccgcttaattggcacaggctatccgaaactcagtggcgctgatgtggcgtattacgccgatattccggcaggtgccgggccgcgctactggattggtgacgaatatgggtggcgtggcacagggctgatttactacggtgcgcagaacttagagatcggcggctttaagctccagaacgtaaaaaactggggggccgatttcgggtacggtgccaagtacggctatatccacgatatcgacctgtggcagccgaacaaaaacggcgacggcatccacttcactaacggggccagtcatatgcgcgtccgtcagattttcggctatgcgcgcgatgactgcctagctatggtcaatagtgatgactccctggtttacggccctgacaaaatcccgacaccggggtcaattcgccagtggatctacccaacctgtcctttctggtacgggtgggcaggaaatgaggccgtgggaaccgacaacgatattcacgatatcactgctacgaatatcgggttaaccggtaacgagcaggtcagcaccattctgaccacgcagtttaaaatctacaacgtgacaatcagcggtatcagcagcgtcaactatatgactccaggccgtggctgggatgaagttaatgcgattctgaaatcgtatgccgggtttggggatgcttcccgctataaggcaggtaatgtcagcaatatcagcattaataacatcattgagtgtgcgtcgaaaaattacagtatcgatataacgctggaggggaggaatatccgcgtcaatcgttatatgaaactggacacccgcgcgaaaacaaaaggtgcgctgaacatcagcagttcagccgccccgtatgtaacgacctctaatattgtggaataa

SEQ ID NO: 239043 - DNA, 1095 bp, Klebsiella pneumoniae
atgactatattaattcaggattcattacgtcgcgccgttgaagctgcctccggcggtgcgcagactgtactttataccagcgccggcgacccgtcgtttgtgaatattattcccaaatttgacgtcagcacgattgatgcatcgctggggtcgggaacgcatccggcatttattgtgaatggcgtcgaggtcgatcagattttcgtcgggacgtatccagggagcattgtaaatggtcagttactgtcactgcctgaccgcgctccagctgtatccgttccatacaatgacggcatcagcctggcgcgggctgcaggtcctggctggcatgccatgactaacgctgagtgggctgcaatcgcattactatgctattcccagggccattccccgcgcggcaatacaaaatgggggctgtcatctgacaatatcagtgaaaaggggcggcgggttgatggcatgacggccggggcagaatccggaacgggtctgacgctgacgggttccggcccggttggctggcggcacaaccgggattacgctggcattgcagatttagcaggcaacgtctgggagcaggtgacgggagtccgattctgtggtggtgagctgcaggtaatggcgaataacaatgcggcgatggggtctactgaccactccctgtcgtcaactgcgtggaaggcagtgagcggcgtcgacggctccctgctgacgcctaccggtacggggaccgccgggaccgattcctgggtgccgaccacgaccaactccgtgcggatcgacatatcgggaacagggaattacacactggtttatggtgagaatacgctgtttacgagcgcccgaaatccgggtgctacgccggtagcagaagcggcgctaagagtgctgcgcagactgatgctgttcccgctggcgggcctggtttccgatgattcgctgtcgtactcaaaaggaggcgaggtgatgacactgcgaggcggtgcatattcgaacggtacaggcggcggaatttacgcgctgctcgctaaccgtgggcgcacatccgctggccaggctaactctggtgtccgtccggtatattacaagccttga

SEQ ID NO: 239044 - DNA, 282 bp, Klebsiella pneumoniae
gtggcctcggaagtggccaagggacggtatgcgatcggttttcagcaggtgagcgaactgctgccggtgcccggcgtaaccttcgtcggcgaactgccggataacctgcagtacatcacccgctttgccggggcggtgaccatcagcgccgaccacccgcaggaaggcaaggcgctgctgacgtatctggcgtcaccggcggcgcaggagaccatccacgccaccggtatgcgaagcgtagccgccgccgcgccggtcagccagaaggatactgttcaataa

SEQ ID NO: 239045 - DNA, 1305 bp, Klebsiella pneumoniae
atggcattggttgttgtaaattttgccaatataattagagatctaggagtttcttctgcaataattcagttaaagacattaaaccaaaagttgattagtagtgtgttttttttaaatttattttttggttttattcttttgttttcgatatttttctttgctgatgatatttcatgtttttttaatgaaagtaaactaactgatgttttgatgcttatagctttttcttttccaattgcaagtattacaagtacgcatttatcattaatggaaagagaatcaaaatttaattcaattgcgaaggttgaaatattttcatcaatcacagccttaatattaggtgtctttgtctcatatattggtggcggagtgtatagcctagttacccaaactttagcgtattcatctttaagtgctattggactatttttttataccagatggataccctcggcatacttttcattcgctgaagttagggggatttttaaattcacttcaaatcttgtgttatttaattttgttaattatttttcaagaaatagtgatcaaataataattggtcgttttttttcttctactattcttggtcagtactcacttgcttatcgaataatgctcttcccgattcaaaatatcacatttgtattaactagatcattgtttcctttgcttagtagaaaccaaagtaatagtcagtattcattgtcattatacttgcatgtacttaaaactttggcaatagtgataccccctctgatggttgggatagctgtcgttagtgatgactttgttaaggtggtgttgggtgaaaaatggaatggtgttgctattttaattttatatttagcaccaactgctatattgcaatcatttattagtactaccggttctgtttttatggctcaaggtagaacaaatacattattccaactgtcattgtttaatgcttttttacaggttggcgcttttattttaggtgcaacagttagtgttgtgtttattataaaattatatttcatcgcaaatctagttattttttttccaaatatatatttcgctatgaggctgttgggtggtaaatggcgtgattttttgtttatttcttataaaccgttattatccgttttattaatgctggttttgttattgtttttgaaaggctacttaaacacgataacgactttcccttcactccggttagcaattttagtttttttaggcggtgtaagttacattggttttctttcacttttagagcgtaaaaagccgcttgagataattaaagatcttaaggatatgtaa

SEQ ID NO: 239046 - DNA, 135 bp, Klebsiella pneumoniae
atgtgggtaatgatgaagcttaaacgcactggagaagtggtttatttccagggttacgacagcaaggaagcggctgaaatggcggttaaggttttgaactccgtcgccagcggctgggaattctatatcaggtaa

SEQ ID NO: 239047 - DNA, 768 bp, Klebsiella pneumoniae
atgagcaagggaaccattatctgcctgtgcgatatcactggcgtcatggctgatccatgggtcgaagcaggttatcgcgccgtcctggtggacccgcagcaccctgagacctcgatcgacggtcctgttgagcgcatatcggcaaccatccttgaggcgatgccgcggctatctcagattatccgctctgaaaacgtcgtcatcgtcatcggcttcccaccatgcacggacgtggctgtttccgggtcccgctggttcgagtccaagcgcgccaaagacccgcatttccagggcaaggccgcgctggtagctgagcaatgccggatggttggcttggcggctggctgcccgtgggcattcgaaaacccggtgagcgtgttcagtagcatcttcggctcagccgattacacgttccatccgtaccagttcactgggctgtgcgcggatgacaactacacgaagcagacctgcctctggacgggtaacggcttcaaggcgccggcagaggatattcacccgcaagtggcacaggcgatcgaacgcgtgaagcagaactttggccggatggtgccgaagaagaaggcgctggaggtgttcaacttccatggtgagaacctcatcgctgactggtatccggacaaccgcattcacgaatgcccgcccagcgacgagcgcgccaacattcgcagcgctactcccctgggatttgcaaaggcggttttcatttcgaatgcaccccaccccaataagaaacgggaggcagcatga

SEQ ID NO: 239048 - DNA, 915 bp, Klebsiella pneumoniae
atgtcatcagaaactagtttacgtagccagcttgagcttacaaatgatcagcaaattgatgtccttgctgcgattctcgacaatgagaacgaacaggcgacatcagcccgtagtatgtctatcgaacctcaagaagttcttgagaaacaccccggtattactccttttaaggatctcgtttcaaaagcatcagagatcgttttggcaaggaatggtaatgagatagcgcaatatctacgctctatccttgaaaacaaaaatgattacctaaaccatcgagatgaagcagtgtcattgtcaattgcgctgaatatttcacaatacatagctccgagatttcgtgcgcttcctccatcacctaaaagaacgtctgatgatgaaccaaaccaattaagcattgaccgccaagtcatcgatatgcactgggcatggatacaaggacagaaaaaagcggtaggtgcagaagagtttgagcacctatttcagcgagaagaatttgactggatcttggcagaaaaatttgcgcgtctaaattggacaactgacgtaaaaatcagggcattacagatcaatgcaaaccttcaatgggagttagcacagtatcaatctaaaaaacaccgtgattcatggcggaaacttcaacaaggagatgtccgaggtggcaagttgcattcattggggattgcacaagttactgagagacttgaatgttcagtaacaaaacggaaaaatcttgcaaaacatattcctcattgggttaatgtttggcttgcttcccgcatatccgataaatcatatatgagtttagcgcagataatgagatttatgacaggggaaagccacgatgagaagaggcttaaatcatcattaaaagctgttttacaacgtttatatttatatgagaaaaagatgtga

SEQ ID NO: 239049 - DNA, 498 bp, Klebsiella pneumoniae
atggcgggatcagattttatattacctatggtagcgggagccgtgctcagctgggccagttacagcatggtcgcgcacgttacatcaaaacggcagatcagcactctacgagcaatctcatggggtgttctgggaacgctttcactagtgctgggagtaagtgcattcgcagctgttagcactcaactctcgggagaaaaacaaaatgccttgtgctcgattaacgagccagaatgctatgcaaaagcacatcataaccccatcaaaaagtgcaaacaggtaatggatgaaaaagcgacgtttcgccatgtgtggctggatcgcgaagcaccgcaggttttcagcacctacctctggcacgacgagcaaaagaaaacgattcaagcatttggacaacaggctaaggccattaacagcatgaatatgctgataccactgcaatatttttgtgtttttaacgccaacaccggggaagtcatcgcggcttcgtttgagtaa

SEQ ID NO: 239050 - DNA, 2610 bp, Klebsiella pneumoniae
atgtcaatacttcaggaaattcaaagctggtccaccaaactaccactctggcaacaacatgctataaatcgaatctacgactcaaggcaacttgaagataaggatttggatgacatatatcttcttcttaaacttcatcatggaattcctgagcaacaggaaatacaagcattaacatttactgaagatcaaatagctgcaatagagaatatatcttcactaattcagataaaatcgataaaaaacctagaaaatataaatgcattagctgagaaagaagaattgcctatatctcctaccggactcaccataatctatggtgagaatggtgcgggtaaatctggttactcaagattactaaaaaaagtttgtagagctcgagatcagagagaaccaatccttcctaatgctaaccgccccccagaacaaactggtccggccagggcagaattcgacattattaaagacggagaagaaataacactcaactggcaagatggcacccctcctcctgaagagctttccaatatatctactttcgactcattttgcgcaagagcctatatagataaccaaggcgactttgcttatataccttatggtctagacattttaactgaattagttaacgtgtgtaataaattaaagttaaagattgagcatgacacgaaaacgaataaaccaaatctagatatttttagtgagctatcaaacacaaagacccaaactggtgttcttcttgctaatttatctcatcagacatcaatacaaaaagttgaacaacttgcctcacttaaagaggatgaaattacccgtttagatacactaacaagaacattagcagaatctgaccctaagcaaaaagccctgatattaaggcaaaaagcactacgttttagagggctttacaaaagaataactgaggcttcaacttcaatatcatcaaataaggaagataatttaaaggaattaataggtaagtataaatctgcaagaaatgcggctgaaattgcggctaaagctttcaaagaaacccctgggcaacttttaggaacaggcagtgaaccatggaaaatactctttgaagcagcacgtgtattttcaaaagaaaactaccctgaaaaacacttcccaaagttagaagaaaatgacaaatgtcctctttgtcaaaatgagttaggcgaacaaggagtgacacgattaatttctttcgatgaattcatacagaaagaagcggagaagttggccgtaacgacaagaactaatgctggaaatgcttataaggagatagagaagttaaacttgagtctaaatattgatgaagcattaaataatgagttatcagactactcacctcaattattagatttatgcttgacgtttgaacaacatttaaaaaagcgtcaaggtgatattatcttagcagcaagtgaaaaacttccttgggaagacgtaagtaagttacttgacacacctaatttaatcattaatgaagcagttataaaacttgaatctgatgcgaaggctttagaggcaacttttaatgcagaagctaaacaggctatggttaatgagcataacgagttgatgtcacgttctaagctaaaagagtttaaagatattgttatcgactgtatcttaaaattagacctttgcaataaactaaatcaatgttctgccagttgtgggacaacggctatatcacgaaagtccactgaattggcgagatcaatagcgacacctgaagttattgaaatgcttaacaaagagtttgaagctctaaatgttcatgagctaagagtcacaatgcaaaactcttctcctggaggcaaaactcaatttaaattagtaatggaaaaatctaatggtgcaagaccatcggagattcttagcgaaggtgaacaaagagcaatagcaattgcttcattcctgactgaagttaacttatctaaaacaatgtccggattaatctttgatgatccagtatcatctctagatcatcgccgtcgctggcatgtagcaagacggctagtagaagagtctaagaaaaggcagttaatagttttcacacatgacatttattttttatgcattcttcagcaagaatctcaagagaatgatgttgtaaaccttacacaatgcatcagaaaaacatctcaaggttttggtgttcacacagatagattaccatttgatgcactaagcacctcaaagagagttaaagcattgaggggtatgcatagtgaagtagtaagacatcataaaggtggagacgagaatttaaccaaaaaactcacacaagatacctattaccatttaagaatggcttgggaaagaagtgtcgaagaaattctttttcaaggtgtagtgaacagattttccgaaggaatttccacacaaaaactaagatatgtgattgtcgaagatgaagattaccgattggtagaatctaatatgaccagatgttcgaaatttgcacacgatggtgctgcaatcgcaatggttcccactcctcatcctgacgaattaatcaaagacatcgaaatattagaatcgtggagagtattgatagagggcagaaaaaaaggagtcgaggccagaagggcatag

SEQ ID NO: 239051 - DNA, 1080 bp, Klebsiella pneumoniae
atgcgtgaagcaaaaatattagacattctgataaatagaattgctcgtaatcactttaagagacaggcacatcgaactacaaattcgcatgagttacaccagttcgcatctctttttgattcagactacctaaaaaaactggctcagttatttattatgacagataaaaattcaactgatggcctgcattctcattattatattgttgaggccggctggatcgataagaaaccactggttgcatttcctccagcgctaaatttaccaaaagtagaacttggtgatgccttacttatctacagtaatcaactcgttgataaggaaagaaaatttataagtgtgggtgaagaacgtgctgtaattattcaagctaaaatcactggaaataaattgcgtcttcccaaagtaactgtaacctctggagaatcttcaaaaaaggagtttgaactttatagtaaatggccttcttttatgcttaagaataagagtggttacacttccttgtttaatcttcctcacccactgagtaaaagtcagccatatccctatgcattttatctggcagcaagaaaatcttactctaagaatccagactggcgatgtcattggatgggggctccatcaaaaaagacagaaaggtgtaacatatctgctggtgatatattgcttggtttgaaaactgggttgccagtaagtaactaccaagtaggagcagatttaaagtcaaacccggagtgggccagacttgtaagagctgtattaatgtatgtatcttctagttggactaataaaggatggtgtggtgttactatgccaacgagaataaaaggaagtcatttaacttctcttaatttatatcttccaaagaaatatcttagaacgaatatatttaatatgggttttaattcatcattaattaatttattgcctgatgtgccggtatcatgggggagtttgtctaactcaattaaaaatggtccttctgagagtgatttctcaggcaagttaatgattttgagaatgactcgaattagttcagagttcccatttgaaacaaaagatgtcgaacaagaattataa

SEQ ID NO: 239052 - DNA, 1857 bp, Klebsiella pneumoniae
atgcttgagctaaacgtaagcaaaatcaacaacgtagtgacatttaccgtcgataaaagcagcattgccaccgcgaagaaagctgccgatgacctccataagtatttccagaaaatagccgatcctaaaatccgcttccggcagcagaaacaacgccgccagaaagctcgacaaatagctgatgatgctcgttttaatgataaacctcggaatgctgccgaaatgaaagcgcaacgagcagaagagaagaaaaaactcagggaggaaaaagccaatctgagagcgcagcagcagctacagcgccgccaggagacagcagagctaaaacaacgccatgccaatctccagatttccgggattaaagggaaatatggcctcgacccaaaacagcagtatgaagcccttaagtttgttcaaaagcaaaccgcagaatttgccgcaggtaatattagctcacaacgaatgaacgcttccattcgtgaacgtataacccttcttcgcagggaggcagcagccgcacagaaagccactcaggcacagaaaacaaattatgtagcggctgctaaaaagctgaaagatcctaacagcaaagaatttggcattgccagattgcaaagtgctgcaacgggaattgggagcatgtttgccgcaggaaacctcgctgcacgtattaaacagacaggggatgaaaacctcgatctggtcagaaagtcggcccttgtaaaaaccaacccaaacgctatacgctcaatggtggcctggggtcaacagcatggggttgactccgcgagtgtggataaagcaacggatgggatgaaagatgtccgagaaaggctgggagagtcgatttcaaactctactttcgatcagaagtctggaaaatggaagggcggtaatggtgcggtagacaacgttatgaacctgttcggatggaacatcgaccagcttaaacaattccaagacaatccattagattttgttcaggcaaccgtaaatgaaggtcaacgtagaggcatgtcccaggcatccatcgggcacctgatcgaggattacggggatgacctggcccactacaccgacatgtttttgaataacggtgcggagtttatcaagacgctgcgccagcttaaagagagcggtcagacgctcaacgatgagcagattaggcagataatggagtatggtgacctcaccacgaaaatggcggctctgacaaacggcctggatattaatctgtttaccgggtttatggatggatttggaaaatctggtgatcaactaactgaaaacactaagaatctcaatgaaagcgctcgccttcttggagagggattaggcaatctggctacacaggtgacaggtgcaacagttcaaatcagtcagagcgtagaggcgattaatcagtatctccgtgacaagttcccgtcctggtttagcggtgataacaatcaacctgcggcccaacaggtgtataacggggccgtaggtggctcagccgatgctgtggcagcttggattagatcaaacaccgggatcgatacgcagagtgttggccctgctgtaatgtcatggctggggatgggaacatcatcaacagggacagcagccaatcaatatgacaccaatggctctcctctccgtgatggtgctcaagcgctgccgtcaaccccggcaatgagctatcaggtgaatccggtctttaatttaacagtagctccggaagtgccgctgacgatccaatctgacacaggaagattagctgattacatcgacttcaacgctagagcgtcagcagcgagttttgaacggtcgttaacgctacaaatgtcaagcggtcagagcactgctggcggctaa

SEQ ID NO: 239053 - DNA, 339 bp, Klebsiella pneumoniae
atgaccacttctacctcctataacaccctacaatctgtcctacaaacatatcacgataattatgccatccctatgctggccagctgcaccgaaatgcagcgtgacagaacgcctgaaagcctcctggcggcgattaacgcgcaagacctggcacaggcaatgctatctcatattggcgacgtggcaagccgtatcgcggctacggaacactcaagccttacacaagatgaggcggatattatttcagaagaaatctctgatgctctgctgctgctattgcagtgcattgaggagacgggcgaaatggcactcgaactggcgccgaacaccaactactag

SEQ ID NO: 239054 - DNA, 123 bp, Klebsiella pneumoniae
atgatcactatgctttattggacgctgtttatctatgtaatagtttattattcagggatgttttccgttaaacggaataataataatgagcagaaaagaacgaaacgtactggcccgtattga

SEQ ID NO: 239055 - DNA, 264 bp, Klebsiella pneumoniae
atggggaaataccacacacaggatgggaaaatttacattcactataaagatggtatctggcgtcagaatgtaaattatctcgcaggtgttcccacccagtataattgcaccacctatgaagaacagtttgagaagattataagtaacatcgaaaacggtaaattacgtggtacatacgcctctaaacggcgttataaaatgatggatggtagattgtatagggaaacaaataaaacggcttataagcccatgtgtaaccaataa

SEQ ID NO: 239056 - DNA, 657 bp, Klebsiella pneumoniae
atggcggtgatcaatgccaaacgcgtataccgcatcatgcgtcagaatgcgctgctgcttgagcgtaaaccggaaataccgccatcgaagcgggcgcatacagggaaagtggccgttggagaaagtaaccagcggtggtgctctgacggcttcgagttcagctgtgataacggtgaaaaactgcgggtcacgttcgctctggactgttgcgatcgcgaggcactttactgggcggccagtaacggtggatatgacagtgaaaccgtgcaggacgtcatgctgggtgccgtggagcgtcgtttcggtaacagcctgccgacatccccagttgagtggctgacagacaacggttcagcctaccgttcttatcagacgcgtcagttcgccagaatggtaggactggagcctaaacatacggcggtacgtagcccggaaagcaacgggatggcagagagcttcgtgaaaacgatgaagcgcgattacatcagcatcatgccgaaacccgacgggttaacagcggtaaagaaccttgcggaggccttcgaacattacaacgaatggcatccgcatagtgcactggggtatcgttcgccacgggaatatctgcggcggcgaaccagtaatgggttaagtgataaaaagtgtatggaaatatag

SEQ ID NO: 239057 - DNA, 252 bp, Klebsiella pneumoniae
atgaacgcagatgagtcaggtgagagctgggtttgcactggttgtatcggagaagcatttttacgcagctgtattgagaaggaaggaacccgacagacctgtcattactgcgctgaggcccacccctgcttctccctagaggccgtaagcgacctgaccgaaaaagcgatagaagcacatttttaccggacgccccctgagccgaacgagatggattatgcccggcttcgccatactgattatgactggtag

SEQ ID NO: 239058 - DNA, 204 bp, Klebsiella pneumoniae
atgactgtatttctcatcctcaccgccatcgcatatggcatcttcaaaaccggttgcttcattcttttagtggtcaaggggtatcagggctggacattattctggaaaaactatgaccgtctccctcatatcatccgttcccgctgccgataccagagacgcttcattttaagacgcatctggaagcgagtcttcagcaactga

SEQ ID NO: 239059 - DNA, 291 bp, Klebsiella pneumoniae; identical to SEQ ID NO: 168200

SEQ ID NO: 239060 - DNA, 1128 bp, Klebsiella pneumoniae
atggactacacaaaaaatcagcatgtactttcacagtgggtgctacgcaactttcgcagcgatgacaccgccctatctgccaaagaaaagcagcgagtatggtgtcataccgtttatatgacgcccgataaggaaaacgttctccacacgcaaccacttccaatatccagtgtggcagtatcgaaaaactgctttcgtcttattgatgctgagacaggactacctttcgatattgaagacgaactgggtgtgtacgagctcctgaccgccggggtcgtgaacgatataattcacgagcacaatttctcacgcctccgtcacacactgccggaagattttccggtagagaaacttgccagtttcgcggtgatgcagttaatgctcaatctgcacaatccgcaaaataaaaacccgtacaaacatgaactgcttgaacagttccatgctgatatacaggatcatttatcagaatacatctattcgataaatcaattgcctcaaactaatcctgagttaatggaagaccatttctatcgcaaaattttgcgcgttgctaattctgtttcttccgaagaagataaaagcagaacgctgtttgttttgtttgggcttttatcaatcctgaataagccgaccctttacgacaaaatcaataaattaagaaacaaaattttttctggcatgagaaccattgaggttattcatacaggccatgatttcgacagcactgaacacaggccagcattcggaatagcacccaacattttttgtctgtataatgatgaaaatagaatatatcttcccttatcccacaatttcactttgtgcttcattactggtgctgcattgtgtttcagacctcgtatagacgtgttctctccacgtcccgagctgctgaaatgtcgccatgatcggagccttaacttttataaggtctcgtttgattacattgataatgtgatgacaactattgatatgtacaatgtgggttcgtccagtaccttctattctgcctatcaactgagcaagcttaatgagtatctggataagcagaacaaaaatcatgattattattacacgccggaaaaccctgtgctgtggcgacctgctcaggaggatgaattatga

SEQ ID NO: 239061 - DNA, 141 bp, Klebsiella pneumoniae; identical to SEQ ID NO: 36145

SEQ ID NO: 239062 - DNA, 1251 bp, Klebsiella pneumoniae
atgatacggcagcactcacctgactgctggaagccgggaattaatctgcccgtggtttctggtttcagtccccgtccgctcaaaaaactgttcacagctaatcagtgctggacctcttttctcgacgccggtggcctgcgtgatatcgaagtcgaagccgtcactaaaatgctcgcctgtggtacccgcatcaccggcgtgaaggaatatggctacgataccccgggttgccggcatgtaaaatacatcaccaacgcctgccacagccgcgcctgtccgtcctgcggtaagaaggccaccgacctgtgggttgccgcccagcttaaccgtctgccggactgtgactggatacacctggtcttcaccctgcccgattcactgtggcctttgtttgaggtcaaccgctggctgcttaacgacctctgccgcctggccgttgataatatgctgtacgctgccggaaaacgcgggctggatattggtattttctgtgccctccatacgcatggcagacggctcaactggcatccccatgtccacgtctccgtcacctgcggcggtatcgatgagcacggaaagtggaaaaaaatcagcttccgcaaggatgccatgcgcacccgctggatgtggaatatccgccagttactgctgagcgtctggtctgaaggcatcgcgctgccgcccctcctgtcgcacatcaccaccggatcacagtggcgcagcctgatactgaccgccggcggcgattactggcatgtgtacatgtcaaaaaagacggcgggtggcaaaaacaccgtaaaatacctgggtcgttacctgaaaaagccgccgatagcgggttcccggctggcgcactatgccggtggcgcgacgctgagctttcgctaccacgaccacaatacgggcgagcaggccacagagacgctgacgcagcgggaaatcgtggtgcgtctgaaacagcacatcccggagaagttcttccggatggtgaggtattttggctttctggccaaccgggtgtgtggagaaaagctgccgcaggtgtaccaggcgctgggaatggacaaaccggagccggtgccgaaggtgtgttacgcgcagatgagcaaacagttcctgcggcgtgccccgttcgaatgcatcctgtgcggcggacgtatggtgtaccgccgtgcggtggccggtctgagtgtacaggggctgaaaatccacgcccgtgacatcagtctgatgcggtatatcccggcctga

SEQ ID NO: 239063 - DNA, 1014 bp, Klebsiella pneumoniae
atgagcaatagccgccaaagtaaaaattctggtttcgccagcgccaccgaggtggcgcgcctggcgggcgtctcccggtcagcggtgtcgcgcacgtttacgcccggcagaagcgtgtccgacgaaacacggagcaaggtgctcgcggccgcagaggcgcttaactatcacgtcaatcacctagcgcgtggcctctccaaggaggccagccgcccggtttgtattctcggcggcaacctttcctccccttatcaatcgcgtctgctcgagcatctgaccctgcgcctgcacaaagccgggcgcgcggtgatggtgatcaacaccgatgacggtgaaaccagcgcaaaagaggcgttgcagaaaacgctgaactatcgttctaccgcgactatcgtgctgtcgggcaagccgcccgtctcgctgattgagcgctgcctgcaaagcgggcagcaggtgatactgatcaaccgcctgggccagtttcctcatgcggaaaatatcgatctcgattacagctcaattatgaaggaagcctttaatcatctgataacggcgggatgtcagcgcctggcgattgtctcctccgccgcccgctcaccgagtatggtggttcgtgaaacccgctttcttgaggctgccgaagaggccggtagcgaagtgacgttaatccgccccggcaataccagctaccagacgggagtcctcgccgcgcgtgaactgttaaaccaggaaaaccgccccgacggcatattctgcgtcaccgaccttattgcctgcggctttattgacgccgctcgccacgagtttggtctgaatattccgcaagatatctgcgttatcggcttcgatgatatcgagcaggccagctggctgggctatcagctcaccaccttcgcacagccgctggccgagatggcggaagccgcctgtgaacggctgctctctccctgcgtgaaaaaaacggggagccagctttttgatgcgcgcctagtaagacgtaaaacgctgcgctaa

SEQ ID NO: 239064 - DNA, 1440 bp, Klebsiella pneumoniae
ttgaccactattgatattgaacagcgcgaagcgactctcaaacgtattatcgtcgaagccggagataccgccctgcgcttcttccagacccgcaaagcgggcgaatatgaactgaagggtcatcaggatatcctgaccgaggcggacaccttcgttgaagcactgatttcaggtgctattaacgaagccttccctcaagatttgatcctcggcgaagagacctccagccagcccgccagcgcggagagtttgtgggtggtagatccgatcgacggcaccgccaactttgcccgcggtattgcccatttttgcgtgtgcatcgcctgggttcgccacggcatcaccgagctgggcgctatttataacccggtaagccaggaactctacctggctcgccgcggccattatgcgctgaaaaacggccagccgctgtgctgtagcgccattaccgacgcgcagcgggcttgcgtggagctgggctggtcttcccgccacagcctgcgccactacctggacgtcatggctgcgatgcttaatcttggtgccagcgtgcgccgcggcggttccggcgcactggcgctggcctgggtagccgaaggccgcaccgacggctacgccgaaattcatatgaacgcctgggactgcctggcggggctgctgctggtgcgtgaagcaggcggccagaccggcaaccttcccgataacgccgaggccattttccgcggtattcccgtgctggccgccgcgccgggcattgctgacaaactggcccgtgcgacgggtattccgctcgccggcgcgccgttgcctgcggcggccgaaaagtcgccgacagcgcgctatcctcgcccgccagtcagcctgatcgcggaagattttcccggctgggggatgaatatctatataggtgattccagaggcgtgagcgacatgacgcagctggcagagcatgatatcggcatcgtcattaactgtgcggtaaatctcgatatcgactgggtcacgatgccggaacccgacgtggcggcgcaccagctctcccacggttcgggtccggttcgctactataagctcgggcttgtcgacggcgacggcaacgcgccggagatgctccacgcgggttatcagctaatgcgttcggcgctgctacaacagatcccggacaaggcctcttatcgcaaccgtaaacgaggcaatattctcgtcaactgtcgcggcggccgcagccgctcggtggcgctggtggcgctgttcatgcacctggagtgcccggaacgtttccccactctcgacgacgccatcgccttgatccgcgataaacgtcagctccatccgcaagagtggtatgaaacgccgaagccgtcgctaacccgcctggccgagtatgccattatacgtgaacgcgccatcgccacagcgaaacagcaccatgagcaatag

SEQ ID NO: 239065 - DNA, 1104 bp, Klebsiella pneumoniae
atgaagcataatctggccgccttctcgattgccgccgcgctggtaagcagccaccaggcccaggctgaaaccttcgatttgcaggcgctgatcgccgcagcaaagcaggagcagccgatgacggtttacgcctcaaccggtaagatcgtgcagcaggcgaaggccttcagcgaaaaatatgggctaaaggccagcggcgtaaaagccgatgccccgcagattattgaaattatgagccgggaggcgcaggccaaaaacgtgcggaccgacgttgccatcattgaggatgcccctgcgggaacggttcagttgctgaataaaggctatgtgcaaagctgggtgccggacgatctcaaaggcagcattgccgcccgcagccaaaatccgctgaccatcgtgttagcccccaacgtgttcgcctataacaccgaacgtcacgccacctgcccgattaccaacctctggcaactgacggaaccgaaatggcgcggacgcgtggcaatgcaggacccgacgggcaaaccggcttacaccgactggttcagccagatggaaacccactacgaccagcagattcgtgacgcctaccagcaggagttcggcaagccgctacaaaccgatgaaaaatctgccacggcagcctttgtcaaagcgctggcgggcaacggcgtactgctgactcattcagataacgacgccgcttccgccattggcgcgccggacagtaaaaccgactttgtcggcctggtgtccacagccaaattccgcgacaacaagcagggcatgaagttgggcctgtgtactgggctgaaaccgttcatcggctggaattacccgagcctcggcgtggttgccaccggcagcaaaagcccgaatagcgcgaagctgtttatccactacctgatgagcgccgacgggatcgcgccgcaggggatagacggcaaaatgtccaccaatcagcaggtaaaactgccggccgatgaggcatccggcattgaaaaatatcgcggcgaactgatggtgtacctgaccaccacggtacaagaagactgggatagccgcagggactggcaggatctctggagcctgaactacaagaaatag

SEQ ID NO: 239066 - DNA, 1080 bp, Klebsiella pneumoniae
atgccgacgattcacttaaataatctgactaaaacctatccgggcagcgataccccggcggtaaacaatatcaacctgacggtaaaagacggcgaatttatgtgcctgctgggaccctccggctgcggaaaaactacgatcctgcgcatgattgccggcatcgagcacgcctgcggcggcgagattgctatcggcgataggatcgttgactcaatagcccacggcatctacgtcccgccggaaaaacgcgggattggcctggtctttcagagctatgcgctctggccgcacatgaccgtagagcagaacgttgattttggcctgcgtttgcaaaaaatcgccgctaaagagcgcatcgcccgctgtcaggacgtgatggagaaattgcgtatcgctgattacgccaaacgctatccggcacagctctccggcggccagcagcagcgcgtcgccctcgcccgcatgctggcggttaatcccggcgtactgctgctggacgaaccgctttccaacctggacgccgcgctgcgcctggagatgcgcgccgagctgcgccgtctacatgaaacctttggcaccaccatcgtttttgtcagccacgatcagtgggaagccatgaccctggcgaccaccattgcggtgatgagcgccggccatatgcagcaggtcggtacgccggatgagatttacgcgacgccggcgaaccgctttgtggccgagtttatcggaacgccacgcctgaatatgatcccactccatcagccatccagcgggctggcgcagcatctacaacagcgcttcaccctgcatgaacaaacccggcactgcggcattcgtccggaagagatcgttctcagccaggaacctgataacaacggtatcccgatgaccatcgataacattatgcctaccggcggaagctgggtgattgaactgattgccgggcaggatcgtctgttccattccacgcagctgcgcccgcgctggcaggtcagccagcaggttcactgccagctcccgaccgcctctctgcacttctttaatagcaacgggctgcgtcacgatttctccatgaattaa

SEQ ID NO: 239067 - DNA, 1821 bp, Klebsiella pneumoniae
gtggcttaccaacccgaagctcgccgccataccgcatggcctcaactccgccacaaactgtcgatcgtcagccaggagcccgccaatctgctggccgtactgctgctgattttgttcagctggataatcctggcccccgtcgtttccgtgctgctgaacgcggtcctggtgcaaagcggcgatgagggccgtaccgggacagcggaaggcgcgctgacctcctggtacctgctgcgcgctctgacttcacgcatgtccgacctgctgctttggacgccgttgctcaacactcttgccatcgccatgactactgtgaccggcgcgctggccatcggcatcgcgctggcgtggctcatcaaccgtaccgatatcgccggcagaaaagggttctctaccctactgatcgtgccgtttatgctgccctcctggaccttcgcgctggcgtggagcaccattttcaaaaaccatgccatcgggggacagccgggatggctggaagcgatgggcgtgcagaccccggactggatggcctatggctacttcccgatcgtcgtcattatgatcctccactacacaccgctggttattctgatcgtcggcaacgccctgaaacgcatggacagccagatggaagagtgcgcccagatacttggcgcttcacataacgttatcgcctttaaaattattatccctctggttcgtccggcgctgctctccgccgccctgctgattttcgccgactgcataggcgagttcgccctgccctatattctcggcctgccggtgcatttcgatacgctgtccaccggattgtaccgggcgattggcacccggcagtcgggcgtggcagcggtgatcgccacggtgattatgctgatgggaatgctgaccctgatgctggatatgaaaatgctgcgcgaggcccgtcgtttcgttacggtgggcggcaagggcaccatggagcgccgccgcagcctgggacactggcgcatcgccgctgccgggctgccgctgctgttcgtcctgctgggcgtggcgattccgcttctgaccctgttcctgtcaacgataatgacgctgcccggccgctttaccgccgataacttcaccctcgcctactggattggtcatgacctcgataccgtggccctgcgtaacggcattctgctcacggccgagttctggcagacggtatggaatacgctgctgatcgtcggctcggcgtccatcgtctgcggtattctcggcctgctggttggctacgcagtgatgcgctgccacttccgctggctctcttccttcctgcgccagctgacttttttgccctatcttgtgccgggcatcgcctttgccgccgcgtttctgtcgctgtttgcggtcgctcgcgggccggttccggcgctgtacggcacgccgctgctgctggtactggcgctgattgcggaaaaaatgccgtacgccagccgctccggtattgccgcgatgacccagctaggtaaagaatccgaagaagccgcgcgcattgccggcgccggatggttcacccgtatccgccgcatcgttgttcctgttcaggccgcaccgctggcaacaggaatcctgctgccgtttatctcgggcatcaagggcgtcagcctgttcgtcatcctcgcgactcccgcaacggatgtcctgaccacctggtccttgcgcctgattgactacaactaccagcaggcagccaatgccgtggtgctgatgatcgcactgatttcatgggctggcacattgatgatccaaaagatcaccggtaccggtcttgcagagggtctggagaaataa

SEQ ID NO: 239068 - DNA, 1293 bp, Klebsiella pneumoniae
atggaaaagttactgaccttgaatctgctgctggcgagcataactctcagcctaattcccgcctcctacgccgcatcaacggatagcgctcgctacacgctggaaaaggtggtgatgcttagccgacacggcgttcgcccgcaaacggttaccgccagcctggaggaagccaccgggaaaaaatggcctgaatggaacgtaccggacggttttttaaccggccatggctatgcgggaatgttgacgcagggcgcttatcagctggctgaatggcaatctcgcggcctgccggtcggcgccggctcggcctgcccgaaatcgggaaaagtatggctctgggcggcaccggatcagcgaactaaagcgaccggatcggcgctgcttgacgggatgttccccggctgcggaatggtcgctcacgtctcggtgaataagttcgatccattatttgataccattgaaatgggtatagccaaaccgaatgaacagctcgtctatcagcaggtaagagaaagaaccggctcttcgcaacaggcgcaaaaaacgcacgcaaaagcggtggcggatttacgccgcgcggtatgcgctgaagacggtaaaagctgcgaatttttggataaagagtgggtcgttaaaataaatgacaaaggtaaagcgaaattaagcggcccggtatcaaaaggctcttcgattggcgaaactattcgtctgcaatatagcgaaaacctgccactatctcaggtagcattcgggcatgcgaaaaatgcgcaagaggtgagtaatttaatggccctgcatgcggaaaaatacaatctggtcagcaacaccccggaatatgccagccacggtggctcgctgttaatgcgccagctaattggagccttgtctgataataaagaaggttcaaaaagtaccgaactgaaaagcccgctggttattctggtcggccacgacagcaatatttcacaaattcaaaccatgctcggctttaactggcagctaccggtttaccctcgcaatgatattccgccgggcggcagtctgattatggagcgttatcttgataaacagaccggtgaaaaaatggttcacctgacctttagcgccagaacattagatcagtggcgtcaactttcgccattgaacgcgcagaatccgctgccggtagccgaatttaaagcgcccgaatgtcatgaaaccgctattggtgagctgtgcccgctgaataaattcatccagctggcagagaaaaacctggtcgatgacggaaaggatttaaccgtattccggtaa

SEQ ID NO: 239069 - DNA, 648 bp, Klebsiella pneumoniae
ttgacatcacactccacgcttgccctggagttaaactacgaacataaatatgaggatatttccaaagagcacacggacgaacttgaaatatctcatgatttcgaatcaggtatcgggattggtaccaagcttaaattccaccctgttgagaaggctaacggcgatgcgggtaacttcttcgacaaaagaaagcttagcgaaaaagaattaaaaattaactataatcaggacattaccgatcggttcagtattgaacctggcatgtctttcaccattaaagacgatgaggaaaaatacaaaccgtctattaaatttaattatcgcctgtttgataaaacaaaactgtctcttcgctaccgtaaagaaataagcgatcgggatgagaaaccaaccaagcgcgttgaccgtattgaaggcaaaatatcgcaaaaaattggcaaattcgatctcggctatacgctcacctggtatcatggcaatgagaatttatataatgaaaaacgctataataccgagcatgaagtggaggttggctatcagcttaccaaacatttctcaccctatattggggtaaaaaacgaggctgtatcgaaaagctcgtccgaacggcagacagaatatatcgtcggcatgaactacaaattttaa

SEQ ID NO: 239070 - DNA, 273 bp, Klebsiella pneumoniae
gtggctagcgttactgtccattgcccccgttgccattccgatgaaatctatcgccatggtcgtagctcttcacaacatgaacgctttcgatgcaagtcatgcaagcgggtttttcagctcaactatacctacgtggctcgaaagcccggtgtcaaagagaagattgttgatatggctcataacggctccggtgtgcgcgataccgccagaacgctgaagattggcatcaacaccgtcattcgggctttaaaaaactctcgccccggcgaataa

SEQ ID NO: 239071 - DNA, 924 bp, Klebsiella pneumoniae
atgtcgcaaatacacgatcgtcttgactggaatctgttacgtacttttctggcaatcgtccaggaaggcagcattagccgggcggctgtgcgcttacatctgacccagccagcggtcagtctggcgctaaagcgcttagaagagcgtctgggagaaaacctgatcgcgcgcagcggatccagttttactgtcaccacggcgggtgagctggtctataaagaggcgctggcgatttacggcagcattgcccggctctcgctggcggtccaggacatcccgcaggatctgacgggcgttgtgagacttgccgtggtatcggcggtgaaaagcgatattctggatagtgtcctgtcggattttcaccaggcgcatccccgcgtaacatttgaaatgacctccggttccagcactgatgtacagcacgcccttctccactttcaggccgcgctcggcgtttctttgaaccataaagaggtaccaggcctggactctactccactactgcatcaaacctatttcctctactgcgggaagagtcacccgctgttcggcaagacagacctgcagattgaagcgctgcagaatgagaactttgtctctttcgccagcgagcagcttgatggtgtattggcttctctcgctgtctatcgcgcccagcagtcgctgaatggctgttcaattggcaccagctccagcctgcacgaggtgacccgtatgatccgcgcgggacttgggattggagccttgcctgaacacgtcgttgccgaagaagctgcggcaggccatttatggaagttacccccctacgagggcattgcgacagttacgttgcacctgatgtggaacgcgtcgctaaaaattaataaggcagaagaggcgtttctggcttgcctacgtaaaaatctcacccgggcaggctattaa

SEQ ID NO: 239072 - DNA, 381 bp, Klebsiella pneumoniae
atgcagcgtattgcgacagcgaacaccggacctgctgccgtggggccatactctcaggccgtggtgagtggtaatctggtgtttgtttccggccaactcccggtatcagcaacgacggagtaccagccagaaacgttcaaagagcaggtccggcagacattattgaatctcggcgcagcgttgagtgctgcaggttctgacctggaccacgtcatcaaggtgaatggctatctgacagaaccctctcagttggagccctataatgaggtgtacgctgagatcctgggtcacgcacctcctgcgcggactaccgtatgcgtgtctctatggggcgtggcgctggaaattgactgcatcgccgaacgcataacggtggcataa

SEQ ID NO: 239073 - DNA, 1392 bp, Klebsiella pneumoniae
atgaccatttccgccagttcagaattagaagcgccagcagccggttcgcaagttaatatgcgaaaagtggcttttgccagcgtcattggcactaccgtagagtggtacgatttatttattttcgccactgcttcggcgctggtttttaataagatatttttccctgagttcgatgaattaattggcacgctgctggcttttggaacttttgcttctgcctacggagctcgtattgttggggcggcacttttcggccactttggcgacaagttggggcggaagtcaatgctgcttatctcattactggctatgggactcgctacctttgccatcgggctgctgccggactacgcctccatcggcctgtgggcgccggtactgttactgacactgcgcctgattcaagggctcgcgctgggaggtgaatggggcggggccgtcctgatggccgttgagcacgcaccaaaaaaccagcgcggactctatggatcatgggtgcagattggtgtgccggtggggacgcttatcgcaaacctcgcctttctgggcatgtctgcttttttaccgccggaagatctggtgagctggggatggcgggtcccgtttctcgccagcgcactgctgattggtatcggtctttatattcgtcttaatatccacgaaacgccggtattcacaaaaaccaaagtgcaggaacccgcagtgaaagtgccgttgttggaaatcgcgcgtaaacactggcggcaggtactgctgggaggcgtggcgacgctctcaaccggcgcttcattcaatattattgttgcctttggtctgacctacggcacgcagacacttggttttagccgtaccgccatgttgagcgtggtgcttgcatcttgcgcgctgtgtattgtcctgctgccggtctttggcgcactgtcggatcgctttggccgcaagccggtgattgttgccggaattgtcgccgaggcgctggtcgcgtttccgatgttctggttaatggatacccgcgaactgccattggtatttctcggctatggcctgctgatgacggcattcgccgcaaattatggccctatcgccacgtttttggctgagttattcggtacacgagtcaggtattcggggctttcgatctcctacatgctctctggtctgctgggcagcgcagccacaccgattgtcactaccgcgctgctttcgtggaccgggaaaggctcctcggtagcctggtatatgatcggcgcggccctgatttcacttgtggcgttgctgctgttgaccgagacctttaaaagagagctcaccgtagctcagcccggcaccgctggtgatactccgcactctgctggacgtcgtgcgggtcaacactgtatcaaaaatacataa

SEQ ID NO: 239074 - DNA, 630 bp, Klebsiella pneumoniae
atgtctttaataaattcggaaacgactcagctggagcttatcagtaaattgctgatggttgagaccgccaccctcggacatttgattgatgaggggtttatggtgcctcagctgcagtgcgtccttcctggcataagatgttgcggtccggcagttaccgtttctttgcatggtgatgatggctatagcttgccgctggcgatcgatgtcgccaaacctggtgacgtgttggtaatcgagcgtgtagatgacgaatgccatgcctgttggggagcggtaatgactgtcgcagctcgccaggcaggcatcgttggcgtggtgctcgacggttatattaccgatttgggggctatctgcgtcgaacaattccccgtctggtgcagagggcgctcgcctgtcaccaccaaaagaggaaaaacaggcggtagcgtgaatcaatccgttcactgcggcggcgtcagggtattgcctggcgatctcattctggccgatgaaaacggcgtcttagcgctgaacgcgcagcagatgcagcagcatctcgaacaggcattaaatttgcagcaacaggagccggagatcatagaacggctgagacagggacagcgtttaaccgacatttatcgcacgtaa

SEQ ID NO: 239075 - DNA, 1263 bp, Klebsiella pneumoniae
atgaatcaactcacatatatccgtaatgtcgcagataatctgctgcccataaacggtgcccgcttgtgggaaaacctgatggagatggcggccatcggtgcgacgaaaaaaggcggaaacagccgcctggcgctaacgaaagaagacagcgctgggcgacggaaattcattaatgactgcttacatctggggatgaccgtcactactgacgcgatcggtaacctgttttgccgctaccagggttcagatccgaaactggatcccgtcgtgatgggcagtcatctcgacacccagcccaaaggcgggcgttttgacggcatttatggggtacttgctgctctggaagggattcgtacgcttagtgatatggggattatccccgtacgtagtattgagattgccgtctggaccaatgaagagggggcacgcttcacgcctgcgatgatgggatctgcagtgtttactggagccatgacgcttgatgatgcgctgcagcgcaaagacagcagcggcatcagcgtggccgagtcactcgaacaggaggcatggcggggtaacagcccgctggggcgttactttgatagttattttgaggcgcatatcgagcagggaccgatccttgaagaacgcggattgaatattggtgtggtgacgggtgggcaggcgatttgctggctggatataacggtgtcaggaagtccggctcatgcgggcacgacgccaatgaaaagtcgccgcgatgccctgctggctactgccgaaatggctggtgaacttgaaaaggtggcagcaacatttgcgccgcaggggttgctaaccatcggtgaactgactatcgcgtcgccttcgcgcaataccatccccggagaagtcacttttactctcgacctacgccatccggaagatgagcaattgcagcaatttgaacgggcctgccgtcaggctatggctgcagtctcttctcgccgcaatattgaactgtccgtcgctgagcactggttaagccagtcaacaccatttgattcttactgcataggcctggttgatgatgctgtccaacagctgggctatccctgtcagcaaatgatcagcggcgccggtcatgacgccatccatctggcccggcactgcccgacggtaatgatctttatcccctgtatggacggcgttagccataacgagtctgaaagtattgatcctctgcatgcagagcagggggcaactgtattaatcaatgccgcgctggccagagctaatagttaa

SEQ ID NO: 239076 - DNA, 930 bp, Klebsiella pneumoniae
atgaataatatcgttattgtcacgaccgttgatgttttccgcagccaactcattgaggctttcagttatcatcgcccggacattccgctggtgctgccggacgatgccgccgccggagaggctgatgttgccgtgtgctggttcccggaggcggggaccgtgcgccgatttccgaaactgaagcttattcactccgtggcggcgggcgtcgatcaccttggtaaagagctgctggattctggtatcgatgtttgccgtatcgtggacagcgaccaaaagcagggtatgtatgaatacatactctgggccgtactctattttcaccgcaactttgattgggtcataaaaaatgctcgggacaaaacgtggttccgctatccgcaggtttcggcaggaaaacggcgtattggcctgatgggattgggagagatagggcgtttcgttggcgtaaagctgtcagagatgggctatcgggtaaatggctggtcacgttcgccgaaatcaatccccggcgtcgcatcattctacggccacgaggggttggatgactttttgtcacagaccgatatcttaatcaacttattaccgctgacggcggatacccagggcattctgtgccagcaactgtttaaaaagctaccccagggcgcaagcctgattaactgcgggcgcggactgcatatggtgccagaagatcttgttgcttgcgtggcctccggacacctacaaggcgccgtgattgatgttttccagacagaaccgctgcctgctggcgatcctctgtggacaactgacggcatcctggttaccccccacatggcttccgccgcctcatttgaagccattgttaaacaggttggtgccaatatcgaccttttacgggcggggaaacggctcaacaaaatcgttaatccggccctcggatattag

SEQ ID NO: 239077 - DNA, 756 bp, Klebsiella pneumoniae
atgacactgcaagaaaaagttactccagcagaatggctggcacgttgtgaacttgcggcgctgtaccgcctgatagcccattttaaaatgaccgatatgattgacacacatatttctctgcaagttcccggtgaaccggatcattttctaatcaacaagtatggcgtgctgttcgaacatatgacggcatcagatctggtgaaaattgattttgacggtgaaattgtcgaagactttgaaatggataaacccgttaatactgctggttttgtcattcattcagcgatccacagcgcccgggacgatgttcactgcattatccatacccacaccgcggacggtatggcggtatcagcccaaaaacagggcctgctgccgctcacacaacacgcgctgaagttttacgacaatctgggctatcacacctatgaaggcattgcattgtcactcagcgaaagggcaaggctggtggacgatttaggtttttataatgcgatgatcctgcgcaaccacggtctgcttggcgcagggaaaagcatcgcctgggcctttcacgagatttatttcctcgaacgtgcatgccaggcacaaattaaggcgctcgcaggtggtgctgaactgatcttccctgccgaagaggtgtgccgtcacgcggcccagcaattcaggcgtgagggaattgatactatcgtcaataacggctggcaagccgccaagggtctgatcgtggcgcagaaagagtcctactgctcatga

SEQ ID NO: 239078 - DNA, 1302 bp, Klebsiella pneumoniae
atgcccaatagtgatcaggcaaaaaaagccgccctcggtgccttcattggcacaacaatagagttctacgatttttatatttatgccacagcggccgcactggtccttggacatgtatttttccctgctgaagacccactggtcagtacgcttgccgcctttgcttcttttgccgtaggatttattgccaggcccctggcaggcgtcgtttttggtcatctgggagacaaattaggtcgtcgcaagatgctgctttttacgatgatgctgatggggcttgccaccaccgcaataggccttattcctggttacgataaaatcggtatctgggcgccaatacttttagtcacttttaggatcgtacaaggtatttcggtaggtggcgagtggggcggcgcagtgctgatggccagtgaacatgcgcctcatggacgcaaaacgttctttgcctcttttgcgcagttgggaagcccggcaggcctgctactgtctcttattgccttccgactggtgtcaatgctggatcaggaggccttcttgtcatggggatggcgtttgccatttttggcaagcggcgtgctgatgatggtcggactctttatccgcatgcgggtggatgaatctccggaatttgagacattaaaagccaaacgtgaacttgccgataatccagtcattgatgtgctgaaaaattactttccgcatatatttttctcggctattgccgtcacgattggctcggccggtttcttctttaccaatatttttatgatcacctatgtcacgcaatatattggcatagcgaagtccacaatacttgactgcctgtttgtggtgacaattattcaacttatatctcagcctgtttctgcactcctggccaataaaataggtgagggaagatttcttaaaatagcggcagcgctatgcctgattacaccatatccgatgtttatgctggtcgatacgaaaaatctaccgttgatgacactaggcattgccgtcgcggtcgttatcctctctgcgctttatgccgtggtggcaggttatatggtctccgtgttcccgaccaggctgcgttattcaggaatctctatttcttatcagcttatttgcgctattgccggcggtacgactccgctgattggtaccgtgattgcgaaaaattacgccgggcaatggctgcctttggcgctctttttcagcattctgtcggctctgtccctactgggtgtgatcgggctgagccggctcaaagatccaacttcagcctctgaggctgaacttttagaaagtaagtaa

SEQ ID NO: 239079 - DNA, 231 bp, Klebsiella pneumoniae
ttgtactgtctggtcaacgtatttccgcacccagtaggtctcaatatggggggtaccattgttcaggaagaactctttgtccttctttccggccgctttagcgaacgcatcttatgtcatgtacagcgtatccgcctttgtaccagcaaccatcagcagtggtttattgatgagactgacatgatcgttcatcaaatccaacaagttgcttgtagtgtgttaacacattga

SEQ ID NO: 239080 - DNA, 213 bp, Klebsiella pneumoniae
atggcagagagcttcgtgaaaacgatgaagcgcgattacataagtatcatgcccaaaccagacgggttaacagcggtaaagaaccttgcggaggcgttcgagcattataacgaatggcatccgcacagtgcactggggtatcgctcgccacgggaatatctgcggcagcgggccagtaatgggttaagtgataacaggtgtctggaaatatag

SEQ ID NO: 239081 - DNA, 1752 bp, Klebsiella pneumoniae
atgaaattcttaaagaatatcccgtcttacctgtttttcaccggtaagggaggtgtaggtaaaacttcgatttcctgcgcaacggctatacgtctggctgaactgggaaagcgtgttctgcttgtcagtaccgacccggcttctaacgtcggtcaggtattcgatcagactatcggtaacactatccagcccgtgactgctgtgcctggactttcggctctggagatcgacccgcaggacgccgcccagcaataccgcgccagaatcattaatcctattaaaggtcttttgcctgatgacgttgttaacagcatcagtgaacagctttcaggagcttgtacgacagagattgctgcgttcgacgagtttactggcttactgaccgatacttctctgctgacccgcttcgatcacatcatttttgatactgccccaaccggccacactattcgtcttcttcagcttcccggagcctggagcagcttcattgaaagtaaccctgatggtgcctcctgtcttgggccgatggcggggctggaaaagcaacgcgaacaatacgctcatgccgttgaagcattatccgatcctgaacgaactcgcctggtgctggtcacgcgattgcaaaaatcaacactacaggaagtcgggcgtactcatgacgaattatcagctattggccttaaaaatcagtatttagtcattaacggtgttctgccagctagcgaagcagaacgtgatgcactggccgccgtaatatggcaacgagagcaagaggcgctggcaaatcttcctaccgggttatctgatttgccgacagacaacttataccttcagccgctgaacatggttggtgtgcccgcattgaaaggcctgctcaacgaacacgctgagatagcattgcttcctgaacaaagcatacaaaacaaaccagagaatatgtcgttctctgtcctggtcgatgatatcgcccgcagtgaacacggtctgattatgctgatgggcaaaggcggtgtgggtaaaaccacaatggctgcggctatcgccatcagtctggcggataagggttttgatgtgcatctaaccacctcagatcctgctgcacatctcagtacaacgctgaatggcagcctcaaaaatctgcaggtcagccgaatcaaccctcaagatgaaaccgaacgctatcgtcagcatgttctggagacgaagggcagggatcttgatgaggccggaaagcggctgctcgaagaggatttacgttctccttgcacagaagagattgcggtgttccaggcgttctcacgcgtaatccgtgaagcaggcaaacggtttgtggtcatggatacggcaccgaccgggcatacgctattactgcttgatgctaccggggcttatcaccgtgagattgctaagaagatggggaataaagttcattttaccactccgatgatgcagcttcaggacccggaacgcaccaaagtcctgctggttactctgcctgaaaccactccggtactggaagcggcaaacctgcagtccgatcttgagcgtgcggggattcatccctggggctggattatcaataacagcctctctattgcacagactcattcaccactgctgtgtctgcgtgctcaacaagaacttcctcagatcgaggctgtgaagaaccagcatgcaaggcgcatagcgttagtacccctaatggcatcagagcctaatggcatcgagaaactcagagagttggcagtttaa

SEQ ID NO: 239082 - DNA, 216 bp, Klebsiella pneumoniae
atgactcaacatcaacgtgagaggcagaccacgtctgccatcgagggggagcgcccgtcgcagctcaaacgcggccttggcgcccggcacattcagatgattgcgctgggcggggctatcgggaccgacctgtttatgggggcgggaagaaatattgccttggcggggacgtcgttcctcgtcatcagtatgctggcaggatttttacctgcatga

SEQ ID NO: 239083 - DNA, 996 bp, Klebsiella pneumoniae
atggaaaagtgggtgaatgatttacatcactgtcgtctgtcgggctggccgtttccgccggatattgaggcgctctggctggcggatggcgtgcttcagctgctgccggtgaagccgtggagcaaggccacggtggtgtcggcggggatccacggtaacgaaaccgcaccgattgagatcctgctgcaggtaatgcacggcctgagcgaaggccagcagcccctacagcatgcgctgctgctgatcttcggcaacctgcctgcgatgcgcgccagccgtcgttactggcattacgacctgaaccgcctgtttggcgggcggcaccgtgccgtggcgccgggtaacgagtcgcggcgcgcgcaggagctggaaagcgtcgtggaggccttctttgccacggcggacagccagggcgcggttccacgccagcatctggatttgcataccgccattcgcggctcgcgctaccggcagtttgcgctgctgccggttcacgacggcgattacggtactgatttttaccagctgttgcaggcgagcggaatggacgccatcgtgcgccataccgaaccgggaggcacctttacccacttcaccagcgaggtgtttggcgcgcagagcgctacgctggagctgggtaaagtcatgccgttcggggagaacgacctcgcgctgttcgccgccaccgaggcggcgatccgcgcgctgattgccggtgcgctgctgcccgcgagggcgaaagcgccggcggactattttctggtgcaggagagcatcatcaagagcgaccgcgattttacgctcaacctggatccgaaaattgaaaacttcaccgcgctgcccgccgggtatgagattgcccgccagccggaaaaaacgtgggtggttcaggctcacgcgccgtacatcttatttccgaatgcgggagtggcgaccggtcaacgtgccgggttgttactgaagtctgccgcgccatgcctttctttgcctgcctga

SEQ ID NO: 239084 - DNA, 1341 bp, Klebsiella pneumoniae
atgtctggttttgaagctaattttgatggcctggtcgggccaacacaccactacgccgggctgtcggtcggtaacgaagcctcgcaaaacaaccgcgatggggagtcgaacccgaaggaagcggcgttgcaggggctgtttaaaatgaaaaccctggcggataagggcttcattcaggggattttaccgccgcagccgagaccgaatatgaccgcgctgcgcggtctgggtttccagggcagcgacgccgaggttatccagagcgccgcggcacaagcgccgcagctgctgtcggcgtttagctctgcgtcatcgatgtggaccgccaacgccgccacggtatcgccttccgccgacagcgccgacggcaagctgcattttacggtcgccaacctgaacaacaaactgcatcgctcgcaggaagcaccgaccactgcggccattctgcgtgccacctttgccgatgaaacctgcttcagccaccacgccgcgctgccgcagcatgagtatctgggggatgaaggcgcggctaaccacaaccgtttttgtcgcgactatgatcgccagggcgtgcagttttttgtttacggcaagcgcgccagcggcggcgtggcgccggtgaaatatccggcccgtcagaccctggaggccagccaggccatcgcccggctgcatcagctgaacccggactataccgttttcgcccagcaggacccggcggctatcgaccgcggcgtgtttcataacgacgtcattgcggtcagcaaccgtcacgtgctgttccaccatcagcatgcctttttaaatcagcaggcggtgctggaacagctgcgggagaagaccgcgcagctggatattccgtttaccagcgttgaagtgccgcaggcgcaggtcagcctcgacgataccgtggcctcctacctgttcaatagccagctgctgagtaaggcggacggcaaaatgttgatcgtggtgccggaggagtgccgccagcgcagcaacgtctggcagtatctgagcgggctggtcagcgacagcgcttcgcccattaatgaagtggcggtattcgacctgcgcgaaagtatgcgtaacggcggcggcccggcgtgtctgcgtctgcgggtggtgcttaaccatcgcgaactggcggcggttaacccccagagcctgatgaatgatgagcgttatcagcaactgacccgctgggttaaaaaacattaccgcgaccggctgcacgctcgcgaccttggcgacccgcagctgctgggcgaggtgtaccaggccctcgatgaactgacgcaaattttaggcctggggtcggtctatgacttccagcgctaa

SEQ ID NO: 239085 - DNA, 1467 bp, Klebsiella pneumoniae
atggcgctaaatgcacagtttatcgcaggacaatggtcgcagggcgccggcgcgctgctgacgaaactggcgccagaagaccagtcgctgttatggcaggccaccagcgcgggtgcggcggatgttcaggccgcctgcagcgccgcccgtggtgccttttacgcctggtcccaccgaccagtgaccgagcgtattgcgtgtgttcagcgctttgcggcactgctggagagcgaaaaagagcggctggcgacgttgatttcccgtgaaaccagcaaaccgctgtgggaaacccgcaccgaagtgcaggcgatgatcggcaaagccgcgatctcgattgaggcctaccacgaacgtaccggccagcgcgaaacggcgatgccggacggtaaagcgctgctgcgccataaaccgcacggcgtgatggcggtgtttggcccctataacttccccggccatctgccgaacggtcacattattccggcgctgattgccggcaataccgtggtcttcaagccgagcgagctgacaccggctaccgcagaactgacggtgcaactgtggctgcaggccgggatcccggacggggtgatcaacctgattcagggtggcaaagagactggccaggcgctgctggaaaaccgcgatatcgacggcgtgctgtttaccggtagcgcttcggttgggttccatttccaccgctacctcggcggccagccggagaaaatgctggcgctggagatgggcggcaataacgcgctgatcgtcgccgacgtagctgacagcgacgcggcgctgaatgtgattattcagtcggcctttatctctgccgggcagcgatgcacctgcgcgcgccggttgctgatcccacgaaatgccgaaggcgacgcgctgctacagcggttggttgaggccagcgcccgtattcgtgtcggtaaatgggatgccgagccgcagccgtttatgggcggggtgatctcgctggcggcggcgcaggggatgctggcggcgcaggacaagctggccgggttgggggggacggtgttactgcggatgcagcagccggatccgcaatcgacagcattaacgccgggcattatcgacgtcaccgggattgatgttcctgatgaagagtacttcggtccgctgctgaccgttatccgctacgacgcttttgatgaggcgatacgcattgccaacgccacccgttatgggctggcggcggggctgatctccgccgacccggcgctgtttgaacgctttgccgatgaggcacgggccgggatcgtcaactggaacaagccgctgaccggcgcctccagtaaagcgccgtttggcggcgtgggcgcctcgggcaaccatcgtgcctcggcgtggtatgccgccgattactgcgcctggccgatggcctcgttggtcagtgacacgctgacgctgccggcgaccacgtcgcctggcctgccattctga

SEQ ID NO: 239086 - DNA, 1026 bp, Klebsiella pneumoniae
atgatgctatttcgtcccgttcgggaaaatgatctcgacgatattatccgcctcgcatcgcgggcgggtgtcggtatgacctcgttacccaacgatcccgtgcgcctggccgcacggatccagcgcagcgtggaaacttttgacggcaagctgtcgcgcggccagcagggctttctgtttgtgctggaagatacccacgttgggcgggtggtgggcgtcagcgctatcgaagtggcggtggggctggatgagcctttttacaatttccgcctgcagcgtaccgtccgtgcctcgaaagaactgggagtctataaaaaccaggaactgctcaaccttagctatgaccataccggccacagcgagctgtgtacgttgttcctcgacccggaatatcagaaaaaccgcaatgggctgtttctgtcaaaggcacgcttcttatttatcgccgccttccgcgaactgttttcgcctcatctgtttgctgagctgcgcggacgcagcgacgagcagggcaattcgcctttctgggacgcgctggggcaccactttttcgacattcccttcgccgacgccgaccgtctgaccggcaccggcatgaagacctttattgccgagctgatgccggcgtacccgatctatgtgtcgctgttgccggaaaatgcccgggcggtgattggtgaagtgcatgctaacacctcaccggcgcgggcgattctggagaaagagggattcagctggcgcggatcggtggatattttcgatgctggtccggtgctggaggcggaaaccgacgccatcagagcggtcagcgagagccagttcattccggcgctgcagctgaaggcctcggggtcgtcgccgctgattgtcgccaataaccagtttgcccagttccgcgcggtgctgctatcgccggaagaccaacctgaacttaaccaatccatgctggatgcgctggcggtcaatgattccgagcgggtctatgcggtgactttatacccggaggcaagaacatcatggcgctaa

SEQ ID NO: 239087 - DNA, 1206 bp, Klebsiella pneumoniae
atgtcaggctgtatgactcgtgaagattttaatgcgtatatggtgccctgttttgccccggccccctttattccggtgagggcggcgggttcaaccgtctgggatcagcaggggaaagactatatcgatttggcgggcgggattgccgtgaactcactcggtcatgctaacccggcgctggtggcggcgctgaagtcgcagctcgataacctgtggcacatcggcaacggttacaccaacgagccggtactgcagctggccaaaacgctggtggagtccacttttgccgacaaagtgttcttttgtaattccggggcggaagccaacgaagcggcgctgaagctggcgcgtaaatatgcccacgataagtttggtgccgataaaagcgaaatcatcgccttccagaatgccttccacggccgcacgctgtttaccgtgacggtcggcggccagccaaaatactcctgcgattacgcgccgctgccgcaggacattacccatctgccgtataacgatattgccgccgtgaaagccgcgatctcggaccgcacctgcgcggtgattgtggagccgattatcggggaaggcggtgtgagaccggctgacccggcgttcctgcaggcgctgcgcgagctgtgcgaccagcacgacgtcacgttgatttttgatgaagtacagaccggcgccggacgtaccgggtcgctttatgcctaccagcactacaacgtgatcccggatatcctcactagcgcgaaagggcttggcggcggcttcccgattggcgcgatgctgactaaagaggcgtgggcgcaggttttccagccgggtactcacggcaccacctttggcggtaacccgctggcggccacggtcgccaatggcgtgctggcgcagatggatggcgaactgctggccggggttaaggttcgtcacgatcttattgttgaaaagctgaatgccctgaatacgcgctacgacctcttcagcgcggtacgcgggatggggctgttgattggcgccgagcttgccagccacctgcgcggtcaggccaaaacgctgaccaaccttgcggcggaagagggactgattgcgctgatcgccgggccagatgtgctgcgctttgcgccggcgctcaatattccgctggcggatattgaggaggcttttgtgcgccttgagcgcgccgtcgcccgcctgacggcctga

SEQ ID NO: 239088 - DNA, 648 bp, Klebsiella pneumoniae
atgctgaagacaagtcaccccgaacaacaacttgaactactgaaatcgattgcagaaggcattgttgctctattctttcctggtgttgaagttgtcattcataatgcgtcgaccagaaagattgcttatatcgcgaataatctctcgaagcgcaaatccggtgatgaggcggggatcgacgatatcaggatgagttgtgccaatgaaatcagcggcccatatgagaaactcaactgggatggcaggaaaatgcgttcagtcagtatctacaccagtatcgatggtcgtcccagctacatcatgtgtgtgaatctgaacacgactatattcgaagacgcacgaaatgcgctggatatgtttttgtctgttacacgtttgcagcctcagccacagcagttatttaaggacgactggcaggaaaacatcaataccttcctgcacgagtggatcaagaaagagaatgcttcgctgacctcgttaaatcgggaacagaaaaagcggatagtcgtcgacctgtatcatgaaggtgcattcaaagcaaaaaatgcagtggactatatcgccagtgtgttagtgatgggccgcgcaactgtgtataagtaccttcgggaggtaaaaaataacgatgtatccaccgcggcctcctga

SEQ ID NO: 239089 - DNA, 1245 bp, Klebsiella pneumoniae
atggactttgatgtgatcgtcttaggcgctgggatcgtgggcgtgagttgcgccctctatcttactgagcgggggaaaaaggtcgtgctgatcgaccggcgggaaccgggcgaagagaccagctatggtaatgcaggattgattgaacgagcggctgtcatcccgtacggtttcccccgcgatttcacttcattactgcaatatgccagcaaccattcaaacgcggcacattacgatatgatttcactgccatcttatttgccctggttgctccgctactggcatgaatcttcacctgcacgattagcaaaggcttcggcggatatgttgccattaattagccgtagcgtcgatgaacatcaggcgttgatacaaagaatcggcactgaggcacagcagttggtttgcgaaacgggtctgctggaggcctggcgtgatacacgacgattctcacaggaagccagtcaggctgagagactggcgcggcgtttcggtctctcgttgacggtactggacggaaagtcccttggtatactggaaccatcgctgaacacgggctttgctggcgcacttcactggcacaatccgaaggcagtgaatagtcccggagatctgactaagagctacgcacgtttgttcatacgtgaaggtggcagtctgctattgggggatgcgaaaagcttacagcaggtcgatggcggctggacggttcgaacgatgaacggtgacattagcgcatcaagtgccgtactggcactcggcccctggtcggatgaggtattccgaccactaggatatcgaattcccttgacggttaaacgtggttatcaccgtcattatcgggctacgcaaccactgaatcgcccggtggtcgacgtagaacatggctacgtcgtcgcaccaatgaaacatggtctgagattgactaccggagtggaactcgcacgacgggatcgccccccgtcctggaaacaactgataaactctgaatatgctgcgcggcagatttttccgctaggtgaagccctcgaagatcagccctggatgggaatgagaccctgtctgccagatatgcggcctgtgattggtcctgcacccaaccacgacgggttatggttttgttttggccataaccaccatggcctgacgttaggacccgtgtccggccgtttactggctgagatggtaacaggagtggaaccattcactgacccgatgccatacagcgcttctcgttttgcttaa

SEQ ID NO: 239090 - DNA, 786 bp, Klebsiella pneumoniae
atgagctggaaaatgacactgttatcgggaatgatggtttactgcagtttttcaacgctgacgtttgctactgaacagaacacgttgcgcataggtgtcaatagcgggtatgccccctttgaagtaaaaacgaatgacggaaaactgtcgggactcgatattgatattggcaatgaagtatgtaaacgactcaatgttcgttgtcagtggattgaacttaacttcgacagcttgatccctgcgcttcaggctaaaaaaatagacgtgatcaattccgcaatgaacatcactgaaaaacgaaaacaagcgattgcattcactgcaccaatttatgtcgttcctatccagatggtggcgaaaaaagacagcgctttacaaccgaatgcggcgagtctgaaagggaagcgcctcggcgttcagcagggaacatctcaggaagattatgctaagaaatactgggctacagcaggcgttaacattatctcctatccggaacagaacgaagtgtttatggatctggccgcaggacgtctcgatgctgcgttgcaagagacacagactgcacaggatgacttccttaaacagccacagggtgcagatttcacctttgtcgggcaaccgttaaaagatgatgaaacattggggaaaggtaccggttttgggctaaggaaaagtgatacaacattgacgaaacaggttgatcagacactgactggaatgaaagttgacgggactctcaggcagctttccatgaaatatttccagcaggatattacggcgcaataa

SEQ ID NO: 239091 - DNA, 1947 bp, Klebsiella pneumoniae
atgctaaaaaaaacagcagtcgcactatcttttattgcttttcagcaagttgccaccgctgctgaatatggtgattatgcaaagagcactctggattcattaattcatgaataccccggaagatatcgtggcaccgaaaattttatcggtgcagcaaacttaatggaggacaggatgtccccagggtataaaataaaccgtcaggatttctcgtggtccggggcacaaacccgcacatcacaaaatgttatcgcctctaatcgtggattacgtaatgattatattattactggggctcatttcgattcttattacggcaggccaaccctggaggcgttagatgataatgcttcaggcgcatctttgcttacagaagtggcacataatctgagtggaatacagacagaacggactttggtatttgcagcgtttggtgcggaagaggaaggcttgcgtggttctaaagccctggccgaagaacttgagcagaagggattaacgggaaacctaaaaggtatgattaatatggatagcatgatcaccggagacatgctttatgcccacgcagggagtaacagtattgataatccagcgctatcgagtttacgtgagcatgtttttcgcattgctaaagaattaggcattgaactgcatacgaacccaggtttagatccgcagtaccccgcaggaaccgggtgctgtagcgatggggacagttttaaccgttttgatatccctgtattgtatcttgaagccacaaactgggatattggcgacaaagatggatatacacaaacaacgaatcctgcagtccctgggggggcgacatggcatagtccctctaaggataacgagaagtttttaaccagtgcgctgggggaaaaaagaattgatgagcgcttacacgatatctcattattactaacgagattattactggaatggtcaaatactgatctgttgtattctgcaacatctgctgcgcatcttcaatatacgattgaaaatagtttgcagcgccagcaccaggtacaaaatacattgctgggaaaacgccgtcagtcactttatttgcaacctcgcgaatctggaacctggggaggaaatgttggcatagaaggccagtccactgctgccgatggctttaatactgtaccccagggacgttctcaaaatagcacagcttatgcgatgcttgattatcagttcaatgataaattcattgcaggttcaaaccttagttttcagcatgattacaataagactgaccgaggaggatatgtcaagaatgatacatggcagtttggtatgtatgggttaattaaatttgaaaacccattctggttatctagcgatgtgtcagtgggccggtccagtatagattctaaacgttctgtttatatagaatccaaagataacctggtgcttttagataaccaacttaacagtaacacaaacgctttattctatagcggaagagttaatggggggtatgattttgaattctctaagctgcagacaggaccaatatttggatttgatttcacgcactaccgagttaatgcctttaacgatcatgaagatttacgtacagcagtatattatcaggagcagaatgttaactcattcgaagtttctttagggtggaaagtcacatcctcattatctttggggggaaaccacacgattctaccctatgcttcccttacctgggttcgggaactgagtgatggaatcgacaataagttcaatattcgcgatacaacggataactcagttcgggaaattaccgttagttcacctgataagagttatggacggggggaggctggtattcaatggaacgtcggaaatagtctttcagtctatactggcgtgaatagccgcttacttaactctgacggttctgaaacacagtacactgttggtggtgcttattccttttaa

SEQ ID NO: 239092 - DNA, 627 bp, Klebsiella pneumoniae
atggtaaagaagcccgcccctgaaaatgcacaactgcggctgttgaagtcggttgctgacggtattgccgcgcttttcttccccagcgttgaagtcgtcatccatgatgttgaagccggcacggtggcctacattgccaacaacctgtcaaaacgcaagccgggtgatgatgccggcctggacgatttacagcaggatccgctggcgccggtaacgggcccttatgaaaagctcaactgggacggaaagaaaatgcgctccgttacgatcgcaacgggggatgaaaagacgccaggctacctgttgtgcatcaacctcagtacaacggtatttgaagaggccagaaacgccctcgaaatgtttctttcagtcacgcgccttcagccacaaccagaacagctttttcgggatgactggcaggaaaatatcaatacctttcttcatgaatggatacggcgggaaaatacctctctcagcgcgctcacgcgagagcagaaaaaaaagctggtgcagagcctgcacctggaaggcgcatttcgcgctaaaaatgcagccgattatattgccggcgtgctgtccctgggccgcacgactgtctataaatatcttcgagaattcaaacattaa

SEQ ID NO: 239093 - DNA, 963 bp, Klebsiella pneumoniae
atgcatcctaccgccattcccgttattaccgcggagcagaccgcggacattctccagcatattgacgtaagagaggccatgcgccgggtgttcaccagcctggcgcggggacatgctgtacagccggcacagaaggtcgtgctgctgcccaataaccggggggatttcattaactactttggcgtggacatgtcccgccagctgctcggagcgaaaatttcgccttacctggtgacggagcaaaagccggtaattaccgcgtggacgctgctgatgtctaccgctgacggcatgccgttaatgctgtgtgatgcctccctgctgacaacggagcgcactgcggccacgacggctctggctgttgaattcctggccccagcggaggcgcaaatactgaccgtaattggtacaggccctgttgccctggcgcacattcgccatgtccttgcgctgcgtaagtggaaagaaattcggatctggagccggagcggattacacacagcagaatcatttgcgcatgagactggactgccagaagggctgctgagagtctgcagaagcgcagaagaggcggcaaaagacacggatgttctgatgctgtgcacctcttcggcaacgccggtcatcgatgtaaagctgctgacccgcccctgcctgattacatccatcagcacgaacgcgccgggcgcacacgaaatatcccctcaggcgctgctggaaatggacgtttactgtgattaccggcaaaccacgcccgctcatgccggtgaaatggtgattgcagcccgagaaaccagctggcgcgcggaaaatatccggggagatttaccggaactggttaccgggcgctccataaagccgttttacaaacgacatgtgtttttccgctccctgggcctggggctggaagatgtcgccatcgcggacagcgtgctgtcttatctcagaaaacaggataaataa

SEQ ID NO: 239094 - DNA, 1134 bp, Klebsiella pneumoniae
atgaaaatcagaccatttggtgtagagcagtggatgaatgagtgggaaacccgctgcgaatataatcttgccgaaacctgcgttgaatccctgaccatgcagcagttgctggatatgacgggcaaaacccgggaggttctggaggatatgctgaacatcaaaatgacatacgggcatatcaccggttcagagcgtctgcgtcagctcatttccgagcagtacagcaaacagtcgtcagaaaatattctcattacacatggcgcaatcggtgccaatgccctgatttatgaaacactggtggaaccgggcgacacggtaatttccgtcctgccgacttaccagcaacattattccattccggcgagttatggagctgttgtaaaaatcttacctctccgcgaagagaatggctttctgccggatctggctgagctgaaatcccttattgatgataaaacgaagctcattgccatcaacaaccctaacaatccgaccggggcgctgatagacgaagcgcttctgcatgacattattgaggttgctcgttcagcaggtgcctggctgctctgtgatgaagtctatcgtggtactgatcaggacggtgacggttacactgcggccatggcggatttgtatgaaaaagggatcagtacggccagcatgtctaaggcgtactctctggccgggctgcgcctgggctggatcgcgggtccagttgagctgctgaaagaagttgaagttcatcgggattacaacacggtcagcgtcggcattctggatgactactttgccactctggcgctggaaaatcgcgacaagatactagcccgtaaccagaaaatgttacatgataatctgaagacgctggatgcgtgggtcagtaatgaaccactggtgagttatgtaaaaccccgcgccggcacgacggctctgctgaaatacgaactgccgctcagctcgcgtgagttttgcgttcgtctgctagagcgttacggggtcatgtttaccccgggagaggcgctggatatggaaggttatctgcgtattggctttgccaataacagtgaggttatgaaacagggtctcattttggtcagtcgcttcatccgtgagctggcagaagaaaaccggtaa

SEQ ID NO: 239095 - DNA, 783 bp, Klebsiella pneumoniae
atgaaagtcagaggtattgcactgtctgtattacttactctgggcgtaacacacgccctgcatgctgaagttcctcaaaatatccgtctgggtacagagcctgcctatgccccatttgaatccaaaaatgctcagggtgaagtggtgggttttgacattgatctggcaaaagagctgtgcagacgaataaaggcgaactgcacgattgtgcagacagagttcgatgcactgataccttcgctgaaagcccgaaaaattgatgccattattgcagctctctccatcacaccaaagcgcctcaaagagatagactttacggacaaactctacagcgctaacgcgcgacttatcgcaccgaagggcagtaaaatccagccagatcttgcgtctcttcagggtaaaagcataggggttcagcagggcaccattcaggaagtctacgctaaccgatattggtcgccgaagggcgtgaatatcgttgcctaccaggcgcaggatcaggtttacgccgacctgaccgccggtcgccttgatgcggcttttcaggacgagactgcaggcagctatggcttcctgaagcaggacgcgggtaaagcctacgaatttgccgggctggcagtaaaagataatgaaatttttggcgtggggacgggcatcggactgcgaaaaggagacaaggctctgcaggacgctttcaactcagctcttgctgagatgttaaaagacggcacctatcagaaaattgcctcgcgctattttgatttcgacatttacgggaaatag

SEQ ID NO: 239096 - DNA, 1104 bp, Klebsiella pneumoniae
atgaaaacaatacgtacagaacttccttcgctggtacccgggcaacccctgtttctgaaccgttatttgttcggcggagcggaaaaagggcgctcagcctatatccaggccgggcttcatgcggatgaacacccgggcattcttgttatgcaacacctgatcaccatgctgaaagagtatgaaaatcagagcaggataacgggaataatcacacttgttccgctagccaatccggttgggatgatgcaaaacgtgctgggttactgggcaggccgtttcgacctggcgaatggcgaaaactttaaccggaactttcccgaacttagtctcgcactcgaaaaacgacttcttgctggcgaaaccgatcctgacctgatgatacagcagtctctggctaatactgaaccgatggacacggtcggaaaaatgaagcatcagctgctgtctgaggccctgaagtacgatctggtgcttgaccttcactgtgatactgatgctgttctgcacctctataccaaccgcttacataccgaacgcgcacgcaagcttgcccatgctctaggggccagcgtggtgtttgtcgaggattttgctggcggccagccgtttgatgaagccattttaaggacatggaagtggttttccgacaggcaacttcttgaaacagaggctattcctttctccgttactgttgagttacgcggacaggcggatgtgagtgatgaactggcgaagcaagatgcacaggcaatcatcgactttctgataagtgaaggtctcctttcagcgcaacctgtagcttttgaaaagcctgagcgagtaacgatttttccccttgaaggcgcaagccatcttctggctcccgtaagcggcattctggcctggcggaagaaccctggcgacgcggtaaccagaggggaacacattgctgacattgtttctgtcagtgacagacagcggacgcccatatgcagcaatgtaaatggtgtcatggtagcgcgcccggttacgaagatgatcaggtcaggccaacgtgttgcgcttctggccggtaatgaccgccttgatgatcgtcaggatggtgaactgcttaggcatttctga

SEQ ID NO: 239097 - DNA, 687 bp, Klebsiella pneumoniae
atgttgtatggatttactatggtcatttttaatggctctatcgttacacttgaactcgcgttgagttcattggccatggcaatcttcattggccttataggggcaagtgctaaactaagtgggagtagattttttgtcacaacttcagatgcttatacaacattaatacgaggggttcctgacctcgtattaatgttgttgattttttacgggctacaaatcctcatcaacgatgttacagatatgtttggttttgaacagattgaccttaacccactggttgcgggtattttaactctggggtttatatatggcgcatatttcacggaaacgttccgcggcgcctggcaatctgtgccgaagggacaaatagaagcaggtattgcatttggattcagcaaagccaaaatctttcggcgcatcatattccctgtcatgatgcgctatgcaattcctggtattggcaataactggcaggttcttctcaaagcgacggctttggtttctttgttggggttagaggatattgtcaaagcaacccaactggcaggtaaaagcacatggcaaccattctattttgcgatagtatgtggtgcgatctatttatttttttccactgtttcaacagtagtgcttttcctcctggaacgtcgtttttccgtgggtgttaagaaggttactttatga

SEQ ID NO: 239098 - DNA, 699 bp, Klebsiella pneumoniae
atggaaattatacaggaatactgggagtctctgttatggagtgacggttatcattttactggtgttgctgtcactctatggctgttgattttatcggttttggtaggtggttttctggcggttttttttgctatcgccagagtatcggacaataaattcattaaatccccgatttggttatttacttatgtctttcgtggtacaccattgtatgttcagttgcttgtattttattccggagtatacactctcgaaatcgtaaagggcagtgagttgttgaatgccttttttcgtagtggtttaaattgtacaattttggcattaacattgaatacctgtgcttataccacggaaatatttgctggagcaattcggtcaataccaaatggagatgttgaggcagcacatgcatacggatttacaacgttcaaactttatactcgaatcattttgccatcagcacttcgtacggcgttaccagcctatagtaatgaagttattctgatgctgcactccactgcactagcatttaccgccacagtgccagatctgttgaaaatttgtagagatataaatgcagcgacctatcaaccatttactgcttttggtattgctgcgattctttatttagcaatatcgtatttattgatacgtttatttagactggcagaaaataaatttctaaagcctactcattaa

SEQ ID NO: 239099 - DNA, 1056 bp, Klebsiella pneumoniae
atgaaatatttctttggttttctatttgttccattttttgtttatccaagcctaaataaaataagcattaatgatattaactcgcatagtggctcgataatagtagtaaatgataaatactatctttttggagaatatagagttaataatgatggcaaaaccagaacgccaaataaccagaagattacattatactcttccacagatttgattcattggtctaaagagaacgatcccatcgatttaacaaaggacccaaatgatttcgaagtagaaagacctaaaattctattcgataaaaatggatccatatattctttatattttcatgtgcaacctcatcgcaagttttcacaaggggtaggattgctgggtatcgcaacttcaaaagatattaccgggccttacagagttataggctattatcaaatagccacaggaaaaaaagcatctactactcaatattcttatgaagttgatgatggctggaaaagaaaggctgatggtttttatcatgactctatcaaactaggccaagaactgcgggatttttatgcgtttgacctttacggcgatacatatgttgtatactccgcagaggaaggttattctgtccaacttgccaaaatagatcttaaaaattcttttgctataaatacttttcataggctgttagtaggagaaagacatgaagcccctatttattttagtgggtttaataaacattactttgtcttctctgatatatcaggttatagacctagtgaaagtaaattgtactcgtttgatataaagaataaaaaattaaattatatatcgcctttcgcaagaggtaaccaaatggatgtgaagactacatttcaaagccaaccggctttcgtcttcaaatgcattaatacaggtaaattaatttatgtagctgataaatggttatacaaagacaaattgaagtatatatggaaaagtaaatatgtatgggcggaaattaaatgggatagtaataagacaccatatattgacaagtcgtcatttaaaaaaaataatatttgcgagtaa

SEQ ID NO: 239100 - DNA, 171 bp, Klebsiella pneumoniae
atgctcggcgccgatagctataacgaagccttgttcagcaccatcaggcttgaggaattcgtccccgccaaccatccgctgcgaccaatccgtacctggctcaacgacgccctgaccagaatggatgccagattctcggcaatgtatgaggccgatatcaaaggggggtga

SEQ ID NO: 239101 - DNA, 456 bp, Klebsiella pneumoniae
atgaaacagcccaggctagatcaacttgatgacatcgaccgtaagctgatcttgttgttgcaggaggatggacgtgagtctgtggccgtactggctcgcaagctgaacgtagcgcgaaccacggtggttgcacgcatcgcaaggcttgaagctaacaaagttatcgtcgggtacggagtacgactcggacaggatgtgctggacggaagtattcaggcatacgttgggatgatcatcacccccaaacggatccgtgaagtcgagaaaaagcttgctcaaatgcctgaagtgaaaacactctgtgctgtcagcggggaatttgacaatgttctatggctgaaggcggaaacccctgagcggctaaactatctgctcgaagaaatcgggatgcttgaaggtgtagaacggacaacaacttcgattatcctggcgcgcaagattgagagagggttttga

SEQ ID NO: 239102 - DNA, 858 bp, Klebsiella pneumoniae
atgcataaaacaactcctgcatccattgatcagtcagtgacgctactaggcgtacccgttgacttcaactcttcgtatctgcgtggcgcagctgaagcaccagaattgcttcgtaaagcgatggcatgtgattcgagtaattggtggactgaacaaggtatctaccttggccaagagggaacgtttatcgatgctggtgacgttgctgtatctgcagaccataccaagacattagagactatcgaaattatggctaggtcttgtttggcaaatggtcgtcctttgattacgttgggtggggatcactcaatctcatacccagtattgcgggcctttaatgaatatcacagtgacttgactgtcattcattttgatgctcatccagatctttacgacgaactgcttggcaatcgctggtcacacgcaagcccatttgctcgagtcatggaagagaaaattgctaagcgtctgattcaggtcggcattcgcactctcactggccaccagtacgaacaagcaaaaaaatttggagtagaaataataagcatgtccgatcttgataaattttttgaattggaaattaatggtccagtatatatatcgatcgaccttgacgtacttgaccctgctttcgttccaggtgtctcacattacgagcctggcggaatgtcagtgcgggagttgatccggtgcttacatgcaattaatgccccggtggtcggtgccgatgttgttgagttcaacccacagcgcgattttcaaggtcaaactgccatggttggtgcaaaattgattaaagagctggctgcaaaagtcctcattcagaaagtacaaccagcatggggaaaagaagtttga

SEQ ID NO: 239103 - DNA, 339 bp, Klebsiella pneumoniae
atggattacagcaagctaagcgactttgaaattaataagcttgtattcgaacgcaaaacagctcttgcggcgcttagttatccgcacagcgcagataagaggtcatgcggccataaggatataaataatatttatcattggtttgacttctgcaataaaccagcagatgcatggccgataatcacttccaatcggattggaattgttcctggtactgccactgataagtgggctgcgcatcatggtgactgggatattgctatcgccgatgttaacccactccgcgctgcaatgatcatcttcctcatgatgcaggacagcaggaaatcaccttcctga

SEQ ID NO: 239104 - DNA, 483 bp, Klebsiella pneumoniae
gtgagtaagctttacgagattgctagcgagtacgcaaagctactcgactcagaccttgagccagagatgattgcggacaccgtagagggcatggaaggcgaactggtagataaaatagagcaactactttccatctgtaaaaacgaaacagggtacgctaggcgcctcagggaggaggcgaaatcactcacagaccgggcttgtgctatcgaaaacaaaatcgaaagcatctacacctacatcgccacatctctcgacatgcttggcaagaaaaagctgagagccggcatacaccaggtaaccataagagcgccatcgcagacggttgaaatcatcgacgccggagccatccctcctgaatatgtcgagttcgaaaccaccgtgaaaccaaacaagctggcaataaagcaccaacttgaagccggcaatgacatacctggtgtgcagttaaagccaggcaagctaaccctcttaatcaaatag

SEQ ID NO: 239105 - DNA, 894 bp, Klebsiella pneumoniae
atgagcaacatcgtagagttcgtcaaacagcaggagccgctattctgcggcgctttgactgaccagagcgtgacgtgggctaaggaaagccagtttgccattcagtatttccagaaaaatgacttcctggcaaaaacggcgcttggtaatccaacgagcgcgcagaacgccattatcaacgtggccgccattggcatcacgcttaacccggccagcaaacttgcatacctggtcccacgggatgggatggtgtgtctcgacattagttacatgggtcttttgcatctggcccagtctaccggctcgattaagtggggtcagtgcaaactggtctttgctaatgacacttacgagtcaaacggcctggactcagcaccgactcacaaatacaacgccttcggagagagaggtgcagtagttggcggttattgcacggtgaaaacagcggacggtgactatctcacggaagagatgagccttgcggaaattaaggctgtagaggcaaccagcaaagctaaaaacggcccgtggaaaacgttctgggaagaaatggcccgcaaaaccatagtcaagcgtgcgagcaaatactggcctaaggctcagcgcctggatagcgcaatccacctactcaatgaagatgaaggtgtatttcaggagccagtaatgccgcataagtcagaggaagacattcgcgaagatgagcgccgtcgccaacaggaaatcatcgatcaggttcaggttctttgtgatgacatggcccaggcggaaaacatggatgacctcaaacgagtatttgcggaagcataccgacgcactgcgggcatgaagttgcagcagaatgttcaggccatctatgcagagtgcaaggtaaagctggaggtgccaagtgagtaa

SEQ ID NO: 239106 - DNA, 201 bp, Klebsiella pneumoniae
atgacaagcaaaaagaaaatcgcagacaaaaagtttcaggaagccatgcaagcggtacatgcggcaggcgaggacagcgttaactactgccttagctttattcgcggctacctggaaagcattgggaaaaccgaaatgcttcacgagtgggatgatgcttgcatgcgcatcaaactatcagaaggtgagcaaattcactga

SEQ ID NO: 239107 - DNA, 543 bp, Klebsiella pneumoniae
atgaccaaatcaaccataaccagagagcagctggaagaatgggttgcacaatttgatgaagatggcggctgtgatgccactgacagccaattagaggctctcattcgtcaatcgctggccgcaatggacggcgagccggtggcagaagttttatctaaccgcccgggtaatgacacgtcgacaatcgacagggcgcttcctgttggcaccaagctctatcgccacgcgcagccggcgtcggtagtgccggtatcccagaaggagcccattagttttgacgagtggtcacgcaaatgcgctttgcaaatcacgctttgctactctgattttcgtgaaaaggctaaatacatctgggattcagcgcgcgaaacacagcacgtagcgccggtgctagttgatgatgtgtcaatattcgaagcagcaattgaagaatgtaaaacgtgcgactcaattgatgagcatgcctggaatcacggtgttttggctgtgatagcaaaatatgaatcatgccgcgccgccatgctcaatggaggtaagccatga

SEQ ID NO: 239108 - DNA, 588 bp, Klebsiella pneumoniae
atgaaagaaatcgatattggttatctgaagtgcatactagactactgcccttcgacaggagtatttacttggaagaaaagggcgagggaagaattctcgtcacaaagagcgcatagtacttttaacgctaagttcgcgggtaagcagtgcggctcattaactaataaatatctgacaatcaggataaacaatagcctctactatagccatagattggcgtgggctatgcattatggcgattggccagttggtgatgtggaccatatcaatatggacaaaactgataatcggatctcgaatcttcggcttgccagaaggcgagataacatgaataaccttactgccacaaagtcaaataagagtgggtttattggggtgtactgggctaaaagagagcggaagtgggtctcaggaatcaccatcgactataagtttcaccatcttggttactttgatgaccctgtctcagcagcaaacgcctataacgcagcatgcgaaaaggcaaacggccgattctcgaaagaaaaaatcaagcataatcttaaaaaaatggagctgtttcaatgcattggagaaagatgtttgtga

SEQ ID NO: 239109 - DNA, 579 bp, Klebsiella pneumoniae
atgattgactacaagccagcaagaaaagaaataaaagcagccaagaaatgcatttcagatatggagtcgtctactaactttgatgacatggagcagctttggcgagactgcttaaatcatatagaaaaatcatttacgaaacttctcaatgcaatcaacccagtaaagggacagtttacaaatgcattctcaaaagaatatgcgataaaaggtagcgatgatttactacgctacattaaacaagcgcgagactgcgacaaccataccataggcgacatatctaagaaagttccagctagcaccacaatcaaccctgctccaggctcaaactctctatatatcaagaacctaagtatagatggttttggtaatatgcattttgaaggtggccctgccttgatacagttccatcctgaatcaattgaagcaatagccgtaacgagtagaagtggtacgtatgacccgccgaagagtcatctaggaaacccaataacatccactaaacctgttgatcttgcaagggcggggattgccttttatgagaactggatagaagaatccagtaaaaaatttaaataa

SEQ ID NO: 239110 - DNA, 690 bp, Klebsiella pneumoniae
atgaggtgttttgttgcgcttatttttttaatggcatctggcgtggttgtggctaatgaaaagcttttttgtgagtttgcagttggggagctatcttcatctccagctcttctcattaaaggcaatgctaatgtgatgttcgacggaaaatcttttacagcatatagaacagacggctcttatatagtaagcccaccactgactgaaaagaaagacggtatgattttcgttgatgataaaacaaaggtatttgccgctagccaggacaaatctaactttgcagtatcagataggataaaaaaaaccatagagcaatggtctaaatgcgaagtagataaggcgtcagctcagcaaaaacaagcagaagatgaaatgagggtagtcgaaagcctttctggaaccaaagccaaagatttctttatgaaagaaaaacatgccttcactaccaattgcttggtatgggaggatgttacaatgatcactggccgctatcccgccatggtaatcgcaggaagtgttatgatgggtaaaaatcctcgctgggatggaagagaatactcattctccttcaataacggatcgatggtagcaaggtttgtaccatctgagccgagacataaattcgtcatgcaagccggtgataagttttatggttgcgggccatcaatggtagaccataattacgattaa

SEQ ID NO: 239111 - DNA, 1092 bp, Klebsiella pneumoniae
atgactatattaattcaggattcattacgtcgcgccgttgaaacagcatcaggtggtgctcaaactgttttgtatacaagcgctggcgatccgtcatttgtaaatattattccaaagtttgatgtgtctacaattgatccatccctggggacaggaactcatccggcatttattgtgaatggcgtcgaggttgatcagatattcgttgggacatatccagggagcattgtaaatggtcagttactgtctctgcctgaccgcgctccagctatatctgttccatacaatgacggtatcagcctggcgcgggctgcaggtcctggctggcacgccatgactaacgctgagtgggctgcaatcgcattactatgctattcccagggccattccccgcgcggcaatacaaaatgggggctgtctgacaatatcagtgaaaaggggcggcgggttgatggcatgacggccggggtagagtcagggaccggccttacgctaacaggttccggtcctgtcagctggcggcacaaccgtgactatgcaggcattgcagatttagccggcaatgtttgggaggcagttactgggtgccgtttctgtggtggtgagttgcagataatggctaataatgacgccgccatgaacagcactgatcacacgttatcctcagcagcatggaaagccgttagtggtctggatggaactcttcttacgccaacaggcactggaacgccgggaacagatacgtatgttccaaccacacctaactcagttcgtatcgccgtttcaggaacaggaaattacactttgatttatggtgagaatataacattcaccgatgtaaaaaaccccggagcaacacctgtggcggaggctgcgcttaaggttttacgtcgattaatgcttttccctttgtctggtttagtgtccgatgactccttgtcatataaggcgggcggagaggtcatgacactgcgaggtggagcttattccaacggtactggtggaggtatcaatgcgctgcttgctaaccgtgggcgcacctcagtaagcgccgctaactctggtgtccgtccggtgtattacaagccataa

SEQ ID NO: 239112 - DNA, 318 bp, Klebsiella pneumoniae
atgagtaacatcacatggggcctgcagcgggatatcacgccgcgcctgggagcccgccttgtgcaggagggtaaccggctgcattatctggctgaccgggccagtatcaccggtaaattcagtgacgtcgaatgccggaagctagatgaaacattcccgcactttatcagccagatggagtcgatgctgaccaccgaagaactgaattcccgccatacccactgcgtcatcctgtaccacaatggtttcacctgcgaagccgatacccttggcagttgcggctacgtatacatcaccgtttatcccactcaacgataa

SEQ ID NO: 239113 - DNA, 237 bp, Klebsiella pneumoniae
atgtctgaatctcatatgttgccatcgggacagttcacccgacagcaggccgaagcggttacccgccggtatcaaaatatcgctattgaagacgaccagggtagccacttccgcctggtggttcgagactctgaaggtcgaatggtctggcgggcgtggagctttgaaacggatgccagtgaaggacttaaccgctatatccggcaatacggcatcctcagagcatcctcctcctga

SEQ ID NO: 239114 - DNA, 3438 bp, Klebsiella pneumoniae
atggacataactaaggttgatcacacgcgcaaagcattctttaaatgtcagaataaattcagaggactagtttcttcatttaaatcaaagagatttgtaaaaaatagagtgttcgatccttcttttttatttagaagtaaatttagagatttgatgctcgaggcaagaacagtattgcacccctcaactttttctgaataccatgaatggattagttatcacattaaacatcagttgcctgagttatcaaatttcccaattcaatatgatgaattagagggggtttcaagaaaatcacaagcaatatcgattgagcgtgaagttcaatggattgtatcaagaataaaggcaaacaaagatgtaattaattactatgttaacatgattaacatattagagttgttaattaaaagaaataggtataactctgcaatagaaacattaaaagagatagagtccaatctaggcgcgagtttttggtcagttcaaatacgtattgcacttgaatatttaagtggtgggttagaaaatcaaaaaaaatataccgcagaagtaaggtctatttatagaaatggattgttgaatttcattgcctataatactagtgtgagaaatgaagaccgggtaagtatatataaatttaacgctgacgttacaacgagaatagaaaatcacacacgttttaatgagtctgttaaacaatatctgcattatcgaatgaagggacaatggcctgagggaaatgaggctatagcagagattctttgtgttgagcaaagccattctttaatagacatatatgatacattcatgaaactaattcaattttctgtcagccagccagaaaatatggttttgcgaaatgctattaagcagtctatatctgaactagagggagttgaagactttagaattataaaatacaacgaagctctgggtgttgatgctttccaagaggtagggcatcaaaaagatatgtctatcttaaatgctcttctaaatggcaaggtttcattatctttaaaaagatatgtagcaaaacaaaaatccactttttcatatattgactcttgggatatgatatacgctggaattgctatcagttacggaaaattaacaaccaacaaatatagcgcaaaatcaataccaatatatattgcacaaatactcaggcaggatcaacatgcgataataggacatgtcaatttaatcaaaatagcaacaaatttatcaggcctaccaagtttcatggggttaattgcattcgtggaacaaatctatcgtgactatcccgataccgcatgggattgtagtaaagtctcattgaatacgcctagcagctatgacaatgaatttcttaccaatacttttataaaaccctcttctgaaaataaattaatgccagcaatagatctcaaaatgagtgatgaagcagaggcaatacaaaaaatcttccactatttacacgaaaacaaatttgactcggcattaaaaatacttaattcctctgaaataactctattagcattaaaatatcaattctatctgcatgctttgcacggctcaggtgatagaaaaaaagttatcaaatatatagtagaacagggaacaaaaaacgagcaagtaatatcgttgatgccagtagcttcgactctgtcaagttatagaagagaagattttgataatttcgacgagctattaacaccatcaattgctctgcatatgctttgggaacttactgaggatgagataattatatctagattgcgttttaaggcttcagaaataataaggaaaaaagaaatacgagcacctgttgcacttgaaaactttaaaaatgaaattcctttaaaagatattgtttattttttaaaaaatatctgtgtaccgaatattatagatcaagctcgagttgtcaaaacgacaaatgctatactaaatcagcgcatggaaacatgttcattgttaagaactcttgatgaagaaaattctagcacctatgaagatgaaatattagatatatctcacagattgactttaaatgcaggtcaaatgatcgtagatcgtactagaattcatgtggatgtaaatgccctcatgcggtgggttaatagggaattatcagaagatatatatagataccgagatttggcaaaagttataacgatagccgaatttgatgaggtaatgagagagttattgatcgaaaatcaacttccggtacaatattcagagtttgatgaggcggatactcttttatactcaatattagtcaaaatagggaatgaatttgtcagcaacccattatttggtttggattattatttaagtaaacgtatcaggcatcaatcatttgttgggttaattcgaggtcatcttcaagagaaaaatataatttcacttaaggaaactggggattcagattatctcagaaatgattattggcttgaaaaattcaattgcttgcctaaagacgccatatcagaattagacaaagctttcaggcgtttctctgcagaattcgataatcatattttagaaactaaagataaaatcatacaaattaactcaaaagaacaaccatatggtttaatcaaactcgaaatacaaccacaattgattcctgtggcgcgttttttgctccatgatggcgatattgatacctttgtgaaagcaagtgttgaactcatgtgggcattgttaggccactcactccgtgaaatccaagattacattagtttaacgctaaagcctcagattacttcgacaatagatacttttcgttcagaggtaaaaagaataactgacggtaaaggtgcctattatgaactggatcgtacaataggtgatacctcagtaaaagttcagcttgctttagatgatgcaagtagttggtttcaaaaaattaatgacccggaagcttttaaaaatagttttaatctcgaccaagcattagaaatatcacttgtcgctgcaaaaaaatgcttacgtggtttcgaaccaaatgtcacgacaagtcaattacccgaagacttacaggtcgcacctagcactttagtttttttacatgatgttctttttgtttcattagataatgcacgaatacattctgggcttaaaaagccaacaattcatatagaagtttctacagacataaataaagaaaaatttatggtacgaacacgatcacaatcaaagcacagttcgagagccgccgctgaaaagaaactttctgaaataaggcaaaaaatagaacgtggtgaatatgaaactaaaacaaaaactgaaggaggcagtggactttataagatagctgctgtcgtaaaacaatcttctcatggagatatagcatttggcttcaataatgatggagattttgaagttacagtagtatatcattacctgactaaaaatcctatgatgggtgaattattatga

SEQ ID NO: 239115 - DNA, 750 bp, Klebsiella pneumoniae
atgaatattttagattttattaaaaactcatggctactggatgaacatttcaaaggcattacagggccactaatagtaacgatttgtttgtggtcagtaagatcaataagaagacttttttttccatttttttggatttttaaaaataatctctcgtctggttttttaaagctaccggtggacgataaaattaatgctttgaaattaataaaggaatatagagaaactgatgataaatatgaggttttgatgaaggaattaaagctcaagcaatatgggttactttatcctgtgccgatattgaaaattttattttgttatattcacgataataacattcgtattaataatacggggtttttatcctttcttgattgcccacaaatttttgattatgataggtacacaataccaatatattcactcaaaaaaataacacttcatttatttgcccatgctgtttttttgttgtttttgatttactatattattgcaatattaaggttattttatgaattgacttatccacctgaaaatattgatagtgtaatgacaggtttatctttgttcatcatttttattataacgtctaggattgcctatatcattatcgagaattcgatttcttttatttgggcggttgttttttcgaagagattaaagacgtattcttctgcaagaaaaactaatgaactaatggagaaatacaatccgacatctctttttttgaatagcgataaatttaaataa

SEQ ID NO: 239116 - DNA, 4758 bp, Klebsiella pneumoniae
atgacaacagcaatcaaccaaaagttacagagcagccgcaaagagttgctggatattgggcttcgcaacaatatgcttaacttccgcaagacggctaagaccctgatggtggtggatgaactagccgaagaggtatttaacatcctctatcgtcaggataaaacgatgactttttcgccgatatctcacaagaagctgaaagaattggcggaacaagaagggggtgaggacgaagaagcattgctgtcagagctggagaatctggactacgctggcgtatttgcagacgcggaagatgaggatgaatccggcacgtcacgccgccatctggatacgcgcctgcagacagcgctctccgatgaaaagttgttccttcagttattaaaaatacacactgaggcgaaaggatttattgaggaacaaggcgttaataccctgttcctggcccttggcttcctgcattggtatgaagcagacagttcagaaactctacgtaaagcccccctgctgctgctgcccgtgagcctagaacgtagtggtgctaaagaggctttcaagctgaattattcgggcgatgagttaatggctaacctttcgctggtggcaaaactcaagaccgattttggtctggatatgacttcctgcacattcgatgaagataactttgcggcagatgagaacagccttgagcgtttctacaacgatgtcaccgatgtgatcagcaaacagggacgctggaaggtcgtcaaaaatgaaatagcgttgggtttcttctcattcggtaaatttctgatgttcaaggatcttgatcctaagagctggcctgatgagaaacaaccagaagcaaacgtcgttatgaagcgtttgcttggtcctggcttcggcgatatacacgcagcatatagcgaaggcgtaaatattgactcagtcatcaaaccgggtgatatacattttgtaaaggacgcagatagcagccaaacggaagcgattctggaagtgcgtgagggaaccaacctggtcattcaagggccgccagggacaggcaagtcgcagaccatcacgaacatcattgcggaattgatcggtcagaaaaaaacggtgctattcgttgctgaaaaaatggccgctcttgaggtggtaaaacggcgtcttgatgaaagccatttaggcgatgccgtcctcgaattacacagccataaatccacaaagcaatcggtactcaaagagttaggcagaacgctggatcaaggacgcccgctgaccaaaattggcaaggaggacctttccagtttgaatatgctacaagatgacctcaatgaatattgcgaggcagtgagcgctccagcaggcgctagcggaatgccgtttatcgacgtgctgggtcactatctgcaactaaagcgagtaaatccggggctgcccgtcattccgtttgcgccaatggcgacctggagctatgccgatcagcaaaagcatcgtgagctggttgatgagctcgttctgcatctaaaggagatggggcgccccgatcagtgtaccttctggggaagcaaccggacgtacttttcacctattgagcagagcagcgctaacgaggcgctgcagttagcgagttcgcatcttattgcactccagtcaacggcttctgcgctttctgaacgattaatgctcactcaaccagcaacgctggcagacgtcgatatcgtgtgccgggcggcacgtcgtgcggccgaagcaccacaactggatggagttcagctttccacgggtgagtggcaatcaaggcgtgatgagatccgtgaattgttggacgctggtgggcgtatgacggcttgccgtatcagacacgacagccagttgatcgacgcggcctgggaacaagaccttttagaggtccgccaaagccttgtgatatatggcaataaatggtggaaagtattgtctggccgtttccgggcagcccgtgcgcgtttgcaagggttatcccggcatgaattacctaaggccagcgcggatatgctggagttagtggattcggtactggcctaccaacaaagtaagaaagtgtacgatcagcatgaagtgcttggtagcgccctgttcggcgcgcaatggcagcatcagaaaacagattggcctgtgcttgagcatttgagtgcctgggtaatcaaactgcatgacgatctgggaaatggacagattccaaaaggcatcatcgctttcctgtcggggcattctgatgccagcggtctcggcaattccgttaccgaaatagaacaacacatcagtgggttggagaaggagctgcatcgagcgctcgaagtgaccggaatgcagacagaaaacaccaaatccagcgtcagaacacaaggtctcaccaggcttggcaaatatctacaattgtggcaagacaacctgaatgcgctttaccagatagcgcgttttaacgtgctctcagagcaattacgcaaggttaagttggacgatctgctagaaatcgctatcagcattgataaacctgagcagcttacaacaattttagacctctcctggtattctgggctggtgcagaaggtctacgccgagaatcccgtgctgcagcggttcgacagaattaaacacgatcaccagattgcacgtttcaagtcgctcgatctggcttcactcaatcatgctcaaagctatttggctaagcagatatgggaaggtatgcctaatatcaatcagcctggtgaaatggctgtactgcgggccgaactcaataagaaacgcaggcacatcccgataagacagcttattgataaggctggccgggcgattcaacagatcaaacctatctttatgatgagtccgatgtctattgcgaacttccttccacccggaaaacttgaattcgatgttgttgtattcgatgaggcctctcaggtgaaggctgttgatgcattcggcgcaatcatgcgcggtaagcaggtggttgtggtcggggatacccgccagatgccgccgactgatttcttcagccgggacgtagagctagaagatgacgaggttgcagtttccgatattgaaagcatcctcagcttgtttaaagccgccggtagccaagaacgttatcttcgttggcactacagaagtcgtcacgaatcattgattgcggtatctaacgttgaattctatgacaacaaactggtggtattcccttctgctgggcagcatccacatgctcgtggagtgagtttcaactatctgcccgatgcgttgtacgaccggggacgaacgcgtaccaataggggtgaagctaaggccgttgcacaggccgttattgagcatgcgattcgaacaccagaactctctctgggcgtcgcggcattcagcgtatcgcaacgtgatcttatccaggttgaggttgaattactgcgccgtcaacggcccgaagccgaagcttttttcactacgcagagcagcgagccgttctttgtcaaaaacctggaaaacatccagggagatgaacgggatatgatttttatcagcatcggttacgggcgcaatgagtcggggcgaatagcgaaagaatttggcccgctgaatcgtgaaggcgggcaccgccgacttaatgttctgatcacccgcgccaagctgtcgatgcaggtattttgtaacttcagagccgaagagcttgaacttgattcaggtgccagccttggcgtcagggcgttgaaaaactttcttaaatatgcagaaacaggcgagcttgaagtcgccatagagacagggaaagcccctgattcacccttcgagcaggaagttatcgaggcactacgcgaacgcaactatgaggttgagccacaggtaggaactgctgggtactttatcgatattgcggttaaggatccagagtatcccgggcgctatattctggcgatcgagtgcgacggcgcagcttatcacagttcgcgttcagcccgggatcgcgaccgattgcgccagggtgtgctggaaggactcggctggaacttccatcgaatctggagtaccgattggttccgcaatccacagcaggaaaccactcgagttgtcgccgcaattgaagcggccagagcgaaaattgccgaaggaagaagtgtggtagaacctaagccagagccaaagtataaaattgagcgagacgcccctgcagcgaaaactgaagtgctctccagtttgagtcaaccttatgtgaaaaccaagctggttccggtgatatcatcaatcagcctgcatcaagagaagccagaacgattgatgcagatgattaggactgttgttgataccgaggcaccagtccacaccagtgaaataacacgacgtctgttggaagcttttggcgtaactcgcgcaggttcaagaatcgcggctgctgttgaaggtgcgattgaccttggtataagacaaaatttttttagaattaaaggagatttcgtgtattcctttgagagtttgcctatccctattcgtaatcgcgcccatatggagtcagcagaacggaaacttgaatgggtagcacctgaagaaatagatcatgccttattgaaaacagtaactctcggcttttcaatgagtcatgaggatgccatttctggcgcattagatctcctgggcttcgggcgtgcaacagcgaagatttcgcaagcccttgaagaaaggatcggtagccttgtcacgaagaggcgtttacaagtagttaatggtatcgtcactacttcaagtgtttccccttaa

SEQ ID NO: 239117 - DNA, 378 bp, Klebsiella pneumoniae; identical to SEQ ID NO: 157174

SEQ ID NO: 239118 - DNA, 621 bp, Klebsiella pneumoniae
atgggtgggaacgaatggagccagggtgagaaagccagagagcatggcgcagatgttctctcatgcgcagataacccgtctggtgaagcctgccagcgaggaattgctgagaataaagcttatgcaggtgcgttggcttcagcggggctaatctacctgccggggggaatgcagattactggcgcaataggcggaacggcaaatgcaggtattcagtatgcgattaatggaacggttaatccaactgatgtattaatcgcgacttatgttggagcatttgctgcaaatacgggagtctggggaactgtgggctggaatgcggcaggtggagcaacatcgagttattttaaaggagatgatccgttaacaggtgctatgtggggggctggaggctcagtaattggctatgggatgggtaaatatcttatcaaaaccccgttaaataaagttctcaatcctatatggaagaactatgagtggattgatatggggatggggataagtaaaccaatgcagttgagcctattacccggtatacctggtaacagtggtgcagcgttagctactgagatgggaagtcagggcggctcaaaactcattgatatattgaacgaggattaa

SEQ ID NO: 239119 - DNA, 297 bp, Klebsiella pneumoniae
atgttttctattaaaatttttagtgaagaaattagtcgaaaacgcagtgctctctccagtgagatgaaaaactgtaaatggagaaagtatgcccaatttctggacgaaaaacatacagacatgcaggctgagttgactatgatgaaagagcgggtctggaactccaagaagtttggtcccggaatattattgtattcatcatcttatttgaaggagcatagctacagtgactctcataaggactttccatcaaatgagaaaagcatcgagttagctaagcttattgaatgttattga

SEQ ID NO: 239120 - DNA, 699 bp, Klebsiella pneumoniae
atggaatcacaatattcacttaccaacgaagaaatcgatgacttggtagaaatagcctccagaaagtatagatcacccattgacctcaatattctcaacccactacttaacatggtctacggcactttggagcagaataaccgaatactaggtattcgttctgatctgagatttgcccagtctcatgtaccaggagaacctgatctacccctgtgcttccagcgcgaagattcgcaggcaatcactcgcttcttcgagtcactgaaaagccagctacgggcagatcataaccggtccaggagaccgggtaacccaacatttccatcttatgggtggtgtagagagcgcgatagcagcgtacaccctcattatcacctggcgttattgttcaacgcagacgtctatgggtacttgggcaattaccaggactccgatgctgacaatatggctacccgaatacagaaagcctggtgtagtgctatagggcttgcttacgaagattactcaacattagctgaattcccaccaaatgctgtttacagatttagtagatttgatgcactggatcgtacccttacctactggcgttttatgattcggctagcatacctggcaaaagcgaggactaaagatatttacagcaataaccacaactttggtacaagccagtgcttccgattagggggattaacatgctaa

SEQ ID NO: 239121 - DNA, 1230 bp, Klebsiella pneumoniae
atgaaaatactcatagttgatgaccatccaataagatataaagaactggtgatggaattggcagtgattggtattcctcgagaggatgtccattttgtaacctgcgcaaatgaagcatatgaaagattggaaaacgatagttacgatcttcttatcttagatattcttatacctcttgatagatttgatgaacccgatcattcaaactctttaaatattttatacagcatatccgaagctgaagggataaataaaccaggcaaagtcataggaataagttcagacatctcagcagcagaaagtgtgagtggcgagttttcagaacatacatggtcaataataagatatgacattgataatatcgagtggatacgaaagataataaactgtgctaaataccttattggcaagattggtagtaaagatgatgaggtgaaaaagcagagtgcagttgacctagctataatttgtgcactacaaacacccgaacttgacgcagttttgagactgccatggaactggggggcttctcgccctatcgatgatttgatttttgtgagagatggatggtttatttccgacaataaaaaaattacagttgttgctgtatacgcttctcgaatgggaatgattgctacggctttgaaaagtttcgccgtaatttctattctgagaccaaaagtgattggtatgactggtatttgcgccggtgtaaaagataaggttaatataggtgatgttctatttgccgatcccgcctgggacttccaaagcgggaagagagttaaagataaaggtaacacttcattttctatcgctccccatcaattagttccttcttatacaatacgctgtcatattgaacaattaaaaacgaactttgagtttttaaaagaaataagttcatcgtatgaaaaggaatgtaaattttctacgaatatagttctagggccagttgcctcaggttccgcagttctagcagatggcgatactattaaagaaataaaagaacagcaacgtgatttggttggcgtagaaatggaaatctatggattgtattctgctgcatataattcaagcccccaaccaaaattttttgcgttaaaaggagtctgtgattttgcggatcctgataaggtagatgaggctcagcactatgctgcttatgcaagctcaaaagtgatgcagaaactatttgaaacctttgcggttagaattctggagaaataa

SEQ ID NO: 239122 - DNA, 762 bp, Klebsiella pneumoniae
atgactaacgctgaatgggctgcaatcgcattactgtgctattcccagggccattccccgcgcggcaacacaaaatgggggctgtcatctgacaatatcggtgaaaaggggcggcgggctgatggcaagacagccggggtagaatccggaacagggctgacgctgacaggttccggcccggttggctggcggcacaaccgtgactatgcaggcattgcagatttagccggcaacgtttgggagcaggtgacgggggtccgattctgtggtggggagctgcagattatgacggataacaatgcggcgatgggctctactgaccattccctgtcgtcaactgcgtggaaggcggtaagcggtgttgatggttctctgctgataccaactggcacggggaccgccgggacagattcctgggtgccgactacgaccaattccgtgcggatcgacatatcgggaacagggaattacacactggtttatggtgagaatacgctgtttacgagcgcccgaaatccgggtgctacgccggtagcagaagcggcgctaagagtgctgcgcagactgatgttgttcccgctggccggcctggtttccgatgattcgctgtcgtactcaaaaggaggcgaggtgatgacactgcggggcggtgcatattcgaacggtacaggcggcggtatcaacgcgctacttgctaaccgtggacgtacttcagttggtcaagctaactctggtgtccgtcctgtttactacaagccttga

SEQ ID NO: 239123 - DNA, 1143 bp, Klebsiella pneumoniae
gtgagccggacggcgacggcggactacgatacgggcggaaagtaccagaaggtagcgcaggcggtaacggcggcgatgcagggtctggcgggggacaacctggcgcaggcggcgagcggggcagtgagtccgtatgtggcggaaatcattcacagccagacgacggacagcgcgacgggtaaggtgaatgtggaagccaatgcgatggcgcacgcggtgtggggagcgatagcggcggcatcgggaaataacagcgcgctggcgggagcggcaggcgcagtgagtggcgagctgctgggacgctggatagcggcggaatattatccgggtgttaagacagaagagctgtcggaagagcagaaggcgacgataagcgcgctgagtacgctggcggcgggactgatgggggggcttagcggaggcagcagcgcggatgcggtggcgggtgcgcaggccgggaagaacgcggtggaaaataatttactgagtggaagtgaagatgctcaggccatatggatacgtcagcatggtgtcgatatggcgagttgttccgataacccaggcgggtcggcatgtcagaaagcgataaatgagcgtaatgcggtaggacttgcgctggcatcgggtagtgtggccctgttaccaggtggtgctcaggcaatgtggggactgggagcaagtgcgaatgccggtatcagttatctggcagatggctcgatagatccggcaaacgcagccattgcaggctgggtaaacgtgatcagcatggggaatggcctggcgggtaccgtgggctggaatgctgccggaggggcgttcgggaactggatagatggcaaggatctgttgtctggagctataaccaacggtggaggtgctgctgtaggttatggtatcggtaaagggatttcgtggggaacagagaaggttacaaatactgttgggaaatgggtaactggtggatgggatccgaaatatgaccctatatggatgaaatatgcagaagttaaccgcaatgacattattcgagaaggaatgaaaccgagtaatattcctggttctgttggtgatataggtgcatctgtgagttctgaaatcggtggtaaagcaacagaaaaagcacttgaaggtaataaaaaatga

SEQ ID NO: 239124 - DNA, 255 bp, Klebsiella pneumoniae
atgaaatattactaccgagcactaattggtcatatggtcatctcagtttgtatttttttgtttagtgttattgggattattatggtagcacttataacaaagctcacattttcggttttagaatggctactcaatggtagctttgatttatcctggagtgagattttacatagtatgaaacttggaggtgtaggtggagggatactcggtattggtattgttctgcttcgtttctttaaagtaaaaggattttag

SEQ ID NO: 239125 - DNA, 303 bp, Klebsiella pneumoniae
atggtggcgaataatgctttgaatccgattgatttcggtaaaggcatggctgacatgggtttatcccagcagttgctcggcgttcatatgctccagaatggtgccacaccagaagaactcacggcggcgctgctcaagaactcacagggacagataccggacggacagaatgcagctaaaggcctgatgattgtctgggcagaattctttggggttctggtgagtgcgttggcggcggatggggaaatgacgccgcaacgagctgcggaaatgcgatggcgcacgcggtgtggggagcgatag

SEQ ID NO: 239126 - DNA, 1203 bp, Klebsiella pneumoniae
gtgattccgattccgacagcgattcggattccgacagcgattcggattccgacagcgactccgattcggacagtgactccgactctgacagcgactccgattcggacagtgattccgactctgacagcgattcggactccgacagtgactcggatgctgacagcgattcggattctgacagcgattcggactctgacagtgactcggattcggacagcgactccgactccgactctgacagtgactccgattcggacagcgattccgacagcgactccgactcggacagcgactcggattccgacagcgactcggattcggacagcgattccgactctgacagtgactcggattccgacagcgattctgactcggacagcgactccgactccgacagcgattcggactctgatagtgactccgattcggacagcgactcggatgctgacagcgattcggattctgacagtgattccgactcggacagcgattccgattccgacagtgattccgactctgacagcgattcggactctgacagtgattccgactctgacagcgactcggactccgacagcgattcggactctgacagcgattcggactccgacagcgactcggattctgacagcgactctgactccgacagcgactctgactctgacagcgactctgactctgacagcgattcggattctgacagcgattcggactctgacagtgactcggattcggacagcgactccgactccgactctgacagtgactccgattcggacagcgattccgacagcgactccgactcggacagcgactcggattccgacagcgactcggattcggacagcgattccgactctgacagtgactcggattccgacagcgattctgactcggacagcgactccgactccgacagcgattcggactctgatagtgactccgattcggacagcgactcggatgctgacagcgattcggattctgacagtgattccgactcggacagcgattccgattccgacagtgattcggactctgacagtgattcggactctgacagcgactcggattctgacagtgattcagactctgacagcgattccgactccgacagcgactcggactctgactccgactccgattcggataccgaaccgcaggcaaataatgatacccatacggcggctatcgataccgtag

SEQ ID NO: 239127 - DNA, 612 bp, Klebsiella pneumoniae
gtggcaaagcaaaagttcaaaatcaccaactggcccacctacaataaagccctcatcaaccgtggctccataactttctggctggatgatgaagctattcaggcctggtatgagtcagcaacaccttcttcacgaggcagacctcagcgctattctgaccttgccatcacgactgtgctggtcattaaacgcgtattcaggctgaccctgcgcgctgcgcagggctttattgattccattttttctctgatgaacgttccgctacgctgcccggattacagctgtgtcagcaggcaggcaaagtcggttaatgtcagtttcaaaacgcccacccggggtgaaatcgcacacctggtaattgattccaccgggctgaaggtcttcggtgaaggcgagtggaaagtcaaaaagcatggccaggaacgccgccgtatctggcgtaagctgcatctcgccgttgacagtaaaacacatgaaatcatctgcgctgacctgtcgctgaacaatgtgacggactcagaagccttccccgggtcttatccggcagactcacagaaaaatcagggcagcatcggcagacggcgcttacgacacccggctctgtcacgatga

SEQ ID NO: 239128 - DNA, 204 bp, Klebsiella pneumoniae
gtgcaccacatccgctggcggtggggactgatagttatctatatggtgtgcgataaccaaaagcagtgcggaaataccaaaaacaatccagccaataagttctacaatacgggtaaaaacagttgtcataacacttcaatatcctttgaacacagcgtgaaatgttactcgatggtcagcagatcacaaggggtatctgtctga

SEQ ID NO: 239129 - DNA, 960 bp, Klebsiella pneumoniae
gtgattaagtcacctatcaagtgggcgggcggtaaaacccgcgttatgcggcagctgctgaagcacctgccgaaagctgattgcctgattgagccatttgttggcagcggcacggtattcatgaacacggaataccgccgttacatcctctgcgatagtaattttgcgctgatcaacttttttaggcagttaaccgcgtggacggatgatgtgatcgccttgtcgtgtgagctattccaaaacggcaatgatgcgggaaggtactatgaacatcgttcgcgctttaacgtgatgaatgcaaataactttggcggaatatcttcccttcaacgttatgccgcgttgtttctttacctgaaccgccattgctataacggcgtttggcgtatcaacctaaagggttcgcacaacgtaccgtttgggaaatacagatccccccatttcccagaagcggaaatgcgtcttttcgcagaaaaggcgaaggataccggcacgatgtttgtctgcggtgattttcgcaccaccattccttcatcagtagagtttgactcggaaccagacgcagtgatgtactgcgaccctccatacatcccaagcagcaaaaccgccaacttcaccgcatacggcaagccgttcaccctggacgatcatcgtgccctggctgcaaccctgctcgatgctcatcgccagcacggaacccgctcggtgatatcaaacagcgacaccccggaaacccgcgagaactactccgctttcaatctccacgccttcagcgttcgccgttctgtcagcgccaaaagccgcgatatggccggtgaagtgattggcgtgcttcgtatctgcaatggctgtggctgttctggcggtggtaactgcccggactgcgggccagtaatgggcgcttctacttacggcgtaatggctgcggcgggtgcattcgacggggcggagggattctga

SEQ ID NO: 239130 - DNA, 2643 bp, Klebsiella pneumoniae
ttgccgcacatggcgagccagaaaaggcagatcatgtctgactattcctccttagtttgggaatggaacgccaaacggcaggctatcaaccccaaccacgtcccagatcctcaaattgagtatctcaccccgaaaggcgagcggaagacgctagcctatgcggatttggtcgataccgtttatcgcacccccatgcgcccgcgcgaaggtgccgcgcgtgaagcattcgaccgcaagggacgcgcccactacctgcgccgccgggttcagactctaccggcgtttatccgcaagcggttctctctgcgcctggaatcgctggagcgtcatgacccaaaagaggccgtgcgctggctgttcagtacgtttgaacgccatgtcttacgccgtgtcgatgcggtagacgcacaatacctaccgcaggccgcgctcccggcgatccttgcgcccctccgtgatgattttcacctgctgccttgggcggacaaaaaacgcctgaaacgactggcttataagctcgccaacctgatgaaaagcgagtttatgcgagagtttgattttcagtatgagaaaaccgctgatgttgagttttccacgctttacgcatacggatttatcgccagtaaagcgacagcgctcaatatcgcgatccctggctggagccggtattgcgatgaagagctggaagccaaagaggcactgcgtgccgtttcgcgccttcagtcggaaaagtggtggttaggtaaaatccgtcggatacacgactgctggcgcgagcacctcatgatcgccgcaggatacgtcagcaaggtggcgtcgccgtactgctcagatccctgcttcaaagagtggatagcccagaaaaaggcaaactttgaatttcttcaggccatggagctggaagaccaggacaccggcgagcgcacttcgctgcttgataaagttatgagcagcacatccaaccccaaaaacgcccgcgccgagctgatggtgcgcatgcgcggttttgaggatatggcaaaagaaatgggcttggttggcatgttctatacgctgactgcaccgtctcgatatcactccacgcacgtaaaatcaggcaggcgcaacgataaatatcgcgacgccagcccgcgccagacgcagaaatacctctgcaaattgtgggcgcgtgtccgtgcgaaatggggacgcgaggggatccgcgccttcggttttcgcgttgctgaaccgcaccatgatggaacgccacactggcatctgttgctgtttctccacccggaagaggtggagtttgcaacggcggttttccgcaagcacgccctgaaagagaacggcaacgagccgggcgcgcaggagtaccgttttaccgttacgccgattgatgaaaaatttggctcggcaacgggctatatcgcgaagtacatctctaaaaatatcgacggctacggcatggacggcgagttagacgacgaatctggccagcctgttaaagagatggcaaagcgcgtgcgtgcgtgggcatcgcgctggaatatccgccagtttcaacagatcggcggtgcgcccgttactacctggcgcgagctgcgccggttaggtaatcgcgagctggttttgcatcccgagatcgaagaggcccgcgccgctgctgacgcgtcggactggccgggctacaaccacgcccagggcggcccgttggtatctcgcgactgtgtgcgcgtacgtctcaattacgaatataccgaggatggcaatgattatggtgacacggtcgccaaaatcaccggtgtctattgccccttcacaatccgtgaatctgtcatttttacccgcaccactgattacaaaattgtgccgaagcgtaagccgtcgtcgggcgagaatttgaccttagaaggccgcgtagcggcccctcggagttctgtcaataactgtacggggtgcgccggatcgaatgaaaaaccaccgtcagaaacggcggtgtcagatgataaaactgcacccgacgacaattcagtgacagaacttccgctgaatatcgatgttttgaggcgatattcacgccagcaaaggcaggagatcaccagcaggctaagaaaatccacccgtgaaagctcagatcaggctttcacgcgcaccgcgcgcgccctgcgcacgtcgattgacgacgaaaccgcgctggcatgggggccaaaagttaccgccgcgaaagatatgagcctgacgccggaagaggctgagcagcgctggtgcgagcagctgcggatcgaggccgagcggcgcgcagataactacgcggcggcggttgcggagtatcaaaagaaaaaagcagaggccgaattgcgccagatgcagcaaatagaagcgacgcaaaaacacggcatctccgaagagatgatcgccagcattggcgcgcagcttcgtggctgtcggattttcgtcagcgatgaggttgtgcggtcaatcgccgacggcgcccgagttcgccacggcggcggcctactcgcggcggacaatggtcggttgcgtgaagtgaaggtatggcgtgcaggcgagaaagataaaccaacttccgaatatatggcagtgcgtgacctggtcacgcgctggaagaaagcggctaaacggagaaatgagaggtaa

SEQ ID NO: 239131 - DNA, 978 bp, Klebsiella pneumoniae
atgactgattctggtatttcgggcgtgttaactatcgtgcaaaaagcagccaaaccattttacaaccttgtaaagataactggcccttttctgattgctcaatctaagacagctgttgaaaactactctgatttcaaactaaataaagcgcgcttagaggcaatatcggcactacttcaagaggaagtaaaaaacatttcagcagaaagagcgaccctgcgcgataaaataacaaactctacaggtcttgaaagagttcgagcacagaatgattatgacttattaacaaaagaaataaacaagctatccacagtggataaaataaaggatttcattggggataacgagtctatagacgaaagtttagaaattgatgataattggatttatatattcaatcaattagcgtcatcactcaatgaagaatggaggaagcagttacttgcgaaggcgttctctcttgagttaaaaaagccaggcgccataaacctacataccttaaactgtatagcttcttttgatgaagaaacttttagaatatttggttttttggtcaactcaagcataagattatacgaagtaaacttcctcccagcccttagtgaagaaaaaacctttaaaatcaatgaaaataaatttaacattgacaacattgagtataagctaggccatctaaacctcctgaattttaatttcggatatgttaaaatagaaaataaagatatttacatgcggtatggccggcgtgtattaaaaatccgacgccctgaatccccttcctttcagggacctaatggcaacattggtgcaatttttttcacaccacttggaaatagcatagccacattgtatacaaggcatctcaatgattttggaaatgataatttcgagtctcttctaagcgaagcaaaaaaacacaggtacatatttcaagaaatcgaaatgtcagagcagctatatagtgaattgggcaattaa

SEQ ID NO: 239132 - DNA, 1158 bp, Klebsiella pneumoniae
atgaacaaaacttttaaatcgctaattacgaccgcaggcagggagaaaatagctgctgcaattgttaacggggacaaggtcatcttctctcaaatgtccgtcggtgatggtggcggcagtgtgacaaccccgcgagaagaacaaacctcattggtaaatgagctttttcgtacccagctgaacagcctgaaattgtccgatgccgatagcattattatcgctgagatgatcattcctccggaggtaggtggatttaccatacgggaggcggcattgtttgatgatgccggcgagtgcatggcggttgccaacgtcccggaaacctataagcctgcactgacggaaggctcagggcgctttaccatcctccgcatctggctggcagtaagcagtaccgaggcggttgaactcattgtggatcctgggatcgtactggcgaccgtcgaggatgtgattaatgccggtaacaacgccaaagactatgccgatgagcaactgagcgagcacgcggcctcgcgagatcaccctgatgcaacgctggatgaaaagggatttacccaactgagcaataagattgatagcaacgatcaggagaaggcggcgacgcctcgcgccgtaaagctggccattgccgcagccattcgctcggcatgggagctggacaaccccgttggtacagtgaaattctacgcgcagaacattgatcctaatgagcgttatccgtggactgagtgggcatatacgggggagaaaaagaccattcgtgtcggcagcgctaatggttcagatattggcacaactggcgggagtgataccgtcgatattcagaaggcgaaccttccggcagtgcagattgacgtcaccggagaaatcagcaaccacccggaacaaaacctgaaaacgaaacctgctggcaaacacaagcatggtggcgtcccaagccgggaaaacccgtgggagattggcggcgacattagccagcgatttaaccccgcgaacctgggcgaaaccgacgaagtggacgatcatgaacacgagatgatcatcccggagcaagagcactcattcagcggtaaaacaggtaacctgggtagcggtaccgcccttagcattgttgaatctcacatcctgctgatgtgctgggcgcgggtggcatga

SEQ ID NO: 239133 - DNA, 1527 bp, Klebsiella pneumoniae
atggctgacaatctgagcggcgatcttaaaaaccttgatagcgcgtgggaggggtttcgtattcaggttgaagaaactattgatggtccgcttcgtaaattaacacaaggtttaagtgatgcgattacagtggcgagcgaatgggttaaaaccaacccgcgtatcgcccagaccctattgcttgttgcgggcggcgcgctggcgctgactgtcgctgttggcgcgctctcgcttgctgtcggtattctgattggcccactggctaaactacagcttggcttcacggtgctaaccggtggtcgcggcattctcggcaccgttgccgcattccgcaccctgggtactgtcgctggcccggtaatggcaagcatgcgcggctggcccgtcgttatatcgggtatcgcatccggtttcggaagagtctccgctctcatgcccgccattcgggccgggttaatgggtgcgtttctggccccgggtgcggcgctggcgtctctgggtaaaaatcttgccatactgatgctcaggctaaccggcctccctgcgctctggggaatgatcaccggtgcagtatcagtgctgggcggggtgctgtctttcctgcttagcccgatcgggctgattggtgctgcgtttgttgcggcggggctgctgatctggcggtattgggagcctatcaaggcgtttttctccgggttctttgctggcgtatggcaggcactgacgccgctcaggagcgccttttcttcgctggcgcccgtcttctccgctctgggtagcgatattaaggccgtctgggagtggttcaaaaacctgttaacgccgatgcagaccagcaaagagacgctggataaatgcgcctctgccggggagacattcggccgggtgatggggacggcgcttagtgttctgctgtggccgcttcagcaactcatgaacggcgtagactggctacttaagaagctggatctcatccctgacgggatcgacaaagccaggcagcaggctgatatggcacagcgggatcttgaagcctctgcggcagcgctggccggacatcaactcccgttaggaaaagcggaagtgtacaagcctgccggcgataagcctccggtcatcacaggtgataacggcacgctgcgacgcctgaacagcatcgctgataacacgaaggcgacagccaacaatacgaagaaaatcggccccggcgacattgtctttaaaaacctgccgcgcgcactggcgctgcgtggcgcttatcaggaggcgcgggttattccccagcctgtgccgcgcgtgtctgcggctgcggccggcggcgttctgtcagtaccgacggcgacgcaaggggcgacttctgcgccggtcgccgcggcttcgggggcggcgccgttcttccagttggtctttaacgacgtcggcaaacgctcggatcaggagcttgaaaagatggttcgcaacgccgtgcgcgatgcaatggccagcacccgcaaaactgaccgtggttcattccgcgatcgggagtaa

SEQ ID NO: 239134 - DNA, 222 bp, Klebsiella pneumoniae
atgcagattgtgttttgctctgggaaatcagcccaaaaccgccgcgccctcgcctgcggttttttccggcttgtcatctctatgctgagaagcggaaatgcaatcattgaagtcaaaaactacgaaggctcaagggagagcattttacagggcggaggtggcgtagttgtcctggttgatgaaggggaggtgatatctgtaagagagaaagggggattataa

SEQ ID NO: 239135 - DNA, 246 bp, Klebsiella pneumoniae
atggtaaggtcccgtaccggacaacgtaaacctcagaccgtactcttcagcacggaagccccgcttccggcagcgattttcttactctttctctctccgcttcgcattattacaaccttggcagggtacgcggtgcgcgtagccgcgactcgttgtcagttctaccggcaagcaatggcttacaaggaagccaaacctcaatcgttcgtgcgcatagtcgcgtcgatgttgacgcgtgtgatgtaa

SEQ ID NO: 239136 - DNA, 597 bp, Klebsiella pneumoniae
atgaataattcgttgatggcgaccgggtcgtcgttactggaacaacgagccgctgccgcatgcgcctctatcagcgatttatccgtgccgctgcgtgatttgtggaatccgtggaaatgcccggctggttttctgccctatctggcgtgggcgttttccgttgatagctgggatgaaagctggagtgatcaggagaaaagaacggctgtcagtgaatcattctggctccatcagagaaaagggaccatcgctgcaatccgccatatagtcgaaaaaatgggttactccatgtcaatcgaggagtggtgggatgttgctgatccggcaggaacattccggcttgaggtcgatgtgggtgatatcggtatcacacccaggatgctggacgaactgaaccggttgattgatgttacaaaacccgttagccgacatctggcacagctcaatatatccacaaaagtgctcggtgatattcatgtcggctcaactctttgcagcggcgacattatcagtatttatccggccgattttgagccggaagagaacattacttacaacggcgtgatttttcacgatggcaattttaattacgggtaa

SEQ ID NO: 239137 - DNA, 1254 bp, Klebsiella pneumoniae
atgacaaagtgcataatatgccgacttgaaaaagacaacatgtctgacgagcacgtcatccctgagtcactcggtgggtactaccatattttcaatgtctgcgccgactgtaattcaatgcttggcgcgaaggttgatgcgcatttaattaacaataagttcggtgaattttatagaagcacttataatctaaaaggaaaaaccggcaacataccaaatccttatgaggggacattttcaagcatcgaagaccctgaaagaaaatcaaaattcaaaagaaatgaagacggtagttttgagccacacctgctaccatacattaaaattaaaaaagatgaaaatggtgcaataaatcagattttgatagaggttgacgaaagtgagaaggacagcgtggggaaattgattgaaaaaatactcaacagaaacggactaaagaaaagcgatattaaaaaaacaacatctggaacagtaagtaatgtgcatcaacataaaatcacatggtcaataaatttaaatgaaataaatcttggggcattaaaaatagcctatgaatttgccgtggactctatcccttcgtacttcaatgataaaatggcgactcaaatatcagatgtgctttttaatgctgatgcagacaaagcaaaagagtatatcttaataggagatggattcgataagcgtattattgaaccatttgaaagcatctttgacatagagaaaaacaaacactatctcatgttgctaaactatgacagcaagcttttttgtctaatcataattaattgcgtttactatataggaattaagctttccgactcaacgtattttgaatttaaatcttcaataattggtgttaatgatgtcgataatggaacattcaacaggctaacattacaagaagcttttgatgtctgtatgggtccgatagaatacacattctataataaaggtgagcctttaacattaatggaggccgattttaaacctgtggaataccccacccatttatttaagaaagatgtaatcccactatatgataaaaacaagacacccatatcaacagttcatgaagtgttaggctcgctaaatccatatgattaccataaaggcgaggttacaaaacattcatcatcattctcattgccattaaaaaaccacattcacgagtattacatcaaatcacaaagcacaggacacatttaccctgtcgatactatagagatagtacaaaaatggaaaggtagaatttaa

SEQ ID NO: 239138 - DNA, 459 bp, Klebsiella pneumoniae
atgaatgacttcaaaccctttgaggacaagctcgccgggttgatagcggccctttctcctgccgggcggcgtcggatgaccgtcgacattgcgaagaaactgcgccagcggcaacaacagcgcataaaatcgcagaaagcgccggacggttcgccgttcgccccgcgtaagcgccagcctgtaggagcaaaaaaaggccgtattaagcgagaaatgttcgtgaaactgcgtaccaaccgctatatgaaagcgagtggtaacgacagtgcggcggtggtggaatttacggggaaagtgcagcgcatcgcccgcgtacatcagaacgggttatcagataaaccgcagaaaaacagtcgtttggtcaaatatgaaaaaagagcactacttggatttaatagcgaaacagaaagcgatataaatgacattgttgttcaatgggtttcgctaaatattgagtag

SEQ ID NO: 239139 - DNA, 618 bp, Klebsiella pneumoniae
atgaatttaaaatttatttggatagtcgctctttgtgctttgatgtttgcgttaggtttcttctttggtggggttaactgggagtgggctgggggcaaacactcaaacgaagtggcgctatggagcatgctaggcggatggctatcagcgtttgcaactttggctgccgtgctggtttctttgtatatggcataccaggctgttcagaatgatactgaaaagctgagggttatacatgggataagcggggaagtttcccatggaaagggggtgaattgctcaattacgattcaaaatatgagaaacttaaaattgaatgttacgggggtttttttttccctaggtaactcgtcggggcgttactctttagaaaatgcaattggtagacgtgacctttccatgtcatataagggcgagctattaactgtcagttttgttattgattctggagtgacatggtgggggacatattcattattcgaaaaagatcaaggcatagactttaaaaaaggaaagctctttataacgactaatcttaatacgtacgagtctaagttaccctccgtttatttaacggctttcaaagatgcttattcgcgctatcgagcgctaaaatag

SEQ ID NO: 239140 - DNA, 1452 bp, Klebsiella pneumoniae
atgttgcttgataatgtatctatagacagccgtatcaaggggatttggtatcaaatatccagccaaaataagcatacatcaattactttagatgaaataaagtccttagcagacacgaagggtttaactgtaattgaattaagagaaatcacctttggttatgatgtgcattcagatggcatattaataaaaaccaacacagggagcgcaatttttcctagactaagggctaccgaaattaatttatcacaagagcgaatcgccccgtcactaaattatgaaaaatactggaagcatatcgattggtttttaccaccatatatttctaatggggcattatcggaatctatacaacggtgtggtgtaacacccagaaacttttcaacaattgataccaaaacagctcaaaaccgttttgagaatgaattctgctcgttatatccattatcagtaataattcccgtaaccattcaaaacctatcaacatccacagcaatcagcaaacacctccctataattaaagaagctatattagcgttttatagcggaatgaaaatagccgccattgcagctctcatcccaataattgaagacatattgagagtcatcgttggtgaagaaggaagcgagctagatacagtaagtaaaattaatagttgttttgatatagctcgattgaatgttttgaaacttgatattcatggagtggattggattcctaaagaattttgcgatcctacgtttttaaaaatcaataatgaaagagtatttatgcttgagacgcttcgagcatggttgttagatagtttttacgcaaacacgattaactatgacaaagagtctggttttaatagacaccattttgcacatgccctttccgatgtatggcaaaatgaaagtaattttttcagagcgataggtttaatacatgcgttagcatttgttgaatgtttttcatttgccgatagcagaatcagtatattcgttcctgaaagcaatgacgaatcactgtcttttcatgcagaggtactagcatgccttgaggcacaagctattaaaaaatttgcattgaatcgttatcagttgacaaatgaattgccatttaatgtgacagcatctgatgacggatggtcaatccgtgctgttacactaagtgaaaaaatggataaaataataatacctctactgagagataaaggttggcaatgtcacaacattggagacccaataaaagatggtgaatacataaccgttgaagcagagaaaaatggaagaaatataaaaatagcattagtttacagttttgctatatctccccaaatctattcacggtttaatgggtcttatgattttgtgctgtgtcaaggtgcctcttacaagagtaatgagtttacttctcacttacaatgtcaggctttacccttaagcgcctggattgctcctgatgcatga

SEQ ID NO: 239141 - DNA, 513 bp, Klebsiella pneumoniae
atgggcgcaggttgtacacaaggaatgttcatgcaaacacctacccgcccgccggggagaatcaccaatatgaggtcatgccgtaagctggctgggaaatatcacgccccctcgcggggcgctggtcaaagtggcccgtcttttgtgtgtctcgttcacgaaaatatccctgcacaccaacagatctgcctgacgtatgagcacaccccgcgagaaaagtcaaccttctttcgcaaatatcttactggtcaggttatcgagtcccgcccgagtcccgagcaccagatcagagaagtgaataaaccttgcctgatcctgcataaacgatgcatagaaaggccgtcagatgacgcttgcaggctcatctacgtattatcaaccacttggagagtggagactataagtcttcactttcacggcttcgcttttccctctgcccgatgggccaagtttccccaccaacatgacgccaggcgctggcgatgtgtcccggttcccggccctggtctttaa

SEQ ID NO: 239142 - DNA, 546 bp, Klebsiella pneumoniae
atgagcaacagagcagcagaaaataaacctgaattatggtttgaagaggatcgtcgccttttctttgctgaaagcgtcgttatcaaagcaactggcgaatgcttcaaggtcgaggacaaacttgatcggattcatacctatatggtggatcaatacaacagttaccgggccgatggtaagaatttctatgaagatcagagggacatagcgactaaatgcaaatgcacacctaaaacccttggcaagtggatgaaagttcttcaagcacttggtttactcgtcattgatgagagtcagaaaagccattcatacactgttcgctcggtagtgagccaggaacacaacctgatttttgattacccgaaactgttaaacggttcaccgtcctacgatcatgaaaaagcactggagcggctgagggcaagccgtggaaccggtggggaaactgacggtaaggttatccaggtcgatttcaaaaaacagacaaaaacgcctgagccgcagcccgtcgttgtggaaacttgctataaccccccgactatatag

SEQ ID NO: 239143 - DNA, 639 bp, Klebsiella pneumoniae
atgactgatgagaaaagtaacagcctgatggctgatctgaatacagacctgaacgaaccagcgtcaccagatgacgttaacgaagttaactcgcgcaaagcgggctgcactgaaccagaacaaaaaacagaccaatcagcaaagatcgatctacccgacccagatttaacccgcttgtttaaaaaccgcggtcgcgacggcgatataatcaaaaaatgcaaaatcatgctggtcgccggagtacctccgggcaaagtcgcgctgctgctgcgtcttccgctggaacgtgttatcgaattgtacaatagctcttataacccaagatgcaggcgctttgcgaacccgaacaacgggagattgataataacgatgtggcgcgagggcgcgatgctcgcagatatctgtcaggcgcttggcttgcccttatttaccgtggtgatgtccctccggggggatcgggttaccaatgccgcaatggctccacggatgccagagtacgatgatccgctgtatgttgaatatcggcaggttgtagcccgaaaagctgcgagcaaatcgcggcctattcaaataaaccctgttcgccgcgttagaaaaagccaacaaaccacaacagcgagccagaccgcgacggcctga

SEQ ID NO: 239144 - DNA, 372 bp, Klebsiella pneumoniae
atgaaaaacttgctcaaaaccgttcgcgattccatagccgcagccatgaacgggcgcaccatcgaacagatggaaaccgaacagctcaaacagaatgtaaaaaacgccgtggatgactatttaatccgccatcccgattggcaaccatcaacgaagccagcgccgaaagctgcgccagtgaccaattccaagcagaaaaccgcaaagatcaaaaaagccctaggtgctggagctggcaagttcatacctcacgttgtggatgaggcggctctcgaacgtgctcgcatcaaatgccgggagatagtcgccgccgatccggcagcatactcatacattatcgaatcggcaccgattaaaggggtgaatgattga

SEQ ID NO: 239145 - DNA, 336 bp, Klebsiella pneumoniae
atgctcatgtttgaagaagatttatccccgcaggatgtgatcgcgtatcgcgatgatccggtgttttcacacaaaacccgcactttcaccaccctggctgtggataccgtacccggtacgctgctgacctcagagggtgaggcatacgccagcggtagcgatgttctgatcgcgctggatagccacaaggctggcgctaacgtccctgtaattgttgtggatcagggctgcatcctgaaacgtaacggcctccgcgctgctaccccagcggcactggctgctgcaatcactgctattgaaaccgacggtaaaaaccgcgtttcagtctccgaataa

SEQ ID NO: 239146 - DNA, 282 bp, Klebsiella pneumoniae
atgagattaaatttattaggtgttgggaacatccctttactatctgcccgtatcaaaacgttggacgatgcagaggggttgctgaacgtctccgcgctcgccagaattcttgaaattccccgaagcactttcctgagcaagatagccacactgggaagccttgaaaaggcaattctgcattacgctgcgatcaaaaagcagcgggacatactcgccactctgtcagagaaagacgctgccgcgtttttagccgcctgcaacgcaaaacaacacaagttataa

SEQ ID NO: 239147 - DNA, 168 bp, Klebsiella pneumoniae
atgaaaaatcacgaaaaaactaacaaagaagttctccaggctcaagcattgctcttaaaaggtgacgagggcaaagattttgccatccaaggcaaaacttcgcaggagcgccgggaaagtctggcaaggatcataaatgctcaaaagagaagctatcaactctgttaa

SEQ ID NO: 239148 - DNA, 450 bp, Klebsiella pneumoniae
atgctcaaaagagaagctatcaactctgttaagattaatcaattttttcatgagtttagtgctgagtatggttacgatgcagaaaaatatcttgatgaattgtataccctcatcgaaaagtgggaagagcagcaatacattgagatttatgaagtacgtgaagaccgcacgcacggcagggcaaagagcagtgactgtgatggcgaaggccgtttagttatcgagtacattggcatttaccatgctcgtttaagaccaaattttgatgatcctcttgttgttataaaatttagtaaggatgacgaaggaaagccttacgtgtctgttcgctttatcactgatcatgaccaattgtttggcgtgaaaaagattaagcatgacaagtcttcgttgtctgctcttcgcaaagctgttgatgagaagatacaagcaggtgagagcaaagattga

SEQ ID NO: 239149 - DNA, 1218 bp, Klebsiella pneumoniae
atggcgatcaacaacaatcagtacctttttcagaacaaatccgggctgtggattttccagatcttcgtacctaaatacatgcgccacgcattcggacataagcgcgcctggcgcaagtccacgggcacaaaagatatagttaaggctcggcaattcagaaaccatcttcttattgaattcaataagttgaaagagcagttaaagccggatactgaggagaaacgcatctctggtgctatcgcgtctctctatcaggaggtaagcaccaacaatgagatcgaggacaggcgcggcaagccagacgaggataaaaccacgtcccccaccctttgcgagatccgcgatgagtacagcgaaaactacaaaaaccgtcgctcctactccactctgagcaaatcagcccgcgccgtggaggtctttcttgccaccattcaggaaacagacatcaagattgatctgattggtcggcgcgtagtgacacaattcatcagaacacaacaagagcgggttgctggtcagactttacagaactggctaacctgcctgggcagtctgtacgagttcgctctgagatcctacgatgccatccccgagggaaaccccttccacaatcacaatctggaagcaaggcgcacaatcgaaagttacgaaccgttcgagtttgtccagatgcaaaagctacttgatgcagcagagccggagatcaagaacattatagtaatgggactattttcaggatgccgccttgatgaactggcaagcctcaagaaatcagagatccaggcggtggaaggtgtgcgctgtttctacatttcgaagtcaaagactaaagcagggatcaggtatgtgccgattcaccctaagctatctgcgattgtcgatgaatacctgagccataattgcggcgaatatctattcccacaggctaacaagattaaccgcgctgacggcaagaaaggccccttctactcccaggcattcaccaggttacgccgtcgtgtattgcctaccgctacagatcgccaatgcttccacagcttgcgtgggatgttcatcacctgtcttgaccgtgccggatgccccgagcaacgcataggggcaatcaccggacacacagaacagaaagcgaaaacggaggctttcaggacgtacagtaaaggggctgggatggttgagttatcgaagtatatagagttggtgaattacgaaggaatatga

SEQ ID NO: 239150 - DNA, 405 bp, Klebsiella pneumoniae
atgtcgaaagccaataatccgggatttgtcttatcaccttactcccagaagaaaatcctcaaagcactaggaagtcaccaagaaaagacggacgctaccgctaaacggcatggaaaaccgacccgctataatattgccatcagcgattatgacaatcttgtcagcggtgagcacggtccgctgatcctgaaagtgagaagggggaaaatcgttacagaaaaacattactgtgccgaatgccacagttacatcagcccaatcagggcatatgccgacagcaactatgggaaagtgcatctttgtacgccttgccatcttgcagcgttcaaccgtagctttggacacgcggatgctatgccgctcaaattggatcatgctcatgcacataagggaaaatggaaatag

SEQ ID NO: 239151 - DNA, 3657 bp, Klebsiella pneumoniae
atgaatacgtcaaatatcaaaaaatacgctccagtggcacgtaaacagttccgcgatgcggtcatgcaaaaactgactacgctgggtattgaggccgataaaaagggcaacctgcaaattgcacaagcaaccgatcttggcgaccaggtgcgttatggtcagttctcgctggataaagcactggcgtcacgtcgtgagcgtctggtcaagcgtgcagaaaagcagggctatgacgtgctggtggagcacatcgcttacacctggtttaaccgcttttgcgctattcgctatatggagctgcatggctatcttgatcacggtttccgtatgctgtctcactcgaccctggaagggggttttgaggttctggatcatgtgccggaagtggcagatgctttggggctggacaaagcgcgcttggtggagatgaagctggcgggagatcgtgacgaagagctgtaccgtgaactgttgcttgcacaatgtcatgcgctgcacggcgcgatgcctttcctgtttgaagctgtcaatgacgatatcgaactggtattgccggataacctgactcgcaccgactccattctgcgcgggctggtggacacgattcctgaagaagactgggggcaggtcgaagtgatcggctggttgtatcagttctacatctcagagaagaaagatgacgtgatcggcaaggtggtgaagagcgaagatattcctgctgccacccagctatttacaccgaactggattgtgcagtatctggtgcagaactcggtggggcgccagtggctgcaaacctacccggactccagcctgaaaggcaaaatgccgtactacattgagccagcagaacagactccagaagttcaggcacagttggcggcaataaccccatccagcattgaaccagaaagcatcaaggttctggacccggcctgtggctccgggcatatcctgaccgaagcctataatgtgctgaaagcgatttacgaagaacgcggctaccgtacccgtgatattccacagttgattctggaaaacaatatctgcggactggacattgacgaccgtgccgcacagctgtctggttttgcgatgctgatgctggcgcgtcaggatgaccgtcgtattctgacccgcagcgtgcggctgaatattgtctccttgcaggaaagtaagctggatatcgctgagctttggagcaagctgaatttccaccagcaggtgcagcgtggcaccatgggggatatgtttgctgaagggactgcactggccaataccgacagcgtggaatataagctgctgatgcgtactttggcattgtttaccagcgcaaaaacgttgggatcgctgattcaggtaccgcaggaagatgaagctgcgttgaaagcgtttctggatggattgtatcgtctggctgttgaaggcgatattcagcagaaagaagcagcggcagagctgattccgtatatccagcaggcgtggatcctggcgcagcgctatgacgcggtagtggcgaacccgccgtatatgggcgggaaagggatgaacggtgaactgaaagagttcgctaagaaacaattcccggacagtaagtcggatttgtttgcgatgtttattgagcgagggtttagttggctcaaagatggtgcattcaactcgatggtgaccatgcagtcatggatgttcctatccagttatgaaaatatgcgtacgaacatactgggtaaatgtacaattgagactatggtacatatgggcaatggagtaatgaaaattgcctttgggaccaatgccactgtatttagaaatattcatgtcccttcttatcagggatcattttcttatgctgagaatgacgatatcgatgatgaaggatacccaaaaaaattcccagtcaaaaatgatcgcttaaggacggctgctgttgatgatttcaaaaaaatccccggttcgccgattgcttattggttgccaagtgaagccagagatgcatttgagaatagtattaagctaggagattttgctcctgctaaacaaggactagcaacagcggataatgacagtttcattcgtctttggcatgagattaatttcagtaggatcaattttgatgccagcagttgcaatgatgcgaaaagtagtaagtacaaatggtttccttataacaaaggtggttcttttcgacgctggtatggtaaccaagattatgttgtaaattggttcaatgatggatatgaaattaaatcgtttgtagacgataatggtaaacaacggtctcgaccacaaaatacacaatgttattttagagagtcagtaagctggtctgatgttacttcaggtaatacttctttcaggtattttccatctggatttatttatgacattactggcatgtctgcacaatccagctcaaaagaagtgttgaataaaacgctgctctttgcaaatacacctatagttgattggtttgtaagatcacttaatcctactcttcattttcagataggaaattactctgtgctcccctttttagagggatggtttgaaagttttgatagtagtgttgctgatatactaatttctgagtcaaaatcagattgggactcttttgaaacctcatggggatttgtttctaataacttaatcattggtaataaattgagtaaagttttttctctattactagagaacaataagaataaaataaacaatatgaaaaaaatggaggaggatgttaataaagatattattagtgcttatggactgagtaattatctggagcacaccagagacgtgaaagaaatcactttgaattgcaacccactttatcgctattctgaaacaagtgatgacgccgaaaatcgatatgtttcagatacctttggtgaacttattagctactccatcggctgccaaatgggccgctactccctcgatcgcgaaggcttggtctacgctcatgaaggtaacaagggttttgccgaattagtcgctgaaggagcctacaaaaccttcgctgccgatgaagacggtatcctaccattaatggattccgactggtttgacgacgacgttaccgctcgcgtgaaagagtttgtccgcaccgtctggggtgaggaacacctgcaggaaaatctcgatttcatcgccgaaagcctctgtttgtacgctatcaagccgaaaaaaggtgagtcttcgctagatacaattcgtcgctatctttccacccagttctggaaagatcatatgaagatgtacaagaaacgcccgatttactggctgttcagctccggtaaagagaaagcgtttgagtgcctggtgtacctgcaccgttataatgaaggcacactgtcgcgtatgcgtaccgaatacgtggttccgctgcttgcgcgataccaaggcaatatcgatctggttaacgatcagcttaagaatgctgaatccggcgctgccactacccgtctgaaaaaagagctggatgggttgagcaaaaaattcaatgagctgcgcagttttgacgaccgcttgcgtcactatgctgatagacgtatcactattgatctggacgacggcgttaaggttaactacggcaaatttggcgatctgctggcggatgtgaaggccattaccggtagtgcacctgaggagatttga

SEQ ID NO: 239152 - DNA, 1083 bp, Klebsiella pneumoniae
atgaaaatagcggcgatttacacgcagagtgttggcccgttgggcgatgcggaaattagctttaaaaacgactggacgggagaggtggaggagaatgtcctcctcaccggcccgaacggctgcggtaaatcgacgctgcttcgtggtatagctatgctgtgggatgccctgggttattggcttgatcagcgtgatttcatgcctttaagaatggaaacaaagaaatggctgcgccgatggaatggagtagccttcgttcttgaagacatgggttttcttggtactgaaaaagttggtgtgtattttggcaacaaggaatgggtcggaaaacttttcatcgaacatcctgaggtctcctggactggtgaaacctttggcagtagctctggacgcataagtctcagtaaaggcatctggagtgcagagtcaggccattcgtcactaagtcctgatcttattgataagtggtcacagattagacagcgactcctgattagtagtgagtacgttaatgctccaaatattatctatctcgatgcagatgaacgacgctgggtttcaccgcaaaaaaatatatcgtccttatcccaggatgatttaagcaaacggtggttagctacatactctccctccattgactggaaagggcagcttgaagcctcgctgttcaatatgaaagcgacgctccctgagctgtatccagagatgatgaaaacgctgaatcagttcttctcagggaaaatcattgaagaagagattcagcctggacagcgtcagcaggtcaggctggctagcggtgatactcatacgctggatgaactgagttctggtgagcatcaggttttaatcatgctctttatggttcaacgttggcttcagccgggcggggtcgtactaatcgacgaaccggatctgcaccttcatccttctctagtttcacctttgcttgcgacactggaaaacattatccagaaaaagcgtggtcagcttattttaacttcccatgctactgacgtctggctgcgctacgaaagtttaggactccgctatcctctttcggttgaaaaaggtgatgagcaatga

SEQ ID NO: 239153 - DNA, 834 bp, Klebsiella pneumoniae
atgaaggagtttgagtggcatatcaagaccatccttgagacaaaaatcactgaaggtaaacgagcgttgatcgttgaaggtaaagcggatgaacttgtttttacccagctcttaaaaaaagtcgatccccaatgggaaaccaactgggttcttgccgaagtcggcgggaaacgcaatgtggtagaaattttgtcaaaacaatatgattggttgggcattgttgatcgcgatgagtgggatgatgcccagttgagccaacggcaacaacaattgcctaacctgctagttttgcccagattttgcattgaaaactatcttgttgtcccgagtgagcttttatctggactgccacccaaacaaagagccaaactccccggtgagagcgcagcggcgatagaggctattacgtcatcgattaccgcaaatcttgaaagttggattcagtttggtaccgcatgggccattatcaacccgctttgggatgaactgcgattgctcggatttaaccgagatcttcttgatccgcaacaggtgattacagagcccgggtttttggcgcattgcgaacgttggcatgcacatctggatcctgcagtactgttacaaagataccagagcaaactggccgaaatccgcgatttgccagttgatgaacagttacgcaaaattgttcacggcaaaaaattttttaaagccgttgtgacccctgcattcatgcagttacttgcaattacgaaagcgatttcagttgatgtatggttcagggaaatgccggtgccaactgaccttgactttatatggcatgaaatgaatttgcctgtagaagaaaattaa

SEQ ID NO: 239154 - DNA, 807 bp, Klebsiella pneumoniae
atgacggcgaatgctagtaaaaaaaataaaaatgcacttgaaggtattaaaaatattacattagagtactatgcggacataaatacaatcatgcgaaagtataacttatctgatgcaaatagaatttgtcattttttagggcagggtgcagttgaatcaggttatttattgtccatgcaagaaactagccagcaacaaattattgttgatggtgttcagcaaggtggtgtgattgttgaagcatcaacatttaatgaaactactaagctaggtcattggtacggagctcttaaagccgagaaggataactatttctccgggaaaaaatacaattcccgtggagggtatatcacaggatcctatagctggattaacggtaactgtggagatgtagatgcacaaaaattcagaggtagagggtttaaaatgctaactggacttaacacatattcaagctactgggtatatcgaggttggttgtcaaaaaatgactttgataaatattggtgggatgacccggagtacaagaaaaaaaattcagccggtatgaagaaaaaaccaccaaaaataggaaaccctcagaaagtgacagaaaatgcatataactgtattgatacaggttgtttttttatagtttgttttaagtctaaagttctcaaaattatggatgaggacaaaattgggaaatctgatgatgacagcattattttgaaagtaactaaaaatataaatggtgcagataaaggaattgcagaaaggaaaatagctactaaaaaagcaaaagagatgattgatgatgaagtttaa

SEQ ID NO: 239155 - DNA, 1293 bp, Klebsiella pneumoniae
atggtacaccaagtgcggaaatgctttcatgcggtcgggaatggaacattatttaccgggcaaatttatgataaaaacagtgatgacatttttaactggatgtatgactgcggctcaaccagtaaaaaaactgtacttagcacaatagctgatctatcaaattggtttggaccacgcaatgttatcgatatgttagtgatttcccattttgataatgatcatgttaatggactcgaagcgctgcttcagaaatattatgtcagaaggcttgttctaccttttactgaatggccgcagagtattcgcgaaatctcggtgatgggaccgaaaggaatctctccgtcagtcgctctgttacaaattgatccttcaaagtggttagagctcaataattttattgatagagtaggtgaaatcctgttggtgcaagggaatggtggtcctgaagagacagatagttcacctgataatcctgataacgatagccctaaatggaaggaacattctgcgtttgatcctgaatctgatactccagatgaaaatacacctccgttgcctgagggcaaccaagaatttccgtcagataaggtagccgccgataatgttttttttaaactgaaaaaccaggctgcgacaacggttatcaaagtggcaaaaatacaccaaagtcaggcggtatattctgctaataattccttcgagtttatgttttataatgcggaaaaacctttctcagcacttggtcttgtttatgaatctggtggtgaaacgtatgcgaaagtttcaaagatgcgtatgtctgaagttaaaaatgacattgaagcgacgatcatttctctcggtttacaccaaaaaatcaccaatttaccagtaaactggcggcaaacgcttaaggattcatatgagacgcacttcggtagtactggggaagctaagaataatatttccttatgcatgtatgcagcaccactgacaaagtgcagagattttggaacgttatttactggcgatataaatctgacaagtgatgtgattgaagatatgaaaacccattttggacaacatcgctggttatcactcattggagtacaggtaccgcatcatgggtctcaacattgctgggctgtggataatgccacacactttgatcttaataaagtatgctttatccagtgcgcaactccaacaaaatatcatccacatgatgtagtcaccaaagatttaaataaatacggatgtacagtatgctcagcgagtcggacgagtccggcccatgcttattactgttattga

SEQ ID NO: 239156 - DNA, 2376 bp, Klebsiella pneumoniae
atgatagaatcaattagtctctccaacatcgccacttatcatcctgacaaatcagaagttattagtctaaaaaagatcaattttatttatggagcaaatggggcgggtaagaccacaatcagtcgacttattgagaaacctagtctttcaatagactccagcattacctggctcaacaatacgccagtgccagcaatggtctataacaatgacttcatcactgccaacttttcagaatccaaagagtttcagggagtatttacactcggcaaggccgaaaaagttcagctcgatcgcctcaaagaacttaaagatgaaagaaagcgccatgaacagttgagagccaagttaatcatctcgcttgatggtgaagatggaaaacccggaaagaatgctgagttgatttctttggaagcaaagttagttggacgatgctgggaacagaaagttaagcatgatgaatattttaagggggcatttgctggtttaaggaataataaggaagcattcaaagcaaaagttcttcaagaacatcagaataacaaatacaccttggttgatttggttgatctcaagactagagctacggttttatatggtgaccaaccctcgaaaatagatcttgtttcgacattggatttatcacgattgatagcattcgagaaaaacccgattctggttaaaaaggtggtaggtaaggatgatgtcagcatatcggcgattattcagcggttaggtaatagcgactgggtcagacagggtatgagatttatggaacatacggatgaacaatgtccgttctgtcagcagatcctgccccatgacttcgagaaggaacttactgattacttcgatgagacttttgaagcggattctaaggcggtctctaccctgcgtaataactatttccaaattgctgaggatcttttggctcaggcatatgttttgttggctttggattgcaaagaactggacaaggaacaacttacccctaagattcaggcactggatgctgttgttcttgtcaataaaggtcggatggataataaagttaccactccaagtactgaagtttttcttgaggggttagaggatattcaggcggatattactgctattattaatgcggcaaacgcgaaaatatccgaacaaaatcgcctagttgcaagcttcactactgagcaacgtagattaactggggaagtgtggaaatatattatcgatgctgagttaaagaataccttgtctgattacactactgagaaaaataaattacaaaaatctatttcgggtatcacattaagccgggataaggccacggaaagtattaatgctactgatgtcgatatcgataagattgaggcggaacttaccagcgtaaaacctacagtaattgctataaataaaattttgaagaattttggctttctcagcttttctctagatcctgcatgtatagataattcttatagaattatccgggcggatgggaaggatgccaagcaaacattgagtgaaggcgagaagaccttcgtaacgttcctttatttctaccatctgctgagaggaagtattacgacgtccggtatcaccactgatcggatcgtgattatcgatgaccctgtttctagccttgatagtgatgtattgtttattgtgagtagcttaatcaaggagctcttcgccgaggttagaaagggtgatagccatcttaaacaagttgtggtgcttacccacaatgtgcatttccataaagaagtcacgtacgatcaacgtcggaagaccaatacttcgcttgctgacgagacattttggattgtccgcaaacctaatgagtattcagtaattgagttccattcaagtaatccaatccggaattcttatcaactactctgggccgagctaaaaagaacaccggtgccagtccttacgttgcagaacaccatgcgtcggattttggagaactatttcaagattttgggtggtgtcgatacataccatcttgtcgacaaatttgagggtatcgaaaagatacagtgccagtctttgatgagttgggtaaatgatggctcgcattacgctccggatgagctttatgtggccattagcgacaatatggcagcaaattacctgaaaattttcttcaagatatttaaagcagctaagcatgatgcacattacaaaatgatgatgggcgattcatatgttgatcttgatccggaagatatctctgagcagcagccaatgacgactgttggcgaagaagggaacactgtatttgatggagccgctgtaaaagagccatcaacccccgtaccgaccgcactcaagtctgaaattgatcagtctggattcgatcaagtggtgccgttttga

SEQ ID NO: 239157 - DNA, 573 bp, Klebsiella pneumoniae
atgggggctttcaaaaaaatattaactcctgttgattacatccgaatagaacacccagaaaaaagagtgtttgacatatatatacctctaatagcctctttagcaattgcagcattcatattttctttagacaaaccggtcccaataattgcaaaagatggtttaatttccgttatcaatggaatattgcaaatactatcaggtttttatatagcttctatggctgccgttgccacattccagaaatcaggcatggactctattatggatggaaccccacccacattaaaaggaaaggatttaacaagaaggaaatttcttacgtatctatttggatatttggcatttgcaagcataatcatgtacttaataggtggagggctccagttattgtccccaacattgagtagtgcccaatgggcaaaaatatgctgggtaaaaataagcttcgttgtcatttatttattcataatcgcaaatattatatgcacaactatacttggcatgtattttatgatagataaaatgcacgatgaaaaaccaaaattaaattcaaagcataaagacctttga

SEQ ID NO: 239158 - DNA, 954 bp, Klebsiella pneumoniae
atgctgttaggggattatgatcgttatgtagttgaatgtgagatggagttagtacgtgccccaaaagatgcgccaacgatgcctgttctagacgtactgatagctgtacaaaagctctttgtcagtaagaaggccatttattctattgagaatggtaaatcaaccgttcgtatcgttgatatgttcataaatgaaaacgagggatatacagtattattgctacaatacgccaattcaaacgcgtcagatcctcattttgctaacaaaaaaaccggagtttcaagaaaagcaaatcgagataaagatgaagcaccagcagtaacatcacacctctgtataaaacatacacccaaggataaaaatctcttccctgacctttacaaagtattggttgaagaggttcctggtcttacgaaaagcttaatggctagtgcattaacatggatgattgatgagtcaactgattatacgtttatgcgcgatgacggaaaaaagccaagagaaataaaatgccgcccgattattgatatatctccttacgcatcaaaaaccttaaaggagtctttatcaacaggaattttgacgggaatgacggctgtcagatacaaaaacaatagacaattagatgatgatggagatatcactattgttcaagaagctatgactttatcatttaaaagtacgaccggccaaaaagctatagatcttgtcaaaaaagctagcgatttagtaagaggaatgcagtattcggagttaaaattaacacgtaaagataaaaacaagcgtacacatagtgatgaaattgatatttcttacgagaagtcaattgaagatatagctgataccatcttctctgaaaaagagaaaataatattaagcgatcaaattgaaacctgtgaaaaaagcatccatactcagcttgctggaaaaatgaaggctttactgctaaaataa

SEQ ID NO: 239159 - DNA, 222 bp, Klebsiella pneumoniae
atgtttaaatattttattctgcgcacacagcagcagctgttctgttatttctgcggcatcgtgcttgcgatggttcttatgctcctgttcccttctgttttccgggggagtgggttttatctgcttttatcgtctgttgtgctgttctgggcaggtcttgtcctttatacccgtcacatcgaccggatgagaaagccaatcagaagagggacagaaagatga

SEQ ID NO: 239160 - DNA, 1428 bp, Klebsiella pneumoniae
atgaaatttttgcaaagaaatttttattgtattattgcattggcaatatctgattttgttagttttgttgtatctctatatttgtcactgtggattttgtcgcaggttcttacgaactttcaacagcgtgtccctgatgagcaaatttatggatggatagccctacactggttgcttggggtatgctgtgtaatttggtttggcgtaaggttaaggcattatttttatcggaagacattttggtttgaattgaaggaaatattgcgaacgttggttatatttgcagttattgaaatagcggtaatcgcattcgcaaaatggtatttttcacggtatgtttggctattaacatggttattttctttcttattagttcctttctttagaattggaactaaatatttattagataagtcaggtttttggcttcgggatacttggattataggaagtggtaaaaatgcaaatgaagcatataaagcaataaatagcgaaaaaaatctcggcctacatgtcgttggttttataacaacatctgttgatggtaatgaatgtttatcgttaacgaatgtaaaaaatttagatgtctcacccgaatggttagaaacaatagataaaagaacacaattcatagttgcagtagaagcgaacgagggagaaaccagaaatcgttggttgagggaattcatgatcaaagggtttagatatgtttccgtgatacctactcttcgaggtgttcctcttgacagcactgatatgtcttttatatttagccatgaagttatgatattccgtgtgcagcaaaatttggcaaaactctcctccagaatcttaaaaagagcatttgatattataggctcattatcaataataattattatctctccgttgttagtatatataagccataaagtgagaaaagacggcgggccggctatttatggtcatgagcgagtaggtaaaaatgggcgaaaatttaaatgcttgaagtttcgatctatggtgataaattctaaagaggtattagaggatttattaataaacgataatgaagcgagagaagaatgggaaaagacatttaaattgaagaatgacccaagaattacgaaaatagggcattttcttcgaagaacgagtcttgacgaattgccccagcttttcaatgttcttaaaggtgaaatgagcttggtaggaccacgacccattatcacagaggaattacaacgttataatgaggaagtggattattatcttcttagtaagcctggtatgacagggctttggcaagttagtggcaggagtgatgttgactatgatacacgagtatacttagattcgtggtatgttaaaaattggtcgatgtggaatgatattgctattttgtttaaaactattgccgttgttttgaaccgtgatggagcatactaa

SEQ ID NO: 239161 - DNA, 819 bp, Klebsiella pneumoniae
atgatcataactcctaaaaggcggaaaatcagtctattgggtgttttaaaactgattgtttcccttttagtactcaaatatcggtttgataaagttatatatattcaacataatttatatcctcatgatactttcgagtctcatataaaaattgcaaaatggattattgaaaaaatatctcttttagttgatgttgttgtagtccatagccccttatttcaagataaaatatatatacctcatcccttatatgaatatccacttaaagaaattaacataaaaagtgacttgatagtacataaggactcatatttgatctttgggagaatagagaaatataaaaaaattgaggaaataattatctctttccctccatctaagaaattaataattgcaggtttttgtaatgataaaaaatatgaaaaggaattaaacgagattctttcaaacaaggagaacattactttcattcctcgttatctaactgatgaagaagcctctttattatttatgtcatgtaaagcgttaataatcggacatgctgatcaagacatgatagtttctggttcttttttttattctttgacacaacaattgccagtgctggcgataaaaaccccttttttagaatgggttcaatctgaatccaaaagtgatatcttattgacttttaataacatcatttctatgatggaatttattgaaagtcaaaaaagtggctttgataagaaaattggttttgataaaaatactattgatgaactaaattcagagtttggagacgattatatctctaaaattataaaaacaattatttaa

SEQ ID NO: 239162 - DNA, 633 bp, Klebsiella pneumoniae
atggttaatggcatacctaaagaaaagttatttaccatatacaatggagtttctgaagttgaacacattgataaattaccaaaaagtgatctttttaatatactatatgtcggtcgctttgattaccaaaaaggttttgatagattagagaagattattaacggattaaattattcaagcagtaatattaagtttacaataatcggtgactatgtctcagaaagtattaataataatagaaaaaatctagataatgcttattttactggctggttgccaaaaagcgaaatttattcatattattataatgcagacttattgataataccttcccgctgggaagggttggccatggtacctcttgaagcatttagttgtaagctcccagttatggctagttcctgcacttcttttcctgaaattatcaaagataaatataatggtttcttagtagacatggataatactgaaattgttatccagttacttaatgaaatagcggctgataaaaatattgacactctcgaaagccttgcctctaatgcgtatgttacttatcttgaaaaattctcttcaacaaaaatgaatgaagatgtatacgatttatatcgtatgagcgaatctgtctgctga

SEQ ID NO: 239163 - DNA, 816 bp, Klebsiella pneumoniae
atgtgtataagagacagatgtagtactgcaccagcgttttataataaccaagttgtcactcatcatgacattacctataaaagatatcccaaaagtttttcattaaaatttagattgttatatggctggttagtccctaaaattcttaaaaattcaaagaaaataattaccgttagtaacttttcaaagaatgagatatcaaacttcttccatatagataaaaataaaatcgatgttatctacaatgctgtagggcaagaattccatactactacaccaaaccgtattgataaagaaaaaccatatgcattagcagtatcatcaccaaattatcataaaaattttcatggattaattgatgcgtttctaagtactgaaatcgatctaaacttaaaaattataggaggaggggctgcaagttttaagaaaatgaatttcagtaacgaagatgatccaaggatacactttctaggtagagtcgatgatgataaactgattcagctatatatgaatgcggagtttttcatcttcccttctttttatgaaggttttggaatacctccattagaagctcaagcatgtggatgtcctgtcatagcctctaacgcagcctctatgcccgaggtattagaacaaagtgttctttatttttctccccattcaaaacatgaaatgcaaaatgctttgcttgaaatttacaatgacgctgaattaagggttaaactcaaaaaattaggagtcaagaatagccatcgtttttcatggaaacactctgctgaaaaaattaatttattacttgaagagttggaaaactaa

SEQ ID NO: 239164 - DNA, 492 bp, Klebsiella pneumoniae; identical to SEQ ID NO: 236923

SEQ ID NO: 239165 - DNA, 846 bp, Klebsiella pneumoniae
atgagtaaaatcatagagatgttcggactggatacacgctcagaacaaaactgggaaagagtgattcaagagcagtgctgtccttttaggcaaaagacttgctttaaaactagaaaatcagattcaagtgtagctattggtacatgctctgtgctctatggaagggagccacagccaataatgatctgcccggcaaggctcttggaacgaggccagatatttactgattgtctgcatttgcttaccaaccatgagccaggaaatgaattgcacgttgtgccagaggtaaaaattccaggcggaaacgttgatttctttttggtctccgtaagaaatggcagagtaaaagactttgttggtatcgaattgcaaacaatggatactacagggacagtgtggccggaaagacagcgttttttgagagaagtaaatgtcatacctagcgatgatgatgagctatccactagaccatatgggattaattggaagatgacggccaaaactattttggttcaaatgcatcataaagtgaagacttttgaacatataaataagaagctcgtgttagtggtccaaaatcatttactgaattatatggcaggagagtttaatttcgctcatttaaatcaacctgcaaggcttggtgattcactccattttcattcatataatatgagccgtattgaagaacaatacaaaattggtatggacacgagacttagtactgatgatgatggtatttcacaatgtttggggcttcaggctgaggctcgtgtagagctagaacaaataattttagtgctggaaagaaaaataggaccagcaacattatttagaatgttttaa

SEQ ID NO: 239166 - DNA, 1089 bp, Klebsiella pneumoniae
atgacaaatggttatgagaaaaaggtaacgtgtgttaacgacgctttctctgagtctttggctagctacaaacatacaaaagggtgctctcctctgttgatgtgtggagatgctcttaacgttttggcacagctcccttctgattccatcgatttcgttatgacttccccaccgtactggggcaagcgggagtatgagagcggtgggatcggattagaaaccgattacatggactttgtcaaaaatttggctgaaatctgtttacagataaagagaatcttgaagcctacggggtcgttttggttgaatcttggggatacgtataaagataaagctttactgggattgccctggcgtgtggcttttgaactaacggataatcaaggatggattcttagaaatagtgttatctggaataaattaaagggaggcatggataatagtgctgatcgccttggtaatgtacacgaaaatatatttcattttgttaagaaaaataaaggatattactacaactcagatgcgattcgcactaagcctagggatgccaaagtagtaaatggctccgttgtttctgccacaggcgtttctggtgttagatataaaagacaaatagaactgtcaacaacattaacgccaaaagagaaagtgaatgctctttcagcactgaacggtatgcttgatgatatctcgtctggaaaattctctgatttcagaatggtcatccgtggtcagcaaagaaccactcactcagaaagtgagaaagtatctggaagagcaaaagaacttaaagataaaggcttttattttctgcgttatcatcctaagggtagtaagcctgctgatgtttgggatattttgccagaggatactcagaagagaaaatctcacttcgctgcatatccattagatctttgtagaattccaatcctagcgacttgcccagaaaatggtattgtattggatccattctcgggtactggttcgacactggttgctgcatatgagctaggccgcaaatctgtggggatcgatatatctcaaagctatttagaacttactatggaaaggtttaagctattaaaatga

SEQ ID NO: 239167 - DNA, 1110 bp, Klebsiella pneumoniae
atggcaaagatagggcgaaatgattcatgctggtgtgggtcaggaaagaaatataaaaaatgtcacttgggaagagaaaaggaaaaaaatatagatcgaggcgatgctaattcagttcttaaactatttacaaatgtaagtaagtgtagtgttcctgatgatttaaaacacgaatgtgagcgcaagatcgttaaggctcatacattatcaaaatcaaatagtctaaaggaaatcgcaaagaatggtcatgtattaggaacaagtaaaggttttgatgcatttgaaaggcataatggtgtgcttagttttgataaaataggaattaacaaagcatcaactttcacaggattctgttcttatcatgataaaatgcttttttcctgcattgaggatgaagagtttatagcaaataacaagcaatgcactatgcttgcttacaggcctttgatgagagaattctatgttaaagaggcaaatctaaaagttgtagaggcaagcaggatattcgatagaggatgggacttccaggctcagttggcatgggcaagacaagtgaatgagaatattgaaggtacaagattaagtttaaaggatttgagttatattaaggatgaaattgagtcgtcaatcaaagataatacatttagtgcattaaagcatttaattataaaacttgaggaacccccaaaagtaatggcatgtggcgtttatgccccaattgttgatattctaggtgacgaaattcaagaaataacaaaagaagacgcgagacctgaatatataatcacaaatgttttagctttaaatggtaatggttacgtgattttttcatggttaccagaagataataacgtaattcaaaagtttattgcatctattaagaaatgctccagacatctcttaggtgacaaacttacaaatcatatcctttcatttatggagaatgtttttgcatcagaggagtggtgggactctcagggggataaacagggatatataaatgagttattgatgcagggagtaagaatgcatgtttatgatttaggacttatttctcatgattataataactacaatgctataacagtaaatgaaatcattgaaatttaa

SEQ ID NO: 239168 - DNA, 147 bp, Klebsiella pneumoniae
atgtgcggaaacttttcccagtcaatgacccgcgaagattatctttcctatcttgccgatgaagccgatcgtgacatcgcttatgaccccgtaccaatcggccggtacaacgtggcgccagggacaaaggttttgctcctgagctaa

SEQ ID NO: 239169 - DNA, 303 bp, Klebsiella pneumoniae; identical to SEQ ID NO: 93655

SEQ ID NO: 239170 - DNA, 1386 bp, Klebsiella pneumoniae
atgtttaaaacattaaaagtagaaaactttaaggtttggaccgatacaggtgaaatcaaaatgtcacctatcacccttttttttggaacgaatagttctggtaaatctagtattggccaactactcatgatgttgaaacaaacggttgaatcatctgacaggaaaactccattctatcccggcggtaaaaattcagcagtacaattgggctcatttcaagatatggttaacatgagagatgttaacaaaagcatttcatttgagtactcctggtcaatagatgagttatattctaaatcatctttagacagcattatatcctcatcggaaatatgcaagtttagatctgagatatcttttaatcctgaaaccaatggtttatatgtcaatggcttctcatatacattctatcagaaagaaaaagatgatgtatctatagggcttattcgcgacctaaaatcaaattataaaatcaaaacaaacaacttcactctaacacggcagaaaggtagagtttgggcaataaaagatgtagttaggttttatggtttccctgaagaggttgtagcttatcatcaaaatgctgattttgtacaagacattaacctaatgcatgaaaaactattccgttcagtttgttatttagggccaatgagaaataaacccgagagattatattcatggactggaatttcacctgaaagcgtaggttatgcaggtgaaaatgcaattcccgccattctttcatcaaaagaaagaagaatcggacttgcttataaaaagaaaaataagccattagaagaaatcattgctgaaaaattaaaacaaatggacttgattgatagcttttctgtaaaagcgatttcagatcatcggcaagaatatgaagtaaaagtcaaaacaaaaggttccaaacaatgggtagaccttccagatgttggatttggcgtttctcaggttcttccagttttagtacaatgcttttacgctcaacctggctcaataatattaatggaacagccagaaattcatttacatcccaaagcgcaatcagtgcttgctgatgttatgatagatgttatccgttcaagagaaaatggaaaatcaagagacatacagcttattatagaaactcactcagagcatttccttcgcagactgcaaaggagaatagcagaagacacaataaagtcggaggaggtttccgcttatttctccgatatctcatcctcaactccaaaattaacaccattgcaaatcgatatattcggaaatattctcaactggccagaaaacttcttcggcgatgaactaacagacattacagagcaggctaaatcagcgttaaaaagaagaataaaagaaaaagaaggtatatctaaatga

SEQ ID NO: 239171 - DNA, 540 bp, Klebsiella pneumoniae
atgaataaattacctgctgcttttttaattgatacaaatgttgctgttacagctaatatgcacacagatatagcaaacattccagatgatatgttaaactgtgttttagagtgtgttgaaataatagaaaaggcaattgaaaaaggtgggttagttgttgatgaagcacaagagatagttgaagagtatcgttcaaatttaagcatgagtggtgctcctggcattggtgataaatttatgaaatggatttacactaaccaatggaaattccctgctaaaaacatggtaaaaatcacaaaaacaggaactagctatgaagagtttcctgctcatgaaggcctgacaaattttgacttatcagatagaaaatttgtggccacatcatatgcacacgtagacaaaccgcctattttccaagcaactgatagtaaatggtggggctggaaagaatctcttgcggatgtaggcataacggttcactttgccgacgaaaaactcataagtgacatatatactaggaaatttccaaatggaagatga

SEQ ID NO: 239172 - DNA, 681 bp, Klebsiella pneumoniae
atggaagatgaactgtataaattcccttccactccacatgtcttttaccatcctaatatcagggatgataaggtcatttcagataaagaacgacttttactctcaactcaaagagtaataatagaagagaaaattgacggagctaatctaggcatttcctttaatgctaatgcagacttactccttcaaaacagaggttcttttttacatcagccttttaatggtcaatggaaaatgcttcctgattggttgaatcacaatcacgacaatctttttgactgcatccgagaccaatacattatatttggagagtggtgctatgcaagacattccattcactacacccgcttacctgactattatttagcgtttgatgtctttgataagaaaagaaaaatattcttaccaatccctcaaagaaacgaaataatttcaaacgcaaaccttcattgcgttccttttcttgatgaaggtttttttgaactaaacaagctatcctcttatataaaaaaatcaaaatttagcgatgaaatctcagaaggagtatatttgagagtagagtcccccgaggctgtaaattttagagcgaaaatagttcgctctgacttcactcaaaatattacagaacactggagcagacgtacgattaaaaaaaatcaaatcatgattaatcacttttaa

SEQ ID NO: 239173 - DNA, 312 bp, Klebsiella pneumoniae
atgaaaaatagaactatgctgccgtgtgtagtgactgtcactaatgatgaaactgaaatatttatggagatggctattaataactttaaaaagcatcttcaggtcatgattgattgtatgggagatgattatgagcgtcactttaaagaccggctttatattgaggatgtgattattaaagtgatagagagaacaaaaaaagattttgctgaatcaatgaaagataataaaggaaaagaatattacctgttcttagatgaggttcgaaggaatctgagagttatttatttggcgtatcgtaaaaactattaa

SEQ ID NO: 239174 - DNA, 198 bp, Klebsiella pneumoniae
atgcgtgtaccagaagttctgagtagggtggggttcagccgtaccacattgtatgagcgtattaaagaaggaagtttccccgatagagtgaaaataggcttaaggtctgtagcttttgttgaaagtgagattgatgcatggattgaaaaagtgatagctgaatctcgctgtgtatctgaatacaactatcgtaaataa

SEQ ID NO: 239175 - DNA, 846 bp, Klebsiella pneumoniae
atgaaaagaagcgaaatcaggaaggcgattgaagtatggttcgatattgatcgctatgacgcaattgaacagctcaccctacagcagttttacgttgaggttgagcggcgcatcttggcttacaaaatgttgcagaaacgagatacattgcctcccctgaacagactcctgctggatgattaccgcaataagatcttgagaggtgaagttttattcagtggtgatacatccacgcaggggcatgagcttgccagaacctacgctgttgtcccggttacttgcagtaatgcgcaactatatgcgaaaagtttaacactgcttgcaacccaccctgaaacatcccaaaagagtcagtctgaatacctttcggagtatctgaaggagtccgggataaaaagcctgtcttcgattactgtcgatatcttcctacaggaggcatcaaccgaagacataattgaacacttgaaagtgctcatccctcaatggaagaaacagttaaaaatgaatgctccggcagtgagggagtatcgatttggcaaaagtacattcagaaaaattattgaataccgtcttatacccatgatggacctcattttttggggagcagataatgatgatatcaaaatcccactttccctaatgtcttcacttcttcatgaggacagtgataatgatcgtgatgaaggaatgctaaaggcaacggattacccgctggcaatggcgttcttaacagatgaaagctatctgaaatcacttgaagattatatgatggaaaacaattacttaaaagatattccagtatctgaacacgtcaaagacgataagaagaaaaaagcagtcaagtaa

SEQ ID NO: 239176 - DNA, 999 bp, Klebsiella pneumoniae
atgcgttatgaattatttggtataactcccgaaaaaggccaatggcgatgggaaaaaaacagaacaactgaagccatagaaaactatcgctttttcttagaaaaaaagtctcaacagatgagtcttgatgattggttttttgataatcttacatcaacaaataaaaaattaaatttcgttcgtaagaacgatgaggatgttgttcagtattatgtcccaccaagtgatggaaaaatactaagcgataactggatggatatttctttaagcggaaatgaaactattttcgacaccgaaaaaaatactgacttgttagaacgaatcatcaactggatttgtagaagttctaacgatatagttttagactttttcgctggttcaggaacaactggccatgcagtgttgaaaagcaattcaaaaaataatagtaacattcattacatgctcatccaattacccgagccaagcaataaatctgagtttatgactatctcagatttaacaaaatatcgtcttatcgaatcaggtaagaaagtaaaagatggaaaccccgactggaatggtgatgtcggttttcgtgtgtttaaactcgatacatctaacattcgtccgtgggaagcctctgccgaaacactttcacaacagcttgatgcttatgtaagcccaatccttgaaggccgtagtgaagaagatttgctgactgaactgatgcttaagcgtggtattgatctgagtgtaaacgttgaaacccgtcagtttgatgaattaactgtttcttgtgttgatggtggcaaattgtttacctgctttacccgtcaaatccctgcctcttctgttgaggtactgaccaaggggatcatcgactggcataagagtttgaaggctggcaaagatactgtctgctatttccttgatgacgcatttgaaaataacgttgctaaaacaaatctttgcgccattctggaacaacatggcctaactaacctgcacagcctgtaa

SEQ ID NO: 239177 - DNA, 156 bp, Klebsiella pneumoniae; identical to SEQ ID NO: 139799

SEQ ID NO: 239178 - DNA, 1224 bp, Klebsiella pneumoniae
atgccgaagaaagccaaagaactcaccggactcgcagtctctaagttaaaaaaagaaggctcttttgccgtcggtggcgttgacggcctgtatcttcgaaacagaggtcagtctcgtgcatgggtgctttgcgttactatgggggtaagagttaatgctctcggaagaacagttcctagacgtttgtatatgggtcttggcccttaccctgaagtttcattagcagaagcgcgtgacaaagctcgtgagctacgtaaacaaatacgtaatgggattgacccccttgccgaaaagcacgcccataaagtacagcaggaacaactggcgtataagaacaaatcctttgccagttgcgcagaagacgtcatcgcaattaagaccaaagagttaaaaaaccagaagcacattgctcagtggcgttccactctggaaacctatgcttatccagtcattggtcaaaagccgattgctgaaattactaaggttgacctgctggcaatacttgagcctatttggttaacgaaaaacgaaacagctagtcgtcttcgcggtcgcattgaagcgatcatcgattacgctaaagcaaaagaatattttgaaggtgataaccctgccgcatggaaaggtatgcttaagccgcttttaccaatgccaagcaaggttcagactcaaaaacatcatgctgcattaccctacagcgagatcggttcattcatatcggacctacaggaacgggctggaacttccgctcgcgcacttgaattctccatactaacggttgcacgttctggtgaagtccgtggtgctgaatggtcagagatcgatttgaaagggaaaacttggaccattcccggcaacaggatgaaagccgggaaagaacatcgtgtaccgctgtctgacgctgcagtagccctgttaaaggctttaccacgtttcaaggacaataatcttgtattccctgcccctcgtggtggacagctatctgatatgtctttgctggcagtactgaaacgaatgggccatagtggtttaacacagcacggtttccgatcaacatttcgtgactgggctggtgaaactacagatcatcaacgtgaagttattgaacacgcactggcccatcaactagctgataaagcagaggccgcttatcagcgcggaacgttatggcctaagcgtgtggcgttgatggatgattggacgcgatattgttttgccgtttaa

SEQ ID NO: 239179 - DNA, 501 bp, Klebsiella pneumoniae
gtgggtaaaggccagctgctgactgccaatctccagaagctgatcgcggacgcgcagattggcaatgcccagctgcggcaggttacgcgacaggaccaccagggtcatattctccggctgatggcgcaggaaaaagcgcatcgcgtcatggatcaccggattattgatcagatggtaatcatcaatgacgagatacagcgggcgctgccagtcggcaagttcaataaacagctgcgcaaaaagagaggagagactggcgtactggcgtttttgcaccatcgcttcactggccgcgcagtggttgccggtagcctgctgaatcgccgcgatcagatagctggcaaaacgctcctgctggttgtcgccttcgtccagcgaaaaccacccaagatcgtttttacccgcggcccactgagaaatgagcgttgtcttaccgtacccggcaggactggtgatcagcacgagacgataattgttcgcgccggaaagtttcgccagtaa

SEQ ID NO: 239180 - DNA, 198 bp, Klebsiella pneumoniae
atgaacccgataattacggcacatcaggaaatcgttatcgaaaactcggttcgctatatcgagttactgaaatcagaagcgacaaaaattctggatgaatactgggagaactggaaggcacgaaatcagttgatatcccagaccacgtatgcaaacgggggggaaattcatgcccggtcgattcgcaccggtgtttaa

SEQ ID NO: 239181 - DNA, 273 bp, Klebsiella pneumoniae
atgggctttaaaaagagcgaggtaagccagctaaatagtctggcaagtgccataaagttaatagaatttgatgccaataaatataccataacacatttgtatggtcgtaaagttgccggcagcctggagtaccccaaagggataaataaaagaaaaggggtaggtaaatggctcggtgaaaaatccgccatgttgctgtcaaatgtcgttgtaaacaattctattcatattttagtatatgaccctcaaaatcctacagaatcaaccagataa

SEQ ID NO: 239182 - DNA, 285 bp, Klebsiella pneumoniae
atgggcacaccaagatttacacctgaatttaaggaagaagccgtccgtcaaataacggaatgcggttattccgtcgccgaagtatctgaccgtctgggtgtttctgcacacagcctctacaagtggctacgggctatcaaacctgataacagcgagcagtatgcccggggtatactggaagctaaaagcgagaccctgaaactccgggcgcagctaaaacgaaccgaagaaaaatgggatatcctgaaaaaggccgcgcggtactttgcaagggagcccggctga

SEQ ID NO: 239183 - DNA, 498 bp, Klebsiella pneumoniae
atgtcgccggcagagaaaaacttatttctcatgccatggctggcgacatcgctgaagcaacgtcttctttggtgtgaaatggcaccagacatcgagtggcttctgaaacagggccgacagctgggcgtcaatgctaaactgccccataagctgaactacctctggcgctcctgcacaggggagttgtctgagcagaatgacctgttccggttgacccatgctctggagacagcgaaggctatgagctggaattaccgtatgttaagcgaccgggaatggtccggccggaatgccagtgtgaacggcatttatccttcacgctccagtctcgatgctgcttttgacgacaatggacgacagataaatcctttgatagcacgtctgacagggaatgtgccggggctggtgaagttgtttatccgcagtgactggcaggtgctgcctgatgatgatgcttccctgacttatcagcatttgttgatagccagggaggcttag

SEQ ID NO: 239184 - DNA, 234 bp, Klebsiella pneumoniae
gtgataaaaagcctggcacctgagggaatgctggcggccgtatttgaagacgacggccggaccgggtatttctatgcgctcgatgagtccgtagaaggaaacccgattgcgccggttgtagagaggttgaacggtattgaagcgcacttggatcaggagcgggcagtacaccaccagaaaacgctggagctggaacgatcgcagccgcaaaaaggttttgagcttggaatgtag

SEQ ID NO: 239185 - DNA, 522 bp, Klebsiella pneumoniae
atgaagtgtttctgggttttctcagttgttttaactctgtcgtttacagccgttgctgctgagaagaacgacaatgttacgaatgtaaaaccttccaccggtagggacttatatctaacctgcaaaggttatcaggtgaagggttcatctgtaattaacatcgataaaccttcttacctagaagggacaggtgagcaggttgaatttgcaatcattactcctagtggtacgtctgatggacttaaggttttttttgattcatggggtttttctccttttggattgattgaaagtcatgtgatgcaggagcactggtctttagtccatgtaggagggcgcgcttcagttaatggggacaagattgactattcatttgttgataaccagccacaggcgggagatggttatcaacccaaaactggggtgttcctgtacggctgcatgacctcggataaaaggccatcttgggtcgaaaaaatctactcaagaacaggcatgtttcgagggggcatagaaggctaa

SEQ ID NO: 239186 - DNA, 423 bp, Klebsiella pneumoniae
atgggagacattgaccacagaatcatcacactgttaagagacaatgctcgtatcccggtcagtgaaattgctacacgtatcggcgtatcacgcgcaacggtgcagaagcatcttgatcagatggaagcgaacggcaccatcagcggttacactgtacgcatacggcaggaaccggagacggaccttatacgggcctggatgagtattgcgattgaaggtaataaggcgcaaaaaatcattcatcaactccagggagaagcagcaatagcaacgctgcatacaaccaatggccgctgggatatcctggtagaaattcacacccgcagtcttgaagagtttgacaaggttttaggggggattcggcgcatccctggggtggcaaatacagaaacaagtattcttctttctactcgtaaaatgtga

SEQ ID NO: 239187 - DNA, 198 bp, Klebsiella pneumoniae
atgcctgctcgcgtcaacagccagatgcagttttcgccagatacgacggcgctctttgccgtgctttttgactttccactcaccttcaccgaaggctttcagccctgtggaatcaatcaccagatgcgaaatttcaccccgggtgggcgtttgaaactgacgttaaccgactttgcccgcttgctgacactggtgtaa

SEQ ID NO: 239188 - DNA, 879 bp, Klebsiella pneumoniae
gtgattaagtttttttttggtaaggcttacaggttgcttttggagaatttgtctacaaccaatagagttaaactaagatattttagagtgtataaaaagcttccaaatataaaaaaacctaaaacctttaatgaaaaggttattagtagaatactaggagaacaaaaggatatatactccacattggctgataaatatcttgtgcggcgtttcgtatccgagcgggttggagaggagtatcttattcctctccatttggctactagcaaccctagtgacttattaaaaatagatgattggtctggattggttatcaaaccaaatcatgcggcaggcatgatttatatatccgatgacaatccctctaaagaggagaaagacaatgttgttaccactgcgaaaacctggttgaaaactgacttttcctctttttgcgatgaaatgcattactccaagataaagccaatgcttttagtggagaggaaaataacaaaacgtggtgaaatccctcgtgattacaagtttcattgtttcaaacaaaaaaatggtgatattaattttgtgttgcagttagtggacggtcgctttgggcaggagtcacgaagctattttttaaattcttttgaaaatatggtttggagtcatggcgctggcaatcatttattaagtaataatgaggttgctgttttaaatgaagtgattttattaaataaaagacttatccttaatgattttaattacgtacgtattgattggtatattttaggtgaccgaatatattttggtgagattacatttactccaggggctggaattggaaatgaatttggacctgccttggaaaaacaaatggctgagtggtgggaggatgaatattaa

SEQ ID NO: 239189 - DNA, 1245 bp, Klebsiella pneumoniae
atgtattctaatgccttttggatgatggctgaaaaattagtcagcatcatcggtcttgtgtttataaactcctatatggcaaaatatataggacctactgattttggtaaaattacttttgctacgacaatatttacgtttgtacagaccatggcttggtttggtgggcaaaacatactttttaaaaggatgagtgagaaaagaaaatcaggtattgctcttgcattacatactcaaaagcagcgcagggttatttttgcactctcttcattgattgccttgttctatttgtttttttttacagataccctgacatttgtttttggggtggctaactgcattgccacttattatatagtgatggatgttttcgctgtatataataatacgcagttaatatctagaattaatgcattaacaaatggtgcagggttgtgtattgcttttatagtccgctttttaatttcatacttggagttgccagtatatacatttagcattcctattatattaatccctgcaataccttatgttattagatatatatactttcacaataccattgaagacactgcggtattaaaatcgaaaacgaagaaatataataagtatttgttttcagcgggagggtcgttgttactatcaaccctgtccattgtgatttacacacaggtatcaaatatttttttggctaaaataacctcatattctgatttgggtatttataatgtggcgctgacgcttggcagtgcgtattcatttattccagttgcgttaatcactagttttttttctaaaatctatcaagagaaagattttgaaaaaatgtctaggcttctaactttaataaatagaattgtgatcgtgataacaatttttatattatttggtttttattttcttgggccgtacattatcagcatgctctatggttcggcctataaactggctgttgagttggtgccaatcattattctagcgacaatgttttcatccttgggaactatttgttatagattcataataaaatactctggctacaaatacctttcatataaaatgacgttaactagcttgctcagcatcccattctcatatgttatgattaaccgttatgatgttttcggtgctgcgtattgttttcttgtggtcgaagttctgtcatgcacattattaaattatttctttaggaatggaatgattctaaggattcatttaaatgttattgggttgatgaggcgttga

SEQ ID NO: 239190 - DNA, 165 bp, Klebsiella pneumoniae
gtgtcagtgaaaatacgaaatcaacaagttggtatcattaccagcgtcggcatggttccagcgatcagatgtcaccgacagaatatgaaaatcagtattatcaacggctcggaagtgtctagattatccgtggcgattcaaaagctgatttttgtcgtggtctaa

SEQ ID NO: 239191 - DNA, 621 bp, Klebsiella pneumoniae
ttgattatttcttttatatccttccgaatcacaacaggagatataacagaaatgaaaaagatagttctattaaaaaacagaaagagtaaaaaaggtttttctctcttggaattattgttagttcttgggatcatcgcagcattagttgttgccgcgtttattgtttaccctaaagtacaggcttcacaacgcgcacaggctgaaagtaataacatagcgactatacaggctggtgttaaagctctttatacatcagcttccagtttcaccggattaacaaactctgtggctgttcaggctaaaatcttcccggataatatgttaagtggttctggttcagccgctaagcctatcaatgctttcaaaggaaatgttacattggctgcggataaaactggtccgtcaggggcggatggttcctcatttacaataacctactcaaacgtgccagcagcagagtgtaccaagattatcactgcagcagcagggaatttctatacggcaggagtaggaactgcaggtaatgtcaaagctgcaggtgaagtattagatgttgctaaaactgcaacacaatgtcaaaacggtgggaatagcaatacattgatcttcacgtccttataa

SEQ ID NO: 239192 - DNA, 174 bp, Klebsiella pneumoniae
atgataaaacaaacattgaaactgaataatataaaacagctcattactatggaaattccgcaaacctataaatatgatttagaacagtatgttaaatctcttcctgtcggcaatgaagatttagtgcataccaacgtaatcggtcccttcttaaagtgttataagtttttatga

SEQ ID NO: 239193 - DNA, 753 bp, Klebsiella pneumoniae
atgaatgtggacgaggtcgcttttaaaaaaggacatcgttatataacggtgatctccgatcgtgacgggcgggcgctggctttaacggatgatcgaggtaaggaaagtcttgccggttacctcagaaccctgactgacggacagctgcaggccattaaaacgctctcaatggacatgaatgcgggctatataagagccgcgcgcatccacttaccgtgtgcagttgataaaatcgcctttgaccgcttccacgtagcgaaacagctgggtgaggtggtggataaaacccgccagaatgaacatccccgtcttccggttgaaagccgccgtcaggccaaaggtacccgcttcctgtggcagtacagcgacaaatggatgactgagtcccggcaggaaaagctgatgtggctgcgggaacagatgcagcagacaagccagtgctggacactgaaagagctggccaaaaatatctgggatcgcccctggagcacagaacgcaggaatgactggttgcagtggatatcgctggcgtctcaatgtgatgtgccgatgatgaaaaacgcagcgaaaaccatcaaaaaacggttatatggaatactgaatgcgatgcatcatcgtgtctcgaatggtaatgcagaggcgctgaacagcaagatcagactgctgagaataaaagccagaggatacaggaaccgggagcgctttaagctgggagtgatgttccactatggaaaactgaatatggcgttctga

SEQ ID NO: 239194 - DNA, 342 bp, Klebsiella pneumoniae
atgtatgctctggcggatgtgaacagcttttattgcagtgttgagaaatgcttcagacccgatttacgcgataaaccagtggtcgtcctttctaacaacgacggctgcgttatagctcgttgtaaactggccaaaaaattcggcattcctatgggtttaccctggtttaagttgcgtgagcagcgcttcccggagcccgtgattgccttctccagtaactacgagctgtatgccagcatgagcgccagagtacattctgcctggaggaattatcatcccgtgtcgaagagtattccatcgatgagtcttttatttgggctggtgggattgataactgcatga

SEQ ID NO: 239195 - DNA, 735 bp, Klebsiella pneumoniae
atgaatactaatgacactgaactacttcgcttatttgatacattaacgacagaacaaaagattgatatcgccagacacttactgcaaaacaaagatattaaatcaactacagttatcgccaaagaagaagataaagcgatctcattttcccagccttatgtttttgcttttacatctaactttcgtgttttttctgatctggacatatctaagaatgaattccgtgtattaacttacatcttggaatacatggagtttggaaaccttattaacctttctcaggcatcactctgtaaagcgttgaacatcgcatctagtaatatgtcaaccatattcaaaaaactaaaacagaaaggcattctcgttgatcatcatggacatctttatattaactcaaacatctttgccaaaggtatgagtcatcaacttgatgaaaagcgtaaagagcatttaagcaatgcaagaaatgttcaggctgagattgaacaataccctgatggttatcaaaatctttctcaacaggaaagacgaggattagccctcgaaacagtaattcaaaatgtttatacagatgcttttatttttagcaagaagaaaaagaacaatgcagttcctaatgctaaaaacagtatcaagatagataaaccccgcaaggtatataaacgaacaaaagaaaatgaagcaaatagacaagatttagttaatatcactaaccacttaaaagctgtttcctaa

SEQ ID NO: 239196 - DNA, 792 bp, Klebsiella pneumoniae
atgaaaaaactacccggttcacttgaaattaaactgcatgaaaaactatctaaaaacgacattctgaatgtcttagcagaacatatgacgatgcttgaggaaacatttggcattgaagagttcaaactcccttcttttcttgaatgttatattgatagtaaaaaacagtccttttatcatgaagtacataatactgttgtaaattcatttgacttacaaggtaatgagaaacttgagaacacagcaaaaataatttcaaacgatggtaataaaagaatcgtctcttttgataaaaatatcgatgtagatagaatacgtttaacagttggaagtattcagaagcataatccgtatcgatattggtctaacaatattcaagtcattccatcatcagtagtcagcaacatcattcaagataaagaaagccaattacaattagaaagagataaactttacttcctcaaccaactgagacgtaaacaagaagaggaacaaaggcgtaaagatcgtgaggaatttgagcgtccattaaaatcactcattgctaaaaagatcatggaaagtggcctcactgatttagagttcaaaagaacaatatgttcaagctatgactatataaaaagccgtactgtaatagctaaatatctagtcaacaagcctgatttgttagaaacatatcatggctcccgattaatacgaatgtccattaaaaatgatgaaggtaaagttggtaaagttgaactttatgatctttctggaacactaatttttgaaagctataagaacaattaa

SEQ ID NO: 239197 - DNA, 489 bp, Klebsiella pneumoniae
atgtcattagataaacatttagaaaatgtaataaaagaaacagaaaacaatactaaaaaactggctccattgctccctgaacataaaccccggtgtccgctgggaactcatcgcaggtgcgtcgataatcgggttgcaatgtatgcaattttcttcgtgctcagaacgggatgcgaatggaatgcgttaactacgacgggtatatgttcatcaagcttagcccaccgtcgagttcaggagtggcgtgatgccggggttttcgaacgcttctggcaaaacgggttgtttgcctgtgagaagctgggtgtcatcgactggtcatggtcatggtcatcgatggatggttgcatgacaaaatcgccgcttgctggctcaaaaaaacggggaaggatcccaccgacaggggtaacagggtgcaaaacgcagcctgataaccgatgcgaacgggctaccactctcactgattgtctccggggcaaatacccatga

SEQ ID NO: 239198 - DNA, 405 bp, Klebsiella pneumoniae
atgagtctacatagacaatttatgaatactaaaatcacagaaattaataataattattatgaaacttgggggatacataatcaaacaagtagtgttaactctaatattcaatccttaaaatccgaatccactcaattaggcataagaataaatgaaataagaaaagaacaagctattgcttataaagataatcaagaaaaacaaaaaaaactgtttttttattttaaaacacttataacggaactggaaacaacgattgaaatattaaaattgatcagccaagaaaaaccagaattagacagtctaataaaagaaagcatcgtgaaaaataatgcagatgtaaataataaagataaatttaaaaactatttaactgaaataatgcaaaatagtataagaggataa

SEQ ID NO: 239199 - DNA, 663 bp, Klebsiella pneumoniae
atgagtgattttttatatcaatttacacttgaaccatcaaaaagaaatggtaaatggcattcatgggtattattgacaaaaaatataactaatcaatcagcgataattatccctgacacattcatattcagttcactgaatgaacaggataaaacaaatgtttttgaagcacaattagaattaatcaacacatctcttcaggcaattacaaataataacattttttcaataaatgttgatgaccttttaacagatcacattttaaatgatacatatatttatgattatttgttcaatagtaggaacatagcacttgaaataaatgaatactttcatgagctcagaaaaaatacgacgaaagaccttgaagcactttctttattatgccctatttggttagatgattatggtagtggttatacaaattccaaactactaaaaagatttgagtttaactgtgtaaaaattgataaagatatgttttggcaaaatgaaaacaagctaactttatctactttatgtaatttaattttctcatattgcaatgaaattataattgaaggtatagaaacagataaacaaagagatttaatatattctattggcggagtatcagggcaaggaagaatttggaaagatcaatacatgaacattgatatgtaa

SEQ ID NO: 239200 - DNA, 588 bp, Klebsiella pneumoniae
atggacaaaaataagaaaggtttttccctattagagttattgctagttcttggcatcattgcagccttagtggtttcagcttttgttgtatacccaaaagtcagagatgcaagatacattgatattgaagcgaagcatatagcacaaatatatgcttctgtaaaaaacgtatatacaggccagcctaattacagcgggctatcaaccacaacacttgccatgcctgcacaatttttcccagaagacatgctttcaaaaaaaatcacatgggcaatatcttcatggggaggatatgttgttgttgactcaaataaagtaagtccttcaggaggtactgattcatcgtttacgataagttattcagatgtacctgataatgtttgtataagactaataactgctgttgagggtgccttctttaatatttatatttcgaatcagaaggggataaatagcggcggtgagtcagcaagtaaaaattatggaacactggttaaacagaatgggaataacacagacatagcactggcagcctctacctgtcagagtggaggtcagaataacagagtggtatttcttgctctttaa

SEQ ID NO: 239201 - DNA, 138 bp, Klebsiella pneumoniae
atggacaacattacgctcgaaaaaaagcacgtggccgggggcaaattcggcttcgtcacgaggatcttccatccagagcgtccccatgaatccctgaataacctgacgccggaggatcacctgggctttgttgaataa

SEQ ID NO: 239202 - DNA, 660 bp, Klebsiella pneumoniae
atgaactctatctattgggtgattttcatgggactgctgttaaacataccatcactggttcctgttatgtttctccataagactcaaaaaaacgtgaagatatctattgcgatcagactgtttctacttaacgctttcttggtgctgtcccttgtgacgctttcgcagaatatcacgcaagaatacgggctgtttccaatatggctggtgtcagctgcattagtgctgtttgcggtcacgctagtaccaacggtaaaatttgtgcgtaagtatttaactatcgggaaaagcagggctcttatcctctcctcattccttattgtctatgctgtcaggtttcatggcgtgttttcagatttgaatgggagtggatatatgcttaacggatacaacgccacatggacacttttcttcttgtttgccagtctgttagcttatatcggttgctctgggagtaaaacatattctggttattctgcgtcgtcatctgcaccacaatcagattattttaagccgaacaaagaatatgaaacacaatctcaaattgactacgatattgcggtgaaggggaagagtgttctgtctgatcctaatctgagtattgttgagcagcagcgttatcgggatgctcttgagaaaaaagaaaaagaagattggtaa

SEQ ID NO: 239203 - DNA, 534 bp, Klebsiella pneumoniae
atgttacagaaagataatccaattgtaaattacaaaccctatacttttaatcataagaaggtatttatccaatttattatatttattttgattgcttttattgtattggcttctgttatatactctccttatattgtattaaattatcagggatatactttatctcaggatgctaattctgtagatatacgattaagaactattgaaaataaggcaaaaacgataaacaaaggtgataattattttagtgtctggtatccagatttttataccagtcctactttaattgctgtttctgaagatgatacagctaatcttcgaaaaagatcgaatcttattattagttcagatagaaaaagtaaaataactacggtatctttgaaaaatgttccagcaatttcttgtagtggtttttttaaccgtattaaagaaatatatggtaatgtttctgcctataatgtagataataaccaaacagaatgtggcagcattttttccacaaaaaaatacaatcttgtgtatcaattgaaatag

SEQ ID NO: 239204 - DNA, 576 bp, Klebsiella pneumoniae
atggttttagataacttttataatcgaaagcaaattggcattcttcctattgaaaatgttaattttacttatctttctattgctcttattgtcattcttttacttttctcattcggtatttttaaatttttaacaaagctggaaaaaacaaatgttaaaaataaaaatgcagcactacaaaaattagccaatgcggaaaaagctaaatataaatttgcaggtcagcaaaaatttaataaaatttgttatgatgataacattcttactaaatatatgcatcttatggatgacattaaaaaaagcattcatgattttatatcagttgcaaatctaaattcttcttatgtcttattttgtgaagaagctattgataaattaaataaagaagaaaattttagatcaaaattgttgaacactttatcccaaggggagggtatatcatattcaacagaacttgatcaatatagatttgcagttattgaattgcataatgtattttcaaatgtattaacgttatctgttgataatacgcttccagtttcaggtcaacaaactattgatatcaatgatatttaa

SEQ ID NO: 239205 - DNA, 1002 bp, Klebsiella pneumoniae
atgaaagagaagatcataaaaatattatggggtaaaacctcagatgggaaagttatcaatgtgaatgatgctataagagataaagattattattgcccatgctgtgatgaaaagttaacattgagagcaggaaatataaaaaggaaacacttttcacacaggaatgattctaaatgcgatccagaatctgtctatcataaactggctaagtttcttatttgttatgctatatctgaaaacgcaaaaggtaataaacaaataaaaatggtcagcaaatgtcatggttgtgataaagaacataaaaaaataataacgccttgtattttctcaaatgctaaagaagaggttcctatcgataaatatcgttgtgatgttgtcgcttacctgaacaatggtaataaagtagcaattgaggttttccatactcatgaaatagatgaggaaaaaaagaaaaacctatcaataccgtggattgagttaaaatcagaaacagtaattgaagatccttttttgtggatttgtgatgactttaaatttaaattaagtttttgtagtgattgcataaaacacttcaaaaaaatcatttctgtatgtgataagtacaaaatagacagaaaactctatacaccattaaacatacctaatgataaagactataattacattgctgacgtaattacatgttatcgttgtaaagctatcacgccagtattctttcataataatggaaccgaatatgatgccccacatacattaaaatttatcaagacacctaaagttccaaaaggctatctcactaatacttgcgctaaatgtggtacaataataggcatgaaatatgtattttgggaagcatcacacataaataaacttcaagatttccaaatttttagagacctagaattagagtccttattctacgagaaacaacagtggtttggaaatataagttctaagcaaaaagagttaaacctgataagatgtaaattaatggagaattga

SEQ ID NO: 239206 - DNA, 306 bp, Klebsiella pneumoniae
atgaattttaaatacggtttgataaatcccttcgccatgcaaagcaaaaggtccaaacgacaaatcaactcgtgtttttataaaaaactcaccggccggaacttttatccccctacgcggttgtcgctctgcactgccgagcgctccaatagcggcgatagcccggttaagccccagcccataatcgataacaccatcgaccatatcggtgtcgtatacaaaatcaaggaggttaagagtttcccagtttttgtcgtgctgagtcctggctacagcccctgtgtatggttgtttgacagcaagtaa

SEQ ID NO: 239207 - DNA, 672 bp, Klebsiella pneumoniae
atgaatatatttgaagacaatgattttgaaaacgcctgtaaatggtatgagcacgttaagtctaatgttgacggttttaatataaaaatacaaaacctaagagaaaagatagcgttagatttattaaataataagaatattgattatttttacacggtttatccgtctttagtaaatcgctttgaaacaggtttttatcaaattattgatacacatgcagtagacccgcaatatctgccattcttatgtatgatcattgaagaacatgccgaccagatatatgactcaaccagttttttatcacaggtattaagtgataaggggtttagcgatccgcaagatactctgacctttggttatgaagtgtatgaggcaattggtctcctgaatgtcgatattgaagatgtaaaagaacagacaatgtataaataccataaaatggattttgcttatcatgactggcgcttgaagtatggtgaacaagagctgataaacgcatgtgccggttttaatcgacgtgtagcagggctgtttaaaaactatgggtttgataaaacctgtattcctgtattgatggcaattattattaatgaaacagatcatatttatggattttcagattatggttttatcgagtccttaataacagctattgagaaagagatggggtaa

SEQ ID NO: 239208 - DNA, 471 bp, Klebsiella pneumoniae
atgtctggaaaaaatccattttggaattatgattacaatgcggcacaacgtaatagagaaattgtagattcttacaaacaagcaaatgaggcaagactggattcccagcaggctcagtttgaagcgtctatggctaatgacagggttagtagaatacagatgcagttgaataacacaatcaatagccataagaagattgtcgctgattacgagcaacgtctggaagggtttaggcttaacttcttcaaaataatgatgcagtcgaatattttctacagaacgctaaacagattgcaagaagaatggccagaccaaaaagaccatattcttgatgaaattcaacggcagcgagactactgtaatcatccagaataccgcgaaaaatggtggaatgccgtatctaaaaacaatataggtgaaagtgttttggcgtttccttatccgcaacgcgagctaaaaaagaaaccataa

SEQ ID NO: 239209 - DNA, 918 bp, Klebsiella pneumoniae
atgcgtgatctgatccttcaactcagcaaaagttcgatttattcaacaaagcccctatcaggaggtaaggacagtgctgctctctcggtgtatatggctaggaactatcctgagctcgacatcgagtatttctttactgatacgggcaaagaattgcctgaagtttatgagtacttggagcaactagaaattgtactaggtaaacctattctgcacataaacgacaaaaaaggatttgattattggttagagcaacacaataattttctccctgcaggacaacaacggtggtgtaccatccgtatgaaactcgagccatttgagaaatggattcgtcctttcctcaacgatggctacgaagttatttcttatgtgggtattcgcgctgatgaaccttggcgtgatggttatcgtcccaatgaaaaccaaaaatatctcacaatcaaaatgccgtttgctgaagacggcattaaaaagcagggtgtactcgatatattagatagtgctgggcttggtttaccgaaatactacgaatggcgttctcgttctggttgtaccttctgcttcttccaaagaaaaattgaatgggtacggctacgtgaagagcatcctgaggcttttgaagaagctaagtcttatgaaaaaagagctgagactagtgagaatggcgaaacttttttctggatggggccaaatgaaccattagaaacactggaggacccagagcgtgtcaagcagattaaggaaaaccacgagaaggtaaaagctcgtttcgagaagaaaaaacagcgcgagagaaaacgtcgattaggtatgcatgcaatggtggatgaaagcatgattattgacacgttagatatggacgcgatgtatgatcttgaagaggggggcggcgcttgtattacatgttataagtag

SEQ ID NO: 239210 - DNA, 732 bp, Klebsiella pneumoniae
atgaagcgtatccacagtgccaaatggcgtaataaagctgctcaggaacaaagagccgcagaacaggctgttcgtgatgctgccaagcaggaagcagttgaagtctacaaaacattcagcgaacttgatcttgaaatcgtcgttgatgtcagaagctttacgattacacatcttgctgaaccagaagagattgtattacctaaaacacgctccggttcttctgccagtgaaccgcaaagacctgttctggttgccccggcacctcatactcgtatgcgtggcgttaaatcttaccgtgataaaacaaaagtcagtaaggtcgttgcaggtaagaaaccatcagtcagtatttctggttctggaacaaatactatcctgaaaatatcctcctctcaaaaccaaaacagggcatccagaagcgcccctgaacgtgttaagaggaaacagactactccacgtcaggataatatttttaaacgcttcacaactcttgtcatcgattttttcaagcagaagtttgtatgggctaaagcaaacaaatcccaaattgatcttatcagtgaagaacacgataagcgtatagctgaaaactatgtgttcgatgaagttcaaggcatctacgtcccacgcgctgagcatgaaagacgagcaagatttaacaaggatgactacaaacctacacctaatgaggtcagacgttttccaagtcgtcctgagaaagaacattggtaa

SEQ ID NO: 239211 - DNA, 2289 bp, Klebsiella pneumoniae
atgagttacgactttagaaacctttcatccgcagactttgaggatcttgttcgggatcttatcggaaaagaagaagggcttcgctttgaagcattctgtgtggggcctgataatggtattgacggccgacacgcatatgctggaaagaatgtcatcctacaggcaaagcattatgaagggtcgtcgttcagtaaactgatgacagctatgaagcgtgagcgcttgtcgatagataagctagccccctcacgctatattctagcgacctcctgtaagcttactccagctaataagggcaagctcgctccgttcatagggccgagtttgaaatctgaggcggacatttgggggccagaagacataaatggtctcctccggaagtaccctgaggtactcaagtcgcatatcaagctgtggctatcgggggtgggtattttggaacaggttgtacgcgcagcggcccatacttttgctgcgttgacgatggaagagatcgaacagaaggttcgagtttacgcatcaaatcctagtttcagcgagtcattagaaacgttagagaaatataggcttctcatcatttctgggccacctggcgtaggcaaaacaacactagctgaaatgctttgctacacctttctgagcgaacaatgggagctagtccctatccgcagtctggaggacggcttttctgccattatcgatagtaaaaagcagatctttcttttcgatgatttcttgggaaaagttgccctcgataggcaggctttggcgcataaggattctgatttgatgcggttcatgaatcgggtgcgccgctcgccgaatgctcgttttatcctgacgacgagggggtacatatttgaagaagcccggagagtctccgagtaccttggagatcaacgccttgatgtgacgaagtacgtgctcgatgttggtgtctatactcgccgaatcaaggcacggattctctataatcatctgcttgtgtcaggaacccctaaatctcacatccaagcacttttggagagtaataagatcgcgaaaattgttgatcataagaattataatcctcgcatcattgaggctatgaccgatgcattacgtaccaacgatataaaatccaccaactatcccacagcctttattgacgccctgaataatcccagccagatttgggacactgctttccgtacgcatattgatcaccgctgccaacaccttctgattgcgatgtttttcctttcggaatacggcgttgcctttgctgatcttcattcgtctttcgataaactacataccacgatgagcactgcttacggtttgccacatgggcctaaggattttgaagaagcccttcgcattctggaaggtagttttattaaaatcatcaacatcagaggacctgtagtctcttttatcaatccttcgctcaaggattatctctcaacctatctgctggatacggacttccttattcgccttgttcccacggcggcctcaattgattggctgttgagtctgtggaacttcgtacatccgcgcggactcagtgaggtcgatcaagcgaaggttgccagatcctgtgttggcatgctggagatgatcgaaacacgtcttccttggtgtccgaaagctggtgacccccgctcacttgaatacaatgacgccgcaaattccaagaggctccgaatgataatggattggtggcagctcacgaatgaacaacgatttgccgacagtataatgacaattgcccgcaacccacagcagggtttcagtacatggtcggatggagagattttgattgacttcttttctttacggaatcaaaagggctatagccgacaatttatttacgaagatgaattattagagctccttgaaaaggaactcacagacactataagttatagttcaattgacatgctttcctcgtttattgatgcggtggacgcagcaagttggttgcctgatagcattactcttgctttaaggagggctgtgctcgacgagttcaaggataacactagccgcatttaccaggatgacagtgaatcctccttgtcggatcggatcgatgccctaaaaaaattcgctccgcgctttggcgtaccagatagtgtattggataaagccatctctgatattgaggagcgcataagcgaaatcgaagaccgcagtagcattgcctcctctccgaccttcccgtcgtccgacgacaagtatgaacaggagacgtttgacgatagcgctcttcggaatcttttcataacccttttggatcgttag

SEQ ID NO: 239212 - DNA, 4059 bp, Klebsiella pneumoniae
atgcctgaagtaaattggaaagtattcaacgaactgcccggtgcagcagatgtgaacttcgaaaacctttgccgcgctctggtacgccgacactatggtcgtttcggtcgctttaagcaacttgcaaatcagcctggggtggagtttcacctcgagctgacggagccttgtgatctcggtgcgccaccaagctggattggttggcaatgcaagtggtatgagctggtgaatggacaagatttgggagcctcccgccgcaataagatcatcgaaggtatcgaaaagacgcgtaagcatgtccctggagtgaccaactggaagctttggacttatcacacgttaacaaaaggagatcaagagtggttcttcgcgctagagcaagaccgcttccccgaattgaagctagaactactcactgctacggatatcgaagatcttttggtcggaccgggagcgcttttacgagaaacctactttggtgaactggttctaaccccagaactaattgctgaacagtataggcttgctgcggctccgtttaagaaccgctaccagccagacgttcatgttgctgtgggggttgaggagaatatattcaggcatctgtgcagccaaaacgcatgggaatccttggaagaactctccaacgctttaaaaaagaatcatacaagcattgcttcgattactgagcaaatcaaaactgagctcagggcagaagttgaattactcttagcccgggttattgggttgactgagtttattgatggcttacacacggcgctcggcaaaggtgactttaactctgtacatcaagcattggtttcaaatccgcgtcagccggtacgttatgaaaggctactttcgaaattgcgtggagcgcgctttgacggggctccgttaaccgctaatttggttgcagatatccacgcggtttcgtctgttctccgcagtctggagcaatcgattggtgcccgggcggttgctgtacttgcgccggcaggtgaaggtaaatctgaacttgcagtcaaggtaacacagccagaaggggaattcccaggggggatcctcctattgggtaagaatcttcattcaggccaggggcttgatgatctcgtatctgctttcaagatctctgggaagccagcagaaagtttcgaccgcttgattgaggctgtagatgcggcaggccagcgtgcaggcaaacgcatacctattgttattgacggtctgaatgaggcggaagatccgagaaattggagggatgaactatcccgagcggatgagcttctaaagaattttccttatgtcttgttagttgtcactcttcgcaatgaatttgccccaatgtgtctgcccgaggagtttctccaagttgagcataacgggtttcaggaagatccgaagacagcatttgacaagtactttgagtactacaagatcgatgctaccgatgcggacctaccagtcgaactcttgcagcaccccttaacactgagaattttttgcgaagtagcaaattctcctcgtcagcatattgtcggagtggaagcattgccccgttcgcttgcaagcctgttcgaagcacactttaacaaggttgccgcacgagtcgctgagctttcaccgacgattcatcgcatttatcaagatgacgttcaggatgcactactaacgatcgcgggtcttctttgggataacaatgcgagaagtgtggattttcaagctacacggactgcagttcgggatatggggtgggatgacagtattattcgtgcacttgagtctgaaggcattctcgttcggactatttctccagaaggtaggcaaggagttgggtttgcatacgacctaatggccggacatatgatggcgcgcaaactgcttatgaagcctgaactggtgcaatggctacaaagcaatgaagggaacgcaaaatttaaatctcatggacctgattcgcataccttcgcttatgacgtattacgggctctggttgatttgtatccgcaatactctggtaggcggcagctttggcaagacttgtcggatgatatactcgttatgaacgctctgttattgacgacgcaatcggacccaagatatatcgggcgggctactgttgaacgatttgctcaagctatgcaggagtcgaagcggtttgcacaacttgccttcgagagactatggagcactagggctgcgctggcacatccgtttgatatgagccttttgcatgatgtgctaatggcgatgtccaatactcagcgcgatcttttttggtccgagtggattcgtcagaaatctgaacaagttaaagatgacttaaaattcttgtcgacgagatggaaattgggtcatctggatgagcgtgaacttcggagagttcgctgggtgatgtggacattgacgacgacatccagagctttgcgggatatggctaccaaagccctgtatgaatttgccatcaggcggccagaagagtttttccggttggcgatggagacaaatgcagtttcagacccatacgtccccgagcgagtgttcgccgcagcctacggtgcagtcctgaccacttggtcggatatcgatgcagtagagttacatgatgcgttgccacggttcgctcgcgagatttaccaaaccatgtttgcacctggtgctacagctcctacctggcatgcattatatcagcaatactgtttgggaatcattgccattgcaaggatggtagatccaaattgtttttcagaggatgaagctgcttatcttcttccgccatttagtcatctgcctaacgtatttgaaagcattcaacagtacgatccagcaatgattgagcgagcggagagcgcagcgattcaaatggacttcggtaactatacgattggtagacttattccagacagagcgaattacgatgacagcaatccggagtatcaacaggtattgcgggccattgtttctcgaatgctgatgcttggttatgaccctgagcagtttgaagctgttgatcggcaaatgtactcaggttctcgtatgggagatgacaagcacaaaatcgatcgatatggcaaaaagtacagctggatagcttactttgagatgtggggaatacgatacgcgcaaggcctcctttccgaagaccgcagtgctcgcccatcagatgctgatatcgatccaacgtttccgcaaaaagcagagagtattagtttgtcactcccagtcttatttaacgatccgtctgtggatgatggtgactggatcgtgggaggcccgctacctgactaccgtagcatccttgagattacggagattgatggtctgacggggccatggatcctacttgatggttttgttgagcaaaatgctacctcggatgaccgacagattttcactttcctgcgaggagtattcgtagatagccaagaagttgacaatctatgtaggttgttcactgatcttgaatatcctggcaatagcgccatccctgatgctcctggctactattacacctatgcgggtgagatgcctttcccgtcgattccggggctgctagtcgctaatgaacaagaggatgatagcgatgaaaatttggtgtccgcagaaagatggtcaggcaatggcgttgcggtagatatcacagtgcaggactacaactgggagagttaccatagcgtggagaaccaaagcagcggtgcgagcctgccctcaaagcaactttgtgaggctttgaatctcaggtaccgtgcaaacaaatgggatttatatgatgctgtaggtgtggcatcactgtaccgcaaagttggcgagtatgagtcggatgtcagtggctcagtcagttatctgcgccgtgatctacttgatcgttacttgatgcaatccggcaaggttttggtatggcttatgtggggggagcgtggttttcactaccggtccaacaagacgcgcaatttgcacaggtattacgtgaatcaccaacatattcacaagcgtattcatatccatcagatagcttcgagtactagtaacccaaacattgcggatggagtcgctatatga

SEQ ID NO: 239213 - DNA, 408 bp, Klebsiella pneumoniae
atgaaaatttggaacggatacggatctgagcattcgatgaacttagttctcatcggaaaattcaagcaagagcaagatgcagtgaaggtcgagaaggatattaaaacgctcagtactcaggctgagaaagatgaatgttactcgatcccttttgatgagccagagaatcaacggttttcagatgaaatgctctcattactatgcagcttaaaactccacactttaggaccaaccgatcttggtcaattggtgtcagatcatcatctagatcgtgaaggcgatagaataacaataactactgatgaggcagaggtatccgcgttcgtgaagctgtttatcgaggctggagcaaaggtcgagattttctcagcgcatgactatccgtccgattccagcgacgccagttga

SEQ ID NO: 239214 - DNA, 918 bp, Klebsiella pneumoniae
atgaagtccagaatcgggccaaacggggttcatttcttcgaccgaaatacaggtctgaatgtccttttagacgagttttgccctcatcagacggtctggtcgaagtctcctcgccaggtatccgttgcgctcaccaatctttgtgacctccactgcgcacattgttttgcgcccaagcacaaggcattgctacatactgaccaagtgcttacttggttaaaagaactggatactgaaggatgcctcggtatcggatttggtggcggagaaccaacactacatcctgatttcgtcgaaatatgcaaacgggctgctggggaaactcatcttgcagtcacatttacgactcatggtcaccgtctgacccaaccattggttaaaaacctcaaaggtacgatccactttgcgcgcattagcgttgacgggataggccatacctacgaagaacagcgtggaagggagtttgcaagtttactcagaggcattgagtcgatcgcgaaattgtcgccctttgggatcaatatcgtgataaacgagcgtacgatttttgagcttgacgcagtggctgaactggcgcaacagtttggagctagtgaattgctgttgttaccccagcaagcaactaatgcagtcgcaagtatggacgaattggtcggccgagagcttcaaaactgggtctctaactatagaggaaaggttcgacttgcagtaagtgaggtgggagcgtcagggctccccatatgcgaccctcttcctaatgagacaggccttcaagcctacgcgcatatagacgcttccgggatattgcgcacgagttcttattcaaccacaggtatggatattgaagaaactggtgttatgtccgcgcttaaacggcttagaaataccttagagattaaacaagggacacaatcatga

SEQ ID NO: 239215 - DNA, 1167 bp, Klebsiella pneumoniae
atgaaatttaactttgtagtaaataatttatttaagaaaggttttatagtatcggttcctcttatctcacttattattacaggatgtgatgataatattaacagtgtaaagtcgacagtctatagttctttaaattcaacgttaaatattggtgatacctttaaaagccggagtgattgtattgatgggaaatgggaggaaaagaaagataatcgtgaacgtattattgtcagctatgaatgttctttacctgaaaaatatattgatttttataataaaaaacaaataaaagaaatatctgattcttatatggcagatgaacagatagctaattcccaaatagagtctattcagagccaattggttaattaccaaaacataaaaaaatcccttaatagcaacaaaaaggacattgctgaagttatagaaaaaagcgtaaggtataaaaatacatatagtagccaatctggtggtgatctaggagaacttatagaagcaatgcaatatggaaaagaacgtgatatcaaaaaggctgaattttgtaaatttatatcagaaaaatattttaagggtacggaggaattaaatagcgagcgttgtaatttacttttcaatattcatagttcttatgttggagttgtagaaaaatctaatatgaatgatgaaaataggtataaatatattgattaccctataatgaaatcattaccaacatgggcagataacgatgttagttcaaaagctagcgttgagaaatattataagaagaatgaaaagattcttgacgatatggaaagaggaatcctaaacgcaactaagaaaataaaaatatacaacgacattaaagagaatataaaatcctatcgtaaaaagctggaagataatatcagtctgactaagacgatatctacaacacagtggtacgtaaccaaaacaggtggggttgaacttattgatagctacttgactttttatcttgctgataatgaatataaatatacgttccagaatcccttgattgcaatagaagttgctttacatgattttagcgatgatcaaatcccatctgtttatatttccagtatggagagttatttcagtaatctaaaaagatctttgaaattcgatgttaggggggaatgccgcaatcagattatgccttgttaa

SEQ ID NO: 239216 - DNA, 162 bp, Klebsiella pneumoniae
atgtgtaaaattgttaataccgatcgaaataacaaaattgatcgacgttatctatcgttaaaaacgatcaatttattgttatttatcatcaatacctatcaaatgaagcgggccgatcgacgccatagatcaatcaatgagaagggtgtagaagaaaaatga

SEQ ID NO: 239217 - DNA, 447 bp, Klebsiella pneumoniae
atgaaacttaatgcgagacaggtagacacggctaaacccagagagaaagcctatcagctggcagatggtgctggtttgtatcttgaggttgttcccagcggcgcacgttactggcgtttaaaatatcgcttcaatggaaaagagaagcggctggcatttggcgtttacccgatagtatcccttgcacaggcgcgagcattgcgtgatgaagctaagaaaaagttagctgacgggatagatccctctgttgcgaagaaagaagaaaaacttgttcgggatatgcagattaacaatacattccagtctgtcgctctggagtggcatagttcgaaagcgagccgatggtcagtaggttacgcatccgacattcttgaagcgtttaacaaagatgttttcccttacatcggtcaaaagccattgctgatattaagcccctcgaactgctaa

SEQ ID NO: 239218 - DNA, 933 bp, Klebsiella pneumoniae
atgaatggattagaaaaaataaagctgttagacaaaatagcaatcgaacttcagtctagtatgacattttctgatatcgataattattttagagggcacggagttccaactcaggatagttatcctcataatagtaaaagatcatacgcaaaagatatgcttgctatggtagatgaaaataaaatatttacaatcgctggtgagttagggcttgttgatgcatctaatctaactgatgctctacagcaagtagatgttggattttggaaacctggacactttaggctgtttttgagtcatttagcctcttttaaaattcagacatcccatcttcaaaccgcgttaagaaaatttgctatatcaagctttgttgcacatgaagatatcgaacctacaaaggaatggcaaaatgaaatagaggctggtttaaaaactatggatgcgctggccgccattctcatgccaggctttcaagagagtaaatggtgcgatcaagagataggtgttgctattggtcgggatgttttgattattcctatacgtaaaggcctagatccttacggttttattggaaagtatcaaggtatccaagcaaatggtaaaactattggggaggtagcagaggcaatcttcggaacattagtaaaatcaccaaaaaccaaaaataaaatacttctttcacttgctggagctgtatcaaacgcaaactccgttgaagaggcaattgaaaaaatttctatatttaagactttagaaggaattccgatatccattttagataaccttaaacaacaggttatggaaaatcagcatttaattgagtctaaagaatttttgagagattttaattcgatgctttataaattcaatgtacagaagctcgtagtagggaaaattaaaacagaaaccgagtgggatgatatcccattttaa

SEQ ID NO: 239219 - DNA, 897 bp, Klebsiella pneumoniae
atgagattggttctacataaacctgagaaaagaatagaaacagtgcatgattttgtaaaatatatcactacattggaaagaaagggctcattaccaacagcctttaggggccagaggttctatggttggcccacaaagcctaaaatattcagggatgatgttggtttatacaaaagcgaagatcttgcagtaagggatattgtttctatacatcccaatgaattcgaatcagataaaactatgttcgatagacttgttagaatgcaacattttggtttaccaactcgcttagttgatgttacaacaaatccgttagtcgctttgtggtttgctacagaaaaaagtaacgattctgatctgtggcatggaggcgtgcaagcactttttatacccaagagtagacagcgttattatgatagtgaccgtgtaagctgcatgtccaatattgctaatttaaagcatacacaaaaagaaaaactatttcagcatgttgaaaatataaaaaatgtagaagagttcaatgctcaggatgaggtaaaaatgcttgtgtttcatattggaatggaaaaatataattttattaataatataaatccaagtgatttagtgttgccagtctatgttaagcctaaaatgtctaataaacgaatcatagctcaatctggggcttttatgctgtatggagcaaagggccgcaaaggtcgaggaaatgaaagcaatgtaattacgtcacacatgtggattcatgaggatgataaacctgaaatacgaagagaacttcaattactaggaatacacgagagcatacttttcccagaaatagataaaacagcgaagtttatcgcagaacaatatggtaatgatgtcagggggcgcaatatggatagcctgatttaa

SEQ ID NO: 239220 - DNA, 558 bp, Klebsiella pneumoniae
atgcaaaaaaaagtaaaaattgagccaaacgactatttaaacctgattaatgatggtgcaatagcaaacgcaaaaacagcagatggaaaattgattccattattaattgtggatacttcggtaaataaagacctcactcacctagtcaatatgcatgaaggtaataacattggtgatgttacctccctgtgggcatataaacgattcgatcacagatacgtgagtttagttttattttttgaacgacctgttgaaatgaaattagcaatatcatttgaagtattgaggtatgcgccattaattgagggaatcctaatttcaaaagctttatacttacaaccgggaaaacccggagataaaatcggagatgatttttccgcacctaaaatattagttgaaataccagaaagaacgacctttgatatttgggagagtattttaaataaagccatcaagaaaaaattaaaaaaagaaggagttcagaggaaaaacttaaacaaagccgccgatgaacatattgcattaataaaaggaatttgggggaaaagattaaaataa

SEQ ID NO: 239221 - DNA, 525 bp, Klebsiella pneumoniae
gtgacggatgaagtattcatttcttttttagctttactagtgtcagtaatggcactgattgcatcaatatttagttactttgtttcaaaaaaatccttaaaaataactcaacaacagcatgatgagagagaacttgatataacactgtattttatagaggcatataaatggcaaaaagaaaaagatatgtacatatcttttgcgttacgagttacaaatcaagcaactctaaccaattctatacctaagttagaattaactattgaacatcatgacgagaacaatattatcagaaaagtgaaattatcccccaccacatcagtcacacctcttaaccttaaagatcacaccgacatacttcatctcccattaaatatttcaccgaaatccgctcaaacaggatgggtgacttttttgatacctaaatcgatggatgaatacatgatagatctttacaaaatcacagcggaaacaataaataaaaaaacatcctccatagacactcacattataaatgagatctaa

SEQ ID NO: 239222 - DNA, 192 bp, Klebsiella pneumoniae
atgaacagagcctctcccgttgatttaaggaaatgccttgaggccgcacatggcctagctaatatcggcatccgttttgtgccgatcccggtagcgacagaggaagagttccaggcactgtctgccgagctttcacgaaagcttgagcagatggcggttgaagcggaaaaaagcgaaggcggtgcagtatga

SEQ ID NO: 239223 - DNA, 681 bp, Klebsiella pneumoniae
atgactgagcgcgggatgatttttaacgctgagatggtgcgggcaattctcgacggccggaagacgcagacccggcgggttatgaaggtacagccggaatccaaccagcttggcttgctgcttatcactgactcaaccaagcgcagtgacattggcaaataccactgggcagaatctaacgctactggtaaccatgtgcgttcaaagcttttctcatgcccgtttggcgccgctggcgaccgcatctgggtaagagagaccttttgcccggtagatgacactcagtatggcggggagaagtgggtggattaccgcgccacacctcgttatgaagccagccatcctgcaggctgggacagcgcgcctaatgatgctgaagccctcaaatggcgcccgtcaatccacatgccgcgctgggccagccgcattctactggaaatcaccgacgtgcgcgttgagcgtcttaactcaatacacgatgtcgatgctatgcgagaaggaatacagaatctgacgacatgttcacacgctgatttcggcattcctggcgtcgtaaatgcgcagcatcctgtacgagcgtttcaactgctatgggaatcaatctacggcgctgacagctggcgcgctaacccatgggtctgggtgatcgagttcaagcgcgttgaaggcggtgcagcatga

SEQ ID NO: 239224 - DNA, 228 bp, Klebsiella pneumoniae
atgtacaaatcggatgctctttcttttttcggcaccaaaacccggctcgctaaagctgctggagttcgcctgtcttcaatctacaaatggggagaacttgtaccagaagggcgtgcggcacgccttcagtcagcatctggcggtcagcttcattacgacaaagacgtgtacgaccaatatcgtaacgaaaaacgcgctggcgaggtgaatcatgaaaatcaggcatga

SEQ ID NO: 239225 - DNA, 1050 bp, Klebsiella pneumoniae
atgagcaatcaggtctttgaaattgttcaggccatgtcagggcaggggaactgcataacgattcccggcccgtatctggatttctttgcaggagacaggcagcagcatttgctggcagcgattctcaatcagctggtgttctggtcgggtaagtcgagtctggatgatggctggttttacaaggagcatgcggcgctcgcgaaagaggttcgtgttcttgaaggtgatgttgttagaagggctatctacaaaatcactgagcaatatttgcccggcgttattcaggaagatacccgtcaggtgaacggtacaccgaagaagcactaccgcatcgaccaggaagaactgatgcacaagattttcccggcaatactggattcggcacaaacaccgaatcggaataagtcattgaaagaattggattcggcacaaacgccgaatgcaaacggcacaaacgccgaatgcattcggcataaacgccatatccaggattcggcacaaacgccgaatggaaacggcacaaacgccgaatcctatctctatacagatcttaaaaatacagatcttaaaacagatcttaaaaaacaagaggggcgtcctctccctgtggataacttttctgaagctgctcagaaaaccgtcatcccggaagcagttattcctgacgtaaccgaagacagcaacctggctaccgatgacgactttgacctcgctatgtggttctggtcgaccatcgtcgagatgtacgagcgagcagccgagtttgatggctgccttgcaaaaccgagagaaccgaactttgtcgcctgggcaaacgaaattcgtttgctgcgccaggagcatggctgcagccatgaccatatccgaaccatgattgagcgaatccaacgccatcagtggtggtgcgagaagattcagaacatggctaccctgcgccgaaaatggcctgagctggtgctgagcctttgtccggcaaacctgtctaccggcagctcgttcggtgtgagcagcaaactggataccgacatcccgaaaggtttccggggctaa

SEQ ID NO: 239226 - DNA, 303 bp, Klebsiella pneumoniae
atgtctgtctcagaaatcccgttgtcaccagagaatcaacagttcgctattgcactggcgggtcagagctttcaaatggccgttacctggcgtgctgcgttctggtgtctcgatatcatggacagcagcggcgccgacctgatcaagggtattcccctgattaccggcgctgatctgctggcccaatatcattacatgagcctcgggttttcgctctatgttgtctgtgatgacccggcgaacgacaacccaacggcagcagacctcggaactaagagccacctttacgtagtaacggagtga

SEQ ID NO: 239227 - DNA, 345 bp, Klebsiella pneumoniae
atgaagaaaaacatcattgcttgtatttttactctctttctcaccactcctacctttgcggatacgggatgcggaccatttggaattaactggaaagcgcaggatggctttgcaaggataaacgggtctaagcccgagtcgcagaaaataacttttctgaaggcaaaggatgattacaacaatgtgaaaatacagtggatgcttccggacgctagatctggccgctggcttggaatggattttgtggctcgaaacggaaagcccattctcaacgtcgaagtgatccgcaagaacatggacgagccccgagagttctggacttataactgtgcgaaggtgaaataa

SEQ ID NO: 239228 - DNA, 234 bp, Klebsiella pneumoniae
atggtagggtctaccacttcagtaataattgggtatgtttttgagtttattcaaaataaagatgtttgttatagcgtggctgccgtcgtggccgcgtggattcgagcaaaacacagcaaaaagataaccattcacaagggcaactataagattgaggcaagcaacctcaatgagcaagaattgtttaagctcttcagtgaggctaaagaggaaattaggatcaaagaagagtag

SEQ ID NO: 239229 - DNA, 834 bp, Klebsiella pneumoniae
atggctgatccaacatggttaggactaggtggccttgttgctagtactttgtctgctttagctgcttatttagctatacggcagaatattatccaaaggaggatatcaaacaaagtccaaatcaccgtaaaaggagttgaaattaacctagcgagaaggaaaataataaattccatcgacctaaccagtaattctgatgagtttacgatgaaaccatttattattaacattggtttagggccagctctaaatttcgtatactcttgggattttgattatttaaaacaccttgaaattaatgagataataggtattggtaacgaaaatgatattcattcaaaacaatacttaaaacacatcaactctaataaatactcttttgaatattcaaatgaaaccaatgcagagtttatacacatactaggaaatggtaaaacggcatggttccatcaccctaagaaaaacaatgaaatagactatatcctcccatggtcagttagcaagagtgaggtacatttaaaattaccgaacctaatacctatgcttctagcacattatcttgcagaatattcaaaatcatctattggtatgttcttacctataactggtccaacactaattttatgttatgaagatattactggagttaaaataaaggaagtattcacctctagcttcgtatgtacaagaaccagcattaaaggcgatacctatgaagccggtttcagcttaactttttcgccaaagctcagtaggactgcacaagtaattcaacggatacgtaaaagctacgtggaatccattaaagaaaatgatttcaataaaaacaaatag

SEQ ID NO: 239230 - DNA, 2508 bp, Klebsiella pneumoniae
atgaataatgatattaagcaagctttgtcagaaggaagaattatgcttctgttaggagcaggttcctcgttcggctcgttaacacaaacgcgtaaacaagttcctctcggcgaagagctagcaaaaatactagcagagcaagcacaactcccatattctggagaaacattatctcgagtatactctgcttgcagacctattttaggagagagaatacataccattttagatagctattttcgaaattgcaccccatctaaagaatataatacgctatcaaaatttgtttttgccagaatttacacccttaatattgacgatgcttttgaaaaagccctagatcgaaattcaaagcagcatttgtacataagatctcgtaacgaaaaagtatctccacccgatcagttatttcataaactagactatataaaattaaatggtgatgtaaaaaaacctaacgaagggtatattttttcaccacaagagtacggggctgcatcagcaaaaccaccattatggtataaagagctaggcagtgacttcttcaactataaatttttatttatcggctctaaattagacgaacctcttttctaccatcaaatcgaacgatatagaggcgctacacagagcgaagaacaaagaagttacgtaatcacaccttctgcttccccgatagatattgcaagtttaaaatcatccaatatagaacatatttcagccactttatcagattttgtatcctggcttgaaagtgagtttcctacccctttaacgccggtacaaaccttaaaacgaagcaggcctgaatataatgtttccgcagatgatgatgaagaaaaatacatgcgtatttttaaggaagtcgtacctataaatcgcgcttgccttcaaatcatgaatgaaagagatagtggaaacccaataagaaacttctttaaaggctttaagccaacatggaaagacattattgacaaagtaccagccgaactggaaaatacgagaattatttatgaagaaatttattcattactcaaaaatcaagagtattcaaacatcaatctttactgtatttttggttccgccggctcaggaaaaaccactttagcaaaacaaattgccctaaaaatttctgagcataacacccctgtttattatgtggaaaatatcaatgccaacttaaaagatttaattaatgaattagagaagaaaagcccccaaaaatacctagtatttattgaaagaatagcagactcagctcaaattattggtgaaatacttagtgaacaaaaactaatgaaaggtatttttgttggcacagagagcaagcaaatttggtcgtatagagctaaggaatattttgaatccacacgatacaaaacaaaagacatatctttaataaacagaagtgatgcaaggaaaatactaacaaaaataagacagtatggtaactggactcgattagagagaatgactcctagtgagagaattaaggaattagttaccaactcaaggaagcagttgcttataggtctaatggagacaacattgggtgaaggcttttatcagatcattagaagagattttcagaacatccctacagaatcacataaagccttgcttgcattaagcggtattgcaagttaccaaagaaccaacgcacacgagacaacgctaactagagcgctgcagcatctaaacctaaatgcaaatgtaagcgaactcgttaaacaaatggatggcatcttattttataaaaatggaaatgtagaaaccaggcattatgcatatgttgaaaaaatattcgatcaatttctcgacacacaatatatatataacatccttgaagcatacataacgtcatttacagtttatgaatacccaatagttaaacacgttataaaatctgaagccgccatttacaaatcattagtaaactccaagaacttaagaaaattattaaaaggagataaggaaaaaacgttatctttatataataagtttgaaaaggatctcgaaaacgaagggttatacttgatgcaatatggcatcgcacttcgagatttcgggatgtatcctgaagcctatgagaaattaaaaacagcaaatgaagcctatcctaactcacctcaaattgagcatgcttttgcgcaactaaaaataatcatcgcattacagagcgagagtagcactgaggcatttagactatttggagaggctgaggaaattttatctcgactagacggaggtaaagttaaggttatcgatggatatcctttagttgctctttcagaagggcatatagccattgccaggaagtttttaagcgaagttgaagctaaaaagctcgcggcttattatcatgataaaatcaaaaaaatgtataacaatgactattcaggtgatactcgcatagaagaaacaagtgaaatgttattcaaatatgctacaacaggtatcttaaccaaaggtttagaagtacaaatagccgaaagagtatttaaataa

SEQ ID NO: 239231 - DNA, 1110 bp, Klebsiella pneumoniae
atgaaaattactttttataaaagcccttcattcaatttaggaggggctttgttcggtatgatttcattttttggcagtatgtcatcatcatcggctgtggttataaacgcacatccgggacaaggttttataccgggcggaactttttcaggttcagtactcgtgccaatttattcatctataagtggtcctgatgtcgattttgcggggtttgcaatagctccggactccctaggctccggtttatgtaactcttacgtcgatcgttggaaaacaattaatggttattttggctatgaagtacatcccggtgttttacttgtcatacacgatacaactattacgggggacgtcgttagtagcgatgcgcgaggaatcgctgtaaatggaagtattaattctaaaggtataatgtccggaaatgttccaccgaatgtgaatggaattaactgttactcgtatctaaggagcgacagtgaaacccgtactgatactgttacccaattcagcggcagctatggttactatgtgtcagagaccgcatcgttaacgtcggatacaggtgtgcagcctacggtcatcgcattcaggcgtgcaaagggccagggcccaatattcaatactaactacgtacgagcgaactcgactagcgacagaattatcatcaaagaaccgcctatgacctgctctgtctcggtgccgccggtagactttggtgaggtggcttccacagcggttggcaacaaggtggtggtggaatccacattgggggttaactgtacaaatacgtccaacaattccatacccatcacgtacagcatgacgccaaaaactcaggcgggcgatcaaaccagtatcccgatgatctcaaaggccgggggaaccgtgggcgatatccggggatttcttggtgcaaacgcctctgcagatgccgggtgcgtagcgaagacttcatcggtacgcattgatggttctcagacgccactgcgtaccgtgcccagcaacaatagtgctccgtggaccagtcctctggtgtgggtattatgccccaaggcaacggcaaaacctggggtagcctcagcggcagctacctttgaattaaactggtaa

SEQ ID NO: 239232 - DNA, 147 bp, Klebsiella pneumoniae
atgcttcgacagtcagacatccgccaggcattcgcggactctatctctggcaacccgaaggggtatcgttacctgcataccagagattttgtgtgtaagttgcaggagagagggattcatttctcaggtaatgaagctaatgcatag

SEQ ID NO: 239233 - DNA, 2106 bp, Klebsiella pneumoniae
atgaaagtaagtcgtgtagcgattcggaacttccgtcgattggaaaatgtgcagattgacattgaagagaaggagtccatttttgttggtcccaacaacagtggcaaaacttctgccactgcggtttttcgttgctttctggggggacgagatttcaagatctacgacttttctgtcgcccggatagcagatttagacacatttggattgaccggagatgagacgctcctccccaaaattagtcttgacctttggttcactatcgatcccgaaagcatcggttttggtagagttttcacattattgccaaatctttcggatttcacgagtgtagggattaggctgtcgtatgaggtctctgaagtaaggaagttatatgagaattacaacgctgcctatcctcccaaggaagatggaacgcgctctaagtcgctttcgcaatatctatctatcgacggaaatcttggccgacattttacggtttgttactactcactagacgagaagattcaggagggagcaccgtctgagatcttgtcgagttatcttgatcctgacgaaggcaaacgtcttcttaagcagctcatacgtgttgagttcgtggacgcgcagcgcaacattaacgatgacaacagcagtcgcagtaataggctctcttcggcatttgctaccttctaccaaaagaaccttgagcaggttgaccatgccgctgatgctcacagcgtaatcgatgcgaataacaaacagctgactgatcactatgcaaagcaatttgccccactgatcaatctcatcaagcgccttggtgtgccgtcaattaatgatcgcgaattgcagattatatcatcgcttagccccgagactgctcttcgggggaataccgaactgctttatattgaccctagccggaagcatgaactacctgagctctataacgggcttggattcaaaaatctaatttatatggccattcaggcgcgtcacttccattctcaatgggtaatgaccaccgagaacagacctctgtgcctgatgattttcattgaagaacctgaagttcatctccatgctcaggtacaacaaacttttatatctaacatttggcaagtaataaatcaatccgctgaggtggctggagaaccgaatctcgtaccgcaacttgttataaccacgcattcctcgcatatcatggaggctgtggattttgagaaagttcgctatttccagcgctgccattgtgagggtgaaacagaagctgctggcattcgcaatgcgtcaatggttcgaagcctccgcgctttccagccgaatgtggagacaattgatggtaaggttatcccaccatcagaatcgctagccttccttaaacgctatttacgtctaacacactgtgacctatttttcgccgatgctggcatccttgttgaaggcgctgttgagaagttgttaatgccgaccatgattgagcgtgctgcagagcgattacggactgtgtatctcacagttttggaggtagggggagcgtatgctcaccgtttcgagggtttgcttagcttccttcatattccctatcttgttatcacagacattgattcagtttcacctaccggttatcccaaagcctgtcgagcggatgttgctggagcaaaaacgtccaacgcgtccctaaagaaactttgtgggctgacaacaattgaccaactgatcgcattgacttgcgcgcagaagcaacacaacgataaggatcgttgcatcgcttttcagacagatgttttggtcgaggaaaatgatgccagcgagatgttacgtccgcgcacgttggaagaagcaattgtatatgagaattttgggctccttcgatctggtgctttatctattggcattactgtccgagcgtctctcagcgacgcttaccaagatgtttacgatatggttcggtcggataatttcaaaaaaactgattttgctatggacatcttggcttgcgctgagcaatggattgtccctggatatattgccgaagggttgaaatggcttgagtcgcgcctattacccccgctaccagttgtggtggatacagaagcctctatcgcggcgggagaatag

SEQ ID NO: 239234 - DNA, 1839 bp, Klebsiella pneumoniae
atgaggacatggatagaaagcgaagcggatattcaagtccgtgcatgcatcgatggccatcgtagttttgcgatgatagccggcgcaggcgcgggcaagactagttcactggtagatgctcttggcagggtccgggataatgaagggaatatccttagaaagcatggtcaacgcattgcttgtattacctttaccaagcgtgcggttgaggtcatcaagaaaagattggggtttgatgagttgtacctagtttcgactcttcatggatttctgtggggcttgattagccatttccacgaaaatattcgtcaagcgttatatgaaagccgtattccaaatcttataggcaaggctagggaagatgataacggcggtaacagcaaaaaggcacttaaagcccgcgcaaaaatagaacgactgacagaacagctttcccttctcgaagcagtcaatcattttgactattctgacactagctttagtgattacgaaaaaggtcagattgggcatgatgatgtcatagaaattgcaacctacttacttaaaaataatcaaacacttagacggatcattggcctacgtttcccttacatcttcgtcgacgaagcacaggacacatttgagggaatcgtctcaggactcaatctcgtctgtgcgggtgatgaacttcctatgattggctattttggtgacccctggcagcagatttatgaccgaagtgccggtgattttgcgccaccagacaaaggtaaagtcatcaagaaagctgaaaactttcgctgttctaaaagcgttatccgacttctcaatgcttatcgtggagatgttgagcagtatgctgctggcgaaaatgctgaatgtgaaggcagtgttgaatttttgctaattaaagcagaagagccaacagaaccacgcaggcgctattcagaagaacagattgagcgggcgctagctcgtatggatgctgcagtcgaaaactggggttgggaaggtcgcgacgatgtcatgaagctcttcttggcacgtcaaatgatcgcgcgacgacttggcttcgctgatctcaatcgcctcttcactggagactatgcctcatcaagggctcaagatgcttttgaggaagggacgcatttccttcttaaaccatttctttcgacgatttgccctctcataacagctcaaagccaaggtgacgatcgaaaaattattcatctacttcgtagagatagtcctgctttcgcgagcaatggattaaatgcggaaaagtcactgaaagtgatgattgagacttcgaggtctttggttgagcagttgcatgctttgtgggataccgaaacgattggaacgatccttcacttttgcgtcgagatgcagataatccagccctcagaaagattgagtgagcatcttgatcgtcctccacgtactgagcctttcaatgaggagcttcacagtttcgaaaaaggagactggctcgcagactcattttttaaaatggccacagggggagtctcccgctatttcgaatatcttaacaacaataccgcctatagcactcaacatggagtgaagggcgaggaatatccaaaggtattggtcgtttatgatgatgtcgaagcagcatggaaccaatacagctttagtaaaacccttactcctctcactgctggggagccctctgatcggcaacgctctgtaactcagaagctcgtgtatgtctcgttttcccgtgctgaggaggatctacgtatagtacttttcacagctaatccagagggagctcaagctgaactaattgaaagtaaattattggcgcctgatcaaatacgaattatggcctga

SEQ ID NO: 239235 - DNA, 1077 bp, Klebsiella pneumoniae
atgtctgagataaccgagccaaccagtcaggttttgctctgctcaaattgcttcgctgatgaagggctgcggatcgacgctgcaaaacatggccttgaacaacaaggcgaatgcccaaattgccaaagcccggatgggaaaaagctgacccgagaccagattaaagatttggcgtggcgctttttcgtaagcggaaccaccgtccgttgtgactacggcgctgcgccagtgattcagttcaatgagcaccattatggccaaggtgacatcgccccgtcaacgtggcttaagaatgacgtaaagcttattgaggaggtcgctaaaattggatttttccattacggccctcgattgtggatggtcggtgaagtcgagccgctaaaggggcttcaggatccgacgacacgtccgcagatcatcgaacgtatcctgagggaatatcccgaatcaacgctcagtaagggcagcaaattctaccgtcttcgcgttaaacctgaacgaccagctgagtcctccgagtatgacagcccacctgtggggttggcaggtagagggcgtttggattctcctggcttctctgtgatgtacggatcgcaagacctcgatgtttgtattcatgaatgcagggcatcaacggaggatgagctttatttcgcaaccttaaagaatcagcaggatctgcggatattggacttgactcattctttggaagaaacagagaccgagtttgaaagtctggatatggcaatacatatgctctttcttgcccggtctcactcatatgaaatcgcccgagacattgctcttgccgctaaagaggctggtttcgacggaataagttatccgtccttttttagccttatccgcactggctgccatcctttcgagacggcctatggcctgtcgcttcgtcgtttccatccgcagagggagcaatatgtggaggcaactaccattcgcaatatcgccctatttggtaggccggtggaaagcggcttggtcagtgtcgagtgcatcaatcgtcttattctcacccaagttggctatcgtgggcattttgggccagttgagtattga

SEQ ID NO: 239236 - DNA, 1173 bp, Klebsiella pneumoniae
gtgagaattcgttacttcgtcccatttaaacgcaaaatcatcattgatgatcattgggaaatcccaatgcaaggcgggaagctccgcatcattgaagagagtggttacgccaaagctattgaacttactttcgaaaagcagcctctggaatatgcaccgagctttcagaaacgagccacttatgaggctatgacaacgataaccgggcacgatgaacttatagcattcgtgaaacgtcaactcgataacgcagccatatttctcgaatgttttcatgacattgaactcatgacagaggaaattgaggccaaatatgaaggagaaaccccggaagaagaaacgcgactatccataaagagtatatcaatgggcagacatgattctgcattgcctctcagtttcgatatgtttacgcgggcgcttatggctgctgagaaatatgatgggccgagatttgaagttgcctttgtaaaaagcgctcgcaaaatgcttgaaaatcaggaattcataaattccttccgctactcattcctgttgatcgagtcactgtatgggaatggtcaatttaaaacaccaagcttgcaagctgcgctaaaatcaaaccaagaatttcgtaatattgttgagcttgccatcaaagatatgattccagcaaagaatgatcggaattcggatacggcaaagctcatttcgacgaaaccaaatgcagatgacattattaatcatttagtcgaaaagcgaggtttctattttcacggaaacatcaaacggaaggacgcctggaaccccgatgaacaagactctgcagaatctctggcgcttctcgcaataggtattatcacaaaaattactatgaaggcggcggagccaatgttcgttgcagaactagagaaacgccactttgaagacgcaatgcaagtaggagccaaaatcgtgtttgaaataaaattcagattccgtgaacccgaagaaaatttcgataggcaacatcaagtcaacataactatgccaggaaccaaagtcacccctcgtacagcttttgctgtcgctcagcattttctacatgtattccagcataatcagcctatatcggctttatgtgaagctgaatgcaaaatacaggaaaccggggaaaaggtatttaacctcacatttcattgcaaagaaaagtga

SEQ ID NO: 239237 - DNA, 672 bp, Klebsiella pneumoniae
atggccacagactcacaagtgagacggatgaaaagcagattagccctattttgcaagggttactcattcgatgttatagttatttgtatcacagatgagacgcaactgagtgaggttagtatgccggaagaaaaaaacatgagtaagcttcgtcggacaaaaggctcggttgtacgcccttcaaccgaagcagctttggtcaaattgggcaaagacatcgaattcgcacgtagagtaagaggaatccctgctgatacgtttgcaaaatccgcaggaatttcgcgctctactttgcatagacttgagagtggtggtggtgccggtatttcactcaacacgcttgcgatggtgctcaccattcttggaaaacttgacctcttgagtaatttgatcgacatgcgcaatgatgacatcggactgtctatgctacgtgaaaatgttatgcaaggtgcaaagccgctccgtaaagatactaagacgaatgttgtgatccggtccagggccaagacgatgcaacgagcggtaggtacagcgactgttaacaaatcgacaaaatctggtgttgaagcaaaggcacagggcaatcaggggacgttagtagtcagcccgtcaggacatacatcatcgctgctctctcgcttaaaagctacgcgagactcttcgggctcgtaa

SEQ ID NO: 239238 - DNA, 1275 bp, Klebsiella pneumoniae
atgaagcaaagactttatgtctggatggatgatcaagatctggtcggacagttggatttcaatgtagacggaatgcgacagagctccgtgttcacctatgcgcagaattggatcgataatcctgagggctatgacctctctcctttcatgccgcgcagccagatagtcgcgtcggccagcctacaaggaaattcatctccccttgtgatgccgttcgccgatagcacccctgattcctgggggcgcgctattatgcgtgcagcgaatggcggtcgtgtaatgaatgatttcgagtacctaattggggtcgatgatttcttacgttcgggggcacttcgcttttatgagagcgatacgccagatgcgcttcctctagctcaacctcggattggagaaagagcctattccataccacggctcattgaacttgagactatgattcatgaggctcgcgctttagaagcagatccggctcattatcgtgaaaaccgtgcaaagttgcttgccggacaaatactgcttgatgctgcaggttcgttaggtggagcgcgaccaaaagtaaatgttcgtgaagatgaccagactatctggatagcgaagttgcctaagatgggcgatgaatacgatatggctcgtgcagaagtacttacgcttcgtctcgcaggggaaataggaatgacggtttctgaagccaagctacttgtcgtagctggccaatttcctgtggccttaattaagcgttttgatcggtcttatgaagatcctaaaaaccctcgtcgtattcattttatcacggctcagacttttatgggcttagcggggactgagccatcaaactatgtctctctagcagagcagatgcttatacatggtgcaggtgatgatttggtcgaactttggacacgaatggcttattctgtgctgattcagaatacagacgaccatctgcgtaatcacggtttcatacgaacggccaatcgctgggctctttctcccgcctatgatattaatcccgacccgtcaattggtggcaccctaaagaccgcgataagcgagatccatggaaacgaactcaaaattttggaggtgttggacgcggcgcagctcttcaacatcaacacagatgaagctcgcgaggctctcagggtaatggcggaaattattatagataaatggcgccctcttgcctacgagttgggaatgacgtcgaaagacatcaaggcgcttgcaccagcctttgaaagcccgcaggtgaaggaagcattgagtctataa

SEQ ID NO: 239239 - DNA, 1155 bp, Klebsiella pneumoniae
atggatgaaaatgctttagggtttgcctcatactggcgcaactcgctggcagatgctgagtcaggaaagggcagttttgaacgtaaagacgccaaaaatttcactcactggcatgggatagcggcgggacgtcttgacgaatcgatcgtcgataaattttttgaaggagaaaaagacgacgtcgaaacagtcgatgtcatcttgcggccaaaggtttatttccggttactgcagcatggaaaggaccgttccgctggtgcgcctgatattgttaccccgatagtgacgccagccctgttgagccgtgaaggttttttatatccgacaccagcgacctccattcctagagacctgcttgaacctttgccaaaaggggcattttcgattggtgagattgagctgtatgacaaatataaaacgacacatacgtcattctctatcaactttgatgacagcgttgataacactgccgaaacggatgaagaacgagaagcacgatatgcagcctggcagcaggattggcgtcaatatctggatgattcggagaggctactgaagaacgttgtcggcgactggattaaaaatcccgagcaatatgaactcgctgagcacggttatattgttaaaacggcgcaatccggtggtgccagtttccatatcctttcgctttatgaccacctgcttgtttgcaaaaaggatgtgccgcttttcaatcgttttgcctcgcgggaggttcatgctgcagagtctttacttgcaccggaagcaaaattcagcgacaggcttggacactctggggataagtttccactggcaaacgctcagcgcgatgccttaagccattttctggatgcgaggcatggcgatatccttgccgttaacggccctcccggaaccgggaaaaccacgctggtactttctatcatcgccacgcagtgggccagagcggctctcgaaaaagcggaaccaccgattattatcgcgacttcaacgaataaccaggcagtaaccaatattatcgaggcgttcgggaaagatttttcccagggtactggtgcaatggccggacgatggttgccagagctgaaaagcttcggcgcttatttcccctcaagcactcgtaaagccgaggctgccaaaaaaataccaaactga

SEQ ID NO: 239240 - DNA, 153 bp, Klebsiella pneumoniae; identical to SEQ ID NO: 191573

SEQ ID NO: 239241 - DNA, 1299 bp, Klebsiella pneumoniae; identical to SEQ ID NO: 191572

SEQ ID NO: 239242 - DNA, 366 bp, Klebsiella pneumoniae; identical to SEQ ID NO: 221991

SEQ ID NO: 239243 - DNA, 537 bp, Klebsiella pneumoniae
atgtttactgtgtgggcaaaatggccggcggacaaactgataaaccccgcaaatactaactgggctctgctctacgcgggctcaggcaccggcgcattgtcagatgacgcaagcacggcgtttaaaatcggcggcgtgcggcaggtgaacgatggttcggacgttccaattcaggtcctgtacgtatatggcgtgcgcgttacgtatcccgcagaagcgcaaacaaagattaaagcagtcgttggccagagcaagcctttccagtacggcgtagaagtggttcgagataaaaatctgaacaatttctactgcaatttctatctgaatggtgagctgatcgggacgtcaccaacatttactcccctggctgtcccgacggtgacaaacgcgtttgtgctgggaaatctggctaacggctactgcatggcgaacactgttttctatcgtgtacgcctggatgacctgagcgggtctactcggctgaccgcagatctcatcgctgacgattacgcaaaaaataaggggtactttagttaa

SEQ ID NO: 239244 - DNA, 651 bp, Klebsiella pneumoniae
gtgtacctctcaagaataacgttgtataccgcgcagctttcgccattacggctcttacacctggtggaacgcggtgaatatgtcatgcatcagtggttgtggcagctttttccaggcgggcaacagcggcagtttctctatcggcgcgaagcgttgcagggcgcatttcgctttttcgttttgtcaccacagctgcctgctgagagcgagatttttgagatccaaagccgttcgtttaatcccgaactgcgggctggccagagattgtgttttagcttgcgggcaaatccaacgatttgtaaagccggcaagcgccacgatctgctgatggacgctaagcgccaggttaaagagcaggttgaacctcgggatatctgggcgcatcagcaacaggcggcgctggcctggttaacgcagcaaggtgaacaaagcgggttttctttagcggagaccgtggtggatgcttatcgtcagcagcagatacggcgcgaaaaatcgcgccagaccattcagttcagcagtgtggattacaccggcatgttggtggtgaacgatccagcgttatttttgcagcgtctggcgtcgggatacggtcaaagccgggcttttggctgcggaatgatgatgattaaacccggggatggcgagtga

SEQ ID NO: 239245 - DNA, 930 bp, Klebsiella pneumoniae
atggatgaaaggccattaacaagtcaatacttatttaaacaatcacttaggattcctgtattttcagcgatatactttggtatattttcctggcttggacactcccctcaatttgatagtgagggctttaataatttcattgcaattagcaagcttcctatcgccttactttctttgtccataccatttgttgctgtcgtagcaaacatacaccgcacagttcaaacaaaccgacaaattgaggaaaccaagcaaaagaatctatctgatagctactatagccatctaaagttcgttactgattatttcaccaatttacctaacaaaaccattaaacgcgaacgtcattatggtactaaagagataagttataaaattaactacccaatacatctatatagatatattttcataaatagctcaccagagaagggacggcctaaaaatacagataaagaatacatacgtgaagtaaataatcactgggttgatatactaaaaaacctagagaagatacattcatctaatcgtggctctcagtttgacgaagttttaatccgtcaaatgcaatctcttcattcaatagaaaaacacttatccgaacttaatcgaatgctttgcctaactccaatggagttaaatgaacatgcaactttatactttgatggatatgaaatgattaccaacttcatgtccagcattgaacttggcgatacaattgaaacctacttcaaatttaccattgatattcttgatattaccgataatttcctttcattcaaggatgatggctcgtctgggcaaatcattatactagcaagattactgaaagataataatccagctatctttgatgaaattgtaacaaacaaagggaaggctcaaccttcgttgacctacaatggcgacagattggcgacagagcattaa

SEQ ID NO: 239246 - DNA, 633 bp, Klebsiella pneumoniae
atgagtttaatcaaggcggggaatgatagtggtgggcgcgatgcgattaataggcttattaaggcttacaacttcagctcacgacagcagctctgcgaacatctggaagtatcaaaaagcactatggctaacagatacttaagggatagcttccctgccgaatgggtaatccaatgtgcccttgaaacaggagcttcccttctatggctggctactggtcaaggagatatgtatgcgtgtgagaacgaagaaacaaatctcaaaagtgaacctcccgtcactgtaagaacactttctaagatcgttgctcctagcatcaaacgtgttgaactgaagaacggcgaactgcagccaagtgatgaaattcttcttgatagcagcctgctcgatggtgactcatccaacgctttatttgttaaaacagctaatgatagctttgtagtggatacgtctgttaaacaagtcagtaatggcttctggttagtcgatatggacggagttaaaagcatcgtcaaaattgcgcgcatacccggaaacaaaatagtagttaaccaagatgacacttcatttgaatgttctgtagatgatgtggaagtcgtaggacgtgcagtcaaagtaatcaagaacctctaa

SEQ ID NO: 239247 - DNA, 471 bp, Klebsiella pneumoniae
atgtctatcgaggaaaaattttttagtgatatcgatttaaaagatccgttttttaacagcctaagagctgattatgaaggatttgatgtttggtttctctcaaaaggtaaaaataaggcgtttgtatcacgtaatgaattaggtgaaatcgatggttttctctatttgaaaatagaagatgaagagttgagtgatatgactccaacgtttccaaagatgaagcgagtaaagcttggcacatttaaaatcgatgctcatggaaccaaacttggagagcgttttattagaattatgtttcaatttgctatgagaaacaaactaaaagaagtatatgttactatatttgataagcattcaggattaattcgcttattaactaaatatggttttgttttaaaggcgaggaaaaatctttctacgattaatgggcaagaaggtgtatactttaagaacttggtatggaaggagtaa

SEQ ID NO: 239248 - DNA, 582 bp, Klebsiella pneumoniae
atgagctatgctaattatcccttagtcaaattgcaggggagaaattatttattaagtatttatcctgcatggcatacacgtcttttccctgagtcaaaactccacaatgagagtgctggtatcatcgctgatatatcacataccaacagtattgaaaaagtatacttaacaaaaatgcatggggtagccagcctaaagcctggagataatttgcttatttatcgtacttcagatggacaaggtccagctcggtttagatctgttgcaacttcagtgtgtgtggttcaggaaattaaagatattcacgatttcttaacttatgaggaatttaagaattactgtgaaccttatagcgtttttgatgaggatgagttacagcttctatatatgaaaaaaaattatccgataattatacggtttacttataatttccctttggaaaaaagagttattcgtgatgaaatcatgaatattacaggttataccaatagtgattattggggttttttaccactaactgattcagcatttaagcagattgtcttacagggaggtgttgatgaaagttttattatcgattaa

SEQ ID NO: 239249 - DNA, 372 bp, Klebsiella pneumoniae; identical to SEQ ID NO: 13078

SEQ ID NO: 239250 - DNA, 546 bp, Klebsiella pneumoniae
atgttaattttcatagcaggtgttcatggtgtaggcaaaggttacttgtgttcatttgcaaaagatgatttcggggtaactcatgtaagcgcaagcgaacttataaaaaataattctaatattaaatttgataacagtaagttaacggccacacctgataaaaaccaatcaatattacttacggcacttaatgcattaaagtcaaaggtatccaatattttattggatggtcattttaccttaataaataaaaatggagatattgaagttctcaagcaagaagtatttgaggaaatggggctagatggagtaattttagttgaggagtctcccgatacaattagagaacgaataatgaaacgagatgggagtgatattacttatgatttaaataagctgatggaagctgaaagagaaaacgcaaaatatgttacaaataaaatcaatgtaccattaattatcttagaatccccaacaacaaacgatttatctattgccctagaaaaactgggcatggttaagaaacatgcccagacaacattataa

SEQ ID NO: 239251 - DNA, 792 bp, Klebsiella pneumoniae
atgtgtggtgccattcttcgaaatattaagcgttatgccattatttattcactgttgtttttggcttttattttaatgctgatagtgtttgttagctatgtttgtaaatttggcatgtattcatggagtgattccgtagagaaatggggacagtttggcgattatattggtggtgtactgaatcctgctctggcctttatctctatcatgcttgtttgtttcacactatattctacatctaggcagtcatctattcagtcattcgagtctgtgttatttgagttactaagatttcataaagataacttatcagaaattaaaacaacgtattcagatggaaaaatgtatgtaggacgggaggctctttcattatacattaccgaagtgaagtttaacctacttaatattgtggatgattcacttcctttggatgaaaggttagagctttcagttaatatggtttatctggaaggtgacaattttgcgaatgtgggacattatttcaggaatatttaccatatttttaaacatatcaacgactctaactatttgactgagaaagaaaaaaccaagtatgcgaaattagttagagcacaaatatcttctatagaatctggagcgatgctattaaatggtttttcatcggtaggaaagcctgccaaaaaatttattgaaaaatattctctccttcaggggtttagtttaagtaaggaattcaagcagcaattacatgatttaggtgccttaaaattatacgatgacgttgcttatgaggataaaaaagggcattaa

SEQ ID NO: 239252 - DNA, 1512 bp, Klebsiella pneumoniae
atgcgccccaaaattggtgattttgaatttggtgaggtttatggagagaatgaggtattatttctcgataattactcgaaatatttttatgatataaataattcattaagtaaacttgatagaaaaaataaaatgctcgtaattggcaggaaggggacgggtaagacattgcttgttaatgtctactgtaacgccaagcgaaaaaataattatattgcagttgtggaatcattaaaagattttgtttttcatgaacttactcactttcaggggcaggatgtgtcttccacaaaatatgtaccaattttcaagtggatgatattggtcaatcttgctaagaatattgtaagtaataaaaaaggatttagtgaggataaaatagttcatttggaaagttttttacgttcttttggccatgtcgcgggcgagttaaggcctgagcaaacagttgaaataactagggagtaccaaacgtcgggtgaggttggtatcggatttagattcccagtattacgtggtgaagccaaagcaaaaggtggtgaggtcgagaaaacaaaagaaacaaaaaagaattatttggaatgtatggaatctttgcagtgttttattgttgacatgctaaaagagagtaataaaaaaatatatgtattttatgatgagttagatgataagtttgatgcaacagttgaatataaaaatgcaatgataagttttttaaatgctgttgtgtcaattaataaaactctaatgcaaaataaaatagatgctaaaattggtgcagttattcgtcatgatataataaatactttttcatcgccgaatattaataaaatcattgaagataactctgttacacttgattggtgttctgctggagagcgagcaagtgattctgagatttttgatatgattgcttttaagatcaaaaactccactgattattataatgatttaaatggttctaatttgttcgggaaaattttcactgagagagttgcaggtgagcatagctctatttatattttacatagaactctaggtcgcccaagagatgccgttaggatgctaacttatattcaagatgaatatggagaaaatactgaaagatttgaaagttccatgtttacaaagatttctaaaaaatactcatcttatcttttacgtgaaattagatctgagcttgcgggacatttaagtgattcagaaatagatgacagtttttctcttttacgttcagtaaaaaaaagaggtttcactccacatttaatcaaggaaaaatttgaagaattgaagttaggagatggtacattaacgcttaataaaatactgagttgtttatttaaagtcggtgctatcgggaatgtactcaggagatctaaaacagatggcggagatgtttatttgtggtcatttaatgatgaagatttagaaatggacccaacgttgaattttgaaatacactgtggtttgtgggatgcactaggaattatcaagcctaaacttaggcaataa

SEQ ID NO: 239253 - DNA, 1422 bp, Klebsiella pneumoniae
atgagcacaaaattttataccctgctgacggatattggcgcggcgaaacttgccagcgccgccgcgctcggtgtgccgctaaaaattacccatatggcggtcggcgatggcggcggagtattgccaacgccagactcaaagcagactgcactggtaaatgagaaacgccgggctgcgctgaatatgctctatatcgacccgcagaacagcagtcagattattgccgaacaggtgatccctgaaaacgagggcggttggtggatacgtgaagtgggcttgtttgatgagtccggggcattgattgccgtgggcaactgcccggaaagctataagccgcaactggctgaaggtagcgggcgcactcagaccgtgcgcatggtgctgattaccagcagcacggacaatatcaccctgaaaatcgaccctgctgtagtgctggcaacccgcaagtatgtggatgacaaggcacttgagctgaaggtatacgcggatgatcagatggcaaaacatcttgccgcaccggacccgcattcacagtatgcacccaaagaaagtccgacgtttaccgggacacccaaagcgccaacgccagcagcagggaataacaccacgcagattgcgaccaccgagtttgttcaggcggctctgacggctcttattaatggtgcgccagccacgctggacacgctgaaagaaatagccgcagccattaacaatgatccgaaattcagtaccaccattaacaatgcgctggcactgaaagcgccgctgtcgagtccggcactaaccggaacgccaacagcccccacggcggcgcagtcggtcaacaatacacagattgccactacggcttttgtgaaatcggcgattgcggcaatggtgggttctgcacctgcggaactggatacactgaacgaactggcggcggcgctggggaatgacccgaactttgccacgacaatgcttaatgcgctggcaggtaaacaaccgttggacaatacgctgactaatttgagtggaaaggatgtgactggtcttctcgcataccttggtttaggggaattgtctgctgctggggttagcggtggcgctgcatctgcttcaggatacatcaccattccgatgattatcagtggagcacggcgggtcttatacattcaatggggaggatttactggagctacaggtagctccggctctgacggggtatatgaaacctcaaatatcaccgtcacctggccagttgctttccccaatgcggttttccaggtgataacaggcggttcatctgatgttagtggtgtcgggcagcaagagatggcatggagtctgggcaagacaaaaacttatgggatttttggttttcaatgccgtaccccaaacgtatcgatgaatggctcatatcttgcaattggctattaa

SEQ ID NO: 239254 - DNA, 705 bp, Klebsiella pneumoniae
gtggctattgaacttccggttatgattgagtcaggaaaaaaaaggaaaaagtatatcgaggggtttgaaaatgaaagctacgtgaaggaaataatctcgaagctgagtcataatggtattgctgttgattattttgttatggatgaacctttatattttggcgcatatagaggaagaaataaaacagcaatgactgcagaagaggcagttgagagtgtagtaaaaagatctattgataatattgcattaataaaaaaagtttatccaaatgctgcattaggtctggttgaaccaatccaactatttaagcataatgatttctatgattactttgatttatataataataaaatgaagtcacatggtatagatattaaattcgttcaagatgatattgtatggaataagttcaatatggatgctattgtaaaattatacaataaattaaaaaataataacattgattttgatatcatcataaacgcaagtaaaaaaagtacatcaaactcgcaatggatcaaatctgccaatgacaatttgattttaatggctagtttttttaagaataatcgagtaggcatagtgtttcaaagttggaataagcatccttctaaaataatacccgaatgggatgcggattctcatttaagtcagattatcttttttaacagacttatgcaaaacaaaaacattggtatccaataa

SEQ ID NO: 239255 - DNA, 1047 bp, Klebsiella pneumoniae
atgcataagataaaatattattttttaaatgaattaaattttcatggtagaaatgcaggtttcaaggccagagttgatgctttaactgtattcagcagtaaccctggagtacaggttgttaatattccgctttgggggggggtgtggagtagattaaaaaatactattagttttttgaattttattttattgaaattaaaatctacagatgttcttttcattcaatatccctttccgaagcctttcatagatatgctaactttcataataaaacatagaaacataaaattatgtttattaatacacgatgttgatatttttagagggcaaggtcataataaagactttaagaatttaacttgcgcaagctttttaatatcacataatgaaagaatgagcgtccaactaaataatgtcggggttactactcctaaaataaacctacaaatatttgactatattttaaaagacaaaaggaaaattttggttgggggtgaaaatagtaaattaaataatataatctattgtggaaatctggatcggaataaatctggttttatttattcctgggggaagggtaatttaaatcgtattgtttatggcgtgaatgccgatgatgatataaacataaataatgattatagggggtcttttgatgctaattttcctccagaaatagaaaatattggacgatcttttgggctcgtttgggatggcgactcgataaatgaatgttctggttcttttggtgaatatttaaaatttaataatccgcataaaacctcactgtatttggcaatggggctaccggttattgtatggaaagatgcagctatatctcaatttgttaagatgaacggtgttggtataatagtggatggattaaatgatttagagcgacagcttgaattaattacatttgcacaatacagcgaaatgttaaataatgtggttgaagtaagaaagaaaataactgctggatggtatttaaatgaatctataaattatgcaatgactttatgttctgaaaatactaatatgaaatag

SEQ ID NO: 239256 - DNA, 939 bp, Klebsiella pneumoniae
atgaaagatgaacctttagtatcaataattatcacgacctataagagagctgataatattgatagagcaatcaaaagtgctttgcaacagacttacagcaatattgagattattgtagtcgatgataatggtatggatagtccttatcagaagattaccgaaaaaagagttgagggttatgtttctaaaaaacaaataaaatatattccacgacagcataatggtggggggggcgaagcaaggaatacagggattgaatttgctaaaggtaaatatataacatttcttgatgatgatgatgaatatttaaaagaaaaggtcagtcttcaagtaaaatgcctcgaagacggatatgatatatgcttgtcctctatgatagtaaaaaaagaaaatggggtcgaaatttttcctaattgggcttattcggtaggtgatggagttaaagactttattctaaacggtaattcgtatacacctatgattatggcaagatcggatattataaaaaaatctggtggtttcgattccgtcaaaatgttgcaagatcatatctttatgttaaagatgcttagactaaatcccaatcttatggcaatgaaggagaagttatatattcatcacattcattctaatgagcgggtatctaaaaacaagaatattgattgctacttattaaaacaatcgatggagaataaatttatatctttattaaacaccaatgaaagggtgtatttaaagtttaagcatttgaaggaactagctttattatatagcgaaaaaaaagcttatgccaaatctatcaggattgcattaggaacattacgtttcgttggtaattataagttaatgaaggagtttattaaactcttagtcagagtccttattggtcctcatggttacaatattgtcgaaaaagtcaaagagagtaaaaatgcataa

SEQ ID NO: 239257 - DNA, 1203 bp, Klebsiella pneumoniae
gtgccgatcaatagcaacgcttacctttttaaacgtaaagacgggatctggatgtttcagatattcgttcccaggtggctgagacatattcacccctgtaaaatctggcgtaaaactaccagcaccagggacatagaacaggccaggcgattccgtgatcatctgctgttagagtgggaagccctgaaacgcgagcataacccctttagcctggatcagcatattgcagagagcatagccagtattcacaggaaaccatctagaccagtggctaaggctgtccgggctggcatcccttctctgcgtgctgtctgtgaggcatatgttgataattacaatgacaaaaaagccgcttcaacactgagtaaggcacaacgcgccgtagagatatttttagagagtattgataaatccgacatcaatttattagatgttaaacgttctacagttaacaattttctacagaaacaaaagggagagtttgcccctcagacgttgcagaactggttaacgagcttagggagcatctacaaatatgcacgtcgtgtctatgatggcctaccgtctgacaacccatttcatgagatggatttaggtgctcgcagtacgatagagagttaccagccattcaccacaaaacagcttgtaacgctcgtagagaatgcagaggatgaattacaaggcgtgatcctgattgggctatacagtggaatgaggctagacgaaatagcatccctcaagcgggacgacattgtagaaattgaaggaatacattgctttaacattacaaagagcaaaacaaaagcaggagttaggcttgttcctatacattctaaagtgcttcccatcgttgataggtggctctccttaaaatctggtgagtatctcctgccaactgctaacagaattcaacgtgcagacggtaaaaaggggccgtattactcccaagcattcactagactgagagacaagatgatcccagaagctacaaatcgtcaatgttatcacagccttaggggacattttataacgtgtctggacaggaacggggtagaagaaacgagaatcggcactatcacaggtcaggttgagaaaaaagctaaaactgaggcattcaggacatatagcgcagggccattaatgaaggaattaaaagggattatagagcttgtatcatatccagaaatagaaaaggggcattaa

SEQ ID NO: 239258 - DNA, 669 bp, Klebsiella pneumoniae
atgctccctgcatggaatataataataatggcaaatacaataaacaataaatcaaacacaaacaccaccactacagataaagggcagaacggcttttgtattctgtccagcttgtataatacagcgtccgatagttatatacagaactaccaggctttaacatttgatagcactccatctacaggaatacgcagacaagccgatgtaacagcctatcctgtagaaagtggtgctaatgtttcagaccatgtgcaaatcaaaaataacacatttaaactatcaggaatgattacagaaacaccaatcagggctgttagagatttattatatagtgctggggtgaatggtactcgtattagtcaagctattacatacttagatcaaatcttcgatgcaagacagccaatcattttaatcactgagcataaagtgtatgagaatgttatccttacaggaatatcttacgattataaatctgagcacgctatgcagtttgatctggagtttgaacagattcgcctagtgagttatgcagaaactaatgttattgctactaaaacaaagggtaataaaaacgttggtggaacagttaaacagaaaggcccatcaagcaaggctgctcaagctaaagccagctctgacacggtgacaccatcgtttaataaataa

SEQ ID NO: 239259 - DNA, 1869 bp, Klebsiella pneumoniae
atgtcattagaaataaatgcctctcgtatctctaacgtagttacatttaccgttgataagaatagtcttaaagaggctatgtctacagtagagggactacgaaaagcttttgaaaagctgcaagaccccaagattaatttcaaacgttttaatcaaaacatgaaacaggctcaaaaaacggtagagaaggcgtctaaatccgcctctacgccccgtgataatagccaacgtgaagcagagcgagcagcaaaggcgcaagcgagggcagaggctcaggcagcgaaagaggctgcgagaaacgcacagcgtagagaaagggctgagctaaaactccttgatacagcttccagttttaagagtatgcagcacctaaccaatgttgagctaacacaagcagcattacaggctagcaaaatcaccaaagcttatgcagcaggtactatctcattacaacgtcaaaacagcgagattaaacgtttacaacagagttatcgacgtattaatgctcaacgtaaacaagcagcttctcctaactatgctaacgtggctggcaatacgccgggcagtggtcttattacaggtagtattatgggcctcggctctcgtgtattagctggcgctggcgtgggcgcagcagcttacggcgcatataactggggcaaggacgctatttcctctcaggaagagcgtagcgagattgtagctagagcacgcttgggcggggtggattacaacgtgttacaggcactttcgcagtatgccacagcaaacgggattgattccggtatggggctgcaaggtcagcggaagttgctggacaatggaaaggacatttcagaaaagatcgcagagagctacaccaacagcacctttgataagaagtcgggacagtggaagggcgggaacgccgcagtagatgccgcgcttaatatgggattcactaaagccgatttaaagaaatatcaatccaatccctttggcttcgtttctgcctataccaacaccatgcagggcaaaggctattcacaagagcaaatccttcataacctggaagaccttgcagacgatttaggcttgtatcacaacgcatttagcaatggtggtaaggcactcactgatcaagtggatatccttaaacgaaatggtcaatggttagataaggaacagcaagatcagctcgtagcctatcgtaaattcaatcaggaaatgagtgtcctttcagatagtcagaaattagccttctttgaaggattcatggagtctattgaccctgaaaccatgagagagtttaaacaggctatgcaagatgctctccccttcttcaaaggtgtagggaaagcggctggcgatgttgtagacggcctaatgaagctaacagcatggattaacggcaagctcacgctattaaatggggacaacactaccaaagaggctgtgagccagcattacggtactacaagcgcccctgtagctcctgggagcaatcctgtagcgggtaactatggggcaactcagccgagagcagatggcacccatgagcctaatatgtttgatacgttgcgcgggtggtggtatggcacaagcgacgctaaagacgtgagcagctattcatctaacaaagatggaagctattctcctgtatctctgctgaaacagagtgcaacagctcccgctacgccgacacaagcgcctgtagtggctcctgtagtattgcagaataacctcccggaggggatgattactctgaatattgctcctgatccaacgtttggaaacatgctaaacgctactgtagatcagaaaatagcacaggctaatcagcgccttgttttatctatagcaagtggacagtcatcaacagggggctaa

SEQ ID NO: 239260 - DNA, 204 bp, Klebsiella pneumoniae
ttgcttctactaaacgaaccacaaaaccataaaatccagaaaatgcaagacgattttaagaatctcagcgtggaagagaaacagtttattgctaaatgccttgatgtttcctcaacagatgaggtggatgctctcattactaaaatggtggagcctcagaaaatctctatgcaacaccggattaatcaacgaattaataaataa

SEQ ID NO: 239261 - DNA, 603 bp, Klebsiella pneumoniae
atgaaaatcgacaagaaactgaatctggtcaccagcgttacccgcgatgacggctcgatcgtttacctgcacgtgacgccgttcccctatgaggtggtggaagaacactgcgtgttgcttgggaacctctttaccaacttcatcacgcaggttgggcctcttggatcggctcgcgtggctgccatgatgctgaaaaaaaggttaaagcaagagcaggaggctcggttagaggacggcaaatcactttctgatctgccaaagagtttaaccctcgttgatgaaattcagcgactgacggtcgttatccataacgtcggcggccagtggaaaaccacgcctcttgaagtcgcattcaatcaggggattatcgaccctgatgagtatcgcgaggtcgaaggcgaagtggttttttttatggtttcctctgctattcagaaggcaaacctgatcgcgccgaccgtgggaacggtgatcaaaatgtacgatgggcaactaacctcatcgagcgttacggcgttccgcgattcgttgcagacgtcgaagccggttaccgataccccgacccagaatgccccgccggaaacgtcatttataccctcttag

SEQ ID NO: 239262 - DNA, 1005 bp, Klebsiella pneumoniae
atggcgctgaagctattagccaataacaacgcaaagagtgttctcgctgctggtattagcgcgtccgctaccgttattaccgtgggggcagggacgggggggttatttccctcgccggtgtcgggagtaagttatttcaaattaacagtaaccgatgccgccacgaaaacaatatccgaaattatgcacgtcacgtctgtatctggtgacgtgatgacagtaattcgtggtcaggagggtaccactgctcgcgtctggtcgactaacgatattgtagcaaatatgatgactgcgggatcgtttctttcctgtctgcaagtatctaataatttttctgaaattgcaggtgaaggaactgcagcggtaaaacaggcgctattaaatctaggttcttcagatggcacgattaatggtcgcctcataaatataaaaatattctatgacaatggtgtatatacaaaatcagaaggtacaagaaacgtaatagttgaaattatagcgggtgggggtgggtccagaagtatttctgctgacagttcatctaccggtggttctcagcctggatttagcggccagtataataagtcaaggtttaattcaagcgatatatcagcgtcagtaaatgtaacgattggcaatggcggttctcctggaaatgctggaggagactcatcgtttggcggtttagttaccgtcggaggaggctattccggaggggaagggaaagtatcgactggagcatttataacggggagcgcgtaccgatacacaggggtagtaaattcttcatcaggacttgtccttgcgtcaagcggaggtgaaacccaatctccgcaagttatacaggtgaccgctggtaccgcgacaggcttcattgcttatccttcacagttccctggcggtatgtatgggcgtggtgccgatgggcgttacgcaccagcaggaacaaccgtagcggggctgtctggaaacaaagggatctgcattatctatgaatatgcctga

SEQ ID NO: 239263 - DNA, 486 bp, Klebsiella pneumoniae
atgactttttttaaacttacattctcaatctgcgttttatttcttgtttctcttatttctactggttgcgacgataaatttcagatgtcgaagttattgcccccaaaagacccactaactattgctgaaatgatagccacaggcaaagaggaaatggcgtcagagtgcaaaaaaggcgacgtttcttttaactgtgagttcctcactggcgacttgactggcaacggtaaatggcatcacacaaagctatacctgcatgacggcggtagggtagatatggttgttgacggtaaagcttactatcaaagcgatatccgtagtaacacctttgctggccaggagacaacatctttcactatgaaaggtgttgatggagatcatggtgaagtaaatatcgtgagatccaatgaaggaaaatcattaaattttgaagcctataacaaagatgacaaacggtttgttatgggaggagttaagttgcagtag

SEQ ID NO: 239264 - DNA, 924 bp, Klebsiella pneumoniae
gtggaaagcgataacttcgatgatcctttgcttgatcaggcaattagctttgtaatcgaaaagcggaaagcatccgtagctggactgcagaggcagttcagaatcgggtacagccgtgcatcgcggttagttgaacaaatggaggagattggagtcgttagcacccaagggagtgacggaaacagagacgtcttggcgtcctcgcaattcgacatagccgctcttaacttgaaagctcttagagaggaaaaggaaaggcggcgtcaagaagaattatcaaggcaagccaaaattgcaaattcagtcgatgaacaattaaggctttcagcaattacaaataagagaattgtaatttggctcaaagagacaggaaatgtagcgccatcaggcaataaggtgtttatcctcaaatcctcatcgccttttgaatatttggcgcagcaacagaaaaacaaattaaagccaggtgacgcagagtacagtgagatacttgatgggtataggttttctgccacaatgcagatgcggacgcctaccagcgttctgtgtcagcatggcaggatagaaaagcttcctgctcataacttacctcgtattgtaaagcaggagtggcaaggcgtatggctgccgcacctaaagccaggcgcagagcttggagcatgggcaagggacgttaacggggctatggcttctgacgtcggttatgttcctcaagatggtggagatttcttgcgatttatgcttctggctcatcaaattgttgatgacgggttaggtcgtgatgaagccatagagtggatgaaaatctgtagagatatggtaggtagcgatggcgagtctattggtaaattcattgaacgttatggaaatacaccagagttggcatggtttcgcatctcatccatgataaaaaataacaggtaa

SEQ ID NO: 239265 - DNA, 384 bp, Klebsiella pneumoniae
atggggattcgtgacaagatccagactaaggttgcaaaagcctttgattcaaaactggccgatgccgttaacgacttcaccggctcttacgtcattcaaacgggctgggatccggtcacggagactggcggtgaaacgactgtcacctacaccgggcgcggcgttctgtcgaaatacagcctcaaccgcatcgatggcgtcaatatcctgcatggcgacctgaaactaaccgcgctgacgaatgaagttaccgataagccgaaggtcgatcacatcatcaccgcgcctgacctggttaccggcgagcagcagcgctacaaagtcattacggcgggaacggatccggcgcaggccacttattccattcaactgcggagggcgtga

SEQ ID NO: 239266 - DNA, 321 bp, Klebsiella pneumoniae
atgaaaatctacgatatcacgcccatcggcaaacccaggatgaccagagctgataagtggaagcagcgcccgcctgtaatgcgttatcgcgctttttgcgatgaagtccgcctgcgcaagatgaccatgcctgaatccggatcacatgtgacattcgtcctaccaatgccaccaagctggagtaagaagaaaccagactgcgacaacatgctgaaggccctgatggatgcgctttatgaggatgattcacacgtctgggattgccgcattaccaaaatatggggcgagaaagggcagatcatcattggggaatctctatga

SEQ ID NO: 239267 - DNA, 201 bp, Klebsiella pneumoniae
atggctgatacaactgctgagtggagcttatccctcgatacgcaatgcccgaagtgcaaccaccacttcgatttacttaacaagctgatcgaaaacgtttcgccaattcagccatgcgaaacggacacagtcgctacacgctattacgaggtggaatgcccggaatgcggtcatgagttcactgtcgattttgtttactga

SEQ ID NO: 239268 - DNA, 504 bp, Klebsiella pneumoniae
atgaacatcgaaacagtaaacgatctcattcagtcgctggagtcggcaggcgatctgtcgatcagagagcagaagttcctgaagctggcgaaagagtttcgcatttgcagcgcttcactggatgccgccataaaaaccgggaatgtgctggcagaccaaaatgctcagctggctgcggagaatgtggcgctgaaggacatcaacgcatggtgcaaaacggatgcattcaaaaacatgtaccgggagtttaaaacagcagaggcgcttggatgctctgatgtggattgcatgcatgatgcaatgcttgtcgcaattatgcatgcgcctgccaccaccgcaaccgatcgcatcgtggccggctttaaggctgatggggtggaggagttcgtatccaacaccgtgcataagatttttgatgaaagcggagcagtgtcagctttggcttacctttcactggctaattcacacgtgaagcagctgcgcgagggggaaaatcatgactga

SEQ ID NO: 239269 - DNA, 156 bp, Klebsiella pneumoniae
atgcagaagaaatgcggttactgccgtaaagcaatcgagggaaaaccagtggtaagcaccctgttgtacctccaggggaaccagctcgcacggaaagaaaaagagtactgctcagaacgttgcgcctctcacgaccagatggctcacgagggctaa

SEQ ID NO: 239270 - DNA, 930 bp, Klebsiella pneumoniae
atgatcagtgaaaaaattgaagtagcagccgttctggtaacatataaccgtgtagctcttttgaaaagggctattgattcattattgaaacagtctgtggaactgaaatatattgttattgtgaataataactctacggatggtacaagagactatttggataataatgaaaatgacaaaataaaatttattcatttaaacgaaaatactggtggcgcaggtggttttcacgtcggtattaatatggcctgcgatcttgacatatcacatgtatggattatggatgatgatgctattgctagtgaaactgcccttgaatcattgattgacgcaaatcactttttgatgtctaaaaatattgcacccggatttttatgtagttatgttctcagtgattctggcgattgcatgaatgtgcctgaaatatcaaagaagaaggggggggcaggttactcaaattggccagaatttgcttctgagggcattataggggttgataaggctacttttgtgtctgtatttttaagtactgacgttgtaaaaggtcttggtttaccaattaaagagatgttcatctggggagatgactctgaatatacttggcgaataagtaacaaatatcattgctatcttgtagcaaaaagtattgtttatcataaaagagttttagcaaaatcattatctctggttactgaagaaaatccggtcagaatttcatggtataagtttttatatcgtaatagtttttataatattaaaaaacatgggcgtaaaaaagattttattttttattttagccatatatttaatgaaattattaagatccttcttcatgcaaaaaatcaaaaatttaaaaaagtgtttacaataatttcaggtgtgcttggtgcattgtttttcaacccaaaaattaagtttcctggcgagtaa

SEQ ID NO: 239271 - DNA, 951 bp, Klebsiella pneumoniae
atgagcataaagataaaagaaatatttgatatttatttcaataatacaatggattttgttgatttttttagtttaaataagatggactatttggagacaaaaactttcagaggacgagaaatagtagcatataaagaaggatttaataagctccgattgctacatcgctttctcaatgaagctatctttaacagggttaagatcatagatgatgtagtcttttcttatagaaaaaaggttaatgtattcgattgtgtttatccacatagattgaatccatttattttcaaaacagatataaaaagcttcttcccatctttcacccgaatctttattcaaagtaagttagaaaacatttttaaagagtttattatatctgacattaatgaatatttaccaaaaatagttgaccttgtaagttataatgattgcttaccagtaggtttttccacatccccttcactaagtaatattcttttcagtgatgctgataaaaaattaaaagaatttagcgcatctaatgaatacatatacacccggtattctgatgatttaataatctcgtccgagaaagaaatacataaaaatgaaatattctcctcaattcaacaaataataaattcagaatgtgaaacatttgttttaaattttgacaagaccaaactcttaaagaaaggtggtgtccgtaaaataatgggcgtcagcattttgcctgatggacacatctctgttgacaaagccataaaaaacaatattgaaaccaaacttcactatatatcaaaattaaataacgttaactctcaagatcctgagctaatggaagtaaaaagatatttatccggcatgattaattacataagtacgattgatgaagcttacataaataaattaaaaagaaagtatggttcaacaatagttgaaatgtttcttaggaagagtctcgtaaaatga

SEQ ID NO: 239272 - DNA, 1365 bp, Klebsiella pneumoniae
atgaaacttgaactgtcaataaaccaaatacaacacctatcaaatctaaacgctagctttgactttagtgaaagtaaaatattttgtattgttagccacaatggaatcgggaaaacaacgttaataaagtcaatgggtattttattccagcctacgatttttgtaaaaacatcaaaccgatttatattcaacccaaatagtgaattgtcgatagatatcgatggtgatcattatgagtataaatacaatccagctataaaccaaatagattgtaaaaatattgttaatcaaaaaaacctaggtgttgttgaacttcccgtaccatatgggaaacgctatggttcatattctagattgaacgaaatagatggtgaattaaggattaaaatagcatacagtgaatattcgactcctgaagcactaatccagttcttaacttttatatatccctataaagatttttcagatttgaaatcagtagaaataaatggagaggaatattatttcagactggttggaaatagcaactatatacgcgaagattatttcagctctggagagtattttgtaattaatatttttaggattataaactcagatacaaaattgattataattgacgaaatagatatgtcgttagactcatacgctcaaataaggctcgtgaagcttattaagaaatcgagtgaagaaaatgagaagttctttatatttaccacgcattcccttgcgatgttaaaatctattgatgatattggcatagacatttattacctagaaaatacaaatgggaatgttgatttaaagaaaagaggatatagttatattaaaggagttatgtttgaatttaagggaagtgataagtatattctaacagaggactcggttttaaaagaatatattaaaatgaaaatgcaaaaaatcattaaagagtcaacgcttaacaaaaaagaaaaaattgaggttattagcataggaggatgtgagaacgttattgatttttataaaagaaataaagaagagtctttcctatgtgagagagatgagaaggtattagttattttagatggagatgttagggaggaaatcctaggaaaaaataaaagcattgcatctaaattgctctttttacctttcgactcaattgaaaaggaaatttttaaaaaatccaataatactcaatacaatctgccttatgttggaaaattaaaagggaaaccagagaaaagaaacaaaaaatattttgacaaactaacaaagaggaacggatttgatatggagaagatattcgacattgcagaaaaagataatcaagaagctgtattaaattttgaaaacaggctttcatcttttttaaaaatgtag

SEQ ID NO: 239273 - DNA, 1449 bp, Klebsiella pneumoniae
atgaaagggaatgtagccaaaacaggtagatcatttaaaaatagagttgattacatattaaaagatgatcacagttttatttgtagcaatatgtcagcagataaaaataatgttagtgatttaactgatgagttcaaagctgtaagcagctttagacaagatataaaaaaaccagtctttcatgcgtttttatctcttccaaaaaatgaacatttaaccgatcagcaatgggaggagatagcaaaagactatttgaaagaaatgaatattgatatagaaaaacatcaatatatttgtgtgcgtcataacgatacagataaagaacatatccatatagtggctaaccggatcggccttgatggttctgtatggcacggtcagcactcagcatttaatacaatagcagcttgtgaacgtttagaagtaaagcacggcttaaccattacggatggcttaaaaggtcagaaatcggacgtatcagcaccaaccaaagctgaaattgagatggcacttagaacaggagaaaagccagcccgtttggtgcttcaagcctctttacaagcggctatgacaggaaaaccagatcttgagacgttcgtagaacgtctgcaggccgtaggcattgaaccgaggttcaatgttgccagcactggcaacgtggcgggttgttctttcagtgtgggagatgtggcattcaagggatctcagttaggcaaaaaatttagttggaacactataaaaagtaaggtgaaatatgacaaaaatagagatgatgaactcgttagaagattcgcagcaagaaaaacagatgacgaaattagtattggacgatcacttattgaatcagatttcaatgacagtagaacctctgacggaatcaatgatgatattatcggagtcggtcagtacggcattaaaccagacacaacagacactaaccagagtgaacaactcattagaagcaacaacaacagctttagactcagcgaaaaatataatagaccaacaatcactaaagttagaagaacaacacagaaagctacacaagtactcaacagagttaaagaacaacacaaaaaaaaatcaatcaagacttataatcaaggtagcttcaatagttggcgtgataaatctgatagcggttctatcagtaggatacttgatcacgcagaaacagccacaacagccacgaataaatttagactcaaaggccgtagcaggttcaatagtagagcaactaagatcgaagaaataagagaaaaattaggtataacaaaacctgttattcatccaaggaacaaagaaaaaatagttaaagaagaaataaagaaaaaaccatattatatagttgagcatgaaaatagatttaaatctaggttgagcgagtattttaaaatcaacatacacaaacaaaaatatttcggcaggaaactaaatgtgaaaatatga

SEQ ID NO: 239274 - DNA, 261 bp, Klebsiella pneumoniae
atgattgatgatgatatagaaaagcaaatgagtttaaaaattaagtttgagttattagcaagatttttttattacatagaacaagataaagatatacctttttgtgaaataaatagtgatgaacaaagattatgttattttgtgtcccataggtatatacaagaaaataaagctgatgatcttctaaaatctttgattgatgaaaatgatgaagactatataaaagctataagagattatatgtttactacaggtggataa
